United States Patent Application Publication US 2021/0199660 A1 - sequence listing, part 28

SEQ ID NO: 393386 - DNA, 120 bp, Artificial Sequence
  ENSG00000145362_9 (sequence is synthesized)
actacacatggctgcccagggagaccacgtggaatgtgtgaagcacctgttacagcacaaggcacctgttgatgatgtcaccctagactacctgacagccctccacgttgctgcgcactg

SEQ ID NO: 393387 - DNA, 120 bp, Artificial Sequence
  ENSG00000145362_10 (sequence is synthesized)
tggccactaccgtgtaaccaaactccttttagacaagagagccaatccgaacgccagagccctgaatggttttactccactgcacattgcctgcaagaaaaaccgcatcaaagtcatgga

SEQ ID NO: 393388 - DNA, 120 bp, Artificial Sequence
  ENSG00000145362_11 (sequence is synthesized)
actgctggtgaaatatggggcttcaatccaagctataacagagtctggcctcacaccaatacatgtggctgccttcatgggccacttgaacattgtcctccttctgctgcagaacggagc

SEQ ID NO: 393389 - DNA, 120 bp, Artificial Sequence
  ENSG00000145362_12 (sequence is synthesized)
ctctccagatgtcactaacattcgtggtgagacggcactacacatggcagcccgagccgggcaggtggaagtggtccgatgcctcctgagaaatggtgcccttgttgatgccagagccag

SEQ ID NO: 393390 - DNA, 120 bp, Artificial Sequence
  ENSG00000145362_13 (sequence is synthesized)
ggaggaacagacacctttacatattgcctcccgcctgggtaagacagaaattgtccagctgcttctacaacatatggctcatccagatgcggccactacaaatgggtacacaccactgca

SEQ ID NO: 393391 - DNA, 120 bp, Artificial Sequence
  ENSG00000145362_14 (sequence is synthesized)
catctctgcccgggagggccaggtggatgtggcatcagtcctattggaagcaggagcagcccactccttagctaccaagaagggttttactcccctgcatgtagcagccaagtatggaag

SEQ ID NO: 393392 - DNA, 120 bp, Artificial Sequence
  ENSG00000145362_15 (sequence is synthesized)
cctggatgtggcaaaacttctcttgcaacgccgtgctgccgcagattctgcagggaagaacggccttaccccgctccatgttgctgctcattatgacaaccagaaggtggcgctgctgtt

SEQ ID NO: 393393 - DNA, 120 bp, Artificial Sequence
  ENSG00000145362_16 (sequence is synthesized)
actggagaagggtgcttcccctcatgccactgccaagaatggctatactccgttacatattgctgccaagaagaatcaaatgcagatagcttccacactcctgaactatggagcagagac

SEQ ID NO: 393394 - DNA, 120 bp, Artificial Sequence
  ENSG00000145362_17 (sequence is synthesized)
aaacattgtgacaaagcaaggagtaactccactccatctggcctcgcaggaggggcacacagatatggttaccttgcttctggataagggagccaatatccacatgtcaactaagagtgg

SEQ ID NO: 393395 - DNA, 120 bp, Artificial Sequence
  ENSG00000145362_18 (sequence is synthesized)
actcacatccttacaccttgcagcccaggaagataaagtgaatgttgctgatattctcaccaagcatggagctgatcaggatgctcatacaaagcttggttacacacctttaattgtggc

SEQ ID NO: 393396 - DNA, 120 bp, Artificial Sequence
  ENSG00000145362_19 (sequence is synthesized)
ctgtcactatggaaatgtgaaaatggtcaactttcttctgaagcagggagcaaatgttaacgcaaaaaccaagaacggctacacgcctttgcaccaggccgctcagcagggtcacacgca

SEQ ID NO: 393397 - DNA, 120 bp, Artificial Sequence
  ENSG00000145362_20 (sequence is synthesized)
catcatcaacgtcctgctccagcatggggccaagcccaacgccaccactgcgaatggcaacactgccttggcgattgctaagcgtctgggctacatctccgtggtcgacaccctgaaggt

SEQ ID NO: 393398 - DNA, 120 bp, Artificial Sequence
  ENSG00000145362_21 (sequence is synthesized)
tgtgactgaggaggtcaccaccaccaccacaactattacagaaaaacacaaactaaatgtacctgagacgatgactgaggttcttgatgtttctgatgaagagggtgatgacacaatgac

SEQ ID NO: 393399 - DNA, 120 bp, Artificial Sequence
  ENSG00000145362_22 (sequence is synthesized)
tggtgatgggggagaataccttaggcctgaggacctaaaagaactgggtgatgactcactacccagcagtcagttcctggatggtatgaattacctgcgatacagcttggagggaggacg

SEQ ID NO: 393400 - DNA, 120 bp, Artificial Sequence
  ENSG00000145362_23 (sequence is synthesized)
atctgacagccttcgatccttcagttccgacaggtctcacactctgagccatgcctcctacctgagggacagtgccgtgatggatgactcagttgtgattcccagtcaccaggtgtcaac

SEQ ID NO: 393401 - DNA, 120 bp, Artificial Sequence
  ENSG00000145362_24 (sequence is synthesized)
tctagccaaggaggcagaaaggaattcttatcgcctaagctggggcactgagaacttagacaacgtggctctttcttctagtcctattcattcaggtttcctggttagttttatggtgga

SEQ ID NO: 393402 - DNA, 120 bp, Artificial Sequence
  ENSG00000145362_25 (sequence is synthesized)
tgcccgaggtggtgctatgcgaggatgcagacacaatgggctccgaatcattattccacctcggaaatgtactgctccaacgcgagtcacctgccgactggtcaagcgccacagactggc

SEQ ID NO: 393403 - DNA, 120 bp, Artificial Sequence
  ENSG00000145362_26 (sequence is synthesized)
aacaatgcctccaatggtggaaggagaaggcctggccagtcgcctgatcgaagttggaccttctggtgctcagttccttggtaaacttcacctgccaacggctcctcccccacttaatga

SEQ ID NO: 393404 - DNA, 120 bp, Artificial Sequence
  ENSG00000145362_27 (sequence is synthesized)
gggagaaagtttggtcagccgcattcttcagctggggcctcctggaaccaaattccttgggcctgtgatcgtggagatccctcactttgcggcccttcgaggaaaggaaagggaactggt

SEQ ID NO: 393405 - DNA, 120 bp, Artificial Sequence
  ENSG00000145362_28 (sequence is synthesized)
ggtcctgcgcagtgagaatggggacagctggaaagagcatttctgtgactacactgaagatgaattgaatgaaattcttaacggcatggatgaagtactggatagcccagaagacctaga

SEQ ID NO: 393406 - DNA, 120 bp, Artificial Sequence
  ENSG00000145362_29 (sequence is synthesized)
aaagaaacgaatctgccgcatcatcacccgagacttcccacagtactttgcagtggtgtctcgtatcaaacaggacagcaatctgattggcccagaaggaggtgtactgagcagcacagt

SEQ ID NO: 393407 - DNA, 120 bp, Artificial Sequence
  ENSG00000145362_30 (sequence is synthesized)
ggtgccccaggtgcaggccgtcttcccagagggggcactcaccaagcggatccgcgtaggcctgcaggctcaacctatgcacagtgagctggttaagaagatcctaggcaacaaagctac

SEQ ID NO: 393408 - DNA, 120 bp, Artificial Sequence
  ENSG00000145362_31 (sequence is synthesized)
cttcagccctatagtcactttggaacctagaagaagaaaattccacaaaccaattaccatgaccattcctgtccccaaagcttcaagtgatgtcatgttgaatggttttgggggagatgc

SEQ ID NO: 393409 - DNA, 120 bp, Artificial Sequence
  ENSG00000145362_32 (sequence is synthesized)
accaaccttaagattactatgcagcataacaggtggaaccacccctgcccagtgggaagatattacaggaactacgccattaacatttgtcaatgaatgtgtttcctttacaacaaacgt

SEQ ID NO: 393410 - DNA, 120 bp, Artificial Sequence
  ENSG00000145362_33 (sequence is synthesized)
gtctgccaggttctggctgatagattgtcgacagatccaggaatccgttacttttgcatcacaagtatacagagaaattatctgcgtaccttatatggccaaatttgtagtgtttgccaa

SEQ ID NO: 393411 - DNA, 120 bp, Artificial Sequence
  ENSG00000145362_34 (sequence is synthesized)
atcacatgaccccattgaagccaggttgaggtgtttctgcatgactgatgataaagtggataagacccttgaacaacaagaaaattttgctgaggtggccagaagcagggatgtggaggt

SEQ ID NO: 393412 - DNA, 120 bp, Artificial Sequence
  ENSG00000145362_35 (sequence is synthesized)
gttagaaggaaaacccatctacgttgattgtttcggcaacttggtaccattaactaaaagtggccagcatcatatattcagtttttttgccttcaaagaaaatagacttcctctatttgt

SEQ ID NO: 393413 - DNA, 120 bp, Artificial Sequence
  ENSG00000145362_36 (sequence is synthesized)
caaggtacgcgatacgactcaggaaccttgcggacgactatcatttatgaaggagccaaaatccacgagaggcctggtgcatcaagctatttgcaacttaaacatcactttgccgattta

SEQ ID NO: 393414 - DNA, 120 bp, Artificial Sequence
  ENSG00000145362_37 (sequence is synthesized)
tacaaaggaatcagagtcagatcaagaacaggaggaagagatcgatatgacatcagaaaaaaatgatgagacagaatctacagaaacatctgtcctgaaaagtcacctggttaatgaagt

SEQ ID NO: 393415 - DNA, 120 bp, Artificial Sequence
  ENSG00000145362_38 (sequence is synthesized)
tcctgtcctagcaagtccggacttgctctctgaagtttctgagatgaaacaagatttgatcaaaatgaccgccatcttgaccacagatgtgtctgataaggcaggttctattaaagtgaa

SEQ ID NO: 393416 - DNA, 120 bp, Artificial Sequence
  ENSG00000145362_39 (sequence is synthesized)
ggagctggtgaaggctgctgaggaagagccaggagagccttttgaaatcgttgaaagagttaaagaggacttagagaaagtgaatgaaatcctgagaagtggaacctgcacaagagatga

SEQ ID NO: 393417 - DNA, 120 bp, Artificial Sequence
  ENSG00000145362_40 (sequence is synthesized)
aagcagtgtgcagagctctcggtctgagagaggattagttgaagaggaatgggttattgtcagtgatgaggaaatagaagaggctaggcaaaaagcacctttagaaatcactgaatatcc

SEQ ID NO: 393418 - DNA, 120 bp, Artificial Sequence
  ENSG00000145362_41 (sequence is synthesized)
atgtgtagaagttagaatagataaagagatcaaaggaaaagtagagaaagactcaactgggctagtgaactaccttactgatgatctgaatacctgtgtgcctcttcccaaagagcagct

SEQ ID NO: 393419 - DNA, 120 bp, Artificial Sequence
  ENSG00000145362_42 (sequence is synthesized)
gcagacagttcaagataaggcagggaagaaatgtgaggctctggctgttggcaggagctctgaaaaggaagggaaagacatacccccagatgagacacagagtacacagaaacagcacaa

SEQ ID NO: 393420 - DNA, 120 bp, Artificial Sequence
  ENSG00000145362_43 (sequence is synthesized)
accaagcttgggaataaagaagccagtaagaaggaaattaaaagaaaagcagaaacaaaaagaggaaggtttacaagctagtgcagagaaagctgaacttaaaaaaggtagttcagaaga

SEQ ID NO: 393421 - DNA, 120 bp, Artificial Sequence
  ENSG00000145362_44 (sequence is synthesized)
gtcattaggtgaagacccaggtttagcccctgaaccccttcccactgtcaaggccacatctcctttgatagaagaaactcccattggttccataaaggacaaagtaaaggcccttcagaa

SEQ ID NO: 393422 - DNA, 120 bp, Artificial Sequence
  ENSG00000145362_45 (sequence is synthesized)
gcgagtggaagatgaacagaaaggtcgaagcaagttgcccatcagagtcaaaggcaaggaggacgtgccaaaaaagaccacccacaggccacatccagctgcgtcaccctctctgaagtc

SEQ ID NO: 393423 - DNA, 120 bp, Artificial Sequence
  ENSG00000145362_46 (sequence is synthesized)
agagagacatgcgccagggtctccctcccctaaaacagaaagacactctactctttcctcttccgcaaaaactgaaaggcaccctccagtatcaccatcaagtaaaactgagaaacactc

SEQ ID NO: 393424 - DNA, 120 bp, Artificial Sequence
  ENSG00000145362_47 (sequence is synthesized)
acctgtgtcaccctctgcaaaaacggaaagacattcacctgcgtcatcatcgagtaaaactgagaaacactcacctgtatcaccctcgacaaaaactgaaaggcactctcctgtgtcatc

SEQ ID NO: 393425 - DNA, 120 bp, Artificial Sequence
  ENSG00000145362_48 (sequence is synthesized)
tacaaaaacagaaagacacccacctgtttcgccttcaggcaaaacagacaaacgtccacctgtatcgccctccgggaggacagaaaaacacccgccagtatcgcctgggagaacagaaaa

SEQ ID NO: 393426 - DNA, 120 bp, Artificial Sequence
  ENSG00000145362_49 (sequence is synthesized)
acgcttgcctgtttcaccctccggaagaacggacaagcaccaacctgtatcaacagctgggaaaactgagaagcacctgcctgtgtcaccttctggcaaaacagaaaagcaaccacctgt

SEQ ID NO: 393427 - DNA, 120 bp, Artificial Sequence
  ENSG00000145362_50 (sequence is synthesized)
atcccccacttcaaaaacagagaggattgaggaaaccatgtctgttcgggagctgatgaaggctttccagtcaggtcaggacccttctaaacataaaactggactctttgagcacaaatc

SEQ ID NO: 393428 - DNA, 120 bp, Artificial Sequence
  ENSG00000145362_51 (sequence is synthesized)
agcaaaacaaaagcagccacaagagaaaggtaaagttcgggtagaaaaagaaaaggggccgatactaacccagagagaagctcagaaaacagagaatcagacaatcaaacgaggccagag

SEQ ID NO: 393429 - DNA, 120 bp, Artificial Sequence
  ENSG00000145362_52 (sequence is synthesized)
actcccggtaacgggcacagcagaatccaaaagaggagttcgtgtttcctccataggagttaagaaagaagatgcagctggaggaaaggagaaagttctcagccacaaaatacctgaacc

SEQ ID NO: 393430 - DNA, 120 bp, Artificial Sequence
  ENSG00000145362_53 (sequence is synthesized)
tgttcagtcagtgcctgaagaagaaagccacagagagagcgaagtgcccaaagaaaagatggctgatgagcagggagacatggatctacagatcagcccagataggaaaacctccactga

SEQ ID NO: 393431 - DNA, 120 bp, Artificial Sequence
  ENSG00000145362_54 (sequence is synthesized)
cttctctgaggtcattaagcaagagttggaagacaatgacaaataccaacaattccgcctgagtgaggagacagaaaaggcacagcttcacttagaccaagtactcactagtcctttcaa

SEQ ID NO: 393432 - DNA, 120 bp, Artificial Sequence
  ENSG00000145362_55 (sequence is synthesized)
cacaacatttccactcgactacatgaaagatgagttccttccagctctgtctttacaaagcggtgctttagatggcagttctgaaagcctaaagaatgagggggtagccggctctccgtg

SEQ ID NO: 393433 - DNA, 120 bp, Artificial Sequence
  ENSG00000145362_56 (sequence is synthesized)
tggcagcctgatggaggggacccctcagattagttcagaagaaagctataagcatgaaggcctagcagagacccctgagacgagcccagaaagcctttctttctcaccaaagaaaagtga

SEQ ID NO: 393434 - DNA, 120 bp, Artificial Sequence
  ENSG00000145362_57 (sequence is synthesized)
ggagcaaactggggaaacaaaggaaagcaccaagacagaaaccaccacagaaattcgttcagaaaaagagcatcccacgaccaaagacattactggtggctctgaagagcgaggtgccac

SEQ ID NO: 393435 - DNA, 120 bp, Artificial Sequence
  ENSG00000145362_58 (sequence is synthesized)
agtcactgaggactcagagacctctactgagagttttcagaaagaggccactctaggctctcccaaagacacaagccctaaaagacaagatgattgcacaggcagctgtagtgtagcatt

SEQ ID NO: 393436 - DNA, 120 bp, Artificial Sequence
  ENSG00000145362_59 (sequence is synthesized)
cgtacctttggtagttcagcccacaagacacaaactgatagtgaggttcaagaatccacagccacctcagacgagacaaaggccttgccgctgcctgaggcttctgtaaagacagataca

SEQ ID NO: 393437 - DNA, 120 bp, Artificial Sequence
  ENSG00000145362_60 (sequence is synthesized)
ggaactgaatcaaaacctcagggagtcattagaagtccccaagggttagaacttgcactccctagccgagatagcgaagtcctcagcgctgtggctgatgactcattagcagtgagccac

SEQ ID NO: 393438 - DNA, 120 bp, Artificial Sequence
  ENSG00000145362_61 (sequence is synthesized)
aaagactctctggaagccagccctgtgctagaagataactcttcacacaaaacccctgattctctggagccaagtcctctgaaagaatccccttgccgtgactctctggaaagcagccct

SEQ ID NO: 393439 - DNA, 120 bp, Artificial Sequence
  ENSG00000145362_62 (sequence is synthesized)
gttgaaccaaagatgaaggctggaatttttccaagtcactttcctcttcctgcagctgttgccaaaacagaactcttgacggaagtggcctctgtgcggtcccggctactccgagaccct

SEQ ID NO: 393440 - DNA, 120 bp, Artificial Sequence
  ENSG00000145362_63 (sequence is synthesized)
gatggcagtgctgaggatgacagtcttgagcagacatcgctcatggagagctcagggaagagccccctttctcctgacacccccagctctgaagaagtcagctatgaggttacacccaaa

SEQ ID NO: 393441 - DNA, 120 bp, Artificial Sequence
  ENSG00000145362_64 (sequence is synthesized)
accacagatgtaagtacaccaaaaccagctgtgattcatgaatgtgcagaggaggatgattcagaaaacggggagaaaaagaggttcacacctgaagaggagatgtttaaaatggtaacc

SEQ ID NO: 393442 - DNA, 120 bp, Artificial Sequence
  ENSG00000145362_65 (sequence is synthesized)
aaaatcaaaatgtttgatgaacttgaacaagaagcaaagcagaaaagggactacaaaaaagaacccaaacaagaagaatcttcttcatcttctgacccagatgctgactgttcagtagat

SEQ ID NO: 393443 - DNA, 120 bp, Artificial Sequence
  ENSG00000145362_66 (sequence is synthesized)
gtggatgaaccaaaacatacaggcagtggggaggatgaaagtggtgtccctgtgttagtaacttcggagagcaggaaggtgtcttcctcctcagaaagtgaacctgagttggcacagctt

SEQ ID NO: 393444 - DNA, 120 bp, Artificial Sequence
  ENSG00000145362_67 (sequence is synthesized)
aaaaaaggtgctgactcaggccttttaccagaaccagtgattcgagtacaacctccttctccacttccatcaagcatggactccaattccagtccagaagaagtacaattccagcctgtc

SEQ ID NO: 393445 - DNA, 120 bp, Artificial Sequence
  ENSG00000145362_68 (sequence is synthesized)
gtttccaaacaatatactttcaagatgaatgaagatactcaggaagagccaggcaaatcagaagaagaaaaagattctgaatcccatttagctgaagaccgtcatgctgtttccactgag

SEQ ID NO: 393446 - DNA, 120 bp, Artificial Sequence
  ENSG00000145362_69 (sequence is synthesized)
gctgaagacaggtcttatgataagctaaacagagacactgatcagccaaaaatctgtgatggccatggatgtgaggccatgagtcctagcagctcagctgctcctgtctcttcaggtcta

SEQ ID NO: 393447 - DNA, 120 bp, Artificial Sequence
  ENSG00000145362_70 (sequence is synthesized)
cagagtccgactggtgatgatgttgatgaacagccagtcatctataaagaatcattagctctccaaggcactcatgaaaaagacacagagggagaagagcttgatgtttctagagcagaa

SEQ ID NO: 393448 - DNA, 120 bp, Artificial Sequence
  ENSG00000145362_71 (sequence is synthesized)
tctccacaagcagattgccccagtgaaagcttttcatcttcatcctctttgcctcattgtttggtatctgaaggaaaagaattagatgaagacatatctgccacatcttctattcaaaaa

SEQ ID NO: 393449 - DNA, 120 bp, Artificial Sequence
  ENSG00000145362_72 (sequence is synthesized)
acagaggtcacaaaaactgatgaaacatttgagaacttaccaaaggactgcccctctcaagactcatccattactactcaaacagatagattttccatggatgttcccgtgtctgaccta

SEQ ID NO: 393450 - DNA, 120 bp, Artificial Sequence
  ENSG00000145362_73 (sequence is synthesized)
gctgagaatgatgaaatctatgatccacaaatcactagcccttatgaaaatgtcccttcccaatcttttttctctagtgaagaaagcaaaacccaaacagatgcaaatcacaccacaagt

SEQ ID NO: 393451 - DNA, 120 bp, Artificial Sequence
  ENSG00000145362_74 (sequence is synthesized)
tttcactcttctgaagtgtattctgttaccatcacatcccctgttgaagacgttgtagtggcaagctcctctagtggaactgttttaagcaaagaatctaattttgagggccaggacata

SEQ ID NO: 393452 - DNA, 120 bp, Artificial Sequence
  ENSG00000145362_75 (sequence is synthesized)
aaaatggaatcccaacaggaaagtaccttgtgggaaatgcaatcagacagtgtctcttcatctttcgagcctactatgtccgctacaacaacagttgttggtgaacaaataagcaaagtc

SEQ ID NO: 393453 - DNA, 120 bp, Artificial Sequence
  ENSG00000145362_76 (sequence is synthesized)
atcatcacaaaaactgatgtggattctgattcttggagtgaaattcgggaagacgatgaagcctttgaggctcgtgtgaaagaggaagaacaaaagatatttggtttgatggtagacaga

SEQ ID NO: 393454 - DNA, 120 bp, Artificial Sequence
  ENSG00000145362_77 (sequence is synthesized)
caatcacagggtaccacccctgacaccactcctgctaggaccccaactgaagaggggaccccaacaagtgagcaaaacccatttctgtttcaggaaggaaaattgtttgaaatgacccga

SEQ ID NO: 393455 - DNA, 120 bp, Artificial Sequence
  ENSG00000145362_78 (sequence is synthesized)
agtggtgccattgatatgaccaaaaggtcctatgcagatgaaagttttcactttttccaaattggtcaagaatccagggaagagactctctctgaagatgtgaaagaaggggctactggg

SEQ ID NO: 393456 - DNA, 120 bp, Artificial Sequence
  ENSG00000145362_79 (sequence is synthesized)
gctgatcccctaccgctggagacatcagctgaatcactagcactttcagaatcaaaagaaacagtggatgatgaggcagacttacttccagatgacgtgagtgaggaagtagaggaaata

SEQ ID NO: 393457 - DNA, 120 bp, Artificial Sequence
  ENSG00000145362_80 (sequence is synthesized)
cctgcttcggatgctcaacttaactcccaaatggggatttcagcctccactgaaacacctacaaaagaagctgttagtgtagggaccaaggacctccccaccgtgcaaacgggtgatata

SEQ ID NO: 393458 - DNA, 120 bp, Artificial Sequence
  ENSG00000145362_81 (sequence is synthesized)
cctcctctctctggtgtaaagcagatatcctgccccgactcttctgaaccagctgtacaagtccagttagatttttccacactcaccaggtctgtttattcagataggggtgatgattct

SEQ ID NO: 393459 - DNA, 120 bp, Artificial Sequence
  ENSG00000145362_82 (sequence is synthesized)
cccgattcttccccagaagaacagaaatcagtaatcgagattcctactgcacccatggagaatgtgccttttactgaaagcaaatccaaaattcctgtaaggactatgcccacttccacc

SEQ ID NO: 393460 - DNA, 120 bp, Artificial Sequence
  ENSG00000145362_83 (sequence is synthesized)
ccagcacctccatctgcagagtatgagagttcagtttctgaagattttctatccagtgtagatgaggaaaataaggcggatgaagcaaaaccaaagtccaaactccctgtcaaagtaccc

SEQ ID NO: 393461 - DNA, 120 bp, Artificial Sequence
  ENSG00000145362_84 (sequence is synthesized)
ctccaaagagttgaacagcagctctcagatctagacacctctgtccagaagacagtggctcctcagggacaggacatggcaagcatcgcaccagataatagaagcaaatctgaatctgat

SEQ ID NO: 393462 - DNA, 120 bp, Artificial Sequence
  ENSG00000145362_85 (sequence is synthesized)
gctagttctttggattcaaagaccaaatgcccagtaaaaacccgaagttacactgagacagaaacagagagcagagagagggccgaggaacttgagttagaatcagaagaaggggccaca

SEQ ID NO: 393463 - DNA, 120 bp, Artificial Sequence
  ENSG00000145362_86 (sequence is synthesized)
agaccaaagatacttacatcccgattgccagttaagagcagaagcactacatcttcctgcagggggggcacgagccccacaaaagaaagtaaggagcatttctttgacctttacagaaat

SEQ ID NO: 393464 - DNA, 120 bp, Artificial Sequence
  ENSG00000145362_87 (sequence is synthesized)
tccatagaattctttgaggagattagtgatgaggcttccaaattagtggataggctgacacagtcagagagggagcaggaaatagtttcagacgatgaaagtagtagtgccctggaagta

SEQ ID NO: 393465 - DNA, 120 bp, Artificial Sequence
  ENSG00000145362_88 (sequence is synthesized)
tcagtaattgaaaatctgccacctgttgagaccgagcactcagttcctgaggacatctttgacacaaggcccatttgggatgagtctattgagactctgattgaacgcatccctgatgaa

SEQ ID NO: 393466 - DNA, 120 bp, Artificial Sequence
  ENSG00000145362_89 (sequence is synthesized)
aatggccatgaccatgctgaagatccacaggatgagcaggaacggatcgaggaaaggctggcttatattgctgatcaccttggcttcagctggacagaattagcaagagaactggatttc

SEQ ID NO: 393467 - DNA, 120 bp, Artificial Sequence
  ENSG00000145362_90 (sequence is synthesized)
actgaggagcaaattcatcaaattcgaattgaaaatcccaactctcttcaagaccagagtcatgcactgttgaagtactggctagagagggatgggaaacatgctacagataccaacctc

SEQ ID NO: 393468 - DNA, 120 bp, Artificial Sequence
  ENSG00000145362_91 (sequence is synthesized)
gttgaatgtctcaccaagatcaaccgaatggatattgttcatctcatggagaccaacacagaacctctccaggagcgcatcagtcatagttatgcagaaattgaacagaccattacactg

SEQ ID NO: 393469 - DNA, 120 bp, Artificial Sequence
  ENSG00000145362_92 (sequence is synthesized)
gatcatagtgaagggttctcggtacttcaagaggagttatgcactgcacagcacaagcagaaagaggagcaagctgtttctaaagaaagtgagacctgcgatcaccctcctatcgtctca

SEQ ID NO: 393470 - DNA, 120 bp, Artificial Sequence
  ENSG00000145362_93 (sequence is synthesized)
gaggaagacatttctgttggttattccacttttcaggatggcgtccccaaaactgagggggacagctcagcaacagcactctttccccaaactcacaaggagcaagttcaacaggatttc

SEQ ID NO: 393471 - DNA, 120 bp, Artificial Sequence
  ENSG00000145362_94 (sequence is synthesized)
tcagggaaaatgcaagacctgcctgaagagtcatctctggaatatcagcaggaatattttgtgacaactccaggaacagaaacatcagagactcagaaggctatgatagtacccagctct

SEQ ID NO: 393472 - DNA, 120 bp, Artificial Sequence
  ENSG00000145362_95 (sequence is synthesized)
cccagcaagacacctgaggaagttagcacccctgcagaggaggagaagctgtacctccagaccccaacatccagcgagcggggaggctctcccatcatacaagaacccgaagagccctca

SEQ ID NO: 393473 - DNA, 120 bp, Artificial Sequence
  ENSG00000145362_96 (sequence is synthesized)
gagcacagagaggagagctctccgcggaaaaccagcctcgtaatagtggagtctgccgataaccagcctgagacctgtgaaagactcgatgaagatgcagcttttgaaaagggagacgat

SEQ ID NO: 393474 - DNA, 120 bp, Artificial Sequence
  ENSG00000145362_97 (sequence is synthesized)
atgcctgaaatacccccagaaacagtcacagaagaagaatacattgatgagcatggacacaccgtggtaaagaaggttactaggaaaatcattaggcggtatgtatcctctgaaggcaca

SEQ ID NO: 393475 - DNA, 120 bp, Artificial Sequence
  ENSG00000145362_98 (sequence is synthesized)
gagaaagaagagattatggtgcagggaatgccacaggaacctgtcaacatcgaggaaggggatggctattccaaagttataaagcgtgttgtattgaagagtgacaccgagcagtcagag

SEQ ID NO: 393476 - DNA, 120 bp, Artificial Sequence
  ENSG00000145362_99 (sequence is synthesized)
gacaacaatgagtaaagccatcacacagaagagggctgtggtgaaggaccagcatggaaaacgcattgacttggagcacctggaggatgtaccagaagcactagaccaggacgacctcca

SEQ ID NO: 393477 - DNA, 120 bp, Artificial Sequence
  ENSG00000145362_100 (sequence is synthesized)
gcgcgatctccagcagctccttcggcatttctgcaaggaggacttgaagcaagaggccaagtgaggggctgcccagttctcacaccagaaaccacacattcactcaatatgcagcttcct

SEQ ID NO: 393478 - DNA, 120 bp, Artificial Sequence
  ENSG00000145362_101 (sequence is synthesized)
gtttcagtaggggagtgacctaactggcctaattaatgggataccccgacatttccactgttagcaaatatacggcattttgctttagttttcccccatcctctttaactataaagctaa

SEQ ID NO: 393479 - DNA, 120 bp, Artificial Sequence
  ENSG00000145362_102 (sequence is synthesized)
tttgtgaccaaagatggcatccttcatactggatgctgtatccaatactttgttgtgtctgtgctaacctgggaactggccacctccattgttctttgcttctgcacaagatccatgaaa

SEQ ID NO: 393480 - DNA, 120 bp, Artificial Sequence
  ENSG00000145362_103 (sequence is synthesized)
atccattgatcagaagaacttcacctgcagacctcttcaagtgacactatgtaggaatccttccaaggaatatctatgtacaatgtatatagctgaaatgctcagatgaacaacatatta

SEQ ID NO: 393481 - DNA, 120 bp, Artificial Sequence
  ENSG00000145362_104 (sequence is synthesized)
aaattaaaaccactgcctattgtaactacactgggcatcagaataaaaggcctctagaaattgctgaacaatggttaattaagatattgctaacacaatcgagtgataatacagttttac

SEQ ID NO: 393482 - DNA, 120 bp, Artificial Sequence
  ENSG00000145362_105 (sequence is synthesized)
tgcaaaagaagcacttcaaacctattatgtccttagaacttccagagtagccactgctcccagttaaaggtgggtcagtagccttgcagaactgtcctgagaagttattgctggtgctgg

SEQ ID NO: 393483 - DNA, 120 bp, Artificial Sequence
  ENSG00000145362_106 (sequence is synthesized)
ccagccatggcttaggactccaacagccactctgagggaggggagaagggagcagaggccacgcagaatgaaccgatggggtattcagttgctggcagctacattgtgtggcattctagc

SEQ ID NO: 393484 - DNA, 120 bp, Artificial Sequence
  ENSG00000145362_107 (sequence is synthesized)
atcttcaggtctttagatcttggacaagttggcagggtattttaaaagctataactactgtagttttccagttttcattgctgctttagcaaaccacgctgtcttacagtggtactttct

SEQ ID NO: 393485 - DNA, 120 bp, Artificial Sequence
  ENSG00000145362_108 (sequence is synthesized)
tactttcttctggccactgcactgtagataattcattggaaacaagatttacccactacataaaaggttaaactccttcagtatgttggagtggtttctttttttttttctttctttctt

SEQ ID NO: 393486 - DNA, 120 bp, Artificial Sequence
  ENSG00000145362_109 (sequence is synthesized)
tcaggtttatatcttctctaatacctgcatgtggcgtttaaaaatcaagaccacggtcaaacccctcttctaatcacattaattgtttccattctttttaccctgagtgagcacttttca

SEQ ID NO: 393487 - DNA, 120 bp, Artificial Sequence
  ENSG00000145362_110 (sequence is synthesized)
ctttccagctaggtctgtttttcagcttgcagacaagattgagaaatccttgaaaatttggttttggttaaaatttttggtttatttatttgaaatccacactcccttggaaactcttaa

SEQ ID NO: 393488 - DNA, 120 bp, Artificial Sequence
  ENSG00000145362_111 (sequence is synthesized)
gtgcatttgtgcacttctgtttgtttgtctcaaagaagggactgtaacaatctgagtaatttccatgtcctcttccttattcctctagtggttgaagctgtgtagcattttaacatatat

SEQ ID NO: 393489 - DNA, 120 bp, Artificial Sequence
  ENSG00000145362_112 (sequence is synthesized)
atattcacaaatatattcatataaacagtatacattttgaatcagtcatttgttaaagaaaagtatattcaatgaagatgaaatttaaataaaaaaggacagagtctatcctccagggat

SEQ ID NO: 393490 - DNA, 120 bp, Artificial Sequence
  ENSG00000145362_113 (sequence is synthesized)
tgaacattttccaattatctggtcttttcctgttgtgcaaaaatgactcattgctccgaatgtcaaaaacaaatgcgacaaacaatggcacttcatcatttaaagtaatgttgccaagag

SEQ ID NO: 393491 - DNA, 120 bp, Artificial Sequence
  ENSG00000145362_114 (sequence is synthesized)
aaaaaatttcctgggagggaggtttcccacaagccaaatctcctaagcctcaaatgctagcactttttggcagttggataggaaatgagacattctttggcagccaaaataagagaggcc

SEQ ID NO: 393492 - DNA, 120 bp, Artificial Sequence
  ENSG00000145362_115 (sequence is synthesized)
gatggtgaaactttttgagacaccctatggccttcttgtcaaaaccttcactggagctcaagaaaagcatttctgttgtgttatttgcagtgcagatgatgtctgtgtaacaacataatg

SEQ ID NO: 393493 - DNA, 120 bp, Artificial Sequence
  ENSG00000145362_116 (sequence is synthesized)
gttattcacctttttttgattttgatttttgctgtgttatcaaaaacttgaatactgtgagaagaagtgaattttcagttgacgaatcagcatcttgttcccatggtgataacactaatt

SEQ ID NO: 393494 - DNA, 120 bp, Artificial Sequence
  ENSG00000145362_117 (sequence is synthesized)
gaatatatctatgagggcatgtattagttaatggaaaaaaaaatacaacactaacaatacatagctgcaatgtgtacaatggctgatttaattaaataaaatgtacaagtgttaaatgtg

SEQ ID NO: 393495 - DNA, 120 bp, Artificial Sequence
  ENSG00000145362_118 (sequence is synthesized)
acagtctgaggctgtaatgggaaagtcggttcctgggctgctgtctcatagacatcagcttgcagggaagctgggggctctccgaattgccctgctccggggcccctcctgctgcgtgac

SEQ ID NO: 393496 - DNA, 120 bp, Artificial Sequence
  ENSG00000145362_119 (sequence is synthesized)
tcacaggcacattgcagagagaagctgccgctcccagtaagtaatgaaaagagacatgaagaattggtatttcaaatgaccaccatgttgcaaaagtctgacagcaatgcaagcttcctc

SEQ ID NO: 393497 - DNA, 120 bp, Artificial Sequence
  ENSG00000145362_120 (sequence is synthesized)
ggaaggccgtagagtcagcaaagttgttaaaacaactgtggtacttggagagaggatggagaaacatctgggggattctagtttagccactgatcttccttcagccaaagatgactttga

SEQ ID NO: 393498 - DNA, 120 bp, Artificial Sequence
  ENSG00000145362_121 (sequence is synthesized)
ggtgatttgttcttctttatcatgaatctgtgatttcaggagaataagaggttttaaaaagttgagctagacttgaaaccaacagaaagacacaaattgctttttttcttatggttttta

SEQ ID NO: 393499 - DNA, 120 bp, Artificial Sequence
  ENSG00000145362_122 (sequence is synthesized)
tttagtcgctgaatatgctatatgcctggcactggattaagcactgggataaatagattttgcctctgccctcaagaaattcttattgttcttgttatgcaaaagaagaaaatgaggatt

SEQ ID NO: 393500 - DNA, 120 bp, Artificial Sequence
  ENSG00000145362_123 (sequence is synthesized)
tttgttttggatcactactaaatgaaagaaaataggaatttggggacttgcaggggatgagaaagggtaagtgggattggcagcacagcaagactggtttggttctctcccatgaggcca

SEQ ID NO: 393501 - DNA, 120 bp, Artificial Sequence
  ENSG00000145362_124 (sequence is synthesized)
tggctgtcactaaatactttctgtctttgggaacagcagttggctctggagttttctttctgtcttagagcctgagaatttaaaattaaatggatatattaatataaataaagacagggt

SEQ ID NO: 393502 - DNA, 120 bp, Artificial Sequence
  ENSG00000145362_125 (sequence is synthesized)
ggttgaatcagatttaacaatgcagtcagataaacagttgtggcagctgctgccatggcaacgtcaccgtccttaccctcccagtgcgcgccccttccccacccctcctcctcctcctgc

SEQ ID NO: 393503 - DNA, 120 bp, Artificial Sequence
  ENSG00000145362_126 (sequence is synthesized)
catagggatttccagctttacaacatgctatgaattatcctcctctgtgttaacacttgtgttaacctcatccgaagtcctgggggatgtcctgttcaacctgccatttcacccatagta

SEQ ID NO: 393504 - DNA, 120 bp, Artificial Sequence
  ENSG00000145362_127 (sequence is synthesized)
gagttggtccacagtgaaaagtggtgaaaagactgaagtctttataccacttgcatatattgttcctgatcctgcgtgtacatttcagagaactggtgaataaactctccgctccatgcc

SEQ ID NO: 393505 - DNA, 120 bp, Artificial Sequence
  ENSG00000145362_128 (sequence is synthesized)
ttgtctctattaaaaaaaaaaaaaaagaaagaatttagtagctctttgttagaataatgcttctaaatattgcctgtgtattgaaaattttccaccatatgcttatttgtagcttttagt

SEQ ID NO: 393506 - DNA, 120 bp, Artificial Sequence
  ENSG00000145362_129 (sequence is synthesized)
attttcaaccaatatctgtaatgattgggatattatcatcactatttctaaagacaaatgccatccagttcatttaaggtcaaactttgagactgccgtggtgacctagtatctggaatt

SEQ ID NO: 393507 - DNA, 120 bp, Artificial Sequence
  ENSG00000145362_130 (sequence is synthesized)
agtatatttataatgttggttcttttgtctcttgaatctataaactttgtacttaagccaatcttcttttctgcctgtcttctataaactgttagtaataaaaaaagagtatgttgactg

SEQ ID NO: 393508 - DNA, 120 bp, Artificial Sequence
  ENSG00000145362_131 (sequence is synthesized)
tatgcttgcctgttgatgcttgttgaaagggtatttatttactctttccttttcttctaaatactctctactcttccttctctcttttttccatcttgcatggcatcttggggcggaaag

SEQ ID NO: 393509 - DNA, 120 bp, Artificial Sequence
  ENSG00000145362_132 (sequence is synthesized)
gcataaatcttagaagaactatgctttgctgagaggcaaagaattgtctctacactctgatgcggggatatgcaggaggagcccaggaggtccctgtgagggtgcaaaccaattaagtaa

SEQ ID NO: 393510 - DNA, 120 bp, Artificial Sequence
  ENSG00000145362_133 (sequence is synthesized)
acggcagcagcagcagcagcagcagcagagtcctttagcgagactgcaccattttcttctcaccctgcatagaggtgtggttggaagcagcaataaactacccaccccctagcagtttca

SEQ ID NO: 393511 - DNA, 120 bp, Artificial Sequence
  ENSG00000145362_134 (sequence is synthesized)
cagaggtggcctcttcctggctccagtcagaagacacagtctgtctggaggagtccccaaagactgttccaattggtgatgtgtgtctaaggatggctttttcaactagtaggatgcttc

SEQ ID NO: 393512 - DNA, 120 bp, Artificial Sequence
  ENSG00000145362_135 (sequence is synthesized)
tctgcacttgcagccacccaactgctgaagagctggaagtctagtgctccgccttcccccgggaccatttctgagtgtgggtgcacacctatgcctgtgtgcgtgcaggtgtgtgctgct

SEQ ID NO: 393513 - DNA, 120 bp, Artificial Sequence
  ENSG00000145362_136 (sequence is synthesized)
ggaggtctcggtttgggaccttagttcattgtagtgagttgtgggtgctgcagaggctggagcaagattatgacctagctcgggggcggagtggattatcttgtgagtgttctggctgcc

SEQ ID NO: 393514 - DNA, 120 bp, Artificial Sequence
  ENSG00000145362_137 (sequence is synthesized)
agccattgccctggtggggaaaatcacatctccatagagctctgaaatcacctggattgctggggagtggaaactgatcctctgctactgcttctgctgatttcctctgcaaaatggctc

SEQ ID NO: 393515 - DNA, 120 bp, Artificial Sequence
  ENSG00000145362_138 (sequence is synthesized)
acgctgctgcttctattaaaaaagttcgagaggctgatctggatgaaaaggaaaaaaatcttgagagagacagaaaaaaacaacggaaaatccccagagaacgtatggaacgaaaaagaa

SEQ ID NO: 393516 - DNA, 120 bp, Artificial Sequence
  ENSG00000145362_139 (sequence is synthesized)
gggagcacagtaagggagctgctagcttaaacaaagctcattgagttgtggagccattgaaatgtaaactaagcggtgcaattaaacgaactgggatcccgagtggcctgggttggatgc

SEQ ID NO: 393517 - DNA, 120 bp, Artificial Sequence
  ENSG00000145362_140 (sequence is synthesized)
agcccgaattgcttgcctgtgttattttgctgcacagtgagcttctgcacagctgtagctaaatatgttaccgtgttcccgatggtaacatcttacctgcagcagatggcctgacttctg

SEQ ID NO: 393518 - DNA, 120 bp, Artificial Sequence
  ENSG00000145362_141 (sequence is synthesized)
atgagggataagtgtacctggtacttgctaacaggttttggagacgtcatgaggcactttcttaagtgcaatacagtatttgtagaagatatttgacaaccttagggttaaagcgtcaag

SEQ ID NO: 393519 - DNA, 120 bp, Artificial Sequence
  ENSG00000145362_142 (sequence is synthesized)
tgcttcttattaaaaagagcaagcagatgcaagcttgttgtgttaccatggtgacctggcctatagtctgaagaagttacaaagacagatttagacgtaatgaatggcaacactgccttg

SEQ ID NO: 393520 - DNA, 120 bp, Artificial Sequence
  ENSG00000145362_143 (sequence is synthesized)
atcagattattcctagtaagcaagagctgccatcagagatcgtggatcttacaaaattttatgagtgcttagtaataatactgaacttatgattgccatatttgaagcccaccaaactta

SEQ ID NO: 393521 - DNA, 120 bp, Artificial Sequence
  ENSG00000145362_144 (sequence is synthesized)
ctgcactggaaatggtcactgaatgcagcctgcagttgccgggggttttgagttctctctgacaccagcaagccagctagcagatggggagaactggtgaggggcgtggaagggaactga

SEQ ID NO: 393522 - DNA, 120 bp, Artificial Sequence
  ENSG00000145362_145 (sequence is synthesized)
gcagaggagccaaggatcatcttgatgaattgcccacattagtgtacccctgggagccctggacagagtgcagagggcaaggacgggcccactgacagcaggaactgtagagctgagatg

SEQ ID NO: 393523 - DNA, 120 bp, Artificial Sequence
  ENSG00000145362_146 (sequence is synthesized)
atcagattaggagtatcaaattttaacttctggattcccttgtgctcttgccattgagcggtaggaacctgtcaaaggatgtgttagttcagctgttggacaaaaaggtaggacaacaga

SEQ ID NO: 393524 - DNA, 120 bp, Artificial Sequence
  ENSG00000145362_147 (sequence is synthesized)
gacttgtgtccccctggaagttgtgctgttagctaatagcacgcttttttcactctcctgctcggctcatcattttgtcatcccaaccctgctactgctgttggtatatgccatggcctc

SEQ ID NO: 393525 - DNA, 120 bp, Artificial Sequence
  ENSG00000145362_148 (sequence is synthesized)
agagcagcgggtgagctcattggctcacatcgcagtcctctctcttatttctcactctctctctttcactctctcttcagaatggcaacactgccttggcgattgctaagcgtctgggct

SEQ ID NO: 393526 - DNA, 120 bp, Artificial Sequence
  ENSG00000145362_149 (sequence is synthesized)
cgagtgattattcagggagacgatatgcctgaaatacccccagaaacagtcacagaagaagaatacattgatgagcatggacacaccgtggtaaagaaggttactaggaaaatcattagg

SEQ ID NO: 393527 - DNA, 120 bp, Artificial Sequence
  ENSG00000145362_150 (sequence is synthesized)
gcatcttggggcggaaaggaatcagagtcagatcaagaacaggaggaagagatcgatatgacatcagaaaaaagtaagaatttaaagaaaattgagtttgtttgaaagctggctaccata

SEQ ID NO: 393528 - DNA, 120 bp, Artificial Sequence
  ENSG00000145362_151 (sequence is synthesized)
aaaagaagcatgaattaaaatgcaagctagttgctattactaaccactatagtaattacatttttatattatccttattaatcattaatatatttataaaagcagcttggccagttaaat

SEQ ID NO: 393529 - DNA, 120 bp, Artificial Sequence
  ENSG00000145362_152 (sequence is synthesized)
aaaatgcaatgattattcatctaagcattcactttcttttgacattcttgttaaccctggtattgctgttatgcttgtttagaaacccaccctaccgttttgtccatttgttagcaaaac

SEQ ID NO: 393530 - DNA, 120 bp, Artificial Sequence
  ENSG00000145362_153 (sequence is synthesized)
actgtcatctcatcattttttaagcactgacatgacagtatcactttttatgtaatgcaatagtgacttctgtagagagctcattatttttgtaggatacacctgcaaaagtgatactgt

SEQ ID NO: 393531 - DNA, 120 bp, Artificial Sequence
  ENSG00000145362_154 (sequence is synthesized)
ctaatagttcttagctgaagctaaccccatccaatgcctgccccctcccccatcactcttttgcactttttactgtggtgaagtgtaaccaatgtctttagagctgaggtctaacagact

SEQ ID NO: 393532 - DNA, 120 bp, Artificial Sequence
  ENSG00000145362_155 (sequence is synthesized)
gccacaggaacctgtcaacatcgaggaaggggatggctattccaaagttataaagcgtgttgtattgaagagtgacaccgagcagtcagaggctttgagttacacaggtagccacatgaa

SEQ ID NO: 393533 - DNA, 120 bp, Artificial Sequence
  ENSG00000145362_156 (sequence is synthesized)
agtctgtcatatgccacagtggtgttttcatcctccctgtgagtctgtcagggaaacactactgagcaaagccagcccagagagtgagaaaccatgtgattcctatcctttttttcccca

SEQ ID NO: 393534 - DNA, 120 bp, Artificial Sequence
  ENSG00000145362_157 (sequence is synthesized)
gttgtgaatgcagcaagagaaaaagaagggagaccagtttaactggtttcaaggtttgcagccctgaagtgaacaaggatggaggattggattaggatgttaacaatggaggtgacatgc

SEQ ID NO: 393535 - DNA, 120 bp, Artificial Sequence
  ENSG00000145362_158 (sequence is synthesized)
ccccagatgaaaccagaggccgccaacattgaaaaggtgatggaagcaaaaaaacacttctaaaaacagtaaagacgttggtaactaagaagttttaattataaccttctgctcaaaaaa

SEQ ID NO: 393536 - DNA, 120 bp, Artificial Sequence
  ENSG00000145362_159 (sequence is synthesized)
acagagtcgaggtgcttgtcttgctgttagttagctcctgtccacactgaatgttctgcattgctatgtcaggcctgtgatcgtggagatccctcactttgcggcccttcgaggaaagga

SEQ ID NO: 393537 - DNA, 120 bp, Artificial Sequence
  ENSG00000145362_160 (sequence is synthesized)
tgtcaagtgaagatgacataagcctagatatctgcttgaattgtttcgctgatttcatcttgaaagaaggggctggtatctctccagtctgacagcaatgcaagcttcctccgtgctgcc

SEQ ID NO: 393538 - DNA, 120 bp, Artificial Sequence
  ENSG00000145362_161 (sequence is synthesized)
tcattctatacatgaattcatggaaaggtgcagaataattcaagagggtagaactcctgtttgaataacttgcagagtaacgtttccttaaactgtggtgttcattggtgtcaccttaac

SEQ ID NO: 393539 - DNA, 120 bp, Artificial Sequence
  ENSG00000145362_162 (sequence is synthesized)
agcttttaaaaatccaggtaactaggatttgcttctgctgaatcagactcagaatctctggagctggtatatgattatacatcttgtttaaaagtcacagaagtgtcttgctttgtcaat

SEQ ID NO: 393540 - DNA, 120 bp, Artificial Sequence
  ENSG00000145362_163 (sequence is synthesized)
taataagggaaagaaataaagacattgcaaattatatttgctagccagtcttttcaaatataatctgtgatagacattaaagaaaattcagatatattccatgtccataaattttaaaag

SEQ ID NO: 393541 - DNA, 120 bp, Artificial Sequence
  ENSG00000145362_164 (sequence is synthesized)
agaaaattcagatatattccatgtccataaattttaaaagcatttacaattacttaagttctggtttccaacaattagaaaatgggtccacggttggccaggcacagtggctcacacctg

SEQ ID NO: 393542 - DNA, 120 bp, Artificial Sequence
  ENSG00000145365_0 (sequence is synthesized)
ctttacaaaggccccgggcgcgagaggacgtgctctgccagccagtgggaaggcaggccgcgcgcgcgggagcgcgggaggatcggcggctcgcggtcactggtccctggctcggttccc

SEQ ID NO: 393543 - DNA, 120 bp, Artificial Sequence
  ENSG00000145365_1 (sequence is synthesized)
cgcaccccggggctcacacttacccgcgcggaggagcagcggccgggtgtccacccccatcctgcgcccagtctcctcgattcccctcgctctgagccgggagagccgaacagctgaaga

SEQ ID NO: 393544 - DNA, 120 bp, Artificial Sequence
  ENSG00000145365_2 (sequence is synthesized)
gagttcactgactccccagccccaggtgggccttgtgcacatcatgaccagttttgaagatgctgacacagaagagacagtaacttgtctccagatgacggtttaccatcctggccagtt

SEQ ID NO: 393545 - DNA, 120 bp, Artificial Sequence
  ENSG00000145365_3 (sequence is synthesized)
gcagtgtggaatatttcagtcaataagttttaacagagagaaactcccttccagcgaagtggtgaaatttggccgaaattccaacatctgtcattatacttttcaggacaaacaggtttc

SEQ ID NO: 393546 - DNA, 120 bp, Artificial Sequence
  ENSG00000145365_4 (sequence is synthesized)
ccgagttcagttttctctgcagctgtttaaaaaattcaacagctcagttctctcctttgaaataaaaaatatgagtaaaaagaccaatctgatcgtggacagcagagagctgggctacct

SEQ ID NO: 393547 - DNA, 120 bp, Artificial Sequence
  ENSG00000145365_5 (sequence is synthesized)
aaataaaatggacctgccatacaggtgcatggtcagattcggagagtatcagtttctgatggagaaggaagatggcgagtcattggaattttttgagactcaatttattttatctccaag

SEQ ID NO: 393548 - DNA, 120 bp, Artificial Sequence
  ENSG00000145365_6 (sequence is synthesized)
atcactcttgcaagaaaacaactggccaccacacaggcccataccggagtatggcacttattcgctctgctcctcccaaagcagttctccgacagaaatggatgaaaatgagtcatgaac

SEQ ID NO: 393549 - DNA, 120 bp, Artificial Sequence
  ENSG00000145365_7 (sequence is synthesized)
acagaaagtctaagaggagaaatatgatggatgaagagctctgtagatgctgtatagacactaaataagagttgattagggtagtatattatagtcatctgttatgctgtgaaatttgga

SEQ ID NO: 393550 - DNA, 120 bp, Artificial Sequence
  ENSG00000145365_8 (sequence is synthesized)
attcagtattatcattttgaagtctgtaaattgtgttagtcattaacttagtcacctgttgtattctggatctacacaaaattattttaactgctcttattaatctgtgaggattaatat

SEQ ID NO: 393551 - DNA, 120 bp, Artificial Sequence
  ENSG00000145365_9 (sequence is synthesized)
acaaaaagtatcctttgagatgaagtcgtgttctcaaaataaggttatattattttctttttctgcttgattttcatcttgtgttttgctttgtttttgtaaggaaccatctcttggttt

SEQ ID NO: 393552 - DNA, 120 bp, Artificial Sequence
  ENSG00000145365_10 (sequence is synthesized)
ggtcacatcagttcacaacagccatttgttttcaaggtcaaggctccaggcaggttgttactggtgtttgcagcctgtcagtacttgcagtactggaataggttctaggctagtgtctgc

SEQ ID NO: 393553 - DNA, 120 bp, Artificial Sequence
  ENSG00000145365_11 (sequence is synthesized)
gcgtcactgtggttttagcatgggaggacttatttgagaaatactaccttacttttctatgatttctttttacagagttatagtgtgtttactcctaagatgacagttctctttgtctat

SEQ ID NO: 393554 - DNA, 120 bp, Artificial Sequence
  ENSG00000145365_12 (sequence is synthesized)
attcagcatctaagacaaatatttaaacattttaaagaaccactgtgttaagtttaggattatttacttaccaaattagaagtttgacttttatgtgttatacacaatcttaaaatttca

SEQ ID NO: 393555 - DNA, 120 bp, Artificial Sequence
  ENSG00000145365_13 (sequence is synthesized)
cgaattcacctttttaatagtatccatgtacataataaaatcaaagtttaattagccattttctttgaatttttttctaaataagggaaataactgttcttgggccactttacagagata

SEQ ID NO: 393556 - DNA, 120 bp, Artificial Sequence
  ENSG00000145365_14 (sequence is synthesized)
tgggccactttacagagataaatgtatgtgaatgtttatgataaacgcttaaatatttctaaaatattaacttcaaaaaagtctttttcagttcttaaataaaaatttatttatttaaga

SEQ ID NO: 393557 - DNA, 120 bp, Artificial Sequence
  ENSG00000145365_15 (sequence is synthesized)
actaaggtagctatgaatgttaagtagatgaggtaaccattcagttaagttaaattgtagcattgccaggtagtgaggctcactgtacaattttccaggtaaatgaaatttcctgtagta

SEQ ID NO: 393558 - DNA, 120 bp, Artificial Sequence
  ENSG00000145365_16 (sequence is synthesized)
agaggtccgtatttttgtaacagccttttaaaaatgcttttgggaaccctccagcctcttaccaaaagaggctttaaacctcatcttgattcagactgtcagtctattcctgggcagtag

SEQ ID NO: 393559 - DNA, 120 bp, Artificial Sequence
  ENSG00000145365_17 (sequence is synthesized)
ggcctgaatgactgttggagttcctgtgtctggttttcctgtttattccctgtgatgcccagagtaatggcccatccaaagatgtccagatgtccatgtgctagtctccagaacttgtaa

SEQ ID NO: 393560 - DNA, 120 bp, Artificial Sequence
  ENSG00000145365_18 (sequence is synthesized)
ctgtgttgttatgtggcaaaggggaatgaaggctgcagatggaagtaaaatagattatgctggattatctgggtgtgcccaattgatcaccggatccgtaaaagtggaagagaggcagat

SEQ ID NO: 393561 - DNA, 120 bp, Artificial Sequence
  ENSG00000145365_19 (sequence is synthesized)
caggatgtcagcgtgatgaggtgtgagacagacttgacttgctgttgctgggaggaaggggaggtcatgagccaaggaatgtggacagtctcttgaagctggaaagtgtgcattggacat

SEQ ID NO: 393562 - DNA, 120 bp, Artificial Sequence
  ENSG00000145365_20 (sequence is synthesized)
ctggaagccagaaaagacaaagaaatatccagaaaggaacaaagtcttgtggacaccttgattttggtccagtgagaatatgtttgacttgttaacctacaaaactttatgatgataaat

SEQ ID NO: 393563 - DNA, 120 bp, Artificial Sequence
  ENSG00000145365_21 (sequence is synthesized)
ttgtgttggtcgtaagccactaaatcacagtaatttgttatagcagcagatagaaaactaatatactccctttaatataaggttatctactattgattctttctaggattttagcttctg

SEQ ID NO: 393564 - DNA, 120 bp, Artificial Sequence
  ENSG00000145365_22 (sequence is synthesized)
gtctgatgtgggtttacagccagatcacccggcttgaattgcttacagtgtgtagtctcatggtaaaggcgttctatgagtgaagtgtatatactttaatgtgtgtatactgtcacattt

SEQ ID NO: 393565 - DNA, 120 bp, Artificial Sequence
  ENSG00000145365_23 (sequence is synthesized)
tgactattttggaagactttcacctctgtttcttgtctttgaggctgatgaatgtgtttctaagttataaatttaatattaagggattcatgtattattgttattgaatccaaacaatgt

SEQ ID NO: 393566 - DNA, 120 bp, Artificial Sequence
  ENSG00000145365_24 (sequence is synthesized)
gttaagtaatatttagggccagaaaaatcttgtacagaataatgatttctcctaatgtaaatcttggaaagggttttgttcaacttgagaaatattaaattttttattctattttctttt

SEQ ID NO: 393567 - DNA, 120 bp, Artificial Sequence
  ENSG00000145365_25 (sequence is synthesized)
cttcaaagattggcaaaggagagagtgggttgctaaaagtttatattgttctccaaagaatagaaacactttccatagcccaactccggtagtaaataataatgaacgctttaataatga

SEQ ID NO: 393568 - DNA, 120 bp, Artificial Sequence
  ENSG00000145365_26 (sequence is synthesized)
aagagcaattggttagtattagaattgttttgattacaaagttagcatctctgcctgagctacccaaccccaaagcggggttgttagaggaaagctaccatatttcatagaaccgaggaa

SEQ ID NO: 393569 - DNA, 120 bp, Artificial Sequence
  ENSG00000145365_27 (sequence is synthesized)
ggaatgcagcagacctcaggtgagattcgaatgctctggctctgaccctcaatgcatattggctccatggccacctgtagctcccaagttttacacgttattgatcccccaaagagacct

SEQ ID NO: 393570 - DNA, 120 bp, Artificial Sequence
  ENSG00000145365_28 (sequence is synthesized)
gatctcttgatttcagttccagggacgggtcagcttgggtcaggtgcccaccccttcaccaatcaacttgtctcaggtaacgcagtcacattatataatggctgctctggtcagtgatca

SEQ ID NO: 393571 - DNA, 120 bp, Artificial Sequence
  ENSG00000145365_29 (sequence is synthesized)
tgtggatagatacagcattttctcaaaaaaatggtcacaggggtgggggtggggcaaacaaaaatattggtgtttgatacaaggtactgaagctaagatgtgaaaccttccatatacact

SEQ ID NO: 393572 - DNA, 120 bp, Artificial Sequence
  ENSG00000145365_30 (sequence is synthesized)
ttaaggacttctttgtccctggaaagtgatttttctggggctccttaggtagagaggtgtattaatggtgccagtgttagaatccttggcagtctcttcttgaacctgcaactccagtgg

SEQ ID NO: 393573 - DNA, 120 bp, Artificial Sequence
  ENSG00000145365_31 (sequence is synthesized)
ttaaatctcataggccatataaccattttctagagaattctgttcctactatctaatgcagtaactgacttaaaagtaagtattactgttagactctaacataagtggtggtatttgttt

SEQ ID NO: 393574 - DNA, 120 bp, Artificial Sequence
  ENSG00000145365_32 (sequence is synthesized)
taatggaggtgggatcaggtatgtgttcacttaagctttacattaaaaaaaaatttatatgtgtaaataaatatatatgccttgtagaaaaattagccataatcttactaccagaagaga

SEQ ID NO: 393575 - DNA, 120 bp, Artificial Sequence
  ENSG00000145365_33 (sequence is synthesized)
actactgttaactttgtgtgtgtgtatatgtggtggatggttttatgttacctcctggctctttttatgtttccaattctctaacacttgtttaattaattacttatattattaagataa

SEQ ID NO: 393576 - DNA, 120 bp, Artificial Sequence
  ENSG00000145375_0 (sequence is synthesized)
ctctcagttgaagcgcgcacattgagtcggcttttctactgcttcggctagggtaccttgtgaccatgtcttccaagaagaatagaaagcggttgaaccaaagcgcggaaaatggttcgt

SEQ ID NO: 393577 - DNA, 120 bp, Artificial Sequence
  ENSG00000145375_1 (sequence is synthesized)
ccttgccctctgctgcttcctcttgtgcggaggcacgggctccttctgctggatcagacttcgcggcaacctccgggactctgacggtgaccaacttattagaaaaggtagatgacaaaa

SEQ ID NO: 393578 - DNA, 120 bp, Artificial Sequence
  ENSG00000145375_2 (sequence is synthesized)
ttcctaaaacattccagaattcccttattcatcttggactcaacactatgaagtctgcaaatatatgtataggtcgaccagtgttgcttactagtttgaacggaaagcaagaggtgtata

SEQ ID NO: 393579 - DNA, 120 bp, Artificial Sequence
  ENSG00000145375_3 (sequence is synthesized)
cagcctggcctatggcaggatttcctggaggcaaggtcggcctgagtgaaatggcacagaaaaatgtgggtgtgaggcctggtgatgccatccaggtccagcctcttgtgggtgctgtgc

SEQ ID NO: 393580 - DNA, 120 bp, Artificial Sequence
  ENSG00000145375_4 (sequence is synthesized)
tacaggctgaggaaatggatgtggcactgagtgacaaagatatggaaattaatgaagaagaactgactggttgtatcctgagaaaactagatggcaagattgttttaccaggcaactttc

SEQ ID NO: 393581 - DNA, 120 bp, Artificial Sequence
  ENSG00000145375_5 (sequence is synthesized)
tgtattgtacattctatggacgaccgtacaagctgcaagtattgcgagtgaaaggggcagatggcatgatattgggagggcctcagagtgactctgacactgatgcccaaagaatggcct

SEQ ID NO: 393582 - DNA, 120 bp, Artificial Sequence
  ENSG00000145375_6 (sequence is synthesized)
ttgaacagtccagcatggaaaccagtagcctggagttatccttacagctaagccagttagatctggaggatacccagatcccaacatcaagaagtactccttataaaccaattgatgaca

SEQ ID NO: 393583 - DNA, 120 bp, Artificial Sequence
  ENSG00000145375_7 (sequence is synthesized)
gaattacaaataaagccagtgatgttttgctggatgttacacagagccctggagatggcagtggacttatgctagaggaagtcacaggtcttaaatgtaattttgaatctgccagagaag

SEQ ID NO: 393584 - DNA, 120 bp, Artificial Sequence
  ENSG00000145375_8 (sequence is synthesized)
gaaatgagcaacttactgaagaagagagactgctaaagttcagcataggagcaaagtgcaatactgatactttttattttatttcttcaacaacaagagtcaattttacagagattgata

SEQ ID NO: 393585 - DNA, 120 bp, Artificial Sequence
  ENSG00000145375_9 (sequence is synthesized)
aaaattcaaaagagcaagacaaccaattcaaagtaacttatgacatgataggaggattaagtagccagctgaaagcaattagagaaataattgaattgcccctcaaacagcctgagcttt

SEQ ID NO: 393586 - DNA, 120 bp, Artificial Sequence
  ENSG00000145375_10 (sequence is synthesized)
tcaagagttatggaattcctgcccctagaggagtgttactttatggtcctccaggtactggaaaaacaatgatcgccagggctgttgctaatgaagttggagcctatgtttctgtaatta

SEQ ID NO: 393587 - DNA, 120 bp, Artificial Sequence
  ENSG00000145375_11 (sequence is synthesized)
atggtcctgaaattataagcaaattctatggtgagactgaagcaaagttacgtcagatatttgctgaagccactctacgacacccatcaattatttttattgatgagctggatgcacttt

SEQ ID NO: 393588 - DNA, 120 bp, Artificial Sequence
  ENSG00000145375_12 (sequence is synthesized)
gtccgaaaagagagggggcccagaatgaagtggaaaaaagagttgtggcttcactcttaacactgatggatggcattggttcagaagtaagtgaaggacaagtgttggttcttggggcca

SEQ ID NO: 393589 - DNA, 120 bp, Artificial Sequence
  ENSG00000145375_13 (sequence is synthesized)
caaatcgccctcatgccttggatgctgctctccgaagacctgggcgatttgataaagagattgagattggagttcccaatgctcaggaccggctagatattctccagaaactgcttcgaa

SEQ ID NO: 393590 - DNA, 120 bp, Artificial Sequence
  ENSG00000145375_14 (sequence is synthesized)
gggtaccccatttgctcactgaggctgagctgctgcagctggcaaatagtgctcatggatacgttggagcagacttgaaagtcttgtgtaatgaagcaggtctctgtgccttgcggagaa

SEQ ID NO: 393591 - DNA, 120 bp, Artificial Sequence
  ENSG00000145375_15 (sequence is synthesized)
tcctgaaaaaacagcctaacctccctgatgtcaaggtggctggactggtgaagattactctgaaggatttcttgcaggcaatgaatgatatcagacccagtgccatgagggaaatagcaa

SEQ ID NO: 393592 - DNA, 120 bp, Artificial Sequence
  ENSG00000145375_16 (sequence is synthesized)
ttgatgtcccaaatgtatcctggtcagatataggaggactggaaagtatcaaactgaagttggaacaggctgtggaatggcccttaaaacatccagagtctttcattcgaatgggtattc

SEQ ID NO: 393593 - DNA, 120 bp, Artificial Sequence
  ENSG00000145375_17 (sequence is synthesized)
agccacctaaaggagttcttctctatgggccacctgggtgctctaaaacaatgatagcaaaggctttggccaatgagagtggactgaattttctagctataaaggggcctgaattaatga

SEQ ID NO: 393594 - DNA, 120 bp, Artificial Sequence
  ENSG00000145375_18 (sequence is synthesized)
ataaatatgttggtgaatctgaaagagcagttagagagaccttccgaaaagcaagagcagtggcgccttccattattttctttgatgaactggatgccttagcagttgaaaggggcagtt

SEQ ID NO: 393595 - DNA, 120 bp, Artificial Sequence
  ENSG00000145375_19 (sequence is synthesized)
ctttaggtgctgggaatgtagccgatcgtgttttggctcagctcttaacagaaatggatgggattgaacagctaaaggatgtgaccattttggcagctactaaccgtccagataggatag

SEQ ID NO: 393596 - DNA, 120 bp, Artificial Sequence
  ENSG00000145375_20 (sequence is synthesized)
acaaggctttgatgcggcctggaagaattgatagaatcatctatgtgcctttaccggatgcagcaacaagaagggaaatatttaagctgcagtttcactccatgcctgtcagtaatgaag

SEQ ID NO: 393597 - DNA, 120 bp, Artificial Sequence
  ENSG00000145375_21 (sequence is synthesized)
ttgacctggatgaactcatccttcaaaccgacgcatactcaggagcagagattgtagctgtctgcagagaggcagctcttctggctctggaagaagacattcaagccaatctcatcatga

SEQ ID NO: 393598 - DNA, 120 bp, Artificial Sequence
  ENSG00000145375_22 (sequence is synthesized)
aaagacatttcactcaggccttgagcactgtgacacctagaattcctgagtcattgagacgtttttatgaagattatcaagagaagagtgggctgcatacactctgagaaaatatatata

SEQ ID NO: 393599 - DNA, 120 bp, Artificial Sequence
  ENSG00000145375_23 (sequence is synthesized)
ttcaagatgctgaaaatcctttccagagaaaatttgtttctttttaaaattttttgagagtgttaaaaaaaattttactaggcaaaatgtttgaagtatgttcagtagaatttaggggct

SEQ ID NO: 393600 - DNA, 120 bp, Artificial Sequence
  ENSG00000145375_24 (sequence is synthesized)
ttggttcttacagattttcaagtcatgtaagtacagtgaaaatatctctgagcataagtttcaatcagttttacctggaaatttgtggtgtggtttaaaaaacaaatgtttagctttttc

SEQ ID NO: 393601 - DNA, 120 bp, Artificial Sequence
  ENSG00000145375_25 (sequence is synthesized)
atttgcgacctagtctgttcatcccatgaagcgatttctttttccagaatctgtttgagtgtctttctaaaatgccaaacatgttggcatcaattttatacagggatataaaaaagtata

SEQ ID NO: 393602 - DNA, 120 bp, Artificial Sequence
  ENSG00000145375_26 (sequence is synthesized)
tgtggataaattttttgtaatctttagggatataaaaaagtgtatgtggataaattttttgtaatctttatttttgaaggccagccagtaaaatggcccaatgtgccagccaggcttatg

SEQ ID NO: 393603 - DNA, 120 bp, Artificial Sequence
  ENSG00000145375_27 (sequence is synthesized)
tggccttgttttcaaatatacatatatgtgttatcattaaaattcatatatgcatttttgttttagccttcttaatctctacctatggccaaaaaaattttttttgagagatattttgta

SEQ ID NO: 393604 - DNA, 120 bp, Artificial Sequence
  ENSG00000145375_28 (sequence is synthesized)
atggccaaaaaaattttttttgagagatattttgtataatacaatgccctttgaaagtgtaagcccactctaagcctagatcagtaggcttgggttttttttgttgttgttttgtctttt

SEQ ID NO: 393605 - DNA, 66 bp, Artificial Sequence
  ENSG00000145375_29 (sequence is synthesized)
tgcaccaccacaccggtctcgaactgctggcctcaggtgacccacccacctgagcctcccaaagtg

SEQ ID NO: 393606 - DNA, 120 bp, Artificial Sequence
  ENSG00000145375_30 (sequence is synthesized)
gagccaccatacctggagaggttttgtgtttttgtttttttttcataaaatgcttttaataaatcatatgaagcattcatgtttttacttatacatattttcagggtaccagtaaacttt

SEQ ID NO: 393607 - DNA, 120 bp, Artificial Sequence
  ENSG00000145375_31 (sequence is synthesized)
ttacttatacatattttcagggtaccagtaaactttttagttcaaagataggccaaattgtacttttttttttttatgagacagagtctcgctgctctgtcgcccaggctagagtgcagt

SEQ ID NO: 393608 - DNA, 120 bp, Artificial Sequence
  ENSG00000145375_32 (sequence is synthesized)
atgagctactgcgccctgccgccaaattgtaatcttaaacatattatgttgcattctaaatatgtatatttatgcttcttgttatttatcctcaggatttcttcacactttattacttca

SEQ ID NO: 393609 - DNA, 120 bp, Artificial Sequence
  ENSG00000145375_33 (sequence is synthesized)
taaatactcttgaaaaagctttcagaaagtgattctctgacttcagatcagaaactggcaatgggaagaatgtgcacttaaacttgatcactgtagatctttgaaaattcccagaaagac

SEQ ID NO: 393610 - DNA, 120 bp, Artificial Sequence
  ENSG00000145375_34 (sequence is synthesized)
aaatcagacaagaaatacctgattatcaaaataatgggctatacagttttgtggtggcatacattccttgtttgtttgtttagagataggatcttgttgtgtcacccaggctggaatgca

SEQ ID NO: 393611 - DNA, 120 bp, Artificial Sequence
  ENSG00000145375_35 (sequence is synthesized)
gtggcacagtcgtagctcactgcaccttcaaactcctggagctcaagtgatcctcctgactcagcctcctgagtagctaggacaacaggtgcacactgccatgtcaggctaatttttttt

SEQ ID NO: 393612 - DNA, 83 bp, Artificial Sequence
  ENSG00000145375_36 (sequence is synthesized)
ggtctccaactcctggcctcaggtgaccctcctgcctcagcttcccaaaggtggtgacatatattctgaagtcacatctcaaa

SEQ ID NO: 393613 - DNA, 120 bp, Artificial Sequence
  ENSG00000145375_37 (sequence is synthesized)
ccagcctgtggtgacatatattctgaagtcacatctcaaatatttaatcctcaaatatatttacatcctcaaaaatatcagattttcaagacaacactggtttaccagtacataaaccca

SEQ ID NO: 393614 - DNA, 120 bp, Artificial Sequence
  ENSG00000145375_38 (sequence is synthesized)
cctaggggacaaagaatattaccacttagaactgtgttgtcaaatacaataaccactaattgtatctgaccattttaattaaattaattacaattaaataatatttaagaattagtttat

SEQ ID NO: 393615 - DNA, 120 bp, Artificial Sequence
  ENSG00000145375_39 (sequence is synthesized)
cagacatatcagccacatttcaaatgctcaatagctacatgtggcaagggtctgccacactggacagagtagaaaacattcccatcattcagaaggttctcttggacgctgcagatctgg

SEQ ID NO: 393616 - DNA, 120 bp, Artificial Sequence
  ENSG00000145375_40 (sequence is synthesized)
aaaacaagacttccatattgaaataaatacaacctcaaaacttttatgctctgtgttccctttagttgttatctacatagaaaattatgaaacaagagaggaacttaccttcttccctat

SEQ ID NO: 393617 - DNA, 120 bp, Artificial Sequence
  ENSG00000145375_41 (sequence is synthesized)
taaatatatggctaagggcacaagaaaataagaggaaaacttatccttcagggcctaaacaaggaaatgaaagaaatctcattcccaatagaataaaaaccagaagcttgaaatgactct

SEQ ID NO: 393618 - DNA, 120 bp, Artificial Sequence
  ENSG00000145375_42 (sequence is synthesized)
ggtgcaggaggctgggtggtggggaggagggtagcagtctcaatcaacaagtttagatattaatagccactcaaagccttcagcccatataacatgaagtgacaactgagctctgcacat

SEQ ID NO: 393619 - DNA, 120 bp, Artificial Sequence
  ENSG00000145375_43 (sequence is synthesized)
aatgctcaagctctataataaccaacactctcagcacaagggtagacaagaaaagaaaaatctcctgctggccaggaagaccacaaggaggctttctgacttggcctgtgcttttgattt

SEQ ID NO: 393620 - DNA, 65 bp, Artificial Sequence
  ENSG00000145375_44 (sequence is synthesized)
ccacaaggaggctttctgacttggcctgtgcttttgatttttaaaacattttttaaaagaggcct

SEQ ID NO: 393621 - DNA, 68 bp, Artificial Sequence
  ENSG00000145375_45 (sequence is synthesized)
tctgagaattctgactatgagcttacctgcccatggctttagaatgatttgaattcacactaccttca

SEQ ID NO: 393622 - DNA, 120 bp, Artificial Sequence
  ENSG00000145375_46 (sequence is synthesized)
gcccatggctttagaatgatttgaattcacactaccttcaaattcatgaaacctcaaaacctacaaattaacctaaaaacatggagccaagctaaaaatgccctgggggtaactagcact

SEQ ID NO: 393623 - DNA, 120 bp, Artificial Sequence
  ENSG00000145375_47 (sequence is synthesized)
tggactagttacaggaatgtagcttcgtctcagaggattccaaaagctaatgccttgcttaccaagggcttgtaatctcacaggatgtgatgggtggggcctcagatctgctgatgggag

SEQ ID NO: 393624 - DNA, 120 bp, Artificial Sequence
  ENSG00000145375_48 (sequence is synthesized)
cataaattggtacaaccactttggaaggcaactggctatctagcaaagttgaagaccctacaatctaacagttctcctaggtgcatatcccagagcaagtctcacattgatgcagtgaga

SEQ ID NO: 393625 - DNA, 120 bp, Artificial Sequence
  ENSG00000145375_49 (sequence is synthesized)
tagtgaataggaaagttcatagcaccattatttttaagtagtaagaacccggaaacaatctaaatatccatcagtaatagatatatgtgatagtcatacaatggaatactgtggcaataa

SEQ ID NO: 393626 - DNA, 120 bp, Artificial Sequence
  ENSG00000145375_50 (sequence is synthesized)
aaaataattagagctacatatgaaatagggatgaaacatggatgaacaaagaatgttttagaggaatatgatatttaaaatttgaagcatgaaaaatatgtgtttatgggggcatatata

SEQ ID NO: 393627 - DNA, 120 bp, Artificial Sequence
  ENSG00000145375_51 (sequence is synthesized)
gtggaagaataaatgaatagaaaagaaaagcaccaaatactggtgaggaatttcctcaggggagaaaagttgagctgcttcaattgtgtcagtaatgtttcatatcttagggtgggtgat

SEQ ID NO: 393628 - DNA, 120 bp, Artificial Sequence
  ENSG00000145375_52 (sequence is synthesized)
gggaatataggtgctgatttaatatagtctgtactttttgtgtacctaaatatttcgtgataatttttaaaagatgggccttaaaccaatacagtcatatcatttaactcaattccatga

SEQ ID NO: 393629 - DNA, 120 bp, Artificial Sequence
  ENSG00000145375_53 (sequence is synthesized)
atttacaatgcaatccacagtgcccacaaccccatgtttctggaaaatcaggagtattgggtacaatggaataaaatgcaagaaggcaaataagagatcaggcttttaggacctaggaaa

SEQ ID NO: 393630 - DNA, 120 bp, Artificial Sequence
  ENSG00000145375_54 (sequence is synthesized)
caaataaagaggaatttgttgctgaaagtaatgtgtagctgacactctcattacctgacacaatgggagacattatgtctgggaataagacatctatttccatagcactgtagtcctgca

SEQ ID NO: 393631 - DNA, 120 bp, Artificial Sequence
  ENSG00000145375_55 (sequence is synthesized)
aaggagttggaagttatgaatttttaaagattttagaacattatatctttagtctctcataagccaattatttatatctccacatagcccattattaccattgaaaaggcatgcaattct

SEQ ID NO: 393632 - DNA, 120 bp, Artificial Sequence
  ENSG00000145375_56 (sequence is synthesized)
tctatttgaagcttgttccctttttacaaaagtactagtaaaaatctgagtcatacaaaagagcaggtcaggtgtcactaataacagtttacctcagcttcatctccatgaaggttttac

SEQ ID NO: 393633 - DNA, 120 bp, Artificial Sequence
  ENSG00000145375_57 (sequence is synthesized)
ttctaatcccagagtctcatgtttatgtattacaagagtgtatgaaagctgggcatggtggcacacaccagtagtcccagctactcggtcgggggttgaggtgagaggatcgcttgaact

SEQ ID NO: 393634 - DNA, 120 bp, Artificial Sequence
  ENSG00000145375_58 (sequence is synthesized)
caggagtttgaatccagcctggtcaatgtagcgagatcctatctcttaaaaaaaaaaaaaaaaggggggaacagtgtatgatcctattatttgggtttgtgtgtgatcgaatacatggta

SEQ ID NO: 393635 - DNA, 120 bp, Artificial Sequence
  ENSG00000145375_59 (sequence is synthesized)
tatagttcatggaaaatttaagctcagcaaggaaagaaaatggccagcttcctgtcttaggaagacaatttactttttggcatctgtttggttgaaagtttgcctttgatccagattctt

SEQ ID NO: 393636 - DNA, 120 bp, Artificial Sequence
  ENSG00000145375_60 (sequence is synthesized)
tcggatgtcagggatattcacattgacatgtctttttagtgttccaggagattttagtttgaatagtacaattttttcttcttacaacaaaacttagaacggcttctaacttatttcttc

SEQ ID NO: 393637 - DNA, 120 bp, Artificial Sequence
  ENSG00000145375_61 (sequence is synthesized)
atggccaagaaactaccctaacttatctcgataaatatttagttctgtcttatttctaatgtgtaaaacaggttttaaaaataatatatagattttgcatttataaaaaaagatttaatt

SEQ ID NO: 393638 - DNA, 120 bp, Artificial Sequence
  ENSG00000145375_62 (sequence is synthesized)
tatagaaccaaacttgaacatatgtttaatttagcctaatcagaaggttacagaaaaagttgctgtaaagatagaataaaggtattgtactggtctgtttttactgaagttccagaatgt

SEQ ID NO: 393639 - DNA, 120 bp, Artificial Sequence
  ENSG00000145375_63 (sequence is synthesized)
gaggttattagagtcttggcttattgtgtcatgttttcctgaatgcttcctttgaagatgagcacacaccaaagcatcctttgatattatgtatggattaaattaacactgctttccaaa

SEQ ID NO: 393640 - DNA, 120 bp, Artificial Sequence
  ENSG00000145384_0 (sequence is synthesized)
atctctagctgcctagaggctgactcaactgaaatcatggcgtttgacagcacttggaaggtagaccggagtgaaaactatgacaagttcatggaaaaaatgggtgttaatatagtgaaa

SEQ ID NO: 393641 - DNA, 120 bp, Artificial Sequence
  ENSG00000145384_1 (sequence is synthesized)
aggaagcttgcagctcatgacaatttgaagctgacaattacacaagaaggaaataaattcacagtcaaagaatcaagcacttttcgaaacattgaagttgtttttgaacttggtgtcacc

SEQ ID NO: 393642 - DNA, 120 bp, Artificial Sequence
  ENSG00000145384_2 (sequence is synthesized)
tttaattacaatctagcagacggaactgaactcagggggacctggagccttgagggaaataaacttattggaaaattcaaacggacagacaatggaaacgaactgaatactgtccgagaa

SEQ ID NO: 393643 - DNA, 120 bp, Artificial Sequence
  ENSG00000145384_3 (sequence is synthesized)
attataggtgatgaactagtccagacttatgtatatgaaggagtagaagccaaaaggatctttaaaaaggattgagcattattcttggcgcacagtccaaaatacaaattggacagaaga

SEQ ID NO: 393644 - DNA, 120 bp, Artificial Sequence
  ENSG00000145384_4 (sequence is synthesized)
tctatattgtaccagaactatttatttcaccccatcaagtataaggttactgattgattggtccttttataaacattggtatatttccattcatgccaaagcaaaagaagtaaaagctaa

SEQ ID NO: 393645 - DNA, 120 bp, Artificial Sequence
  ENSG00000145384_5 (sequence is synthesized)
ttaggatttaatttgttttatattctctaagatatatatttactaaaagaatttgtgacattttaaaaaacaaaaataaatattgcgtccatgttgctttatatgtagccttgcctttta

SEQ ID NO: 393646 - DNA, 120 bp, Artificial Sequence
  ENSG00000145384_6 (sequence is synthesized)
tttaaaagaaaaagtatgtgaatatgaattgacagactgttttcgtagagagagggtcttactctttcactcaggctggaatgtagtggagagatcatagctcactgtaacctcaaactc

SEQ ID NO: 393647 - DNA, 120 bp, Artificial Sequence
  ENSG00000145384_7 (sequence is synthesized)
ctgtaacctcaaactcctggactcatgcaatcttcctgcctcaggcttctgagtagctaggactatgggtacattccacagtgcccagctaatttttgttttgttttctttttatttttt

SEQ ID NO: 393648 - DNA, 120 bp, Artificial Sequence
  ENSG00000145384_8 (sequence is synthesized)
caatcctcctgcctcagcctctcaagttgttttttttctttacatttgataaactaaaagcataggctgcatatgagtctttaacatcttgaactggttgtgaataattttctggcactg

SEQ ID NO: 393649 - DNA, 120 bp, Artificial Sequence
  ENSG00000145384_9 (sequence is synthesized)
aatatatgctcaaccagaaaacttagaaataagaaacacaaatgtaaaataagtatttccataactcataatccagagataattgccattctgattttgatagatatcctctcagctctc

SEQ ID NO: 393650 - DNA, 120 bp, Artificial Sequence
  ENSG00000145384_10 (sequence is synthesized)
ttccctgggggcagatatttcccaatacataccactttgaataggatgataggaaataaatgatgtactacattaaattaaattattgtattacatttttgtacacatcagtcattccca

SEQ ID NO: 393651 - DNA, 120 bp, Artificial Sequence
  ENSG00000145384_11 (sequence is synthesized)
cgcttggctgaaaatcaggatcatctgagaaacttaaacaatttctgcattcttaatctccactgttattctattatatcagaatcgctaatagaaccaagaattctagaaaatttcctg

SEQ ID NO: 393652 - DNA, 120 bp, Artificial Sequence
  ENSG00000145384_12 (sequence is synthesized)
gtgattctgatgcagcctgtccactaacttgtctttgagaacaatggagatatcagttatcaatgttatttttaaccacccccttcttttttgttgttgtgggttttttcacataaacac

SEQ ID NO: 393653 - DNA, 120 bp, Artificial Sequence
  ENSG00000145384_13 (sequence is synthesized)
atacattgccaattttccagggctcaaaaagtttccttttattcatattttcacatgacgtaaaattttatgtgcttcacataattgtattttagcagggtacatattaggggatggaga

SEQ ID NO: 393654 - DNA, 120 bp, Artificial Sequence
  ENSG00000145384_14 (sequence is synthesized)
gggggtacaatttttaagcatttgcagctgcaactctatagacttttgacaaattctttttcacactgatgtagataacagcttaacatttacatagttcttactacttgccacacactg

SEQ ID NO: 393655 - DNA, 120 bp, Artificial Sequence
  ENSG00000145384_15 (sequence is synthesized)
ttctaagtggtatatacatatgacatatatattaaaatgtaggaagaaaaatgtttgagtacctgatgaaaatgaatagagagtatgtaatctttgaaagctgaatactgcgtgttctca

SEQ ID NO: 393656 - DNA, 120 bp, Artificial Sequence
  ENSG00000145384_16 (sequence is synthesized)
cttataagtgggagctaaataatgtatacacatggacacaccagagtgtagaataatagacactggagacttggaagagttggagggttggcagggggcgatgataatttacttaatggg

SEQ ID NO: 393657 - DNA, 120 bp, Artificial Sequence
  ENSG00000145384_17 (sequence is synthesized)
tacaatgtacattattcagggggtgatggttacagcccagactttaccactatgcaatatatcaatgtaacaaaactatacttgtactccttaaatttatataaaaataccttaaatcta

SEQ ID NO: 393658 - DNA, 120 bp, Artificial Sequence
  ENSG00000145386_0 (sequence is synthesized)
ggcgggctgctcgctgcatctctgggcgtctttggctcgccacgctgggcagtgcctgcctgcgcctttcgcaacctcctcggccctgcgtggtctcgagctgggtgagcgagcgggcgg

SEQ ID NO: 393659 - DNA, 120 bp, Artificial Sequence
  ENSG00000145386_1 (sequence is synthesized)
gctggtaggctggcctgggctgcgaccggcggctacgactattctttggccgggtcggtgcgagtggtcggctgggcagagtgcacgctgcttggcgccgcaggctgatcccgccgtcca

SEQ ID NO: 393660 - DNA, 120 bp, Artificial Sequence
  ENSG00000145386_2 (sequence is synthesized)
ctcccgggagcagtgatgttgggcaactctgcgccggggcctgcgacccgcgaggcgggctcggcgctgctagcattgcagcagacggcgctccaagaggaccaggagaatatcaacccg

SEQ ID NO: 393661 - DNA, 120 bp, Artificial Sequence
  ENSG00000145386_3 (sequence is synthesized)
gaaaaggcagcgcccgtccaacaaccgcggacccgggccgcgctggcggtactgaagtccgggaacccgcggggtctagcgcagcagcagaggccgaagacgagacgggttgcacccctt

SEQ ID NO: 393662 - DNA, 120 bp, Artificial Sequence
  ENSG00000145386_4 (sequence is synthesized)
aaggatcttcctgtaaatgatgagcatgtcaccgttcctccttggaaagcaaacagtaaacagcctgcgttcaccattcatgtggatgaagcagaaaaagaagctcagaagaagccagct

SEQ ID NO: 393663 - DNA, 120 bp, Artificial Sequence
  ENSG00000145386_5 (sequence is synthesized)
gaatctcaaaaaatagagcgtgaagatgccctggcttttaattcagccattagtttacctggacccagaaaaccattggtccctcttgattatccaatggatggtagttttgagtcacca

SEQ ID NO: 393664 - DNA, 120 bp, Artificial Sequence
  ENSG00000145386_6 (sequence is synthesized)
catactatggacatgtcaattatattagaagatgaaaagccagtgagtgttaatgaagtaccagactaccatgaggatattcacacataccttagggaaatggaggttaaatgtaaacct

SEQ ID NO: 393665 - DNA, 120 bp, Artificial Sequence
  ENSG00000145386_7 (sequence is synthesized)
aaagtgggttacatgaagaaacagccagacatcactaacagtatgagagctatcctcgtggactggttagttgaagtaggagaagaatataaactacagaatgagaccctgcatttggct

SEQ ID NO: 393666 - DNA, 120 bp, Artificial Sequence
  ENSG00000145386_8 (sequence is synthesized)
gtgaactacattgataggttcctgtcttccatgtcagtgctgagaggaaaacttcagcttgtgggcactgctgctatgctgttagcctcaaagtttgaagaaatataccccccagaagta

SEQ ID NO: 393667 - DNA, 120 bp, Artificial Sequence
  ENSG00000145386_9 (sequence is synthesized)
gcagagtttgtgtacattacagatgatacctacaccaagaaacaagttctgagaatggagcatctagttttgaaagtccttacttttgacttagctgctccaacagtaaatcagtttctt

SEQ ID NO: 393668 - DNA, 120 bp, Artificial Sequence
  ENSG00000145386_10 (sequence is synthesized)
acccaatactttctgcatcagcagcctgcaaactgcaaagttgaaagtttagcaatgtttttgggagaattaagtttgatagatgctgacccatacctcaagtatttgccatcagttatt

SEQ ID NO: 393669 - DNA, 120 bp, Artificial Sequence
  ENSG00000145386_11 (sequence is synthesized)
atggaccttcaccagacctacctcaaagcaccacagcatgcacaacagtcaataagagaaaagtacaaaaattcaaagtatcatggtgtttctctcctcaacccaccagagacactaaat

SEQ ID NO: 393670 - DNA, 120 bp, Artificial Sequence
  ENSG00000145386_12 (sequence is synthesized)
ctgtaacaatgaaagactgcctttgttttctaagatgtaaatcactcaaagtatatggtgtacagtttttaacttaggttttaattttacaatcatttctgaatacagaagttgtggcca

SEQ ID NO: 393671 - DNA, 120 bp, Artificial Sequence
  ENSG00000145386_13 (sequence is synthesized)
agtacaaattatggtatctattactttttaaatggttttaatttgtatatcttttgtatatgtatctgtcttagatatttggctaattttaagtggttttgttaaagtattaatgatgcc

SEQ ID NO: 393672 - DNA, 120 bp, Artificial Sequence
  ENSG00000145386_14 (sequence is synthesized)
agctgtcaggataataaattgatttggaaaactttgcaagtcaaatttaacttcttcaggattttgcttagtaaagaagtttacttggtttactatataatgggaagtgaaaagccttcc

SEQ ID NO: 393673 - DNA, 120 bp, Artificial Sequence
  ENSG00000145386_15 (sequence is synthesized)
tctaaaattaaagtaggtttaggaaaacagaccctcaaattctgacattcattttcctaagcaactggatcaatttgctgacttgggcataatctaatctaagcatatctgaatacagta

SEQ ID NO: 393674 - DNA, 120 bp, Artificial Sequence
  ENSG00000145386_16 (sequence is synthesized)
ttcagagatagatacagtagagattccccagactttttcgctctttgtaaaacctgtttgtttaggttttgcgaggtaaactcaacagaggttgggagtggaagagggtgggaagcttat

SEQ ID NO: 393675 - DNA, 120 bp, Artificial Sequence
  ENSG00000145386_17 (sequence is synthesized)
atgcaaattaacagacgagaaatgctccagaaggtttattattttaaagcacattaaaaacaaaaaactatttttaaaatcctgctagattttataatggatttgtgaataaaaaatacc

SEQ ID NO: 393676 - DNA, 120 bp, Artificial Sequence
  ENSG00000145386_18 (sequence is synthesized)
cagggttctcagaatggaataaatatcccttttaatagttatatatacagatatacaactgttagctttaattggcagctctcttcttttttcttcttttcactggctttttacttggtg

SEQ ID NO: 393677 - DNA, 120 bp, Artificial Sequence
  ENSG00000145386_19 (sequence is synthesized)
ctttttcttgttttgcactggtggtctgtgttctgtgaataaagcaaagtaagaatttactaagagtatgttaagttttggattattgaaataagaggcatttcttagttttccagtagg

SEQ ID NO: 393678 - DNA, 120 bp, Artificial Sequence
  ENSG00000145386_20 (sequence is synthesized)
atctaaaatgtgtcagctatgagtaagactggcatccaagaagtttatattatagatttaggtcctaatttttataaatcacaaggtaaaaaaatcacagaacagatggatctctaatga

SEQ ID NO: 393679 - DNA, 120 bp, Artificial Sequence
  ENSG00000145386_21 (sequence is synthesized)
aaaagggatgtctttttgtttatagtcatgtggcaagatgagagtaaaaccagagagcaaacctctataagtgttgagtatatgtatacatttgaaataaaccagaaatttgttacctta

SEQ ID NO: 393680 - DNA, 120 bp, Artificial Sequence
  ENSG00000145388_0 (sequence is synthesized)
aagtctctactgaggaaagctatgaggatactctgttcgtaagctcccggtgaattttgttccacagactcggaagaaaggttggataagagttcactggagattgacaagtactcggga

SEQ ID NO: 393681 - DNA, 120 bp, Artificial Sequence
  ENSG00000145388_1 (sequence is synthesized)
tagtgaaaagccggagttggaacatggatagccgcttgcaggagatccgggagcggcagaagttacggcgacagctcctcgcgcagcagttgggagctgaaagtgccgacagcattggtg

SEQ ID NO: 393682 - DNA, 120 bp, Artificial Sequence
  ENSG00000145388_2 (sequence is synthesized)
ccgtgttaaatagcaaagatgagcagagagaaattgctgaaacaagagaaacttgcagggcttcctatgatacctctgctccaaatgcaaaacgtaagtatctggatgaaggagagacag

SEQ ID NO: 393683 - DNA, 120 bp, Artificial Sequence
  ENSG00000145388_3 (sequence is synthesized)
atgaagacaaaatggaagaatataaggatgaactagaaatgcaacaggatgaagaaaatttgccatatgaagaagagatttacaaagattctagtacttttcttaagggaacacagagct

SEQ ID NO: 393684 - DNA, 120 bp, Artificial Sequence
  ENSG00000145388_4 (sequence is synthesized)
taaatccccataatgattactgccaacattttgtagacactggacatagacctcagaatttcatcagggatgtaggtttagctgacagatttgaagaatatcctaaactgagggagctca

SEQ ID NO: 393685 - DNA, 120 bp, Artificial Sequence
  ENSG00000145388_5 (sequence is synthesized)
tcaggctaaaggatgagttaatagctaaatctaacactcctcccatgtacttacaagccgatatagaagcctttgacatcagagaactaacacccaaatttgatgtgattcttctggaac

SEQ ID NO: 393686 - DNA, 120 bp, Artificial Sequence
  ENSG00000145388_6 (sequence is synthesized)
cccctttagaagaatattacagagaaactggcatcactgctaatgaaaaatgctggacttgggatgatattatgaagttagaaattgatgagattgcagcacctcgatcatttatttttc

SEQ ID NO: 393687 - DNA, 120 bp, Artificial Sequence
  ENSG00000145388_7 (sequence is synthesized)
tctggtgtggttctggggaggggttggaccttggaagagtgtgtttacgaaaatggggttacagaagatgtgaagatatttgttggattaaaaccaataaaaacaatcctgggaagacta

SEQ ID NO: 393688 - DNA, 120 bp, Artificial Sequence
  ENSG00000145388_8 (sequence is synthesized)
agactttagatccaaaggctgtctttcagagaacaaaggaacactgcctcatggggatcaaaggaactgtgaagcgtagcacagacggggacttcattcatgctaatgttgacattgact

SEQ ID NO: 393689 - DNA, 120 bp, Artificial Sequence
  ENSG00000145388_9 (sequence is synthesized)
taattatcacagaagaacctgaaattggcaatatagaaaaacctgtagaaatttttcatataattgagcatttttgtcttggtagaagacgccttcatctatttggaagagatagtacaa

SEQ ID NO: 393690 - DNA, 120 bp, Artificial Sequence
  ENSG00000145388_10 (sequence is synthesized)
ttcgaccaggctggctcacagttggaccaacgcttacaaatagcaactacaatgcagaaacatatgcatcctatttcagtgctcctaattcctacttgactggttgtacagaagaaattg

SEQ ID NO: 393691 - DNA, 120 bp, Artificial Sequence
  ENSG00000145388_11 (sequence is synthesized)
agagacttcgaccaaaatcgcctcctcccaaatctaaatctgaccgaggaggtggagctcccagaggtggaggaagaggtggaacttctgctggccgtggacgagaaagaaatagatcta

SEQ ID NO: 393692 - DNA, 120 bp, Artificial Sequence
  ENSG00000145388_12 (sequence is synthesized)
acttccgaggagaaagaggtggctttagagggggccgtggaggagcacacagaggtggctttccacctcgataattgttgaagacattgaacctattcatcctcctctaaccttctttat

SEQ ID NO: 393693 - DNA, 120 bp, Artificial Sequence
  ENSG00000145388_13 (sequence is synthesized)
tgtaattaaatttcaagtgggagacttaactttagaactcacttccagcttgcactttgctttaatttctctgagctgcaagaatgtcttagcgagccttgcttgcagttgtcacacaca

SEQ ID NO: 393694 - DNA, 120 bp, Artificial Sequence
  ENSG00000145388_14 (sequence is synthesized)
ctgtctggtttttttcaggataaatgaatgattctgccttttgttatgtgcgtgaacagaatggaacaactcaagtagcttcatcttcagagactgaatttattctgatagacttcagct

SEQ ID NO: 393695 - DNA, 120 bp, Artificial Sequence
  ENSG00000145388_15 (sequence is synthesized)
aattacaaaggattttgctaatttttgggaataaataatggaaaaagatccagtctgtggtatcatgctagtgctgacagggccttgatagaatagagttggaaaagatggtaagctttt

SEQ ID NO: 393696 - DNA, 120 bp, Artificial Sequence
  ENSG00000145388_16 (sequence is synthesized)
gtcagggttttaacattttcttgatgaaacaataaaaagaggtaagcttttttcttctttttttttaagttttaaataaactcagatataatttgaatactgaagaaattaagagacttt

SEQ ID NO: 393697 - DNA, 120 bp, Artificial Sequence
  ENSG00000145388_17 (sequence is synthesized)
gaacaaaaactcttcccaaatctaaatttgataggggaggtggagattccaggggtgggtgaaagaagagatagaacttagcaggcagacttaaaaaaaaaaaaaaagtttatcatcata

SEQ ID NO: 393698 - DNA, 120 bp, Artificial Sequence
  ENSG00000145388_18 (sequence is synthesized)
atctcaattttgtggctatgactcctaatcacgcttcctaagaagcaaaggaggacaaatattcatgtgctagatagcactgtggtgtggacttgaacttggattgaccttaaattttat

SEQ ID NO: 393699 - DNA, 120 bp, Artificial Sequence
  ENSG00000145388_19 (sequence is synthesized)
attcctcaaataaaagagaggcagcgacaagatacctcattatcagatgcttggtttatacattttgggactaaaatacttggtgatgaaatgacatacacctttaaacttgttatggag

SEQ ID NO: 393700 - DNA, 120 bp, Artificial Sequence
  ENSG00000145388_20 (sequence is synthesized)
atagtttaatgtaaaaccaactacggaaaaccctcaacttaaggatacagcttggaaattggaactgcaattgccttttattaaaaccatatggtgtgatgtttgtttttaaaattatat

SEQ ID NO: 393701 - DNA, 120 bp, Artificial Sequence
  ENSG00000145388_21 (sequence is synthesized)
aagactttatgctgtcacttctcttgctgtactgtaattcatgttttaaatgaatttgataatgaaattatactattatcattcttgatgaatacttttcttatttttatgatttttcta

SEQ ID NO: 393702 - DNA, 120 bp, Artificial Sequence
  ENSG00000145388_22 (sequence is synthesized)
atgaaactttaaacttttgagatttgagagtctgttttctataagtagaattactgttgttacaaaatgaaaaaggactgacctaaaatcagtctcttcttttggtctgtgatggatttt

SEQ ID NO: 393703 - DNA, 120 bp, Artificial Sequence
  ENSG00000145388_23 (sequence is synthesized)
aatggccgttctgtgctcatatatacctaagatgagattatattacatccaccaaagactcagtttgaagataaggaatgagtgatagaagaaataaggctgagatccttaaaagcctaa

SEQ ID NO: 393704 - DNA, 120 bp, Artificial Sequence
  ENSG00000145388_24 (sequence is synthesized)
ttaatttaactcgcttaacccattagtactatctagtacaagacccctttttttttgctgaaattatggtatattttcaacttcactaattacaaattatctagatttagaactctatat

SEQ ID NO: 393705 - DNA, 120 bp, Artificial Sequence
  ENSG00000145388_25 (sequence is synthesized)
gtcagcattgacctgggaatgaagtcaggatagagaaattccacttgcctgtgatgggtccttagaagtatcagctaaggagtgaccctgtcctatacacagggctctctattacgttcc

SEQ ID NO: 393706 - DNA, 120 bp, Artificial Sequence
  ENSG00000145388_26 (sequence is synthesized)
ataccctgggcctacccaaggtgacattcctgctgtttacatggcataggcacctgtgagatcagtgtcacaatttcatcttagaaagaggtaggtatggctgctttgtcggttgaaagt

SEQ ID NO: 393707 - DNA, 120 bp, Artificial Sequence
  ENSG00000145388_27 (sequence is synthesized)
aaaaaagagcagatggtggaaaaagaatgtaagacccagaatttatccctttgacaatgaatctggcctttttaatagcaggatggaattgattcactagtttttgctaactttcacttt

SEQ ID NO: 393708 - DNA, 120 bp, Artificial Sequence
  ENSG00000145388_28 (sequence is synthesized)
cagtaaaggttgaggtgttgtttttgcaatgactgtgtattcattgaggaaaggtttccaatgaaatttcattactctgacctcttctaatttttggtcttctttatatttacatgtctt

SEQ ID NO: 393709 - DNA, 69 bp, Artificial Sequence
  ENSG00000145388_29 (sequence is synthesized)
cctcttctaatttttggtcttctttatatttacatgtcttacattccacaaaattatttagaatgtggg

SEQ ID NO: 393710 - DNA, 62 bp, Artificial Sequence
  ENSG00000145388_30 (sequence is synthesized)
gagaccagcctgaccaatacgcctgtaatccccgctactcgggaggctgtggcaggagaatt

SEQ ID NO: 393711 - DNA, 71 bp, Artificial Sequence
  ENSG00000145388_31 (sequence is synthesized)
tatagaaataaatttttagttgctttatgcactaattccttactggggatagaagctaattattgtgaaat

SEQ ID NO: 393712 - DNA, 120 bp, Artificial Sequence
  ENSG00000145388_32 (sequence is synthesized)
ctaattccttactggggatagaagctaattattgtgaaataacctagtttagaagttagaagatcagcatgtctgagtttttacagaattataattcatggtattccaaaccaactgttg

SEQ ID NO: 393713 - DNA, 120 bp, Artificial Sequence
  ENSG00000145388_33 (sequence is synthesized)
ttatttatttccagtgagaaccattttcccactgaccttcctcctttcagaggatggggattaggaggcccaaagtactgattgagtaggaatacttttttactcttcttcactgtggag

SEQ ID NO: 393714 - DNA, 120 bp, Artificial Sequence
  ENSG00000145388_34 (sequence is synthesized)
aaagaagagggcaggtagttgatgatgtcaggagaacagattttatggtgtggaataccatacctaaacacaaatgaatcagattagaccacagaattgtgatgatggcagtcagaatgt

SEQ ID NO: 393715 - DNA, 120 bp, Artificial Sequence
  ENSG00000145388_35 (sequence is synthesized)
aatacggtcatcatgaaacagcacagtgtgagaggtcaaggtgtcaacctgggaagtgagaatcaagcaggagtgtggcatggcaaccaactcacagatccagagttgagagggatcact

SEQ ID NO: 393716 - DNA, 120 bp, Artificial Sequence
  ENSG00000145388_36 (sequence is synthesized)
actgcagcagttctgctctgttactctggtaagtagtagagccactttatgagcccttatttcctatctcccttattctgaggccaggtcagtgatatgctatagtttcatttaagttaa

SEQ ID NO: 393717 - DNA, 120 bp, Artificial Sequence
  ENSG00000145388_37 (sequence is synthesized)
tggagtataaagatgggatacttgggagctatattgtgcatcagggtgtcacagctgctactaggagttactccttttcatgtcttttaaaatactttctacccatcttaattgctaaat

SEQ ID NO: 393718 - DNA, 120 bp, Artificial Sequence
  ENSG00000145388_38 (sequence is synthesized)
tatctttcagttagttacagcgcttaatttaaaacctgtactgttttcatcctgaatttagaacataagatttagcctttgaagtatagtttcagactttactaatttgtttaatataat

SEQ ID NO: 393719 - DNA, 120 bp, Artificial Sequence
  ENSG00000145388_39 (sequence is synthesized)
ccttattaacatgacaaaatgaaagccctgttgggacttagtctaaacagtagtctttgatctgaaagtgtctcatattttgtgatctattagaaacataaacctttgcttatgcagaag

SEQ ID NO: 393720 - DNA, 120 bp, Artificial Sequence
  ENSG00000145388_40 (sequence is synthesized)
gtctttcttagaacaatcctgtaatcttagggttcatgtgtgactagcattatcctctctttgatgttgggtaatagaggctgaacttttcttgtgtatatatagttagttttgaggcca

SEQ ID NO: 393721 - DNA, 120 bp, Artificial Sequence
  ENSG00000145388_41 (sequence is synthesized)
taaatctaggacttctcaaaagattagaacatttatccagtaaactgactccattgaagacttcatttctggaaataccacattgcttctgctctcaataactctatcatttactcgtat

SEQ ID NO: 393722 - DNA, 120 bp, Artificial Sequence
  ENSG00000145388_42 (sequence is synthesized)
aaatattgctagctgtaatgcacagagaaaaactacctcattcaatctagataattgggacatccttttccagtaaaccctttttccactactggataaaatattaaaatgatcagtttg

SEQ ID NO: 393723 - DNA, 120 bp, Artificial Sequence
  ENSG00000145388_43 (sequence is synthesized)
agtgtatgttagagttcatgtttctgtaactaaaggtgctaataaactgaaatcagataaggtaggtttttccaaaaatacttctaaataattgacaacctagaagtcaacaatgtaaaa

SEQ ID NO: 393724 - DNA, 120 bp, Artificial Sequence
  ENSG00000145388_44 (sequence is synthesized)
tgcatatgggactctatattaatagagaagcaggccaagaactttttaatgggataattgtcttctttaggcacattgtttgcatattaacgacatggaaatattttcactcatttactt

SEQ ID NO: 393725 - DNA, 120 bp, Artificial Sequence
  ENSG00000145388_45 (sequence is synthesized)
tcatccatctatctgtgctttttctcactttgatgagttctctcaactcctttctaagaaaagcagagcagagcagcatagagtgcgttagtaaatggccactgactcttggtctcaggc

SEQ ID NO: 393726 - DNA, 120 bp, Artificial Sequence
  ENSG00000145388_46 (sequence is synthesized)
catagcaactatagagagaagagtggggctggagacctcataccctgggtaaagtggacatcacttgtcagctccagctaattgtcaccacagagagaagagggtaagtctgagatgttc

SEQ ID NO: 393727 - DNA, 120 bp, Artificial Sequence
  ENSG00000145388_47 (sequence is synthesized)
atgtgcatttccctacattttagaggttgacaaaatagtttgtgacttttgcttacatttgcattcatagaactaaaaaaaatttaacttggctaacaaaataccacatgcatattttct

SEQ ID NO: 393728 - DNA, 88 bp, Artificial Sequence
  ENSG00000145388_48 (sequence is synthesized)
taacttggctaacaaaataccacatgcatattttctgttacccaggctggggggcagtgataagatcttggctcactgcaacctccgc

SEQ ID NO: 393729 - DNA, 62 bp, Artificial Sequence
  ENSG00000145388_49 (sequence is synthesized)
taattttagtattcctgatccacccaccctggcctcccaaagtgtcaggattacaggcgtga

SEQ ID NO: 393730 - DNA, 120 bp, Artificial Sequence
  ENSG00000145388_50 (sequence is synthesized)
cccaccctggcctcccaaagtgtcaggattacaggcgtgagcctctgcaactggccaacatgcatatttaaattatgcatgcattgtagctgtatactgtgtgaccacatttacttaaaa

SEQ ID NO: 393731 - DNA, 120 bp, Artificial Sequence
  ENSG00000145388_51 (sequence is synthesized)
aagaggaaaaaaggttacttgcttgagacaggaaactatcacctttgaaagcatattaagtagttggcttactttggaacacacagtagactgaaaatgtgaactaatactttaaaattg

SEQ ID NO: 393732 - DNA, 120 bp, Artificial Sequence
  ENSG00000145388_52 (sequence is synthesized)
ccgtataatgatgtcattgcaagccattcatctatccaatgggggaaaatgtggaggtctaggcttgtgttgtcacaaaatacaccttttagataatccttacctgtacagatttttata

SEQ ID NO: 393733 - DNA, 120 bp, Artificial Sequence
  ENSG00000145388_53 (sequence is synthesized)
actgttgttatcataagagaatggctacatcattatcctgccttttctgggtgtttattttgttgtttttgaaagtggacaaaacctcaaagcacaattttgttctgatatatccagttt

SEQ ID NO: 393734 - DNA, 120 bp, Artificial Sequence
  ENSG00000145388_54 (sequence is synthesized)
agtagtttatgctggttaaatgatcaaagtaattgcttaaatgtcttgtggaattagctgtcactttatagtttatgtattgtggtgggtaccttaataataaaaagatttttaatgtaa

SEQ ID NO: 393735 - DNA, 120 bp, Artificial Sequence
  ENSG00000145388_55 (sequence is synthesized)
tatcccgctggcattacgatcttgggcaaatcaagtatcctttctaagtcttcttttcgccaacttcttttatcgtattatcttcaaaaatttgggagctgaaagtgccgacagcattgg

SEQ ID NO: 393736 - DNA, 120 bp, Artificial Sequence
  ENSG00000145390_0 (sequence is synthesized)
ctgggtattggggcgtatgcgcatgctccgctcacagggtcgggctctgggcggcggagaccagccgcctgtgctccagttcccggtgagcctcggtactgtggcagcagtcagtgtgtc

SEQ ID NO: 393737 - DNA, 120 bp, Artificial Sequence
  ENSG00000145390_1 (sequence is synthesized)
tggcgggtgtcggcgtgaagcggggctgggccagcgggaggtagctctgtgggagtggaaggcctgtatttctctacctggaccgcacgctcctcgcgcaaggagggtagagctcaagtt

SEQ ID NO: 393738 - DNA, 90 bp, Artificial Sequence
  ENSG00000145390_2 (sequence is synthesized)
aggggaacaaaacttactctgcaaaagtaatatatgatttacctgctgttgtcataagaattccaaatagacaaactcggtatgcttggg

SEQ ID NO: 393739 - DNA, 120 bp, Artificial Sequence
  ENSG00000145390_3 (sequence is synthesized)
gtcataagaattccaaatagacaaactcggtatgcttgggatttgctttacattctaagtggatttggagaagagacaataaagaataagcagtcaattctataatatatttagaaggag

SEQ ID NO: 393740 - DNA, 90 bp, Artificial Sequence
  ENSG00000145390_4 (sequence is synthesized)
aaagaataagcagtcaattctataatatatttagaaggagaaaagtgccaaggaggaatgaaaaagtagaacaagagacagcatcttggt

SEQ ID NO: 393741 - DNA, 120 bp, Artificial Sequence
  ENSG00000145390_5 (sequence is synthesized)
cctcccgcctcagcttcctgagtagctgagattacagatttgctttgaggtcacattgatatgaaatatggagtcaccttttataacttcacctgggaaagagagagaaaactttcttgt

SEQ ID NO: 393742 - DNA, 120 bp, Artificial Sequence
  ENSG00000145390_6 (sequence is synthesized)
taaaaaaacataaggaaaacaaacaaccaaaggaatcatgccaaatgccaactctacatctttttgtattattaacatattttatgcatcaagacaaatggcttatgcattaaaggggat

SEQ ID NO: 393743 - DNA, 120 bp, Artificial Sequence
  ENSG00000145390_7 (sequence is synthesized)
gattcgttcatcagtatttttagccattaaaaaaaatcgttttcatattaaccttatacagctcccataaaatttaacacatataaacatctttaacgccttgtttaaaatagctttctt

SEQ ID NO: 393744 - DNA, 120 bp, Artificial Sequence
  ENSG00000145390_8 (sequence is synthesized)
ttttagtgcttagaacttcaatgtttatgcaccctattgttacttgtcagagtctttaagagtttataacatcaggaaagatatggacttggaaacttacattattaaaatagactgcag

SEQ ID NO: 393745 - DNA, 120 bp, Artificial Sequence
  ENSG00000145390_9 (sequence is synthesized)
tggatttaattggacaattcaagacatccattttattgtccaaaatattacataaaagtgtacagtttttagcctaaatgcaaacaaagttgcttgaaaatggcatgggtaaaattctta

SEQ ID NO: 393746 - DNA, 120 bp, Artificial Sequence
  ENSG00000145390_10 (sequence is synthesized)
cggaaacctggtggcaatcttggaaaagtttatcagcctggaagtatgctatcactagcccctaccaaaggcttgttaaatgaaccaggacaaaacagctgctttcttaatagcgctgta

SEQ ID NO: 393747 - DNA, 120 bp, Artificial Sequence
  ENSG00000145390_11 (sequence is synthesized)
caggttttatggcaattggatatattccgacgaagcttgcgggttttgactggacatgtttgtcagggagatgcctgtatattttgtgcattgaagacgatatttgcacagttccaacac

SEQ ID NO: 393748 - DNA, 120 bp, Artificial Sequence
  ENSG00000145390_12 (sequence is synthesized)
agtcgagaaaaagcacttccctcagataacataaggcatgctcttgcagaaagtttcaaagatgagcagcgatttcaacttggccttatggatgatgctgcggagtgctttgaaaatatg

SEQ ID NO: 393749 - DNA, 120 bp, Artificial Sequence
  ENSG00000145390_13 (sequence is synthesized)
ttggagaggattcattttcacatagtgccaagcagagatgcagacatgtgtacctctaaatcttgtatcactcaccagaagtttgctatgactctgtatgaacagtgtgtgtgtcgtagc

SEQ ID NO: 393750 - DNA, 120 bp, Artificial Sequence
  ENSG00000145390_14 (sequence is synthesized)
tgtggagcatcgtcagatcctctaccttttacagaatttgtgcggtacatttctacaacagccttatgcaatgaggttgaaagaatgttggaaaggcatgaacgctttaaacctgaaatg

SEQ ID NO: 393751 - DNA, 120 bp, Artificial Sequence
  ENSG00000145390_15 (sequence is synthesized)
tttgcagaattgctacaagcagcaaatacaacagatgactataggaaatgtcctagtaactgtggccaaaaaataaaaattcgccgtgttttaatgaattgcccagagattgttacaatt

SEQ ID NO: 393752 - DNA, 120 bp, Artificial Sequence
  ENSG00000145390_16 (sequence is synthesized)
ggtttagtctgggactccgagcattctgacttgaccgaagctgttgttcggaatctagcaacacatctttatcttcctgggcttttttatagagttactgatgaaaatgccaaaaatagt

SEQ ID NO: 393753 - DNA, 120 bp, Artificial Sequence
  ENSG00000145390_17 (sequence is synthesized)
gaacttaaccttgttggtatgatctgctacaccagccaacattattgtgcctttgcatttcacaccaaaagttccaaatgggtattttttgatgatgcaaatgtgaaagagattggaact

SEQ ID NO: 393754 - DNA, 120 bp, Artificial Sequence
  ENSG00000145390_18 (sequence is synthesized)
agatggaaagatgttgtctccaaatgcattcgatgccactttcagccactacttttgttttatgcaaacccagatggcacagcagtttctactgaggatgcactcaggcaggtcatcagc

SEQ ID NO: 393755 - DNA, 120 bp, Artificial Sequence
  ENSG00000145390_19 (sequence is synthesized)
tggtcacattacaaatctgttgcagaaaatatgggatgtgaaaagcctgtaattcataagtcagataatttaaaagaaaatggatttggtgatcaggcaaagcagagagaaaatcagaaa

SEQ ID NO: 393756 - DNA, 120 bp, Artificial Sequence
  ENSG00000145390_20 (sequence is synthesized)
tttccaactgataatatttcatcatctaatcggagccacagtcacacaggtgtagggaaaggaccagctaagttaagtcacattgatcaaagggaaaagataaaagacatttccagagaa

SEQ ID NO: 393757 - DNA, 120 bp, Artificial Sequence
  ENSG00000145390_21 (sequence is synthesized)
tgtgctctgaaagctattgaacagaaaaacttactttcttcacaaaggaaagatttagagaagggacaaagaaaagatttaggacgacatagagatttggttgatgaagacctttcacat

SEQ ID NO: 393758 - DNA, 120 bp, Artificial Sequence
  ENSG00000145390_22 (sequence is synthesized)
ttccaatctggatcacctcctgccccaaatggttttaaacaacatgggaatccacatctatatcatagtcaaggaaaaggatcatataaacatgaccgagttgtacctcagagtcgagct

SEQ ID NO: 393759 - DNA, 120 bp, Artificial Sequence
  ENSG00000145390_23 (sequence is synthesized)
tctgcacaaataataagttcaagtaaatcccagattcttgctccaggagagaaaataactggcaaagttaagagtgacaatggcactggatatgacacagacagcagccaagattctagg

SEQ ID NO: 393760 - DNA, 120 bp, Artificial Sequence
  ENSG00000145390_24 (sequence is synthesized)
tatgagagaaacattaaatgttgatagtatttttagtgaaagtgaaaaaagacagcatagtccaagacataaaccaaatatcagtaataagcctaaatctagcaaggatccgagttttag

SEQ ID NO: 393761 - DNA, 120 bp, Artificial Sequence
  ENSG00000145390_25 (sequence is synthesized)
taattggccaaaagagaatccaaagcaaaaaggtttaatgaccatatatgaagatgaaatgaagcaggaaataggaagcagaagttcccttgaatctaatggaaaaggagcagagaaaaa

SEQ ID NO: 393762 - DNA, 120 bp, Artificial Sequence
  ENSG00000145390_26 (sequence is synthesized)
taaaggccttgtagagggtaaagtgcatggtgataattggcagatgcaaaggactgagtctggatatgaaagcagtgatcacatcagtaatggttctactaatttggactcacctgttat

SEQ ID NO: 393763 - DNA, 120 bp, Artificial Sequence
  ENSG00000145390_27 (sequence is synthesized)
cgatggaaatggtacagtaatggatatcagtggtgttaaagaaacagtatgcttcagtgaccagattacgacaagcaacctaaataaagaacgtggggactgtacctcccttcagagcca

SEQ ID NO: 393764 - DNA, 120 bp, Artificial Sequence
  ENSG00000145390_28 (sequence is synthesized)
acatcacttagaaggctttagaaaagaactcaggaatttggaagcaggctataaatctcatgaattccacccagaatcacatttacaaataaaaaatcatttgataaaaagatcacatgt

SEQ ID NO: 393765 - DNA, 120 bp, Artificial Sequence
  ENSG00000145390_29 (sequence is synthesized)
acatgaagacaatggaaagttatttccttcatccagtctacaaatacccaaggaccataatgcaagagaacatatccaccagtcagatgaacagaaacttgaaaaaccgaatgaatgcaa

SEQ ID NO: 393766 - DNA, 120 bp, Artificial Sequence
  ENSG00000145390_30 (sequence is synthesized)
attttctgagtggcttaatatagaaaattctgagagaacaggtttgccttttcacgttgataactctgcttctgggaagagagtgaacagtaatgaaccatcttcattatggtcttcaca

SEQ ID NO: 393767 - DNA, 120 bp, Artificial Sequence
  ENSG00000145390_31 (sequence is synthesized)
cctaagaactgttgggttaaagccagaaactgctcctctcatccagcaacaaaatatcatggatcaatgttactttgagaactctctatccacagaatgtataattcggtcagccagcag

SEQ ID NO: 393768 - DNA, 120 bp, Artificial Sequence
  ENSG00000145390_32 (sequence is synthesized)
atctgatgggtgtcagatgccaaaacttttttgccagaatctaccaccccctttgccaccaaagaaatatgctataaccagtgtgccacagtcagagaaaagcgaatctacacctgatgt

SEQ ID NO: 393769 - DNA, 120 bp, Artificial Sequence
  ENSG00000145390_33 (sequence is synthesized)
caaacttacagaggtgtttaaagctacctctcatcttccgaagcacagtttaagtacagcttcagaaccaagtttagaagtgagtacacatatgaatgatgaaagacataaagaaacatt

SEQ ID NO: 393770 - DNA, 120 bp, Artificial Sequence
  ENSG00000145390_34 (sequence is synthesized)
tcaagtgagagaatgttttggcaacacaccaaactgtccatccagctcctcaactaacgattttcaggcaaactcaggtgccattgatgcattttgccaaccagaactagactctatttc

SEQ ID NO: 393771 - DNA, 120 bp, Artificial Sequence
  ENSG00000145390_35 (sequence is synthesized)
tacctgtccaaatgagacagtttcattaactacctatttttcagttgatagctgcatgacggatacatatagattgaaataccatcagaggcccaagctctcttttccagagagcagtgg

SEQ ID NO: 393772 - DNA, 120 bp, Artificial Sequence
  ENSG00000145390_36 (sequence is synthesized)
cttttgtaataattcactatcttagagtgaaaaaggactagacctgtgttacataataatcttggttcaagctgcccttctgaacaaagatataaacctagcatacattgtaatagataa

SEQ ID NO: 393773 - DNA, 120 bp, Artificial Sequence
  ENSG00000145390_37 (sequence is synthesized)
ctggtaaaactgaccaacttttacttctcagaggccatttaaatataataggaacctactgaccaaacctagtgatacataaaattaaagcctgtggcatttttaaagttgttaatcact

SEQ ID NO: 393774 - DNA, 120 bp, Artificial Sequence
  ENSG00000145390_38 (sequence is synthesized)
atacatatgtatgtgtatatgtgtatacacatatataattttatgatcaatatcttagatattttagaaattccctttgaatagtcttggcgtgccgtgaaaaatagaaaatcagggaga

SEQ ID NO: 393775 - DNA, 120 bp, Artificial Sequence
  ENSG00000145390_39 (sequence is synthesized)
tataataattcatttgtcatatgctacagttgaataaaaattaaatttgtccccctattttgtggccagtagactgggaagtattaaactaaccagtactcatgtatggagattataaac

SEQ ID NO: 393776 - DNA, 120 bp, Artificial Sequence
  ENSG00000145390_40 (sequence is synthesized)
tatgctaattgaaaagtaccaggtgatacatagcctggtacttttttgtcaaagaattgctttatgaagaagcactttctaatgggtaaccagaaaagggcttcacccatttgtttttga

SEQ ID NO: 393777 - DNA, 120 bp, Artificial Sequence
  ENSG00000145390_41 (sequence is synthesized)
cttctatgatagtcactgcatatgatccctttaagtgtctttaaaaaaaatgacttatgaatttgatagcatttggggaaaaaaagccttatatgattaacaatttgtaagttttcaaga

SEQ ID NO: 393778 - DNA, 120 bp, Artificial Sequence
  ENSG00000145390_42 (sequence is synthesized)
tcggatggaatttaattttgctcctagaatttttgtcttcagaatatctagttaagataaattaggcctttgactattataggtattcataaatgctactttagccatgtaagttaaaaa

SEQ ID NO: 393779 - DNA, 120 bp, Artificial Sequence
  ENSG00000145390_43 (sequence is synthesized)
gttaaaatacttaaactttagtgtatttatttatctcgttactttttttctaattttatatgaaatgtgaaaggtctttattttggtttggtttactttgggctgctaaccaccagtgtt

SEQ ID NO: 393780 - DNA, 120 bp, Artificial Sequence
  ENSG00000145390_44 (sequence is synthesized)
aggaattaatgtagggcaccctcttattgggaatgtcactgtaattgcctacattttctttgctgtaatattacctgcttataggttgtcaacccattttatctgaatttgaaaatctat

SEQ ID NO: 393781 - DNA, 120 bp, Artificial Sequence
  ENSG00000145390_45 (sequence is synthesized)
ctaggtttccagattaaatttctacctttcatatagagagtttaattttaataaaatgtttaattagagcatccttcccttttattctactttgaacaaatagtaattttaccccaacta

SEQ ID NO: 393782 - DNA, 120 bp, Artificial Sequence
  ENSG00000145390_46 (sequence is synthesized)
cttttcatgaagagtgctttgaaaattaaaggaatttttattattatggtaaccttatgagtaaaaataagttactttaattgctttatttcgttagttgtcattttattttgtactatg

SEQ ID NO: 393783 - DNA, 120 bp, Artificial Sequence
  ENSG00000145390_47 (sequence is synthesized)
ctggtaaactaattgtggtttagaatagttttatgttcactcctgataactgagaaacagaactaaagttttccttacattgctaaatggataaacctcatattcaataaactagtaaat

SEQ ID NO: 393784 - DNA, 120 bp, Artificial Sequence
  ENSG00000145390_48 (sequence is synthesized)
gtagccacttgactgattgcgtaaatcgtgttaaaacattctaaaatgttgtaactaatttaatgtgaatactgttaaacagaaaataattgcttataaaagtctaacttcacccagtta

SEQ ID NO: 393785 - DNA, 120 bp, Artificial Sequence
  ENSG00000145390_49 (sequence is synthesized)
taaactataatagtgagtgatcattactttatattctcgtaagttagaaatacttgaatgccaaattaattttgttttaagaaagcttatttttaacataattttttagtgtggagggtt

SEQ ID NO: 393786 - DNA, 120 bp, Artificial Sequence
  ENSG00000145390_50 (sequence is synthesized)
tgtaaataatgtaaagtttgtaaacctgtatttaaaataccaaagtttttcttcttttataacattgtaagatactagaaaaatgggcttcaagttttttaatagctttcacagtttgtg

SEQ ID NO: 393787 - DNA, 120 bp, Artificial Sequence
  ENSG00000145390_51 (sequence is synthesized)
tagttttttttttctatttggttaagatgtgagttggaaatgtattatttgaaacatttaaactaatttttgtatttaacagcagtctcagacatttgtcttttcaactcagttgagttg

SEQ ID NO: 393788 - DNA, 120 bp, Artificial Sequence
  ENSG00000145390_52 (sequence is synthesized)
tagatatcaaatagaaatgtccagttttgcctcttttaagtactgtccagttgaaacctcctgactcatgtactactacacaaactagaaaatgcccatttatttttgttgattcaacac

SEQ ID NO: 393789 - DNA, 120 bp, Artificial Sequence
  ENSG00000145390_53 (sequence is synthesized)
tccagatacagattgatacatatatactaatcattttatttcatgtaaaagttttacatctagggtgcctatttatttttatagatgctttcatccagttataagcttattataactttg

SEQ ID NO: 393790 - DNA, 120 bp, Artificial Sequence
  ENSG00000145390_54 (sequence is synthesized)
taaatatttcagccaacagttgtaatgtttaaaatacttaccttcagaatgttatattttcatgtgaaatcaatttcttctaattcaaaaaaattttaagataaactgatttttaagttt

SEQ ID NO: 393791 - DNA, 120 bp, Artificial Sequence
  ENSG00000145390_55 (sequence is synthesized)
ttaagtgacttttttggcaaagcaattatgaagggagggagggcaaagccatgtgggcgttatggggggaatgtattccaggcaggggaatggccagtgcaaacaatatagagaacagaa

SEQ ID NO: 393792 - DNA, 120 bp, Artificial Sequence
  ENSG00000145390_56 (sequence is synthesized)
gtttgtatagtgtgcaggaatgagaaggaggctgatgtggctggaatgggaaagccaaaggtcaagtagttagatgaggggctgggcagatagtgacattatgatttaattttagaaaga

SEQ ID NO: 393793 - DNA, 120 bp, Artificial Sequence
  ENSG00000145390_57 (sequence is synthesized)
tctctgtctgctctccagaatagacttatatgttactgtgtaaagggtagaagccaggagacaagctgctatttttttaatccacacaagatgtgatgatggccaagactagaattgttg

SEQ ID NO: 393794 - DNA, 120 bp, Artificial Sequence
  ENSG00000145390_58 (sequence is synthesized)
aagtggaggtggtgaaaagtggtcagatcctgaaatatgacagaaaaaggagtcaaagatgacatcaagatatttgttctcagcaactggaaagataaagttgccattggctgagatggg

SEQ ID NO: 393795 - DNA, 120 bp, Artificial Sequence
  ENSG00000145390_59 (sequence is synthesized)
gaggaaggtatagataaagtaagagttcagtctggggctttgtcaaggcaaataaatgttaggttattgctggcttgacataattttcttctggagatcatgtcttaaaagtagactgct

SEQ ID NO: 393796 - DNA, 120 bp, Artificial Sequence
  ENSG00000145390_60 (sequence is synthesized)
gtaagccattttctttaatgaccatgtcctatattctggatacatgtgtatgcttgtcttttgctagttagttactagtggaaactagtgaataggtaaaagcaacatgaaatatagcac

SEQ ID NO: 393797 - DNA, 120 bp, Artificial Sequence
  ENSG00000145390_61 (sequence is synthesized)
ggttttttgttagacacaaagaaatagagcaaaaaagtggaaacattgaaaattacttaaaacttactgtttttttgttggcagtattatagtcttttttcttattaattttattttctg

SEQ ID NO: 393798 - DNA, 120 bp, Artificial Sequence
  ENSG00000145390_62 (sequence is synthesized)
tgttttataaattttctactgtagtcttctctaattcctccatttctagagtgacaatggttttacacatcaaagaatatttattcttcaattataccttccttactataatcctttagc

SEQ ID NO: 393799 - DNA, 120 bp, Artificial Sequence
  ENSG00000145390_63 (sequence is synthesized)
tttataaacacagttacttctgtaatgaaagatatattttttcttttttctgacactatctacttgaagatgaagagtttttttgtattacttcaacttggtataactcttctgtttgct

SEQ ID NO: 393800 - DNA, 120 bp, Artificial Sequence
  ENSG00000145390_64 (sequence is synthesized)
atctagttatctaaaataaaatcttaaatacttctagtaagatgagcagttgtagcatatcatcagaaagtcctcagtgtatctttgaggtgctatattgttagtgaaaagatgttaata

SEQ ID NO: 393801 - DNA, 120 bp, Artificial Sequence
  ENSG00000145390_65 (sequence is synthesized)
tgaagttttactttacagtttgatggctaggactgtgtactattaagaacatatttgcagtgattctgtgctaatatggaattatggatatttctaattttctttatgtagtatttctgt

SEQ ID NO: 393802 - DNA, 120 bp, Artificial Sequence
  ENSG00000145390_66 (sequence is synthesized)
ggtatttcagaaatctaatgaacaagtactgtttgataatcaaaaaaatccatacacataaaagaacaaagagtctcatggctttatcaactattatattagtttcctagggctgttgta

SEQ ID NO: 393803 - DNA, 120 bp, Artificial Sequence
  ENSG00000145390_67 (sequence is synthesized)
acaaagaaccacaaactgggtggcttaaatgacagaaatttattctctcacagttctggaactagaagtccaaaatccaggtgtcagcaggattggttccaactgagggctctgaataga

SEQ ID NO: 393804 - DNA, 120 bp, Artificial Sequence
  ENSG00000145390_68 (sequence is synthesized)
ggctgttcatctttggtgttccttgacttgcagcttcatccttccagcctctgcctctgtcatcattctctctctttctcttcttataatgactgctaccagtcacattggattagggtc

SEQ ID NO: 393805 - DNA, 120 bp, Artificial Sequence
  ENSG00000145390_69 (sequence is synthesized)
caccccagtgacctcatcttaatctgataacattttcaaataccctgttgccaaatacattgacattcataggtctgggacttggacatatgtttttgggagacacaattcaacccataa

SEQ ID NO: 393806 - DNA, 120 bp, Artificial Sequence
  ENSG00000145390_70 (sequence is synthesized)
taggtataatgaatcaggtttaagatgccattatcatttacccagaccattctagtagcctgataaagttattggatgttagaatttgaacaaattccatatagtgtcatccccttttgg

SEQ ID NO: 393807 - DNA, 120 bp, Artificial Sequence
  ENSG00000145390_71 (sequence is synthesized)
gggaaaacacctgttaaataatttatatagcatggtgaagattacctaactaattatgtattgggcttaagttttggaaggagaaaagatagtttgatagtcttgtctagggtaatgaag

SEQ ID NO: 393808 - DNA, 120 bp, Artificial Sequence
  ENSG00000145390_72 (sequence is synthesized)
gagagtggccctggaatcttgccttttaggataaaattattgctggtaaagcactgactcataagaaaacagcagtgacttatttcctttcttttcttttctttctgtctctctctcttt

SEQ ID NO: 393809 - DNA, 120 bp, Artificial Sequence
  ENSG00000145390_73 (sequence is synthesized)
ctgtctctctctctttctcaaaacttctggttcattttaaagttcaaatttaagttttttattttaaaatattttattggaaagtattaataactgatattaagcacttaataaagttaa

SEQ ID NO: 393810 - DNA, 120 bp, Artificial Sequence
  ENSG00000145390_74 (sequence is synthesized)
tatttaagccttacagaaattttaataacagtaaatgttgtaattatccttattttacaggcaaatgtggatatatgtttataactgcacaaatgaattctgaagggacgcataagacat

SEQ ID NO: 393811 - DNA, 120 bp, Artificial Sequence
  ENSG00000145390_75 (sequence is synthesized)
tggtattggttgcctatggggaatataattgatatgggggagacttggttttccttgtatgctcttctatatggtttaaaaaattatttatgaaaattaaatatatactaaaaaagaggg

SEQ ID NO: 393812 - DNA, 120 bp, Artificial Sequence
  ENSG00000145390_76 (sequence is synthesized)
aaattgctgagtttttccttttagctgcactattaactcttttaggaaaaagcagtgatctatcaaattgtattgagatattcagtagatctgctactgaagtacttatttacattggag

SEQ ID NO: 393813 - DNA, 120 bp, Artificial Sequence
  ENSG00000145390_77 (sequence is synthesized)
ttaaaaacacaaatgcagtttgacaaatataaattcttagaaaaagtaagttctactcttttatttggggatataatattttacttatttcatatttgcagtgttgtagggtaatgcagt

SEQ ID NO: 393814 - DNA, 120 bp, Artificial Sequence
  ENSG00000145390_78 (sequence is synthesized)
tgcttttaacaagccataagtgaacttctgagaatttcattcaaagtaaacagttaggagaatataagatcctttgaagtgattctgccagttttctaatttttttctttaagaatttct

SEQ ID NO: 393815 - DNA, 120 bp, Artificial Sequence
  ENSG00000145390_79 (sequence is synthesized)
taagcattgtgaaatatatttatgtatttaaacttttagaaatttatgctgttaaggaaaaaattattcatgacaattgttaaagatggtaaggaagacacttgttacagataggtacag

SEQ ID NO: 393816 - DNA, 120 bp, Artificial Sequence
  ENSG00000145390_80 (sequence is synthesized)
ggagcactgcaatggagtcttgcagttggggagagagattgggctctactctatatactacaagtaaaagcgggaatttatagacaaggatgtgggtgtggttggtggatggaaaattac

SEQ ID NO: 393817 - DNA, 120 bp, Artificial Sequence
  ENSG00000145390_81 (sequence is synthesized)
tagggggcaacattaggaataagagaggattctggccaaactgacctaacaggattcttgttgaaggcaggccagggtgatcagacatcacctggaggatggtgaaggatgaggaaccta

SEQ ID NO: 393818 - DNA, 120 bp, Artificial Sequence
  ENSG00000145390_82 (sequence is synthesized)
atcagatatgaggatgatcagataaggagaatggctgacttgacttagtaggactcttgctaaaattggacaacgtagagacaaacaaggaagtccaaaagttgaggaatagttgaaaaa

SEQ ID NO: 393819 - DNA, 120 bp, Artificial Sequence
  ENSG00000145390_83 (sequence is synthesized)
gaacatggaatagctcgagtggagtttgatcaatgagagaatctttgtcaatattttctgacacctgtatctgaaaatatcaaatagttacttatattaggcccatttagaaaatcaaaa

SEQ ID NO: 393820 - DNA, 120 bp, Artificial Sequence
  ENSG00000145390_84 (sequence is synthesized)
tacttatattaggcccatttagaaaatcaaaactgttgtattacattagaattagtattagtggcaggggcacagtggctcatacctgtaatatcagcactttgagaggctgaggcagga

SEQ ID NO: 393821 - DNA, 80 bp, Artificial Sequence
  ENSG00000145390_85 (sequence is synthesized)
gtcaaggttgcagtgagtcatgatcagctcaaaaaaaaaaattagtactagtattgaattagaaaatttaatataagaaa

SEQ ID NO: 393822 - DNA, 120 bp, Artificial Sequence
  ENSG00000145390_86 (sequence is synthesized)
ggaggaatgaaaaagtagaacaaggcaaatgtggatatatgtttataactgcacaaatgaattctgaagggacgcataagacattggtattggttgcctatggggaatataattgatatg

SEQ ID NO: 393823 - DNA, 120 bp, Artificial Sequence
  ENSG00000145390_87 (sequence is synthesized)
agaaacagcatgagctgttttaaagagctttaaaaagtttgtttcttttaaacacaagtatgtttctgtaaagaaacctaggatattgtagtttatttgatattttagatttccattttg

SEQ ID NO: 393824 - DNA, 120 bp, Artificial Sequence
  ENSG00000145390_88 (sequence is synthesized)
aatagttatttcctgattccaaaaatagcagctttttatttttagaaaatttggaaagtacagaagtttattatcattgttgtgtcactgtcaacaattgattggttttaaagcacagac

SEQ ID NO: 393825 - DNA, 120 bp, Artificial Sequence
  ENSG00000145390_89 (sequence is synthesized)
tgtcaacaattgattggttttaaagcacagacttcaattggtatcatctaagtcattaaggtggttgtttaattcttctttttttggtgggaggggaaggagtctcactctgttgcccag

SEQ ID NO: 393826 - DNA, 82 bp, Artificial Sequence
  ENSG00000145390_90 (sequence is synthesized)
tcccaggttcaagcgattctcctgccttaacttcccaagtagctgggactacagaagacggggtttccccaggctactcttg

SEQ ID NO: 393827 - DNA, 74 bp, Artificial Sequence
  ENSG00000145390_91 (sequence is synthesized)
caggctgttgtttaattcttcaatctatataatgtttataatcccatctctaacatttgtaactcagaactgaa

SEQ ID NO: 393828 - DNA, 120 bp, Artificial Sequence
  ENSG00000145390_92 (sequence is synthesized)
tttataatcccatctctaacatttgtaactcagaactgaagctagtttttactgtcacactcattctcatggaagagatattttccctttagcaaatataaaaaaaatcagccaaataac

SEQ ID NO: 393829 - DNA, 120 bp, Artificial Sequence
  ENSG00000145390_93 (sequence is synthesized)
tttgtgttcgattaattctaaatacatttattatattactgtttaatccttctaacaatgtgtttgtttgatattagctgatatttgaccacatttgttattaaaaggtagatttgcaaa

SEQ ID NO: 393830 - DNA, 120 bp, Artificial Sequence
  ENSG00000145390_94 (sequence is synthesized)
aatcaactgctcatgttttatgaaaatgcttgtttcaataaagacttaaggaaagggccaggtgtagtgtttacacacctgtaatcacagcaccttgggaggctgaggcaggaggattgc

SEQ ID NO: 393831 - DNA, 120 bp, Artificial Sequence
  ENSG00000145390_95 (sequence is synthesized)
ttgcttgagcccaggagttcaatactagcctgagcaacatggaaagatctcatcatctctaggaaacagttttaaaatattagccaggtattgtggcatatgcctgtggtcccagctact

SEQ ID NO: 393832 - DNA, 89 bp, Artificial Sequence
  ENSG00000145390_96 (sequence is synthesized)
aggctgaggtgggaggatttcatgtttgtaccactgcactccatcctgggcaaaagagcaaaaggtcctggctcaaaaaaaaaaaaaaa

SEQ ID NO: 393833 - DNA, 120 bp, Artificial Sequence
  ENSG00000145391_0 (sequence is synthesized)
gggaacacggacagtgcacgacggactttcaagttgctcccggcacaacgggaggtcgggagctcggagcccctacgggcggtccaagtgtccgcgagaagcccgcagcgcccaggaccg

SEQ ID NO: 393834 - DNA, 120 bp, Artificial Sequence
  ENSG00000145391_1 (sequence is synthesized)
cgttgagcgctcggggcgcgccaagccgcacctaagcaaaagagaaacgctgacgggccggaggcgggttggctgggacgcggaatacgcgcggccccggagcgcctttcgttttaagga

SEQ ID NO: 393835 - DNA, 120 bp, Artificial Sequence
  ENSG00000145391_2 (sequence is synthesized)
gccttacttctggaaagggacagggaactgtcaatcagcgagggagggagcgcaccggcgctgggtgatgtcagcggatcagctgctcgataacaaagagagggtattacaggagaaagt

SEQ ID NO: 393836 - DNA, 120 bp, Artificial Sequence
  ENSG00000145391_3 (sequence is synthesized)
tgcagcagcggcagcggccaaggcggcacaccggagcctccgaggcgaggggcaagtgggcgaagggaggggggacgacggctgctgccgcagcagctgaaggccaaggaattgaaaggg

SEQ ID NO: 393837 - DNA, 120 bp, Artificial Sequence
  ENSG00000145391_4 (sequence is synthesized)
ctgtagggggaggcagtgcgagccagccccgactgctcctcctcttcctcctcctcctccaaactcgcgagccccagagctcgctcagccgccgggagcacccagagggacgggaggcag

SEQ ID NO: 393838 - DNA, 120 bp, Artificial Sequence
  ENSG00000145391_5 (sequence is synthesized)
ccgcgcagccccgagctgggcagtgtccccagccgccatggatagcgacgacgagatggtggaggaggcggtggaagggcacctggacgatgacggattaccgcacgggttctgcacagt

SEQ ID NO: 393839 - DNA, 120 bp, Artificial Sequence
  ENSG00000145391_6 (sequence is synthesized)
cacctactcctccacagacagatttgaggggaactttgttcacggagaaaagaacggacgggggaagttcttcttctttgatggcagcaccctggaggggtattatgtggatgatgcctt

SEQ ID NO: 393840 - DNA, 120 bp, Artificial Sequence
  ENSG00000145391_7 (sequence is synthesized)
gcagggccagggagtttacacttacgaagatgggggagttctccagggcacgtatgtagacggagagctgaacggtccagcccaggaatatgacacagatgggagactgatcttcaaggg

SEQ ID NO: 393841 - DNA, 120 bp, Artificial Sequence
  ENSG00000145391_8 (sequence is synthesized)
gcagtataaagataacattcgtcatggagtgtgctggatatattacccagatggaggaagccttgtaggagaagtaaatgaagatggggagatgactggagagaagatagcctatgtgta

SEQ ID NO: 393842 - DNA, 120 bp, Artificial Sequence
  ENSG00000145391_9 (sequence is synthesized)
ccctgatgagaggaccgcactttatgggaaatttattgatggagagatgatagaaggcaaactggctacccttatgtccactgaagaagggaggcctcactttgaactgatgcctggaaa

SEQ ID NO: 393843 - DNA, 120 bp, Artificial Sequence
  ENSG00000145391_10 (sequence is synthesized)
ttcagtgtaccactttgataagtcgacttcatcttgcatttctaccaatgctcttcttccagatccttatgaatcagaaagggtttatgttgctgaatctcttatttccagtgctggaga

SEQ ID NO: 393844 - DNA, 120 bp, Artificial Sequence
  ENSG00000145391_11 (sequence is synthesized)
aggacttttttcaaaggtagctgtgggacctaatactgttatgtctttttataatggagttcgaattacacaccaagaggttgacagcagggactgggcccttaatgggaacaccctctc

SEQ ID NO: 393845 - DNA, 120 bp, Artificial Sequence
  ENSG00000145391_12 (sequence is synthesized)
ccttgatgaagaaacggtcattgatgtgcctgagccctataaccacgtatccaagtactgtgcctccttgggacacaaggcaaatcactccttcactccaaactgcatctacgatatgtt

SEQ ID NO: 393846 - DNA, 120 bp, Artificial Sequence
  ENSG00000145391_13 (sequence is synthesized)
tgtccacccccgttttgggcccatcaaatgcatccgcaccctgagagcagtggaggccgatgaagagctcaccgttgcctatggctatgaccacagcccccccgggaagagtgggcctga

SEQ ID NO: 393847 - DNA, 120 bp, Artificial Sequence
  ENSG00000145391_14 (sequence is synthesized)
agcccctgagtggtaccaggtggagctgaaggccttccaggccacccagcaaaagtgaaaggcctggctttggggttcagagacctggaatagaaacttggatctatgcactacgtttat

SEQ ID NO: 393848 - DNA, 120 bp, Artificial Sequence
  ENSG00000145391_15 (sequence is synthesized)
ctgacaatgggacaaccagggactgctcatgctgtgacgtcacatcctctcaccatgcgttagcaacgactttctcgcatactaactaggtttgactgtattactcataccagatttaaa

SEQ ID NO: 393849 - DNA, 120 bp, Artificial Sequence
  ENSG00000145391_16 (sequence is synthesized)
attagctagccttgcaacaacgtcctactgagaggtattgtcgagcatttgacataagacagcgtgatgttctttggtggttcaagtctaaatctgtaccacattcggagatgccaaatg

SEQ ID NO: 393850 - DNA, 120 bp, Artificial Sequence
  ENSG00000145391_17 (sequence is synthesized)
attagactgaaacagggaaacggggtttttcagtcatttttagtcagtggtttttccatagtgcttttttcctatggccagtgcaaattgtgttagcacacttgcatatgtgccgtatta

SEQ ID NO: 393851 - DNA, 120 bp, Artificial Sequence
  ENSG00000145391_18 (sequence is synthesized)
agggttgacaattactacatctttattctctaaatgtagtataatttgccttttaacctttgatctgtatcttgcaatagaatggctttggtttttttcttagtaaataggagcccactt

SEQ ID NO: 393852 - DNA, 120 bp, Artificial Sequence
  ENSG00000145391_19 (sequence is synthesized)
ctaaagtcatttcacccctcagccctattctctttcttagataccctttacaagagaaaacttccaaatggatttttgcatcaatagcagtgtgtaggtctctctggttctttctatatc

SEQ ID NO: 393853 - DNA, 120 bp, Artificial Sequence
  ENSG00000145391_20 (sequence is synthesized)
atcattttattattatgtcctaatataaagtactggctcatagggccagggtattattatagaatattattctcgcatgtaaacaaagatatctttgctttaagatgtgagaagaaatga

SEQ ID NO: 393854 - DNA, 120 bp, Artificial Sequence
  ENSG00000145391_21 (sequence is synthesized)
atttactttgtttgcattaagttatggaagagttgtaatatatactttaagaaagaagagaagaaaactagtatctctaagcggtaactatggcaattttgcaatattttcagtagtgct

SEQ ID NO: 393855 - DNA, 120 bp, Artificial Sequence
  ENSG00000145391_22 (sequence is synthesized)
agtaattttttcctccttgagtacacattaaatgtacataacatagcgcggtcaggcttgtggcacagtgcattgaattcaaaagtcaaacagcaaatttgaattctaacagaattcaaa

SEQ ID NO: 393856 - DNA, 120 bp, Artificial Sequence
  ENSG00000145391_23 (sequence is synthesized)
aaaaaatttttttagtcagtactactaaggcagacacactgattactaggtacaaatcaaaccttgatgctaaaactcttcatcattgtaatttcaaagcacttacctgcttcaaaacat

SEQ ID NO: 393857 - DNA, 120 bp, Artificial Sequence
  ENSG00000145391_24 (sequence is synthesized)
tgtaaactaagactgaacacctgtatagtttaaaagcaacactatcaatagcatttcagccattttgccagccatgtgtaatcacaactgcagaaataaggagaaaacccctgttttttt

SEQ ID NO: 393858 - DNA, 120 bp, Artificial Sequence
  ENSG00000145391_25 (sequence is synthesized)
agtttagctaattagatctgtaacatcactgggattgctctgaatgaatcctgagagttttgttttttataagcaccctcaccacatgccatagctttgtctcttttagacacctcgatg

SEQ ID NO: 393859 - DNA, 120 bp, Artificial Sequence
  ENSG00000145391_26 (sequence is synthesized)
cagcggctggaaggactggagagcagctgttgtgctgatctgtagctgtcagctgtgattcctgtcacctgagtcagtttggtctggaaagcgaaggccttccaagctgtagcagatagt

SEQ ID NO: 393860 - DNA, 120 bp, Artificial Sequence
  ENSG00000145391_27 (sequence is synthesized)
gagctccagctgatgagagaaggcttcagtggaagaagagtgaggacataggcagaaggaagtttgctatttcttgtcagttgcacattgctttatgaagactacaacaaaagtgcttaa

SEQ ID NO: 393861 - DNA, 120 bp, Artificial Sequence
  ENSG00000145391_28 (sequence is synthesized)
tcccaggctgctcatgactttcatttcaggtggcccttgggcacattgacagagttgcccttcccttctttgcaacaccaggcttcctagagcacccggttgcatgctttgcagctaggt

SEQ ID NO: 393862 - DNA, 120 bp, Artificial Sequence
  ENSG00000145391_29 (sequence is synthesized)
ggcagtggtttcagggagatccagttggatccctgcttgaaagcttaagccaatggttcacccatgagaggaagttgtcagtgcttccaggaagattgcccaccaaaggaactgaatagt

SEQ ID NO: 393863 - DNA, 120 bp, Artificial Sequence
  ENSG00000145391_30 (sequence is synthesized)
aaagagaccgttctatacactgtgacggatgggccagggcctctggacttgcattctgataggtgctttaatttaaatgtgcccaaagggagtgactgtcttcaggagaaagatggcttg

SEQ ID NO: 393864 - DNA, 120 bp, Artificial Sequence
  ENSG00000145391_31 (sequence is synthesized)
cattaacctcgatcaagtgggttgtgcagccaggtcagggaatacggtcagggagaggatagtgctggtcatgcccccgatgcagctatgctctgaatgatttcattcctgagagtgata

SEQ ID NO: 393865 - DNA, 120 bp, Artificial Sequence
  ENSG00000145391_32 (sequence is synthesized)
gcattctggtcctggctgcagtggggtacaatttacgtcctaagtgggggctactctaattatcccattcaaatggaatttttttcaacattggatagaaggaattgaagagttgtaagt

SEQ ID NO: 393866 - DNA, 120 bp, Artificial Sequence
  ENSG00000145391_33 (sequence is synthesized)
agtgattagtctgctaatcagttcttcagatgagatattgaatggtaacactctgagcttaaaactcagcagtgtgtctgtgacctccacgcaaatcagaggaagcaatgcatccacgct

SEQ ID NO: 393867 - DNA, 120 bp, Artificial Sequence
  ENSG00000145391_34 (sequence is synthesized)
gagcctcaccatgtcttcctcccaactctcttcatactctctgtgtcttccagctcttctttctctggccggctctctttcctcttctctctgcatatgtgagaacgcctgggcatcctg

SEQ ID NO: 393868 - DNA, 120 bp, Artificial Sequence
  ENSG00000145391_35 (sequence is synthesized)
ggtaacagcagccccagctgccctctcctgttccctgttccaagtcccctgcactgacctttcttgagtctctctggctctgtgcatgtctttgggactctgctcatctggcttttcctc

SEQ ID NO: 393869 - DNA, 120 bp, Artificial Sequence
  ENSG00000145391_36 (sequence is synthesized)
tgtgtgtgcctctctgtttgcttatgtctctggctctgtcttccccacccctcccctcacacacacacatactcccaaatgtaaggctctgtggcaggttggaatcggagtaaggcttga

SEQ ID NO: 393870 - DNA, 120 bp, Artificial Sequence
  ENSG00000145391_37 (sequence is synthesized)
gattcactgagttctgtaggtagggaaagaagtcaagggagtggaggttctataaggaattaacagctgaggacggaagggtttgtttcccgtttgaacctaaacgcaagtggaaaagaa

SEQ ID NO: 393871 - DNA, 120 bp, Artificial Sequence
  ENSG00000145391_38 (sequence is synthesized)
tactcagaatgtatttttctactttacatctgctggggaaggaaatgtgtcaggaagccgctgcatctggtcatttcatcgcatcagaatcacagcagacgtggaagattccatgtggtg

SEQ ID NO: 393872 - DNA, 120 bp, Artificial Sequence
  ENSG00000145391_39 (sequence is synthesized)
gggaataaagaaataactttatgctctcctgaaaaacagcgggagcctatgtgtgtgtgcgacactgtaatctcaaggagattcactcagagctgtctcagtccaactcctgcatgacca

SEQ ID NO: 393873 - DNA, 120 bp, Artificial Sequence
  ENSG00000145391_40 (sequence is synthesized)
gatcttcccttagcatcttttctgtgatgaaatattatcttgtgttagagttaggaataggaactaacctgtaggagcatgtccccaaatggacatttgaatggactaacaaaaacaact

SEQ ID NO: 393874 - DNA, 120 bp, Artificial Sequence
  ENSG00000145391_41 (sequence is synthesized)
ggaaagactgaatttccgacacaaaggaatgatgggatcaaaaagaaagcagtgaggagttcttgagtcttgtagtacctattcttattttaacttgcttcatccttgatctacctgaga

SEQ ID NO: 393875 - DNA, 120 bp, Artificial Sequence
  ENSG00000145391_42 (sequence is synthesized)
cactaagaaggaaattagttttccaagagctctttgaacctgtctaggactgtagttaaacctatttgccctatgggggttcttcacactcgaaaaactatttccttatcaccaacgacc

SEQ ID NO: 393876 - DNA, 120 bp, Artificial Sequence
  ENSG00000145391_43 (sequence is synthesized)
cacccagaaaggccaatgaggccaaatgtaacaatttttaacatttaaatataactattaaaattgcattaattgtgaacagtgaattaaagggttgtcttctccaggagacagtatgtg

SEQ ID NO: 393877 - DNA, 120 bp, Artificial Sequence
  ENSG00000145391_44 (sequence is synthesized)
gcacttttcgtaaatttcatttaatatataaaaatttaaatcactcactgcaacatgcatttaaaatcttccaagaaggtagaggtatcattttctgttttgctttgttttaaaacagtt

SEQ ID NO: 393878 - DNA, 120 bp, Artificial Sequence
  ENSG00000145391_45 (sequence is synthesized)
gcctcaagcttctgtcttaagagtagtgacttagaatccagatatcttttgttttagaaaaacaagcaaaactatgttgcaagactgacagttgtaatgtttatttgccacagatcaaag

SEQ ID NO: 393879 - DNA, 120 bp, Artificial Sequence
  ENSG00000145391_46 (sequence is synthesized)
gttcacaaagtatatcaaatttacatctacttggggtaccttgatagattattattgtttttcttttatctttcccttcaggaatttggaaactcgttgtcactttttttaattttaaaa

SEQ ID NO: 393880 - DNA, 120 bp, Artificial Sequence
  ENSG00000145391_47 (sequence is synthesized)
atactaaattgtaatagttttcttttgccaaatgtgtgcgtacatattcaaagcaatgaaactatttcaagccatacaaccacaggggtgggaacccttttcacaaattttaatgtgttt

SEQ ID NO: 393881 - DNA, 120 bp, Artificial Sequence
  ENSG00000145391_48 (sequence is synthesized)
gtatgtaaatagatgtttgtatgaaatattttcatgatagaatgaatatatttaaatgaagttgaattattccagtgctacttaaacacattacaaaaattttggtgagaattatctgag

SEQ ID NO: 393882 - DNA, 120 bp, Artificial Sequence
  ENSG00000145391_49 (sequence is synthesized)
tctattgagatgtaatgcagatcaattttgatttttaaaaatcaaaagcctacaataactctgactctcagcaacttcctcggcgttgttgcacctgacgtggagagagctcgtaggctt

SEQ ID NO: 393883 - DNA, 120 bp, Artificial Sequence
  ENSG00000145391_50 (sequence is synthesized)
ccccagtgcctcagccgcttcctggtggaagttaggtgctaatggaggtgtgttcaccttttagtgatatcactgcaggcctttgaggggcctgagagtgaatcagaggcattagagaca

SEQ ID NO: 393884 - DNA, 120 bp, Artificial Sequence
  ENSG00000145391_51 (sequence is synthesized)
ccggtgcagttatctggagcacaatttctttgcagggcagcagaatcagaagccagacttggccatgtgaacctcgaaactcggtttcccggccgccatcaaccgccacccttactgcct

SEQ ID NO: 393885 - DNA, 120 bp, Artificial Sequence
  ENSG00000145391_52 (sequence is synthesized)
agtcacacacgtcagggaggctgccctcagtggagttggggttgagaccccagggtgggacttcacagttttgccagcaatctctaccttctgacttctgcctcgcagagaggaaggaga

SEQ ID NO: 393886 - DNA, 120 bp, Artificial Sequence
  ENSG00000145391_53 (sequence is synthesized)
ggggagcatctggcaaggggcccatttctcagcacagtacatttcctgtctcagctctggaagactatgcacccaagcaccaaacttccaaccagagagagagacgtcctccgataacaa

SEQ ID NO: 393887 - DNA, 120 bp, Artificial Sequence
  ENSG00000145391_54 (sequence is synthesized)
aaatccttgcttcctctgtctgtgactttacacacagttgttcaaagttgttaaatgtcaagagtcaatcacatccctaggacatacctcccaactctcctgactcttatgttattgaaa

SEQ ID NO: 393888 - DNA, 120 bp, Artificial Sequence
  ENSG00000145391_55 (sequence is synthesized)
aaacaaacaaacaaaaactcctttatgatgatattcaacttgagtggggttttttttccactttggtcctggatataatgaaatgatacatattaggataaattttcactgtgtatagta

SEQ ID NO: 393889 - DNA, 120 bp, Artificial Sequence
  ENSG00000145391_56 (sequence is synthesized)
gcaatacgaacacacatgccaatgtatcaacatatctacttggttacattttggtttatgataattaaccttgattcatgtattgggaagctacagggactacgtaatacctgcttatca

SEQ ID NO: 393890 - DNA, 120 bp, Artificial Sequence
  ENSG00000145391_57 (sequence is synthesized)
cataggaaaattatgtccatgattctgagctcccttcttcaaaagtttcctcctgggtgttctatgttctctctttatcctgaaatacatttattaggttgtgaggtatgttgaagaagt

SEQ ID NO: 393891 - DNA, 120 bp, Artificial Sequence
  ENSG00000145391_58 (sequence is synthesized)
agaagccaggggtatgctttcagcatttattgcaaccaaaagttaaccccatcacggttaacgagcatctttggtctcttgtggaatttgaactaaaactatgagccttattcaatatct

SEQ ID NO: 393892 - DNA, 120 bp, Artificial Sequence
  ENSG00000145391_59 (sequence is synthesized)
ataattctatgatttttttaaattatgggaaattaatgaaagatgtttacatgaataatgtttgcccttactgtgttatgaatgagttttttgtagtgtgtctgggtgcatgatgcaaga

SEQ ID NO: 393893 - DNA, 120 bp, Artificial Sequence
  ENSG00000145391_60 (sequence is synthesized)
gagtaggaaaaatgtttctgaaacaaaacttgacaaatatttgtaatgaaagtaaatttaaagattgctataattgcgctatagaaacaatgcaagtattaaacaaaatatacaatcatc

SEQ ID NO: 393894 - DNA, 120 bp, Artificial Sequence
  ENSG00000145391_61 (sequence is synthesized)
aagctggcattcctctttatagtgcagcccaaggactgatgctcataatgatgttcgtgagtaattaagaaaagataaaagcgaatggaatgaactctgcctactgataatggcaattgt

SEQ ID NO: 393895 - DNA, 120 bp, Artificial Sequence
  ENSG00000145391_62 (sequence is synthesized)
cagaacataggcttccctcaagaactcaaaatcgcactctgggagccattttaagatctgaaaagagatacctaataagttgtgccagagaaatcaataaataaagtcaccagagggggg

SEQ ID NO: 393896 - DNA, 120 bp, Artificial Sequence
  ENSG00000145391_63 (sequence is synthesized)
aaaaagaccctcaaaccagcaggacttgattagataaaatatcttttaaaacaatcaggatatttggaattttcttcaggctaatatgggagataagggaagtgaagtgtgggtgtagat

SEQ ID NO: 393897 - DNA, 120 bp, Artificial Sequence
  ENSG00000145391_64 (sequence is synthesized)
aaaaccagactgaccacatgtggataaggatttcagctgggtgatgagtacgagttcatgatcttatatgtgtgtttttatatgtttttgaaatctccacaataaaaaattacaaaaaaa

SEQ ID NO: 393898 - DNA, 120 bp, Artificial Sequence
  ENSG00000145391_65 (sequence is synthesized)
atccgtcctagctcctggacgctggaccgctcctcaactccctgctcagggggagactagctcctcgtattatgttcagtctctacgtttctctacagaaagccctcccaagtcccacgg

SEQ ID NO: 393899 - DNA, 120 bp, Artificial Sequence
  ENSG00000145391_66 (sequence is synthesized)
cagctgggtcttcatctctccactgcacccagaatcacacgctgacccagataaagctcaatgcagtgaacactcttggtctggaggtccaacatcagggagttgccgggactggtttca

SEQ ID NO: 393900 - DNA, 120 bp, Artificial Sequence
  ENSG00000145391_67 (sequence is synthesized)
gacacacggaggaggagacacacagagaaaaggaggcagtgatgtgaccacagaggcagagattgacatgatgcagccgcaagaggcagagttatgcaggcctcacgatgcaactgcttc

SEQ ID NO: 393901 - DNA, 120 bp, Artificial Sequence
  ENSG00000145391_68 (sequence is synthesized)
tggaaaatgcaactgcgtgcatggtgaatcttcagctgccagaacaatcacttctcctggagacagattcattatgaaaggactttaattctggtctgacagactgcttgacattggagt

SEQ ID NO: 393902 - DNA, 120 bp, Artificial Sequence
  ENSG00000145391_69 (sequence is synthesized)
gaattctcaaggcttatcaaaatcatctcgtggaatgatgagttgacttgcacccactgaaacgggggcaaatctccttcaaaagatcatgccaaagactgtgtgggtaccggaaaggct

SEQ ID NO: 393903 - DNA, 120 bp, Artificial Sequence
  ENSG00000145391_70 (sequence is synthesized)
gtgtggcagggaaaaggtttgctctaacctagaagcctgcaaggtcccctctgcacgcccaagcagcgggcccgagttcattatggccagcaaagccaactgacaccacaggaaacagag

SEQ ID NO: 393904 - DNA, 120 bp, Artificial Sequence
  ENSG00000145391_71 (sequence is synthesized)
ctcgtgggacaccccatgacacgaagttttcaacctcattgcttccccctgaagtcaagtttagtcacctgtgctgtgctggaccagccatgaaagtaatgagggaactggatcactcca

SEQ ID NO: 393905 - DNA, 120 bp, Artificial Sequence
  ENSG00000145391_72 (sequence is synthesized)
gggaagcccaggtggaataataggtgtcactcaaaagtacagctttcaacttaaaaaggaaggaaattctgatacatgctacgtggatgaacattgaaggcatgatgctaagtgaaataa

SEQ ID NO: 393906 - DNA, 120 bp, Artificial Sequence
  ENSG00000145391_73 (sequence is synthesized)
gccagtcacaaaacaacaaatattgtatgattccatttatatgcggtacttagactagtcacatttatagaaactgaaagtagaagggagggtggttgccaagggctaggggaaaaaggg

SEQ ID NO: 393907 - DNA, 120 bp, Artificial Sequence
  ENSG00000145391_74 (sequence is synthesized)
aatggagttagtgtgtaatggatgtatttcagttttgctagatgaaaaagttctggagattagttgaacaatgtgaatgtacttactactgagttgcagactgaaaaatggttagtatgg

SEQ ID NO: 393908 - DNA, 120 bp, Artificial Sequence
  ENSG00000145391_75 (sequence is synthesized)
tgtctccaaaaaaaaaaaaaaaaaaaaagttaggatggtaaatttaatgttatgtatacttttccacaattgttaattaattttttaaagtgcagcttctgatggcacacgtatctctcc

SEQ ID NO: 393909 - DNA, 120 bp, Artificial Sequence
  ENSG00000145391_76 (sequence is synthesized)
ttaaagtgcagcttctgatggcacacgtatctctccctcttctttgtctccagaagatgagagggagcatgagacagcagataggatgcgtcatcttattgcatttatttctgtagacca

SEQ ID NO: 393910 - DNA, 120 bp, Artificial Sequence
  ENSG00000145391_77 (sequence is synthesized)
tgcattgaggctgtctgaccttcaattattcattaaacaaatatttactgagttgagtacgtactacatgccaagcattgttctagaggctggagttacagcagtgaacagaaaaagatc

SEQ ID NO: 393911 - DNA, 120 bp, Artificial Sequence
  ENSG00000145391_78 (sequence is synthesized)
tccccagttccctagtcacagggatctcaccttctagcaggtggagaaaaacaataagtaaataagcaagtaagatatatggtatttatatggcaataagagctatggagaaaaataaag

SEQ ID NO: 393912 - DNA, 120 bp, Artificial Sequence
  ENSG00000145391_79 (sequence is synthesized)
caaagaaggaggaagaagaagagtgtttcagggttgtatttttaaataaggtggtcaggggagacctcactgagaggatggtatttgagtaagacttgaatgagattagggagttagcta

SEQ ID NO: 393913 - DNA, 120 bp, Artificial Sequence
  ENSG00000145391_80 (sequence is synthesized)
tttaggtatctgcaggaagagtgtttcagacaaaataaaaagtcagtgcaaaggccctgaggcagaaacatgaatggggtgtttaaggaaaagcaaaggggccattgtggctgaaaaggt

SEQ ID NO: 393914 - DNA, 120 bp, Artificial Sequence
  ENSG00000145391_81 (sequence is synthesized)
aggggccattgtggctgaaaaggtaagcagcagcagagagacagtctaagaagaggttagaaacatcacagaagcagcccagatcatgaaggttgagacggagtctcgctctgtcaccta

SEQ ID NO: 393915 - DNA, 73 bp, Artificial Sequence
  ENSG00000145391_82 (sequence is synthesized)
agtgattcttctgctataggttttattattattattagtagtagtagtagagacagcgtttcaccatgttggc

SEQ ID NO: 393916 - DNA, 120 bp, Artificial Sequence
  ENSG00000145391_83 (sequence is synthesized)
ggccccattatttgtaagagtttgactcatactctgagacagtaactagaggaatgatatgatccaacttccatgttaaaaggatcaccaggggttggaggcgggggtgtcaagggcagg

SEQ ID NO: 393917 - DNA, 120 bp, Artificial Sequence
  ENSG00000145391_84 (sequence is synthesized)
tcaggaagactagtaggactgcaatactccaggcaagagatgctgagagctcagcccaagcaggtagctatggaggtggtaagatgtgggcagattctgggtatattttgaagatagggc

SEQ ID NO: 393918 - DNA, 120 bp, Artificial Sequence
  ENSG00000145391_85 (sequence is synthesized)
caacaggatttactgagagactggaggtaaggctccacagaaagagaaataagagaaacattaaagatgaccgtatcggtttcctggggctgctgtaacacatcaccacaaacttggcgg

SEQ ID NO: 393919 - DNA, 120 bp, Artificial Sequence
  ENSG00000145391_86 (sequence is synthesized)
aacagaaatttattctctcacagttctaaggccaggaagtctgagattaaggggttcttgcttccaggggctctagagcagcagtcctcatccttccggggccggttttgtggaagacca

SEQ ID NO: 393920 - DNA, 120 bp, Artificial Sequence
  ENSG00000145391_87 (sequence is synthesized)
gaagaccatgtttccacggacaggggcaggagtgccgggggagagaggcagcagggtggtgggtgtgtgtgtggatggtttcgggatgaaactgctccacctcagatcatcaaggattag

SEQ ID NO: 393921 - DNA, 120 bp, Artificial Sequence
  ENSG00000145391_88 (sequence is synthesized)
ttagattctcataagagcacgcaacctagatccctcacgtgtgtggttcacaatagggtttgcattcccatgagaatctaatggcactgctctgacaggaggtggagctcaggtggcaat

SEQ ID NO: 393922 - DNA, 120 bp, Artificial Sequence
  ENSG00000145391_89 (sequence is synthesized)
gctcacctcctgctgtgtggcccagttcccaacaggccatggaccagtaccatcgcagcccagaggttgcagacccctgctgtagaggatattctattccttgtctcttccagcttctgg

SEQ ID NO: 393923 - DNA, 120 bp, Artificial Sequence
  ENSG00000145391_90 (sequence is synthesized)
tccagcttctggtggatccaggcgttccttggcttggggttacatgactctagtctctgccttctcctcttttctgtgtcacctgtcccttgtaaggacaactgtcattggatttaggac

SEQ ID NO: 393924 - DNA, 120 bp, Artificial Sequence
  ENSG00000145391_91 (sequence is synthesized)
ccacccagataatccaggatgattccaccatgaaatccttaacttcattaaatctgcaaagaccctttttctggcttacacaaaaatgcttctggttgttttaaaagataaaccagtttt

SEQ ID NO: 393925 - DNA, 120 bp, Artificial Sequence
  ENSG00000145391_92 (sequence is synthesized)
gtttaactttgtttactgcaggcactagaagtgcaattggccctcttgaaatttgggattatttaaaaataaaggctgggagcagtggcttatgcctgaaatcccagcactttgggaggc

SEQ ID NO: 393926 - DNA, 120 bp, Artificial Sequence
  ENSG00000145391_93 (sequence is synthesized)
aaaagatcctttttccaaatcaggtcacattctcagggcctggcgttaggatgtggacatacctttttgtgagccatgattcaactcactacagtgactcttattttaatctgagcaact

SEQ ID NO: 393927 - DNA, 120 bp, Artificial Sequence
  ENSG00000145391_94 (sequence is synthesized)
gtaaagatgaacttgccattaactgagatggagaagaatgccagtttgggagagaagtccaggagctcggtgctggacatgtcagggttgagatgcttgtctgacatccagtggagctga

SEQ ID NO: 393928 - DNA, 120 bp, Artificial Sequence
  ENSG00000145391_95 (sequence is synthesized)
tgagtgggcagctgggtgaataagcctgaagcttgggacagaagtatgggttggagatggaaatacgaaggttcccagatgtggacagcatctaaagccacggacccatggtctcaacca

SEQ ID NO: 393929 - DNA, 120 bp, Artificial Sequence
  ENSG00000145391_96 (sequence is synthesized)
ggggaggagtgtggacagaggagaaaaacatcagggactgagccctggggcacaccaggattcagaggacccagccaagagactgagaaggagcagccggggagagaggaggcaaaacag

SEQ ID NO: 393930 - DNA, 120 bp, Artificial Sequence
  ENSG00000145391_97 (sequence is synthesized)
cagagtgtgaggtcctagaaggcaagggagggaactgctttaaggagaaaggagtgatcaactcacagtagcaaattttcagaactgggcattcaagtaaaagttgaaatttcctatgca

SEQ ID NO: 393931 - DNA, 120 bp, Artificial Sequence
  ENSG00000145391_98 (sequence is synthesized)
gtttcctgtaacaagattgtgcacttttcatgtcactcccctcttatgatgtgggaaaggcagtgacatctgcttaaaatcatcactaatacccttatgttataatgaagcatattttca

SEQ ID NO: 393932 - DNA, 120 bp, Artificial Sequence
  ENSG00000145391_99 (sequence is synthesized)
aagcgtgtcgttaccatttttatcagcatagcttttccttggttccatgttctatgtctacaactcagaagggaaagaaaggcacatgtttcagccccacatggggtcaggagagactgt

SEQ ID NO: 393933 - DNA, 120 bp, Artificial Sequence
  ENSG00000145391_100 (sequence is synthesized)
tatgactgagtcctgagctgctgttgcctggagtcacaccattttcctaatttttagttcctgcggtaaaagtcttgtccttaacagcagcgggggctgtgtgaggaaaatcaatcaggg

SEQ ID NO: 393934 - DNA, 120 bp, Artificial Sequence
  ENSG00000145391_101 (sequence is synthesized)
aaactgttttaaaaggttttaaatgattaccagagcatagtataatcacttcaggaaccaagacaacaatttgacaagtgaaaaactccccaaattccactggcttgcctgaaagcctgt

SEQ ID NO: 393935 - DNA, 120 bp, Artificial Sequence
  ENSG00000145391_102 (sequence is synthesized)
tacaaaaaaacaaacatctgacaaatcaatcaatctagcttaaacatccaaacagagggctttgtcactgagtgagggagaagcagcatgagatgactgggtgggttttccaccaaatgg

SEQ ID NO: 393936 - DNA, 120 bp, Artificial Sequence
  ENSG00000145391_103 (sequence is synthesized)
acatccagaagagacaacttaaatcttgagctgtttgggaggtttttagtgaatgataatgaatggttaaattagagaactgagtgctaaatcctgaagaataaatatgttttgtggaaa

SEQ ID NO: 393937 - DNA, 120 bp, Artificial Sequence
  ENSG00000145391_104 (sequence is synthesized)
atccgtcctagctcctggacgctggaccgctcctcaactccctgctcagggggagactagctcctcgtattatgttcagtctctacgtttctctacagaaagtctggaggtccaacatca

SEQ ID NO: 393938 - DNA, 120 bp, Artificial Sequence
  ENSG00000145391_105 (sequence is synthesized)
ggatatattacccagtaagccgtgtgactgttcactctgctggaaagtaacatactgtgactcttcacaatgaagagtaaaatgtattctgtgttagaacttgggagctgtgaaacctga

SEQ ID NO: 393939 - DNA, 120 bp, Artificial Sequence
  ENSG00000145391_106 (sequence is synthesized)
gagtcaccacagctgacaccaagagtttatgaggcatgccctctcactgttactcactattggcttagattgttggcccttgaatccgttattaattatttttcagcgttgttttggaaa

SEQ ID NO: 393940 - DNA, 120 bp, Artificial Sequence
  ENSG00000145391_107 (sequence is synthesized)
ggagtaattaatcatgattaaaacaaattgagacaaattggttttattgtatcactaataaaggcaaaatatattgcttttaattcttttggcacatagagggagatagtggaaattttc

SEQ ID NO: 393941 - DNA, 120 bp, Artificial Sequence
  ENSG00000145391_108 (sequence is synthesized)
attgttgctattagttttatttcctgtttctcatatgtaaaaaccagtccagcaatttttaatttgggagagcttactgcactgttgttacttgattctacaattccactaactgctttt

SEQ ID NO: 393942 - DNA, 120 bp, Artificial Sequence
  ENSG00000145391_109 (sequence is synthesized)
taaggtattttatggtttatattgtttaaattaaggtgattaaaattaacttacctttgagtatttgatagcattttatgatatttctggagtctattaaagtaaaaagatatggcagaa

SEQ ID NO: 393943 - DNA, 120 bp, Artificial Sequence
  ENSG00000145391_110 (sequence is synthesized)
agccgccgggagcacccagagggacgggaggcagccgcgcagccccgagctgggcagtgtccccagccgccatggatagcgacgacgagatggtggaggaggcggtggaaggttattacc

SEQ ID NO: 393944 - DNA, 120 bp, Artificial Sequence
  ENSG00000145391_111 (sequence is synthesized)
ccaagaaaaagccagtagaataactactgccttcattttcacccacctctgcaaaatcagctcaccagaatgattgggaagacaccaataagggcacctggacgatgacggattaccgca

SEQ ID NO: 393945 - DNA, 120 bp, Artificial Sequence
  ENSG00000145414_0 (sequence is synthesized)
gtgtcttttggctcctccgcgtgtagttacctgagaaacgcgggaagttgggcccaggcagtgttgctgcggttgcctaagttgtttttctatttctggagagagccgtgagcttgtcca

SEQ ID NO: 393946 - DNA, 120 bp, Artificial Sequence
  ENSG00000145414_1 (sequence is synthesized)
ggggccccaatcctgaggccgacccggtttctggcgcggtgcgatggaggtagtggaggccgccgccgctcagctggaaactctgaaattcaatggcaccgactttggagttggggaagg

SEQ ID NO: 393947 - DNA, 120 bp, Artificial Sequence
  ENSG00000145414_2 (sequence is synthesized)
tccggcggctccgtctccgggctctgcccctgtgccagggacacagccgccgctacagtcgtttgaggggtccccggacgctgggcagaccgtggaggttaagcctgccggggagcagcc

SEQ ID NO: 393948 - DNA, 120 bp, Artificial Sequence
  ENSG00000145414_3 (sequence is synthesized)
tctgcagcccgttctgaacgccgtcgcggccgggaccccggcgccgcagccacagccaccggctgaatcgccggcctgcggagactgcgtcacctccccaggagccgcagagcctgcgcg

SEQ ID NO: 393949 - DNA, 120 bp, Artificial Sequence
  ENSG00000145414_4 (sequence is synthesized)
ggcgccggactccttggagacctcggactcggattcggactcggacagtgaaacagattcagatagttcaagttcatcgtcttcctcttcatcttcctcatcgtcgtcttcttcctcttg

SEQ ID NO: 393950 - DNA, 120 bp, Artificial Sequence
  ENSG00000145414_5 (sequence is synthesized)
tatatcacttcctccagtgctgtcagatggagatgatgatttacaaattgagaaggaaaataagaattttcctcttaaaacaaaagatgaattacttcttaatgaactgccttctgttga

SEQ ID NO: 393951 - DNA, 120 bp, Artificial Sequence
  ENSG00000145414_6 (sequence is synthesized)
agaactcactattattctgcctgaagatattgagttaaagcctcttgggatggtttcaagtattattgaacaactagtaataattgaatctatgactaacctacctccagttaatgagga

SEQ ID NO: 393952 - DNA, 120 bp, Artificial Sequence
  ENSG00000145414_7 (sequence is synthesized)
tatgtgttacggtttaattcttcagatcacattgagagtaaaggtattaaaataaaggagactatgtattttgctccatcaatgaaagatttcactcaatatatattcacagaaaaacta

SEQ ID NO: 393953 - DNA, 120 bp, Artificial Sequence
  ENSG00000145414_8 (sequence is synthesized)
aaacaggataagggatcagatgcatcatggaagaatgatcaggaaccaccaccagaggccttagattttagtgatgatgaaaaagagaaggaagccaaacagaggaaaaaatctcagatt

SEQ ID NO: 393954 - DNA, 120 bp, Artificial Sequence
  ENSG00000145414_9 (sequence is synthesized)
caaggccggaaaaaactcaaatctgaatttaatgagcctggtgaagattttactgaagtacatcagaattggaatgctcatagctctgcttcagagcatgcaaaaggatatcgtaacaga

SEQ ID NO: 393955 - DNA, 120 bp, Artificial Sequence
  ENSG00000145414_10 (sequence is synthesized)
gaattcacacgaggattttccagggccagataccctcgatcttgccatggcaggcctccacctcagcatttctataactcagaacatatggtatctcaggagacttcaggatttccttct

SEQ ID NO: 393956 - DNA, 120 bp, Artificial Sequence
  ENSG00000145414_11 (sequence is synthesized)
cagagacaaaataatcccattatgccacaatacccctttcctcttccagtgtttgacatgcataattttcccctccgccctccacccccaccaccacccccacctgtaaacatgggttgg

SEQ ID NO: 393957 - DNA, 120 bp, Artificial Sequence
  ENSG00000145414_12 (sequence is synthesized)
gctacaccaaacatggctgctcatccattacttaacttaccatactccctacccccaccccctccccctccaccactgcctcctccaccctcttctggagatagtaattctcattttgga

SEQ ID NO: 393958 - DNA, 120 bp, Artificial Sequence
  ENSG00000145414_13 (sequence is synthesized)
ccttactattaggtgactatgcatttccagagaaatgtggacttttcatattatgtggtaaggatttttttttttcaagagtgattatggagctagatttttaaaaacactgtaaaatac

SEQ ID NO: 393959 - DNA, 120 bp, Artificial Sequence
  ENSG00000145414_14 (sequence is synthesized)
taaatgattccttctgttgtaagttgatatatatttgtaacctttgtgaaattgtattcatatgaaaatgtcagctcaaattcttgggagaacattaaattatgtaatatttaattaaaa

SEQ ID NO: 393960 - DNA, 120 bp, Artificial Sequence
  ENSG00000145414_15 (sequence is synthesized)
agtcaagtgagtcacacaaactttttggtttccaaatgcatataaaagttacgtttacatgctactttagtttattaagtatgcaatagcattgtgtctaaaaaaaccaatgtgcatatc

SEQ ID NO: 393961 - DNA, 120 bp, Artificial Sequence
  ENSG00000145414_16 (sequence is synthesized)
tcaattggagaatactttactgttcaaaaaataataatgaccctttgagcctgcagtgagttacagtcttttagctgttggaaggtctggactcaagtgctgttggccgctgactaatca

SEQ ID NO: 393962 - DNA, 120 bp, Artificial Sequence
  ENSG00000145414_17 (sequence is synthesized)
gggtagttgttgctaaaagtggcagtttctcctaatagatagcagtgaagtgtgctacattaattggctcttcctttcaccaaagatttctgtgtagcatgtgatgctacttgatagcat

SEQ ID NO: 393963 - DNA, 120 bp, Artificial Sequence
  ENSG00000145414_18 (sequence is synthesized)
cttaatctatagagaaaaaaaaaattcagtcatggctctcagtactccagggattggatcctactttccaaccatatctgaaaagtgaaggctcacctaatagcatcaggtaagaaaaat

SEQ ID NO: 393964 - DNA, 120 bp, Artificial Sequence
  ENSG00000145414_19 (sequence is synthesized)
gaaaccagaaagaaagagacttgtctgaagtcatattagtggggaggagcagatctgaactggtaatagatacattccaaactgctgtgtttttagtatttgtggagacctgcatagcaa

SEQ ID NO: 393965 - DNA, 120 bp, Artificial Sequence
  ENSG00000145414_20 (sequence is synthesized)
cgttggaatctggtcgtttggactttctcattatttggtttctgaataatcatgtagcatattttctcaaagtgaaggatgaatgtatcatctaatgtaagctttttaaaattgtatttg

SEQ ID NO: 393966 - DNA, 120 bp, Artificial Sequence
  ENSG00000145414_21 (sequence is synthesized)
cttggattatattgcctctcaataaagcttttgacttggaactgtgtagtgtgtgggaaataaatggtggagcttctttagtatgttgaattttagtagttcatttgcgaaatgctgtgg

SEQ ID NO: 393967 - DNA, 120 bp, Artificial Sequence
  ENSG00000145414_22 (sequence is synthesized)
tgtttggggatgtttatttccatgcaagcttttcatttgctaatgatgtgaatgaaatagttttcttcctttcctttcctactctttgttatgtgtagaagtattgaataaatgagtcca

SEQ ID NO: 393968 - DNA, 120 bp, Artificial Sequence
  ENSG00000145414_23 (sequence is synthesized)
ttttgaatgaatgaattatggaacattgtcttctgttttttattggctctgataatatatataatttgcttagtccttgatactcttacctttggcacccttttgcatctgatactatga

SEQ ID NO: 393969 - DNA, 120 bp, Artificial Sequence
  ENSG00000145414_24 (sequence is synthesized)
tgaattttaagtctaaactggaagtcagactcatatctgaaggctgattactggcctgtgttaattaaagtcattaagcatttatcaaaaaatgctttatttttataccatgtctaattc

SEQ ID NO: 393970 - DNA, 120 bp, Artificial Sequence
  ENSG00000145414_25 (sequence is synthesized)
aagtgctgggattacaggcatgagccccttgcccagccagtattacagatttttgatacttaccgatttaaccttggccattttagatgtttaaagcaatcgtaaatcatgatctgtgtt

SEQ ID NO: 393971 - DNA, 120 bp, Artificial Sequence
  ENSG00000145414_26 (sequence is synthesized)
tctaattttactgaggtatgaatcaggtttatgcccacttggagggttctatacaggtatgaatcacttaaccagtgaatgatccttgcttagtatctgaattgaaatggaattatgttt

SEQ ID NO: 393972 - DNA, 120 bp, Artificial Sequence
  ENSG00000145414_27 (sequence is synthesized)
tctaattaatgttatgtatttatgtgatttcagttaaggctctgaatattcacttaatgttctgaattaagttttagagtatctatagcatcttattactggaattacatgttttaaacg

SEQ ID NO: 393973 - DNA, 120 bp, Artificial Sequence
  ENSG00000145414_28 (sequence is synthesized)
tgtttagagattcataaacatctcaaatcatatttcttttaaaatccagatattctttttttctttttttgggtaggggatggagttttgctctttctgcccaggctgcaatgcagtggc

SEQ ID NO: 393974 - DNA, 60 bp, Artificial Sequence
  ENSG00000145414_29 (sequence is synthesized)
tggagttttgctctttctgcccaggctgcaatgcagtggcacggtctcagctcaccgcaa

SEQ ID NO: 393975 - DNA, 120 bp, Artificial Sequence
  ENSG00000145414_30 (sequence is synthesized)
ttgtccaggctagtcttgaactcctgacctccagtaatccacccctctctgcctctcaaagtgctgagatttcaggcgtgagccaccgcacctggccaaaatccagatattctaatgaat

SEQ ID NO: 393976 - DNA, 120 bp, Artificial Sequence
  ENSG00000145414_31 (sequence is synthesized)
atccagatattctaatgaatccctcttgtttcggacctaagcattgaagttaccaattacaacaatgcgagttatttgtaaaattggtttgactaggttaattgcaaaattacatctcac

SEQ ID NO: 393977 - DNA, 120 bp, Artificial Sequence
  ENSG00000145414_32 (sequence is synthesized)
ctagttcatggtgtttgttttttccaggtagcttgaactggatcattaagtatcttgggatttaattttgtaatatttgttggtgaaactttgtagtctagaattattgcctggtattga

SEQ ID NO: 393978 - DNA, 120 bp, Artificial Sequence
  ENSG00000145414_33 (sequence is synthesized)
tcatagattaaaattagaaatttgtgaggtttaaacttaaaaagagaaaaaggagaaacattgcgtgatgtgaaaatagaaagcttgcataaaggaaaataagagaaattatgtgctatg

SEQ ID NO: 393979 - DNA, 120 bp, Artificial Sequence
  ENSG00000145414_34 (sequence is synthesized)
aaatgttgggctgcataaaggacctaaaaattacctacggttgtatcatgttcatcttcatagccatttttaatatgccaccgtatactttatggttgaataaatgtatttaatgaatgg

SEQ ID NO: 393980 - DNA, 120 bp, Artificial Sequence
  ENSG00000145414_35 (sequence is synthesized)
tgatcaggaaccaccaccagagaccatggttgactgaaggtaactgaaaccacgaaaagtgacagcacagatgaggggagagtactgtatcctcaaatgatggtatggctggtgatggta

SEQ ID NO: 393981 - DNA, 120 bp, Artificial Sequence
  ENSG00000145414_36 (sequence is synthesized)
acagcaagtctaccagcctagtcaagcattcttatccatagaagagttgccatgggaacctcatggcaacccacagatttcaagtactgtatgttctgcctaaataaataatgaaaagct

SEQ ID NO: 393982 - DNA, 120 bp, Artificial Sequence
  ENSG00000145416_0 (sequence is synthesized)
tattttcagaatttcagaaattgaaaagggataagaggaaggagaaaatgctgggctggtgtgaagcgatagcccgtaaccctcacagaattccaaacaacacgcgaacacccgagatct

SEQ ID NO: 393983 - DNA, 120 bp, Artificial Sequence
  ENSG00000145416_1 (sequence is synthesized)
caggggatttggctgacgcctcacaaacctccacattgaatgaaaaatccccagggcgatctgcaagtcgatcaagtaacatttcaaaagcaagcagcccaacaacagggacagctccca

SEQ ID NO: 393984 - DNA, 120 bp, Artificial Sequence
  ENSG00000145416_2 (sequence is synthesized)
ggagccagtcaaggttgtctgtctgtccatccactcaggacatctgcagaatctgtcactgcgaaggggatgaagagagccccctcatcacaccctgtcgctgcactgggacactgcgct

SEQ ID NO: 393985 - DNA, 120 bp, Artificial Sequence
  ENSG00000145416_3 (sequence is synthesized)
ttgtccaccagtcctgcctccaccagtggataaagagctcagatacacgctgctgtgagctctgcaagtatgacttcataatggagaccaagctcaaacccctccggaagtgggagaaac

SEQ ID NO: 393986 - DNA, 120 bp, Artificial Sequence
  ENSG00000145416_4 (sequence is synthesized)
tacagatgaccacaagtgaaaggaggaaaatattctgctctgtcacattccacgtaatcgcgatcacctgtgtggtttggtctttgtatgtattgatagaccggacagcggaggaaatca

SEQ ID NO: 393987 - DNA, 120 bp, Artificial Sequence
  ENSG00000145416_5 (sequence is synthesized)
agcaaggcaatgacaatggtgtccttgaatggccattttggacaaaactggttgtggtagccattggcttcacaggaggtcttgtcttcatgtacgtacagtgtaaagtctatgttcagt

SEQ ID NO: 393988 - DNA, 120 bp, Artificial Sequence
  ENSG00000145416_6 (sequence is synthesized)
tgtggcgcaggctgaaggcctacaaccgtgtgatctttgtacaaaattgcccagacactgccaaaaaactggagaagaacttctcatgtaatgtaaacacagacatcaaagatgctgtgg

SEQ ID NO: 393989 - DNA, 120 bp, Artificial Sequence
  ENSG00000145416_7 (sequence is synthesized)
tagtgcctgtaccacaaacaggtgcaaattcactgccatctgcagagggtggcccccctgaagttgtatcagtctgatggaacctgttgggagtttcttcaccgaagaatatctttctag

SEQ ID NO: 393990 - DNA, 120 bp, Artificial Sequence
  ENSG00000145416_8 (sequence is synthesized)
ccctcagccactacaaatgacagaagtgatcttgaattatttactcccttcagctcctcctttctcctactgacacatttttcctgactttgttcaaagaggaaaggagaaaaacaaaca

SEQ ID NO: 393991 - DNA, 120 bp, Artificial Sequence
  ENSG00000145416_9 (sequence is synthesized)
gaccaaatgcccaggagcccatgaagtaatagcgtaaagtaaagtatgatatggaaatgtgaagtttgcaagagaatgatttccaagacaattaagaactactggggcaatgaatgcttt

SEQ ID NO: 393992 - DNA, 120 bp, Artificial Sequence
  ENSG00000145416_10 (sequence is synthesized)
taggcagtaatcaaagattaaatggacccatgatactcttcttcacagtaacaggggaaaagttcaagaatacagacttgaattgcgatgtgtattacttctagggccttgtaatgttaa

SEQ ID NO: 393993 - DNA, 120 bp, Artificial Sequence
  ENSG00000145416_11 (sequence is synthesized)
ctgtctcatctggaaataactaacatatttggttttaagcctgaaattgtctgcattatccctaagtcacattggaagtgaacttggaggatgcatattttgatatgctttgacagctaa

SEQ ID NO: 393994 - DNA, 120 bp, Artificial Sequence
  ENSG00000145416_12 (sequence is synthesized)
cagatttgtatggtttagtggagtctggttattttgacagatgcatgttttttttaaatagatgcaatatacatttgaagacattgatatttggaattaattacgtttgtttaagtcacg

SEQ ID NO: 393995 - DNA, 120 bp, Artificial Sequence
  ENSG00000145416_13 (sequence is synthesized)
caaaagattttcagaaaatgttcggatataattagctctgttaaatacccacagaactgttatcaggtcttatatttattttcatctggttcctctaatacagtgctgtccaatagaaac

SEQ ID NO: 393996 - DNA, 120 bp, Artificial Sequence
  ENSG00000145416_14 (sequence is synthesized)
acaacagccacaaatgcaggccacagatgcaaatatttaacttcccagtagccctattttaaaaagtaaaaataaatgtttgtttgttaaaatgaattttgattttttaaaaacactata

SEQ ID NO: 393997 - DNA, 120 bp, Artificial Sequence
  ENSG00000145416_15 (sequence is synthesized)
tgttatttcaacatgtcatcaatataaaaaattgattgattgattgatagtttacatctgtttcttgaaccaagttttcaaaatccagttggtaatttaaaagtacacttcaacttgaat

SEQ ID NO: 393998 - DNA, 120 bp, Artificial Sequence
  ENSG00000145416_16 (sequence is synthesized)
taactatattggatagcacagccgtaaaattagagactaagcttctgctttatttaacagttgttgagtatttcaaaacagtttaattcattcttttatttcaaagtcacaaaagttagt

SEQ ID NO: 393999 - DNA, 120 bp, Artificial Sequence
  ENSG00000145416_17 (sequence is synthesized)
tatgatttttaaaagcattaaattaagtgtcctcattttaaagtcagatgaagttcacatctctaaagggtaaaaatccaaaagtatagaaagataaaacaatcaatctgcctatagcag

SEQ ID NO: 394000 - DNA, 120 bp, Artificial Sequence
  ENSG00000145416_18 (sequence is synthesized)
agttgtgaaataaataaattgttactatgaagtacttacaataggggaataaaattacctatttttgttattaaatcaaatgtgtaaggcttatttcatccatatgaggtgtcaacttga

SEQ ID NO: 394001 - DNA, 120 bp, Artificial Sequence
  ENSG00000145416_19 (sequence is synthesized)
cagatgatgagtaattatgactaagaatctagcccttacttttaaaagctgacaggatttcccttgctcagttagaaaacaaaaatattcaacagattctgtgataagtaattaatcgtt

SEQ ID NO: 394002 - DNA, 120 bp, Artificial Sequence
  ENSG00000145416_20 (sequence is synthesized)
taggtttgacagttgattattgtgttctttgcatattcatgtaaaactgatgtgtgaatgacattgcagtgagctagattaacggtgattatagatacagtagcctgtcaaagaaagatg

SEQ ID NO: 394003 - DNA, 120 bp, Artificial Sequence
  ENSG00000145416_21 (sequence is synthesized)
tcctacattaaaaaaggtgacttatttttgttagctgtcattatttattaacatgaaaaggcaatgatggccataagaaccaaagcatgagtatcacactgcacaaatctgggtatcaca

SEQ ID NO: 394004 - DNA, 120 bp, Artificial Sequence
  ENSG00000145416_22 (sequence is synthesized)
aagatggtataaatattagtagtggctgacactgagtccagatagtcttgattcctagaaataaacaaaaggtaaacaatgtcaattttgtgtgtgtgtatggcgtgtgtgtagtcatgt

SEQ ID NO: 394005 - DNA, 120 bp, Artificial Sequence
  ENSG00000145416_23 (sequence is synthesized)
atatatgcggggaaaatgttaaggtattcagtcaggaaacaaaaggtttaaaactcatctttcttaaaacttgttataagcacagggaaagcaaagttgaggtaactaaactgaaccaaa

SEQ ID NO: 394006 - DNA, 120 bp, Artificial Sequence
  ENSG00000145416_24 (sequence is synthesized)
caaaaattctgtataaataaggatataagtaattaacgttttaaaaaacatgtggaccttaaacaaactgtatattaaattcctcttaaatgcccattttaaatatttaagataaataca

SEQ ID NO: 394007 - DNA, 120 bp, Artificial Sequence
  ENSG00000145416_25 (sequence is synthesized)
tgaataacaaatctgtgggtgatttaaccatggcaccatatccaagggattaaccttaatgcaattttcctgttaattgtcctaagctttttactaatccattttccctgtgggttagta

SEQ ID NO: 394008 - DNA, 120 bp, Artificial Sequence
  ENSG00000145416_26 (sequence is synthesized)
atggcaacatgctgcttacagatattcccggggaaaaacatccagacaccagcaaacaaagaaatgttgatttctcttttgtttgctctgaaagtaaaataattatttactttaattaac

SEQ ID NO: 394009 - DNA, 120 bp, Artificial Sequence
  ENSG00000145416_27 (sequence is synthesized)
atggaaaatattgtttaaattctgtacgaacctaaacaagatacgttgcagggctgatttcacagtggaggatgatcggctaaaataaagcctcatttattaagggctacacttttaaca

SEQ ID NO: 394010 - DNA, 120 bp, Artificial Sequence
  ENSG00000145416_28 (sequence is synthesized)
ctaagaaaacatttctagaataaaaagcaaaggtaagcattattctattaatagtaaaagaggacatgggattttaaaactatacctaaattcttgcaattaacttttatgggcttggac

SEQ ID NO: 394011 - DNA, 120 bp, Artificial Sequence
  ENSG00000145416_29 (sequence is synthesized)
attgttgaaatgagaaaataatataatatagcttcctggcaggttaaaagtcaacacttgattttgctattcttctgactttttgaaaccctgaagttctgaatttcaagcttttaagaa

SEQ ID NO: 394012 - DNA, 120 bp, Artificial Sequence
  ENSG00000145416_30 (sequence is synthesized)
gcttttcagcaatggttgtttgtttatggttcaaacatctgaaataactacctgcatttaaaatctaatgttgattattttctttttacattctgtgtggcaatggaacatttgcccttt

SEQ ID NO: 394013 - DNA, 120 bp, Artificial Sequence
  ENSG00000145416_31 (sequence is synthesized)
caaacaataaaacgatttagctttgtggcagtgcttttttgtagactgactgactatacccttcaaaaagaaaaactgctctacggaatgcaaattttgaggcatgtttacctgctcgtg

SEQ ID NO: 394014 - DNA, 120 bp, Artificial Sequence
  ENSG00000145416_32 (sequence is synthesized)
gaagaaataaaatggaattgaaaaaaaaaggactaaaattgaagaatgaaattacagttgtgttaaaaaccttggctctttataatcatgaatcttcagtattaaaccagacattgatgc

SEQ ID NO: 394015 - DNA, 120 bp, Artificial Sequence
  ENSG00000145416_33 (sequence is synthesized)
tgttaatttttttaaagaactatcactcttatcgtacaggagtaaagattaaattgtaaaagaaagaaattccaattttttaaaaagtaaagcccaaaaggcaattaagcttaagtacaa

SEQ ID NO: 394016 - DNA, 120 bp, Artificial Sequence
  ENSG00000145416_34 (sequence is synthesized)
aaacaaaataaaaatgaacaaaatctaaactaaagtgagcccaacaacctgagatacagcaatgtgtaacctgaaggaagataggtgtagactgaaggagtctttcaaaacaccccagca

SEQ ID NO: 394017 - DNA, 120 bp, Artificial Sequence
  ENSG00000145416_35 (sequence is synthesized)
ttaaatctcactctgcgctgcttctacacgtgattatagtcccagacagacgacctcatggttttttatcttgttttacaaaaggtccttgggtactctttaaaacatctattctttggc

SEQ ID NO: 394018 - DNA, 120 bp, Artificial Sequence
  ENSG00000145416_36 (sequence is synthesized)
aggaaaattagctcattagaacaatgacaccattaagggacattataagggtcctggggctgaggtgggaagatttttctatctgccccatatagtttacccttccttgccttgaaaatg

SEQ ID NO: 394019 - DNA, 120 bp, Artificial Sequence
  ENSG00000145416_37 (sequence is synthesized)
aatattatagaacagagtacagctcttaaaagttattagtatcattattattatagttgttatataatactttaattaagaaagatgaaaaccttttttctttcctaagtcagcccaatg

SEQ ID NO: 394020 - DNA, 120 bp, Artificial Sequence
  ENSG00000145416_38 (sequence is synthesized)
gtgctattttacatatcaacacagttgaaaggaagtactgttattttgggctgcagtgtttcctccacatctaaagaaagcccattttgaaactggatactgcattaaaacaaagaagga

SEQ ID NO: 394021 - DNA, 120 bp, Artificial Sequence
  ENSG00000145416_39 (sequence is synthesized)
aaaattattttaactgtgtgcagtttttgaaattaggcatttgtactattttggttttacataattctcttgcattaacaatttactgttttgtgaatcatgtgtactaaagcaaattaa

SEQ ID NO: 394022 - DNA, 120 bp, Artificial Sequence
  ENSG00000145416_40 (sequence is synthesized)
gaaaaagaaaataattatctgtgaaagactttgtatattaaacaagtgacgcaaaccttagttgtggtttccacaatttttgcctaacagactgatatttgtatttgcaacatccaaaca

SEQ ID NO: 394023 - DNA, 120 bp, Artificial Sequence
  ENSG00000145416_41 (sequence is synthesized)
cacatacattttttaagattttacaagggtctgaacatataattattttaaagcaaacctacgttgactaactcatgacatggtacaaataaataaatacacaaacagagggaaaccaat

SEQ ID NO: 394024 - DNA, 120 bp, Artificial Sequence
  ENSG00000145416_42 (sequence is synthesized)
gaaaataaactatgtggactttcaaacctgctttaaaaaaagagttcaagagaaatcacaatgtaatctaaagcgggactgtctcaagaataagtcttggatatagaaaaataagcatat

SEQ ID NO: 394025 - DNA, 120 bp, Artificial Sequence
  ENSG00000145416_43 (sequence is synthesized)
aacagcatttttctgttcagagataatagtggattcagataattgcatggataataaacattaaaagcaagatattagaatctaagaggtttggtgatagcaaaaaacaaagctgtttcc

SEQ ID NO: 394026 - DNA, 120 bp, Artificial Sequence
  ENSG00000145416_44 (sequence is synthesized)
agaggaggggagaggactggggagccgagccagagccgggctgcctgccacccggctgctcgtccgctagctggggaggagcgctccacccgcaactgacaaaggatgggagaatgcccg

SEQ ID NO: 394027 - DNA, 120 bp, Artificial Sequence
  ENSG00000145416_45 (sequence is synthesized)
cgccccgggatgccggccgcacgcagcctggcggccgcctgagctacttcaccctccgccggtaagtgactgcaaacatcattcattcaatcagcctcactgggagccccttctctccgg

SEQ ID NO: 394028 - DNA, 120 bp, Artificial Sequence
  ENSG00000145416_46 (sequence is synthesized)
ctggtagtcctgggcggcttgtccctgatcccgagcggggcttggcacagcatcagccctggagggcaggcagcaggtgcctttgcctggtgggtccactggggagcgtggctggggttc

SEQ ID NO: 394029 - DNA, 120 bp, Artificial Sequence
  ENSG00000145416_47 (sequence is synthesized)
gcggcgggtgctgccacccaacctgcgggcggcgggctcgcccagtaggcgcctctctggtgagaggaggcggctccagcccgcagcctggggtagttgctactattggcccccagcgcc

SEQ ID NO: 394030 - DNA, 120 bp, Artificial Sequence
  ENSG00000145416_48 (sequence is synthesized)
cgctctgcgcgcgcgccgtttctggcggatccccagtgcgcggcgcgctgtttacaccggcgtggtactagtcacggagccgcacccctcggaaagcgcggagtcgatgacagccacttc

SEQ ID NO: 394031 - DNA, 120 bp, Artificial Sequence
  ENSG00000145416_49 (sequence is synthesized)
acaggctcacgcgctcctagtgtgggcttgaaggggacggggaccgattaccaaaggagagcgctgagtacggaagacacagggcagcctttgtcttgggtttagcgctgatgcgctcaa

SEQ ID NO: 394032 - DNA, 120 bp, Artificial Sequence
  ENSG00000145416_50 (sequence is synthesized)
ccctgagtcgggttcactgcaactgttgtgtccgatttcggttccctgcaaccgccctcctgggcgagagatgtcattgtgttcctgcggccagcgggactgagagctgggacttaagac

SEQ ID NO: 394033 - DNA, 120 bp, Artificial Sequence
  ENSG00000145416_51 (sequence is synthesized)
acaatgctcttaggggagagggggtgctccagtgacaaagcagttcaattatgacttgcagtaaatcatcctttggagaatgcagtactccctggattatttgttcttgcatttctttta

SEQ ID NO: 394034 - DNA, 120 bp, Artificial Sequence
  ENSG00000145416_52 (sequence is synthesized)
actcccctttcaatgtgtttaacattttgaccagaagactctggcctctgctgcacagtgtctcaaacactatttttcccctctttgtttagacctgagcttggcaaagcaaggatatga

SEQ ID NO: 394035 - DNA, 120 bp, Artificial Sequence
  ENSG00000145416_53 (sequence is synthesized)
actcagggcgagtgaagagataaggcatccaatcagggattggccacctgcagccctgccaatatgcccctccaccagatttccgtaatcccagcacgggagactgccagcaatgggaga

SEQ ID NO: 394036 - DNA, 120 bp, Artificial Sequence
  ENSG00000145416_54 (sequence is synthesized)
aattcaatgggcagaaacaaagagaagaacaaggaagtcgagaatgaaaaatccccagggcgatctgcaagtcgatcaagtaacatttcaaaagcaagcagcccaacaacagggacagct

SEQ ID NO: 394037 - DNA, 120 bp, Artificial Sequence
  ENSG00000145416_55 (sequence is synthesized)
aaaatctgagtcataaattacagatattcttgatgaaaattcagaacataggatttattttcaaaaagaaatgtaccccaaaagaactctgagagaatatactcaactgtcctgctgtga

SEQ ID NO: 394038 - DNA, 89 bp, Artificial Sequence
  ENSG00000145416_56 (sequence is synthesized)
aaagaactctgagagaatatactcaactgtcctgctgtgattaaacaagactgctgtattttatggggtttcagactcaagcgatccac

SEQ ID NO: 394039 - DNA, 120 bp, Artificial Sequence
  ENSG00000145416_57 (sequence is synthesized)
gacaaaggatgggagaatgcccgcgccccgggatgccggccgcacgcagcctggcggccgcctgagctacttcaccctccgccgctgaatttggtcaggtggctttagaagcagaaggcg

SEQ ID NO: 394040 - DNA, 120 bp, Artificial Sequence
  ENSG00000145416_58 (sequence is synthesized)
agaatgcccttggcatggacttggcattcttacaaagagtattttgctgtggtcacccaaagggacatactggaacaaaagaggaaaagtgaacagatgctatctggtaacttgtagctg

SEQ ID NO: 394041 - DNA, 120 bp, Artificial Sequence
  ENSG00000145416_59 (sequence is synthesized)
ctatattctctgttctgcattataagcaacatgaccagcagccacgtttgttgtaattttttaaatatgtggaaaaaaagcaagatatcaaccatgtattaccttaaccaagatgccaaa

SEQ ID NO: 394042 - DNA, 120 bp, Artificial Sequence
  ENSG00000145416_60 (sequence is synthesized)
acatctgcagatctgccatcttgcatgacatgtcagaagagtcatttgagtattgcacccctgtcatggtgctgagccctgctaggaaggagtctggtaagaaatcagtaatacaaagac

SEQ ID NO: 394043 - DNA, 120 bp, Artificial Sequence
  ENSG00000145416_61 (sequence is synthesized)
ctaggaggaggagaaaagcctctgagagatatgagcatgctgcagaagaacaaataagagggagaaaaaatgactttcaccttcaaatctcaagccccaggtggagggagctttacacag

SEQ ID NO: 394044 - DNA, 120 bp, Artificial Sequence
  ENSG00000145416_62 (sequence is synthesized)
attcttcagattcatcttccacagatgagagtcattggattcaggcaaaaagaagagcccaggttaaattcagactgtcaagaagaaggaggagaaataataataagccgtgtgaaaact

SEQ ID NO: 394045 - DNA, 120 bp, Artificial Sequence
  ENSG00000145416_63 (sequence is synthesized)
tagctgggtcttccactcctaacggaattgagctcgttgatctgggatccaaaggtaaagagcaacaagagctgattgaatgtgagagttgctctttaaatctccacagaggaaaacata

SEQ ID NO: 394046 - DNA, 120 bp, Artificial Sequence
  ENSG00000145416_64 (sequence is synthesized)
caaggtaccaagaatgcaacccttctctgactcaagggtcctctgaaattaagagatcctcaaggaatcatgagaagagcaaaggcagatatcaccacagagatcctcagctcttgcaaa

SEQ ID NO: 394047 - DNA, 120 bp, Artificial Sequence
  ENSG00000145416_65 (sequence is synthesized)
gtcttaggaaaaatgaaataatgaagaagacattttcagaaacagattccagcactgaaatactgggagttccagaaggcagcaaggacatgaatgatgcagggctccaggtgaataacc

SEQ ID NO: 394048 - DNA, 120 bp, Artificial Sequence
  ENSG00000145416_66 (sequence is synthesized)
tgggagggaccatttgcaaagcagacttgttttagaaatctatttcctttgccaatacgattctcctaatatgctaatatccattaagggtatgtgtcttgtgttgagctcagtgcacaa

SEQ ID NO: 394049 - DNA, 120 bp, Artificial Sequence
  ENSG00000145416_67 (sequence is synthesized)
aatttatctaagtgtttgcagataatccttcctttcttctatgttttatattctagagcttctgattgatatattactttcaatgcttttttaaaagtcagtgtgtgcacgtaatagata

SEQ ID NO: 394050 - DNA, 120 bp, Artificial Sequence
  ENSG00000145416_68 (sequence is synthesized)
taaacatatatatgtatatgcatgcaaaatgcacttgtaattcaatgtaattgaattgatgagaactatgatagcattgtgcttacggaagccagttctcaagaaggttacatgatacat

SEQ ID NO: 394051 - DNA, 120 bp, Artificial Sequence
  ENSG00000145416_69 (sequence is synthesized)
tgccttaaacaacatcaactcatcaaatttcttacaagttatttattaggtaatagaagagaatgatttcttctataaagtgtgtactatttatgtttgcttttatttgggaattggttt

SEQ ID NO: 394052 - DNA, 120 bp, Artificial Sequence
  ENSG00000145416_70 (sequence is synthesized)
aatggcacatgtgtaattagagtaggtagaaataaaaagtactattttccatattgtgcatcaggctgtaagagagaggtaagtgtattttgtatctgtaatgtttgtcttcaaattcct

SEQ ID NO: 394053 - DNA, 120 bp, Artificial Sequence
  ENSG00000145416_71 (sequence is synthesized)
taagactgtgagtcagatacaaagttagtgtctcactcaaagccaccgaagaacagcttgtaaacaatacaaacaaggacaatgaacttatacaattcatgtttgatagctggacttctg

SEQ ID NO: 394054 - DNA, 120 bp, Artificial Sequence
  ENSG00000145416_72 (sequence is synthesized)
gattttagcatgtaacttatttatctttttgcctaactgtagccttacatatatggctgcctcagtttccaagggagagtatgaagaccacagtttaaataatgaatcatcccagagttg

SEQ ID NO: 394055 - DNA, 120 bp, Artificial Sequence
  ENSG00000145416_73 (sequence is synthesized)
ctttttttatttaaattgaatgcaaagcaaaagttataggacattgcctggaaagaaacacaacgagttccagaatgagcagagttgaaatgcaaataagaatattctagcacatatctg

SEQ ID NO: 394056 - DNA, 120 bp, Artificial Sequence
  ENSG00000145416_74 (sequence is synthesized)
attgctggctgaccattgcaattcttcattaattctgtaaattgtggagggagagaatcacattccttgcttttgtggtagcctcaatttttaaaatctgcaaatggtttatagctatca

SEQ ID NO: 394057 - DNA, 120 bp, Artificial Sequence
  ENSG00000145416_75 (sequence is synthesized)
aaaataatgcataaaattcctttaggatatgtgtggtctttttttaacaatggggtaacctgagtgctgcagggtaaccctgtttttctagggcccagaggtgtcaatgccagaaataga

SEQ ID NO: 394058 - DNA, 120 bp, Artificial Sequence
  ENSG00000145416_76 (sequence is synthesized)
aatggaccctgattccttgtcctttgcttcatccgctggacagatgctgagcattgtctgcagtagttaaatggcacattgtactccacgattttccaaatgttttttcttagttctcag

SEQ ID NO: 394059 - DNA, 120 bp, Artificial Sequence
  ENSG00000145416_77 (sequence is synthesized)
ggaactacaaattatttcatagaatctatatatttcttcattttttttctcatgctaaatttacataaaattttcatttcaactttgtcaaatacagtattttaatttgagggccacgat

SEQ ID NO: 394060 - DNA, 120 bp, Artificial Sequence
  ENSG00000145416_78 (sequence is synthesized)
ctaggataataacatattctaattttctcttctttaccatatctatcaccactactcatttttgtttaattaaaaaacatgctgctgagaagaaacttgaaaagtctttttattccaccg

SEQ ID NO: 394061 - DNA, 120 bp, Artificial Sequence
  ENSG00000145416_79 (sequence is synthesized)
ccagcttttgtagtatctagtataccctgtcaatacaactttcatcctttgttaatattccattctcaataatttacaactctcttaggaaatcttatttttttcctcaacaaacacact

SEQ ID NO: 394062 - DNA, 120 bp, Artificial Sequence
  ENSG00000145416_80 (sequence is synthesized)
aacaaacacacttataaaccagagaaaggcagcaaatatgtctatctttttaaatattcatgataatggaccaggcacggtggcttacacctggaatctcagcactttgggaggctgagg

SEQ ID NO: 394063 - DNA, 120 bp, Artificial Sequence
  ENSG00000145416_81 (sequence is synthesized)
aggagtttgagaccaacctgggcaacaaagtgaaatcttgtctctacaaaaaagttaaaaaaaaaaaattaacctggcatggtagcacaaacctgtagttccagctactcaagaggctga

SEQ ID NO: 394064 - DNA, 120 bp, Artificial Sequence
  ENSG00000145416_82 (sequence is synthesized)
gaggctgaggaaggaggatcccttgagcctaggatttcaaggttccagtgagctttgattgcaccactgcagtcaagcctgagtgacagagccatactttgtctccaaaaaaaaaaaaaa

SEQ ID NO: 394065 - DNA, 120 bp, Artificial Sequence
  ENSG00000145423_0 (sequence is synthesized)
cagcaacggctcattctgctcccccgggtcggagccccccggagctgcgcgcgggcttgcagcgcctcgcccgcgctgtcctcccggtgtcccgcttctccgcgccccagccgccggctg

SEQ ID NO: 394066 - DNA, 120 bp, Artificial Sequence
  ENSG00000145423_1 (sequence is synthesized)
gctgccagcttttcggggccccgagtcgcacccagcgaagagagcgggcccgggacaagctcgaactccggccgcctcgcccttccccggctccgctccctctgccccctcggggtcgcg

SEQ ID NO: 394067 - DNA, 120 bp, Artificial Sequence
  ENSG00000145423_2 (sequence is synthesized)
cgcccacgatgctgcagggccctggctcgctgctgctgctcttcctcgcctcgcactgctgcctgggctcggcgcgcgggctcttcctctttggccagcccgacttctcctacaagcgca

SEQ ID NO: 394068 - DNA, 120 bp, Artificial Sequence
  ENSG00000145423_3 (sequence is synthesized)
gcaattgcaagcccatccctgccaacctgcagctgtgccacggcatcgaataccagaacatgcggctgcccaacctgctgggccacgagaccatgaaggaggtgctggagcaggccggcg

SEQ ID NO: 394069 - DNA, 120 bp, Artificial Sequence
  ENSG00000145423_4 (sequence is synthesized)
cttggatcccgctggtcatgaagcagtgccacccggacaccaagaagttcctgtgctcgctcttcgcccccgtctgcctcgatgacctagacgagaccatccagccatgccactcgctct

SEQ ID NO: 394070 - DNA, 120 bp, Artificial Sequence
  ENSG00000145423_5 (sequence is synthesized)
gcgtgcaggtgaaggaccgctgcgccccggtcatgtccgccttcggcttcccctggcccgacatgcttgagtgcgaccgtttcccccaggacaacgacctttgcatccccctcgctagca

SEQ ID NO: 394071 - DNA, 120 bp, Artificial Sequence
  ENSG00000145423_6 (sequence is synthesized)
gcgaccacctcctgccagccaccgaggaagctccaaaggtatgtgaagcctgcaaaaataaaaatgatgatgacaacgacataatggaaacgctttgtaaaaatgattttgcactgaaaa

SEQ ID NO: 394072 - DNA, 120 bp, Artificial Sequence
  ENSG00000145423_7 (sequence is synthesized)
taaaagtgaaggagataacctacatcaaccgagataccaaaatcatcctggagaccaagagcaagaccatttacaagctgaacggtgtgtccgaaagggacctgaagaaatcggtgctgt

SEQ ID NO: 394073 - DNA, 120 bp, Artificial Sequence
  ENSG00000145423_8 (sequence is synthesized)
acagggtggggagctggtgatcacctcggtgaagcggtggcagaaggggcagagagagttcaagcgcatctcccgcagcatccgcaagctgcagtgctagtcccggcatcctgatggctc

SEQ ID NO: 394074 - DNA, 120 bp, Artificial Sequence
  ENSG00000145423_9 (sequence is synthesized)
cgacaggcctgctccagagcacggctgaccatttctgctccgggatctcagctcccgttccccaagcacactcctagctgctccagtctcagcctgggcagcttccccctgccttttgca

SEQ ID NO: 394075 - DNA, 120 bp, Artificial Sequence
  ENSG00000145423_10 (sequence is synthesized)
cgtttgcatccccagcatttcctgagttataaggccacaggagtggatagctgttttcacctaaaggaaaagcccacccgaatcttgtagaaatattcaaactaataaaatcatgaatat

SEQ ID NO: 394076 - DNA, 120 bp, Artificial Sequence
  ENSG00000145423_11 (sequence is synthesized)
ttttatgaagtttaaaaatagctcactttaaagctagttttgaataggtgcaactgtgacttgggtctggttggttgttgtttgttgttttgagtcagctgattttcacttcccactgag

SEQ ID NO: 394077 - DNA, 120 bp, Artificial Sequence
  ENSG00000145423_12 (sequence is synthesized)
gttgtcataacatgcaaattgcttcaattttctctgtggcccaaacttgtgggtcacaaaccctgttgagataaagctggctgttatctcaacatcttcatcagctccagactgagactc

SEQ ID NO: 394078 - DNA, 120 bp, Artificial Sequence
  ENSG00000145423_13 (sequence is synthesized)
agtgtctaagtcttacaacaattcatcattttataccttcaatgggaacttaaactgttacatgtatcacattccagctacaatacttccatttattagaagcacattaaccatttctat

SEQ ID NO: 394079 - DNA, 120 bp, Artificial Sequence
  ENSG00000145423_14 (sequence is synthesized)
agcatgatttcttcaagtaaaaggcaaaagatataaattttataattgacttgagtactttaagccttgtttaaaacatttcttacttaacttttgcaaattaaacccattgtagcttac

SEQ ID NO: 394080 - DNA, 120 bp, Artificial Sequence
  ENSG00000145423_15 (sequence is synthesized)
ctgtaatatacatagtagtttacctttaaaagttgtaaaaatattgctttaaccaacactgtaaatatttcagataaacattatattcttgtatataaactttacatcctgttttaccta

SEQ ID NO: 394081 - DNA, 120 bp, Artificial Sequence
  ENSG00000145425_0 (sequence is synthesized)
cccttttggctctctgaccagcaccatggcggttggcaagaacaagcgccttacgaaaggcggcaaaaagggagccaagaagaaagtggttgatccattttctaagaaagattggtatga

SEQ ID NO: 394082 - DNA, 78 bp, Artificial Sequence
  ENSG00000145425_1 (sequence is synthesized)
ctcgtcaccaggacccaaggaaccaaaattgcatctgatggtctcaagggtcgtgtgtttgaagtgagtcttgctgat

SEQ ID NO: 394083 - DNA, 120 bp, Artificial Sequence
  ENSG00000145425_2 (sequence is synthesized)
caagctgattactgaagatgttcagggtaaaaactgcctgactaacttccatggcatggatcttacccgtgacaaaatgtgttccatggtcaaaaaatggcagacaatgattgaagctca

SEQ ID NO: 394084 - DNA, 120 bp, Artificial Sequence
  ENSG00000145425_3 (sequence is synthesized)
aagctcacgttgatgtcaagactaccgatggttacttgcttcgtctgttctgtgttggttttactaaaaaacgcaacaatcagatacggaagacctcttatgctcagcaccaacaggtcc

SEQ ID NO: 394085 - DNA, 76 bp, Artificial Sequence
  ENSG00000145425_4 (sequence is synthesized)
cagatacggaagacctcttatgctcagcaccaacaggtccgccaaatccggaagaagatgatggaaatcatgaccc

SEQ ID NO: 394086 - DNA, 85 bp, Artificial Sequence
  ENSG00000145425_5 (sequence is synthesized)
agctcatggagcttcatggtgaaggcagtagttctggaaaagccactggggacgagacaggtgctaaagttgaacgagctgatgg

SEQ ID NO: 394087 - DNA, 69 bp, Artificial Sequence
  ENSG00000145425_6 (sequence is synthesized)
atggagcttcatggtgaaggcagtagttctggaaaagccactggggacgagacaggtgctaaagttgaa

SEQ ID NO: 394088 - DNA, 120 bp, Artificial Sequence
  ENSG00000145425_7 (sequence is synthesized)
ttttggctctctgaccagcaccatggcggttggcaagaacaagcgccttacgaaaggcggcaaaaagggagccaagaagaaagtgtaagtcgcgactgtcgtggcgtcttgctttttggg

SEQ ID NO: 394089 - DNA, 120 bp, Artificial Sequence
  ENSG00000145425_8 (sequence is synthesized)
ggtctgctggaatcggcgggctggtcctagatcgcggcgtaggccggatggcgaggattccagtcggattgtgcgggccgtggcgggttggtgcacccaggaacgcggcctggaggggtt

SEQ ID NO: 394090 - DNA, 120 bp, Artificial Sequence
  ENSG00000145425_9 (sequence is synthesized)
cgccttacgaaaggcggcaaaaagggagccaagaagaaagttgaaaaatacagtaagaattgatctgcaatggaacttaagcatcttcttaaaatccagggttgatccattttctaagaa

SEQ ID NO: 394091 - DNA, 120 bp, Artificial Sequence
  ENSG00000145425_10 (sequence is synthesized)
gttgagtagcggcaggtcggctgcctttcccaggccttctggtccttgcgcgcgtcgcgtttgagccggcttgccggcgcgactcggctggaatggttgatccattttctaagaaagatt

SEQ ID NO: 394092 - DNA, 120 bp, Artificial Sequence
  ENSG00000145425_11 (sequence is synthesized)
aggtaaaggtctgttgaaatcctgtctgtgaatccttctagctatatctctttaagtgaaagagtgttaagtactcagtaaatatgattattattactattattatttgagtcagagtct

SEQ ID NO: 394093 - DNA, 120 bp, Artificial Sequence
  ENSG00000145425_12 (sequence is synthesized)
tgctctgttgcccaggctcgagtgcagtattgtgatcctccttggctcactgtaaccactgcttcctgggttcaagcagttcttgagcctcagcctcctgagtatctgggaatacagggg

SEQ ID NO: 394094 - DNA, 120 bp, Artificial Sequence
  ENSG00000145425_13 (sequence is synthesized)
cttcaggtgatctgccagtactctaaatgataacagttttttcgtgtttatttattttgaatgaagctgtctcacagtagatggagttgaaggacaggaaatgtttttcccctacttgga

SEQ ID NO: 394095 - DNA, 86 bp, Artificial Sequence
  ENSG00000145425_14 (sequence is synthesized)
atggagttgaaggacaggaaatgtttttcccctacttggaaaatacactgaataagttgagtggggtgggatgtgtaggattgttt

SEQ ID NO: 394096 - DNA, 120 bp, Artificial Sequence
  ENSG00000145425_15 (sequence is synthesized)
accctgtcccaaaaaataaaaaatatacgtatatatatatacacacacaaagaaaaaatacactgaatagacaaaacctttcatgattaatgatgcacgggaataagtgatgaaaaaagt

SEQ ID NO: 394097 - DNA, 120 bp, Artificial Sequence
  ENSG00000145425_16 (sequence is synthesized)
ttcggtcccagatgatggccagtgataacaacatttttctgatgttcccatgcaatatacagttagctaagagggtgtaatggaaaaagcataaggcttggactcagaagactctactaa

SEQ ID NO: 394098 - DNA, 120 bp, Artificial Sequence
  ENSG00000145425_17 (sequence is synthesized)
ctttgccactagctagctatgtaattcagatcatctatcctttacatgtgaaaggtaaataatggcttatcttaacaggaggatttatgcaggttaaatgaggtaggtgttatgtgtagg

SEQ ID NO: 394099 - DNA, 120 bp, Artificial Sequence
  ENSG00000145425_18 (sequence is synthesized)
tttattccaaggcttctctacttttaaaggaaatggcttatatctgagaactaggacttttagaaaaaaatttactgttactggtttgcaggattccagacagcattggaaaagacatag

SEQ ID NO: 394100 - DNA, 120 bp, Artificial Sequence
  ENSG00000145428_0 (sequence is synthesized)
ccagtcctgccgcccggtaacaaaaccggggttcccgccacacgcacccggtagggctcaagacgctttatcggcgacaatggctggctgaatgggaggcctgaggttctgaaggaaccg

SEQ ID NO: 394101 - DNA, 120 bp, Artificial Sequence
  ENSG00000145428_1 (sequence is synthesized)
ctgaaggaaccggggtgctggcgaccgggacctcgaggccgctgctggggaggacgctggccagcgtgcagggggcggaggcggggcgtgccgggaggctcccatctcccgccccgcaca

SEQ ID NO: 394102 - DNA, 120 bp, Artificial Sequence
  ENSG00000145428_2 (sequence is synthesized)
ccgccgctccgccgccgccgcagatccggctctcaccctcggctcccgaggccccgcggcgcctccttctgcggactctgcgggaccctccccggcaggcgctgtgccctggagaaggca

SEQ ID NO: 394103 - DNA, 120 bp, Artificial Sequence
  ENSG00000145428_3 (sequence is synthesized)
cagtggctcaggcatggccgcggggacggcggcgcggaaggcagcgccggtgctggaggcccccccgcagcaggagcagctctctcatacaaagctttctgcagaagacacatggaacct

SEQ ID NO: 394104 - DNA, 120 bp, Artificial Sequence
  ENSG00000145428_4 (sequence is synthesized)
gcagcaggagaggatgtacaagatgcaccggggccacgattccatgcacgtggaaatgatcttgatcttcctctgcgttctggtcattgcccagatagtgctggttcagtggagacagag

SEQ ID NO: 394105 - DNA, 120 bp, Artificial Sequence
  ENSG00000145428_5 (sequence is synthesized)
gcatggccgatcctacaatctggtgaccttgttgcagatgtgggttgtccccttatatttcacgataaaattatactggtggcggtttctgtctatgtgggggatgttctccgttattac

SEQ ID NO: 394106 - DNA, 120 bp, Artificial Sequence
  ENSG00000145428_6 (sequence is synthesized)
ggacaccacgattggtctacaaatggtttcttttgatctacaaactcagctatgcatttggtgttgtgggttacttggcgatcatgtttacaatgtgtggattcaatctgtttttcaaaa

SEQ ID NO: 394107 - DNA, 120 bp, Artificial Sequence
  ENSG00000145428_7 (sequence is synthesized)
tcaaagctagagattccatggattttggcattgtgtctttgttctacggcctctactatggagtaatggggagagactttgccgagatctgctcagactacatggcttccactatagggt

SEQ ID NO: 394108 - DNA, 120 bp, Artificial Sequence
  ENSG00000145428_8 (sequence is synthesized)
tctacagtgtcagccggttgcctacaaggagcttatcggacaatatctgtgcagtctgtgggcagaagatcattgtggagcttgatgaagaagggctcattgaaaacacctaccagcttt

SEQ ID NO: 394109 - DNA, 120 bp, Artificial Sequence
  ENSG00000145428_9 (sequence is synthesized)
cctgtaatcatgtctttcatgaattctgcatccgaggttggtgtatcgttgggaaaaagcagacttgcccttactgcaaagagaaagttgatttgaagaggatgatcagtaatccctggg

SEQ ID NO: 394110 - DNA, 120 bp, Artificial Sequence
  ENSG00000145428_10 (sequence is synthesized)
agcgcacacattttctgtatggacaaatcctggattggcttcgttatttggtggcctggcaacctgtggtgataggaatagttcaaggcattatctattcactagggctggaataggaca

SEQ ID NO: 394111 - DNA, 120 bp, Artificial Sequence
  ENSG00000145428_11 (sequence is synthesized)
gcagaccccagaagcaacatactgcatggttgaaatccttggtccaacatttaatattaatttttttaattttagagatgatcccaagtgtttagaaaactaagtaaactttgttgtcaa

SEQ ID NO: 394112 - DNA, 120 bp, Artificial Sequence
  ENSG00000145428_12 (sequence is synthesized)
gcaatttgtccatgtggaaagaatttaaagagaagctgaacaatggaataaacaaataaagcatgttttttcatctttcccattacagctgtttcttaactcatgcacatgtcacatttg

SEQ ID NO: 394113 - DNA, 120 bp, Artificial Sequence
  ENSG00000145428_13 (sequence is synthesized)
cctccatcttgcttaccttccatgcccaaaccccagtcctttatcctccagcccagtcgagtcttcctgtttgtccctgctgaataatgaactgctaattaaggtgaacctcctcctcca

SEQ ID NO: 394114 - DNA, 120 bp, Artificial Sequence
  ENSG00000145428_14 (sequence is synthesized)
gtaatttcctttctaaagaggactgttaatgccacatagacaggaaggcagtatctgagcagggtgctggcaggggaaattggttgaagtcataagtgagcagatagccaacaaagatca

SEQ ID NO: 394115 - DNA, 120 bp, Artificial Sequence
  ENSG00000145428_15 (sequence is synthesized)
gggaaagaaggggtttggaggtgagaaaaagagtgaagtatcaggtgcaggggggaacttaagactatccaagtggagcccaaggtctgaatcttagcagatcaagaaatacaaagagtg

SEQ ID NO: 394116 - DNA, 120 bp, Artificial Sequence
  ENSG00000145428_16 (sequence is synthesized)
ctttgcctagaaataatcctaggaacctacctgtggcaacagtagtcttgggggcagccaagggaggaaaccaagccttcttctcagcttcagtctttagaagaagatacagccacaggc

SEQ ID NO: 394117 - DNA, 120 bp, Artificial Sequence
  ENSG00000145428_17 (sequence is synthesized)
agcaagacaccttggattacaaaagcagggaccaaaatttggacatttgttcttggaccatgggctcctccaccaatgggttctatcccaaatagctatccattggctgagggatcttca

SEQ ID NO: 394118 - DNA, 120 bp, Artificial Sequence
  ENSG00000145428_18 (sequence is synthesized)
tatgataggtaccagacagcctgagcctggaaaccagcattctatgtgaactccagtaaccattaaggaaagcctcaatgtgctgaaaaatgctggcatcgagacccctgaacaaatcaa

SEQ ID NO: 394119 - DNA, 120 bp, Artificial Sequence
  ENSG00000145428_19 (sequence is synthesized)
aattcttcctaaatacaaaaaagggtatcatttatctttattttatagtacagtatcaatttaataatgtcatcgctatgtacccagttagttcaaagctctggcattatgagatggtta

SEQ ID NO: 394120 - DNA, 120 bp, Artificial Sequence
  ENSG00000145428_20 (sequence is synthesized)
aaccatctgtcttttgcctaaagcccacttaatttagtcagtcatacctcggtgtccagtacctatgattcaattctgtttaatctggacagtttccacttattcaatcctgaaagtaaa

SEQ ID NO: 394121 - DNA, 120 bp, Artificial Sequence
  ENSG00000145428_21 (sequence is synthesized)
accaggaccaaatgcatctcaaaagtaataggagcctttactccaatacataagccttaaaatcttaagggaagaaacacaaagataccccatatggatttctgtagtggttttttcagt

SEQ ID NO: 394122 - DNA, 120 bp, Artificial Sequence
  ENSG00000145428_22 (sequence is synthesized)
gtgatacctttcccaaaaaactcattctttgtagcaattttccaagtctggccctagttttaaatatgatttatttttcaaatgttggaacagagccccttctgccatttgcaaatggaa

SEQ ID NO: 394123 - DNA, 120 bp, Artificial Sequence
  ENSG00000145428_23 (sequence is synthesized)
atgttttctctctccacctttaaaagcccttagggattgttgtacatgtgtgcatatataatctaaaatgtagtcacctttaaatttgcttttcagggagtattattaatggcccatttt

SEQ ID NO: 394124 - DNA, 120 bp, Artificial Sequence
  ENSG00000145428_24 (sequence is synthesized)
agcatgagtcatattagtgagaaatgggcaaatatgagtcatattaacaaggatgggttatctgagtcttgctctgcagaagttctgccagtgtgcaagtttttcagcattgagattttg

SEQ ID NO: 394125 - DNA, 120 bp, Artificial Sequence
  ENSG00000145428_25 (sequence is synthesized)
aaaatgaaaaagaacattagagagaatgtggacatttctgtgctgactcaatggcccctgaattctatacctctgtagaagatggggctgtattccagcccttttgaatgaaaggctgtt

SEQ ID NO: 394126 - DNA, 120 bp, Artificial Sequence
  ENSG00000145428_26 (sequence is synthesized)
tgagttttggttcaaaatcttcgttataatacaccactttattttaaagcatattgcaaaaatgaccccaattccaagaacataaaataatggaaactcctggttacattgaaatttaat

SEQ ID NO: 394127 - DNA, 120 bp, Artificial Sequence
  ENSG00000145428_27 (sequence is synthesized)
actgaggagttatatacatggccttgacttgctacacctccaagctcctccatttgttagggagggaacttctacatcgttgctgttcacctgggtgtgtagcaggccagtcagaagatc

SEQ ID NO: 394128 - DNA, 120 bp, Artificial Sequence
  ENSG00000145428_28 (sequence is synthesized)
atgtgatcttggcccagaaagtcacattgggagcagcgattgtagaaataaacaaatcagtaggatggatttcattatagttcattttgcccaaatccatagtatcagggaacatggaaa

SEQ ID NO: 394129 - DNA, 120 bp, Artificial Sequence
  ENSG00000145428_29 (sequence is synthesized)
tatatattcccaaaaataatcagttttgaaagagtcattcaaatgttcattcaataaatatttcttaggcatggcttaaggtgctgaggacactgaaatgaatgagacatagtcctacag

SEQ ID NO: 394130 - DNA, 120 bp, Artificial Sequence
  ENSG00000145428_30 (sequence is synthesized)
gtaacacatggtctaggagaaacatgtaagtaccaaaagtcctgctacactagagtaagtccctggtgctgtgagaacacatagggttcactcaagtttggggacaaagggtcagacttt

SEQ ID NO: 394131 - DNA, 120 bp, Artificial Sequence
  ENSG00000145428_31 (sequence is synthesized)
ctggaccaggagacgtatacaaatggatctgtaaatgcctagagtttgagaagttaagtttagtaggtatatattctattaaaaataattggctccttatcagtacttttaaaagtcaag

SEQ ID NO: 394132 - DNA, 120 bp, Artificial Sequence
  ENSG00000145428_32 (sequence is synthesized)
gatcctacaatgtgagtcatccccgtggctgctgggagcctgctccagcttgtatcagcttgactgtttttttccaggacatgttctcccttggttagcactttgaaggaactgccttgg

SEQ ID NO: 394133 - DNA, 120 bp, Artificial Sequence
  ENSG00000145428_33 (sequence is synthesized)
ggttctcaaccaagtgcaatttcactcccaggagacatttggcaatgtctggaaacatttttgactgtcaagacttgtggggggtgaaaagggggaggggagttgcaactggcacctggt

SEQ ID NO: 394134 - DNA, 120 bp, Artificial Sequence
  ENSG00000145431_0 (sequence is synthesized)
accccgtgcggagacgccgcgcgtagccccgaggttagcgcggagcccgaggcgtggggggaggggacggggaacaaccggagccccgcggtgaccccgagcggccgaattgccccaggc

SEQ ID NO: 394135 - DNA, 120 bp, Artificial Sequence
  ENSG00000145431_1 (sequence is synthesized)
tttgaggagcgggggacgagcccgaacaaggtgaactttggtcgcggaaaactcaagccaggtgccggaatccgtgctgcggcgctccgaacccggggccaactgcgctccgggctgagg

SEQ ID NO: 394136 - DNA, 80 bp, Artificial Sequence
  ENSG00000145431_2 (sequence is synthesized)
cccgctccggcgccccggcccgtgggacccgccgcggcgccctcgccttgtttcttccccctcccccttcgggggtgggg

SEQ ID NO: 394137 - DNA, 120 bp, Artificial Sequence
  ENSG00000145431_3 (sequence is synthesized)
gggtggggggtggggcgggggagaggggcgcccggagagccgcatctattggcagctttgttattgatcagaaactgctcgccgccgacttggcttccagtctggctgcgggcaaccctt

SEQ ID NO: 394138 - DNA, 120 bp, Artificial Sequence
  ENSG00000145431_4 (sequence is synthesized)
gctgcgggcaacccttgagttttcgcctctgtcctgtcccccgaactgacaggtgctcccagcaacttgctggggacttctcgccgctcccccgcgtccccaccccctcattcctccctc

SEQ ID NO: 394139 - DNA, 120 bp, Artificial Sequence
  ENSG00000145431_5 (sequence is synthesized)
gccttcacccccacccccaccacttcgccacagctcaggatttgtttaaaccttgggaaactggttcaggtccaggttttgctttgatccttttcaaaaactggagacacagaagagggc

SEQ ID NO: 394140 - DNA, 120 bp, Artificial Sequence
  ENSG00000145431_6 (sequence is synthesized)
tctaggaaaaagttttggatgggattatgtggaaactaccctgcgattctctgctgccagagcaggctcggcgcttccaccccagtgcagccttcccctggcggtggtgaaagagactcg

SEQ ID NO: 394141 - DNA, 120 bp, Artificial Sequence
  ENSG00000145431_7 (sequence is synthesized)
ggagtcgctgcttccaaagtgcccgccgtgagtgagctctcaccccagtcagccaaatgagcctcttcgggcttctcctgctgacatctgccctggccggccagagacaggggactcagg

SEQ ID NO: 394142 - DNA, 120 bp, Artificial Sequence
  ENSG00000145431_8 (sequence is synthesized)
cggaatccaacctgagtagtaaattccagttttccagcaacaaggaacagaacggagtacaagatcctcagcatgagagaattattactgtgtctactaatggaagtattcacagcccaa

SEQ ID NO: 394143 - DNA, 120 bp, Artificial Sequence
  ENSG00000145431_9 (sequence is synthesized)
ggtttcctcatacttatccaagaaatacggtcttggtatggagattagtagcagtagaggaaaatgtatggatacaacttacgtttgatgaaagatttgggcttgaagacccagaagatg

SEQ ID NO: 394144 - DNA, 120 bp, Artificial Sequence
  ENSG00000145431_10 (sequence is synthesized)
acatatgcaagtatgattttgtagaagttgaggaacccagtgatggaactatattagggcgctggtgtggttctggtactgtaccaggaaaacagatttctaaaggaaatcaaattagga

SEQ ID NO: 394145 - DNA, 120 bp, Artificial Sequence
  ENSG00000145431_11 (sequence is synthesized)
taagatttgtatctgatgaatattttccttctgaaccagggttctgcatccactacaacattgtcatgccacaattcacagaagctgtgagtccttcagtgctacccccttcagctttgc

SEQ ID NO: 394146 - DNA, 120 bp, Artificial Sequence
  ENSG00000145431_12 (sequence is synthesized)
cactggacctgcttaataatgctataactgcctttagtaccttggaagaccttattcgatatcttgaaccagagagatggcagttggacttagaagatctatataggccaacttggcaac

SEQ ID NO: 394147 - DNA, 120 bp, Artificial Sequence
  ENSG00000145431_13 (sequence is synthesized)
ttcttggcaaggcttttgtttttggaagaaaatccagagtggtggatctgaaccttctaacagaggaggtaagattatacagctgcacacctcgtaacttctcagtgtccataagggaag

SEQ ID NO: 394148 - DNA, 120 bp, Artificial Sequence
  ENSG00000145431_14 (sequence is synthesized)
aactaaagagaaccgataccattttctggccaggttgtctcctggttaaacgctgtggtgggaactgtgcctgttgtctccacaattgcaatgaatgtcaatgtgtcccaagcaaagtta

SEQ ID NO: 394149 - DNA, 120 bp, Artificial Sequence
  ENSG00000145431_15 (sequence is synthesized)
ctaaaaaataccacgaggtccttcagttgagaccaaagaccggtgtcaggggattgcacaaatcactcaccgacgtggccctggagcaccatgaggagtgtgactgtgtgtgcagaggga

SEQ ID NO: 394150 - DNA, 120 bp, Artificial Sequence
  ENSG00000145431_16 (sequence is synthesized)
gcacaggaggatagccgcatcaccaccagcagctcttgcccagagctgtgcagtgcagtggctgattctattagagaacgtatgcgttatctccatccttaatctcagttgtttgcttca

SEQ ID NO: 394151 - DNA, 120 bp, Artificial Sequence
  ENSG00000145431_17 (sequence is synthesized)
aggacctttcatcttcaggatttacagtgcattctgaaagaggagacatcaaacagaattaggagttgtgcaacagctcttttgagaggaggcctaaaggacaggagaaaaggtcttcaa

SEQ ID NO: 394152 - DNA, 120 bp, Artificial Sequence
  ENSG00000145431_18 (sequence is synthesized)
tcgtggaaagaaaattaaatgttgtattaaatagatcaccagctagtttcagagttaccatgtacgtattccactagctgggttctgtatttcagttctttcgatacggcttagggtaat

SEQ ID NO: 394153 - DNA, 120 bp, Artificial Sequence
  ENSG00000145431_19 (sequence is synthesized)
gaaaaaaactgtgcaagtgagcacctgattccgttgccttgcttaactctaaagctccatgtcctgggcctaaaatcgtataaaatctggatttttttttttttttttgctcatattcac

SEQ ID NO: 394154 - DNA, 120 bp, Artificial Sequence
  ENSG00000145431_20 (sequence is synthesized)
atatgtaaaccagaacattctatgtactacaaacctggtttttaaaaaggaactatgttgctatgaattaaacttgtgtcgtgctgataggacagactggatttttcatatttcttatta

SEQ ID NO: 394155 - DNA, 120 bp, Artificial Sequence
  ENSG00000145431_21 (sequence is synthesized)
aaatttctgccatttagaagaagagaactacattcatggtttggaagagataaacctgaaaagaagagtggccttatcttcactttatcgataagtcagtttatttgtttcattgtgtac

SEQ ID NO: 394156 - DNA, 120 bp, Artificial Sequence
  ENSG00000145431_22 (sequence is synthesized)
gtacatttttatattctccttttgacattataactgttggcttttctaatcttgttaaatatatctatttttaccaaaggtatttaatattcttttttatgacaacttagatcaactatt

SEQ ID NO: 394157 - DNA, 120 bp, Artificial Sequence
  ENSG00000145431_23 (sequence is synthesized)
gcttggtaaatttttctaaacacaattgttatagccagaggaacaaagatgatataaaatattgttgctctgacaaaaatacatgtatttcattctcgtatggtgctagagttagattaa

SEQ ID NO: 394158 - DNA, 120 bp, Artificial Sequence
  ENSG00000145431_24 (sequence is synthesized)
tctgcattttaaaaaactgaattggaatagaattggtaagttgcaaagactttttgaaaataattaaattatcatatcttccattcctgttattggagatgaaaataaaaagcaacttat

SEQ ID NO: 394159 - DNA, 120 bp, Artificial Sequence
  ENSG00000145431_25 (sequence is synthesized)
gaaagtagacattcagatccagccattactaacctattccttttttggggaaatctgagcctagctcagaaaaacataaagcaccttgaaaaagacttggcagcttcctgataaagcgtg

SEQ ID NO: 394160 - DNA, 120 bp, Artificial Sequence
  ENSG00000145431_26 (sequence is synthesized)
ctgtgctgtgcagtaggaacacatcctatttattgtgatgttgtggttttattatcttaaactctgttccatacacttgtataaatacatggatatttttatgtacagaagtatgtctct

SEQ ID NO: 394161 - DNA, 120 bp, Artificial Sequence
  ENSG00000145431_27 (sequence is synthesized)
taaccagttcacttattgtactctggcaatttaaaagaaaatcagtaaaatattttgcttgtaaaatgcttaatatcgtgcctaggttatgtggtgactatttgaatcaaaaatgtattg

SEQ ID NO: 394162 - DNA, 120 bp, Artificial Sequence
  ENSG00000145431_28 (sequence is synthesized)
aatcatcaaataaaagaatgtggctattttggggagaaaattatgtgtgtgtgtgctcaagatttatttcttggactctgagaaaatgaaagataaaattttctgttatgattttcattt

SEQ ID NO: 394163 - DNA, 120 bp, Artificial Sequence
  ENSG00000145431_29 (sequence is synthesized)
agcaaaagcatatgtcaattcaaaagacaaaaaaagggaagatacctgtgagccttctctgcctcttgtttccaatgcctttgagcaatggttttatttttcttactggtcttaatacag

SEQ ID NO: 394164 - DNA, 120 bp, Artificial Sequence
  ENSG00000145431_30 (sequence is synthesized)
atttctggtaatttaagtttcacctgacttgaaagttgtatggtttatgaaatgcttggtgataggtggtatggtagtatgaaactggaaaaaaacttgcaggtttccactcatgtcttc

SEQ ID NO: 394165 - DNA, 120 bp, Artificial Sequence
  ENSG00000145431_31 (sequence is synthesized)
attgtcactggcaactactaaatggggtgagcataaattgatttggtgcatggattattgtacattgcacacttcaagatatggttcctcagttccagacatagattcctattcagggct

SEQ ID NO: 394166 - DNA, 120 bp, Artificial Sequence
  ENSG00000145431_32 (sequence is synthesized)
ggtatcttcagcatcctttcctcagcctttcaacttggcagagatgtctagtgtccagggccttctgtcttcagactgctcttcaggcaagcacccttttcctgtgctttgacacctgca

SEQ ID NO: 394167 - DNA, 120 bp, Artificial Sequence
  ENSG00000145431_33 (sequence is synthesized)
gttctgccctgcctccaactatgtggaaaacaaagaaacaaaatgagcctatgtgttctgtcttacttccttaccttttcctggttttgtcctatccatatagaggccaactagatatat

SEQ ID NO: 394168 - DNA, 120 bp, Artificial Sequence
  ENSG00000145431_34 (sequence is synthesized)
ggaatatgcaacgtagtaagtagttggcagtttacaactttcattagtatagtaaagactactaagtcttagtaaatagcctgtttaactgtgtttaatccattgtttcccatctttgaa

SEQ ID NO: 394169 - DNA, 120 bp, Artificial Sequence
  ENSG00000145431_35 (sequence is synthesized)
cgaaatatattttcccttttttaatatttattttttgtttacttataaaatcttgacagccagaagagatcataagggtagcagtcctcagttgccagtcggtgagtggttaccatgtga

SEQ ID NO: 394170 - DNA, 89 bp, Artificial Sequence
  ENSG00000145431_36 (sequence is synthesized)
gcagtcctcagttgccagtcggtgagtggttaccatgtgaggactaaccactttataatcacttactcatagatcgtcctgtgtatttt

SEQ ID NO: 394171 - DNA, 120 bp, Artificial Sequence
  ENSG00000145431_37 (sequence is synthesized)
attgactgtattgaccacacaccgttttgtgtatgatatctgtttcaagcctttgtccttgagacatgggctgttttgcccagtgatgtttactaaaataaaagcaagccttaaatgtca

SEQ ID NO: 394172 - DNA, 120 bp, Artificial Sequence
  ENSG00000145431_38 (sequence is synthesized)
atccaacctgagtagtaaattccagttttccagcaacaaggaacagaacggtaggaactatatccaagcatctggactggcatagaaaagaggagaaagaacatttaaaaggagtacaag

SEQ ID NO: 394173 - DNA, 120 bp, Artificial Sequence
  ENSG00000145431_39 (sequence is synthesized)
ttacgtttgatgaaagatttgggcttgaagacccagaagatgacatatgcaagtatgattttgtagaagttgaggaacccagtgatggaactatattagggcgctggtgtggttctgggt

SEQ ID NO: 394174 - DNA, 120 bp, Artificial Sequence
  ENSG00000145431_40 (sequence is synthesized)
tctgcatccactacaacattgtcatgccaaacctcccgtgagttgttcctggcaggcatttgtgtctgcatgccctgtctgctgcttaggctctttaaaagatttgtgtgatacttgttt

SEQ ID NO: 394175 - DNA, 120 bp, Artificial Sequence
  ENSG00000145431_41 (sequence is synthesized)
ggttacttgtgtgattcataatagcagattctcgttttggcaagagaaaactctcttctatgatgcagtatacttggcttctcacaaagcaattcacagaagctgtgagtccttcagtgc

SEQ ID NO: 394176 - DNA, 120 bp, Artificial Sequence
  ENSG00000145431_42 (sequence is synthesized)
gagtgatttttagtttactcatagattaagagcatgcgtatcatttttttctcattttctttagccattctgaattttgatttggaatatgccgctcttcgctacggttggtcttattaa

SEQ ID NO: 394177 - DNA, 120 bp, Artificial Sequence
  ENSG00000145431_43 (sequence is synthesized)
catcagttattgtatgtgttctttttctcaagggcttttgtggcatgtggggcaatttactttggtctgctggtcgtgcccttttgccggtatcttgtgtttatggattttccatctctt

SEQ ID NO: 394178 - DNA, 120 bp, Artificial Sequence
  ENSG00000145431_44 (sequence is synthesized)
tgtttttggaagaaaatccagaggagataattatgaaaaggaaaaaaatctgaagaccaacttttacaaatatttggcagagggaaacttctttaatattattatagttaagctattcaa

SEQ ID NO: 394179 - DNA, 120 bp, Artificial Sequence
  ENSG00000145431_45 (sequence is synthesized)
atcctttggtacattatctttctttcttcttttcctttttctctttatttgccttccccccccaaaagtactatacaatgtttcaagaatgtatgacatatgacttaacttaatgaagct

SEQ ID NO: 394180 - DNA, 120 bp, Artificial Sequence
  ENSG00000145431_46 (sequence is synthesized)
tatatgcgtttgaagccttagcagtaggcagcataaatttcaaaatgaaatgccaaatttaaaatccttagttatatttttagaaaactgtggactgcataaatgctttacttttttttc

SEQ ID NO: 394181 - DNA, 120 bp, Artificial Sequence
  ENSG00000145431_47 (sequence is synthesized)
tttcactttcttcctctagttcagggttttcattcataccttgctactgctacaaaaaaatactgtattttctaagtcaagcttaactagtacgtaaaaagggcttttgacttttgtgtc

SEQ ID NO: 394182 - DNA, 120 bp, Artificial Sequence
  ENSG00000145431_48 (sequence is synthesized)
caagccaagtgctcacagagcagcccacagagggctgtgggacagtgatgaccctgttgtgccaggtttcatggatgaattggatttttgaaaaggtcattgtaatgcaattcacagaag

SEQ ID NO: 394183 - DNA, 120 bp, Artificial Sequence
  ENSG00000145431_49 (sequence is synthesized)
tcttcatgcatcaagcaattcacagaagctgtgagtccttcagtgctacccccttcagctttgccactggacctgcttaataatgctataactgcctttagtaccttggaagaccttatt

SEQ ID NO: 394184 - DNA, 88 bp, Artificial Sequence
  ENSG00000145439_0 (sequence is synthesized)
ttttttgcggaaccgcggttgtttaaaagcctgagggaacctggagaggggctcccactccctaccctctttcctccgagtttgtgac

SEQ ID NO: 394185 - DNA, 120 bp, Artificial Sequence
  ENSG00000145439_1 (sequence is synthesized)
gggctcccactccctaccctctttcctccgagtttgtgactccgagatggacaaagtgtgtgctgtttttggaggctcccgaggcattggcagagctgtggcccagttaatggcccggaa

SEQ ID NO: 394186 - DNA, 120 bp, Artificial Sequence
  ENSG00000145439_2 (sequence is synthesized)
aggctaccgactggcggtcattgccagaaacctggaaggggccaaagccgccgccggtgacctcggcggagatcatttggcatttagctgtgatgttgctaaagaacatgatgttcaaaa

SEQ ID NO: 394187 - DNA, 120 bp, Artificial Sequence
  ENSG00000145439_3 (sequence is synthesized)
tacatttgaagagctggagaaacatttaggtcgagtaaatttcttggtaaatgcagctggtattaacagggatggtcttttagtaagaacaaaaactgaagatatggtatctcagcttca

SEQ ID NO: 394188 - DNA, 120 bp, Artificial Sequence
  ENSG00000145439_4 (sequence is synthesized)
tactaacctcttgggttccatgctgacctgtaaagctgccatgaggactatgattcaacaacagggagggtctattgttaatgtaggaagcattgttggcttaaaaggcaactctggcca

SEQ ID NO: 394189 - DNA, 120 bp, Artificial Sequence
  ENSG00000145439_5 (sequence is synthesized)
gtccgtttacagtgccagtaaaggaggattagttggattttcacgtgctcttgctaaagaggtagcaagaaagaaaattagagtgaatgtagttgcaccaggatttgtacacacagatat

SEQ ID NO: 394190 - DNA, 120 bp, Artificial Sequence
  ENSG00000145439_6 (sequence is synthesized)
gacgaaagacttgaaagaagaacatttaaagaaaaatattcctcttgggaggtttggagaaactattgaggtggcacatgcggttgtgtttcttttagaatcaccgtatattacagggca

SEQ ID NO: 394191 - DNA, 120 bp, Artificial Sequence
  ENSG00000145439_7 (sequence is synthesized)
tgttctggtagtggatgggggattacaactcattttgtaatttgcagattattcagttataggggtgattagcatcaagggcacactttggctactgattagacaattatacctacatgg

SEQ ID NO: 394192 - DNA, 120 bp, Artificial Sequence
  ENSG00000145439_8 (sequence is synthesized)
gtaacatgtgctaatcaaacctgctgatgctacaaatgttaatttctgtctttataaaaatatgtctcaaaagaacaatgtgtgacaaattgtggtttttttttttttggtctaagttac

SEQ ID NO: 394193 - DNA, 120 bp, Artificial Sequence
  ENSG00000145439_9 (sequence is synthesized)
atcagtgttgttttgtttaaaaagccttcatgagatacaattcacataccatataatcacacatttaaaatacacaattcagtggttttaacatatttaaatacatgtgcaatcatcccc

SEQ ID NO: 394194 - DNA, 120 bp, Artificial Sequence
  ENSG00000145439_10 (sequence is synthesized)
ccagacaaattgtgttttctaaaggatgtgtatcacttacctttggttacctcatagactgtagcaatcttagtgtatagacattttgcaagtcatataaacaagtattgatttatatat

SEQ ID NO: 394195 - DNA, 120 bp, Artificial Sequence
  ENSG00000145439_11 (sequence is synthesized)
tttgtctcaaaagtggaaaaattatattgtctaattatgatgaattattttcttgtatcaagctgaattttctaaaagttaaccttgtgggctgttgccaaaataagagtatttagagga

SEQ ID NO: 394196 - DNA, 120 bp, Artificial Sequence
  ENSG00000145439_12 (sequence is synthesized)
cactgattagttgtcaatactttagcaagcccactaaagataactatattccttttgcatgtgcttgggtgatcagtttttatacaggttgcaaaacatagtattcattaaagacatgaa

SEQ ID NO: 394197 - DNA, 120 bp, Artificial Sequence
  ENSG00000145439_13 (sequence is synthesized)
tttagaattgatttctttgagtggtatttctcttgattgagcagctagacaaaataatctgcaaatttaaatgtggcgcatttgactcattcttgagaaattctcataagtgaagaggat

SEQ ID NO: 394198 - DNA, 120 bp, Artificial Sequence
  ENSG00000145439_14 (sequence is synthesized)
attcatgaaaaacttagaatagtgaactattaatatttaaaaacgagaaatacaacatttaaaaaattaagagtattttgcattagtgattatgattcttatcccaaaattctagaaagt

SEQ ID NO: 394199 - DNA, 120 bp, Artificial Sequence
  ENSG00000145439_15 (sequence is synthesized)
ctgtatgaataagcataaaaaataaataaatatgcaataacattaaattaaatgtctttacaagaagcagtgaaggcactggtcttaagtgagaatatttgcctgggagtagagataaag

SEQ ID NO: 394200 - DNA, 120 bp, Artificial Sequence
  ENSG00000145439_16 (sequence is synthesized)
acacaaaccgaatgtgaaataccaggtaataattattttgcattaaactctttttatcgggaatagtatgatattttcagtgtcactccattcatgttgatttggagctgacagttattt

SEQ ID NO: 394201 - DNA, 120 bp, Artificial Sequence
  ENSG00000145439_17 (sequence is synthesized)
tgtgtaagcagagatttaattttatattgaaagtcagtgcaaaattatgaataggatatactaataaatacaaagtaataacaaaagtcaaagcagtgttctaaataaaaattctgggtt

SEQ ID NO: 394202 - DNA, 120 bp, Artificial Sequence
  ENSG00000145439_18 (sequence is synthesized)
ggttccttaaaaattattttaaatttatctttgaaatagttttcttagattaatctcaggatatgagaaagtcaattaagtgtgagtaaagttagtatcattaaacaaattgtctattaa

SEQ ID NO: 394203 - DNA, 120 bp, Artificial Sequence
  ENSG00000145439_19 (sequence is synthesized)
aagacgtggtaatatacagaatttatcaggcattaccaagtctaggcacatataggaaatgcagcactcagaatggtttcaatgtagtagttgatgcttgtaaggtaggggagcttattc

SEQ ID NO: 394204 - DNA, 120 bp, Artificial Sequence
  ENSG00000145439_20 (sequence is synthesized)
agacatagtagatagtttctctaatgctgtctcaattgctggcctttggctacctgtacttccccattatggcagcccattcagtcttgagttttcttctctggacaccttatgctctga

SEQ ID NO: 394205 - DNA, 120 bp, Artificial Sequence
  ENSG00000145439_21 (sequence is synthesized)
aatcatgagcgaggctgattcaattggtgatttgggtagaaagcagtatgttttgctgacattaagatgtaggttatagataggtttagcctttaagtgtatgtttttatactttaaaat

SEQ ID NO: 394206 - DNA, 120 bp, Artificial Sequence
  ENSG00000145439_22 (sequence is synthesized)
aagaaatataaccttttaagctattccacctcctcccccagcctatctcaaactggtggaatatatggagagatcttgaaagaggtaaaataaaccttcactgctccactccaggtgaat

SEQ ID NO: 394207 - DNA, 120 bp, Artificial Sequence
  ENSG00000145439_23 (sequence is synthesized)
ccgcccactcccactgacctagtagaatttgtaatttaatacttaccttctatttctgaaatcagttgtgaactgttgccttatgttcagaggtttaagaacctcagtgaattcattttt

SEQ ID NO: 394208 - DNA, 120 bp, Artificial Sequence
  ENSG00000145439_24 (sequence is synthesized)
taaaatctgctattctgagaagcattgaatgaattcttaacaagaagactcatctgtagctgtttgctgactcctatgagcccataagggttctgtgcttagcattaacaaaataaggtt

SEQ ID NO: 394209 - DNA, 120 bp, Artificial Sequence
  ENSG00000145439_25 (sequence is synthesized)
tataggtaaagccaatgtattaatttttttttgcatggagggctttaaaatttgtgctctttttcatattttattcatattcaatttatggtttgtaactgctttttagggagataatta

SEQ ID NO: 394210 - DNA, 120 bp, Artificial Sequence
  ENSG00000145439_26 (sequence is synthesized)
tatgttataaattagttttggggggaataattgtgcaaagaggataatttaatttacgtgcttctgttattcagaataaagagagaagactacgctgcatattcaagagttgtaccttaa

SEQ ID NO: 394211 - DNA, 120 bp, Artificial Sequence
  ENSG00000145439_27 (sequence is synthesized)
cattggtgaaacattttttctaagattttcaaaaggaatatgtgtaaattgagaaatcataaccactgtcctaacttggtaaacaaactgttcttaaataaagtatttaatgattttaaa

SEQ ID NO: 394212 - DNA, 120 bp, Artificial Sequence
  ENSG00000145439_28 (sequence is synthesized)
cagtatccataaggaagatggaaaagggggacagaataaatgttaccctaagaagtccagagcaacatggtacctgattagctgtttcctcttctggctcctgaatattaaagacagttg

SEQ ID NO: 394213 - DNA, 120 bp, Artificial Sequence
  ENSG00000145439_29 (sequence is synthesized)
cactgtcagcacctagcagtcgacgagccattctttcttcgtatgttaacctctaaacaacatttaaacaacggaaaaagccactgaagtatgtatagtatctgtgcgccgagatacaca

SEQ ID NO: 394214 - DNA, 120 bp, Artificial Sequence
  ENSG00000145439_30 (sequence is synthesized)
ggaaagcatggaacatgtggatggaaggaaccgggatcatctcatccagctgagtaataagtacgtttggtgcagtgccacacaggaggccaccaacagagcccagagtagtaactaggt

SEQ ID NO: 394215 - DNA, 120 bp, Artificial Sequence
  ENSG00000145439_31 (sequence is synthesized)
tgcttcactcttagcctctcaagtgatgacaccaaggcatgatcttatctcttgattgtggccacccgtaaagaaaagcgtatctctaatctcagaagcacaaggagttcataccaggaa

SEQ ID NO: 394216 - DNA, 120 bp, Artificial Sequence
  ENSG00000145439_32 (sequence is synthesized)
accaagattagtaagtatttttgtggtgaataccttttgaataagacaggattaatgtaacagttaaaagtatagaaatataaaagttacgaacttactggtgatttttttctttggtgt

SEQ ID NO: 394217 - DNA, 120 bp, Artificial Sequence
  ENSG00000145439_33 (sequence is synthesized)
ccgccgccggtgacctcggcgggcttcccattatgttgcccgtgctggaccccaactcctgatttactggctctagagatcttctcgcctcagtctcccaaggacctgggactatagacg

SEQ ID NO: 394218 - DNA, 120 bp, Artificial Sequence
  ENSG00000145439_34 (sequence is synthesized)
ttggaacattagtaattgacatctgggtagaatagtttgtaaaatgattgtgaaaagaatcaaataatgaactgggggactcaaaaaaattttttgtacctcatattctatataaagtct

SEQ ID NO: 394219 - DNA, 120 bp, Artificial Sequence
  ENSG00000145439_35 (sequence is synthesized)
atgtgttagcctgtttgcattgctctaaaggactgtctgaggtaattcataaaaaaaagaggcttatttggctctcgggcctgcaggctgtacaagcatgacaccaacatctgctcagct

SEQ ID NO: 394220 - DNA, 120 bp, Artificial Sequence
  ENSG00000145439_36 (sequence is synthesized)
tctggtgaggcccaggaaactttttttcagtcatggcggaaggtaaagaggtagcagccaagtcatatggggatagcaggagcaagagagagaggaggtggcaggctctaaacaaccagc

SEQ ID NO: 394221 - DNA, 120 bp, Artificial Sequence
  ENSG00000145439_37 (sequence is synthesized)
tctggcatgaactaacagtgagaactcattatttaccatgtggagggcaccaagctattcatgaggaatccgcctccatgacccaaacacctcccgctaggcccacctccaacattggga

SEQ ID NO: 394222 - DNA, 120 bp, Artificial Sequence
  ENSG00000145439_38 (sequence is synthesized)
agatttggaggggacagacatccaaaccataagagtctttatttttaaattttgcactagtggaataacttaaggtggagagggtcttagaaataattttttccagtcatttttgtagat

SEQ ID NO: 394223 - DNA, 120 bp, Artificial Sequence
  ENSG00000145439_39 (sequence is synthesized)
agtcatttttgtagattagaaaactgtacctgggattcagagtgacttgcctaaggttacacagctagtttatggaagaactgttactaaaagctttgtcttttgatttccacctaatgg

SEQ ID NO: 394224 - DNA, 120 bp, Artificial Sequence
  ENSG00000145439_40 (sequence is synthesized)
gagcttaaaaataatgtcctaccaggtatggtagctcatgtgggaggctgaggcaggagtattgtgaggccaggagttccagatcagcctgagcaacatagcaagatgctgtctgtaccg

SEQ ID NO: 394225 - DNA, 120 bp, Artificial Sequence
  ENSG00000145451_0 (sequence is synthesized)
aacccaaggtggagagctggattccggcgggcggcgcttggagcaggtggagaggcgtcctctttccggctgttgctgctcttcttcctccaatcctgggtctcagtcagggaagaacga

SEQ ID NO: 394226 - DNA, 120 bp, Artificial Sequence
  ENSG00000145451_1 (sequence is synthesized)
acattcttcctttgctgctggagctttagagaactgttgcccagcacctaggcacttcagacatttcatctcactcatttttgtaatttcactgtaaaaatcacctgcacatttataaca

SEQ ID NO: 394227 - DNA, 120 bp, Artificial Sequence
  ENSG00000145451_2 (sequence is synthesized)
ctgtgactctccacttctgctcaatgctgagaaggggtccgcatactgcggggagctgtctaaggtgctgaagcttcccaagcatcagtctacaccaacaccatgcggggttagattgta

SEQ ID NO: 394228 - DNA, 120 bp, Artificial Sequence
  ENSG00000145451_3 (sequence is synthesized)
cattttcattctgtctttctggttccccatgccttggataagactattttcaggatcgtgaatatctctccgtatcatggcccacgtgagacactttcggacattagtttcgggatttta

SEQ ID NO: 394229 - DNA, 120 bp, Artificial Sequence
  ENSG00000145451_4 (sequence is synthesized)
cttctgggaagcagcactgttactcagtttggttgccacaaaggaaacagacagtgcaagatctcgaagtgctccaatgtcaccttctgattttctggataaattaatgggcaggacatc

SEQ ID NO: 394230 - DNA, 120 bp, Artificial Sequence
  ENSG00000145451_5 (sequence is synthesized)
aggatatgatgcaagaatcagacccaattttaaaggccctccagttaatgtcacatgcaacatattcatcaacagctttggctctatcgcagagacgaccatggattacagagtgaatat

SEQ ID NO: 394231 - DNA, 120 bp, Artificial Sequence
  ENSG00000145451_6 (sequence is synthesized)
ctttcttcgtcagaaatggaatgatccccgcctcgcgtacagtgaatatcctgacgactctttagacctcgacccctccatgttggactccatttggaaacctgatttgttctttgccaa

SEQ ID NO: 394232 - DNA, 120 bp, Artificial Sequence
  ENSG00000145451_7 (sequence is synthesized)
tgaaaagggtgccaactttcatgaagtcactacagacaacaaattgctaagaattttcaaaaatggaaatgttctttattcaataagattaacattaacactttcctgtccaatggatct

SEQ ID NO: 394233 - DNA, 120 bp, Artificial Sequence
  ENSG00000145451_8 (sequence is synthesized)
caagaattttcccatggatgtacaaacatgtataatgcaactggaaagctttgggtacacaatgaatgatctcatttttgaatggcaagatgaggcacccgtacaagtggcagaaggact

SEQ ID NO: 394234 - DNA, 120 bp, Artificial Sequence
  ENSG00000145451_9 (sequence is synthesized)
cactttgccccagtttctgttgaaagaagaaaaagatttacgatactgcactaaacattacaatacaggaaagtttacgtgtatagaagtgcgattccatctggagcgacaaatgggata

SEQ ID NO: 394235 - DNA, 120 bp, Artificial Sequence
  ENSG00000145451_10 (sequence is synthesized)
ctatctgatccagatgtacattcccagtctcctgattgttattctatcctgggtttcattctggatcaacatggatgcagcaccggccagggtagctctggggataaccactgtgctaac

SEQ ID NO: 394236 - DNA, 120 bp, Artificial Sequence
  ENSG00000145451_11 (sequence is synthesized)
gatgactacacagagttcaggatcacgagcttccttgccaaaagtttcatatgtcaaagctattgatatttggatggcagtatgcctcctttttgtgttttcagcacttctggagtatgc

SEQ ID NO: 394237 - DNA, 120 bp, Artificial Sequence
  ENSG00000145451_12 (sequence is synthesized)
agctgtaaattttgtatcaagacaacacaaagaacttctgagatttcgacgaaagagaaagaataagacagaagcttttgcactggagaagttttaccgtttctcagatatggatgatga

SEQ ID NO: 394238 - DNA, 120 bp, Artificial Sequence
  ENSG00000145451_13 (sequence is synthesized)
ggtaagggaaagccgattcagcttcacagcctatggaatgggaccatgtctacaagcaaaggatggcatgactccaaagggccccaaccaccctgtccaggtaatgccaaaaagtcctga

SEQ ID NO: 394239 - DNA, 120 bp, Artificial Sequence
  ENSG00000145451_14 (sequence is synthesized)
tgaaatgaggaaggtctttatcgaccgggccaagaagattgataccatctcccgagcctgcttcccattagcttttttgatttttaatattttctactgggttatctataaaattcttag

SEQ ID NO: 394240 - DNA, 120 bp, Artificial Sequence
  ENSG00000145451_15 (sequence is synthesized)
gcatgaggatattcatcagcagcaagattaagtctctgggggcatgcaaatgcaaatggtcaattcagaagaaagtgtctctgccataggtgtgtatgtgtatatgtgtgcgtgtggtat

SEQ ID NO: 394241 - DNA, 120 bp, Artificial Sequence
  ENSG00000145451_16 (sequence is synthesized)
acaaatgatgaccattgtattaaaatggcatatggaaaagctttgtattttggttagctatgcaaagtcatgagaaagatgagattcttttaatgaatataaaatatttattaggggatt

SEQ ID NO: 394242 - DNA, 120 bp, Artificial Sequence
  ENSG00000145451_17 (sequence is synthesized)
ctatttcatattaattccaggtgatttgttttttcacagtaaaccatgtaagtggaagctttactgccaatgtgtttatatgttatataatatctcataatagtagacatgaaaactact

SEQ ID NO: 394243 - DNA, 120 bp, Artificial Sequence
  ENSG00000145451_18 (sequence is synthesized)
ttgaaattccttgatttgtaattcaatgctattaaatcatacaaaagcaaattttgcacagtaaaccaatagtttgagatttaaaactattttcttatagtatagttacaaaatgggaaa

SEQ ID NO: 394244 - DNA, 120 bp, Artificial Sequence
  ENSG00000145451_19 (sequence is synthesized)
ataattagttacagtgggaaattcactcatattaatggaggattgtacatataaatactatttaaacaacatatgtaattttgaaaatttttaaataagagcattaaaagactttaatga

SEQ ID NO: 394245 - DNA, 120 bp, Artificial Sequence
  ENSG00000145451_20 (sequence is synthesized)
tttggaatactaaatttaattgtttagaatattaagttttcctctgtgcaaatttaaaacaaataacaagagatcgtgttacagtcacaatctacttttcttaaactttgtatctctagg

SEQ ID NO: 394246 - DNA, 120 bp, Artificial Sequence
  ENSG00000145451_21 (sequence is synthesized)
aacgaaggtggaaatacgggaaacaactttgtttttaaataagtattatagctatgtatttttagttattgccaaacattgaacaattcaagccagcacccttgtttttgttagactttt

SEQ ID NO: 394247 - DNA, 120 bp, Artificial Sequence
  ENSG00000145451_22 (sequence is synthesized)
aatagctacttaactgtatgtgattgtgtttaataatttgatataacaggacaaaattcagtaagacttttatattttagtttagaatgtgactttaaaattcaatgggattaaagtatt

SEQ ID NO: 394248 - DNA, 120 bp, Artificial Sequence
  ENSG00000145451_23 (sequence is synthesized)
tacattttgataaaaatgaatacaatgaaaacaaaatggattcatggaagattttttaataaaaaccattttcccatcaatgttttatgggtctcaactcctatctccaaatataagtag

SEQ ID NO: 394249 - DNA, 120 bp, Artificial Sequence
  ENSG00000145451_24 (sequence is synthesized)
ggaaagttttaattttaaatgatataagtaagtcatttctataaagtgaggactctttttctatttctgaattaatgatttcaaaatctaagccattcgcaagatgtgaataattttaaa

SEQ ID NO: 394250 - DNA, 120 bp, Artificial Sequence
  ENSG00000145451_25 (sequence is synthesized)
tgaaatttttacataaaatttttcaatgaccccatgggattacttcaacaaaaacagagcattagtaacttgttttttgcagtgtaattgggtgcaaatgtatgatagagttcttggtaa

SEQ ID NO: 394251 - DNA, 120 bp, Artificial Sequence
  ENSG00000145451_26 (sequence is synthesized)
acagaaccagactctgactctttttcagttttgctatttttttaactatttttaccataaatttatttggaaaagctttggaatgctttttaggtattttaattattggtcagatgcaca

SEQ ID NO: 394252 - DNA, 120 bp, Artificial Sequence
  ENSG00000145451_27 (sequence is synthesized)
aactcagtccaccaaattattcacagagaaaactttaaagattaagaaaacaatgaactcagatgtacaatagaaaagccagttctttaacaagatgctattttctacccttcaaccact

SEQ ID NO: 394253 - DNA, 120 bp, Artificial Sequence
  ENSG00000145451_28 (sequence is synthesized)
caaccactttcaaattaaaagcaaaaactaccatttaaaactaaaacctttacaatgttattgtacatcagcttatacaattgtaattttttaaaataacattttaaaaaatagtaaatg

SEQ ID NO: 394254 - DNA, 120 bp, Artificial Sequence
  ENSG00000145451_29 (sequence is synthesized)
tttttgctagtaaaagaccaagttcccctcctttataagtaacttaaaacaacactataaggaaataatatcatgtttggcattatgtgcaaatgacacaaccaaaagaatttgttactc

SEQ ID NO: 394255 - DNA, 120 bp, Artificial Sequence
  ENSG00000145451_30 (sequence is synthesized)
tgtaagtacccacgttgaggactgtgcacctgaaaattaaacatatgcttcttcatttggtgtgtatttaacaaaaccatggaaacatattcttgttctaaagattagagcaagatatgt

SEQ ID NO: 394256 - DNA, 120 bp, Artificial Sequence
  ENSG00000145451_31 (sequence is synthesized)
catttgtattccttgagaattagcaggagagtttgaggtaattataaactacatcatctcgatgtgtctctgaaatacctgaatacgtttttctatactttccacatcttatttcaaaag

SEQ ID NO: 394257 - DNA, 120 bp, Artificial Sequence
  ENSG00000145451_32 (sequence is synthesized)
tttcccaacattgcttaagtgaattctgccaggagcaaacagaaatataatgaatgcaaacatgcttacttccaaaagaaattcacagacatcacttctttccatatttgagaatattat

SEQ ID NO: 394258 - DNA, 120 bp, Artificial Sequence
  ENSG00000145451_33 (sequence is synthesized)
aaatgtgtctttgttaaatcagaaacttagaaagtgaaaataccaaacatgagacaatattgtcaacaaggacgttggtacattagaaatctatctcaaaagtattacactttccttagg

SEQ ID NO: 394259 - DNA, 120 bp, Artificial Sequence
  ENSG00000145451_34 (sequence is synthesized)
catagttttcctttcctattatatttgtcactgtcttactgcactaagaaaatactttaacagctttcactcacaaggcaacagtgacaaggtgcatgtggctgaatccaatatgtttaa

SEQ ID NO: 394260 - DNA, 120 bp, Artificial Sequence
  ENSG00000145451_35 (sequence is synthesized)
aggaatgtgtctcctccttcgaactcttatagaccttttaaaactgaaaaattacattgcagttagcatcctgagataatatttgcctcaataagccctgtgtccaaccagaatatttta

SEQ ID NO: 394261 - DNA, 120 bp, Artificial Sequence
  ENSG00000145451_36 (sequence is synthesized)
ttaactactaaacacacaaattggaattccaatgtgcatattctgaagtattttaaaatagccacattagaaaatatgggattttcatgtatgcagtttatatcattttcttaaaaagaa

SEQ ID NO: 394262 - DNA, 120 bp, Artificial Sequence
  ENSG00000145451_37 (sequence is synthesized)
ttatttgtatgtcaatcattgaaatatttgattccatagcatatgaatttataggctatcttatacattagcatatatgtgcccaaccttttctttctttcccaaccattagaattgaac

SEQ ID NO: 394263 - DNA, 120 bp, Artificial Sequence
  ENSG00000145451_38 (sequence is synthesized)
ttaaaccataatgaggctctagaacttactttacaactttaaatagattcaagagtcactgtattttcaagaaagctgagggtgtttaaaacttctccaacccttccaaaagtttctcca

SEQ ID NO: 394264 - DNA, 120 bp, Artificial Sequence
  ENSG00000145451_39 (sequence is synthesized)
tggcgctggagaccccatccaactctcagtggctatattagggaatcatccggactgctcatcttattctaaaattaattcttattctgttgatatattctaataacttttatcttaatt

SEQ ID NO: 394265 - DNA, 120 bp, Artificial Sequence
  ENSG00000145451_40 (sequence is synthesized)
tggaatttaattgcttgtatatttatatatccctaagacatgaattcatgtattagtttatgaatacccaggatctcatggaaggtaagggaaattttagaaaaaaaaatgaataatcta

SEQ ID NO: 394266 - DNA, 120 bp, Artificial Sequence
  ENSG00000145451_41 (sequence is synthesized)
aatgtttaactaacagaagagagcaagctgttcactactttagtactcagtgcaacttaagtagttataatatttgaaaaaagatttagatgtatcttccatactatacatccctttttc

SEQ ID NO: 394267 - DNA, 120 bp, Artificial Sequence
  ENSG00000145451_42 (sequence is synthesized)
tgaacattttttattccactttttaaaatatgcttttctatttttctcaacacaacatacttcaacctgctggttacttgggaggactgaatattatactggcagctaaatttttatttc

SEQ ID NO: 394268 - DNA, 120 bp, Artificial Sequence
  ENSG00000145451_43 (sequence is synthesized)
atctataaagtacacattccaggaaatggacatgagagaatacaagagacttgccaaaattgaaatggaaaatacttgcagtattttgtaaatggaaaagaaggaaactgacagcattgt

SEQ ID NO: 394269 - DNA, 120 bp, Artificial Sequence
  ENSG00000145451_44 (sequence is synthesized)
ttttcacaggtgtcccctaaaaatttagaacactctaagaacaaaactctgagaacaaaaatgtatctaatgatccttagacagatatcattaacaatccttgaggtcatgatatcttct

SEQ ID NO: 394270 - DNA, 120 bp, Artificial Sequence
  ENSG00000145451_45 (sequence is synthesized)
actccaaaagtgattccacactctttgcaacatagataatagcataaactcccaaaatttatcagcatatacgacctatatttttcatctagttaatattgaactagcaaagaaaagcaa

SEQ ID NO: 394271 - DNA, 120 bp, Artificial Sequence
  ENSG00000145451_46 (sequence is synthesized)
gccattccaaatataagacaatctggtgttaatacaatatattagaagaaatagtgtaaatgttcacacagattccctcttgcaaataaagtacccataatacccattgcatcttgtacc

SEQ ID NO: 394272 - DNA, 120 bp, Artificial Sequence
  ENSG00000145451_47 (sequence is synthesized)
tgtataagagacatcttcctcagcagatgcattggtttttatttccttatttgtgtgctacagtggtaaatatagcctcactgcattttttttattgttatataaacctttcatggataa

SEQ ID NO: 394273 - DNA, 120 bp, Artificial Sequence
  ENSG00000145451_48 (sequence is synthesized)
ataagcagtgtacactgtaaattgcattaatttaattaactttaaaattaaacttttatctcagcccccattcctctttacaaacatagtgatattaaaaagtgaacttccatagggaga

SEQ ID NO: 394274 - DNA, 120 bp, Artificial Sequence
  ENSG00000145451_49 (sequence is synthesized)
cacctggtactccaattacttcaaaagtaaagtgatgcatattcttccataacaaagatacttataggccatgtgtaaaatataactctctacaatttaaacggaactagggcagggaaa

SEQ ID NO: 394275 - DNA, 120 bp, Artificial Sequence
  ENSG00000145451_50 (sequence is synthesized)
aatatcctggggaagcttcttccagatatgaggacaagagatataatcccaagttagtagctaggacccacttacctgtttttttggtctacattttacatcttaataatgccttcatct

SEQ ID NO: 394276 - DNA, 84 bp, Artificial Sequence
  ENSG00000145451_51 (sequence is synthesized)
tggtaatgagatgaattcctttagattaaaaatacaaagacagtcaatttttctagacaaaggttcataatcctgtgatatgtt

SEQ ID NO: 394277 - DNA, 120 bp, Artificial Sequence
  ENSG00000145451_52 (sequence is synthesized)
caatttttctagacaaaggttcataatcctgtgatatgttttgcaatattaagtgattcctggtggaaaatatgaaccatgcagtcattcgatttggccagctcttaatcatgcaacaat

SEQ ID NO: 394278 - DNA, 120 bp, Artificial Sequence
  ENSG00000145451_53 (sequence is synthesized)
cttttgcctcaaaaacacataaacaaagctaactggatcaagtctttaacccttaacaatcgaattctaaaacactatttgaaccgtttttgaagaacagctaaataactgtcaaaaacc

SEQ ID NO: 394279 - DNA, 120 bp, Artificial Sequence
  ENSG00000145451_54 (sequence is synthesized)
tttttcaaaagacagctagtaatattggatgactttgtagtgtctgaacaggtggttttctcagtagtttttgtggttaacacataaacaaagaggagacatttaaggtgatggagtatt

SEQ ID NO: 394280 - DNA, 120 bp, Artificial Sequence
  ENSG00000145451_55 (sequence is synthesized)
atttttaaaaagtgattttgaaccctggctatgtgttggaattccttacacattttaaaaatacatacatatgcttggtgtccaacatagaagattatgatttaatcattgattaaacaa

SEQ ID NO: 394281 - DNA, 120 bp, Artificial Sequence
  ENSG00000145451_56 (sequence is synthesized)
atattcattgagtaccttatgtgtgcctggcactgtcccaagtgctaaatttagtatttttggaataagatctgaaattctggatgattgaaaaaattccagaagtgagagaattcgtgt

SEQ ID NO: 394282 - DNA, 120 bp, Artificial Sequence
  ENSG00000145451_57 (sequence is synthesized)
gaacttacacaagcttattctcttaataaggatcaatttaacactttttaagttttatcattttttctttcttcaagcaactaattttagttgtctctcatttatattcttagaattaaa

SEQ ID NO: 394283 - DNA, 66 bp, Artificial Sequence
  ENSG00000145451_58 (sequence is synthesized)
aatcacttgaggtcaggagttaagacaccagcctggccaatatgataaaaccctgtctctactaaa

SEQ ID NO: 394284 - DNA, 62 bp, Artificial Sequence
  ENSG00000145451_59 (sequence is synthesized)
atgatggcaggtgcctgtaatcccagttactcaagggaggctgaggtggaagaatactgggt

SEQ ID NO: 394285 - DNA, 120 bp, Artificial Sequence
  ENSG00000145451_60 (sequence is synthesized)
gacagagtgagactctgtctcacaaacaaacagacagacaaaaaaagaatttaaaataaatctttgatgcgtttcaattcagctttcctcccaatgtcagaatcttcaccattacattat

SEQ ID NO: 394286 - DNA, 120 bp, Artificial Sequence
  ENSG00000145451_61 (sequence is synthesized)
aatgtcagaatcttcaccattacattatccacattcttcgagcacccagatagcaacaggtagctcattactctgagggcagtcttctgttccattgtgacataactctagatgataaaa

SEQ ID NO: 394287 - DNA, 120 bp, Artificial Sequence
  ENSG00000145451_62 (sequence is synthesized)
atgttaatcttcatcaagaaatgacttttacttcctaaaataccaagtaagtttattcccctcctataagacaactagcatatattttcacatttctgctgtctgtgtttaagttcaatc

SEQ ID NO: 394288 - DNA, 120 bp, Artificial Sequence
  ENSG00000145451_63 (sequence is synthesized)
aaccccttatcactagctttattcttatttaaaccattcatgagagcattgtaagtgttaaacaatgatgagatattttcaggcttataaaataatgaaatataaaattaattatctaca

SEQ ID NO: 394289 - DNA, 120 bp, Artificial Sequence
  ENSG00000145451_64 (sequence is synthesized)
attatataaaactctacaaagtaatatgaatttaaaaaaactagcagcaaaccatattaaccatattgtgtgtttttagagtaaagctataacaaaagtacaggggattaagttgtttta

SEQ ID NO: 394290 - DNA, 120 bp, Artificial Sequence
  ENSG00000145451_65 (sequence is synthesized)
ttttaatagctgcttttactctggggtggttttagcaatggcgcctttgggcaaccccgctcacatacacagtatccagcctgggtggttaatactagggagctgtgacttaaatggcag

SEQ ID NO: 394291 - DNA, 120 bp, Artificial Sequence
  ENSG00000145451_66 (sequence is synthesized)
gaaaggattcagatgtaaaattgtacttgaatatgcttgaataattttgcacttcttcacttttttctctatgaattattcaatggtcattacttaaatttgtattttaatgtatgataa

SEQ ID NO: 394292 - DNA, 120 bp, Artificial Sequence
  ENSG00000145451_67 (sequence is synthesized)
atgataatatggggggggaaatagagtgaagtaccctgacattctacagatataatatgatatgctatgaaaaacaaaacaaaaagaaaatgtgccatatattttccatgtaccatcttt

SEQ ID NO: 394293 - DNA, 120 bp, Artificial Sequence
  ENSG00000145451_68 (sequence is synthesized)
atatgatatacagtgacttcattattagtgagtcaagttgtttaaaggactaccaaaagaagtattgctattttatggtttttatggtgtaaattatttttctgtcttcttgagtcttat

SEQ ID NO: 394294 - DNA, 120 bp, Artificial Sequence
  ENSG00000145451_69 (sequence is synthesized)
gtctaagtctgtcttccttgtccagatgctgtcatatttttccaggaaattatactgaaaacatatttaaaaatttatgcacgatttcatcaacttgtttttcattatattatatttagt

SEQ ID NO: 394295 - DNA, 120 bp, Artificial Sequence
  ENSG00000145451_70 (sequence is synthesized)
tcaattttgcaactaacagactctctatcagagtcattaacctgtgaacagtataaagtatttaacatgtaactatagataatttgatccgaaacaataaaaatgaacacttttcaagaa

SEQ ID NO: 394296 - DNA, 120 bp, Artificial Sequence
  ENSG00000145451_71 (sequence is synthesized)
tcttcaaatgcttcatatcttcagtttctttgttaacaaaaattgtgctagaaaaagaaaaaatcttgttgaatttacaaatggagcatctgttatgtttcatgagagatctggctttcc

SEQ ID NO: 394297 - DNA, 120 bp, Artificial Sequence
  ENSG00000145451_72 (sequence is synthesized)
tgcttttttaaagaaagaagaagaaggtccttgcaaagacgactaattgaacttacatatttatctgtatttcctctgaaaccccattaaaaaaaggaaataaacggaataaagaataaa

SEQ ID NO: 394298 - DNA, 120 bp, Artificial Sequence
  ENSG00000145451_73 (sequence is synthesized)
gaggaaataaaacacaaacaagaacagacgcttaagaaatgcctacatttagaagttgttggaaaaaattccagacaaaggcaaagatggcaaattaaaatcaacacgattcaacctcga

SEQ ID NO: 394299 - DNA, 120 bp, Artificial Sequence
  ENSG00000145451_74 (sequence is synthesized)
cccactggaaagtaggcaaaaagagtttaacctactggaaagcaagagctgtcagaatcccagggtccacttttgaatgaaatctgactgcagaaaggaagaaaagaaaatgttcaataa

SEQ ID NO: 394300 - DNA, 120 bp, Artificial Sequence
  ENSG00000145451_75 (sequence is synthesized)
tattaagacgtgggaagtaggcaaaaaggaaacataatttaaaagcaaacactttaatggcttgcaatggtacaacttccttaaattcagtaaaagttcaataaatatatgtcaatggtc

SEQ ID NO: 394301 - DNA, 120 bp, Artificial Sequence
  ENSG00000145476_0 (sequence is synthesized)
cggtctttcgctttcggctggggcgtggaggccgcggtgctgcgtaggccgggccgggcgcaggaacagccccgtggcgccctctctggccgccgcccgggcgggaaacgtcgttccggg

SEQ ID NO: 394302 - DNA, 80 bp, Artificial Sequence
  ENSG00000145476_1 (sequence is synthesized)
cggggaagtgggcggtgtgcggccggcaccgcctcgcaccacgcccccgcgggcccgcactttcccggagtgcaccccgc

SEQ ID NO: 394303 - DNA, 120 bp, Artificial Sequence
  ENSG00000145476_2 (sequence is synthesized)
ggccgccagccggggcgatggcggggctctggctggggctcgtgtggcagaagctgctgctgtggggcgcggcgagtgccctttccctggccggcgccagtctggtcctgagcctgctgc

SEQ ID NO: 394304 - DNA, 120 bp, Artificial Sequence
  ENSG00000145476_3 (sequence is synthesized)
agagggtggcgagctacgcgcggaaatggcagcagatgcggcccatccccacggtggcccgcgcctacccactggtgggccacgcgctgctgatgaagccggacgggcgagaattttttc

SEQ ID NO: 394305 - DNA, 120 bp, Artificial Sequence
  ENSG00000145476_4 (sequence is synthesized)
agcagatcattgagtacacagaggaataccgccacatgccgctgctgaagctctgggtcgggccagtgcccatggtggccctttataatgcagaaaatgtggaggtaattttaactagtt

SEQ ID NO: 394306 - DNA, 120 bp, Artificial Sequence
  ENSG00000145476_5 (sequence is synthesized)
caaagcaaattgacaaatcctctatgtacaagtttttagaaccatggcttggcctaggacttcttacaagtactggaaacaaatggcgctccaggagaaagatgttaacacccactttcc

SEQ ID NO: 394307 - DNA, 120 bp, Artificial Sequence
  ENSG00000145476_6 (sequence is synthesized)
attttaccattctggaagatttcttagatatcatgaatgaacaagcaaatatattggttaagaaacttgaaaaacacattaaccaagaagcatttaactgctttttttacatcactcttt

SEQ ID NO: 394308 - DNA, 120 bp, Artificial Sequence
  ENSG00000145476_7 (sequence is synthesized)
gtgccttagatatcatctgtgaaacagctatggggaagaatattggtgctcaaagtaatgatgattccgagtatgtccgtgcagtttatagaatgagtgagatgatatttcgaagaataa

SEQ ID NO: 394309 - DNA, 120 bp, Artificial Sequence
  ENSG00000145476_8 (sequence is synthesized)
agatgccctggctttggcttgatctctggtaccttatgtttaaagaaggatgggaacacaaaaagagccttcagatcctacatacttttaccaacagtgtcatcgctgaacgggccaatg

SEQ ID NO: 394310 - DNA, 120 bp, Artificial Sequence
  ENSG00000145476_9 (sequence is synthesized)
aaatgaacgccaatgaagactgtagaggtgatggcaggggctctgccccctccaaaaataaacgcagggcctttcttgacttgcttttaagtgtgactgatgacgaagggaacaggctaa

SEQ ID NO: 394311 - DNA, 120 bp, Artificial Sequence
  ENSG00000145476_10 (sequence is synthesized)
gtcatgaagatattcgagaagaagttgacaccttcatgtttgaggggcacgatacaactgcagctgcaataaactggtccttatacctgttgggttctaacccagaagtccagaaaaaag

SEQ ID NO: 394312 - DNA, 120 bp, Artificial Sequence
  ENSG00000145476_11 (sequence is synthesized)
tggatcatgaattggatgacgtgtttgggaagtctgaccgtcccgctacagtagaagacctgaagaaacttcggtatctggaatgtgttattaaggagacccttcgcctttttccttctg

SEQ ID NO: 394313 - DNA, 120 bp, Artificial Sequence
  ENSG00000145476_12 (sequence is synthesized)
ttcctttatttgcccgtagtgttagtgaagattgtgaagtggcaggttacagagttctaaaaggcactgaagccgtcatcattccctatgcattgcacagagatccgagatacttcccca

SEQ ID NO: 394314 - DNA, 120 bp, Artificial Sequence
  ENSG00000145476_13 (sequence is synthesized)
accccgaggagttccagcctgagcggttcttccccgagaatgcacaagggcgccatccatatgcctacgtgcccttctctgctggccccaggaactgtataggtcaaaagtttgctgtga

SEQ ID NO: 394315 - DNA, 120 bp, Artificial Sequence
  ENSG00000145476_14 (sequence is synthesized)
tggaagaaaagaccattctttcgtgcatcctgaggcacttttggatagaatccaaccagaaaagagaagagcttggtctagaaggacagttgattcttcgtccaagtaatggcatctgga

SEQ ID NO: 394316 - DNA, 120 bp, Artificial Sequence
  ENSG00000145476_15 (sequence is synthesized)
tcaagttgaagaggagaaatgcagatgaacgctaactatattattgggttgtgcctttatcatgagaaaggtctttattttaagagatccttgtcatttacaatttacagatcatgagtt

SEQ ID NO: 394317 - DNA, 120 bp, Artificial Sequence
  ENSG00000145476_16 (sequence is synthesized)
agttcaatatgcttgaatcccctagacctaatttttccttgatcccactgatcttgacatcaagtctaacaaagaaaaagttttgagttttgtattttcttttttcttttttctttattt

SEQ ID NO: 394318 - DNA, 120 bp, Artificial Sequence
  ENSG00000145476_17 (sequence is synthesized)
tggtcacaaaagtagttaattgtgtcagcacccaaataaacatctaacaggtttctcaacagaggaatccacagtccaattccacttcaattgatagacccaaaaaatataatttaatca

SEQ ID NO: 394319 - DNA, 70 bp, Artificial Sequence
  ENSG00000145476_18 (sequence is synthesized)
tccacttcaattgatagacccaaaaaatataatttaatcaaagttctagagtcgcagtggtgacatctcg

SEQ ID NO: 394320 - DNA, 66 bp, Artificial Sequence
  ENSG00000145476_19 (sequence is synthesized)
aagttctagaattttttaaaggtattcatggtgactcaggaatacacacatacacacacacacaca

SEQ ID NO: 394321 - DNA, 120 bp, Artificial Sequence
  ENSG00000145476_20 (sequence is synthesized)
cacacacacacacatacacacatataatttgaaagaggtgagtatgtactctgacttcagctctcaggttttaaaaattatattagtgggaccagttatgacaagaataatcattatagt

SEQ ID NO: 394322 - DNA, 120 bp, Artificial Sequence
  ENSG00000145476_21 (sequence is synthesized)
acaagaataatcattatagtacttttcagattttataacctggagcagattattttaagttgattagtaggttctgttacagtttttcttttgatcgtgcacttatagtcttcatttaat

SEQ ID NO: 394323 - DNA, 120 bp, Artificial Sequence
  ENSG00000145476_22 (sequence is synthesized)
tcctcatagaatcccagtcacctttatatatcatattattggaagagattcatcttcataatctccagttttttcacagtgcctcacagagttaatcatgccttttggagctagaaggac

SEQ ID NO: 394324 - DNA, 120 bp, Artificial Sequence
  ENSG00000145476_23 (sequence is synthesized)
tttagaacttatctagttatgctcctttatattataagtaagggaatagaatcaataagacagtttctgcccaaagtcatgttaccagttggtgacagagctggaaatacgtagagatct

SEQ ID NO: 394325 - DNA, 120 bp, Artificial Sequence
  ENSG00000145476_24 (sequence is synthesized)
atacccttaaatctctccactcacatgctgatatactttctactacaatatgctatagctttatggaactcagggtgatgatcagacgtgtcattagaacatgagtcctctgcttctgat

SEQ ID NO: 394326 - DNA, 120 bp, Artificial Sequence
  ENSG00000145476_25 (sequence is synthesized)
tcaggcatacttttgggattcttccatctttaaaggaaaaaggaagccattcatctatatttagtaacccagtaatatctcacttagtttagggttagatctttagttaattcaacctta

SEQ ID NO: 394327 - DNA, 120 bp, Artificial Sequence
  ENSG00000145476_26 (sequence is synthesized)
tagatcatacttatgaaggtgataactgacacgtgttcactgaattttaatttgataggcaatacatctacccactccattattttttaaaacttcatttaatagtttaaacaagattgg

SEQ ID NO: 394328 - DNA, 120 bp, Artificial Sequence
  ENSG00000145476_27 (sequence is synthesized)
ttttgttttcaatttttattcactcttcatagaatcacaattacctttatatatcatatgttattggaagagattcctcagtaatctccaatctctcatagtgcctcacagggttggtca

SEQ ID NO: 394329 - DNA, 120 bp, Artificial Sequence
  ENSG00000145476_28 (sequence is synthesized)
atggcttttggaactggaaggaccttagaacttatctgttatgctcctgatagccaatagcagatagaagcttgcaatcaagagggtaggacatgtgttcttcaatggatatcaaaggaa

SEQ ID NO: 394330 - DNA, 120 bp, Artificial Sequence
  ENSG00000145476_29 (sequence is synthesized)
gaggttgcaaaccaaagccatttggcaagccctgtagcctgggccatttaagacaggggcggtctcagccaaattgcacccatttaactatcccaaagagccacagtgcctacaacccag

SEQ ID NO: 394331 - DNA, 120 bp, Artificial Sequence
  ENSG00000145476_30 (sequence is synthesized)
gccctaagttgatgaagaaaaagtcaaggaaggaggtgatacaattggaaatattcccatcaaatggttaatcttatttagaaaatgggcatattagaaaaagtccttccaagatgattt

SEQ ID NO: 394332 - DNA, 120 bp, Artificial Sequence
  ENSG00000145476_31 (sequence is synthesized)
tggataataaaagttgtatttgtggaaattggtattatctctgttttatgcacttacatttatcccttacattttgtttttagtgaccctacatgacattaaatttaaagtaaaacattg

SEQ ID NO: 394333 - DNA, 120 bp, Artificial Sequence
  ENSG00000145476_32 (sequence is synthesized)
tttaatgttaccttttggcttgagaatgtctttcagctccagaattattgttactcatattttaatcagtaagtcatttaagctatgacagagtaggaattgagaaattatttcatatgc

SEQ ID NO: 394334 - DNA, 120 bp, Artificial Sequence
  ENSG00000145476_33 (sequence is synthesized)
tacagtattgaaatgtggatgctgccttgttttataagaagatgatcaaggtttgtgtgcccattacctttcctctgcctgaaagacgtgtctcaagaaaaataaattctattttagatg

SEQ ID NO: 394335 - DNA, 120 bp, Artificial Sequence
  ENSG00000145476_34 (sequence is synthesized)
caggtactgcattttattctaagaattgatatcaattcaaaacatagaaaactgtaaaagataaatcaggagatggctgattcataatgggtaataaaataaatagcactttcgagctga

SEQ ID NO: 394336 - DNA, 120 bp, Artificial Sequence
  ENSG00000145476_35 (sequence is synthesized)
gcgctacgctggcgtaagaggtggcggtggagacgtttcgctggcgtaagaggtggaggtggagacgttacgctggcgggcacgatacaactgcagctgcaataaactggtccttatacc

SEQ ID NO: 394337 - DNA, 120 bp, Artificial Sequence
  ENSG00000145476_36 (sequence is synthesized)
ggggaaggcagagaagtacagccctgacaagcaggctcgtgaaaatcagactttgttctgttcacaaaggcgcagctcacctcgtgcccatggaacgccgcctttattaacacagcacag

SEQ ID NO: 394338 - DNA, 120 bp, Artificial Sequence
  ENSG00000145476_37 (sequence is synthesized)
gcacgtcccaccagcgtgcaacaccgtgcggcgtggaactgccatctctaggcatgaacctccgctttgcaggcttgtttccttgtttgtcaccgaggcaaggggcacgatacaactgca

SEQ ID NO: 394339 - DNA, 72 bp, Artificial Sequence
  ENSG00000145476_38 (sequence is synthesized)
tcgtgagccaccacgcctggccagagttttttatttttatcaccaccatagatgttacagttggctgtggtc

SEQ ID NO: 394340 - DNA, 120 bp, Artificial Sequence
  ENSG00000145476_39 (sequence is synthesized)
ggtatgccagtgtacctttgtaaagctgtctatagaaatggttacttctacgtgcaacttgttatttcaagaattaacacagggtagctttttctgtagcaggactgttctctcagaaag

SEQ ID NO: 394341 - DNA, 120 bp, Artificial Sequence
  ENSG00000145476_40 (sequence is synthesized)
gaggagaaaggctggaaaggaaggtccagctggcagctggcctttgcccgtcaagaggccaagagtccaggtgaacagttatcttcagctgtggtattcaatagcgactgtcgccagtgt

SEQ ID NO: 394342 - DNA, 120 bp, Artificial Sequence
  ENSG00000145476_41 (sequence is synthesized)
tcaggaagactcaggaggtcctgatggacgggagtggacgggatggaggacacagtaaagcaaaggagtgtctggagcagggaaatcttgaaaatccaatcaaaaagatggtcagcccca

SEQ ID NO: 394343 - DNA, 120 bp, Artificial Sequence
  ENSG00000145476_42 (sequence is synthesized)
gagaagtacagtgagctggtatctagaaacagggctccatcctctgagagagggccccacaagagcaaggcaggagcctagcagggactttggagaactggagaggggagagatcaaggt

SEQ ID NO: 394344 - DNA, 120 bp, Artificial Sequence
  ENSG00000145476_43 (sequence is synthesized)
agaaccatggagtgtgaggatcatctgaggactgaggtattgatggaaggagaaataaatttattattagaaactcggaacttagaaattgagaaaaattcttaaatttttcaattttat

SEQ ID NO: 394345 - DNA, 120 bp, Artificial Sequence
  ENSG00000145476_44 (sequence is synthesized)
gaatgctattttaaacatgtatagaacaatgtccaaaatactcatattttgtaactatagatgaatattttatagatatgtgtatatctttgtcattctgccaaaagcatttgagaacct

SEQ ID NO: 394346 - DNA, 120 bp, Artificial Sequence
  ENSG00000145476_45 (sequence is synthesized)
gtagatgaagctgtttcaggagaattttgttgacttgctatatttatgctttaatcgttttggatgttacttttctctttctctctctctctctgtagatatattttttgtaaccacata

SEQ ID NO: 394347 - DNA, 120 bp, Artificial Sequence
  ENSG00000145476_46 (sequence is synthesized)
aagagaaaatggcccaaacaggaaatcacactccaccgggaaggcaaatggggggacgggaaagggtgacgggctcttcagcgcggttctacgaccgcactggccttctgaggagcagca

SEQ ID NO: 394348 - DNA, 120 bp, Artificial Sequence
  ENSG00000145476_47 (sequence is synthesized)
gccacgcccagggctgtgagtggggcaggcatggagcaactgcccagggaggcgaagggaaggaagaacaggaacagggagtagaagtggaccgtacaagagaagagggtaaagggagga

SEQ ID NO: 394349 - DNA, 120 bp, Artificial Sequence
  ENSG00000145476_48 (sequence is synthesized)
agaagaattctgaaatatacaaggacaaagcaggatgtacgtctttagtgtctgccgctgcaaaataaacacgagataactaacgtgcgtgaattgaatggttgcttctcacccatattt

SEQ ID NO: 394350 - DNA, 120 bp, Artificial Sequence
  ENSG00000145476_49 (sequence is synthesized)
agaagaagttgacaccttcatgtttgaggtattgtatattgttaggttcagatatcattaaacaaatttcagttattgttagaatctttagcattattttttaaaacaatcaaattttaa

SEQ ID NO: 394351 - DNA, 120 bp, Artificial Sequence
  ENSG00000145476_50 (sequence is synthesized)
agtagtttaactaaagaagattcattatattttaattagaaattacaaaatttaagaaactgattaagtaccagctcaacttcttcagaaaacgattttgactagtgctgggcacagcag

SEQ ID NO: 394352 - DNA, 120 bp, Artificial Sequence
  ENSG00000145476_51 (sequence is synthesized)
tagacacatttgtttttcctcaagaaaacctaagatttgtcagagttttcccaagcagaagagcagccagagattgctctcagttctccatgtggcttcaggcttccttctaacctccca

SEQ ID NO: 394353 - DNA, 120 bp, Artificial Sequence
  ENSG00000145476_52 (sequence is synthesized)
gacatgcaagtccacttcctcaccacctgctttctgaggttccagcagatgagcacttagctgctgccatgagctactctacctagaggacagttaagagccctccaacagagaatcagc

SEQ ID NO: 394354 - DNA, 120 bp, Artificial Sequence
  ENSG00000145476_53 (sequence is synthesized)
cagttcatgattctaaaaagatctctgatctcaaatttatacatacatatgtgaagtacattttagcaagatagcctaaatattaaatcctacaaagagggactttctctatatgtggat

SEQ ID NO: 394355 - DNA, 120 bp, Artificial Sequence
  ENSG00000145476_54 (sequence is synthesized)
tgcaaaataaataaaacatggtttttagaagccatgtagtaatatcgtccacatggggcagagtgaaaggcacctgagtttttaatggctctgcctgccacccacgtgtgagctgctctg

SEQ ID NO: 394356 - DNA, 120 bp, Artificial Sequence
  ENSG00000145476_55 (sequence is synthesized)
cggcagcctctggcggcagtgccagtgtcctgcactctggtgtgaggctccacgacacggtagaagaaggttgtgtgatgggtctttcgatccgagttccagttcaggctctgtgctgat

SEQ ID NO: 394357 - DNA, 120 bp, Artificial Sequence
  ENSG00000145476_56 (sequence is synthesized)
tagccaaataagatagttctgatcattccagagttctgtcacaattttcctatgtgtaaagcgagagatggactacgttggtggttttaaacttttttaagcagaaaactttactgaaaa

SEQ ID NO: 394358 - DNA, 120 bp, Artificial Sequence
  ENSG00000145476_57 (sequence is synthesized)
taaatcttaagcagaaaatggacatctaaattagctgaaaagtagagaggtgttaagtgtgtgggctctaagatcaaatcccagctaacatgctgggaccatgacctcaagcacctcacc

SEQ ID NO: 394359 - DNA, 120 bp, Artificial Sequence
  ENSG00000145476_58 (sequence is synthesized)
tagccgttctgggcctgaatattcttattttaatagcacaagcctcatggaatagttatgatgattagatttgtaaaggtgctctgagaatcgtgattggcccataagtatgcggcacat

SEQ ID NO: 394360 - DNA, 120 bp, Artificial Sequence
  ENSG00000145476_59 (sequence is synthesized)
accgggtgttattattgcatgtcggagtagagagatctcacatcttcaccttgcccatgtactacacacacacacgcatacactcatgtaaacccatgcacacacatgcacacacttaca

SEQ ID NO: 394361 - DNA, 120 bp, Artificial Sequence
  ENSG00000145476_60 (sequence is synthesized)
cacacacatatgctcatgcacatacacatgcacagacacatgtatataccaacatacacacattcacatatacacacatacacaaacacatgcacacacctacatacactcatgcacata

SEQ ID NO: 394362 - DNA, 120 bp, Artificial Sequence
  ENSG00000145476_61 (sequence is synthesized)
catgcacacacaaacatatgtatatccacatgcgcacacacgtgcatacactcacacacaaatatacacacacacccagatactcatgcacatacacacacatgcacacatatacccaca

SEQ ID NO: 394363 - DNA, 120 bp, Artificial Sequence
  ENSG00000145476_62 (sequence is synthesized)
tgcacacatgcatgcatacacatgcatgcacacatatacccacatgcacacatgcatgcatacacatacatgcacacaccaccccccacagaggcacacattcatgtacatttatgcaat

SEQ ID NO: 394364 - DNA, 120 bp, Artificial Sequence
  ENSG00000145476_63 (sequence is synthesized)
catacaaaaacacatgtacacacctacatacacacatgcgcatatacacatacatagatgcacatatatacacacatgcacacataaatgcacacagctatgtacactcgtgtacataag

SEQ ID NO: 394365 - DNA, 120 bp, Artificial Sequence
  ENSG00000145476_64 (sequence is synthesized)
cacaaaggcacacacaaatacatgtacatatccacgtacacacattcatatatgtgcacaaccccatacacatatgtacacacatgtgcacacacacatccatctcctaccaggaacctc

SEQ ID NO: 394366 - DNA, 120 bp, Artificial Sequence
  ENSG00000145476_65 (sequence is synthesized)
tcaatctcacgtaaacaatcagaaccagactaatgatttttcttccaactctaacattccttgacattctaattgttttcttctttgcattgaaagggaggcagcataccaggtgtgagt

SEQ ID NO: 394367 - DNA, 120 bp, Artificial Sequence
  ENSG00000145476_66 (sequence is synthesized)
gtgatactgtggcctcctccacaggtcggtgcaggctgtgagtgacactgtggcctcctccacaggccggtgcaggctgtgagtgtgatactgtggcctcctccacaggctggtgcaggc

SEQ ID NO: 394368 - DNA, 120 bp, Artificial Sequence
  ENSG00000145476_67 (sequence is synthesized)
tgcaactgcccaggttccagctgtgagctaaaagtgggcgtcctcccctgctccaccagtgtgcctcggtgctttacgtttgccttatcatgctttctgcagttggcagatgaaatgaaa

SEQ ID NO: 394369 - DNA, 120 bp, Artificial Sequence
  ENSG00000145476_68 (sequence is synthesized)
tcggaagttcagcagactcctcttatgcatttggatcaggcttccgctcataaattcaaggaaagctattaaaattgtttagccagaatacttccttccgtacttagacaactgagcaca

SEQ ID NO: 394370 - DNA, 120 bp, Artificial Sequence
  ENSG00000145476_69 (sequence is synthesized)
acgggccggagctcatctggagttccgagtaggttttgtaactgcaagtgctaggaaaatgcagaggcgccgacctcaggacctgtaggctgtgtcttttaagaattgcagaataagccc

SEQ ID NO: 394371 - DNA, 120 bp, Artificial Sequence
  ENSG00000145476_70 (sequence is synthesized)
attcattttaggagctgttttataaaacaagtactttgaagatttctgcacagagaatgaaatattacaaaaatcacttgtgccacataggaaaaatggaaaagtgagatcttttataga

SEQ ID NO: 394372 - DNA, 120 bp, Artificial Sequence
  ENSG00000145476_71 (sequence is synthesized)
ggaaataatttgttttttctttttgtcctcaaagtttcagagaggtagattactgttattgactttccagatacattttttttttttctgaagaactcaccacttttgcatatggaaatg

SEQ ID NO: 394373 - DNA, 120 bp, Artificial Sequence
  ENSG00000145476_72 (sequence is synthesized)
tgctagggagatgaggaggtagataagaagccaggtcctgaaatatcaaatgggtgggaaagaaggttgcccgagacattacactagcttaagaggtggaggcggagacgttacgctacc

SEQ ID NO: 394374 - DNA, 120 bp, Artificial Sequence
  ENSG00000145476_73 (sequence is synthesized)
gctaagaggtggaggtggagacgttacgctggcgtaagaggtggcggtggagacgctacgctggcgtaagacgcggcggtggagacgctacgctggcgtaagaggcggcggtggagacgc

SEQ ID NO: 394375 - DNA, 120 bp, Artificial Sequence
  ENSG00000145476_74 (sequence is synthesized)
tacgctggcgtaagaggcggcggtggaggcgctacgctggcgtaagaggcggcggtggaggcgctacgctggcgtaagaggtggcggtggagacgtttcgctggcgtaagaggtggaggt

SEQ ID NO: 394376 - DNA, 120 bp, Artificial Sequence
  ENSG00000145476_75 (sequence is synthesized)
ggagacgttacgctggcgtaagaggtggaggtggagcgtccttactgcacagggtgtggagggaatggcgtgggctcagctggctttgtcatcggacacgccgcaggctcagtttctgcc

SEQ ID NO: 394377 - DNA, 120 bp, Artificial Sequence
  ENSG00000145476_76 (sequence is synthesized)
tctgtttcccactaagctgtttagcacagaagaagttatttaaccacatctttggcctcagtttttaatctctgaattgtaaagaacagtaatgagtctttcatggagtttttgtgcaga

SEQ ID NO: 394378 - DNA, 120 bp, Artificial Sequence
  ENSG00000145476_77 (sequence is synthesized)
ttaattcagtttctgcaaagtgcttagtattttgcctaaaactcagcaagtatgaaatgaggttgttgtcaatttttactgcagaggatatgacttagaaccacacctctaccccctggt

SEQ ID NO: 394379 - DNA, 120 bp, Artificial Sequence
  ENSG00000145491_0 (sequence is synthesized)
gcgtcccgggtgcctggataccgagcgcgtccgtagtggcggctggcgctagggaactgcagggtctagggtgttgtcggagtggcagttggtccgaatttctcccgaagcccgcggagg

SEQ ID NO: 394380 - DNA, 120 bp, Artificial Sequence
  ENSG00000145491_1 (sequence is synthesized)
agcgggtaagagccccgcgaatccggccccaacctcgggaacgggatgggaggcggccctggccgcaagccccgcgctgctagcgggtccaccgcgtcgtagccgacagccgcccttctt

SEQ ID NO: 394381 - DNA, 120 bp, Artificial Sequence
  ENSG00000145491_2 (sequence is synthesized)
cctcgcagcgcgccgcgattcaccagcctggtcccttctgcggagagcgatgccgcttcccgacaccatgttctgcgctcagcagatccacattcccccggagctgccggacatcctgaa

SEQ ID NO: 394382 - DNA, 120 bp, Artificial Sequence
  ENSG00000145491_3 (sequence is synthesized)
gcaattcaccaaggctgccatccgcacccagccggccgacgtgctgcggtggtccgcgggctatttttcagctctgtcgagaggagatccacttcctgtaaaggacagaatggaaatgcc

SEQ ID NO: 394383 - DNA, 120 bp, Artificial Sequence
  ENSG00000145491_4 (sequence is synthesized)
agcagaagtggaagaacttgtgcctgccgaaggaaaaattcaaagcgctcttacaactggatccttgtgaaaacaaaatcaagtggataaactttttagcgcttggatgcagcatgcttg

SEQ ID NO: 394384 - DNA, 120 bp, Artificial Sequence
  ENSG00000145491_5 (sequence is synthesized)
gtgggtccttgaacactgcgctgaagcacctgtgcgagatcctcacggacgatccggagggcgggcccgctcgcatccccttcaagacgttttcctacgtttaccgctacttggccagat

SEQ ID NO: 394385 - DNA, 120 bp, Artificial Sequence
  ENSG00000145491_6 (sequence is synthesized)
tagactcagatgtgtctcccttggagacggaatcctaccttgcctctctaaaggaaaatatagacgccaggaagaacggcatgataggtctttcagatttcttctttccaaagaggaaac

SEQ ID NO: 394386 - DNA, 120 bp, Artificial Sequence
  ENSG00000145491_7 (sequence is synthesized)
ttttagaaagcattgaaaactctgaagatgtaggccattaatacagagaagaatacattttaatgtcaaaatagtgctctttaaaattctggcaccaaatacaacttaccctgaatcaca

SEQ ID NO: 394387 - DNA, 120 bp, Artificial Sequence
  ENSG00000145491_8 (sequence is synthesized)
gcggccccaggcgcaggcgggtcccgcagcggggcccgtgccgcccaggcgatcagccccttcacttaacccgcttccctcctagcaggcccgagtcccctagcctcagcctcacgcagc

SEQ ID NO: 394388 - DNA, 120 bp, Artificial Sequence
  ENSG00000145491_9 (sequence is synthesized)
cagagcaaggggaagagggagtccttcgtgagttcgccgctcacattcggcggtgggaaaccgatccgaagatgcttttgtaggcgaaacgctcagctcgcgcggctctgaaccaccggg

SEQ ID NO: 394389 - DNA, 120 bp, Artificial Sequence
  ENSG00000145491_10 (sequence is synthesized)
aggaaaatatgtaagtatgcaccctctctaggattcaggtatgttgaccatgggagaatttcctgtttcacttcccccttgtagggaaaaactcagtttttcctttgctctctcaccaca

SEQ ID NO: 394390 - DNA, 120 bp, Artificial Sequence
  ENSG00000145491_11 (sequence is synthesized)
gcctctctaaaggaaaatatggtcttgtcctggctgagcacaaccagaatctggagagaagaaagcctcatgatacacaggtcagctatgctgggctcagagcatggaagagccaggaga

SEQ ID NO: 394391 - DNA, 120 bp, Artificial Sequence
  ENSG00000145491_12 (sequence is synthesized)
ggctaaaggaatgtgctagacaaagaagtttgaaatatccagcacacggccattcgatgaagacatggtggggtccagcacacggccattcgaccatttgggtgaagatgcggtggggga

SEQ ID NO: 394392 - DNA, 120 bp, Artificial Sequence
  ENSG00000145494_0 (sequence is synthesized)
aaaggccagcggcgcaaaatggcggcggcgatgaccttctgccggctgctgaaccggtgtggcgaggcggcgcggagcctgcccctgggcgccaggtgtttcggggtgcgggtctcgccg

SEQ ID NO: 394393 - DNA, 120 bp, Artificial Sequence
  ENSG00000145494_1 (sequence is synthesized)
accggggagaaggtcacgcacactggccaggtttatgatgataaagactacaggagaattcggtttgtaggtcgtcagaaagaggtgaatgaaaactttgccattgatttgatagcagag

SEQ ID NO: 394394 - DNA, 120 bp, Artificial Sequence
  ENSG00000145494_2 (sequence is synthesized)
cagcccgtgagcgaggtggagactcgggtgatagcgtgcgatggcggcgggggagctcttggccacccaaaagtgtatataaacttggacaaagaaacaaaaaccggcacatgcggttac

SEQ ID NO: 394395 - DNA, 120 bp, Artificial Sequence
  ENSG00000145494_3 (sequence is synthesized)
tgtgggctccagttcagacagcaccaccactagagcgtgtggcacgccgggggtcccgcagcatcctgtgagcatttccgcggggaagctgagcacgtgaagctcgctggttctgtgcga

SEQ ID NO: 394396 - DNA, 120 bp, Artificial Sequence
  ENSG00000145494_4 (sequence is synthesized)
ggtattcctggtgctgaataaagggtgttgctgtcaaggctgacaatttgtaagtttgtttctttcatagtctgggctttggaagtgaacatccacgtggacatgggtagacatgcgagt

SEQ ID NO: 394397 - DNA, 120 bp, Artificial Sequence
  ENSG00000145494_5 (sequence is synthesized)
ggaagcagtgcccgctccagtgagcctgagctgcctcctgccggccgctgcctgccttaccggctgcttctgtgtgtctcctcttatccttggggccacgtgggctgcaggaatgggcgg

SEQ ID NO: 394398 - DNA, 120 bp, Artificial Sequence
  ENSG00000145494_6 (sequence is synthesized)
ggggcagggaaggagaaggagaagtgcctcttgttttgcagatgcaactgtgcttcagagagccaaggtgggtcttgaggtgcatagtgaaggagggtgcccaggcctcaactggtccta

SEQ ID NO: 394399 - DNA, 120 bp, Artificial Sequence
  ENSG00000145494_7 (sequence is synthesized)
tgggaaggtcagcctctctcctgttgctggcttgcagagctggtctatccgtccgtcctagtccctatgttgaaatgtcagatcttaaaacccaagaatttaagcactggtttgaaggca

SEQ ID NO: 394400 - DNA, 120 bp, Artificial Sequence
  ENSG00000145494_8 (sequence is synthesized)
tcgaaagtcacatactggccacattaaggacagtctatgtttttaaaagagtaaggattataatgtagtgtaacataaaaataaaagtagattttgagggaagagaaaggagtcttgcta

SEQ ID NO: 394401 - DNA, 120 bp, Artificial Sequence
  ENSG00000145494_9 (sequence is synthesized)
tggtgcgtagctggccacctgtgcacatgttagggcagcctgctcgtcctcatactccccttcactcccagtgcctgttctttctgtcctcttctctacctgctcccgaggcggccctta

SEQ ID NO: 394402 - DNA, 120 bp, Artificial Sequence
  ENSG00000145494_10 (sequence is synthesized)
cggggttcacactgctggcacattcaccctacagcgccacactacagggcctacatagagccgcctgtccgaaaaccccctttcaactgtgaagtggtgggcggcatgtttctcttctcg

SEQ ID NO: 394403 - DNA, 120 bp, Artificial Sequence
  ENSG00000145494_11 (sequence is synthesized)
aaaatgcccctgattacaccgagtactgtgcacttgtttgacttttcatcaatggcctaaaagttaagaaaaacactttcctgtaatatttatgattgatatgaagtgactttcagaatt

SEQ ID NO: 394404 - DNA, 120 bp, Artificial Sequence
  ENSG00000145495_0 (sequence is synthesized)
gttcccgcccctccccctcccgtgtcgctcgctttctgtcagcctctctccctctccctctcccctctccttcctctcgcttcctctctcgcacctgagcgtacgcacctgcccgggccc

SEQ ID NO: 394405 - DNA, 120 bp, Artificial Sequence
  ENSG00000145495_1 (sequence is synthesized)
ggctccctcctcctctcccctccctctttccccgcccggccgcgggagcctcgtggctgcgtcaccgccgcccccccagacaagatggacaccgcggaggaagacatatgtagagtgtgt

SEQ ID NO: 394406 - DNA, 120 bp, Artificial Sequence
  ENSG00000145495_2 (sequence is synthesized)
cggtcagaaggaacacctgagaaaccgctttatcatccttgtgtatgtactggcagtattaagtttatccatcaagaatgcttagttcaatggctgaaacacagtcgaaaagaatactgt

SEQ ID NO: 394407 - DNA, 120 bp, Artificial Sequence
  ENSG00000145495_3 (sequence is synthesized)
gaattatgcaagcacagatttgcttttacaccaatttattctccagatatgccttcacggcttccaattcaagacatatttgctggactggttacaagtattggcactgcaatacgatat

SEQ ID NO: 394408 - DNA, 120 bp, Artificial Sequence
  ENSG00000145495_4 (sequence is synthesized)
tggtttcattatacacttgtggcctttgcatggttgggagttgttcctcttacagcatgccgcatctacaagtgcttgtttactggctccgtgagctcactactgacgctgccattagat

SEQ ID NO: 394409 - DNA, 120 bp, Artificial Sequence
  ENSG00000145495_5 (sequence is synthesized)
atgctgtcaacggaaaatttgttggcagattgtttgcagggttgttttgtggtgacgtgcacactgtgtgcattcatcagcctggtgtggttgagagagcagatagtccatgggggagca

SEQ ID NO: 394410 - DNA, 120 bp, Artificial Sequence
  ENSG00000145495_6 (sequence is synthesized)
ccaatttggttggagcatgctgccccaccgttcaatgctgcggggcatcaccaaaatgaggctccagcaggaggaaatggtgcagaaaatgttgctgctgatcagcctgctaacccacca

SEQ ID NO: 394411 - DNA, 120 bp, Artificial Sequence
  ENSG00000145495_7 (sequence is synthesized)
gctgagaacgcagtggtgggggaaaaccctgatgcccaggatgaccaggcagaagaggaggaggaggacaatgaggaggaagatgacgctggtgtggaggatgcggcagatgctaataac

SEQ ID NO: 394412 - DNA, 120 bp, Artificial Sequence
  ENSG00000145495_8 (sequence is synthesized)
ggagcccaggatgacatgaattggaatgctttagaatgggaccgagctgctgaagagcttacatgggaaagaatgctaggacttgatggatcactagtttttctggaacatgtcttctgg

SEQ ID NO: 394413 - DNA, 120 bp, Artificial Sequence
  ENSG00000145495_9 (sequence is synthesized)
gtggtatctttaaatacactgttcattcttgtttttgcattttgcccttaccatattggtcatttctcccttgttggtttgggatttgaagaacacgtccaagcatctcattttgaaggc

SEQ ID NO: 394414 - DNA, 120 bp, Artificial Sequence
  ENSG00000145495_10 (sequence is synthesized)
ctaatcacaaccatagttgggtatatacttttagcaataacactgataatttgtcatggcttggcaactcttgtgaaatttcatagatctcgtcgcttactgggagtctgctatattgtt

SEQ ID NO: 394415 - DNA, 120 bp, Artificial Sequence
  ENSG00000145495_11 (sequence is synthesized)
gttaaggtctctttgttagtggtggtagaaattggagtattccctctcatttgtggttggtggctggatatctgttccttggaaatgtttgatgctactctgaaagatcgagaactgagc

SEQ ID NO: 394416 - DNA, 120 bp, Artificial Sequence
  ENSG00000145495_12 (sequence is synthesized)
tttcagtcggctccaggtactaccatgtttctgcattggctagtgggaatggtatatgtcttctactttgcctccttcattctactactgagagaggtacttcgacctggtgtcctgtgg

SEQ ID NO: 394417 - DNA, 120 bp, Artificial Sequence
  ENSG00000145495_13 (sequence is synthesized)
tttctaaggaatttgaatgatccagatttcaatccagtacaggaaatgatccatttgccaatatataggcatctccgaagatttattttgtcagtgattgtctttggctccattgtcctc

SEQ ID NO: 394418 - DNA, 120 bp, Artificial Sequence
  ENSG00000145495_14 (sequence is synthesized)
ctgatgctttggcttcctatacgtataattaagagtgtgctgcctaattttcttccatacaatgtcatgctctacagtgatgctccagtgagtgaactgtccctcgagctgcttctgctt

SEQ ID NO: 394419 - DNA, 120 bp, Artificial Sequence
  ENSG00000145495_15 (sequence is synthesized)
caggttgtcttgccagcattactcgaacagggacacacgaggcagtggctgaaggggctggtgcgagcgtggactgtgaccgccggatacttgctggatcttcattcttatttattggga

SEQ ID NO: 394420 - DNA, 120 bp, Artificial Sequence
  ENSG00000145495_16 (sequence is synthesized)
gaccaggaagaaaatgaaaacagtgcaaatcaacaagttaacaataatcagcatgctcgaaataacaacgctattcctgtggtgggagaaggccttcatgcagcccaccaagccatactc

SEQ ID NO: 394421 - DNA, 120 bp, Artificial Sequence
  ENSG00000145495_17 (sequence is synthesized)
cagcagggagggcctgttggctttcagccttaccgccgacctttaaattttccactcaggatatttctgttgattgtcttcatgtgtataacattactgattgccagcctcatctgcctt

SEQ ID NO: 394422 - DNA, 120 bp, Artificial Sequence
  ENSG00000145495_18 (sequence is synthesized)
actttaccagtatttgctggccgttggttaatgtcgttttggacggggactgccaaaatccatgagctctacacagctgcttgtggtctctatgtttgctggctaaccataagggctgtg

SEQ ID NO: 394423 - DNA, 120 bp, Artificial Sequence
  ENSG00000145495_19 (sequence is synthesized)
acggtgatggtggcatggatgcctcagggacgcagagtgatcttccagaaggttaaagagtggtctctcatgatcatgaagactttgatagttgcggtgctgttggctggagttgtccct

SEQ ID NO: 394424 - DNA, 120 bp, Artificial Sequence
  ENSG00000145495_20 (sequence is synthesized)
ctccttctggggctcctgtttgagctggtcattgtggctcccctgagggttcccttggatcagactcctcttttttatccatggcaggactgggcacttggagtcctgcatgccaaaatc

SEQ ID NO: 394425 - DNA, 120 bp, Artificial Sequence
  ENSG00000145495_21 (sequence is synthesized)
attgcagctataacattgatgggtcctcagtggtggttgaaaactgtaattgaacaggtttacgcaaatggcatccggaacattgaccttcactatattgttcgtaaactggcagctccc

SEQ ID NO: 394426 - DNA, 120 bp, Artificial Sequence
  ENSG00000145495_22 (sequence is synthesized)
gtgatctctgtgctgttgctttccctgtgtgtaccttatgtcatagcttctggtgttgttcctttactaggtgttactgcggaaatgcaaaacttagtccatcggcggatttatccattt

SEQ ID NO: 394427 - DNA, 120 bp, Artificial Sequence
  ENSG00000145495_23 (sequence is synthesized)
ttactgatggtcgtggtattgatggcaattttgtccttccaagtccgccagtttaagcgcctttatgaacatattaaaaatgacaagtaccttgtgggtcaacgactcgtgaactacgaa

SEQ ID NO: 394428 - DNA, 120 bp, Artificial Sequence
  ENSG00000145495_24 (sequence is synthesized)
cggaaatctggcaaacaaggctcatctccaccacctccacagtcatcccaagaataaagtagttgtctcaacaacttgaccttcccctttacatgtccttttttgtggacttctctcttt

SEQ ID NO: 394429 - DNA, 120 bp, Artificial Sequence
  ENSG00000145495_25 (sequence is synthesized)
ggagatttttcccagtgatctctcagcgttgtttttaagttaaatgtatttgacttgtgttctcagcattcagagagcagcggtgtaagattctgctgttctccctggatcttctgacat

SEQ ID NO: 394430 - DNA, 120 bp, Artificial Sequence
  ENSG00000145495_26 (sequence is synthesized)
tactgctgtctgagatttgtatatgtgtaaatacaagttccttgataccctaaaaccttggattaaacagaatgtgcattgtacatctttaaacaaaatgtatattaatttattaaatct

SEQ ID NO: 394431 - DNA, 120 bp, Artificial Sequence
  ENSG00000145495_27 (sequence is synthesized)
agttgtcactttattttggacctgctgtgatctcgacaggaaacgtgccacagagcagtagtgcgcaggcaagacttttcagtgacgccttgtggaacgcagttcatgatgtcctagcag

SEQ ID NO: 394432 - DNA, 120 bp, Artificial Sequence
  ENSG00000145495_28 (sequence is synthesized)
ctctcactaagggaactgtacattctttctttcttggctattcagaccttaccaagaacgttaaaggaaacaagtagaaatcagcagtggagtgtctgtggtaagaaaacatgaacttta

SEQ ID NO: 394433 - DNA, 120 bp, Artificial Sequence
  ENSG00000145495_29 (sequence is synthesized)
tgcttcactgttagttgtttgtggaagttattttgtataacaccaaagctgttgtacatttcctactgcctgatttttttcatgtgtctgtgtttgtaatattgtatagtatcttgtgct

SEQ ID NO: 394434 - DNA, 120 bp, Artificial Sequence
  ENSG00000145495_30 (sequence is synthesized)
aggtgaggaaattatttttaattttgataatttaatattcctagtgtgatcagcattgggagttgggtttcagtggggcatgtctatacttagagaaaaaaagtccaaatgaagattttc

SEQ ID NO: 394435 - DNA, 120 bp, Artificial Sequence
  ENSG00000145495_31 (sequence is synthesized)
atgagtcagcccccccgcccgcccccaccccacacccacatcctctcttttccacacacaactatctgtttattttttgtagcagtggccgaaagtcctgcaaggtcataaatctttcag

SEQ ID NO: 394436 - DNA, 120 bp, Artificial Sequence
  ENSG00000145495_32 (sequence is synthesized)
agtgacatcaccaactgtactgcatcttactggatttaggacttctgagatgcttgtgaagtatagatgtggttgtggtcttagattgacagcattagagaagactggttagaacatctg

SEQ ID NO: 394437 - DNA, 120 bp, Artificial Sequence
  ENSG00000145495_33 (sequence is synthesized)
gtctcgctggttagtgcctcgttggctgaggactaggtgtgcatttctcctagcttttcatcaggaaatcccaaagtttccaaagctttttgtttacagaataaaacttcaaataaaacc

SEQ ID NO: 394438 - DNA, 120 bp, Artificial Sequence
  ENSG00000145495_34 (sequence is synthesized)
aattcattatttgtccagaaggaagcttggctgagctggccttttaacataggaatgtatttcgttggaaacattctgaaaaatctcagagaactgaacccttacaaactttgttttccc

SEQ ID NO: 394439 - DNA, 120 bp, Artificial Sequence
  ENSG00000145495_35 (sequence is synthesized)
tcataaccaaagcttcaggttagaagtttagaaaaatagaatggttgggtacatgatctaaatgtttaatgctaaaggtatatcgtaagggtagtgtttgtttttgaacgataatttaga

SEQ ID NO: 394440 - DNA, 120 bp, Artificial Sequence
  ENSG00000145495_36 (sequence is synthesized)
agttctcatagaaagcgtataacataggtcttcagaaactataaaagaattttcatatagtattaaaatccatagactaaaatctgagaattttttaacatatgcaagtcagccaaacat

SEQ ID NO: 394441 - DNA, 120 bp, Artificial Sequence
  ENSG00000145495_37 (sequence is synthesized)
aagctaccaaaataaagagcaatgtgttctggctgttttatacttcaacaattttttccctaagtggtaagcaattactttaaaacatatttttaaaaacatcggtatcgggagctgcgg

SEQ ID NO: 394442 - DNA, 120 bp, Artificial Sequence
  ENSG00000145495_38 (sequence is synthesized)
tggctccggccggttgtcctggcacacaaggaggcgaggctatgcgttcgaggccaacctaggcaaaattggaaaaaaaaaaaaaaatcagtatcagaaataatgcttgacataggattc

SEQ ID NO: 394443 - DNA, 120 bp, Artificial Sequence
  ENSG00000145495_39 (sequence is synthesized)
agtgttatactctttggcactttagagcagccttttctctcatttgaaataaggtctttgttagccctacctttactcagaaatttagtcctactataaaaaattaggattttaaaatat

SEQ ID NO: 394444 - DNA, 80 bp, Artificial Sequence
  ENSG00000145495_40 (sequence is synthesized)
tgcctgtcatagtgtatttctaaattgctctctttgggagaaaaacattattattgaattgagcatataactatataact

SEQ ID NO: 394445 - DNA, 61 bp, Artificial Sequence
  ENSG00000145495_41 (sequence is synthesized)
ctcccaagtagctggtactacaggtgcgtgccaccacacctggcttattttagtgcaggtg

SEQ ID NO: 394446 - DNA, 120 bp, Artificial Sequence
  ENSG00000145495_42 (sequence is synthesized)
caaagtgctgggattataggtgtgagcccccacgcctggccaacttgattatattaattttgggttttttgttttgttttgttttgttttttaatttttcaaagaatttgtggatcttgg

SEQ ID NO: 394447 - DNA, 120 bp, Artificial Sequence
  ENSG00000145495_43 (sequence is synthesized)
aatttttcaaagaatttgtggatcttggtataaagtcattggaacatatctgttttaacagcaagagatcctaggcagatacttcaaaaggttaaaaattcttaatcctacagaatttta

SEQ ID NO: 394448 - DNA, 120 bp, Artificial Sequence
  ENSG00000145495_44 (sequence is synthesized)
aatgaatcttatcaatgttttgtaaacaaacaatatgaatggccaaaaaattgccctccattttactggcaggtaatttatattgtcttacttaagaattctcccctagtttttcaattg

SEQ ID NO: 394449 - DNA, 120 bp, Artificial Sequence
  ENSG00000145495_45 (sequence is synthesized)
tactttatcgtgttgttttcaatgagataagtattttcatagggaaagcattttccagcataatatttgcttgggtagcatccgggttttagtatttaaccaagagccttttaaatattg

SEQ ID NO: 394450 - DNA, 120 bp, Artificial Sequence
  ENSG00000145495_46 (sequence is synthesized)
aaaacccatagttcagaaaatgttagtattgctgcccttcttcacataaatttttttttaaattatactattattttgcttaattttatattgggttaaaacaaccttcaagaaggttaa

SEQ ID NO: 394451 - DNA, 120 bp, Artificial Sequence
  ENSG00000145495_47 (sequence is synthesized)
ctaggaaagaagacctttttgttttatttttactatttatatatagaagacaaatcagcatttggtgatagttttacatgaccagttatcaaacggtcatagtatgaagtgtgcagttgt

SEQ ID NO: 394452 - DNA, 120 bp, Artificial Sequence
  ENSG00000145495_48 (sequence is synthesized)
tcattattagtaaattatgtttgatttttaaactatttagtactaatagttgagatgaaaactgaagaaaaatgccaatgtgacgtttgtgtatagctagccttaaaaaacttcccatgt

SEQ ID NO: 394453 - DNA, 120 bp, Artificial Sequence
  ENSG00000145495_49 (sequence is synthesized)
ttttaggtgacttttttccccctcttagtactctggagaaacaatgaagatgggccatctcaattccagatgtaaacaaaaagtaatttttatttcaacatttaatgtaactgctattat

SEQ ID NO: 394454 - DNA, 120 bp, Artificial Sequence
  ENSG00000145495_50 (sequence is synthesized)
tgtggattcttgtcttgtgtattttctttcccttattcaagtaatatagaataactttccttaaaatgatttgatccaagatacgtcatttctgtattggcaaaatgccactattaaagt

SEQ ID NO: 394455 - DNA, 120 bp, Artificial Sequence
  ENSG00000145495_51 (sequence is synthesized)
gtaattcttgaatttaggttgaattgatgactttttaaaacaaaacaaacactggacagttctacattgtattgcgtttgcgaatgtgcgtgaacacacgcacacgtgcaggagaatgta

SEQ ID NO: 394456 - DNA, 120 bp, Artificial Sequence
  ENSG00000145495_52 (sequence is synthesized)
gtgccataagaacactggcgctttttaaaactttccaagctagctacttattttcattttcagggttgagtactctaagctctctacttactgtgagaagttttctacattgtaaaatta

SEQ ID NO: 394457 - DNA, 120 bp, Artificial Sequence
  ENSG00000145495_53 (sequence is synthesized)
aaagattatatttaaaatacttctttaggatgttattcagccatcaaaaaaaaacccaactaaaatgtcttaccagtaaagtattattaaaagcctcatttgtggagattcgctgacttc

SEQ ID NO: 394458 - DNA, 120 bp, Artificial Sequence
  ENSG00000145495_54 (sequence is synthesized)
cttggttaagctgtcttgtatttacttaatttgtcccctcaaccaggtgttttcttttcagcctgttactgtcctgtgccatttttaaaaatagccatcatgagtaagggcttctttaaa

SEQ ID NO: 394459 - DNA, 120 bp, Artificial Sequence
  ENSG00000145495_55 (sequence is synthesized)
ataatccctgacaatatctttggcattaatacgacataaagacaagacagtatatgtatgttttcattcctgttttgtacgagtgcctcattttgtagtcatgaaagtaacatagtacct

SEQ ID NO: 394460 - DNA, 120 bp, Artificial Sequence
  ENSG00000145495_56 (sequence is synthesized)
taaataaaaatgtaatgactaatctaaggtctaggaataactattgtagaagctaagtagaacacttagtttggggtgtcaattttctatcaacgcaaacaccttagggtacccagacca

SEQ ID NO: 394461 - DNA, 120 bp, Artificial Sequence
  ENSG00000145495_57 (sequence is synthesized)
attttatgtatatatattctgaaatgctccctttttaatgtggtcatttgttgccttctaagttgagaggacaaaactgaataaagtgaatgttaattgtagtctagtttttttgtttgt

SEQ ID NO: 394462 - DNA, 120 bp, Artificial Sequence
  ENSG00000145495_58 (sequence is synthesized)
ttttgtgttattgcaagattgctttaagattgcagaaatatgcattattagccagcatagataatccagatgttataataggaaggaaaaacaactccagttaaatgtgactgtggcgac

SEQ ID NO: 394463 - DNA, 120 bp, Artificial Sequence
  ENSG00000145495_59 (sequence is synthesized)
tcccttttatgtatacatttaaatgcatagttgcagaggacacatccctccccttctgtctccctaacttgaactgtagaccgtcctcactgggaagagtaaggccccacattttgtgca

SEQ ID NO: 394464 - DNA, 120 bp, Artificial Sequence
  ENSG00000145495_60 (sequence is synthesized)
atagcaagctactgcccacttctgcatgtctgctacgagatcagaaagtcagtttcactaaggttgtcttttagctgaatacttagagtaaaaccaatcaaatccattgtacatacctga

SEQ ID NO: 394465 - DNA, 120 bp, Artificial Sequence
  ENSG00000145495_61 (sequence is synthesized)
ccatatgtcccagataaaaaggaaagacttgcgtgatgtttttttccttctgagtgccctgaggagatccttttgcttcagactatttctaatttttctttgtttataggttcagaattt

SEQ ID NO: 394466 - DNA, 120 bp, Artificial Sequence
  ENSG00000145495_62 (sequence is synthesized)
tttccatgattgttttcccccaaacaagtgcatttttaattactttaaatgcaggggtgatagaggaaatgctattcgaaccatagacatctttaatctgtgaagctgaaatttttcagc

SEQ ID NO: 394467 - DNA, 120 bp, Artificial Sequence
  ENSG00000145495_63 (sequence is synthesized)
aaaggaaattgcatggtcaagttcagaaactggccattaatttcccccttccgctccacagttcatagctactcttgttgcaaacatgtagtgataaggagaactaacgtatcaaggggc

SEQ ID NO: 394468 - DNA, 120 bp, Artificial Sequence
  ENSG00000145495_64 (sequence is synthesized)
tgagagggtaacgttcccctcctcctccatgtttttattttggtgtctgttttgtttctagcactgtatttagtactgtagttgaatgaggtatgatgtctcccttcaaggaactcagaa

SEQ ID NO: 394469 - DNA, 120 bp, Artificial Sequence
  ENSG00000145495_65 (sequence is synthesized)
tggaacagaagcatgagcaaaagattgtattacagaggtatgaataaaatgccatggggaacacagagaaaggttcacccgggagagatggcctagccacttccttagtgactgtttggt

SEQ ID NO: 394470 - DNA, 120 bp, Artificial Sequence
  ENSG00000145495_66 (sequence is synthesized)
atatgtaggtccccctgccattactctttcagccttctgcaatctagttctacttagtcacacacttctctaagaccactcatacgtaaacactacgtagaggcccctttttgcctcatt

SEQ ID NO: 394471 - DNA, 120 bp, Artificial Sequence
  ENSG00000145495_67 (sequence is synthesized)
ttacattgtttagttatcattttgaaacttttcttcacatatgtaacagtgccggagtttttctgcttctctgtgtttgttcagtaactcttctttaggatacacctaaagatgagaagc

SEQ ID NO: 394472 - DNA, 120 bp, Artificial Sequence
  ENSG00000145495_68 (sequence is synthesized)
ttcatacccagtactcctcttcattcactcatatgtttttgggatcagtcccttctgctggctgtgcattggtctaatggaacagaatagagtccagaaataacccaacatgtatgtgga

SEQ ID NO: 394473 - DNA, 120 bp, Artificial Sequence
  ENSG00000145495_69 (sequence is synthesized)
caactggtttttgacagaggtgcaaaggtcttgaaaaaatgatgctggaataattgggcatcagatgcaaaattaaaaacaaattgatccatatcttaacactggcaaagattaaagtcc

SEQ ID NO: 394474 - DNA, 120 bp, Artificial Sequence
  ENSG00000145495_70 (sequence is synthesized)
aaatggattatagttccccaaaactgtataatttctagaagacaacaaggaaaacgtgttcagccttgggttaggaaaagatttcttaaatccaacaccaaaagcacaatccatgaagga

SEQ ID NO: 394475 - DNA, 120 bp, Artificial Sequence
  ENSG00000145495_71 (sequence is synthesized)
aaaatcgataaattgtactttatcaaaattgagaacttctctttgaaaggtaccataaggagaacaaaaagacaagctgtagagtggcagaaaaatatttgcaaaacatttctgataaat

SEQ ID NO: 394476 - DNA, 120 bp, Artificial Sequence
  ENSG00000145495_72 (sequence is synthesized)
gagttgcatctagattacataaagaagtctcaaaactgaacaagtaaacccattgtttacttaatcgctgtttctcctgagcttgctgcctctgcccctgctctctctccttttccattt

SEQ ID NO: 394477 - DNA, 120 bp, Artificial Sequence
  ENSG00000145495_73 (sequence is synthesized)
gttttcaacattgaatccagaatgttcttcttgagatccaagtcagatcacaccaaccctcagaactctccaatagacgaccatggcactcaaaagtccacaatagccttcaatgctggg

SEQ ID NO: 394478 - DNA, 120 bp, Artificial Sequence
  ENSG00000145495_74 (sequence is synthesized)
caaaacatgaagcaccccttttctcccttctctgaccccatcacctctgtgttcaccctgctcctgccgtcctccctgcctccaaaacaggtcaggccttcgtgcctttgcacttactat

SEQ ID NO: 394479 - DNA, 120 bp, Artificial Sequence
  ENSG00000145495_75 (sequence is synthesized)
ttgcaatacccaaatgttcttcaggctctttagcctcttcatttctttcctgaagtgtcattctcactgaggcttatctaaagctgcagctactggggcattcctgtctcatctccctgc

SEQ ID NO: 394480 - DNA, 120 bp, Artificial Sequence
  ENSG00000145495_76 (sequence is synthesized)
tgtattttgtactcccggctctcttttgtacttttaaacatactatatggtttacctttgttgtttatatttgcatgttgtttcccacttgaatgtaagctccaaagattttattttttt

SEQ ID NO: 394481 - DNA, 120 bp, Artificial Sequence
  ENSG00000145495_77 (sequence is synthesized)
aaactgaattattactgtattcccagaacaattccctggcaaatatttggtactcaatagtaatgctaagttagtaaataaatgatgaatttagaatcaaaataatgtgtctatggccaa

SEQ ID NO: 394482 - DNA, 120 bp, Artificial Sequence
  ENSG00000145495_78 (sequence is synthesized)
aataaaacctgaaatccctgtcctatttcccagaggtaactgctgttaatagtttagttgtgtgcttccagacataccttcacagaatcatttatcacaataaaggtgtcatactatgca

SEQ ID NO: 394483 - DNA, 120 bp, Artificial Sequence
  ENSG00000145495_79 (sequence is synthesized)
tttcttgagcagctatgtgaattcatgatgcgagttgtgactgtgtgccatcatgctctttttcggtaggccgcatctacaagtgcttgtttactggctccgtgagctcactactgacgc

SEQ ID NO: 394484 - DNA, 120 bp, Artificial Sequence
  ENSG00000145495_80 (sequence is synthesized)
cttcattttttagtaatatataacagtcagtgagagaatttggttttcagagatgtcatccaaagcagattttacagttgtttcctggttataaattgtctcaacaattctcttttagtc

SEQ ID NO: 394485 - DNA, 120 bp, Artificial Sequence
  ENSG00000145495_81 (sequence is synthesized)
aaatgtgattattaataaaatagtattctaaagagttacatcatttcttcattggcattatgcaagggaatagttaggcaataccgtctcattcttttttaaaaaaaataacagtggctc

SEQ ID NO: 394486 - DNA, 120 bp, Artificial Sequence
  ENSG00000145495_82 (sequence is synthesized)
aagagatagtggtcatgttgccaactaatgaaaatgtgctctgaaatccagtcagctgggtgggcctgaggcataccgtgggaaagtttcccacaggctgattttctgtccatctcaaga

SEQ ID NO: 394487 - DNA, 120 bp, Artificial Sequence
  ENSG00000145495_83 (sequence is synthesized)
acctgtatgttctcttctttccctttccccaggtgccccctgctgaatttagaaaagtaacaatatatcaatcaatttaaaaagggtagaatattttggaatgacgggttgtagtgtttt

SEQ ID NO: 394488 - DNA, 120 bp, Artificial Sequence
  ENSG00000145495_84 (sequence is synthesized)
ctagagtgctttagttttgacattttatcagtattttccagaggtaaataaattttggaaggattattacttctctgttggggccctagaacaatttagtcttttatggaaaagctgact

SEQ ID NO: 394489 - DNA, 120 bp, Artificial Sequence
  ENSG00000145495_85 (sequence is synthesized)
atctgggatcatatgctcagtttgtatatttgagatctgagagatcacgttctgaagtcttctcatatttagtacacctctgattctcactagttgaatgcaagaacttgaaaggttcag

SEQ ID NO: 394490 - DNA, 120 bp, Artificial Sequence
  ENSG00000145495_86 (sequence is synthesized)
gtaagtgttttgaaaaattttgactttccaaacttttgccacttgctatctgaaactcaggaatcaaaaaataccgacaggcactgttactttcaaaattctttctataagttgagaatg

SEQ ID NO: 394491 - DNA, 120 bp, Artificial Sequence
  ENSG00000145495_87 (sequence is synthesized)
ggacagatttgcagagcaagggaaacttgaacagttacttctagtggtaggaaatgaggtggctaggatattacccagctggtgggtgacttgggcagtgtgttcctgctttcagtggtt

SEQ ID NO: 394492 - DNA, 120 bp, Artificial Sequence
  ENSG00000145495_88 (sequence is synthesized)
agcctttagcaaatctgctttagagtgagagtagagggcaggctgttgtattacagtgctcttgtttttgtaaaatttaattcactctactgttattttgtctccttgggtaaagtgtta

SEQ ID NO: 394493 - DNA, 120 bp, Artificial Sequence
  ENSG00000145495_89 (sequence is synthesized)
gacaaaaaaggccttctgagcaacagttactttctggccagatcagagacagactcaaaaaatgacttttcacacagttacagctgacaaagcctcagagtctcctgggttttgttatct

SEQ ID NO: 394494 - DNA, 120 bp, Artificial Sequence
  ENSG00000145495_90 (sequence is synthesized)
catggcaggtaaatgaggcttagcagccgcagaaaggaagttaaggcagagcagtcagaacacatgccagtttgacagcactgcttgcagagccatgagcttccagagagaagaggaaat

SEQ ID NO: 394495 - DNA, 80 bp, Artificial Sequence
  ENSG00000145506_0 (sequence is synthesized)
cccacctccgccccgcggccgtacctggcgccccctggctcccccggcccccgcgcggcgtggagccatcttccctcacc

SEQ ID NO: 394496 - DNA, 120 bp, Artificial Sequence
  ENSG00000145506_1 (sequence is synthesized)
tggagccatcttccctcacctcctaccggcaccctagcttgctcccggcccatgcggcccccgcgggctcccggccccggcttcagaactcagccctgcacctgagcgcggggcccggcg

SEQ ID NO: 394497 - DNA, 120 bp, Artificial Sequence
  ENSG00000145506_2 (sequence is synthesized)
gggcgtggcggcggcgatggggaaactgcagtcgaagcacgccgccgccgcccgcaagcggagagagagcccggaaggggacagcttcgtggcgtccgcgtacgcgagcggccgcaaagg

SEQ ID NO: 394498 - DNA, 120 bp, Artificial Sequence
  ENSG00000145506_3 (sequence is synthesized)
cgcggaggaagcggagcggcgcgcgcgggacaagcaggagctgcccaatggggaccccaaggaggggcctttccgggaggaccagtgtcccctacaggtggcactccccgctgagaaagc

SEQ ID NO: 394499 - DNA, 120 bp, Artificial Sequence
  ENSG00000145506_4 (sequence is synthesized)
tgagggccgcgagcacccgggacaactcctcagcgcagatgacggagagagggcagcaaaccgcgagggcccgcgaggaccgggcgggcagcgcctcaacattgacgcactccagtgcga

SEQ ID NO: 394500 - DNA, 120 bp, Artificial Sequence
  ENSG00000145506_5 (sequence is synthesized)
tgtctcggtggaggaggacgaccgccaggagtggacgttcacgctctatgactttgacaactgcgggaaggtcaccagggaggacatgtccagcctcatgcacaccatctatgaggtcgt

SEQ ID NO: 394501 - DNA, 120 bp, Artificial Sequence
  ENSG00000145506_6 (sequence is synthesized)
ggatgcctcggtcaaccactcctcgggcagcagcaagaccctccgtgtgaagctaaccgtcagccctgagccctccagcaagaggaaggagggtcctcctgctggccaggaccgggagcc

SEQ ID NO: 394502 - DNA, 120 bp, Artificial Sequence
  ENSG00000145506_7 (sequence is synthesized)
cacccgttgcaggatggagggtgaactggcagaggagccaagggtggctgacaggaggttgtctgcacacgtcaggaggcccagtactgacccccagccctgctcggagcgggggcccta

SEQ ID NO: 394503 - DNA, 120 bp, Artificial Sequence
  ENSG00000145506_8 (sequence is synthesized)
ctgcgtggacgagaacacggagcgcagaaaccactacctggacctcgccgggattgagaactacacgtccagattcggccctgggtcccctcctgtgcaagcaaagcaggagccccaggg

SEQ ID NO: 394504 - DNA, 120 bp, Artificial Sequence
  ENSG00000145506_9 (sequence is synthesized)
cggtcccgctcccaggagccagatacacatgccgtacaccaccgcaggtcacaggtgctggtggaacacgtcgtgccagcctcggagcctgctgcccgggccctggacacgcagccccgg

SEQ ID NO: 394505 - DNA, 120 bp, Artificial Sequence
  ENSG00000145506_10 (sequence is synthesized)
ccgaaggggccggagaagcagttcctcaagtcccccaagggctccgggaagccgcctggggtgccagccagcagcaagtccgggaaagccttcagctactacctgccggccgtcctgccg

SEQ ID NO: 394506 - DNA, 120 bp, Artificial Sequence
  ENSG00000145506_11 (sequence is synthesized)
ccccaggcccctcaggacggccaccacctcccgcagcccccaccgccaccctacggccacaagcggtaccgccaaaagggcagggagggccactcgccactcaaggccccacacgctcag

SEQ ID NO: 394507 - DNA, 120 bp, Artificial Sequence
  ENSG00000145506_12 (sequence is synthesized)
cctgccacagtggagcacgaggtggtgcgggacctgccgcccacgccagcaggagagggctacgcggtgccagtgatccagcggcacgagcaccaccaccaccacgagcaccaccaccac

SEQ ID NO: 394508 - DNA, 120 bp, Artificial Sequence
  ENSG00000145506_13 (sequence is synthesized)
caccaccaccaccacttccacccgtcctagcgccactgccaagcacacctcgctcccagcacaccacagcccgcgacctcagggcagggagcagagcagctgccggctgtgtgcccatgg

SEQ ID NO: 394509 - DNA, 120 bp, Artificial Sequence
  ENSG00000145506_14 (sequence is synthesized)
ggagcccagcccccaccccccacctccgacagcaaacagcaactgactgcaggtgctggcatgatggaggtggtgcaccttggacacgtggacaaggcccaggcgccctctgctcttctg

SEQ ID NO: 394510 - DNA, 120 bp, Artificial Sequence
  ENSG00000145506_15 (sequence is synthesized)
ccctcgatgccacatggcggtgaacacatctgaagccactatgtttcctggctctaaggctcgtctgtgtaacccataaaacctgctttgattccaaaatgaggccctggagtgcgcaag

SEQ ID NO: 394511 - DNA, 120 bp, Artificial Sequence
  ENSG00000145506_16 (sequence is synthesized)
gagtgcccggatgcttggggtgggtgttcctcccggggcttcaaggggtgactgctgtaggctgtcccagtgcgaggccgggagcgaatggaaaagctgaggctttgcctggcttgtgca

SEQ ID NO: 394512 - DNA, 120 bp, Artificial Sequence
  ENSG00000145506_17 (sequence is synthesized)
tcatgaagtgagaggggacagggccggtggggggaagcagcttgtgcttagcagggagcatccgcggctccccgcaggaggccaagcagcagaaggcagcagtgctagaaagagaagtgc

SEQ ID NO: 394513 - DNA, 120 bp, Artificial Sequence
  ENSG00000145506_18 (sequence is synthesized)
aggtcacccacagtggccaggccccttcccttcagggctggtggccgtctgactgcagacttggctaacagactggcctcagggtcccctcctgtgcaagcaaagcaggagccccagggc

SEQ ID NO: 394514 - DNA, 120 bp, Artificial Sequence
  ENSG00000145506_19 (sequence is synthesized)
ggggcagtggctgagggtggctggggcagtggttgggggtggctggggcaatggctaagggtggctggggtagtggctggggatggctcaggcagtggctgaggcagtggctgggggtgg

SEQ ID NO: 394515 - DNA, 120 bp, Artificial Sequence
  ENSG00000145506_20 (sequence is synthesized)
ctgggtggctggggtgtggctggcgcagtggctacagtggtcccagagtggtgatcaggtgccactacagcatgagccactccctagagcacctgcggctctggtgcctgggagggagtt

SEQ ID NO: 394516 - DNA, 120 bp, Artificial Sequence
  ENSG00000145506_21 (sequence is synthesized)
cacagggttctgggggtcggctgtgaccttgtttctctggacggcacttgactgtctgtgcccaggcgtccactctccttcctgctctgcgaggaggtgggtgctggtcaggatgcaccc

SEQ ID NO: 394517 - DNA, 120 bp, Artificial Sequence
  ENSG00000145506_22 (sequence is synthesized)
cggacccctgccgcctgctgtaggcaccccgtcatcaggggtgcgccacccagtctgtgcgggggtcaggcccttctctgtgctccaagcaggaggcccagtactgacccccagccctgc

SEQ ID NO: 394518 - DNA, 120 bp, Artificial Sequence
  ENSG00000145526_0 (sequence is synthesized)
aggttgaaaatggttgcttgtgttcaactactgtgaagagttggaatcagacaactacggctttgattttccaagtggttcagaatgtaaatatgatctgacctttccctgatggacagt

SEQ ID NO: 394519 - DNA, 120 bp, Artificial Sequence
  ENSG00000145526_1 (sequence is synthesized)
taaatcatggacacgctaaacaatttactttggactgtccttcctaaagatgctctggcttctctcttgaatgctcactaagctttcgtagctgacaaggaaaggaaggaaaactgtgaa

SEQ ID NO: 394520 - DNA, 120 bp, Artificial Sequence
  ENSG00000145526_2 (sequence is synthesized)
ctggaaagttatcttacaatgaaaattactagcacatcttgcatctgtccagtcctagtgtgtctctgttttgtgcagaggtgttatggaactgctcaccacagctccatcaaggtgatg

SEQ ID NO: 394521 - DNA, 120 bp, Artificial Sequence
  ENSG00000145526_3 (sequence is synthesized)
agaaaccaaaccaaacacattgaaggtgaaaccgaagtccatcatcgtcccaaaaggggatgggtatggaatcagttctttgttttagaagaacatatgggaccagatcctcagtatgtt

SEQ ID NO: 394522 - DNA, 120 bp, Artificial Sequence
  ENSG00000145526_4 (sequence is synthesized)
ggaaagctgcactccaattctgacaaaggtgatggatctgtcaagtacatccttactggagagggtgctgggactatatttatcattgacgataccacgggtgatatccactcaacaaaa

SEQ ID NO: 394523 - DNA, 120 bp, Artificial Sequence
  ENSG00000145526_5 (sequence is synthesized)
agcctagacagagagcagaagacccactatgtgcttcatgctcaagctattgatagacgtacaaacaaacctcttgagcctgaatccgagttcatcatcaaagtgcaagacatcaatgac

SEQ ID NO: 394524 - DNA, 120 bp, Artificial Sequence
  ENSG00000145526_6 (sequence is synthesized)
aacgctccaaaattcacagatggaccatacattgttactgtgcctgaaatgtcagatatgggtacctctgttctacaggtgacagctactgatgcagatgaccctacctatggaaacagc

SEQ ID NO: 394525 - DNA, 120 bp, Artificial Sequence
  ENSG00000145526_7 (sequence is synthesized)
gctcgggtggtttacagcattctccaaggacaaccctacttctccgtcgaccctaaaacaggagttattagaacggccttacataacatggacagagaagccagagaacattactccgta

SEQ ID NO: 394526 - DNA, 120 bp, Artificial Sequence
  ENSG00000145526_8 (sequence is synthesized)
gtcattcaagccaaagacatggctgggcaagttggagggctttcaggatctacaacagtcaacatcaccttaaccgatgtcaatgacaacccaccacgctttcctcaaaaacactatcag

SEQ ID NO: 394527 - DNA, 120 bp, Artificial Sequence
  ENSG00000145526_9 (sequence is synthesized)
ctatatgttcctgagtcagctcaagttggttcagctgttgggaaaatcaaggcaaatgatgctgacactggctcaaatgctgacatgacctactccatcataaatggtgatggcatggga

SEQ ID NO: 394528 - DNA, 120 bp, Artificial Sequence
  ENSG00000145526_10 (sequence is synthesized)
atattctcaatctccactgacaaagagaccagagaaggaatcctttctttaaagaagccactgaactatgagaaaaagaagtcatataccctcaacatagaaggagcaaatacacatctt

SEQ ID NO: 394529 - DNA, 120 bp, Artificial Sequence
  ENSG00000145526_11 (sequence is synthesized)
agatcattgttggggatgtagatgaaccaccactattttccatgccttcctacctcatggaagtctacgaaaatgccaagattgggaccgtcgttggtacagttttggcacaagatcctg

SEQ ID NO: 394530 - DNA, 120 bp, Artificial Sequence
  ENSG00000145526_12 (sequence is synthesized)
acagtactaacagcttagtaagatacttcatcaactacaatgttgaagacgacagatttttcaacattgatgccaatactgggaccattaggactacaaaggttctcgacagagaagaaa

SEQ ID NO: 394531 - DNA, 120 bp, Artificial Sequence
  ENSG00000145526_13 (sequence is synthesized)
ctccatggtacaacatcacagtcactgcttcagaaattgataatcctgatttgctgagccatgtcacagtgggtattagagttctggatgtcaatgacaatccacccgaacttgccaggg

SEQ ID NO: 394532 - DNA, 120 bp, Artificial Sequence
  ENSG00000145526_14 (sequence is synthesized)
aatatgatattattgtatgtgaaaattctaagcctggccaggttattcataccatcagtgccactgataaagatgattttgccaatggaccaaggtttaacttctttcttgatgaacgcc

SEQ ID NO: 394533 - DNA, 120 bp, Artificial Sequence
  ENSG00000145526_15 (sequence is synthesized)
tgcctgtaaatccaaacttcactctgaaggacaatgaagataacacagccagcattctgacaaggcggaggagatttagtcgaactgttcaggatgtgtattatctgcccattatgatct

SEQ ID NO: 394534 - DNA, 120 bp, Artificial Sequence
  ENSG00000145526_16 (sequence is synthesized)
ctgatggtggaatcccctctctcagcagcagcagcaccctcaccatcagggtttgtgcatgcgagagagatgggcgtgtgcggacctgccatgcagaagccttcctgtcctcggctggtt

SEQ ID NO: 394535 - DNA, 120 bp, Artificial Sequence
  ENSG00000145526_17 (sequence is synthesized)
tgagtacaggagccttaatcgctattcttctctgtgttctcattctcctggcaattgtggtactttttatcaccctgaggcgcagcaaaaaagagcccttgatcatttcagaagaggatg

SEQ ID NO: 394536 - DNA, 120 bp, Artificial Sequence
  ENSG00000145526_18 (sequence is synthesized)
tacgggagaacgtggtcacctatgatgatgaaggaggcggagaggaagacacagaggcctttgacatcacagccttgaggaatccttctgctgctgaggagctcaagtaccggagggata

SEQ ID NO: 394537 - DNA, 120 bp, Artificial Sequence
  ENSG00000145526_19 (sequence is synthesized)
tcagacctgaagtgaagctcactcccagacaccagacatcatccaccctggaaagcatagatgttcaggaatttattaagcaaagactggcagaagcagacctagaccctagcgttcccc

SEQ ID NO: 394538 - DNA, 120 bp, Artificial Sequence
  ENSG00000145526_20 (sequence is synthesized)
cttatgactctcttcagacttatgcctatgagggtcagagatcagaagctgggtctatcagctcgctggattcagcaacgacacaatcagaccaggattatcactaccttggagactggg

SEQ ID NO: 394539 - DNA, 120 bp, Artificial Sequence
  ENSG00000145526_21 (sequence is synthesized)
gacccgagtttaaaaagttagctgaactctatggagaaatagaatctgaaagaacaacttagggggtcagttcttgcaaccttgtggaatttgcttcctgagtaagtggatatacaacct

SEQ ID NO: 394540 - DNA, 120 bp, Artificial Sequence
  ENSG00000145526_22 (sequence is synthesized)
cagcaatgacaaggaagaagtgtggaaacagtacttggaactgaggaagctggacacagctcctgtagaaacaagtgcccttttcatgatcgaaactgggttatttaattggaagaaagt

SEQ ID NO: 394541 - DNA, 120 bp, Artificial Sequence
  ENSG00000145526_23 (sequence is synthesized)
gagtctgggctttccgaggacggcgagcagctgtgcccagagctctgggaaagtcccctctctttgcttcttataaattaagttcctttccaccagttagggcaagtccgccaagataga

SEQ ID NO: 394542 - DNA, 120 bp, Artificial Sequence
  ENSG00000145526_24 (sequence is synthesized)
agtctgtggtactgtttattaagaatacctgaattaagccaaacaatgatatttgtttcaatatattgtgatttatttttttcaaaagcaaaactaaacagaaaggctcaagatcactgg

SEQ ID NO: 394543 - DNA, 120 bp, Artificial Sequence
  ENSG00000145526_25 (sequence is synthesized)
tggttatgacttataggggtggtaacactaatacaggaaacttgtgaaggtaatcacaacctcttttatcacttttctgggtgaaaccttgagaaccacactctgttattataacagatc

SEQ ID NO: 394544 - DNA, 120 bp, Artificial Sequence
  ENSG00000145526_26 (sequence is synthesized)
tcattagccttgtcttgtgtttatattacatgaggtatttccactctatcatggacttgtatgtaccatttccctttgccctccccagttcttttctccatacaaaactgatggagcatg

SEQ ID NO: 394545 - DNA, 120 bp, Artificial Sequence
  ENSG00000145526_27 (sequence is synthesized)
gggatttgctgcctgcactataatgtatgcaacttcagtgcaccagttgtgtgctgtactgagcacgagactattgtctctatcccgtacacccccttttattttaatgggatactccta

SEQ ID NO: 394546 - DNA, 120 bp, Artificial Sequence
  ENSG00000145526_28 (sequence is synthesized)
tttttaaatggacagaaagaatagtttaaggtatgttatgaaaatctgatatgtcagggaataatttaattttaaaaatagccacacaccttatcttctaccaaatgttggggaactttt

SEQ ID NO: 394547 - DNA, 120 bp, Artificial Sequence
  ENSG00000145526_29 (sequence is synthesized)
tttttccttttttccacttgttttattatatttaaatcagcaattttggtcatttctctatttaaaattaattgtcaaatattttgctggctggtttgtacttcagtctaattcacttat

SEQ ID NO: 394548 - DNA, 120 bp, Artificial Sequence
  ENSG00000145526_30 (sequence is synthesized)
tttcaacacgagcagtaattaaaaataagtacctcacacaataacaatgtagtctgaaagactatcctccaatgaacgtaaatgtcatagaatcatagttgacttacatttattccttac

SEQ ID NO: 394549 - DNA, 120 bp, Artificial Sequence
  ENSG00000145526_31 (sequence is synthesized)
acagtttcagattttttccatctcactgataattagtttggtatcaacaggaaaatgtgtaggactaggagcaaaaaaggagattcacagttattatcctcagatatgtttccgaaagtc

SEQ ID NO: 394550 - DNA, 120 bp, Artificial Sequence
  ENSG00000145526_32 (sequence is synthesized)
tctgtgttcagggtccaaaccacaaagtagagatggcaatgacttccctgcccacctcacagggttgttgtgaggattaaatgagcatctgtaaaatgctttgccaactgcaaagtattc

SEQ ID NO: 394551 - DNA, 120 bp, Artificial Sequence
  ENSG00000145526_33 (sequence is synthesized)
aattgcataaaagcttgcagacgcttatctaattttctagtttcattagcttataaatatatatttacatgcatctggcataaaatattatcacaggagaatttcatgaaatcttcaaca

SEQ ID NO: 394552 - DNA, 120 bp, Artificial Sequence
  ENSG00000145526_34 (sequence is synthesized)
gtgaagctactgtttaaatatatgtacacaattccaattattttaatattttcataagctaatttctgagaatttgggtggggctttttttttcaaattgttttagataatgttttgttg

SEQ ID NO: 394553 - DNA, 120 bp, Artificial Sequence
  ENSG00000145526_35 (sequence is synthesized)
ttgttgctattggccttgaagtaagaattcataccataatggtcctattttctaaaactggccacatctatatatttcagaaatattgaaattcttaaatacatgaaataggaattagtt

SEQ ID NO: 394554 - DNA, 120 bp, Artificial Sequence
  ENSG00000145526_36 (sequence is synthesized)
gacaccggagtttttcctttgctctttaaatttatcattatcagtgtccccaaaagttatatgacattttctgtctgtttctacccatgtgcaaaattttggattttacctctgtttgca

SEQ ID NO: 394555 - DNA, 120 bp, Artificial Sequence
  ENSG00000145526_37 (sequence is synthesized)
attgccctgtgctatcatattataatttgaggtatgggaagtaagtaagcttaatttgaataattctcaatttgtgttttaagcctgaggaataaaatgtaatttaagctttttacgaca

SEQ ID NO: 394556 - DNA, 120 bp, Artificial Sequence
  ENSG00000145526_38 (sequence is synthesized)
tagattgattatacagcagcagcatgagctgagtctcagagctgagcgagcgtcagggtgaaaaggaaagagagaaagagagagagagagaaaaaaaagcggggagagagagagagagag

SEQ ID NO: 394557 - DNA, 120 bp, Artificial Sequence
  ENSG00000145526_39 (sequence is synthesized)
gaacacaaggtggggaggaagccagtgcacgttccatagcatcactactgtgactgcttgtacccgataatcttgctctgcagctccctcagtgaacaacttactgaggtgcctttcttt

SEQ ID NO: 394558 - DNA, 120 bp, Artificial Sequence
  ENSG00000145526_40 (sequence is synthesized)
ttacaagaggatgtcagctctgagctccagcaagaaataacagacttcaccttggaatagctcatcttactcctgcatcattaaagcggattttcaaaagaaaacaaaaatcaagtcccc

SEQ ID NO: 394559 - DNA, 120 bp, Artificial Sequence
  ENSG00000145526_41 (sequence is synthesized)
tttccagttccactttcttccagcattgaacaggaacagtttcacgctccaggactcaaccacagcaatatgtaagaagaacacacaccaaacattcctgaagtgatttaaaagatggaa

SEQ ID NO: 394560 - DNA, 120 bp, Artificial Sequence
  ENSG00000145526_42 (sequence is synthesized)
ccgccaccacgccaggatagactgaagaggagcaagaacagaaacagggagccagttacagatctatcccaagaattctggggagagatgatggtgtctgcagcagagtgacagcagtgg

SEQ ID NO: 394561 - DNA, 120 bp, Artificial Sequence
  ENSG00000145526_43 (sequence is synthesized)
ttcatgcctaatggctcatgagaaaattaaataaccaggcagtttcctgcctgctccagaagacttgtgccacagaagacagaggctgatacaactcagtggcctctgcctcaagggata

SEQ ID NO: 394562 - DNA, 120 bp, Artificial Sequence
  ENSG00000145526_44 (sequence is synthesized)
aagagaagagtaaagagttgaaaatggttgcttgtgttcaactactgtgaagagttggaatcagacaactacggctttgattttccaagtggttcagaatgtaaatatgatctgaccttt

SEQ ID NO: 394563 - DNA, 120 bp, Artificial Sequence
  ENSG00000145526_45 (sequence is synthesized)
ggccaccataagtgagacatggattgctccctaatattggatataaatttcctgataaatgaggatcagaatggagttggtgtgaacacgtggtgaactaagagaagaagatggaattgg

SEQ ID NO: 394564 - DNA, 120 bp, Artificial Sequence
  ENSG00000145526_46 (sequence is synthesized)
tttaagtactgcagtcatctaatgtacttcaccagcagaatctaaattctagatccaagaaagattattgtcagctggctttattcagggtccaattctgagcccagtatcaagtaataa

SEQ ID NO: 394565 - DNA, 120 bp, Artificial Sequence
  ENSG00000145526_47 (sequence is synthesized)
agattgagtggtgtgataattagagatgcttcaaccaaagttttcaaaaatgggaacatattgaacccttggttctacaactaccttcttacaacgaagttagtatgcagtgctctccaa

SEQ ID NO: 394566 - DNA, 120 bp, Artificial Sequence
  ENSG00000145526_48 (sequence is synthesized)
ggagcctgagtctgggctttccgaggacggcgagcagctgtgcccagagctctgggaaagtcccctctctttgcttcttataaattaagttcctttccaccagttagggcaagtccgcca

SEQ ID NO: 394567 - DNA, 120 bp, Artificial Sequence
  ENSG00000145526_49 (sequence is synthesized)
tcttatatacacacaaacatcttgcaaatcagcattcaaagtcagtttgatgctactgtgttatgatctgtgaatagcttgtgtttaaaattgagccatatgtacaaataactttcattg

SEQ ID NO: 394568 - DNA, 120 bp, Artificial Sequence
  ENSG00000145526_50 (sequence is synthesized)
aatttattcagaagcatctctttaaacaagaaatgtacatgtaatatgctcttgggcaaattttaagagaaatcttagctgacaaacttgtttatgagagctgctgccactgcttggagg

SEQ ID NO: 394569 - DNA, 120 bp, Artificial Sequence
  ENSG00000145536_0 (sequence is synthesized)
agtaataaccccggcgcggcggcggagtcgctgtggggaatcctcccgcgctctgcctgggtcgggtcctccctgcccgctcgcacgctgccggccggggaccctccggtggcccctagc

SEQ ID NO: 394570 - DNA, 120 bp, Artificial Sequence
  ENSG00000145536_1 (sequence is synthesized)
ccctcggagcgctcctggatgaagccccgcgcgcgcggatggcggggcttggcggcgctgtggatgctgttggcgcaggtggccgagcaggcacctgcgtgcgccatgggacccgcagcg

SEQ ID NO: 394571 - DNA, 120 bp, Artificial Sequence
  ENSG00000145536_2 (sequence is synthesized)
gcagcgcctgggagcccgagcgtcccgcgtcctcctccacccgcggagcggccgggctggatggaaaagggcgaatatgacctggtctctgcctacgaggttgaccacaggggcgattac

SEQ ID NO: 394572 - DNA, 120 bp, Artificial Sequence
  ENSG00000145536_3 (sequence is synthesized)
gtgtcccatgaaatcatgcaccatcagcggcggagaagagcagtgcccgtgtccgaggttgagtctcttcaccttcggctgaaaggctccaggcacgacttccacatggatctgaggact

SEQ ID NO: 394573 - DNA, 120 bp, Artificial Sequence
  ENSG00000145536_4 (sequence is synthesized)
tccagcagcctagtggctcctggctttattgtgcagacgttgggaaagacaggcactaagtctgtgcagactttaccgccagaggacttctgtttctatcaaggctctttgcgatcacac

SEQ ID NO: 394574 - DNA, 120 bp, Artificial Sequence
  ENSG00000145536_5 (sequence is synthesized)
agaaactcctcagtggccctttcaacctgccaaggcttgtcaggcatgatacgaacagaagaggcagattacttcctaaggccacttccttcacacctctcatggaaactcggcagagct

SEQ ID NO: 394575 - DNA, 120 bp, Artificial Sequence
  ENSG00000145536_6 (sequence is synthesized)
gcccaaggcagctcgccatcccacgtactgtacaagagatccacagagccccatgctcctggggccagtgaggtcctggtgacctcaaggacatgggagctggcacatcaacccctgcac

SEQ ID NO: 394576 - DNA, 120 bp, Artificial Sequence
  ENSG00000145536_7 (sequence is synthesized)
agcagcgaccttcgcctgggactgccacaaaagcagcatttctgtggaagacgcaagaaatacatgccccagcctcccaaggaagacctcttcatcttgccagatgagtataagtcttgc

SEQ ID NO: 394577 - DNA, 120 bp, Artificial Sequence
  ENSG00000145536_8 (sequence is synthesized)
ttacggcataagcgctctcttctgaggtcccatagaaatgaagaactgaacgtggagaccttggtggtggtcgacaaaaagatgatgcaaaaccatggccatgaaaatatcaccacctac

SEQ ID NO: 394578 - DNA, 120 bp, Artificial Sequence
  ENSG00000145536_9 (sequence is synthesized)
gtgctcacgatactcaacatggtatctgctttattcaaagatggaacaataggaggaaacatcaacattgcaattgtaggtctgattcttctagaagatgaacagccaggactggtgata

SEQ ID NO: 394579 - DNA, 120 bp, Artificial Sequence
  ENSG00000145536_10 (sequence is synthesized)
agtcaccacgcagaccacaccttaagtagcttctgccagtggcagtctggattgatggggaaagatgggactcgtcatgaccacgccatcttactgactggtctggatatatgttcctgg

SEQ ID NO: 394580 - DNA, 120 bp, Artificial Sequence
  ENSG00000145536_11 (sequence is synthesized)
aagaatgagccctgtgacactttgggatttgcacccataagtggaatgtgtagtaaatatcgcagctgcacgattaatgaagatacaggtcttggactggccttcaccattgcccatgag

SEQ ID NO: 394581 - DNA, 120 bp, Artificial Sequence
  ENSG00000145536_12 (sequence is synthesized)
tctggacacaactttggcatgattcatgatggagaagggaacatgtgcaaaaagtccgagggcaacatcatgtcccctacattggcaggacgcaatggagtcttctcctggtcaccctgc

SEQ ID NO: 394582 - DNA, 120 bp, Artificial Sequence
  ENSG00000145536_13 (sequence is synthesized)
agccgccagtatctacacaaatttctaagcaccgctcaagctatctgccttgctgatcagccaaagcctgtgaaggaatacaagtatcctgagaaattgccaggagaattatatgatgca

SEQ ID NO: 394583 - DNA, 120 bp, Artificial Sequence
  ENSG00000145536_14 (sequence is synthesized)
aacacacagtgcaagtggcagttcggagagaaagccaagctctgcatgctggactttaaaaaggacatctgtaaagccctgtggtgccatcgtattggaaggaaatgtgagactaaattt

SEQ ID NO: 394584 - DNA, 120 bp, Artificial Sequence
  ENSG00000145536_15 (sequence is synthesized)
atgccagcagcagaaggcacaatttgtgggcatgacatgtggtgccggggaggacagtgtgtgaaatatggtgatgaaggccccaagcccacccatggccactggtcggactggtcttct

SEQ ID NO: 394585 - DNA, 120 bp, Artificial Sequence
  ENSG00000145536_16 (sequence is synthesized)
tggtccccatgctccaggacctgcggagggggagtatctcataggagtcgcctctgcaccaaccccaagccatcgcatggagggaagttctgtgagggctccactcgcactctgaagctc

SEQ ID NO: 394586 - DNA, 120 bp, Artificial Sequence
  ENSG00000145536_17 (sequence is synthesized)
tgcaacagtcagaaatgtccccgggacagtgttgacttccgtgctgctcagtgtgccgagcacaacagcagacgattcagagggcggcactacaagtggaagccttacactcaagtagaa

SEQ ID NO: 394587 - DNA, 120 bp, Artificial Sequence
  ENSG00000145536_18 (sequence is synthesized)
gatcaggacttatgcaaactctactgtatcgcagaaggatttgatttcttcttttctttgtcaaataaagtcaaagatgggactccatgctcggaggatagccgtaatgtttgtatagat

SEQ ID NO: 394588 - DNA, 120 bp, Artificial Sequence
  ENSG00000145536_19 (sequence is synthesized)
gggatatgtgagagagttggatgtgacaatgtccttggatctgatgctgttgaagacgtctgtggggtgtgtaacgggaataactcagcctgcacgattcacaggggtctctacaccaag

SEQ ID NO: 394589 - DNA, 120 bp, Artificial Sequence
  ENSG00000145536_20 (sequence is synthesized)
ccgcatctatgaaatgaacgtctctacctcctacatttctgtgcgcaatgccctcagaaggtactacctgaatgggcactggaccgtggactggcccggccggtacaaattttcgggcac

SEQ ID NO: 394590 - DNA, 120 bp, Artificial Sequence
  ENSG00000145536_21 (sequence is synthesized)
tactttcgactacagacggtcctataatgagcccgagaacttaatcgctactggaccaaccaacgagacactgattgtggagctgctgtttcagggaaggaacccgggtgttgcctggga

SEQ ID NO: 394591 - DNA, 120 bp, Artificial Sequence
  ENSG00000145536_22 (sequence is synthesized)
atactccatgcctcgcttggggaccgagaagcagccccctgcccagcccagctacacttgggccatcgtgcgctctgagtgctccgtgtcctgcggagggggacagatgaccgtgagaga

SEQ ID NO: 394592 - DNA, 120 bp, Artificial Sequence
  ENSG00000145536_23 (sequence is synthesized)
gggctgctacagagacctgaagtttcaagtaaatatgtccttctgcaatcccaagacacgacctgtcacggggctggtgccttgcaaagtatctgcctgtcctcccagctggtccgtggg

SEQ ID NO: 394593 - DNA, 120 bp, Artificial Sequence
  ENSG00000145536_24 (sequence is synthesized)
gaactggagtgcctgcagtcggacgtgtggcgggggtgcccagagccgccccgtgcagtgcacacggcgggtgcactatgactcggagccagtcccggccagcctgtgccctcagcctgc

SEQ ID NO: 394594 - DNA, 120 bp, Artificial Sequence
  ENSG00000145536_25 (sequence is synthesized)
tccctccagcaggcaggcctgcaactctcagagctgcccacctgcatggagcgccgggccctgggcagagtgctcacacacctgtgggaaggggtggaggaagcgggcagtggcctgtaa

SEQ ID NO: 394595 - DNA, 120 bp, Artificial Sequence
  ENSG00000145536_26 (sequence is synthesized)
gagcaccaacccctcggccagagcgcagctgctgcccgacgctgtctgcacctccgagcccaagcccaggatgcatgaagcctgtctgcttcagcgctgccacaagcccaagaagctgca

SEQ ID NO: 394596 - DNA, 120 bp, Artificial Sequence
  ENSG00000145536_27 (sequence is synthesized)
gtggctggtgtccgcctggtcccagtgctctgtgacatgtgaaagaggaacacagaaaagattcttaaaatgtgctgaaaagtatgtttctggaaagtatcgagagctggcctcaaagaa

SEQ ID NO: 394597 - DNA, 120 bp, Artificial Sequence
  ENSG00000145536_28 (sequence is synthesized)
gtgctcacatttgccgaagcccagcctggagctggaacgtgcctgcgccccgcttccatgccccaggcaccccccatttgctgctgcgggaccctcgaggggcagctggtttgcctcacc

SEQ ID NO: 394598 - DNA, 120 bp, Artificial Sequence
  ENSG00000145536_29 (sequence is synthesized)
ctggtctcagtgcacggccagctgtgggggaggcgttcagacgaggtccgtgcagtgcctggctgggggccggccggcctcaggctgcctcctgcaccagaagccttcggcctccctggc

SEQ ID NO: 394599 - DNA, 120 bp, Artificial Sequence
  ENSG00000145536_30 (sequence is synthesized)
ctgcaacactcacttctgccccattgcagagaagaaagatgccttctgcaaagactacttccactggtgctacctggtaccccagcacgggatgtgcagccacaagttctacggcaagca

SEQ ID NO: 394600 - DNA, 120 bp, Artificial Sequence
  ENSG00000145536_31 (sequence is synthesized)
gtgctgcaagacttgctctaagtccaacttgtgagttgggaccgctctccgtagcagagaaagtgcctgcgtggcacagaaatttcccacaaatgagctgtgcaatctacgtcggaatac

SEQ ID NO: 394601 - DNA, 120 bp, Artificial Sequence
  ENSG00000145536_32 (sequence is synthesized)
atccaaggaagagcaaagccaaaagaagaaaaccgtgttaggctctttgaccaggagtgtatgtatgtgtttcactgtgagcctgggtgcagacctgtgtccccatgcacacagtgtctc

SEQ ID NO: 394602 - DNA, 120 bp, Artificial Sequence
  ENSG00000145536_33 (sequence is synthesized)
ctgtcaggctgaaatgtggcaccctggcagacagagctgtggctcgtgaggcagaaggcaggcaccacaacgggagaggcagcactcacccctgcctgttgcagctaaatcaagtcaaaa

SEQ ID NO: 394603 - DNA, 120 bp, Artificial Sequence
  ENSG00000145536_34 (sequence is synthesized)
agacaggcgaggctgaacttgctaaatgtctggtgccttagaaaaagaaggaaaggccatgaaataaggaaaacatacaaaatatgtaccccctagttcaccagcctcccctcccactag

SEQ ID NO: 394604 - DNA, 120 bp, Artificial Sequence
  ENSG00000145536_35 (sequence is synthesized)
gagggcccctcgagccatcaggagtgaccaacttcctgggtggaggtcaggggagctccaggaggctgcccaggctcctcctcctcctccccagcggccgagcatctcttaccaggaacc

SEQ ID NO: 394605 - DNA, 120 bp, Artificial Sequence
  ENSG00000145536_36 (sequence is synthesized)
tggagccaccgccggagccagcgtcatctctagggtcactggccaggggactgcattctggtttgggactttgcctatggaaatgggaaaaatgaaattcctgctaaggtgcttctatct

SEQ ID NO: 394606 - DNA, 120 bp, Artificial Sequence
  ENSG00000145536_37 (sequence is synthesized)
ctttcagattcatgcattgaaggagagattttttatactttatgttttatctttctcagttatttgcaagtgagtgtccttttaaaaacacacttcttcatgcttttctttgtaaatgac

SEQ ID NO: 394607 - DNA, 120 bp, Artificial Sequence
  ENSG00000145536_38 (sequence is synthesized)
agatcgaagtataggttacatcaaaaccctaccatcctgagaagagttatggttctattatagcagacgtcagccacacagcctatgtgacaataaccttagagtcctgtgttttgtttt

SEQ ID NO: 394608 - DNA, 120 bp, Artificial Sequence
  ENSG00000145536_39 (sequence is synthesized)
tgtgtgttgtgagattttaatcttttttttttcggtgagtctggccatttctataatgccaggtgggaagccaggctgcgggtgttagggtgggaatctgcccggcgtctctggcaccct

SEQ ID NO: 394609 - DNA, 120 bp, Artificial Sequence
  ENSG00000145536_40 (sequence is synthesized)
ccctgccatcctcagtgcggctgctgttctcctgtccggtgctgtggctccattccaaaggggcacctggatatttatatttgctgaagttttataataaagtttatatggtacagtgtg

SEQ ID NO: 394610 - DNA, 120 bp, Artificial Sequence
  ENSG00000145536_41 (sequence is synthesized)
agaagctaactgtaggtacagcatcgtattcagatgctagtctttcaacccatgcatctttgctcctcttgcataggtatttttaaaacatgtatttctcatatacatatgcatacccat

SEQ ID NO: 394611 - DNA, 120 bp, Artificial Sequence
  ENSG00000145536_42 (sequence is synthesized)
gctcctatcaaacactgtgtttattttatattgataatgtgaagaggaatccttttctcacttttgtgaaaataaaattgatgagctacctggaattcatagacatagaaatcagacaac

SEQ ID NO: 394612 - DNA, 120 bp, Artificial Sequence
  ENSG00000145536_43 (sequence is synthesized)
aggtgatgacagattcagtctattgaggggaaacattaagccattgaccaccatttatcatggaaaggaccagcattaaacagtgctgtgaaagccacagaacatcggtttgaagaccct

SEQ ID NO: 394613 - DNA, 120 bp, Artificial Sequence
  ENSG00000145536_44 (sequence is synthesized)
ggagcacatcattttcacctattgttgcctctgtgagaagagagagagctatggtagagaaaagaagaagtatacaagatgttgcagcaatgtggacgtagttggaggccattcattatc

SEQ ID NO: 394614 - DNA, 120 bp, Artificial Sequence
  ENSG00000145536_45 (sequence is synthesized)
aggaacagaaaaccaaatactgcatgttgttacttataagcaggagctaaacactgagtacacatggacacaaagatgggaaccatagaccccggggactacttaaggggggatggtggg

SEQ ID NO: 394615 - DNA, 120 bp, Artificial Sequence
  ENSG00000145536_46 (sequence is synthesized)
aaggggggatggtgggagggggcaagggttgaaacactatcccatattgtgcttgctgcatgggtgatgaggttattcgaatgccaaactttagtgacacgtaatctacccatgtaacaa

SEQ ID NO: 394616 - DNA, 120 bp, Artificial Sequence
  ENSG00000145536_47 (sequence is synthesized)
atctgcacatgtacccctgaacctaaaacaaaagtcggaaaaaaaagaaatatacaagataacaagtttattactaaatggtaaagaatgacaatttcattattaaaactttaaaaaatt

SEQ ID NO: 394617 - DNA, 120 bp, Artificial Sequence
  ENSG00000145545_0 (sequence is synthesized)
cctttctgcagagtcccggcagtgcgggactccggtagccgcccctccggtagccgcccctcctgcccccgcgccgccgccctatatgttgcccgccgcggcctctggggcatggagcac

SEQ ID NO: 394618 - DNA, 120 bp, Artificial Sequence
  ENSG00000145545_1 (sequence is synthesized)
gctgcccagccctggcgatggcaacggcgacgggggtggcggaggagcgcctgctggccgcgctcgcctacctgcagtgcgccgtgggctgcgcggtcttcgcgcgcaatcgtcagacga

SEQ ID NO: 394619 - DNA, 120 bp, Artificial Sequence
  ENSG00000145545_2 (sequence is synthesized)
actcagtgtacggccgccacgcgctgcccagccacaggctccgagtgccggcgcgggccgcctgggtggtgcaggagctgccctcgctggccctgccgctctaccagtacgccagcgagt

SEQ ID NO: 394620 - DNA, 120 bp, Artificial Sequence
  ENSG00000145545_3 (sequence is synthesized)
ccgccccgcgtctccgcagcgcgcccaactgcatcctcctggccatgttcctcgtccactacgggcatcggtgcttaatttacccatttctgatgcgaggaggaaagcctatgccactgt

SEQ ID NO: 394621 - DNA, 120 bp, Artificial Sequence
  ENSG00000145545_4 (sequence is synthesized)
tggcgtgtacaatggcgattatgttctgtacctgtaacggctatttgcaaagcagatacttgagccattgtgcagtgtatgctgatgactgggtaacagatccccgttttctaataggtt

SEQ ID NO: 394622 - DNA, 120 bp, Artificial Sequence
  ENSG00000145545_5 (sequence is synthesized)
ttggcttgtggttaacgggcatgttgataaacatccattcagatcatatcctaaggaatctcagaaaaccaggagatactggatacaaaataccaaggggaggcttatttgaatacgtaa

SEQ ID NO: 394623 - DNA, 120 bp, Artificial Sequence
  ENSG00000145545_6 (sequence is synthesized)
ctgcagccaactattttggagaaatcatggagtggtgtggctatgccctggccagctggtctgtccaaggcgcggcttttgctttcttcacgttttgttttttatctggtagagcaaaag

SEQ ID NO: 394624 - DNA, 120 bp, Artificial Sequence
  ENSG00000145545_7 (sequence is synthesized)
agcatcatgagtggtacctccggaaatttgaagagtatccaaagttcagaaaaattataattccatttttgttttaagtgcgtttttcatgaaattatcttcaacttgaagctttccaat

SEQ ID NO: 394625 - DNA, 120 bp, Artificial Sequence
  ENSG00000145545_8 (sequence is synthesized)
ggcgcttctctatggactttgtaaataagttatatctttgtaattttcctgctactttatcattttcaagatgtcctctaggaattttttttctagtaattttgcaatctacctaataag

SEQ ID NO: 394626 - DNA, 120 bp, Artificial Sequence
  ENSG00000145545_9 (sequence is synthesized)
tacctaaatacgctgaaatggaggttgaatatcctactgtgtaacaggtcagaatttcaagctctgggtaataactgctgatattttttctaatttcaaatttacctcttttggctatgt

SEQ ID NO: 394627 - DNA, 120 bp, Artificial Sequence
  ENSG00000145545_10 (sequence is synthesized)
cttgccaagtgtgtatgagactagactttacaactgtctttgatggcattttcagaacaataaatgtcacaatcccttctatagccccctacagtgatctcttcaaggtcaactgcagtg

SEQ ID NO: 394628 - DNA, 120 bp, Artificial Sequence
  ENSG00000145545_11 (sequence is synthesized)
ttgcttccctccccctatagggctggaatctgtctaggagccctctctcggaggccacagaggctgggggtagccattgtgcagtcatggcccgggggaaacttgccaaccttcgtgtca

SEQ ID NO: 394629 - DNA, 120 bp, Artificial Sequence
  ENSG00000145545_12 (sequence is synthesized)
ggtgctgtgtgtaagtggagaacttggggatagaggaggaagctcctcgtggcccttccaaggtgaggcaaaggcatctggacttgttccagcccagcccaccgggtgacatcaccgggc

SEQ ID NO: 394630 - DNA, 120 bp, Artificial Sequence
  ENSG00000145545_13 (sequence is synthesized)
agggaggggtgctggtggtggttcatacggagtaagctgctctgcctgtgtgagtggctcctgggccctaaacaggcacctttaggccatgggtcactcaccgtgagccatcaatgtgct

SEQ ID NO: 394631 - DNA, 120 bp, Artificial Sequence
  ENSG00000145545_14 (sequence is synthesized)
ctggtctgacatggtttctctctgtcttctagtctagacctagtttttttgttctgttccccacgtatggatatagtagagattgttgtctgtgaaatttctcttttgtagattttgagt

SEQ ID NO: 394632 - DNA, 120 bp, Artificial Sequence
  ENSG00000145545_15 (sequence is synthesized)
tttcccttgtagtgtaaagaatgatcactttctgtaacaataacaagaccactttttaagatttatcctgtttgttctttgttgattgaaacataataattgttaaaattctctacagcc

SEQ ID NO: 394633 - DNA, 120 bp, Artificial Sequence
  ENSG00000145545_16 (sequence is synthesized)
ttctttttcttccatagctaatcttccttctaatagtttttgctttctgttttgctgttgttgctttgcaaagctttcccctcatagcctgtacctgttatcaatataaaataatcttcc

SEQ ID NO: 394634 - DNA, 120 bp, Artificial Sequence
  ENSG00000145545_17 (sequence is synthesized)
tgttgaatgcttcatgacttgaattctactttgataaaaacattgccatactgctttttatcttgatgaattcatctggcattgctttgccttatcatctcatctggagtttttaaatgc

SEQ ID NO: 394635 - DNA, 120 bp, Artificial Sequence
  ENSG00000145545_18 (sequence is synthesized)
catttgtttcagttgtctttaacaacataataaatagactttgccatttaacaaggtagctcaaattcttttactaattgttacatcgaaacattctttcatcatatttcctgtttttat

SEQ ID NO: 394636 - DNA, 120 bp, Artificial Sequence
  ENSG00000145545_19 (sequence is synthesized)
ttggttttttcaacttcttctgtttactatctacagtgatttggaaaggagatttcctttaaaacaaacaagcttattgggaatggcttttatgatttttaaagtagccttgagagcttc

SEQ ID NO: 394637 - DNA, 120 bp, Artificial Sequence
  ENSG00000145545_20 (sequence is synthesized)
cagttaaatctgatgagctgaacatacacctttccttctcccctctctattctgaccccagttgaaatcacctcaaaggaatttaggtgggggagtggccccataaagagagtgagagag

SEQ ID NO: 394638 - DNA, 120 bp, Artificial Sequence
  ENSG00000145545_21 (sequence is synthesized)
agtcaccactgcagatggaccacagcacgggtggagatgggcctgatgtggcagagcagagaggccatgacagtgcacaccctgcggagaccctgggtcctcacatctgggctgacagaa

SEQ ID NO: 394639 - DNA, 120 bp, Artificial Sequence
  ENSG00000145545_22 (sequence is synthesized)
ggcagagggaaatgagcatctcaaagtgagaccaactaaacatggcgcctgcagcagaaagcagtgtcctctgcacccccactctccagggagagcacagagagcccagaaatgagccat

SEQ ID NO: 394640 - DNA, 120 bp, Artificial Sequence
  ENSG00000145545_23 (sequence is synthesized)
gtgcccattgccggggaagagaaggtaggctgaggaggtggcctttcctaacacaaaaattaactaagtggggaaaaccagagaactaggtgttggcatcccaggaaaaaaataaagtct

SEQ ID NO: 394641 - DNA, 120 bp, Artificial Sequence
  ENSG00000145545_24 (sequence is synthesized)
ccacattttggcctatagggatcctgccccataatggctggttacctcctgcctcaagctgcagggaagccagggggtggcatggccatggcttctccctcagagaggcctctgtgcacg

SEQ ID NO: 394642 - DNA, 120 bp, Artificial Sequence
  ENSG00000145545_25 (sequence is synthesized)
acttcagtcacccaacactgacagaacttggaacccaaaagcccatttctctccttccgtccagaccctgtctgctgttatctgtaggaagaccacagccaactgctatcatgaccaaag

SEQ ID NO: 394643 - DNA, 120 bp, Artificial Sequence
  ENSG00000145545_26 (sequence is synthesized)
ctaaaatccaatgaggcagagaacaatagttgtacccatctcctccttagtctccaaggccagcggtgcatgcatttgtgcattcaacaacatttgccaagcacttactgtatatcaagc

SEQ ID NO: 394644 - DNA, 120 bp, Artificial Sequence
  ENSG00000145545_27 (sequence is synthesized)
acagcagtgggtgctgaggacggatgggtagaaaaaacagtcctggcccaggtggagtgacaggtaagaaacaagtaagtagctaaaataatgttaggtagaaaaaaataacaagaataa

SEQ ID NO: 394645 - DNA, 120 bp, Artificial Sequence
  ENSG00000145545_28 (sequence is synthesized)
aagcaaggaaaagggaagggaccctcacttgtgtctgatacagccataatcttctctatcggccattgctgtaaccaaagcttaaccacctttcttaagatattgatcaaccagatcatt

SEQ ID NO: 394646 - DNA, 120 bp, Artificial Sequence
  ENSG00000145545_29 (sequence is synthesized)
gatcaaatggtagttctacttttagttctaaggaatttccacactgttttccatggtggctctaatagtttacattcccaccagcagtgtggaagtgttccatgattgccgcatgcatgc

SEQ ID NO: 394647 - DNA, 120 bp, Artificial Sequence
  ENSG00000145545_30 (sequence is synthesized)
attgccgcatgcatgccaacatctactgttttttgatttttttggttatggccgttcttgcaggagtaagggggtatcgcactgtagtttttatttgcatttccctgatcattagtgatg

SEQ ID NO: 394648 - DNA, 84 bp, Artificial Sequence
  ENSG00000145545_31 (sequence is synthesized)
tcctttgtctcgttgtctgtttactctgctgactgttgcttttaccatgcaaaagctctttagtttaattaagtcccatctatt

SEQ ID NO: 394649 - DNA, 79 bp, Artificial Sequence
  ENSG00000145545_32 (sequence is synthesized)
gtcccatctatttatctttgtttttattgttggaaacaacctatgttctcattgatatgtgggagctaagctatgagga

SEQ ID NO: 394650 - DNA, 87 bp, Artificial Sequence
  ENSG00000145545_33 (sequence is synthesized)
tggaagggggggtgaggaataaaagacaacatatatggtatagtatatactactcaggagatgggtgcaccaggatctcacaaatca

SEQ ID NO: 394651 - DNA, 80 bp, Artificial Sequence
  ENSG00000145545_34 (sequence is synthesized)
ggaaaaaaagatattcatcgacctattccaggtcctctctccaccactgagcctcgtggggacataaagagctgcctgcc

SEQ ID NO: 394652 - DNA, 120 bp, Artificial Sequence
  ENSG00000145545_35 (sequence is synthesized)
ccaccactgagcctcgtggggacataaagagctgcctgccctcccctgttccccttgcctttttgcagcaggattcctgaaaatgttgacttacagatacgtttttgagatatgaacgtt

SEQ ID NO: 394653 - DNA, 120 bp, Artificial Sequence
  ENSG00000145545_36 (sequence is synthesized)
tgttatttcctggtgcttagggaagaaaataattgatgttgtgagttgggcgggactttagggactatgctgaacaatccactgaccactgcaggctcccatttatgatcttgggccaac

SEQ ID NO: 394654 - DNA, 120 bp, Artificial Sequence
  ENSG00000145545_37 (sequence is synthesized)
agccaccagcctctgttcatgcagtctcactgagggcagttacttctttggagtggcatgcctctgagcagataattccaataatcaatgtcaaactagatattgaaacagcccaagtgt

SEQ ID NO: 394655 - DNA, 87 bp, Artificial Sequence
  ENSG00000145545_38 (sequence is synthesized)
ataatcaatgtcaaactagatattgaaacagcccaagtgtcctggtaaagctagctgttgatactcctgactgttgcattattttgt

SEQ ID NO: 394656 - DNA, 71 bp, Artificial Sequence
  ENSG00000145545_39 (sequence is synthesized)
caagccacagctcccggcccaactgttgcattattatttgcaaatgttggctatccctgctgttgtctata

SEQ ID NO: 394657 - DNA, 120 bp, Artificial Sequence
  ENSG00000145545_40 (sequence is synthesized)
tattatttgcaaatgttggctatccctgctgttgtctatatatcaattttgtctacccaacacagctgtaaacttctcaaggtgaggagtgagccatcactctttgcacctcttgctgtg

SEQ ID NO: 394658 - DNA, 120 bp, Artificial Sequence
  ENSG00000145545_41 (sequence is synthesized)
attgacatggtataccttaagatatatgttaattcctatgtcttaataaatattggcttatggagaatttgttggagcaagtacagaccctatgtttaacttcttttattcaacagaatt

SEQ ID NO: 394659 - DNA, 120 bp, Artificial Sequence
  ENSG00000145545_42 (sequence is synthesized)
aaaaaactagctagttctctcaataaaataatactttcttttctttcttaaaatctagctgatctggtctaaaatacacatgtgggaggcgggattgtagaaatatctcaaattaattag

SEQ ID NO: 394660 - DNA, 120 bp, Artificial Sequence
  ENSG00000145545_43 (sequence is synthesized)
cgtctagctctttgtaaggtaattgacagtctgagttagttgcttcccccactgcaaagcagcaaaatctgctctcaaaggcttcacgtagccgggaaaactccgttcccaattcagatc

SEQ ID NO: 394661 - DNA, 120 bp, Artificial Sequence
  ENSG00000145545_44 (sequence is synthesized)
ctctggggagggcatcaattatttcctattgtttttagcaccgattgttctgtctaatttgaaaggatccaaaaaaggaaatgatacttggcattagtatcattctccatcactcttgaa

SEQ ID NO: 394662 - DNA, 120 bp, Artificial Sequence
  ENSG00000145545_45 (sequence is synthesized)
agatatatgaagggaatgttggcgcaatcagtctagaaacatatttctcccataacaataagccagttctttttgctttgaatcagaaatagctccatcaggcccatgaaggaaagggaa

SEQ ID NO: 394663 - DNA, 120 bp, Artificial Sequence
  ENSG00000145545_46 (sequence is synthesized)
acaaaactgagtgccaagcatatgataacatgctcagcatcatatgacattaggggattgcaaattgaaacaacagtaccaccacacacctatcagaatggccaaaatccagaagactga

SEQ ID NO: 394664 - DNA, 120 bp, Artificial Sequence
  ENSG00000145545_47 (sequence is synthesized)
catcaccaatgctagtgagaatgtggagcaacaggaactctcattcacggctggtggggatgcaaagtggtggagccacttgggaagacagtctggcagattcctaaaaaggtaaacata

SEQ ID NO: 394665 - DNA, 120 bp, Artificial Sequence
  ENSG00000145545_48 (sequence is synthesized)
ctcttactaaacaatctagtagatttgctcctaggtgtttacccaaaggagttgaaaacatgtccacacagaaaacctgcacatgaatgtttatagcagctttactcaaaattgccaaaa

SEQ ID NO: 394666 - DNA, 120 bp, Artificial Sequence
  ENSG00000145545_49 (sequence is synthesized)
attggaagcaaccaagatgtccttcaataggtgggcggataaagaaattgtatccaattctatttctatgaggaaaatctattcatacaatagaatactagtgtcagagattttttttta

SEQ ID NO: 394667 - DNA, 120 bp, Artificial Sequence
  ENSG00000145545_50 (sequence is synthesized)
acaaagagctatcaagccatgaaaagataaggaagaactttaatgcatattggtaagtgaaaaaagccagtttgcaaaggctagatactatatgatcccaactgtataacattctgaaaa

SEQ ID NO: 394668 - DNA, 120 bp, Artificial Sequence
  ENSG00000145545_51 (sequence is synthesized)
aggcacaactatggagacaataaaaagaacagagttttggatgaagggagggatgaacaggcagaatacaaacaaattttagggcagtgaaactattattatgatactttatggatatag

SEQ ID NO: 394669 - DNA, 120 bp, Artificial Sequence
  ENSG00000145545_52 (sequence is synthesized)
agggcagtgaaactattattatgatactttatggatatagaatattatgcatttttcaaaacacatagaatatacaacatgaagaatgaatgctaatgtaaactctggatttttattaat

SEQ ID NO: 394670 - DNA, 120 bp, Artificial Sequence
  ENSG00000145545_53 (sequence is synthesized)
taaaatgttatttaattattaaatttagatgctacttaatttttgctttattattattatgttaatatcatcaactgtaactagtgtacaacactaatgcaagatgttaataggggaaat

SEQ ID NO: 394671 - DNA, 120 bp, Artificial Sequence
  ENSG00000145545_54 (sequence is synthesized)
ggggaaatcgtgttggagagagagatatgtgagaactctgtactttcttttcaatgtttctgtaaacataaagctgctctaaaaaattaaatctattaaaaaaaaaactgagtggaaaaa

SEQ ID NO: 394672 - DNA, 120 bp, Artificial Sequence
  ENSG00000145545_55 (sequence is synthesized)
tcccaaatgccagcccatggtacccattgtctgcccggatctgaatcatgattccaagacgcagagagaaattgctgggattcgttgttcttattcattgcttggcaacactgcagcttc

SEQ ID NO: 394673 - DNA, 120 bp, Artificial Sequence
  ENSG00000145545_56 (sequence is synthesized)
caggagaatacccacctcactgatgacacaacatctgaatgcacacttactggccaacacgtgctttgctgtaaatcagtatgaagtcttcctaggggtcctggcctgaatgagatgaga

SEQ ID NO: 394674 - DNA, 120 bp, Artificial Sequence
  ENSG00000145545_57 (sequence is synthesized)
accttggaggctgcttttgactcatgtgaatgtcttccccaggagttaagtgggagtgctggggagagagtggcttgaggatgcacagccagcatgacactactattatgtgattactgt

SEQ ID NO: 394675 - DNA, 120 bp, Artificial Sequence
  ENSG00000145545_58 (sequence is synthesized)
cgacgttcataaccataactaatgactaattatgactttaccctggcgcacatggtcagaatggaaacaaataacaagctttacagtttttcctgctctattaaggtgcttaatttaccc

SEQ ID NO: 394676 - DNA, 120 bp, Artificial Sequence
  ENSG00000145555_0 (sequence is synthesized)
agtcccgcgggcgagagctggctgagccgcggcgcgggactgctcacctccaagcgctcgcgcggggatcgcggctcctgctcactttgcggcccgctgtcctcctgcccgccccgaggg

SEQ ID NO: 394677 - DNA, 120 bp, Artificial Sequence
  ENSG00000145555_1 (sequence is synthesized)
cccccggccggagcgcagagggagggggccgcgctcgccagcaccccgccgccttcccccgcctgggggaagaatgtgccaccagctgttctccgcttgcgagcgctgcgcccagtagtg

SEQ ID NO: 394678 - DNA, 120 bp, Artificial Sequence
  ENSG00000145555_2 (sequence is synthesized)
aggaacttggaggaagaagagacaaaggctgccgtcgggacgggcgagttagggacttgggtttgggcgaacaaaaggtgagaaggacaagaagggaccgggcgatggcagcaggggagc

SEQ ID NO: 394679 - DNA, 120 bp, Artificial Sequence
  ENSG00000145555_3 (sequence is synthesized)
cccgcgggcgcgcgtcctcgggagtggcgccgtgacacgcatggtttccccggacccgcggcggcgctgacttccgcgagtcggagcggcactcggcgagtccgggactgcgctggaaca

SEQ ID NO: 394680 - DNA, 120 bp, Artificial Sequence
  ENSG00000145555_4 (sequence is synthesized)
atggataacttcttcaccgagggaacacgggtctggctgagagaaaatggccagcattttccaagtactgtaaattcctgtgcagaaggcatcgtcgtcttccggacagactatggtcag

SEQ ID NO: 394681 - DNA, 120 bp, Artificial Sequence
  ENSG00000145555_5 (sequence is synthesized)
gtattcacttacaagcagagcacaattacccaccagaaggtgactgctatgcaccccacgaacgaggagggcgtggatgacatggcgtccttgacagagctccatggcggctccatcatg

SEQ ID NO: 394682 - DNA, 120 bp, Artificial Sequence
  ENSG00000145555_6 (sequence is synthesized)
tataacttattccagcggtataagagaaatcaaatatatacctacatcggctccatcctggcctccgtgaacccctaccagcccatcgccgggctgtacgagcctgccaccatggagcag

SEQ ID NO: 394683 - DNA, 120 bp, Artificial Sequence
  ENSG00000145555_7 (sequence is synthesized)
tacagccggcgccacctgggcgagctgcccccgcacatcttcgccatcgccaacgagtgctaccgctgcctgtggaagcgccacgacaaccagtgcatcctcatcagtggtgaaagtggg

SEQ ID NO: 394684 - DNA, 120 bp, Artificial Sequence
  ENSG00000145555_8 (sequence is synthesized)
gcaggtaaaaccgaaagcactaaattgatcctcaagtttctgtcagtcatcagtcaacagtctttggaattgtccttaaaggagaagacatcctgtgttgaacgagctattcttgaaagc

SEQ ID NO: 394685 - DNA, 120 bp, Artificial Sequence
  ENSG00000145555_9 (sequence is synthesized)
agccccatcatggaagctttcggcaatgcgaagaccgtgtacaacaacaactctagtcgctttgggaagtttgttcagctgaacatctgtcagaaaggaaatattcagggcgggagaatt

SEQ ID NO: 394686 - DNA, 120 bp, Artificial Sequence
  ENSG00000145555_10 (sequence is synthesized)
gtagattatttattagaaaaaaaccgagtagtaaggcaaaatcccggggaaaggaattatcacatattttatgcactgctggcagggctggaacatgaagaaagagaagaattttattta

SEQ ID NO: 394687 - DNA, 120 bp, Artificial Sequence
  ENSG00000145555_11 (sequence is synthesized)
tctacgccagaaaactaccactacttgaatcagtctggatgtgtagaagacaagacaatcagtgaccaggaatcctttagggaagttattacggcaatggacgtgatgcagttcagcaag

SEQ ID NO: 394688 - DNA, 120 bp, Artificial Sequence
  ENSG00000145555_12 (sequence is synthesized)
gaggaagttcgggaagtgtcgaggctgcttgctggtatactgcatcttgggaacatagaatttatcactgctggtggggcacaggtttccttcaaaacagctttgggcagatctgcggag

SEQ ID NO: 394689 - DNA, 120 bp, Artificial Sequence
  ENSG00000145555_13 (sequence is synthesized)
ttacttgggctggacccaacacagctcacagatgctttgacccagagatcaatgttcctcaggggagaagagatcctcacgcctctcaatgttcaacaggcagtagacagcagggactcc

SEQ ID NO: 394690 - DNA, 120 bp, Artificial Sequence
  ENSG00000145555_14 (sequence is synthesized)
ctggccatggctctgtatgcgtgctgctttgagtgggtaatcaagaagatcaacagcaggatcaaaggcaatgaggacttcaagtctattggcatcctcgacatctttggatttgaaaac

SEQ ID NO: 394691 - DNA, 120 bp, Artificial Sequence
  ENSG00000145555_15 (sequence is synthesized)
tttgaggttaatcactttgaacagttcaatataaactatgcaaacgagaaacttcaggagtacttcaacaagcatattttttctttagaacaactagaatatagccgggaaggattagtg

SEQ ID NO: 394692 - DNA, 120 bp, Artificial Sequence
  ENSG00000145555_16 (sequence is synthesized)
tgggaagatattgactggatagacaatggagaatgcctggacttgattgagaagaaacttggcctcctagcccttatcaatgaagaaagccattttcctcaagccacagacagcacctta

SEQ ID NO: 394693 - DNA, 120 bp, Artificial Sequence
  ENSG00000145555_17 (sequence is synthesized)
ttggagaagctacacagtcagcatgcgaataaccacttttatgtgaagcccagagttgcagttaacaattttggagtgaagcactatgctggagaggtgcaatatgatgtccgaggtatc

SEQ ID NO: 394694 - DNA, 120 bp, Artificial Sequence
  ENSG00000145555_18 (sequence is synthesized)
ttggagaagaacagagatacatttcgagatgaccttctcaatttgctaagagaaagccgatttgactttatctacgatctttttgaacatgtttcaagccgcaacaaccaggataccttg

SEQ ID NO: 394695 - DNA, 120 bp, Artificial Sequence
  ENSG00000145555_19 (sequence is synthesized)
aaatgtggaagcaaacatcggcggcctacagtcagctcacagttcaaggactcactgcattccttaatggcaacgctaagctcctctaatcctttctttgttcgctgtatcaagccaaac

SEQ ID NO: 394696 - DNA, 120 bp, Artificial Sequence
  ENSG00000145555_20 (sequence is synthesized)
atgcagaagatgccagaccagtttgaccaggcggttgtgctgaaccagctgcggtactcagggatgctggagactgtgagaatccgcaaagctgggtatgcggtccgaagaccctttcag

SEQ ID NO: 394697 - DNA, 120 bp, Artificial Sequence
  ENSG00000145555_21 (sequence is synthesized)
gacttttacaaaaggtataaagtgctgatgaggaatctggctctgcctgaggacgtccgagggaagtgcacgagcctgctgcagctctatgatgcctccaacagcgagtggcagctgggg

SEQ ID NO: 394698 - DNA, 120 bp, Artificial Sequence
  ENSG00000145555_22 (sequence is synthesized)
aagaccaaggtctttcttcgagaatccttggaacagaaactggagaagcggagggaagaggaagtgagccacgcggccatggtgattcgggcccatgtcttgggcttcttagcacgaaaa

SEQ ID NO: 394699 - DNA, 120 bp, Artificial Sequence
  ENSG00000145555_23 (sequence is synthesized)
caatacagaaaggtcctttattgtgtggtgataatacagaagaattacagagcattccttctgaggaggagatttttgcacctgaaaaaggcagccatagttttccagaagcaactcaga

SEQ ID NO: 394700 - DNA, 120 bp, Artificial Sequence
  ENSG00000145555_24 (sequence is synthesized)
ggtcagattgctcggagagtttacagacaattgctggcagagaaaagggagcaagaagaaaagaagaaacaggaagaggaagaaaagaagaaacgggaggaagaagaaagagaaagagag

SEQ ID NO: 394701 - DNA, 120 bp, Artificial Sequence
  ENSG00000145555_25 (sequence is synthesized)
agagagcgaagagaagccgagctccgcgcccagcaggaagaagaaacgaggaagcagcaagaactcgaagccttgcagaagagccagaaggaagctgaactgacccgtgaactggagaaa

SEQ ID NO: 394702 - DNA, 120 bp, Artificial Sequence
  ENSG00000145555_26 (sequence is synthesized)
cagaaggaaaataagcaggtggaagagatcctccgtctggagaaagaaatcgaggacctgcagcgcatgaaggagcagcaggagctgtcgctgaccgaggcttccctgcagaagctgcag

SEQ ID NO: 394703 - DNA, 120 bp, Artificial Sequence
  ENSG00000145555_27 (sequence is synthesized)
gagcggcgggaccaggagctccgcaggctggaggaggaagcgtgcagggcggcccaggagttcctcgagtccctcaatttcgacgagatcgacgagtgtgtccggaatatcgagcggtcc

SEQ ID NO: 394704 - DNA, 120 bp, Artificial Sequence
  ENSG00000145555_28 (sequence is synthesized)
ctgtcggtgggaagcgaattttccagcgagctggctgagagcgcatgcgaggagaagcccaacttcaacttcagccagccctacccagaggaggaggtcgatgagggcttcgaagccgac

SEQ ID NO: 394705 - DNA, 120 bp, Artificial Sequence
  ENSG00000145555_29 (sequence is synthesized)
gacgacgccttcaaggactcccccaaccccagcgagcacggccactcagaccagcgaacaagtggcatccggaccagcgatgactcttcagaggaggacccatacatgaacgacacggtg

SEQ ID NO: 394706 - DNA, 120 bp, Artificial Sequence
  ENSG00000145555_30 (sequence is synthesized)
gtgcccaccagccccagtgcggacagcacggtgctgctcgccccatcagtgcaggactccgggagcctacacaactcctccagcggcgagtccacctactgcatgccccagaacgctggg

SEQ ID NO: 394707 - DNA, 120 bp, Artificial Sequence
  ENSG00000145555_31 (sequence is synthesized)
gacttgccctccccagacggcgactacgactacgaccaggatgactatgaggacggtgccatcacttccggcagcagcgtgaccttctccaactcctacggcagccagtggtcccccgac

SEQ ID NO: 394708 - DNA, 120 bp, Artificial Sequence
  ENSG00000145555_32 (sequence is synthesized)
taccgctgctctgtggggacctacaacagctcgggtgcctaccggttcagctctgagggggcgcagtcctcgtttgaagatagtgaagaggactttgattccaggtttgatacagatgat

SEQ ID NO: 394709 - DNA, 120 bp, Artificial Sequence
  ENSG00000145555_33 (sequence is synthesized)
gagctttcataccggcgtgactctgtgtacagctgtgtcactctgccgtatttccacagctttctgtacatgaaaggtggcctgatgaactcttggaaacgccgctggtgcgtcctcaag

SEQ ID NO: 394710 - DNA, 120 bp, Artificial Sequence
  ENSG00000145555_34 (sequence is synthesized)
gatgaaaccttcttgtggttccgctccaagcaggaggccctcaagcaaggctggctccacaaaaaaggggggggctcctccacgctgtccaggagaaattggaagaagcgctggtttgtc

SEQ ID NO: 394711 - DNA, 120 bp, Artificial Sequence
  ENSG00000145555_35 (sequence is synthesized)
ctccgccagtccaagctgatgtactttgaaaacgacagcgaggagaagctcaagggcaccgtagaagtgcgaacggcaaaagagatcatagataacaccaccaaggagaatgggatcgac

SEQ ID NO: 394712 - DNA, 120 bp, Artificial Sequence
  ENSG00000145555_36 (sequence is synthesized)
atcattatggccgataggactttccacctgattgcagagtccccagaagatgccagccagtggttcagcgtgctgagtcaggtccacgcgtccacggaccaggagatccaggagatgcat

SEQ ID NO: 394713 - DNA, 120 bp, Artificial Sequence
  ENSG00000145555_37 (sequence is synthesized)
gatgagcaggcaaacccacagaatgctgtgggcaccttggatgtggggctgattgattctgtgtgtgcctctgacagccctgatagacccaactcgtttgtgatcatcacggccaaccgg

SEQ ID NO: 394714 - DNA, 120 bp, Artificial Sequence
  ENSG00000145555_38 (sequence is synthesized)
gtgctgcactgcaacgccgacacgccggaggagatgcaccactggataaccctgctgcagaggtccaaaggggacaccagagtggagggccaggaattcatcgtgagaggatggttgcac

SEQ ID NO: 394715 - DNA, 120 bp, Artificial Sequence
  ENSG00000145555_39 (sequence is synthesized)
aaagaggtgaagaacagtccaaagatgtcttcactgaaactgaagaaacggtggtttgtactcacccacaattccctggattactacaagagttcagagaagaacgcgctcaaactgggg

SEQ ID NO: 394716 - DNA, 120 bp, Artificial Sequence
  ENSG00000145555_40 (sequence is synthesized)
accctggtcctcaacagcctctgctctgtcgtccccccagatgagaagatattcaaagagacaggctactggaacgtcaccgtgtacgggcgcaagcactgttaccggctctacaccaag

SEQ ID NO: 394717 - DNA, 120 bp, Artificial Sequence
  ENSG00000145555_41 (sequence is synthesized)
ctgctcaacgaggccacccggtggtccagtgccattcaaaacgtgactgacaccaaggccccgatcgacacccccacccagcagctgattcaagatatcaaggagaactgcctgaactcg

SEQ ID NO: 394718 - DNA, 120 bp, Artificial Sequence
  ENSG00000145555_42 (sequence is synthesized)
gatgtggtggaacagatttacaagcggaacccgatccttcgatacacccatcaccccttgcactccccgctcctgccccttccgtatggggacataaatctcaacttgctcaaagacaaa

SEQ ID NO: 394719 - DNA, 120 bp, Artificial Sequence
  ENSG00000145555_43 (sequence is synthesized)
ggctataccacccttcaggatgaggccatcaagatattcaattccctgcagcaactggagtccatgtctgacccaattccaataatccagggcatcctacagacagggcatgacctgcga

SEQ ID NO: 394720 - DNA, 120 bp, Artificial Sequence
  ENSG00000145555_44 (sequence is synthesized)
cctctgcgggacgagctgtactgccagcttatcaaacagaccaacaaagtgccccaccccggcagtgtgggcaacctgtacagctggcagatcctgacatgcctgagctgcaccttcctg

SEQ ID NO: 394721 - DNA, 120 bp, Artificial Sequence
  ENSG00000145555_45 (sequence is synthesized)
ccgagtcgagggattctcaagtatctcaagttccatctgaaaaggatacgggaacagtttccaggaagcgagatggaaaaatacgctctcttcacttacgaatctcttaagaaaaccaaa

SEQ ID NO: 394722 - DNA, 120 bp, Artificial Sequence
  ENSG00000145555_46 (sequence is synthesized)
tgccgagagtttgtgccttcccgagatgaaatagaagctctgatccacaggcaggaaatgacatccacggtctattgccatggcggcggctcctgcaagatcaccatcaactcccacacc

SEQ ID NO: 394723 - DNA, 120 bp, Artificial Sequence
  ENSG00000145555_47 (sequence is synthesized)
atggaggacagcaggaacatgtttgctttgtttgaatacaacggccacgtcgacaaagccattgaaagtcgaaccgtcgtagctgatgtcttagccaagtttgaaaagctggctgccaca

SEQ ID NO: 394724 - DNA, 120 bp, Artificial Sequence
  ENSG00000145555_48 (sequence is synthesized)
tccgaggttggggacctgccatggaaattctacttcaaactttactgcttcctggacacagacaacgtgccaaaagacagtgtggagtttgcatttatgtttgaacaggcccacgaagcg

SEQ ID NO: 394725 - DNA, 120 bp, Artificial Sequence
  ENSG00000145555_49 (sequence is synthesized)
gttatccatggccaccatccagccccggaagaaaacctccaggttcttgctgccctgcgactccagtatctgcagggggattatactctgcacgctgccatcccacctctcgaagaggtt

SEQ ID NO: 394726 - DNA, 120 bp, Artificial Sequence
  ENSG00000145555_50 (sequence is synthesized)
tattccctgcagagactcaaggcccgcatcagccagtcaaccaaaaccttcaccccttgtgaacggctggagaagaggcggacgagcttcctagaggggaccctgaggcggagcttccgg

SEQ ID NO: 394727 - DNA, 120 bp, Artificial Sequence
  ENSG00000145555_51 (sequence is synthesized)
acaggatccgtggtccggcagaaggtcgaggaggagcagatgctggacatgtggattaaggaagaagtctcctctgctcgagccagtatcattgacaagtggaggaaatttcagggaatg

SEQ ID NO: 394728 - DNA, 120 bp, Artificial Sequence
  ENSG00000145555_52 (sequence is synthesized)
aaccaggaacaggccatggccaagtacatggccttgatcaaggagtggcctggctatggctcgacgctgtttgatgtggagtgcaaggaaggtggcttccctcaggaactctggttgggt

SEQ ID NO: 394729 - DNA, 120 bp, Artificial Sequence
  ENSG00000145555_53 (sequence is synthesized)
gtcagcgcggacgccgtctccgtctacaagcgtggagagggaagaccactggaagtcttccagtatgaacacatcctctcttttggggcacccctggcgaatacgtataagatcgtggtc

SEQ ID NO: 394730 - DNA, 120 bp, Artificial Sequence
  ENSG00000145555_54 (sequence is synthesized)
gatgagagggagctgctctttgaaaccagtgaggtggtggatgtggccaagctcatgaaagcctacatcagcatgatcgtgaagaagcgctacagcacgacacgctccgccagcagccag

SEQ ID NO: 394731 - DNA, 120 bp, Artificial Sequence
  ENSG00000145555_55 (sequence is synthesized)
ggcagctccaggtgaaggcgggacagagcccacctgtctttgctacctgaacgcaccaccctctggcctaggctggctccagtgtgccatgcccagccaaaacaaacacagagctgccca

SEQ ID NO: 394732 - DNA, 120 bp, Artificial Sequence
  ENSG00000145555_56 (sequence is synthesized)
ggctttctggaagcttctggtctgagggaggtgtctccgaggatccttttgcctgccgccttcattgatcctgtattaagctgtcaactttaacagtctgcacagtttccaaagctttac

SEQ ID NO: 394733 - DNA, 120 bp, Artificial Sequence
  ENSG00000145555_57 (sequence is synthesized)
tactcttagaggacacatgccttaaaaaaggaggggaggaaccacgctgccaccaaagcagccggaagtgccttaacttgtggaaccaacactaatcgaccgtaactgtgctactgaagg

SEQ ID NO: 394734 - DNA, 120 bp, Artificial Sequence
  ENSG00000145555_58 (sequence is synthesized)
gaactgcctttcccccttctgggggagacttaacagagcgtggaaggggggcattctctgtcaatgatgcactaacctcccaacctgatttccccgaatctgagggaaggtgagggagtg

SEQ ID NO: 394735 - DNA, 120 bp, Artificial Sequence
  ENSG00000145555_59 (sequence is synthesized)
ggaagggggatggagagctcgaggggacagtgtgtttgagctggagtgctgcgggcagcctttctcatggaatgacatgaatcaacttttttctttgtttcatcttttaagtgtacgtgc

SEQ ID NO: 394736 - DNA, 120 bp, Artificial Sequence
  ENSG00000145555_60 (sequence is synthesized)
ttgcctgttcgtgcatgtgttcataaactcaacactttaatcatggtttcatgagcattaaaaagcaaagggaaaaaggatgtgtaatggtgtacacagtctgtatattttaataatgca

SEQ ID NO: 394737 - DNA, 120 bp, Artificial Sequence
  ENSG00000145555_61 (sequence is synthesized)
gagctatagtctcaattgttactttataaggtggttttattaacaaacccaaatcctggattttcctgtctttgctgtattttgaaaaacacgtgttgactccattgttttacatgtagc

SEQ ID NO: 394738 - DNA, 120 bp, Artificial Sequence
  ENSG00000145555_62 (sequence is synthesized)
aaagtctgccatctgtgtctgctgtattataaacagataagcagcctacaagataactgtatttataaaccactcttcaacagctggctccagtgctggttttagaacaagaatgaagtc

SEQ ID NO: 394739 - DNA, 120 bp, Artificial Sequence
  ENSG00000145555_63 (sequence is synthesized)
attttggagtctttcatgtctaaaagatttaagttaaaaacaaagtgttacttggaaggttagcttctatcattctggatagattacagatataataaccatgttgactatgggggagag

SEQ ID NO: 394740 - DNA, 120 bp, Artificial Sequence
  ENSG00000145555_64 (sequence is synthesized)
acgctgcattccagaaacgtcttaacacttgagtgaatcttcaaaggaccctgacattaaatgctgaggctttaatacacacatattttatcccaagtttataatggtggtctgaacaag

SEQ ID NO: 394741 - DNA, 120 bp, Artificial Sequence
  ENSG00000145555_65 (sequence is synthesized)
gcacctgtaaataaatcagcatttatgaccagaagaaaaataatctggtcttggactttttatttttatatggaaaagttttaaggacttgggccaactaagtctacccacacgaaaaaa

SEQ ID NO: 394742 - DNA, 120 bp, Artificial Sequence
  ENSG00000145555_66 (sequence is synthesized)
gaaatttgccttgtccctttgtgtacaaccatgcaaaactgtttgttggctcacagaagttctgacaataaaagatactagctaacacgctgtgtgtttcctttatcagaggaggctcta

SEQ ID NO: 394743 - DNA, 120 bp, Artificial Sequence
  ENSG00000145555_67 (sequence is synthesized)
tgtgtttcctttatcagaggaggctctaaaaaccatggaggggaggcttatttttgttttggctttttggtggttttttttttttttctttagagacagagtctcactctgttacccagg

SEQ ID NO: 394744 - DNA, 69 bp, Artificial Sequence
  ENSG00000145555_68 (sequence is synthesized)
actgcattgggagtacaggcatgcatcaccacgcctggctaggttttgtatttttagtagagatggggt

SEQ ID NO: 394745 - DNA, 72 bp, Artificial Sequence
  ENSG00000145555_69 (sequence is synthesized)
ggctttttggtgttaatgctatggtttcagtgtctgggctttgtgtttgtttcatggacttgctcatcaggt

SEQ ID NO: 394746 - DNA, 120 bp, Artificial Sequence
  ENSG00000145555_70 (sequence is synthesized)
tctgggctttgtgtttgtttcatggacttgctcatcaggtctaaacacagatctgcagctgtctccactgctcttgtagacactgagtgtgacttcaagaaagcaaaagaagggactggt

SEQ ID NO: 394747 - DNA, 120 bp, Artificial Sequence
  ENSG00000145555_71 (sequence is synthesized)
aaatgaagtcacacacagctgaggacttgaaatgtgtttatgtcagacagtcccctatgtcagccccaaagtgtgcctgatcttgcaaccctggatcctagaacctgcctgcacctccct

SEQ ID NO: 394748 - DNA, 120 bp, Artificial Sequence
  ENSG00000145555_72 (sequence is synthesized)
gtggaccagaacacacaggtaggcagtttggttgccaatgtacccaaaccaccaggccaggcgtctagcatgagcaagcgccacttctcttgcagaccactgactcccaccctctgctca

SEQ ID NO: 394749 - DNA, 120 bp, Artificial Sequence
  ENSG00000145555_73 (sequence is synthesized)
tgctcacggatggcttcttcccattctgcagggattgggatggaacctgaagccaggtgctgcctgaagcctgtggccccgccaggcacccaaggaaagccggcaaagacttggatgtgt

SEQ ID NO: 394750 - DNA, 120 bp, Artificial Sequence
  ENSG00000145555_74 (sequence is synthesized)
gttgtctttgtttttattttaggctcagaaagaatttgacagaagtcttctttctactgctcacctctcaggattccctctgtgacttaatttactctggaaggctgtcgcccgccctca

SEQ ID NO: 394751 - DNA, 120 bp, Artificial Sequence
  ENSG00000145555_75 (sequence is synthesized)
attatagatggggaaataggcaaggaaaggcatgactcagattgggggggttagagcagcaccatagttagaacatagatttacatgtgagcctttacatggcatagttgtggttttgtt

SEQ ID NO: 394752 - DNA, 120 bp, Artificial Sequence
  ENSG00000145555_76 (sequence is synthesized)
ttagccttttatttagaaataattacagactcagagaaagttgcaacagaacgtacagggaggcctgcgtgcccttcagtttccccagtggtagcatcccccatcactgtagagcagcat

SEQ ID NO: 394753 - DNA, 120 bp, Artificial Sequence
  ENSG00000145555_77 (sequence is synthesized)
cacagctgacaaagtaccgttgagcttcccctagccacagaacctattccaattttactgcttttacatgcactcattggtgtgtgtgatgtcagttgctttcaacaaggtcagtgaagt

SEQ ID NO: 394754 - DNA, 120 bp, Artificial Sequence
  ENSG00000145555_78 (sequence is synthesized)
gcagtcgtcccttggtatccaagggagattggttccaggaccccctccccccacccctgaggatacaaaattcacagatgctcaagtccctgctatacagtggtataatatttgcataga

SEQ ID NO: 394755 - DNA, 120 bp, Artificial Sequence
  ENSG00000145555_79 (sequence is synthesized)
acctgcacacatctttccttaccctttaaatcatctccaggttacagatacctagcacaacataaatgctgcataaatagctgttataccgtgtgtgtctgtgttttaaacattgtttat

SEQ ID NO: 394756 - DNA, 120 bp, Artificial Sequence
  ENSG00000145555_80 (sequence is synthesized)
ctgttataccgtgtgtgtctgtgttttaaacattgtttatttgagacagggtctcactctgtcaccaggctacagtgcagaggcacagtcacagctcattgcagcctcaacctcctgggc

SEQ ID NO: 394757 - DNA, 120 bp, Artificial Sequence
  ENSG00000145555_81 (sequence is synthesized)
gacaggtgtgagccactgtgccccaccaaaaaaagttttttcaaatattttctatctgtggttggattcagaccacatgaacactgagggctgactgtagttttgaatgtctgttactga

SEQ ID NO: 394758 - DNA, 120 bp, Artificial Sequence
  ENSG00000145555_82 (sequence is synthesized)
ggaggcaccagcataaagtattttatcacttcagacgctgacaatctagtatttttaatttttaaatcttttgaaagctaatacatataggtgatttgtaaaaaaaaaaaaaaaaaaaaa

SEQ ID NO: 394759 - DNA, 120 bp, Artificial Sequence
  ENSG00000145555_83 (sequence is synthesized)
aaaaaaaaaaaaaaaaaacaactagaagtaaaatgttacttttttccagctgtagccctaattacccattttcctttcccagaaacagctatttttactgttttattgaatattctctca

SEQ ID NO: 394760 - DNA, 120 bp, Artificial Sequence
  ENSG00000145555_84 (sequence is synthesized)
aaaataatttaagctgtccaatcatttactcatacatacatatatatccccatcctcatttttaatagatggaaacaaactgttgtagcttacttttttctcagcatagtattttagctc

SEQ ID NO: 394761 - DNA, 120 bp, Artificial Sequence
  ENSG00000145555_85 (sequence is synthesized)
taatcctacattaatacctatagaattgccttattctttttgatgattatatagtacctcagatagctctgtggaaaaacaggataaggccatctgtattagtccattctcacactgcta

SEQ ID NO: 394762 - DNA, 120 bp, Artificial Sequence
  ENSG00000145555_86 (sequence is synthesized)
tgagactgggtaatttataaagaaaaagaagttgaatggactcagtctcacatgcctggggaggcctcacaatcatggtggacagcaaaggaggagaaaaggcacatcttatatggcagc

SEQ ID NO: 394763 - DNA, 120 bp, Artificial Sequence
  ENSG00000145555_87 (sequence is synthesized)
ttatatggcagcaggcaagagagcttgcacaggggaactcccttttataaaaccattagctcttccgagacatactcactatggacaagaacagcatgggaaaacccacccccatgattc

SEQ ID NO: 394764 - DNA, 63 bp, Artificial Sequence
  ENSG00000145555_88 (sequence is synthesized)
cacctaagttctctgtaaaaatagtttcagccaggcatgctggctcacgcctgtaatcccagc

SEQ ID NO: 394765 - DNA, 120 bp, Artificial Sequence
  ENSG00000145555_89 (sequence is synthesized)
ctcacgcctgtaatcccagcatgttggaaggccgaggcaagaggatcgcttgagctccggagttcaagaccagtctgggcaacatgacaagaccctgtctccacagaaaattaacattag

SEQ ID NO: 394766 - DNA, 90 bp, Artificial Sequence
  ENSG00000145555_90 (sequence is synthesized)
tgagaaaatcgtttgaacccaggaggtcaaagctgcagggagccatgatggtgccactgcattctggtgtgggtgacagagcaagactct

SEQ ID NO: 394767 - DNA, 83 bp, Artificial Sequence
  ENSG00000145555_91 (sequence is synthesized)
gaaatctaagacagcactttttttagttactaagccttttattcagatagcacactaaattggggtcaaaaatctgctatagt

SEQ ID NO: 394768 - DNA, 120 bp, Artificial Sequence
  ENSG00000145555_92 (sequence is synthesized)
cagatagcacactaaattggggtcaaaaatctgctatagtaaagttctgtatttgtgtgtattgggtataaaaataagcgctttaattaatttgaaaatccctattcaccaaaagtttat

SEQ ID NO: 394769 - DNA, 120 bp, Artificial Sequence
  ENSG00000145555_93 (sequence is synthesized)
actgtaataggggacaaaacaagtgcataaagctaaatttagccagtacatttataactgtttcattcagttgatcagagaagcatcacgattgctggaaaatatcggacctggattcaa

SEQ ID NO: 394770 - DNA, 120 bp, Artificial Sequence
  ENSG00000145555_94 (sequence is synthesized)
ggtttggcattgctgttttcaaagtatgtaatcttttagatcaggggtcagtgaactacagtacagagaccaaatctaccctgccacctgtttttgtgaataaagttttattgaaacaga

SEQ ID NO: 394771 - DNA, 120 bp, Artificial Sequence
  ENSG00000145555_95 (sequence is synthesized)
aaagcacaggaatggtgttcattattgttccatgtctttagctgtggggaaaaggtcagtgtggcagttgttttccatatgaattttggcccaagagccaaactgaaggtgagatgcccc

SEQ ID NO: 394772 - DNA, 120 bp, Artificial Sequence
  ENSG00000145555_96 (sequence is synthesized)
cgctatacaattgttctttcacattgggaagatactcctgttgccatgcctaccataaccttttgtctcccaaacagttactattttatttgaagtgaagtccttgacttgtcagggact

SEQ ID NO: 394773 - DNA, 120 bp, Artificial Sequence
  ENSG00000145555_97 (sequence is synthesized)
gaatattttggattttgaatttaacttaaattatgcttaaccagtacatagtatgcaaatattccaaaatccaaaaaatattgaaatccacaacactttgtgtcccaggcatttcacaca

SEQ ID NO: 394774 - DNA, 120 bp, Artificial Sequence
  ENSG00000145555_98 (sequence is synthesized)
agggatgctcaatctatattttgaaactcatactttgctgtcattagagaaaaaacacaagtttgtttttttttgtaatagtgtcttgctatgttgcccaggctagactcaaactcctga

SEQ ID NO: 394775 - DNA, 120 bp, Artificial Sequence
  ENSG00000145555_99 (sequence is synthesized)
cctcctgagtacctgggattacaggcacgtgccagcatgcccacctagacacaagttgttattgtacattttcaatagtcaagaaaaagtaagtaaattagaaggaaaaaaaaactacac

SEQ ID NO: 394776 - DNA, 120 bp, Artificial Sequence
  ENSG00000145555_100 (sequence is synthesized)
attagaaggaaaaaaaaactacacaagggtttaaaaggcagacccttttaaaaagttttttatttattttcctcttttcatgataataatgttaaacctgacagctaaattgccaataca

SEQ ID NO: 394777 - DNA, 120 bp, Artificial Sequence
  ENSG00000145555_101 (sequence is synthesized)
tactatgaataagatcttggtcttggaataaggtcatattcttcctttctaaggggaaacccgtaggatttttgtgcatccaatttgcagttcagttcagttaattatgccattgtagac

SEQ ID NO: 394778 - DNA, 120 bp, Artificial Sequence
  ENSG00000145555_102 (sequence is synthesized)
cttccgtttgaggcttgcaaaattgtatattatccataaagcagccaccatgattttttaaaattatcattgaagccattcaccggagatgtcagcgtctgttggactccgctcacatcg

SEQ ID NO: 394779 - DNA, 120 bp, Artificial Sequence
  ENSG00000145555_103 (sequence is synthesized)
agacaagaccgccacctgtcagaacagccactgcttctccacatttgatcctggctcggagcaatgcctgtctatatctttaaaagagaaaaaaaataaaatgacttgaattgttccaga

SEQ ID NO: 394780 - DNA, 120 bp, Artificial Sequence
  ENSG00000145555_104 (sequence is synthesized)
aatctgtgatttaggagtgagttctttccatgcttctcctctcctcttttcccttcctagcaagaggagaaaaaaagcaagtaatttaatgtaatctgattttttttttttttttttttt

SEQ ID NO: 394781 - DNA, 120 bp, Artificial Sequence
  ENSG00000145555_105 (sequence is synthesized)
ttacttcatggctttttgacattggaagagaaatgagccatctttctagaggagctttagtgtcatgtgtgcttttcttattgattgggaataacttaaaaagactcctcagaactccga

SEQ ID NO: 394782 - DNA, 120 bp, Artificial Sequence
  ENSG00000145555_106 (sequence is synthesized)
atgggatatttaatttgttagaacacgagtctgcaccactatctgttgacggtgaaatgaatttactaagtggataatttgctgagcattagctgaccctgacgtggcggaacgaaggtc

SEQ ID NO: 394783 - DNA, 120 bp, Artificial Sequence
  ENSG00000145555_107 (sequence is synthesized)
tctggagatggttcatggtggaaatctgggcttgatgggtcggtaatgagacttcagcgatgacatctttaccaaggctgaggcttaacactcgggaccaagcgattcaactgggaacac

SEQ ID NO: 394784 - DNA, 120 bp, Artificial Sequence
  ENSG00000145555_108 (sequence is synthesized)
agatgcccttgcccggactgctaaagatgcagctatttacagtggacagaaactgaaggggtgaaagaaaacccaaggcaatcaaggctgcacttgctacccttctgcaggaagcttccc

SEQ ID NO: 394785 - DNA, 120 bp, Artificial Sequence
  ENSG00000145555_109 (sequence is synthesized)
agccagcacagtttctctctgccctgcctcttaatccccacccctgctcccaggcctgggacactgctaaccacccctccttcctgacacctctctgaccacccctcctcctcttgactg

SEQ ID NO: 394786 - DNA, 120 bp, Artificial Sequence
  ENSG00000145555_110 (sequence is synthesized)
agcaaagagtgctgttcttgttctctgggtggattttccaagatcacaactaaactgcttgattttgtcctgggactttttttaaaaaaaaattattgattggcttttaaaatcaagaat

SEQ ID NO: 394787 - DNA, 120 bp, Artificial Sequence
  ENSG00000145555_111 (sequence is synthesized)
ctttgggccctgaaatgtaattacacatttgttgatgcgtgcatgatggttagtttgcccctgcagtcaaaagtgtcttcagcagttcctatcacgtcagcctcgccaggctggacttcc

SEQ ID NO: 394788 - DNA, 120 bp, Artificial Sequence
  ENSG00000145555_112 (sequence is synthesized)
tttgagtagaatcaggaatgaattaagcagcacagcccgagacgcaccacataaaaggctgggaacaccagccagccgaagaaagcccatttttgtgtctgtcagcttagatgcccttgc

SEQ ID NO: 394789 - DNA, 120 bp, Artificial Sequence
  ENSG00000145569_0 (sequence is synthesized)
gcctcagggaagcgagcccgggcgccggcgggcggccgtcgcgtctgacagaccactgcagaccacgggccgaggcccagcgcccgtccgcagcgcggccggcatggcggcgacaaggag

SEQ ID NO: 394790 - DNA, 120 bp, Artificial Sequence
  ENSG00000145569_1 (sequence is synthesized)
ccccacgcgggcaagggagcgggagcggtctggcgctcccgccgcaggaagtgaccaagttcactcctggatgctagctacaagccaagccttagacactgtctggagaatggcaaaagg

SEQ ID NO: 394791 - DNA, 120 bp, Artificial Sequence
  ENSG00000145569_2 (sequence is synthesized)
ctttgtgatgttggcagtttcatttctggtggctgccatctgctacttccggaggctacatttatattcagggcacaagctgaaatggtggattggatatctgcagagaaaattcaaaag

SEQ ID NO: 394792 - DNA, 120 bp, Artificial Sequence
  ENSG00000145569_3 (sequence is synthesized)
gaacctcagtgtggaggcagaggttgatttactcagttattgtgcaagagaatggaaaggagagacaccccgtaacaagctgatgaggaaggcttatgaggagctattttggcggcatca

SEQ ID NO: 394793 - DNA, 120 bp, Artificial Sequence
  ENSG00000145569_4 (sequence is synthesized)
cattaaatgtgttcgacaagtaaggagagataactatgatgctctcagatcagtgttatttcagatattcagccagggcatctcttttccatcatggatgaaagaaaaggacattgttaa

SEQ ID NO: 394794 - DNA, 120 bp, Artificial Sequence
  ENSG00000145569_5 (sequence is synthesized)
gcttcctgaaaaactgctgttttcacaaggttgtaattggattcagcagtacagttttggtcctgagaagtatacaggctcgaatgtgtttggaaaactacggaaatatgtggaattatt

SEQ ID NO: 394795 - DNA, 120 bp, Artificial Sequence
  ENSG00000145569_6 (sequence is synthesized)
gaaaacacagtggactgaatttaatggcattagagattatcacaagagaggaagtatgtgcaacacccttttttcagatgccattctggaatataaactttatgaagctttaaagttcat

SEQ ID NO: 394796 - DNA, 120 bp, Artificial Sequence
  ENSG00000145569_7 (sequence is synthesized)
catgctgtatcaagtcactgaagtttatgaacaaatgaagactaaaaaggtcattcccagtctttttagactcctgttttccagggagacatcctctgatcctttgagcttcatgatgaa

SEQ ID NO: 394797 - DNA, 120 bp, Artificial Sequence
  ENSG00000145569_8 (sequence is synthesized)
tcacctgaattctgtaggcgacacatgtggactagagcagattgatatgtttatacttggatactcccttgaagtaaagataaaagtgttcagactgttcaagtttaactccagagactt

SEQ ID NO: 394798 - DNA, 120 bp, Artificial Sequence
  ENSG00000145569_9 (sequence is synthesized)
tgaagtctgctacccagaggagcctctcagggactggccggagatctccctgctgaccgagaacgaccgccactaccacattccagtcttttaagtccgctgggggccgaacagcagtgc

SEQ ID NO: 394799 - DNA, 120 bp, Artificial Sequence
  ENSG00000145569_10 (sequence is synthesized)
tcaccagtgacggtggtcacagttgcaataaagtctctctctgaaaccaaagctagcatttcagcatggaaggaattaggaccttttcttcaggattacaggtacactggatgcagccat

SEQ ID NO: 394800 - DNA, 120 bp, Artificial Sequence
  ENSG00000145569_11 (sequence is synthesized)
gcatggatggtttttctttatttttcagtgatttcctctgaagcagctgcactgatacatttgggagttggtggcttgactttgtccataaggggcgtggccacttcacatgatggcggg

SEQ ID NO: 394801 - DNA, 120 bp, Artificial Sequence
  ENSG00000145569_12 (sequence is synthesized)
cctttaagagcacaaagaagtttaatatggacaacaacaggaaaaagcaagaagaaaacaagtagggaaaaacagctaacctggagagaaagaatttctttaacctttatgttcttcatt

SEQ ID NO: 394802 - DNA, 120 bp, Artificial Sequence
  ENSG00000145569_13 (sequence is synthesized)
aaaaatcttatcttggactgatttgagggatttttagaaacatggccttattttatataagcattaccttcccaggaatctttgttgtatattaatttttgataaccatttgattaactt

SEQ ID NO: 394803 - DNA, 120 bp, Artificial Sequence
  ENSG00000145569_14 (sequence is synthesized)
agtatatgtgtgtatatatacatatgtatgtttatatacacacatgtatctgtatagttttatatatacatatatacacatagacatacagagaaccactactttgtaatagtgtacagt

SEQ ID NO: 394804 - DNA, 120 bp, Artificial Sequence
  ENSG00000145569_15 (sequence is synthesized)
tgtacagtttgttttatatctctttactttttttgttactattttatctggccagcttaatagttttatttagattttttaaaattctgtagattaaagcaaatgacagttattgaacta

SEQ ID NO: 394805 - DNA, 120 bp, Artificial Sequence
  ENSG00000145569_16 (sequence is synthesized)
tcacaaaactattaaactgtggtacatttaatgtgtatttaatgtgtggaatctcattatggtaggcagaataatgccctatgctccccaaagatgtctgtgtctgaatcctcagagccg

SEQ ID NO: 394806 - DNA, 120 bp, Artificial Sequence
  ENSG00000145569_17 (sequence is synthesized)
taaagggctaaatgggttaaatgggaaaggagaattaaggttgcaggtggaactgagatgctaatccaatgatgctgaaatagggagatttttctagattctccaggtggacgcagtgta

SEQ ID NO: 394807 - DNA, 120 bp, Artificial Sequence
  ENSG00000145569_18 (sequence is synthesized)
atcagaatggttcttaaaagtggaagagggaattggaagagtgtcagagtcagaggggaatgtgaaatatggaagaacggttagagagagatgcaccattgctggctttgaagatggagg

SEQ ID NO: 394808 - DNA, 120 bp, Artificial Sequence
  ENSG00000145569_19 (sequence is synthesized)
aaggggccataagccagggagttgcaggcagcctgtagaattgagactggaaaggaaacagaaacttccccatagcctccagaaggaacgcagccctgccaacaccttgattttagccca

SEQ ID NO: 394809 - DNA, 120 bp, Artificial Sequence
  ENSG00000145569_20 (sequence is synthesized)
gtgaagcctgtgttggacctctaatctgcagaactgtaagataatagatttgtgtttaagccactaagtttgtggtaatgtgttgtagcaacagaaaactagtattctcaggctagtttt

SEQ ID NO: 394810 - DNA, 120 bp, Artificial Sequence
  ENSG00000145569_21 (sequence is synthesized)
tggtcgtctttattttggaaatacttttctagtttaatttgatagttttttttttggaggtactttgctagtctgttttgagtttcagtacataagaataatttttaaaatcttgctaat

SEQ ID NO: 394811 - DNA, 120 bp, Artificial Sequence
  ENSG00000145569_22 (sequence is synthesized)
tatatattacttcaaagtcacaaatccctttctaagaatgacttacttcacgagatatttagcactatcattttcccagatgttcatattatttctgcaataaattaaaagggagtgtgt

SEQ ID NO: 394812 - DNA, 120 bp, Artificial Sequence
  ENSG00000145569_23 (sequence is synthesized)
caaatgctgtcatgtctgaaattagcattcatattcttttgcaatggggatgatcagtcgtgtgtactacatgaaccatgtctgatggtagcttgttcccactgtcattttgttttctgg

SEQ ID NO: 394813 - DNA, 120 bp, Artificial Sequence
  ENSG00000145569_24 (sequence is synthesized)
ttgaagattaatgagctcagccacagaaacaagagttcttcattgacctctacagtccctgcctgtttggaaacatctatggttttgtataacccctgtcatttaactgacagtgttaga

SEQ ID NO: 394814 - DNA, 120 bp, Artificial Sequence
  ENSG00000145569_25 (sequence is synthesized)
agatatccccctgatgtgttactgtaaccaagaaagcatgaacgttaccctttctggtgacagcctgccatgggctgctgtggctgatacttatagaattgttgctccaaaattttggct

SEQ ID NO: 394815 - DNA, 120 bp, Artificial Sequence
  ENSG00000145569_26 (sequence is synthesized)
ccacttgagctgtccagaagtgtacctgacatttgtgtattaccactcaccttggatctccttactagtgtaattatttccacatcaatccaggactgaaaggaaaaattttttcaccag

SEQ ID NO: 394816 - DNA, 120 bp, Artificial Sequence
  ENSG00000145569_27 (sequence is synthesized)
gattggcagcctgtagctctgtgacctcagtcaacccatcatgttgtgttgtgggcggggggcaagaattctttagagaaccaagttgcgagaaagatttcaatccagtgaaagtaaaaa

SEQ ID NO: 394817 - DNA, 120 bp, Artificial Sequence
  ENSG00000145569_28 (sequence is synthesized)
gtaagaagacatttagatagttgctatattttgggaagatgtcaaaacaggtttttagggaggaggtatgaggtgttgtgttgttttgtttgtttttattcagttgtataatgaatataa

SEQ ID NO: 394818 - DNA, 120 bp, Artificial Sequence
  ENSG00000145569_29 (sequence is synthesized)
gggtgatgccaacatttaaatgtctttctaaccgtatatgttttaaatggtgagagaactatagcaaaaatggaaacataatgccctcgtcgttttttgattttaggataagtttctctc

SEQ ID NO: 394819 - DNA, 120 bp, Artificial Sequence
  ENSG00000145569_30 (sequence is synthesized)
tcaaattttggccttacgtgtccatactgaggggttgtatgcatattagtacaaggctgacttttactgtggtaaaatacacataacatatagtttatattttaacaatttttttttttg

SEQ ID NO: 394820 - DNA, 120 bp, Artificial Sequence
  ENSG00000145569_31 (sequence is synthesized)
tacaggtgcccaccactacgctcgactaattttttgtgtttttagtagaaacggggtttcaccatttagccaggctgatctgaactcctgaccttgggcgatccgcctacctcggcatcc

SEQ ID NO: 394821 - DNA, 120 bp, Artificial Sequence
  ENSG00000145569_32 (sequence is synthesized)
attacgggtgtgagccactgcgcccggccctaacaatttttaagtgacagtgacattaagcatattcacattgttgtgcaaccctcaccaccatccaccctcagaactttttaaaatctc

SEQ ID NO: 394822 - DNA, 120 bp, Artificial Sequence
  ENSG00000145569_33 (sequence is synthesized)
ttttaaaatctccaagactgactttttttcaaagcaggcaactttaattccctacctggtatctggattccttttccttttcatgctatcttttcatcatacctcttctaatctgagtat

SEQ ID NO: 394823 - DNA, 120 bp, Artificial Sequence
  ENSG00000145569_34 (sequence is synthesized)
ttcctctgggcttaaaagagcctcagtggagaagtacaacctaagagggagttaggtacaacctaggagggagtcaggaggagagagttaggttagttagtacaacctaagagggagtta

SEQ ID NO: 394824 - DNA, 120 bp, Artificial Sequence
  ENSG00000145569_35 (sequence is synthesized)
aatggatcaggaaaatcgtgttttatctccaaagtaaaatgataactatgggtggcttctgggctcaatttagaatattatcattgaaaagtccccaagaaactattaattcagagccac

SEQ ID NO: 394825 - DNA, 120 bp, Artificial Sequence
  ENSG00000145569_36 (sequence is synthesized)
cctggtgagttgaatttcttgaatgtcttcatggtcttgaaccaaagtcatttccacccaagggagagtcaggtgaaagtccccagggccctctctaggggaccggagacctccagacta

SEQ ID NO: 394826 - DNA, 120 bp, Artificial Sequence
  ENSG00000145569_37 (sequence is synthesized)
agctggtggaggatgggctcaacctccatgagagaagagcagccaggatcagggggcattaacgttaattttcccaggacttttctgcaaatgggtattggatggaaatatttgttctca

SEQ ID NO: 394827 - DNA, 120 bp, Artificial Sequence
  ENSG00000145569_38 (sequence is synthesized)
gtcagatgagtttctcctattttagtgagaccaaagaaagacaattttaattgtgtccaagctgacttttttgaatgctctggaaatgttggaattccacatcaaagtacgtaactgttt

SEQ ID NO: 394828 - DNA, 120 bp, Artificial Sequence
  ENSG00000145569_39 (sequence is synthesized)
taaactgataactaacccaatatgtgaaaatatatgcaagcatgaataaagggttgactaattccagaattagcaataattttctcttaaatagcaaatttctaaagctgtatgattctc

SEQ ID NO: 394829 - DNA, 120 bp, Artificial Sequence
  ENSG00000145569_40 (sequence is synthesized)
tttgcaagaatgtttttcacactgcttaataagaccagttaatgtgtaaaacagaaaaaagtatatatatatcatatgtcttttcatgcatctgaaactttaactgtctatagggttgct

SEQ ID NO: 394830 - DNA, 120 bp, Artificial Sequence
  ENSG00000145569_41 (sequence is synthesized)
tgtcatagttgaacattatttaattaacttattgactatatatgggtatacttttctctatagccattcacttttttaaagttttaattatttaattgacaaattagctattcattttcc

SEQ ID NO: 394831 - DNA, 120 bp, Artificial Sequence
  ENSG00000145569_42 (sequence is synthesized)
ttcaaatcctgtttttatcacaatgtccattttacagctagacacaaaatttagtgggtccaaattgttcaatcacttctatgttatttgttcagaatagtggatctttgcttaattcac

SEQ ID NO: 394832 - DNA, 120 bp, Artificial Sequence
  ENSG00000145569_43 (sequence is synthesized)
ttctgttttaatcccatcatattcctttaggccaagaaaaggaaagctgatttggattatatttatgcttaatatcaacatggtttataagtggacagaaaaacactcactcacgtattc

SEQ ID NO: 394833 - DNA, 120 bp, Artificial Sequence
  ENSG00000145569_44 (sequence is synthesized)
agccacgtatggtctggagtgctctgtagaacagcccgaagtgtacaccatgtctctgcacttgaagctcatggaatgtgttggaggagactcaagctccatgtgggaacagtgtggccc

SEQ ID NO: 394834 - DNA, 120 bp, Artificial Sequence
  ENSG00000145569_45 (sequence is synthesized)
aagagccagcatggaggagggctgtgtgagcagactgctatagaatgctaaagttataatcctagctggtgtctcgttctgtttaaaaaaatcaaatttctgtatgtaattgacgtattg

SEQ ID NO: 394835 - DNA, 120 bp, Artificial Sequence
  ENSG00000145569_46 (sequence is synthesized)
gtccttatagtcagtaccatcaggtcttagattgttaagtcattttgctgccaccagaccagtgagagtcactcacttatttgtaatgattcttgggaagtttagtcaagagaatatcct

SEQ ID NO: 394836 - DNA, 120 bp, Artificial Sequence
  ENSG00000145569_47 (sequence is synthesized)
tgaataaagaagtacatgttttaagtattttcatcgtagtctagatgggctgtaaaacccatttccacacgagtataaatttaaaacagaaacatcaaggtgtcagcaatcatgattttg

SEQ ID NO: 394837 - DNA, 120 bp, Artificial Sequence
  ENSG00000145569_48 (sequence is synthesized)
ttttgcttgttcacaagtttgaaaaggtgcatgaggcaccaatcagtgacactggaatgctttaaggatggtttgtgactttaccccattgtgccttatcatttgtcagcaaacttactg

SEQ ID NO: 394838 - DNA, 120 bp, Artificial Sequence
  ENSG00000145569_49 (sequence is synthesized)
ggccaaacacaaatggctgagacactcctggcccatttcttgtcatcgctgccatccccaaagacagactctgggaaacaacttgggaactgcttcaagtccatgccaggtcatggcttc

SEQ ID NO: 394839 - DNA, 120 bp, Artificial Sequence
  ENSG00000145569_50 (sequence is synthesized)
gtccgcctcccagcatgtacctggacttcctttgggtgccggcttttctgctggactaagattcatggaaagaaccccagggcaaggtgaggagaagcagctggtacagactgatgacga

SEQ ID NO: 394840 - DNA, 120 bp, Artificial Sequence
  ENSG00000145569_51 (sequence is synthesized)
aggagaggaccagaaaagctgcttgggtgtggtggaagtttcagtgtaatgtgattcctagtaggcacatctgtgactcccttaaataaaaagggccagagatgaggggacgcctggtga

SEQ ID NO: 394841 - DNA, 120 bp, Artificial Sequence
  ENSG00000145569_52 (sequence is synthesized)
aaatggtgtttgttgtaacatcttggtatcattgtgggtaagtagaacaaatatttacatctgttatgaaaagctacctttagccgtagataaacattaaaaggaagactcagccccaga

SEQ ID NO: 394842 - DNA, 120 bp, Artificial Sequence
  ENSG00000145569_53 (sequence is synthesized)
gtatatttgatctattggttaactcatctgtcagcaaatggttaagtaagtaaaattaatttttccatttggtgtgtatttcacagggtaacaatgaagtgctccaatctgcttgtgaga

SEQ ID NO: 394843 - DNA, 120 bp, Artificial Sequence
  ENSG00000145569_54 (sequence is synthesized)
ccagttagattagtagttgcagttgagaccattcctcctgtatgtctttacaagcaaattgaaacgacatgctcttctttgtactatacagaaggacacaccacagatcctctttttaaa

SEQ ID NO: 394844 - DNA, 120 bp, Artificial Sequence
  ENSG00000145569_55 (sequence is synthesized)
gcaggtaataaagtagctttttccttttgaaacatcattgtaaaacagtgctttttaaactatccatggtaaaggatgagttttaaaaattctaatcctttgcaggttggtagttttata

SEQ ID NO: 394845 - DNA, 120 bp, Artificial Sequence
  ENSG00000145569_56 (sequence is synthesized)
aatacgataaaaatatagcaccaagattagattgttataaaagtttctaaacactttcagtttctgtacttaatcttgcagtgtggtaataaagacttctacactttagtagcactaaaa

SEQ ID NO: 394846 - DNA, 120 bp, Artificial Sequence
  ENSG00000145569_57 (sequence is synthesized)
tgctcaccagtgacggtggtcacagttgcaataaagtctctctctgaaaccaaagctagcatttcagcatggaaggaattaggaccttttcttcaggattacaggccaagaaaaggaaag

SEQ ID NO: 394847 - DNA, 120 bp, Artificial Sequence
  ENSG00000145592_0 (sequence is synthesized)
ctcttccggtctttctggtctcggccgcagaagcgagatgacgaagggaacgtcatcgtttggaaagcgtcgcaataagacgcacacgttgtgccgccgctgtggctctaaggcctacca

SEQ ID NO: 394848 - DNA, 120 bp, Artificial Sequence
  ENSG00000145592_1 (sequence is synthesized)
ccttcagaagtcgacctgtggcaaatgtggctaccctgccaagcgcaagagaaagtataactggagtgccaaggctaaaagacgaaataccaccggaactggtcgaatgaggcacctaaa

SEQ ID NO: 394849 - DNA, 120 bp, Artificial Sequence
  ENSG00000145592_2 (sequence is synthesized)
aattgtataccgcagattcaggcatggattccgtgaaggaacaacacctaaacccaagagggcagctgttgcagcatccagttcatcttaagaatgtcaacgattagtcatgcaataaat

SEQ ID NO: 394850 - DNA, 120 bp, Artificial Sequence
  ENSG00000145592_3 (sequence is synthesized)
gttctggttttaaaaaatacatatctggttttggtaaggtatttttaatcaattaggcttgtagtatcagtgaaatactgtaggtttagggactgggctagcttcatatcagatttactt

SEQ ID NO: 394851 - DNA, 120 bp, Artificial Sequence
  ENSG00000145592_4 (sequence is synthesized)
gttaagtgactgttttggaatgtttacttttggactgggtttgtaacacggttaaaggcaatgagaaacaagcagaattccaggagtccttgaagcagagggcactggaagacaatatag

SEQ ID NO: 394852 - DNA, 120 bp, Artificial Sequence
  ENSG00000145592_5 (sequence is synthesized)
cagattaaaatagcacagctcatgtggcataggtgggtattttagatgtttgagtaaatttgaaagagtatgatgtttaaattacctttagcaacatgttcatctgctatgctgtcatga

SEQ ID NO: 394853 - DNA, 120 bp, Artificial Sequence
  ENSG00000145592_6 (sequence is synthesized)
ctagggggatgattattagtcacatagagcttgggagtaccactggaaacgtatgggtaggagtttaggtggcttctgtttttcaaaagatgatcttatcctagtatctgtaatgctcac

SEQ ID NO: 394854 - DNA, 120 bp, Artificial Sequence
  ENSG00000145592_7 (sequence is synthesized)
ttggcacacctgacttgtgggctgtgtgtaaggtggctagctaagtgaaaaaagcctgctaggtgtgagtcaacttaagaatatgtaaataggtttgagaaaaagtagggcttgggtgca

SEQ ID NO: 394855 - DNA, 120 bp, Artificial Sequence
  ENSG00000145592_8 (sequence is synthesized)
agtaaagattgagcaggaaataaaggaaaatcaagtataatccctgagatttgtagactaaaggcaatgatgtgggactacttggtcgaatttttttagccctcaacttggtaattgggt

SEQ ID NO: 394856 - DNA, 120 bp, Artificial Sequence
  ENSG00000145592_9 (sequence is synthesized)
gtttctgtgttaaagcactgaaacttgctgtcgtgccttcctagttttcgtggtttattgacagggttgggggttttttttgtttttttaaaatgaagggacaaagtcaactggactgct

SEQ ID NO: 394857 - DNA, 120 bp, Artificial Sequence
  ENSG00000145592_10 (sequence is synthesized)
gagtgagagggcaggggcagttgaagggaacatgaattgctggaacagctacataaaatagtgatgtagccaagtcatgctatttaaattataattctccactgtgtttagaataacatc

SEQ ID NO: 394858 - DNA, 120 bp, Artificial Sequence
  ENSG00000145592_11 (sequence is synthesized)
tgaggttcttaacctggccttggaagggtatcacttttacttgtaacctggaatggctttataatgtgctagctaattgctactctcatcttgtattttaactcctaatttacccttcag

SEQ ID NO: 394859 - DNA, 120 bp, Artificial Sequence
  ENSG00000145592_12 (sequence is synthesized)
gtctcagcttcagaacattcacttataaagaaaccctgctgattaaatctctcttgggcttcctcccgaaatgtgagactatactttaaagatgtatggttagagtccaattgccattgc

SEQ ID NO: 394860 - DNA, 120 bp, Artificial Sequence
  ENSG00000145592_13 (sequence is synthesized)
gtccaattgccattgcctttcttgtttacagatagtgcaatggcgcaatcctggctcactgcagcctctaattcctgggctcaagtcaagtggttctcctgcctcagccttctgagtagc

SEQ ID NO: 394861 - DNA, 120 bp, Artificial Sequence
  ENSG00000145592_14 (sequence is synthesized)
tggctaatttttgtgttttttgtagagatggagattcactcgactaattctttttgtattcttagtagagactgggtttcaacatgttgaccaggctggtctcgaactcgacctcgtgat

SEQ ID NO: 394862 - DNA, 90 bp, Artificial Sequence
  ENSG00000145592_15 (sequence is synthesized)
gtcatcatcaaattttcaagtgaagatagtctgttgaagattgaacaatgaccttgaaagacagctgagttgctgtgggtataatgtaaa

SEQ ID NO: 394863 - DNA, 120 bp, Artificial Sequence
  ENSG00000145592_16 (sequence is synthesized)
accttgaaagacagctgagttgctgtgggtataatgtaaagctggtgaagtttggccagtttgggcttcagaagtctaagtctagtgaaggtaccctgacccccatataaacaacccttg

SEQ ID NO: 394864 - DNA, 61 bp, Artificial Sequence
  ENSG00000145592_17 (sequence is synthesized)
tctagtgaaggtaccctgacccccatataaacaacccttgaggccggtgtggtggctcacg

SEQ ID NO: 394865 - DNA, 120 bp, Artificial Sequence
  ENSG00000145592_18 (sequence is synthesized)
gactccacctcaaaaaaaaaaaaaaatccttgaactaatgactcaaattttcaaatgaaacaaaataagcagtggatcttgcattggagatggagttaaactatgttgcccaggctggtc

SEQ ID NO: 394866 - DNA, 78 bp, Artificial Sequence
  ENSG00000145592_19 (sequence is synthesized)
tttcaagtgcgagccaccacaccccacctattgtctatatttctatctttaacagcacttcagtcctgccttaagtta

SEQ ID NO: 394867 - DNA, 120 bp, Artificial Sequence
  ENSG00000145592_20 (sequence is synthesized)
atttctatctttaacagcacttcagtcctgccttaagttatagttatgtatagatacccattatactttaaatttttcagcagaaattatgcttttatcttctctgcagtgttatatgtt

SEQ ID NO: 394868 - DNA, 120 bp, Artificial Sequence
  ENSG00000145592_21 (sequence is synthesized)
ggtgtgcaaaaatgttaaatttatttttcctaagtaccccatctgcttttcaactctgtcctctgcctgaaaagcctccctccagcccctacttccctcccatcttagttcacaaagtca

SEQ ID NO: 394869 - DNA, 120 bp, Artificial Sequence
  ENSG00000145592_22 (sequence is synthesized)
ggttgatttgcccccagctgtcaaagcagactacctgtttccacatgtaactggttatgttctgtaaagttacaaaaatagaaaggttgaatctgtggcggccgggtacggtagctcacg

SEQ ID NO: 394870 - DNA, 120 bp, Artificial Sequence
  ENSG00000145592_23 (sequence is synthesized)
atatatatacacacacacacacacactatgatggataaatgcatgagtttctgtgagagcattggaaaggagtttgtcactcaataggtgaagccaggctaagatttaagctgagccagg

SEQ ID NO: 394871 - DNA, 120 bp, Artificial Sequence
  ENSG00000145592_24 (sequence is synthesized)
gccaggctaagatttaagctgagccagggaggacttgaaggaatcatgatgagagagaaggtaagtggctttgccagcaatgaaacagctgacataatggtaaccagtcagaggagggca

SEQ ID NO: 394872 - DNA, 120 bp, Artificial Sequence
  ENSG00000145592_25 (sequence is synthesized)
taactatgaaactggacaccttggttgtcaggttagaaggatggggtgtagggttggtaagaaaagaattcagggaagagcagcgatcagattatgaagaatttgtcttgagaaattaca

SEQ ID NO: 394873 - DNA, 120 bp, Artificial Sequence
  ENSG00000145592_26 (sequence is synthesized)
gaggatttaaaccagaatgttaggaatagttattctagcaagatgaatgtggaaagtgttagtgtgcatgtgatgagtcttgaagctggaaactaggtaacaggttcttaaatagttcat

SEQ ID NO: 394874 - DNA, 120 bp, Artificial Sequence
  ENSG00000145592_27 (sequence is synthesized)
gtgaaaatcatgacagactaaggcagtggctgtggggctgtccgggagttctctacagaaaacatctaaaacttgaatgtgcaagtgagtagctaacttccaagcttcccatttctgtat

SEQ ID NO: 394875 - DNA, 120 bp, Artificial Sequence
  ENSG00000145592_28 (sequence is synthesized)
aaatgagaacactgagatttgataggcatgtagaagtcagagtaagcaagagggcttgagttcatcgatgaacttcagtaactatccttgacttagtattggtggaaaccatttgtgaat

SEQ ID NO: 394876 - DNA, 120 bp, Artificial Sequence
  ENSG00000145592_29 (sequence is synthesized)
ttacagactccaaaaacaaaaagataatttagagtctcaaagtaagatttggggagatgtccattggagacagaagtggagagagggagaagttcatttgttgacatatttatgtatggt

SEQ ID NO: 394877 - DNA, 120 bp, Artificial Sequence
  ENSG00000145592_30 (sequence is synthesized)
gcacctactgtgtgccaagccatgttagagatacagtgggagcaaaaccagatgtgttttctgccctctgactccagtggttgcagaattagcccaggaactagaattggatggagtcac

SEQ ID NO: 394878 - DNA, 120 bp, Artificial Sequence
  ENSG00000145592_31 (sequence is synthesized)
acaaaccaaggaaggggattgtttgaggggggcactcagtcacatgtggctgaggccaaagagaatgaagatatattttaaaattctggatttggcaaaatttaggctagtctttacttt

SEQ ID NO: 394879 - DNA, 120 bp, Artificial Sequence
  ENSG00000145592_32 (sequence is synthesized)
tcataaacctctctcatgttagagcagcaaagaaaaaccagtttgccaagaggtcacgagattgggcagtgaggaatggggagtttagtttaaaagacaacactagatacttttggaagt

SEQ ID NO: 394880 - DNA, 120 bp, Artificial Sequence
  ENSG00000145592_33 (sequence is synthesized)
ttacctattctgtggttcccttttattgactaaatggtgcccttcattcatgaagcaagtatctatttagtgactactatgtgtcaaaagctatctaggcccagaaacttttaagtggaa

SEQ ID NO: 394881 - DNA, 120 bp, Artificial Sequence
  ENSG00000145592_34 (sequence is synthesized)
aacaaaacaaagaccctgccctgacagatttcaatcatgtatatactgtatgtatgtttgtggaaggtgacataatagacaattgcagatagtgataagtgtgtaagacaaggataccac

SEQ ID NO: 394882 - DNA, 120 bp, Artificial Sequence
  ENSG00000145592_35 (sequence is synthesized)
gagcgtaatagacagtggggatggaggaacctttagaaggttggttaagttgaatgataaggagccattcttttgtctttacctgaatgacttatcattcagccctttttgagttttggg

SEQ ID NO: 394883 - DNA, 120 bp, Artificial Sequence
  ENSG00000145592_36 (sequence is synthesized)
ttgcttgcagagtttaaccttgcctgtaattgaaacttaattttgtaatagcataacttcatgtaagaaaagcaaagcaatacattacagaattattttactgaagaacttgtttcagag

SEQ ID NO: 394884 - DNA, 120 bp, Artificial Sequence
  ENSG00000145592_37 (sequence is synthesized)
aaagaggctgtttcacatttattagcacatttggattatatttaggtgttttatttttttttaaacaaaggagtttggatcataatacaagagaagcacagggcaaagacactgcataac

SEQ ID NO: 394885 - DNA, 66 bp, Artificial Sequence
  ENSG00000145592_38 (sequence is synthesized)
cataatacaagagaagcacagggcaaagacactgcataacctcaagaactaagaatggaaggactg

SEQ ID NO: 394886 - DNA, 120 bp, Artificial Sequence
  ENSG00000145592_39 (sequence is synthesized)
gagactccatctcaaaaaaaaaaaaggataaaggaaggacttaagcaaaatcttccttgtaagtagaaggatgttttgacaagaaaagttgcaatggaaaaatggttctcatgtacacga

SEQ ID NO: 394887 - DNA, 120 bp, Artificial Sequence
  ENSG00000145592_40 (sequence is synthesized)
gaaaaatggttctcatgtacacgagtatgtagaataagcatcgtgtgtggattggattcagatcaaaacattgcttttatgtttgtgtctttatacggtgggagtataccctggtgcccc

SEQ ID NO: 394888 - DNA, 120 bp, Artificial Sequence
  ENSG00000145592_41 (sequence is synthesized)
aggatgaagacttgacctgacccatgtatttttagattactcacagataacaaaaagtattttcatcatgattagttgcgaaaacagttttatttcaataggtaaaacgtgcagtcctat

SEQ ID NO: 394889 - DNA, 120 bp, Artificial Sequence
  ENSG00000145592_42 (sequence is synthesized)
gtaatcgtcagaaggtaatcttaattatagcttgggtgtgctttaaactgcaagctggcagtggagggcacgattcctctgatttcagctttctccttatacttttctggagctgtgagc

SEQ ID NO: 394890 - DNA, 120 bp, Artificial Sequence
  ENSG00000145592_43 (sequence is synthesized)
tgcaagttaactcagtgggattaaagtgtagactggaggtacaaaaggtgaggagtgaggagatagggtagttcttccttggctggctggcttcataatccctgggccccgcagataatt

SEQ ID NO: 394891 - DNA, 120 bp, Artificial Sequence
  ENSG00000145592_44 (sequence is synthesized)
aaatcgactttttctgtctcaggcatttgtatgacctctttggaggttccctgctgggtagttatccttgtatctgatggacccatctcaatttaaaatactctgccaggttcggaggtt

SEQ ID NO: 394892 - DNA, 85 bp, Artificial Sequence
  ENSG00000145592_45 (sequence is synthesized)
acccatctcaatttaaaatactctgccaggttcggaggttcatgcttgtcatcccagcactttgggaggctcagaggtgccattg

SEQ ID NO: 394893 - DNA, 120 bp, Artificial Sequence
  ENSG00000145592_46 (sequence is synthesized)
tggatgacaaagaccctgtctcaagaaaagtctgtaattctttcctaacccttagtatccagcctcagtcctgaggttttctttacctctgggggctattttatgccggctctctcctga

SEQ ID NO: 394894 - DNA, 120 bp, Artificial Sequence
  ENSG00000145592_47 (sequence is synthesized)
gtgtcacacatctggtcctcaggaaacattctcacatccctggcctgaaaaaaacaatttcagggagatcgcatggcagcagccctctctgggctccccagctaaatggttgtacgaaac

SEQ ID NO: 394895 - DNA, 120 bp, Artificial Sequence
  ENSG00000145592_48 (sequence is synthesized)
acatttcaaagctctctgaagggcttccttgaagttcctttcactgggtttcaaagtagaaggtagtaactcctttgtccaagaaggctgaattgagcacttaacaattctccaaagaaa

SEQ ID NO: 394896 - DNA, 120 bp, Artificial Sequence
  ENSG00000145592_49 (sequence is synthesized)
tttcttcattggtctctatcctagaccccttctgtatccttgatatggctgaggattctaaaaaatgaccagtcttacatgggagggctgggatataaaaaataaaataataaataatga

SEQ ID NO: 394897 - DNA, 120 bp, Artificial Sequence
  ENSG00000145592_50 (sequence is synthesized)
taaaaactgaaaactgaccacgttcttggatatgttttctttgggttgtgtgtgtgtgtgagacttttgatagttacccaaagtaggaaaaatcccattctaataaggttatatttatgt

SEQ ID NO: 394898 - DNA, 120 bp, Artificial Sequence
  ENSG00000145592_51 (sequence is synthesized)
agctctgcaaataaacatctagcaaatgtaaaaagtattttctttgccttaaaaatgattaaaattatttgaactcctgaggagtgttatatgaataaaattagtaagttatttggagga

SEQ ID NO: 394899 - DNA, 120 bp, Artificial Sequence
  ENSG00000145592_52 (sequence is synthesized)
aagttattttttaaaaagacaactggtaaaacagtacaggagaaaggccagcttcctcaagtgaggacagttgtttagaattgactgaggagcggccgggtgcggaggctcacatctgta

SEQ ID NO: 394900 - DNA, 61 bp, Artificial Sequence
  ENSG00000145592_53 (sequence is synthesized)
ttgactgaggagcggccgggtgcggaggctcacatctgtaatcccacacgccttgggaggc

SEQ ID NO: 394901 - DNA, 77 bp, Artificial Sequence
  ENSG00000145592_54 (sequence is synthesized)
aggcaggaggatcacctgagcccaggaagttagtgacagcgagactgtctcaaaaaaagaaaaaagtgactgaggag

SEQ ID NO: 394902 - DNA, 120 bp, Artificial Sequence
  ENSG00000145592_55 (sequence is synthesized)
agcgagactgtctcaaaaaaagaaaaaagtgactgaggaggaagaggccaggtggcaaatggaacagaatcaccaaagggtgaacaggactaaggcaatgtagtgtatggctcagctacg

SEQ ID NO: 394903 - DNA, 120 bp, Artificial Sequence
  ENSG00000145592_56 (sequence is synthesized)
tcagagtggaaaaggtgttattagagcagaaactatggtccctgcgtcacagggaagcaacctacagagaagcagcagctccccaagagaggagagataagaagccagaagcctcagagt

SEQ ID NO: 394904 - DNA, 120 bp, Artificial Sequence
  ENSG00000145592_57 (sequence is synthesized)
gaacaattgtcctattagggattgctctagagagagaaacctctgggaacgtacccctgtgaggcagcacagcacaatgcttttagaattgtatgagagttgatatatctccatttgttt

SEQ ID NO: 394905 - DNA, 120 bp, Artificial Sequence
  ENSG00000145592_58 (sequence is synthesized)
tgcaaaggcaaaaactaagatacagagattatctgttaaagttatgtatttctttggtaataaagatgctgacagtgttgctggaatgcatttctttaataaagatattgtacaatgaaa

SEQ ID NO: 394906 - DNA, 120 bp, Artificial Sequence
  ENSG00000145592_59 (sequence is synthesized)
aacaacacctaaacccaagagggcagctgttgcagcatccagttcatcttaagaatgtcaacgattagtcatgcaataaatgttctggttttaaaaaatacatatctggttttggtctca

SEQ ID NO: 394907 - DNA, 120 bp, Artificial Sequence
  ENSG00000145592_60 (sequence is synthesized)
ttgtaaaaagataacagtaccctgatggttactggggatgagatgttggaagctttttatttattgttgtttttgaggcagggtttcactatgttgcccaggcttgagtgtagtggcacg

SEQ ID NO: 394908 - DNA, 120 bp, Artificial Sequence
  ENSG00000145592_61 (sequence is synthesized)
atcacggctcagtgcagcctcagtctccccagcctcaggtaatctcatctcagccgcccgagtacccgggactacaggtgtgcgctgccacatgcccagctaatttttgtatttattgta

SEQ ID NO: 394909 - DNA, 120 bp, Artificial Sequence
  ENSG00000145592_62 (sequence is synthesized)
gatggtgagttgtgactgtggtgtttgtgaatcgcgttccatcctcgtcctttgtgcctctctgtttgctgtgcttggggggctggcaagattccggataaggggaactggtgggctgga

SEQ ID NO: 394910 - DNA, 120 bp, Artificial Sequence
  ENSG00000145604_0 (sequence is synthesized)
agtggggatggaacgttgctaggcttagcgggtctggctgctgggggcccgagcagcacgctcggagccgccgcgcgccaaagcgggaatctgggaggcgagcagctctgcagttaatgc

SEQ ID NO: 394911 - DNA, 120 bp, Artificial Sequence
  ENSG00000145604_1 (sequence is synthesized)
acgtattttaaactcccgggcctgcggacgctatgcacaggaagcacctccaggagattccagacctgagtagcaacgttgccaccagcttcacgtggggatgggattccagcaagactt

SEQ ID NO: 394912 - DNA, 120 bp, Artificial Sequence
  ENSG00000145604_2 (sequence is synthesized)
ctgaactgctgtcaggcatgggggtctccgccctggagaaagaggagcccgacagtgagaacatcccccaggaactgctctcaaacctgggccacccggagagccccccacggaaacggc

SEQ ID NO: 394913 - DNA, 120 bp, Artificial Sequence
  ENSG00000145604_3 (sequence is synthesized)
tgaagagcaaagggagtgacaaagactttgtgattgtccgcaggcctaagctaaatcgagagaactttccaggtgtttcatgggactcccttccggatgagctgctcttgggaatctttt

SEQ ID NO: 394914 - DNA, 120 bp, Artificial Sequence
  ENSG00000145604_4 (sequence is synthesized)
cctgtctgtgcctccctgagctgctaaaggtctctggtgtttgtaagaggtggtatcgcctagcgtctgatgagtctctatggcagaccttagacctcacaggtaaaaatctgcacccgg

SEQ ID NO: 394915 - DNA, 120 bp, Artificial Sequence
  ENSG00000145604_5 (sequence is synthesized)
atgtgactggtcggttgctgtctcaaggggtgattgccttccgctgcccacgatcatttatggaccaaccattggctgaacatttcagcccttttcgtgtacagcacatggacctatcga

SEQ ID NO: 394916 - DNA, 120 bp, Artificial Sequence
  ENSG00000145604_6 (sequence is synthesized)
actcagttatagaagtgtccaccctccacggcatactgtctcagtgttccaagttgcagaatctaagcctggaaggcctgcggctttcggatcccattgtcaatactctcgcaaaaaact

SEQ ID NO: 394917 - DNA, 120 bp, Artificial Sequence
  ENSG00000145604_7 (sequence is synthesized)
caaatttagtgcgacttaacctttctgggtgttctggattctctgaatttgccctgcagactttgctaagcagctgttccagactggatgagctgaacctctcctggtgttttgatttca

SEQ ID NO: 394918 - DNA, 120 bp, Artificial Sequence
  ENSG00000145604_8 (sequence is synthesized)
ctgaaaagcatgtacaggtggctgttgcgcatgtgtcagagaccatcacccagctgaatcttagcggctacagaaagaatctccagaaatcagatctctctactttagttagaagatgcc

SEQ ID NO: 394919 - DNA, 120 bp, Artificial Sequence
  ENSG00000145604_9 (sequence is synthesized)
ccaatcttgtccatctagacttaagtgatagtgtcatgctaaagaatgactgctttcaggaatttttccagctcaactacctccaacacctatcactcagtcggtgctatgatataatac

SEQ ID NO: 394920 - DNA, 120 bp, Artificial Sequence
  ENSG00000145604_10 (sequence is synthesized)
ctgaaactttacttgaacttggagaaattcccacactaaaaacactacaagtttttggaatcgtgccagatggtacccttcaactgttaaaggaagcccttcctcatctacagattaatt

SEQ ID NO: 394921 - DNA, 120 bp, Artificial Sequence
  ENSG00000145604_11 (sequence is synthesized)
gctcccatttcaccaccattgccaggccaactattggcaacaaaaagaaccaggagatatggggcatcaaatgccgactgacactgcaaaagcccagttgtctatgaagtatttattgca

SEQ ID NO: 394922 - DNA, 120 bp, Artificial Sequence
  ENSG00000145604_12 (sequence is synthesized)
ggatggtgtctcttctttagaacagggaaaataggcaggaagcccaattgctggagtacttagctagttttattcttggttttccctttgccttcattctgcaagtatactagggagcca

SEQ ID NO: 394923 - DNA, 120 bp, Artificial Sequence
  ENSG00000145604_13 (sequence is synthesized)
tttgagagggaaaactatgaaatcttgctttttgaaatgattctaaaagcttctatcactgctttgctcttaagagccaaagttgtaggccttttgaaattttaggagagtgagcctata

SEQ ID NO: 394924 - DNA, 120 bp, Artificial Sequence
  ENSG00000145604_14 (sequence is synthesized)
atttcaagataccttaaagagcaaaatttgagccacctcttccaagtgcccttcttactaagtctattcagaatcaagcttaaaaattaccaccagcaaacaatcttcatagcccatata

SEQ ID NO: 394925 - DNA, 120 bp, Artificial Sequence
  ENSG00000145604_15 (sequence is synthesized)
catcttttctaggaataggaaagagaaaaatgtatttgaattttgcctttagatttgaaattaggttaatagaaataagtaaccccatgtaattcaccttaaaacttaacaaaagaccaa

SEQ ID NO: 394926 - DNA, 120 bp, Artificial Sequence
  ENSG00000145604_16 (sequence is synthesized)
acattacaaaacccagagatatagaatcaatataggatttgaaggcccagcagacagttttctatgacaggttaatctgaagtatcctgtaatgttcattaagttactgtgtttccagaa

SEQ ID NO: 394927 - DNA, 120 bp, Artificial Sequence
  ENSG00000145604_17 (sequence is synthesized)
tctaaattagatgagaaatataattgtggttttctaacttgataatcaaattatgttaacatgggtcctttagcttttaaaatgacttgctttgttttagaaaggtggtattaatccact

SEQ ID NO: 394928 - DNA, 120 bp, Artificial Sequence
  ENSG00000145604_18 (sequence is synthesized)
ctctattcttgaaaatttggatgggagaattctgaagttgcctgctgttttcctttagcgctgaggttcttaaggttacttttatattactctggaatcaagtattttaaattgtatttt

SEQ ID NO: 394929 - DNA, 120 bp, Artificial Sequence
  ENSG00000145604_19 (sequence is synthesized)
ttttttaaatgatctctcagcaataattgtttgaaactatccatatataaggttatcagacctacagttccctaagaggaactgcatgttctcttcaatcagaaatatacagtagaagca

SEQ ID NO: 394930 - DNA, 120 bp, Artificial Sequence
  ENSG00000145604_20 (sequence is synthesized)
ggtatatcttccatgcagtttcagtagtaagcactacttatacctacataagagttaaaatccagatgtgggaccttttgataccatcagtgatatatatttttttaaactggtacagag

SEQ ID NO: 394931 - DNA, 69 bp, Artificial Sequence
  ENSG00000145604_21 (sequence is synthesized)
ataccatcagtgatatatatttttttaaactggtacagagaagtgaaaagattaaattctactcggagt

SEQ ID NO: 394932 - DNA, 77 bp, Artificial Sequence
  ENSG00000145604_22 (sequence is synthesized)
agccaaattctacttcttaaaaatcacaaaaactagtttaaattgatgacttgttcgtatgttcaaaatgtaacaac

SEQ ID NO: 394933 - DNA, 120 bp, Artificial Sequence
  ENSG00000145604_23 (sequence is synthesized)
ttaaattgatgacttgttcgtatgttcaaaatgtaacaacaaaaaaagctaacaccagtcatttatattaactttttttttttaaatcaaaaattgttaatgttagaaacatactatgaa

SEQ ID NO: 394934 - DNA, 120 bp, Artificial Sequence
  ENSG00000145604_24 (sequence is synthesized)
gtgcctttatctgcttagacctaaggaagattttaaagttgggttgcacaggaaatgatgatgcttcaatttcttaatagttaaaaagtgctaaatactacttgaaattattgtttacag

SEQ ID NO: 394935 - DNA, 120 bp, Artificial Sequence
  ENSG00000145604_25 (sequence is synthesized)
attagtgacaagagctggggttaggatccggttggactctgacatcggatgccctcaaacatacagaacttccaaactcaagtccagccataagctattttgccaacatgtcagagtaat

SEQ ID NO: 394936 - DNA, 120 bp, Artificial Sequence
  ENSG00000145604_26 (sequence is synthesized)
ctgtatttttgtatgtgatttctacttttatagacttgttttaaaacaataaaacacatttttataaaaatgagtgcttaaactaagttgtattccttttttctttctctttttttaagt

SEQ ID NO: 394937 - DNA, 120 bp, Artificial Sequence
  ENSG00000145604_27 (sequence is synthesized)
gctgtggttaaaatttgaaagcatttagtgtggtatgccatttggcttagatacctctaaataagactcttcaaaacagagccctgagatggtcctttttgacccatctacttcatatgc

SEQ ID NO: 394938 - DNA, 120 bp, Artificial Sequence
  ENSG00000145604_28 (sequence is synthesized)
atggtcctttttgacccatctacttcatatgcttgtcacattaaaaaaaaaagtttataatgcctttataaaaggggctaatacagtcttgttatctttttttttaaattatactttaag

SEQ ID NO: 394939 - DNA, 120 bp, Artificial Sequence
  ENSG00000145604_29 (sequence is synthesized)
aagggaaggaagtaagggcgagcccgtcggactacgaagcgggacggaaactacaattcccagcaggccttgggcctcagtgcggccgcgaagcagagcgggctgtagagccttgcgcgc

SEQ ID NO: 394940 - DNA, 80 bp, Artificial Sequence
  ENSG00000145623_0 (sequence is synthesized)
agctgattcatagccccggcccgggccgcctctgcacgtccgccccggagcccgcacccgcgccccacgcgccgccgagg

SEQ ID NO: 394941 - DNA, 120 bp, Artificial Sequence
  ENSG00000145623_1 (sequence is synthesized)
tacccccgacccgcccgtccccgctctgctcgcgccctgccgctgcgccgccctcggtggcttttccgacgggcgagccccgtgctgtgcgggaaagaatccgacaacttcgcagcccat

SEQ ID NO: 394942 - DNA, 120 bp, Artificial Sequence
  ENSG00000145623_2 (sequence is synthesized)
cccggctggacgcgaccgggagtgcagcagcccgttcccctcctcggtgccgcctctgcccagcgtttgcttggctgggctaccacctgcgctcggacggcgctcggagggtcctcgccc

SEQ ID NO: 394943 - DNA, 120 bp, Artificial Sequence
  ENSG00000145623_3 (sequence is synthesized)
ccggcctgcctacctgaaaaccagaactgatggctctatttgcagtctttcagacaacattcttcttaacattgctgtccttgaggacttaccagagtgaagtcttggctgaacgtttac

SEQ ID NO: 394944 - DNA, 120 bp, Artificial Sequence
  ENSG00000145623_4 (sequence is synthesized)
cattgactcctgtatcacttaaagtttccaccaattctacgcgtcagagtttgcacttacaatggactgtccacaaccttccttatcatcaggaattgaaaatggtatttcagatccaga

SEQ ID NO: 394945 - DNA, 120 bp, Artificial Sequence
  ENSG00000145623_5 (sequence is synthesized)
tcagtaggattgaaacatccaatgtcatctgggtggggaattacagcaccactgtgaagtggaaccaggttctgcattggagctgggaatctgagctccctttggaatgtgccacacact

SEQ ID NO: 394946 - DNA, 120 bp, Artificial Sequence
  ENSG00000145623_6 (sequence is synthesized)
ttgtaagaataaagagtttggtggacgatgccaagttccctgagccaaatttctggagcaactggagttcctgggaggaagtcagtgtacaagattctactggacaggatatattgttcg

SEQ ID NO: 394947 - DNA, 120 bp, Artificial Sequence
  ENSG00000145623_7 (sequence is synthesized)
ttttccctaaagataagctggtggaagaaggcaccaatgttaccatttgttacgtttctaggaacattcaaaataatgtatcctgttatttggaagggaaacagattcatggagaacaac

SEQ ID NO: 394948 - DNA, 120 bp, Artificial Sequence
  ENSG00000145623_8 (sequence is synthesized)
ttgatccacatgtaactgcattcaacttgaatagtgtgcctttcattaggaataaagggacaaatatctattgtgaggcaagtcaaggaaatgtcagtgaaggcatgaaaggcatcgttc

SEQ ID NO: 394949 - DNA, 120 bp, Artificial Sequence
  ENSG00000145623_9 (sequence is synthesized)
tttttgtctcaaaagtacttgaggagcccaaggacttttcttgtgaaaccgaggacttcaagactttgcactgtacttgggatcctgggacggacactgccttggggtggtctaaacaac

SEQ ID NO: 394950 - DNA, 120 bp, Artificial Sequence
  ENSG00000145623_10 (sequence is synthesized)
cttcccaaagctacactttatttgaatcattttctggggaaaagaaactttgtacacacaaaaactggtgtaattggcaaataactcaagactcacaagaaacctataacttcacactca

SEQ ID NO: 394951 - DNA, 120 bp, Artificial Sequence
  ENSG00000145623_11 (sequence is synthesized)
tagctgaaaattacttaaggaagagaagtgtcaatatcctttttaacctgactcatcgagtttatttaatgaatccttttagtgtcaactttgaaaatgtaaatgccacaaatgccatca

SEQ ID NO: 394952 - DNA, 120 bp, Artificial Sequence
  ENSG00000145623_12 (sequence is synthesized)
tgacctggaaggtgcactccataaggaataatttcacatatttgtgtcagattgaactccatggtgaaggaaaaatgatgcaatacaatgtttccatcaaggtgaacggtgagtacttct

SEQ ID NO: 394953 - DNA, 120 bp, Artificial Sequence
  ENSG00000145623_13 (sequence is synthesized)
taagtgaactggaacctgccacagagtacatggcgcgagtacggtgtgctgatgccagccacttctggaaatggagtgaatggagtggtcagaacttcaccacacttgaagctgctccct

SEQ ID NO: 394954 - DNA, 120 bp, Artificial Sequence
  ENSG00000145623_14 (sequence is synthesized)
cagaggcccctgatgtctggagaattgtgagcttggagccaggaaatcatactgtgaccttattctggaagccattatcaaaactgcatgccaatggaaagatcctgttctataatgtag

SEQ ID NO: 394955 - DNA, 120 bp, Artificial Sequence
  ENSG00000145623_15 (sequence is synthesized)
ttgtagaaaacctagacaaaccatccagttcagagctccattccattccagcaccagccaacagcacaaaactaatccttgacaggtgttcctaccaaatctgcgtcatagccaacaaca

SEQ ID NO: 394956 - DNA, 120 bp, Artificial Sequence
  ENSG00000145623_16 (sequence is synthesized)
gtgtgggtgcttctcctgcttctgtaatagtcatctctgcagaccccgaaaacaaagaggttgaggaagaaagaattgcaggcacagagggtggattctctctgtcttggaaaccccaac

SEQ ID NO: 394957 - DNA, 120 bp, Artificial Sequence
  ENSG00000145623_17 (sequence is synthesized)
ctggagatgttataggctatgttgtggactggtgtgaccatacccaggatgtgctcggtgatttccagtggaagaatgtaggtcccaataccacaagcacagtcattagcacagatgctt

SEQ ID NO: 394958 - DNA, 120 bp, Artificial Sequence
  ENSG00000145623_18 (sequence is synthesized)
ttaggccaggagttcgatatgacttcagaatttatgggttatctacaaaaaggattgcttgtttattagagaaaaaaacaggatactctcaggaacttgctccttcagacaaccctcacg

SEQ ID NO: 394959 - DNA, 120 bp, Artificial Sequence
  ENSG00000145623_19 (sequence is synthesized)
tgctggtggatacattgacatcccactccttcactctgagttggaaagattactctactgaatctcaacctggttttatacaagggtaccatgtctatctgaaatccaaggcgaggcagt

SEQ ID NO: 394960 - DNA, 120 bp, Artificial Sequence
  ENSG00000145623_20 (sequence is synthesized)
gccacccacgatttgaaaaggcagttctttcagatggttcagaatgttgcaaatacaaaattgacaacccggaagaaaaggcattgattgtggacaacctaaagccagaatccttctatg

SEQ ID NO: 394961 - DNA, 120 bp, Artificial Sequence
  ENSG00000145623_21 (sequence is synthesized)
agtttttcatcactccattcactagtgctggtgaaggccccagtgctacgttcacgaaggtcacgactccggatgaacactcctcgatgctgattcatatcctactgcccatggttttct

SEQ ID NO: 394962 - DNA, 120 bp, Artificial Sequence
  ENSG00000145623_22 (sequence is synthesized)
gcgtcttgctcatcatggtcatgtgctacttgaaaagtcagtggatcaaggagacctgttatcctgacatccctgacccttacaagagcagcatcctgtcattaataaaattcaaggaga

SEQ ID NO: 394963 - DNA, 120 bp, Artificial Sequence
  ENSG00000145623_23 (sequence is synthesized)
acctaataataatgaatgtcagtgactgtatcccagatgctattgaagttgtaagcaagccagaagggacaaagatacagttcctaggcactaggaagtcactcacagaaaccgagttga

SEQ ID NO: 394964 - DNA, 120 bp, Artificial Sequence
  ENSG00000145623_24 (sequence is synthesized)
ctaagcctaactacctttatctccttccaacagaaaagaatcactctggccctggcccctgcatctgttttgagaacttgacctataaccaggcagcttctgactctggctcttgtggcc

SEQ ID NO: 394965 - DNA, 120 bp, Artificial Sequence
  ENSG00000145623_25 (sequence is synthesized)
atgttccagtatccccaaaagccccaagtatgctgggactaatgacctcacctgaaaatgtactaaaggcactagaaaaaaactacatgaactccctgggagaaatcccagctggagaaa

SEQ ID NO: 394966 - DNA, 120 bp, Artificial Sequence
  ENSG00000145623_26 (sequence is synthesized)
caagtttgaattatgtgtcccagttggcttcacccatgtttggagacaaggacagtctcccaacaaacccagtagaggcaccacactgttcagagtataaaatgcaaatggcagtctccc

SEQ ID NO: 394967 - DNA, 120 bp, Artificial Sequence
  ENSG00000145623_27 (sequence is synthesized)
tgcgtcttgccttgcctcccccgaccgagaatagcagcctctcctcaattacccttttagatccaggtgaacactactgctaaccagcatgccgatttcataccttatgctacacagaca

SEQ ID NO: 394968 - DNA, 120 bp, Artificial Sequence
  ENSG00000145623_28 (sequence is synthesized)
ttaagaagagcagagctggcaccctgtcatcaccagtggccttggtccttaatcccagtacgatttgcaggtctggtttatataagaccactacagtctggctaggttaaaggccagagg

SEQ ID NO: 394969 - DNA, 120 bp, Artificial Sequence
  ENSG00000145623_29 (sequence is synthesized)
ctatggaacttaacactccccattggagcaagcttgccctagagacggcaggatcatgggagcatgcttaccttctgctgtttgttccaggctcacctttagaacaggagacttgagctt

SEQ ID NO: 394970 - DNA, 120 bp, Artificial Sequence
  ENSG00000145623_30 (sequence is synthesized)
gacctaaggatatgcattaaccactctacagactcccactcagtactgtacagggtggctgtggtcctagaagttcagtttttactgaggaaatatttccattaacagcaattattatat

SEQ ID NO: 394971 - DNA, 120 bp, Artificial Sequence
  ENSG00000145623_31 (sequence is synthesized)
tgaaggctttaataaaggccacaggagacattactatagcatagattgtcaaatgtaaatttactgagcgtgttttataaaaaactcacaggtgtttgaggccaaaacagattttagact

SEQ ID NO: 394972 - DNA, 120 bp, Artificial Sequence
  ENSG00000145623_32 (sequence is synthesized)
taccttgaacggataagaatctatagttcactgacacagtaaaattaactctgtgggtgggggcggggggcatagctctaatctaatatataaaatgtgtgatgaatcaacaagatttcc

SEQ ID NO: 394973 - DNA, 120 bp, Artificial Sequence
  ENSG00000145623_33 (sequence is synthesized)
acaattcttctgtcaagcttactacagtgaaagaatgggattggcaagtaacttctgacttactgtcagttgtacttctgctccatagacatcagtattctgccatcatttttgatgact

SEQ ID NO: 394974 - DNA, 120 bp, Artificial Sequence
  ENSG00000145623_34 (sequence is synthesized)
acctcagaacataaaaaggaacgtatatcacataattccagtcacagtttttggttcctcttttctttcaagaactatatataaatgacctgttttcacttagcatcctttggactctgc

SEQ ID NO: 394975 - DNA, 120 bp, Artificial Sequence
  ENSG00000145623_35 (sequence is synthesized)
agtaggttgtctgggtcaagataactctcagtcacatttatattcatattatgctaaaatagtaaaatgaaacctcattgttggacataatttagatataactaaaaagttctatgaagt

SEQ ID NO: 394976 - DNA, 120 bp, Artificial Sequence
  ENSG00000145623_36 (sequence is synthesized)
gggaaattccgtgttggctctggagcagctttgtctcctctgaaccaatatatcccaaaccaatatatgcaaagcacctggtacacaactggtattttagtacatgttggttcttttggt

SEQ ID NO: 394977 - DNA, 120 bp, Artificial Sequence
  ENSG00000145623_37 (sequence is synthesized)
gcaatctcagctcactgcagcttccgcctcctagattcaaacaaacagttctcctgccccagcctccagagcacctaggactccaggtgcatgctaccacacctgactagtttttatatt

SEQ ID NO: 394978 - DNA, 79 bp, Artificial Sequence
  ENSG00000145623_38 (sequence is synthesized)
ctcaaactcctgaccgcaggtgatccacctgcctcagcttccccaaggtcacattatttgtcacatttattttactttt

SEQ ID NO: 394979 - DNA, 78 bp, Artificial Sequence
  ENSG00000145623_39 (sequence is synthesized)
ggtgtgagccaccatgcccagcctatttgtcacattatttgtcacatttattttacttttatttattttttgagatgc

SEQ ID NO: 394980 - DNA, 67 bp, Artificial Sequence
  ENSG00000145623_40 (sequence is synthesized)
gtcacatttctaaacaagcatgaaaggggttcatttttgtcttcttcttgcctgccgtcagcatggt

SEQ ID NO: 394981 - DNA, 120 bp, Artificial Sequence
  ENSG00000145623_41 (sequence is synthesized)
ggttcatttttgtcttcttcttgcctgccgtcagcatggtggaaatggctctgcctatgctcatgcttctggtgcccaatgccttgcactgtgccattcaacactatgaagagaaacaag

SEQ ID NO: 394982 - DNA, 120 bp, Artificial Sequence
  ENSG00000145623_42 (sequence is synthesized)
tagccacacctcaaaataatgtggctgtcaacaactggcctaaataaacctacacaaaccagtacttgccttttgctggaaacattgattatgtgctcctcacgtagtagaaagcggtat

SEQ ID NO: 394983 - DNA, 120 bp, Artificial Sequence
  ENSG00000145623_43 (sequence is synthesized)
cctgattagtctaacagttgtgttagactttagggccagtattgtcagcatttatttatttatgtacctttgttatgatgggatatttttcatttgaaacttgttcataaaaatgtcaat

SEQ ID NO: 394984 - DNA, 120 bp, Artificial Sequence
  ENSG00000145623_44 (sequence is synthesized)
gacattgatgactgatttgtacatatttttcatatagttttgtttaaaaaataattcacgcaaaatcttgaagtcatttttgctattgaaataaaccttaattaaaatatttcatcatca

SEQ ID NO: 394985 - DNA, 120 bp, Artificial Sequence
  ENSG00000145623_45 (sequence is synthesized)
gtgtgtcaacgtgtttcagtgggacagtcccctcagtgtggggagaaggagacttcagccatggctcaggacatttctgtccaggggattcttcaacatacatgggaaattatctcaaat

SEQ ID NO: 394986 - DNA, 120 bp, Artificial Sequence
  ENSG00000145623_46 (sequence is synthesized)
ttattcaagtaactgcaaccctaacaaacagtcaccactgagagttggagttactatttatgatctttgtggcttgtgaaataggaattgcatttactattttgtaaaaagtgttgtcag

SEQ ID NO: 394987 - DNA, 120 bp, Artificial Sequence
  ENSG00000145623_47 (sequence is synthesized)
tctttgcacctggaaagagtccatgaacatttccagagatcatcagaactggcatcaactttcaccacagactctgccaactttgtagaataaaagataataactggctaatctcttgcc

SEQ ID NO: 394988 - DNA, 120 bp, Artificial Sequence
  ENSG00000145623_48 (sequence is synthesized)
gcggccgcctccccccgggactgaagggagggaattcctgtgggtcccaggagtgccaagagtgcgcagcaagacgggaaattgcaaaagacctcacccctctgccctcccccgcggttt

SEQ ID NO: 394989 - DNA, 120 bp, Artificial Sequence
  ENSG00000145623_49 (sequence is synthesized)
tccagtaactcccgcccctccgcgcttgccccgcagctgattcatagccccggcccgggccgcctctgcacgtccgccccggagcccgcacccgcgccccacgcgccgccgaggactcgg

SEQ ID NO: 394990 - DNA, 120 bp, Artificial Sequence
  ENSG00000145623_50 (sequence is synthesized)
ctgactcatcgaggtgagactagagttgtcacagcccaccgtggccactaacgtgtctttgtttcacagactgtgtgatcaagtaaatgtgctgtagatctttgcctcattcacagcgga

SEQ ID NO: 394991 - DNA, 120 bp, Artificial Sequence
  ENSG00000145623_51 (sequence is synthesized)
ggtgagagttagaatttatacctattgttcatgccacgtttctcctcatggatgcacgcatcccctattatttgtttcttttaataatgtcacgagcaccaatgagcttactacccaact

SEQ ID NO: 394992 - DNA, 120 bp, Artificial Sequence
  ENSG00000145623_52 (sequence is synthesized)
tcaaaactaggactctaacaataacttctgtcatatctcatcctgtaacgcccccaccttcgctccttccgccaagataattatcactttaaattgtgtgcgtgtgtattctcatttctt

SEQ ID NO: 394993 - DNA, 120 bp, Artificial Sequence
  ENSG00000145623_53 (sequence is synthesized)
atgtgatggtaaaaatgcctttattttgtttggttttaatgcatagaaaggacatcaagctgtatgtaataattcagtaattatgtttatataatattaaattgctaatatttgcccata

SEQ ID NO: 394994 - DNA, 120 bp, Artificial Sequence
  ENSG00000145623_54 (sequence is synthesized)
ttgcttctacattcaatctgttgccatatgttgttttggctgaagtattaaagaaaatctagcctcacacagctgagccttcttgagacaccccatcactgcatccagaaatccccgaaa

SEQ ID NO: 394995 - DNA, 120 bp, Artificial Sequence
  ENSG00000145623_55 (sequence is synthesized)
acttagagggaaccacttctaaaggattatggatagtctgctcacaccaatcagaatatggaatatcttgaaagtctgaagaaaaaaataattatttcaattaaagcaccataacggctt

SEQ ID NO: 394996 - DNA, 120 bp, Artificial Sequence
  ENSG00000145623_56 (sequence is synthesized)
catgcaaagggcctggacagggctgttcacagtggaaaagacctaatccagggatctgtcagactcaggccccactgtgacctggaaccgtgagaggatcagcatctcagcataacataa

SEQ ID NO: 394997 - DNA, 120 bp, Artificial Sequence
  ENSG00000145623_57 (sequence is synthesized)
tttggcatatcagtgtgctgcagctcaccagctgggaaactctgaattagaataccaaaaagaaatttggaaaagtaaaccagagaactttagtcatcactaggtttttctgaaggtggg

SEQ ID NO: 394998 - DNA, 120 bp, Artificial Sequence
  ENSG00000145623_58 (sequence is synthesized)
acgtgatcacttacctgaatgactacatattgcactcagttggttgctgggctggaaacccagaatttcaatacagacacaataaaggcagttatcatctgtatgttcctgtagtccagt

SEQ ID NO: 394999 - DNA, 120 bp, Artificial Sequence
  ENSG00000145626_0 (sequence is synthesized)
agaagggcgagagaattggcaggatccgtctcctacctcttcctaggcccacagccagtgcctttggagtactgaggcgcgcacagagtccttagcccggcgcagggcgcgcagcccagg

SEQ ID NO: 395000 - DNA, 120 bp, Artificial Sequence
  ENSG00000145626_1 (sequence is synthesized)
ctgagatccgctgcttctgtggaagtgagcatggttgggcagcgggtgctgcttctagtggccttccttctttctggggtcctgctctcagaggctgccaaaatcctgacaatatctaca

SEQ ID NO: 395001 - DNA, 120 bp, Artificial Sequence
  ENSG00000145626_2 (sequence is synthesized)
ctgggtggaagccattacctactgttggaccgggtgtctcagattcttcaagagcatggtcataatgtgactatgcttcatcagagtggaaagtttttgatcccagatattaaagaggag

SEQ ID NO: 395002 - DNA, 120 bp, Artificial Sequence
  ENSG00000145626_3 (sequence is synthesized)
gaaaaatcataccaagttatcaggtggttttcacctgaagatcatcaaaaaagaattaagaagcattttgatagctacatagaaacagcattggatggcagaaaagaatctgaagccctt

SEQ ID NO: 395003 - DNA, 120 bp, Artificial Sequence
  ENSG00000145626_4 (sequence is synthesized)
gtaaagctaatggaaatatttgggactcaatgtagttatttgctaagcagaaaggatataatggattccttaaagaatgagaactatgatctggtatttgttgaagcatttgatttctgt

SEQ ID NO: 395004 - DNA, 120 bp, Artificial Sequence
  ENSG00000145626_5 (sequence is synthesized)
tctttcctgattgctgagaagcttgtgaaaccatttgtggccattcttcccaccacattcggctctttggattttgggctaccaagccccttgtcttatgttccagtattcccttccttg

SEQ ID NO: 395005 - DNA, 120 bp, Artificial Sequence
  ENSG00000145626_6 (sequence is synthesized)
ctgactgatcacatggacttctggggccgagtgaagaattttctgatgttctttagtttctccaggagccaatgggacatgcagtctacatttgacaacaccatcaaggagcatttccca

SEQ ID NO: 395006 - DNA, 120 bp, Artificial Sequence
  ENSG00000145626_7 (sequence is synthesized)
gaaggctctaggccagttttgtctcatcttctactgaaagcagagttgtggtttgttaactctgattttgcctttgattttgcccggcccctgcttcccaacactgtttatattggaggc

SEQ ID NO: 395007 - DNA, 120 bp, Artificial Sequence
  ENSG00000145626_8 (sequence is synthesized)
ttgatggaaaaacctattaaaccagtaccacaagacttggacaacttcattgccaactttggggatgcagggtttgtccttgtggcctttggctccatgttgaacacccatcagtcccag

SEQ ID NO: 395008 - DNA, 120 bp, Artificial Sequence
  ENSG00000145626_9 (sequence is synthesized)
gaagtcctcaagaagatgcacaatgcctttgcccacctccctcaaggagtgatatggacatgtcagagttctcattggcccagagatgttcatttggccacaaatgtgaaaattgtggac

SEQ ID NO: 395009 - DNA, 120 bp, Artificial Sequence
  ENSG00000145626_10 (sequence is synthesized)
tggcttcctcagagtgacctcctggctcaccccagcatccgtctttttgtcactcatggtgggcagaacagcgtaatggaggccatccgtcatggtgtgcccatggtgggattaccagtc

SEQ ID NO: 395010 - DNA, 120 bp, Artificial Sequence
  ENSG00000145626_11 (sequence is synthesized)
aatggagaccagcatggaaacatggtccgagtagtagccaaaaattatggtgtctctatccggttgaatcaggtcacagccgacacactgacacttacaatgaaacaagtcatagaagac

SEQ ID NO: 395011 - DNA, 120 bp, Artificial Sequence
  ENSG00000145626_12 (sequence is synthesized)
aagaggtacaagtcggcagtggtggcagccagtgtcatcctgcactctcagcccctgagccccgcacagcggctggtgggctggatcgaccacatcctccagactgggggagcgacgcac

SEQ ID NO: 395012 - DNA, 120 bp, Artificial Sequence
  ENSG00000145626_13 (sequence is synthesized)
ctcaagccctatgccttccagcagccttggcatgagcagtacctcattgatgtctttgtgtttctgctggggctcactctgggcactatgtggctttgtgggaagctgctgggtgtggtg

SEQ ID NO: 395013 - DNA, 120 bp, Artificial Sequence
  ENSG00000145626_14 (sequence is synthesized)
gccaggtggctgcgtggggccaggaaggtgaagaagacatgaggctaggtgtagccttgggtgaggggagggcatccctggtcctttgaaggttctccccaccccagcacacgccacccc

SEQ ID NO: 395014 - DNA, 120 bp, Artificial Sequence
  ENSG00000145626_15 (sequence is synthesized)
tctgttctctcttcagctccacctgccactgatcctgcaacttgcttctttctattctctgcctctgtttagaaatcttcacgcaccactgaggcttcttgacttgccccttgtgacttg

SEQ ID NO: 395015 - DNA, 120 bp, Artificial Sequence
  ENSG00000145626_16 (sequence is synthesized)
aaaccccagctcagatacaaattttcacctgccagccctgcctcctcctttctcccttttcctagacacaggactctgacaacttcatcctccttgtttagatgacttcccagtttccag

SEQ ID NO: 395016 - DNA, 120 bp, Artificial Sequence
  ENSG00000145626_17 (sequence is synthesized)
tccccatttctccttctatcacttttcataaaaaaactcaggaaatatttgacatatcttccatttcaaattcttccattttatgcagatatcttgcccttcctataagctctcctcaaa

SEQ ID NO: 395017 - DNA, 120 bp, Artificial Sequence
  ENSG00000145626_18 (sequence is synthesized)
gctcaggaaacctggtctgctctcctgcatttagggaaggagaacccctgccaagacctttgctcactgcctgagaccccttccttagagagcacctcctttgctggtcagacatggagc

SEQ ID NO: 395018 - DNA, 120 bp, Artificial Sequence
  ENSG00000145626_19 (sequence is synthesized)
ctgcagttggtcacagatgatactgctttatttcagtttttacagttgtcttcttaagattcccgtcttataaatggagtacagggaacctcaagtagtgaagtggaaatccatgtgtaa

SEQ ID NO: 395019 - DNA, 120 bp, Artificial Sequence
  ENSG00000145626_20 (sequence is synthesized)
tagagattaccttaatctgctaggaacagaagcaagaaaaaccatggcgtaaacacccccagagtttttgttcatttgtttcatctttcttgataaagcccgaaggtagcccattcaggg

SEQ ID NO: 395020 - DNA, 120 bp, Artificial Sequence
  ENSG00000145626_21 (sequence is synthesized)
ctgttgtggttggttgctccatcatgtcatcaatagcccatatcttttcttttttatcttccttagtgtaacaccaaactacctctctgatagctggtgttcatgaaatattttaccttc

SEQ ID NO: 395021 - DNA, 120 bp, Artificial Sequence
  ENSG00000145626_22 (sequence is synthesized)
aaatgattgtacctttttatttgctttagagttctgaaataaaatgaaattccactgtaataaaactgtcaaatgcatggtgtctgatgagttaaaaacacagagtagaaaacaggcata

SEQ ID NO: 395022 - DNA, 120 bp, Artificial Sequence
  ENSG00000145626_23 (sequence is synthesized)
tggagaggccctggatgaaccatagttttagattgtttaattctagaattgtgaaacagatcttgaaacaattcagatcaaaagatgaaactgttacaaatgctcctgcagaaatagaga

SEQ ID NO: 395023 - DNA, 120 bp, Artificial Sequence
  ENSG00000145626_24 (sequence is synthesized)
atgccccccaccaaaaactttgccaattccatgaaaggatttgcttgcgagtctgcagagctgagtgctggatgtctatccattttgtgagttctcatgacacaagagccagaagcatga

SEQ ID NO: 395024 - DNA, 120 bp, Artificial Sequence
  ENSG00000145626_25 (sequence is synthesized)
agcacgcagaagtacattagagtgtgtgtatctgtgtgcgtataatacaaggttttattgctgtaattcttatgaaaccacatgaattgattgatggccatactcccatgaagggcagac

SEQ ID NO: 395025 - DNA, 120 bp, Artificial Sequence
  ENSG00000145626_26 (sequence is synthesized)
atggatgcttccctgtgttttctgttgaatcaacagccatgatttcattcccctcatgagcaacataaggtcttagggataagcctccctggccagtaactcccccctcaccccagaaca

SEQ ID NO: 395026 - DNA, 120 bp, Artificial Sequence
  ENSG00000145626_27 (sequence is synthesized)
tagcctttctctaacacttggtaattcattgaggtcaactttatgccacttgtataaacttgcatccctaaaatctgatcataagcagccaatgagccagaatgatgcttctaatcttgc

SEQ ID NO: 395027 - DNA, 120 bp, Artificial Sequence
  ENSG00000145626_28 (sequence is synthesized)
tctgtccaagcaccctccacagggctgcaagcatggctctgacaacctagaaatctggtgttatccctcactgtttaaaatctttgttcccattgtgtggaatataagggctctatgatt

SEQ ID NO: 395028 - DNA, 120 bp, Artificial Sequence
  ENSG00000145626_29 (sequence is synthesized)
tggtcctggctaccaatctaggcacacctggagcagttctcctcccactcttttccaaatgttcgctacaccccctcagaacacattttgctgtttttaacctctgaggtttgtctatgc

SEQ ID NO: 395029 - DNA, 120 bp, Artificial Sequence
  ENSG00000145626_30 (sequence is synthesized)
ccttccttctctcagaaataccatcctattcttgctggaatgagaaacttctgcttatctgtcagtatccagtgtcattgtgttcacattggtaagcctgtgcctgaccactacacctga

SEQ ID NO: 395030 - DNA, 120 bp, Artificial Sequence
  ENSG00000145626_31 (sequence is synthesized)
aatggagctcactgcattctcttttgaagcatttttcttactatatcgcaattatttattacaatatctgtttcctatttagaaaccataaggtcataaagacagggactggttcctatt

SEQ ID NO: 395031 - DNA, 120 bp, Artificial Sequence
  ENSG00000145626_32 (sequence is synthesized)
tatcttgttatagaacctggcatagtgcctggaacaaatactgctaggacaactggataatattgagaaaaaaggcaatatttgatccagacttcacactatatcaaaaactgaattcct

SEQ ID NO: 395032 - DNA, 120 bp, Artificial Sequence
  ENSG00000145626_33 (sequence is synthesized)
atacaccagatatctaggtacaaaaaatgataccatgctgagtctaagagaaaaagtgaatttttccatagcctgtgtatagggagagactttctaaataggaagaaaaaatcctgatac

SEQ ID NO: 395033 - DNA, 120 bp, Artificial Sequence
  ENSG00000145626_34 (sequence is synthesized)
aacaagagaagtgtaaattaatttgacacaaaaaactttggcatggcaaaaatcatggtaagaagattagcgatccaaattaaaaagttggagaaacatagctgcagcatatatcttaca

SEQ ID NO: 395034 - DNA, 120 bp, Artificial Sequence
  ENSG00000145626_35 (sequence is synthesized)
catagacctaatatttctgataaactaagaactattaaaattgaagaaagaacctatgatacatatacatactgaaataatattcagctttaaactacaataaacaaaagcagaataagc

SEQ ID NO: 395035 - DNA, 120 bp, Artificial Sequence
  ENSG00000145626_36 (sequence is synthesized)
taatatggagcaaattccaatatggttaagtaaaaaatagcaaagagtaagagtaactataggatgtatccttttttttataagaaaaaggaaagtatgtgtatgggggataatgaaaaa

SEQ ID NO: 395036 - DNA, 120 bp, Artificial Sequence
  ENSG00000145626_37 (sequence is synthesized)
aatacatatctatgtgcattgccttgcaaaaacagtgcagagggaataaaccagagtgtgatagattatctatgagggtggtgtttgaatagggtggaaggatccatgtgtttatgtttt

SEQ ID NO: 395037 - DNA, 120 bp, Artificial Sequence
  ENSG00000145626_38 (sequence is synthesized)
tacatagtttggattttggaaacgttaatattttgcataccaagtatatgtttaaataaacaaggagagaaaagccaagaactgaaatacaaacggaaacaaatgaaatcaattttttcc

SEQ ID NO: 395038 - DNA, 120 bp, Artificial Sequence
  ENSG00000145626_39 (sequence is synthesized)
aaatgaaaatgtaactatactgtagtgaaaaaaattagcatcattaccttttaaacacagtacttttactatatactgtatacaatcaatcaacagaaaaaaaaaagaactccaaacgaa

SEQ ID NO: 395039 - DNA, 120 bp, Artificial Sequence
  ENSG00000145626_40 (sequence is synthesized)
tgaaacttctgtgacatggaataacatgtgtgtgatgctaacagcccacctgttttctctggtaagtctctaggaagactaatttaggttagatgctgagaattactttcctaccttaag

SEQ ID NO: 395040 - DNA, 120 bp, Artificial Sequence
  ENSG00000145626_41 (sequence is synthesized)
gctgtgatggcgacaaattatatacacatgatctctttgactgatcttatatttgggagtccctctagtggaattccaactgaagcggggggtttctttgtgtgtttccccagtgtgcct

SEQ ID NO: 395041 - DNA, 120 bp, Artificial Sequence
  ENSG00000145626_42 (sequence is synthesized)
gctcttctcacctctggcttcttcgtctgtgctgctccctagaacacccttcccttctcttcacaggactggctccttcatgacatttgggtctcttctccaatgtttcttccatagaca

SEQ ID NO: 395042 - DNA, 120 bp, Artificial Sequence
  ENSG00000145626_43 (sequence is synthesized)
agggggatacccaccatggtagaccagagccactggaaagaggcatgagtccacatatccataaaggcaaatatccaaatattggctgtctggacctacaggaatactaaagaaggcact

SEQ ID NO: 395043 - DNA, 120 bp, Artificial Sequence
  ENSG00000145626_44 (sequence is synthesized)
accactgagatggctttgaccctcagaatctggaggaaaaacacctcctagcctgtgtatcctgaaccactgagtctgctttgaccctcagaatctggaggaaaaacacctcctagccct

SEQ ID NO: 395044 - DNA, 120 bp, Artificial Sequence
  ENSG00000145626_45 (sequence is synthesized)
cggaacaaaggtttggccaaattatgaaggactggcttggtctcaggaaggaaccattcattgtgataccatctggcagctggacattttctgtaggcgtgaggacgaatggcctgaggc

SEQ ID NO: 395045 - DNA, 120 bp, Artificial Sequence
  ENSG00000145626_46 (sequence is synthesized)
cccacatgtgcaggctttttataccttgcagggaaatctagatctttgctgacagtgtaggattgatccagccctcctgctttgtcatttcaggagaggctgcaaagggcaattccaggg

SEQ ID NO: 395046 - DNA, 120 bp, Artificial Sequence
  ENSG00000145626_47 (sequence is synthesized)
aactaaagaaacaaatcccagaggcactcccagcagagaagccagctccctccagctctgctcctctgggtccacctcaacctctctatccagcttcagtctctcgcttgcctaatccta

SEQ ID NO: 395047 - DNA, 120 bp, Artificial Sequence
  ENSG00000145626_48 (sequence is synthesized)
acaggacttaaagtacattaagggggatttttggcaagttttcacatgaccctgacagatagatagaggctttccagaatttaacccaggtatttgaactctcttggagagacattgtgt

SEQ ID NO: 395048 - DNA, 120 bp, Artificial Sequence
  ENSG00000145626_49 (sequence is synthesized)
tacttttgaatcagatcctgatgaacactgagaagcaggctgctctgcaagtagcagagagatttggggatgagctttgtttcacatatagtgtcaggaaagggggcaaactttatccga

SEQ ID NO: 395049 - DNA, 120 bp, Artificial Sequence
  ENSG00000145626_50 (sequence is synthesized)
ctggaagagaagcagtaccagtaaatgaccctggatgggatggatcccagtgttgaaatgggagactggaagaggagatactttcaggtatgcatcatggagggattacgtaggactaag

SEQ ID NO: 395050 - DNA, 120 bp, Artificial Sequence
  ENSG00000145626_51 (sequence is synthesized)
accaagcctcttgattatagcaagctatctatgatagaccagggatttaatgaaaatcccactgccttcttggagaggctaagaggggccttggtaaagcatacccccgtatcttctgat

SEQ ID NO: 395051 - DNA, 120 bp, Artificial Sequence
  ENSG00000145626_52 (sequence is synthesized)
tcagtgaagggacaactaattctgaagaataaatttattactcagacagcccctgatatcaggaggaagttgcagaaatgggccctgggaccagataatactttagaggtctaactgaaa

SEQ ID NO: 395052 - DNA, 120 bp, Artificial Sequence
  ENSG00000145626_53 (sequence is synthesized)
gtggccatctttgccttttacaatagagatgggggacacaagaaagaggcagaagcattaatggtcaccatgcaagcccataaaccccagaattcccagggtacacttgttaattgctac

SEQ ID NO: 395053 - DNA, 120 bp, Artificial Sequence
  ENSG00000145626_54 (sequence is synthesized)
agatgtggcaagaacagttgtctctcttctaaagttgaaccgcttctatacaaggtttaatttctttcaccagggtgaaacagctcaaagcagaatggttttagtattttcacttgttat

SEQ ID NO: 395054 - DNA, 120 bp, Artificial Sequence
  ENSG00000145626_55 (sequence is synthesized)
ttctgtgatctttggcactagattattttcttgtataatacacttgtttaacccatgcctacttaaccttataaaacttgttttttcctctcacttagaggccatcaaactccaaatggt

SEQ ID NO: 395055 - DNA, 120 bp, Artificial Sequence
  ENSG00000145626_56 (sequence is synthesized)
caggcaaccggagcctcggacaacggctcccttttgcaaggacccttagataaacctctgggaggaatctgactgctgttttctccaaaatagtgccacctgtcagcagaaattagctaa

SEQ ID NO: 395056 - DNA, 120 bp, Artificial Sequence
  ENSG00000145626_57 (sequence is synthesized)
gattggccatcgtccatattctaatggcagttagatttgcctctgcagagaggggagatgatacggctaggagacagagaaatactgggtagaagagggcagttccctggcaaaggtccc

SEQ ID NO: 395057 - DNA, 120 bp, Artificial Sequence
  ENSG00000145626_58 (sequence is synthesized)
aatttcaagcctggaaacctctggccctaactgagaacatgcattcctgttttcacacacaaaagttgccttttggctctccacacgcccctctcctgtactcatataaatctgagacct

SEQ ID NO: 395058 - DNA, 120 bp, Artificial Sequence
  ENSG00000145626_59 (sequence is synthesized)
caggttccagaagcagatgaaaaggagatgaacagaagagcagaagaatggcataatggtgtggcagagagaagagaaggagagtctgaacaccaagaggagttcagctgggggcgattg

SEQ ID NO: 395059 - DNA, 120 bp, Artificial Sequence
  ENSG00000145626_60 (sequence is synthesized)
gagaggagatcagccactggatggctgaactccaggaagaccatcttcccattccgtctcctttccagctccccatgcatcccatccccaccactcaataaaacccccacattcaccatc

SEQ ID NO: 395060 - DNA, 120 bp, Artificial Sequence
  ENSG00000145626_61 (sequence is synthesized)
agccttcattaacgtgatttactgaggcccctgtcattcctggctcttagtaaggattttccagataggacagctgtgattacgcaggcagagaaaggttacagatcaggttaccaaccc

SEQ ID NO: 395061 - DNA, 120 bp, Artificial Sequence
  ENSG00000145626_62 (sequence is synthesized)
tcccagacaggcgcgtcccggatccccgcactgccagggctccagcgaacggcgattgatcagagttatccaggcgattttccaggctgggcttgcggacctggctggaggagggagaag

SEQ ID NO: 395062 - DNA, 120 bp, Artificial Sequence
  ENSG00000145626_63 (sequence is synthesized)
cttcctaacacttttcaagatttgtaatgactccatttatttatgtttttattaattgtctggcccccaacacaaaagagtagagagtcagcttcataagtacagcaatgtctctctctt

SEQ ID NO: 395063 - DNA, 120 bp, Artificial Sequence
  ENSG00000145626_64 (sequence is synthesized)
tttttcaactctgttcccagtgcttactgcagagcctgccacaaaataagtttccatgaatttcagttaagtgaggaaataaaagcggcatagtgaccttcttggttactgcccatccag

SEQ ID NO: 395064 - DNA, 120 bp, Artificial Sequence
  ENSG00000145632_0 (sequence is synthesized)
gcacaagtggaccggggtgttgggtgctagtcggcaccagaggcaagggtgcgaggaccacggccggctcggacgtgtgaccgcgcctagggggtggcagcgggcagtgcggggcggcaa

SEQ ID NO: 395065 - DNA, 120 bp, Artificial Sequence
  ENSG00000145632_1 (sequence is synthesized)
ggcgaccatggagcttttgcggactatcacctaccagccagccgccagcaccaaaatgtgcgagcaggcgctgggcaagggttgcggagcggactcgaagaagaagcggccgccgcagcc

SEQ ID NO: 395066 - DNA, 120 bp, Artificial Sequence
  ENSG00000145632_2 (sequence is synthesized)
ccccgaggaatcgcagccacctcagtcccaggcgcaagtgcccccggcggcccctcaccaccatcaccaccattcgcactcggggccggagatctcgcggattatcgtcgaccccacgac

SEQ ID NO: 395067 - DNA, 120 bp, Artificial Sequence
  ENSG00000145632_3 (sequence is synthesized)
tgggaagcgctactgccggggcaaagtgctgggaaagggtggctttgcaaaatgttacgagatgacagatttgacaaataacaaagtctacgccgcaaaaattattcctcacagcagagt

SEQ ID NO: 395068 - DNA, 120 bp, Artificial Sequence
  ENSG00000145632_4 (sequence is synthesized)
agctaaacctcatcaaagggaaaagattgacaaagaaatagagcttcacagaattcttcatcataagcatgtagtgcagttttaccactacttcgaggacaaagaaaacatttacattct

SEQ ID NO: 395069 - DNA, 120 bp, Artificial Sequence
  ENSG00000145632_5 (sequence is synthesized)
cttggaatactgcagtagaaggtcaatggctcatattttgaaagcaagaaaggtgttgacagagccagaagttcgatactacctcaggcagattgtgtctggactgaaataccttcatga

SEQ ID NO: 395070 - DNA, 120 bp, Artificial Sequence
  ENSG00000145632_6 (sequence is synthesized)
acaagaaatcttgcacagagatctcaaactagggaacttttttattaatgaagccatggaactaaaagttggggacttcggtctggcagccaggctagaacccttggaacacagaaggag

SEQ ID NO: 395071 - DNA, 120 bp, Artificial Sequence
  ENSG00000145632_7 (sequence is synthesized)
aacgatatgtggtaccccaaattatctctctcctgaagtcctcaacaaacaaggacatggctgtgaatcagacatttgggccctgggctgtgtaatgtatacaatgttactagggaggcc

SEQ ID NO: 395072 - DNA, 120 bp, Artificial Sequence
  ENSG00000145632_8 (sequence is synthesized)
cccatttgaaactacaaatctcaaagaaacttataggtgcataagggaagcaaggtatacaatgccgtcctcattgctggctcctgccaagcacttaattgctagtatgttgtccaaaaa

SEQ ID NO: 395073 - DNA, 120 bp, Artificial Sequence
  ENSG00000145632_9 (sequence is synthesized)
cccagaggatcgtcccagtttggatgacatcattcgacatgacttttttttgcagggcttcactccggacagactgtcttctagctgttgtcatacagttccagatttccacttatcaag

SEQ ID NO: 395074 - DNA, 120 bp, Artificial Sequence
  ENSG00000145632_10 (sequence is synthesized)
cccagctaagaatttctttaagaaagcagctgctgctctttttggtggcaaaaaagacaaagcaagatatattgacacacataatagagtgtctaaagaagatgaagacatctacaagct

SEQ ID NO: 395075 - DNA, 120 bp, Artificial Sequence
  ENSG00000145632_11 (sequence is synthesized)
taactcagcaacccagcaaacacaggacagatgaggagctccagccacctaccaccacagttgccaggtctggaacacccgcagtagaaaacaagcagcagattggggatgctattcgga

SEQ ID NO: 395076 - DNA, 120 bp, Artificial Sequence
  ENSG00000145632_12 (sequence is synthesized)
tgatagtcagagggactcttggcagctgtagcagcagcagtgaatgccttgaagacagtaccatgggaagtgttgcagacacagtggcaagggttcttcggggatgtctggaaaacatgc

SEQ ID NO: 395077 - DNA, 120 bp, Artificial Sequence
  ENSG00000145632_13 (sequence is synthesized)
cggaagctgattgcattcccaaagagcagctgagcacatcatttcagtgggtcaccaaatgggttgattactctaacaaatatggctttgggtaccagctctcagaccacaccgtcggtg

SEQ ID NO: 395078 - DNA, 120 bp, Artificial Sequence
  ENSG00000145632_14 (sequence is synthesized)
tccttttcaacaatggtgctcacatgagcctccttccagacaaaaaaacagttcactattacgcagagcttggccaatgctcagttttcccagcaacagatgctcctgagcaatttatta

SEQ ID NO: 395079 - DNA, 120 bp, Artificial Sequence
  ENSG00000145632_15 (sequence is synthesized)
gtcaagtgacggtgctgaaatacttttctcattacatggaggagaacctcatggatggtggagatctgcctagtgttactgatattcgaagacctcggctctacctccttcagtggctaa

SEQ ID NO: 395080 - DNA, 120 bp, Artificial Sequence
  ENSG00000145632_16 (sequence is synthesized)
aatctgataaggccctaatgatgctctttaatgatggcacctttcaggtgaatttctaccatgatcatacaaaaatcatcatctgtagccaaaatgaagaataccttctcacctacatca

SEQ ID NO: 395081 - DNA, 120 bp, Artificial Sequence
  ENSG00000145632_17 (sequence is synthesized)
atgaggataggatatctacaactttcaggctgacaactctgctgatgtctggctgttcatcagaattaaaaaatcgaatggaatatgccctgaacatgctcttacaaagatgtaactgaa

SEQ ID NO: 395082 - DNA, 120 bp, Artificial Sequence
  ENSG00000145632_18 (sequence is synthesized)
agacttttcgaatggaccctatgggactcctcttttccactgtgagatctacagggaagccaaaagaatgatctagagtatgttgaagaagatggacatgtggtggtacgaaaacaattc

SEQ ID NO: 395083 - DNA, 120 bp, Artificial Sequence
  ENSG00000145632_19 (sequence is synthesized)
ccctgtggcctgctggactggttggaaccagaacaggctaaggcatacagttcttgactttggacaatccaagagtgaaccagaatgcagttttccttgagatacctgttttaaaaggtt

SEQ ID NO: 395084 - DNA, 120 bp, Artificial Sequence
  ENSG00000145632_20 (sequence is synthesized)
tttcagacaattttgcagaaaggtgcattgattcttaaattctctctgttgagagcatttcagccagaggactttggaactgtgaatatacttcctgaaggggagggagaagggaggaag

SEQ ID NO: 395085 - DNA, 120 bp, Artificial Sequence
  ENSG00000145632_21 (sequence is synthesized)
ctcccatgttgtttaaaggctgtaattggagcagcttttggctgcgtaactgtgaactatggccatatataattttttttcattaatttttgaagatacttgtggctggaaaagtgcatt

SEQ ID NO: 395086 - DNA, 120 bp, Artificial Sequence
  ENSG00000145632_22 (sequence is synthesized)
ccttgttaataaactttttatttattacagcccaaagagcagtatttattatcaaaatgtctttttttttatgttgaccattttaaaccgttggcaataaagagtatgaaaacgcagaaa

SEQ ID NO: 395087 - DNA, 120 bp, Artificial Sequence
  ENSG00000145632_23 (sequence is synthesized)
cacaggacagatgaggtgtgttgggaaagagtaaagtagatactcacgctttacgttatttccactctttattaattagcacttggactatgattatcatggttcaaatatgtcatattt

SEQ ID NO: 395088 - DNA, 120 bp, Artificial Sequence
  ENSG00000145632_24 (sequence is synthesized)
acttaaagtttttcttcaaaccctttgaaagggaagttaaaactaaaaggaagtcttttagttttacagtgcatgcaagtgagtttactgcgttatcttttatctggcttgtgtccattg

SEQ ID NO: 395089 - DNA, 120 bp, Artificial Sequence
  ENSG00000145632_25 (sequence is synthesized)
ctttttgatgagctttcccagcaattgcctcactctcatcttaatctggaattctcacccttaaatgaatttagatgcttgactcattgcataaatcttctctcttctaaggagctccag

SEQ ID NO: 395090 - DNA, 120 bp, Artificial Sequence
  ENSG00000145632_26 (sequence is synthesized)
cttgcttaagtttgagaggattttcttagaataataatagagtgcatgctacaaaatctttgtaggcactaactcactctcctaatctcttccagggtggagatctgcctagtgttactg

SEQ ID NO: 395091 - DNA, 120 bp, Artificial Sequence
  ENSG00000145632_27 (sequence is synthesized)
gtgcgtatgactcttgagtaaagtattttctttgtgtgcaaggatggcccttccctgttaggaaaatgtcttctgcatgtgtaatcactggcttttccgaggtgactggaagctaataag

SEQ ID NO: 395092 - DNA, 120 bp, Artificial Sequence
  ENSG00000145632_28 (sequence is synthesized)
ttagcataacttggccatatttgcgtattcttaaatgttgatatttatagcataataaatccataccttgaattgtgattgatagctttttattttgcaaacactaaagagggcttttgg

SEQ ID NO: 395093 - DNA, 120 bp, Artificial Sequence
  ENSG00000145632_29 (sequence is synthesized)
ttcagatgccaaaagtcaaatgtttccaaatagaaattcagtatagattttaagattttgtttaagattttgtctcccatcaagtcatgtcaagagaaccaagtttaagtagtggaatag

SEQ ID NO: 395094 - DNA, 120 bp, Artificial Sequence
  ENSG00000145632_30 (sequence is synthesized)
tttgcattcttagcctcagaactgtgtgtctcccgcagcccagagaaatgcatcttgagtctggaagcgagggctttctacatcagacctctctccctctatctgctcccagggaatttt

SEQ ID NO: 395095 - DNA, 120 bp, Artificial Sequence
  ENSG00000145632_31 (sequence is synthesized)
cctgacaagtctcatcagagattatttttcatgtctccccgttccaactccctccataaagctcccctttataaaagaagaagagaaactgtttgaacttgctgtttccagcaatgcatt

SEQ ID NO: 395096 - DNA, 120 bp, Artificial Sequence
  ENSG00000145632_32 (sequence is synthesized)
tctcttcatgagggagctttaacgaagtcgaatgcctccctctgtccaccctcctccattcctcaatttttttttttttgcttttctttcttcccatttatttatttatttaaaatatct

SEQ ID NO: 395097 - DNA, 120 bp, Artificial Sequence
  ENSG00000145632_33 (sequence is synthesized)
ttttttctctctctgtttttttttacatattaatgttcttaattgggatctcgtgtctgcaatcttgcttttgaatgggcgactttcatataacaattggctgcctggctccaaagtgga

SEQ ID NO: 395098 - DNA, 120 bp, Artificial Sequence
  ENSG00000145632_34 (sequence is synthesized)
atctgggattttagctgtggcagcacttacactgcaaagttaactttcattgctcatcctgcaaagggaaaccagtgattttgataactgttttgacagattctcttttttccttctcct

SEQ ID NO: 395099 - DNA, 120 bp, Artificial Sequence
  ENSG00000145642_0 (sequence is synthesized)
agagcccagatcggaagagccgagtccgggcagaggggtccgcgggctctggaggtgctggacgggtgcgatccgagagcagaccggggccctcgcgagcctctcccggcccctgcccgc

SEQ ID NO: 395100 - DNA, 120 bp, Artificial Sequence
  ENSG00000145642_1 (sequence is synthesized)
gatgagcgaggccagccgactgtgctccggctactacagcctcaaccagagcttcgtggagcccttccagtgcccccggcgcggcgagggggcagcgctccagtattgctgcggcttcgc

SEQ ID NO: 395101 - DNA, 120 bp, Artificial Sequence
  ENSG00000145642_2 (sequence is synthesized)
cgacctcaagtactgctgcagcgagccgggcagctacttcccctacaagcacagctacatgtggagcctcagcattggtgccttgattggactaggaattgctgcccttgttttactcgc

SEQ ID NO: 395102 - DNA, 120 bp, Artificial Sequence
  ENSG00000145642_3 (sequence is synthesized)
caaagattagacactggccttaagcttcaacacttagaggcttcttccactcaagaaggcaagtcaaatggaaaaaccaaagccctcaattcaaatgcagcatcaaatgcaacaaatgaa

SEQ ID NO: 395103 - DNA, 120 bp, Artificial Sequence
  ENSG00000145642_4 (sequence is synthesized)
acatactatgaagctgatgatataattcaagaaaaaacaatggatgcaacacaaatccacattgcttattaactaaaaattctgtgttttaaatgcttactggagagatgggacaataaa

SEQ ID NO: 395104 - DNA, 120 bp, Artificial Sequence
  ENSG00000145642_5 (sequence is synthesized)
aataaagcgtgcacttgaaacggtttgtaatattgcttttcaaaaattcgtcactcacaaagcaagacacagctgcatttttgatcattcagttactttattaaacgcacattaaggttt

SEQ ID NO: 395105 - DNA, 120 bp, Artificial Sequence
  ENSG00000145642_6 (sequence is synthesized)
cctacaagcacagctacatgtggagcctcaggtcaaacttgtcagtgtcctaatcccagagaaagagcagaagcctaaaggcaagccaggaagataatgaagaaaaagatcattactttt

SEQ ID NO: 395106 - DNA, 85 bp, Artificial Sequence
  ENSG00000145642_7 (sequence is synthesized)
atgtatattttttgagggcctgtgcaagcaactgggctttacgacttgcactttttggaggatctgacccctaccctggagagaa

SEQ ID NO: 395107 - DNA, 120 bp, Artificial Sequence
  ENSG00000145642_8 (sequence is synthesized)
ttgcactttttggaggatctgacccctaccctggagagaattgaagcgacaccaagaaagcattggtgccttgattggactaggaattgctgcccttgttttactcgcctttgtcatcag

SEQ ID NO: 395108 - DNA, 120 bp, Artificial Sequence
  ENSG00000145642_9 (sequence is synthesized)
tgattatacacacactctgtagaacaggacaccccctttcttgaaacccgagccatgtggctattgctggaatgtgaagagactttctaagcattggtgccttgattggactaggaattg

SEQ ID NO: 395109 - DNA, 120 bp, Artificial Sequence
  ENSG00000145649_0 (sequence is synthesized)
agattttcaggttgattgatgtgggacagcagccacaatgaggaactcctatagatttctggcatcctctctctcagttgtcgtttctctcctgctaattcctgaagatgtctgtgaaaa

SEQ ID NO: 395110 - DNA, 120 bp, Artificial Sequence
  ENSG00000145649_1 (sequence is synthesized)
aattattggaggaaatgaagtaactcctcattcaagaccctacatggtcctacttagtcttgacagaaaaaccatctgtgctggggctttgattgcaaaagactgggtgttgactgcagc

SEQ ID NO: 395111 - DNA, 120 bp, Artificial Sequence
  ENSG00000145649_2 (sequence is synthesized)
tcactgtaacttgaacaaaaggtcccaggtcattcttggggctcactcaataaccagggaagagccaacaaaacagataatgcttgttaagaaagagtttccctatccatgctatgaccc

SEQ ID NO: 395112 - DNA, 120 bp, Artificial Sequence
  ENSG00000145649_3 (sequence is synthesized)
acaaatatgtgactatccttcatctacctaaaaagggggacgatgtgaaaccaggaaccatgtgccaagttgcagggtggggcaggactcacaatagtgcatcttggtccgatactctga

SEQ ID NO: 395113 - DNA, 120 bp, Artificial Sequence
  ENSG00000145649_4 (sequence is synthesized)
gagaagtcaatatcaccatcatagacagaaaagtctgcaatgatcgaaatcactataattttaaccctgtgattggaatgaatatggtttgtgctggaagcctccgaggtggaagagact

SEQ ID NO: 395114 - DNA, 120 bp, Artificial Sequence
  ENSG00000145649_5 (sequence is synthesized)
cgtgcaatggagattctggaagccctttgttgtgcgagggtgttttccgaggggtcacttcctttggccttgaaaataaatgcggagaccctcgtgggcctggtgtctatattcttctct

SEQ ID NO: 395115 - DNA, 120 bp, Artificial Sequence
  ENSG00000145649_6 (sequence is synthesized)
caaagaaacacctcaactggataattatgactatcaagggagcagtttaaataaccgtttcctttcatttactgtggcttcttaatcttttcacaaataaaatcaatttgcatgactgta

SEQ ID NO: 395116 - DNA, 120 bp, Artificial Sequence
  ENSG00000145675_0 (sequence is synthesized)
gtcgccagcagctggagcggagttggaggaagcagcggcagcggcgagggcggcaggctagctgtcggagacggcaagcacggatcgggcacggccggcgggtcgcagccgggctggagg

SEQ ID NO: 395117 - DNA, 120 bp, Artificial Sequence
  ENSG00000145675_1 (sequence is synthesized)
ccggtcggaaccgagcgggcaggaggccaccgctgcagcgcgggccccgcagaggaaggaagccggcgggcggggtgaagctcgtgtgtggagtgccacggtacaatcagacgacagatg

SEQ ID NO: 395118 - DNA, 120 bp, Artificial Sequence
  ENSG00000145675_2 (sequence is synthesized)
gacagtgtgacaaaagtgtcagaaaggattgggcctcgctgtgagagtcagcctggattcaaagtgttgacaagttgctgaaaaggaagccagtgagaggactgtggcacgcagaggaag

SEQ ID NO: 395119 - DNA, 120 bp, Artificial Sequence
  ENSG00000145675_3 (sequence is synthesized)
tggagccctgtcttcggtcacaccattgatggaggacagatggacagccgtatggccagtcacctctcctcttaaacctttggagagtggtcctttgtcctctgctggacacataatagg

SEQ ID NO: 395120 - DNA, 120 bp, Artificial Sequence
  ENSG00000145675_4 (sequence is synthesized)
aattctaacacattctctgaattcacttttcataaaaacgtaaaatcagactgctctgtacaaccaggctcaactgttgcatggtagcagatttgcaaacatgagtgctgaggggtacca

SEQ ID NO: 395121 - DNA, 120 bp, Artificial Sequence
  ENSG00000145675_5 (sequence is synthesized)
gtacagagcgctgtatgattataaaaaggaaagagaagaagatattgacttgcacttgggtgacatattgactgtgaataaagggtccttagtagctcttggattcagtgatggacagga

SEQ ID NO: 395122 - DNA, 120 bp, Artificial Sequence
  ENSG00000145675_6 (sequence is synthesized)
agccaggcctgaagaaattggctggttaaatggctataatgaaaccacaggggaaaggggggactttccgggaacttacgtagaatatattggaaggaaaaaaatctcgcctcccacacc

SEQ ID NO: 395123 - DNA, 120 bp, Artificial Sequence
  ENSG00000145675_7 (sequence is synthesized)
aaagccccggccacctcggcctcttcctgttgcaccaggttcttcgaaaactgaagcagatgttgaacaacaagctttgactctcccggatcttgcagagcagtttgcccctcctgacat

SEQ ID NO: 395124 - DNA, 120 bp, Artificial Sequence
  ENSG00000145675_8 (sequence is synthesized)
tgccccgcctcttcttatcaagctcgtggaagccattgaaaagaaaggtctggaatgttcaactctatacagaacacagagctccagcaacctggcagaattacgacagcttcttgattg

SEQ ID NO: 395125 - DNA, 120 bp, Artificial Sequence
  ENSG00000145675_9 (sequence is synthesized)
tgatacaccctccgtggacttggaaatgatcgatgtgcacgttttggctgacgctttcaaacgctatctcctggacttaccaaatcctgtcattccagcagccgtttacagtgaaatgat

SEQ ID NO: 395126 - DNA, 120 bp, Artificial Sequence
  ENSG00000145675_10 (sequence is synthesized)
ttctttagctccagaagtacaaagctccgaagaatatattcagctattgaagaagcttattaggtcgcctagcatacctcatcagtattggcttacgcttcagtatttgttaaaacattt

SEQ ID NO: 395127 - DNA, 120 bp, Artificial Sequence
  ENSG00000145675_11 (sequence is synthesized)
cttcaagctctctcaaacctccagcaaaaatctgttgaatgcaagagtactctctgaaattttcagccctatgcttttcagattctcagcagccagctctgataatactgaaaacctcat

SEQ ID NO: 395128 - DNA, 120 bp, Artificial Sequence
  ENSG00000145675_12 (sequence is synthesized)
aaaagttatagaaattttaatctcaactgaatggaatgaacgacagcctgcaccagcactgcctcctaaaccaccaaaacctactactgtagccaacaacggtatgaataacaatatgtc

SEQ ID NO: 395129 - DNA, 120 bp, Artificial Sequence
  ENSG00000145675_13 (sequence is synthesized)
cttacaagatgctgaatggtactggggagatatctcgagggaagaagtgaatgaaaaacttcgagatacagcagacgggacctttttggtacgagatgcgtctactaaaatgcatggtga

SEQ ID NO: 395130 - DNA, 120 bp, Artificial Sequence
  ENSG00000145675_14 (sequence is synthesized)
ttatactcttacactaaggaaagggggaaataacaaattaatcaaaatatttcatcgagatgggaaatatggcttctctgacccattaaccttcagttctgtggttgaattaataaacca

SEQ ID NO: 395131 - DNA, 120 bp, Artificial Sequence
  ENSG00000145675_15 (sequence is synthesized)
ctaccggaatgaatctctagctcagtataatcccaaattggatgtgaaattactttatccagtatccaaataccaacaggatcaagttgtcaaagaagataatattgaagctgtagggaa

SEQ ID NO: 395132 - DNA, 120 bp, Artificial Sequence
  ENSG00000145675_16 (sequence is synthesized)
aaaattacatgaatataacactcagtttcaagaaaaaagtcgagaatatgatagattatatgaagaatatacccgcacatcccaggaaatccaaatgaaaaggacagctattgaagcatt

SEQ ID NO: 395133 - DNA, 120 bp, Artificial Sequence
  ENSG00000145675_17 (sequence is synthesized)
taatgaaaccataaaaatatttgaagaacagtgccagacccaagagcggtacagcaaagaatacatagaaaagtttaaacgtgaaggcaatgagaaagaaatacaaaggattatgcataa

SEQ ID NO: 395134 - DNA, 120 bp, Artificial Sequence
  ENSG00000145675_18 (sequence is synthesized)
ttatgataagttgaagtctcgaatcagtgaaattattgacagtagaagaagattggaagaagacttgaagaagcaggcagctgagtatcgagaaattgacaaacgtatgaacagcattaa

SEQ ID NO: 395135 - DNA, 120 bp, Artificial Sequence
  ENSG00000145675_19 (sequence is synthesized)
accagaccttatccagctgagaaagacgagagaccaatacttgatgtggttgactcaaaaaggtgttcggcaaaagaagttgaacgagtggttgggcaatgaaaacactgaagaccaata

SEQ ID NO: 395136 - DNA, 120 bp, Artificial Sequence
  ENSG00000145675_20 (sequence is synthesized)
ttcactggtggaagatgatgaagatttgccccatcatgatgagaagacatggaatgttggaagcagcaaccgaaacaaagctgaaaacctgttgcgagggaagcgagatggcacttttct

SEQ ID NO: 395137 - DNA, 120 bp, Artificial Sequence
  ENSG00000145675_21 (sequence is synthesized)
tgtccgggagagcagtaaacagggctgctatgcctgctctgtagtggtggacggcgaagtaaagcattgtgtcataaacaaaacagcaactggctatggctttgccgagccctataactt

SEQ ID NO: 395138 - DNA, 120 bp, Artificial Sequence
  ENSG00000145675_22 (sequence is synthesized)
gtacagctctctgaaagaactggtgctacattaccaacacacctcccttgtgcagcacaacgactccctcaatgtcacactagcctacccagtatatgcacagcagaggcgatgaagcgc

SEQ ID NO: 395139 - DNA, 120 bp, Artificial Sequence
  ENSG00000145675_23 (sequence is synthesized)
ttactctttgatccttctcctgaagttcagccaccctgaggcctctggaaagcaaagggctcctctccagtctgatctgtgaattgagctgcagaaacgaagccatctttctttggatgg

SEQ ID NO: 395140 - DNA, 120 bp, Artificial Sequence
  ENSG00000145675_24 (sequence is synthesized)
gactagagctttctttcacaaaaaagaagtaggggaagacatgcagcctaaggctgtatgatgaccacacgttcctaagctggagtgcttatcccttctttttctttttttctttggttt

SEQ ID NO: 395141 - DNA, 120 bp, Artificial Sequence
  ENSG00000145675_25 (sequence is synthesized)
aatttaaagccacaaccacatacaacacaaagagaaaaagaaatgcaaaaatctctgcgtgcagggacaaagaggcctttaaccatggtgcttgttaatgctttctgaagctttaccagc

SEQ ID NO: 395142 - DNA, 120 bp, Artificial Sequence
  ENSG00000145675_26 (sequence is synthesized)
tgaaagttgggactctggagagcggaggagagagaggcagaagaaccctggcctgagaaggtttggtccagcctggtttagcctggatgttgctgtgcacggtggacccagacacatcgc

SEQ ID NO: 395143 - DNA, 120 bp, Artificial Sequence
  ENSG00000145675_27 (sequence is synthesized)
actgtggattatttcattttgtaacaaatgaacgatatgtagcagaaaggcacgtccactcacaagggacgctttgggagaatgtcagttcatgtatgttcagaagaaattctgtcatag

SEQ ID NO: 395144 - DNA, 120 bp, Artificial Sequence
  ENSG00000145675_28 (sequence is synthesized)
aaagtgccagaaagtgtttaacttgtcaaaaaacaaaaacccagcaacagaaaaatggagtttggaaaacaggacttaaaatgacattcagtatataaaatatgtacataatattggatg

SEQ ID NO: 395145 - DNA, 120 bp, Artificial Sequence
  ENSG00000145675_29 (sequence is synthesized)
gatggatttgtatcaataccaaatagcttctgttttgttttgctgaaggctaaattcacagcgctatgcaattcttaattttcattaagttgttatttcagttttaaatgtaccttcaga

SEQ ID NO: 395146 - DNA, 120 bp, Artificial Sequence
  ENSG00000145675_30 (sequence is synthesized)
ataagcttccccaccccagtttttgttgcttgaaaatattgttgtcccggatttttgttaatattcatttttgttatccttttttaaaagtaaatgtacaggatgccagtaaaaaaaaaa

SEQ ID NO: 395147 - DNA, 120 bp, Artificial Sequence
  ENSG00000145675_31 (sequence is synthesized)
aatggcttcagaattaaaactatgaaatattttacagtttttcttgtacagagtacttggctgttagcccaaggttaaaaagttcataacagattttttttggactgttttgttgggcag

SEQ ID NO: 395148 - DNA, 120 bp, Artificial Sequence
  ENSG00000145675_32 (sequence is synthesized)
tgcctgataagcttcaaagctgctttattcaataaaaaaaagaaatgaaaaagatatatgaatatgacaaagtattgctgagtccaacaatgttgttttaagactcttaaaatacggtac

SEQ ID NO: 395149 - DNA, 120 bp, Artificial Sequence
  ENSG00000145675_33 (sequence is synthesized)
ctggcaatgtttatttcataaagaattgtgaacttcttgaatctagggagggggaatgtagtgaagggatgtatcaagtggggtggtgggagggggaggcaaggttatatgcactttctc

SEQ ID NO: 395150 - DNA, 120 bp, Artificial Sequence
  ENSG00000145675_34 (sequence is synthesized)
atgatttacagagaagtgaataactgcaaagtgaagttgcttcttctacttcagtcttctctcactttgatttgctagttgttatcaattaatgacaattacaaacctactgtatctcta

SEQ ID NO: 395151 - DNA, 120 bp, Artificial Sequence
  ENSG00000145675_35 (sequence is synthesized)
atacagtgtgactggtcaggtatttcagttcttaggaaggaagtgccaagtttgtttttgggttcctggaacagcgctcacctttgtttagaacactggtttaaagggataatcatctct

SEQ ID NO: 395152 - DNA, 120 bp, Artificial Sequence
  ENSG00000145675_36 (sequence is synthesized)
gtcacattagactatccatcatgaccagcaaatactcattttaggaaaaaaaaaagcatgatctgaaaaatacttttggtggtatgttggttaccctcctagctttccatttggtttaga

SEQ ID NO: 395153 - DNA, 120 bp, Artificial Sequence
  ENSG00000145675_37 (sequence is synthesized)
acataaagcaaatagacacagtcatactgtcactgctctggactgtgtggagctcgctaaagtcatggtcattgcaggaatccaagtggcagtccttctcattcattctaatcattgtat

SEQ ID NO: 395154 - DNA, 120 bp, Artificial Sequence
  ENSG00000145675_38 (sequence is synthesized)
gtgcttcactacgggggggagaaggaaacgttagcatcatgtttcccatttagggcaggagtgagaggtctctcttcctgatttagatatgcaaaagctggtatgttcagtaggaactgt

SEQ ID NO: 395155 - DNA, 120 bp, Artificial Sequence
  ENSG00000145675_39 (sequence is synthesized)
acatgtgttgggaggcataaagactaattagcaaccataatatggtcactaccctaatagactaaatgaaatcttgcaatttcaaattactctttctccatattagatttacccacagct

SEQ ID NO: 395156 - DNA, 120 bp, Artificial Sequence
  ENSG00000145675_40 (sequence is synthesized)
atatttctgtttaagtactagggtgagggttttctgttactttgttttttaatgttgttccttttgaaagaatcagtcttgcagctgagtgaaaaatctgtggaatgtattatttgtcct

SEQ ID NO: 395157 - DNA, 120 bp, Artificial Sequence
  ENSG00000145675_41 (sequence is synthesized)
ctttacatgaaactactcatacttaagcaaaagtcagtcttatagcaagactgttagccctcaaacttgactctactgatctgaccatttccctctcatcgccagacaactgacgatttc

SEQ ID NO: 395158 - DNA, 120 bp, Artificial Sequence
  ENSG00000145675_42 (sequence is synthesized)
cctggttttagtctgcgtctctgctttaaagttattgtgatatccttctagatcatacacaagtctaacagttaattagttaacagtttttaaactaggtttgtgggtatttttttggta

SEQ ID NO: 395159 - DNA, 120 bp, Artificial Sequence
  ENSG00000145675_43 (sequence is synthesized)
gcacatgtatgctattacatacaaatttttatttctaaaatataagatctgagattgaatattttcattaaaagctacagttttgtgaatctttgtgcttcaacattctttgcaagatga

SEQ ID NO: 395160 - DNA, 120 bp, Artificial Sequence
  ENSG00000145675_44 (sequence is synthesized)
tacggtatttaggcatttgccttatttttgcatctcacaaacataagtgcaatagatcttttcattgaacagcaaagtaggattcatcattccatatgacttgagttacaccagacctgt

SEQ ID NO: 395161 - DNA, 120 bp, Artificial Sequence
  ENSG00000145675_45 (sequence is synthesized)
tctgcccaatgcctttttgattacagtgtagcttgcccaccgcatttgtcgttttagatactttgctagccggccactttggatttcatcagacagtcctaacaatattgtctgaacggc

SEQ ID NO: 395162 - DNA, 120 bp, Artificial Sequence
  ENSG00000145675_46 (sequence is synthesized)
tgaatatgaatagatacagcagaggcactcctgatatatgatttttatccatgcgtcagtttttcccacccagtgtagcatcctaaagataaagccagaagctaagctgcagtgaggctg

SEQ ID NO: 395163 - DNA, 120 bp, Artificial Sequence
  ENSG00000145675_47 (sequence is synthesized)
tgattgggcgtagaagtgggagcattgggacctcacattacacacacgagagatcataaccatgtgaaaaggcaaaaagcatgtgtttgcaacatctgataacttcatggcctttgataa

SEQ ID NO: 395164 - DNA, 120 bp, Artificial Sequence
  ENSG00000145675_48 (sequence is synthesized)
atgtatatatgtatatgtgcatggactgtgtttccagtacacctttcagccaaaacagatccacagtagttgttgagttcaagtacataaagtacataacaagcgaacgtctagtacaat

SEQ ID NO: 395165 - DNA, 120 bp, Artificial Sequence
  ENSG00000145675_49 (sequence is synthesized)
tcttacttatgtgtatgggatttttccctttgaggttgctttgttttgtcttacaaaggtgaaaattgtttgtaagtgaagtgagaagttcatatttctttggcttttttgtgtttttaa

SEQ ID NO: 395166 - DNA, 120 bp, Artificial Sequence
  ENSG00000145675_50 (sequence is synthesized)
aagttactccttttagggagctggtctgatgacttgcttagcttggaaatccttgttttcagtgtgtcgagtcaaaatgtgtttatgtgagctgtcactgtggggaaccaattgctttgt

SEQ ID NO: 395167 - DNA, 120 bp, Artificial Sequence
  ENSG00000145675_51 (sequence is synthesized)
catatagctggttatgaactagtaacatgtttgggaagtcctactgatgttcctttggaagaaaaaatctgctggttttaacaactgtgcttttgctatgtatggtatccaagttagttg

SEQ ID NO: 395168 - DNA, 120 bp, Artificial Sequence
  ENSG00000145675_52 (sequence is synthesized)
aaacgcagacactgagatctgtttgagtttagggtcatttttagaaaggggcagtttaaagcacaatgtctcacatgggacaaagttccaaaatgccaaattcttattttttaaaaagct

SEQ ID NO: 395169 - DNA, 120 bp, Artificial Sequence
  ENSG00000145675_53 (sequence is synthesized)
agttctataaaatactggtattatgggtggggaggaaatagaattgagtcaattggaaagactatccaacttaacatgaaacttgtcaccatgagatagcattagctgcccaggatgctg

SEQ ID NO: 395170 - DNA, 120 bp, Artificial Sequence
  ENSG00000145675_54 (sequence is synthesized)
tttttaaaaatctgtttatatgacattgttaaaataaagttggtcttttgacgagagggaggatgtcacggtcagttgtaactttgccttcacaaggcaactggggtggggggtgggggt

SEQ ID NO: 395171 - DNA, 120 bp, Artificial Sequence
  ENSG00000145675_55 (sequence is synthesized)
agtgtgcctccttgacatttcgttcaagttatagattcaatggagctatgtcttgttttaagttgctttaatgcattgtattagatcttcaaacagaataaaggttgttttgaaactgaa

SEQ ID NO: 395172 - DNA, 120 bp, Artificial Sequence
  ENSG00000145675_56 (sequence is synthesized)
attattgacagagatgtcagtgaagtgccagagtgaagtggcactgcctaagaacagagtgtgaaggcactctatctattaagcacaactctaagaattcttgccttaaacacaataaga

SEQ ID NO: 395173 - DNA, 120 bp, Artificial Sequence
  ENSG00000145675_57 (sequence is synthesized)
gcctcttcttatcaagctcgtggaagccattgaaaagaaaggtaaccagactgctagagggcatcagttcctttgttctacccttatttcatggctcttattatttgtctcttgtgcatt

SEQ ID NO: 395174 - DNA, 120 bp, Artificial Sequence
  ENSG00000145675_58 (sequence is synthesized)
cattaagtaaatttcctactaccagctatgtccagatactctgctggacactcaaactgtttggggctaagtactgggaaaaatgtctcagtctataatttctaactctagattatcatg

SEQ ID NO: 395175 - DNA, 120 bp, Artificial Sequence
  ENSG00000145675_59 (sequence is synthesized)
ggactcttttcttataactgagctcagccaaggaaactcttgcacaaatgtacaatactgtttggaatatggaagacctggatttagaatatgccaagacagatataaattgtggcacag

SEQ ID NO: 395176 - DNA, 120 bp, Artificial Sequence
  ENSG00000145675_60 (sequence is synthesized)
agacttgatgttttatatagaaatggacccaccaggtaatactgcagtattattgtagagagttagttaatttcgtggctttttaatttttcgaaagctactgtaaaagatcctttttgg

SEQ ID NO: 395177 - DNA, 120 bp, Artificial Sequence
  ENSG00000145675_61 (sequence is synthesized)
atttctgtttttattaatttgtttcattgataaaaattagtttgctcatggcttaaaaattaaacagattgtttgactgtctgtggaagcaagcagctcaggctgtgtgtggtaaatgct

SEQ ID NO: 395178 - DNA, 120 bp, Artificial Sequence
  ENSG00000145675_62 (sequence is synthesized)
tattcttacttgaatggatatgaattgaactccagtttttcactggtgtcttttgttaatcgagatccttccctgggtgagttatgttgtgggatattgtccctgtaattaaaatgatgc

SEQ ID NO: 395179 - DNA, 120 bp, Artificial Sequence
  ENSG00000145675_63 (sequence is synthesized)
atcttttgtgctgcttttctctgttgccagtggatgagaacagtgtagcactttgcagtgataacacttggtactttagaaagcatgtaaaatgtagcagtgattacaactcagttctct

SEQ ID NO: 395180 - DNA, 120 bp, Artificial Sequence
  ENSG00000145675_64 (sequence is synthesized)
aaatgttgagactttgcttgctctctcatattaagatattataatgaaaaaagaagttgactttccattattgttagtctttgtaaaatattcttggtagatacctgaaatcattttttg

SEQ ID NO: 395181 - DNA, 120 bp, Artificial Sequence
  ENSG00000145675_65 (sequence is synthesized)
tataagttaaaatagtaacagtgctttaaaacttatgacagaatttacctaaaaatcctagatttattttgtttcctaagtaagttgttttattccaatgttagctctccccctgccccc

SEQ ID NO: 395182 - DNA, 120 bp, Artificial Sequence
  ENSG00000145675_66 (sequence is synthesized)
atttaaggtattcaggaatactgcagtcttttatttgtcaccaattggtatatatgaatactgatttgacattgaggaagggggatatcatttttaatcagacctagtatatagagcaca

SEQ ID NO: 395183 - DNA, 120 bp, Artificial Sequence
  ENSG00000145675_67 (sequence is synthesized)
atttatccaacagaatattaacatattaaagagatttagggcacagatgagagtttcttaaagtggcttttggcagaacagtgcctgaaatactaagattagagaaacccaattgctcct

SEQ ID NO: 395184 - DNA, 120 bp, Artificial Sequence
  ENSG00000145675_68 (sequence is synthesized)
cttaaaacatactgctgtagatgagcctttttattactgcaacagagtttgtggaggacagagaccaaatttgtctttcgtaattaaataagaggaaattaaagccaactcatgttattc

SEQ ID NO: 395185 - DNA, 120 bp, Artificial Sequence
  ENSG00000145675_69 (sequence is synthesized)
ctgctactcatatgttcatagtttcttactttagatggatttgaccaggcatgaaactttaatataactagaatctagaagtacagaatgtcatgactctggatttactttgaaatttat

SEQ ID NO: 395186 - DNA, 120 bp, Artificial Sequence
  ENSG00000145675_70 (sequence is synthesized)
tcacatggccagcccaatttatttgttagtttctaaggctctctctcttttctccttttcagtttcatttctttttgagccatgctctgaaagattttttttaagaaaattatcttccat

SEQ ID NO: 395187 - DNA, 120 bp, Artificial Sequence
  ENSG00000145675_71 (sequence is synthesized)
attgcatggaattgtgaactaatgctatatatttcagttactctaactttttatttttttaaagtaaaagtattcatctaaagaaatttagttctaatgtagttgggattgcgaacaact

SEQ ID NO: 395188 - DNA, 120 bp, Artificial Sequence
  ENSG00000145675_72 (sequence is synthesized)
atctttatctaagggagacgtgcgagcgcctgggctcctttcctccccgatacagtagcgaaatccagttggcttctcaatgaggagccggcagtgagcggcggtggcccggacgcactg

SEQ ID NO: 395189 - DNA, 120 bp, Artificial Sequence
  ENSG00000145675_73 (sequence is synthesized)
ggcgtggggcggagggacgagccgagccgagccaagcggagctgggccactgtgcacgcccggagggtcctggcggcgcccccgctcctgcgcgcactctcggcgccggacacgagcact

SEQ ID NO: 395190 - DNA, 120 bp, Artificial Sequence
  ENSG00000145675_74 (sequence is synthesized)
cgagcactgcctgccgggaacaggctggggggaggtgcgggggcttggcccacttggtggaagaacagctttggggattttttttttttcattgtcggatacaggcatttcaaagggaaa

SEQ ID NO: 395191 - DNA, 120 bp, Artificial Sequence
  ENSG00000145675_75 (sequence is synthesized)
aatacctttatttttatattgtttttacaggaaagggggaaataacaaattaatcaaaatatttcatcgagatgggaaatatggcttctctgacccattaaccttcagttctgtggttga

SEQ ID NO: 395192 - DNA, 120 bp, Artificial Sequence
  ENSG00000145675_76 (sequence is synthesized)
acacactgagctttttgcatttccatttgacctgagatttctactttctcataatgcgttttctaatgagaaggacaaatgtactgtgtgcttctcccaacaactttttaaatgactcct

SEQ ID NO: 395193 - DNA, 120 bp, Artificial Sequence
  ENSG00000145675_77 (sequence is synthesized)
taagaaaacaatgccattttatgttagctttgggaagggggagtaaggttggagaaactcttttgagatcatgagtttctgtgctcatttgtcagagagattgtaatgtttggttgaaaa

SEQ ID NO: 395194 - DNA, 120 bp, Artificial Sequence
  ENSG00000145675_78 (sequence is synthesized)
aataaaaacttagtaccacagatacaccaatagtgaaagtgatatgcacctgtttgtgatgagactgcaattgctaacatttctatttaaacaaattattagctcttattagtgagctct

SEQ ID NO: 395195 - DNA, 120 bp, Artificial Sequence
  ENSG00000145675_79 (sequence is synthesized)
gaaaatgcaattcattaatttaaatctatgtgggcaggaggaatatgggcactcactgtactttccacttgattttgctgtgaacctaaaactgctctaaaaaatagcctattttaaaaa

SEQ ID NO: 395196 - DNA, 120 bp, Artificial Sequence
  ENSG00000145675_80 (sequence is synthesized)
agatggtgatagcagaagatttttctcattttaggaaaatgcatgacttgctttgtttttagaacaagtgaggaattttactgagtttggaacatcttgtaggagaaaatgtataaactc

SEQ ID NO: 395197 - DNA, 120 bp, Artificial Sequence
  ENSG00000145675_81 (sequence is synthesized)
agtgccattatccagaattttaaaaaaagaaagcttagctaaggaggactaggatttatttttactcataatgctgtgaaacaactctctgtgtccataatgatgtccctgaacatctga

SEQ ID NO: 395198 - DNA, 120 bp, Artificial Sequence
  ENSG00000145675_82 (sequence is synthesized)
aaaaagcaactcactagctatacaactttttgacagattacactgttcttgaaaaaccgtttagaagaaagcagataagagttttcttaggtgcaaaagttgattaaactttaggaagca

SEQ ID NO: 395199 - DNA, 87 bp, Artificial Sequence
  ENSG00000145675_83 (sequence is synthesized)
ggggtgcctgcggctaaagtttgggaagaaatgttggttcagagttaaggtttaagttggaaaggccagtggaggaggctccctgcc

SEQ ID NO: 395200 - DNA, 120 bp, Artificial Sequence
  ENSG00000145681_0 (sequence is synthesized)
acttgatctccagcttccaacttaagcagaacttgagagcatccgaactcctggatttcaggacaagtgaagaagattctttgggctataaagatgaagagtctacttcttctggtgctg

SEQ ID NO: 395201 - DNA, 120 bp, Artificial Sequence
  ENSG00000145681_1 (sequence is synthesized)
atttcaatctgctgggctgatcatctttcagacaactatactctggatcatgacagagctattcacatccaagcagaaaatggcccccatctacttgtggaagcagagcaagccaaggtg

SEQ ID NO: 395202 - DNA, 120 bp, Artificial Sequence
  ENSG00000145681_2 (sequence is synthesized)
ttttcacacagaggtggcaatgttacactgccatgtaaattttatcgagaccctacagcatttggctcaggaatccataaaatccgaattaagtggaccaagctaacttcggattacctc

SEQ ID NO: 395203 - DNA, 120 bp, Artificial Sequence
  ENSG00000145681_3 (sequence is synthesized)
aaggaagtggatgtttttgtttccatgggataccacaaaaaaacctatggaggctaccagggtagagtgtttctgaagggaggcagtgatagtgatgcttctctggtcatcacagacctc

SEQ ID NO: 395204 - DNA, 120 bp, Artificial Sequence
  ENSG00000145681_4 (sequence is synthesized)
actctggaagattatgggagatataagtgtgaggtgattgaaggattagaagatgatactgttgtggtagcactggacttacaaggtgtggtattcccttactttccacgactggggcgc

SEQ ID NO: 395205 - DNA, 120 bp, Artificial Sequence
  ENSG00000145681_5 (sequence is synthesized)
tacaatctcaattttcacgaggcgcagcaggcgtgtctggaccaggatgctgtgatcgcctccttcgaccagctgtacgacgcctggcggggcgggctggactggtgcaatgccggctgg

SEQ ID NO: 395206 - DNA, 120 bp, Artificial Sequence
  ENSG00000145681_6 (sequence is synthesized)
ctcagtgatggctctgtgcaatatcccatcacaaagcccagagagccctgtggggggcagaacacagtgcccggagtcaggaactacggattttgggataaagataaaagcagatatgat

SEQ ID NO: 395207 - DNA, 120 bp, Artificial Sequence
  ENSG00000145681_7 (sequence is synthesized)
gttttctgttttacatccaatttcaatggccgtttttactatctgatccaccccaccaaactgacctatgatgaagcggtgcaagcttgtctcaatgatggtgctcagattgcaaaagtg

SEQ ID NO: 395208 - DNA, 120 bp, Artificial Sequence
  ENSG00000145681_8 (sequence is synthesized)
ggccagatatttgctgcctggaaaattctcggatatgaccgctgtgatgcgggctggttggcggatggcagcgtccgctaccccatctctaggccaagaaggcgctgcagtcctactgag

SEQ ID NO: 395209 - DNA, 120 bp, Artificial Sequence
  ENSG00000145681_9 (sequence is synthesized)
gctgcagtgcgcttcgtgggtttcccagataaaaagcataagctgtatggtgtctactgcttcagagcatacaactgaatgtgcccttagagcgcatcagttttaaagtcattaagaaca

SEQ ID NO: 395210 - DNA, 120 bp, Artificial Sequence
  ENSG00000145681_10 (sequence is synthesized)
tgtgaaaggtgttttttttttccaatatgaactcatgcaagttaccaaaactgtgataacccttttttacttactgtaaagagtcattttcataaagatcaattcattgatttgtttttt

SEQ ID NO: 395211 - DNA, 120 bp, Artificial Sequence
  ENSG00000145681_11 (sequence is synthesized)
gtaaagctatcattcaatatatattataaattaatataaatttaagggaagctctatgtaaggagacttagagccaaactgtttaagctgtatcatcccaacaaagtatcctttcatgaa

SEQ ID NO: 395212 - DNA, 120 bp, Artificial Sequence
  ENSG00000145681_12 (sequence is synthesized)
cggggcatgcaatagcttaagaattgctaggattaaattaaggaaagtaaagctactcagagcagcaggttccacaagcacaaactttacacatttgtacaattttgaaatgcactacaa

SEQ ID NO: 395213 - DNA, 120 bp, Artificial Sequence
  ENSG00000145681_13 (sequence is synthesized)
taaacaaattagagcaacacatttgaaatacaggcttctttacataaactgagaggttatacaaaactcagtttcacaagggaacaatctatacctttctaaaagttaatatttcaagtc

SEQ ID NO: 395214 - DNA, 120 bp, Artificial Sequence
  ENSG00000145681_14 (sequence is synthesized)
tctaataggcagaatattttactctttaaaatcctgcctttctgaccaaaaaaaaaaaaaaaaattcatatggattccaatccatagtaacaagcacagttaaaactcctcaataatccc

SEQ ID NO: 395215 - DNA, 120 bp, Artificial Sequence
  ENSG00000145681_15 (sequence is synthesized)
atttatatgaagcatgacacataaataagcagataatatttaaccaatgaaaaagacttctaccttcttataattaaaattacacatgtctaagaggaattgttttatcttttgagtagc

SEQ ID NO: 395216 - DNA, 120 bp, Artificial Sequence
  ENSG00000145681_16 (sequence is synthesized)
tttaccgagttgtatttaaattctaagggccatttgctaagcagcatttagcatctactcagggcagttatatagataaactgctggacagaaaaattgtaaaatttagcagcttgattt

SEQ ID NO: 395217 - DNA, 120 bp, Artificial Sequence
  ENSG00000145681_17 (sequence is synthesized)
tctgttagcctatgaaatgttattgtcctataaaaataactttaaactgatttaatatttcatatttacattatatgaaaatcaattacattataaaaggaatccctaatgcagaaacaa

SEQ ID NO: 395218 - DNA, 120 bp, Artificial Sequence
  ENSG00000145681_18 (sequence is synthesized)
agatgcaactttcaaaattcttattattcctatttgtatatacacgagagaacccaaccagtgcctgtgtttggggggaaaagtcaacagtgtagttctaaaccttatcccaaacagaaa

SEQ ID NO: 395219 - DNA, 120 bp, Artificial Sequence
  ENSG00000145681_19 (sequence is synthesized)
atgtggttaatgatgtcactttccttgctggtcatcattaggcttaaattaaatgctgaagctgtcatcaaagagtttacactaaaatcttcagggctttaaataaaaggttaagtccag

SEQ ID NO: 395220 - DNA, 120 bp, Artificial Sequence
  ENSG00000145681_20 (sequence is synthesized)
gctctgttttcctatatttttatgactgctgagaccccacagggaccaatatttgtattcaaattacatttcatggtttcccattgtttcacaatgagttctaataaatgggatttacta

SEQ ID NO: 395221 - DNA, 120 bp, Artificial Sequence
  ENSG00000145681_21 (sequence is synthesized)
taataatccaagtatgacatagccggtatgctttcatgaatgtttttatgtagattttcctcccatgaacatgagtaaataaatctgtttcctgaatggattgtggttgcatttaaagct

SEQ ID NO: 395222 - DNA, 120 bp, Artificial Sequence
  ENSG00000145681_22 (sequence is synthesized)
ctgtaataattctaataaatttactctatagagttctgtgtgtggaaggtatagaacaattggaagtccatgaaaccataactataatcatatattattcagacaaaatattgtaataaa

SEQ ID NO: 395223 - DNA, 120 bp, Artificial Sequence
  ENSG00000145681_23 (sequence is synthesized)
agtaggtcctttctttcatcaaaaacatatctgaaaattttcagatgctttaatattaaaagatgacaatgttatgtatgcacatttttaagttaggttggatatgcaaactgtacaaaa

SEQ ID NO: 395224 - DNA, 120 bp, Artificial Sequence
  ENSG00000145681_24 (sequence is synthesized)
ctataaatccaaagagtttgtaaagtttaaactcaaacactggtggtataaatagaacttgcacttctaaattaaggaagatacctaaatggtctaggatgagatgatatattatttaaa

SEQ ID NO: 395225 - DNA, 120 bp, Artificial Sequence
  ENSG00000145681_25 (sequence is synthesized)
gaggggactatctcccaaataacaactttaacacctcaaatatgggggctagctcattgaaagaagtccatacttgaactattattatgtatgttccgataattttgttgaaaatacaag

SEQ ID NO: 395226 - DNA, 120 bp, Artificial Sequence
  ENSG00000145681_26 (sequence is synthesized)
tgggaacaaatttctattgaagcaaacatctaattttcagttatgtccagaactctactttataatgttaaatgtagtagtatttcttaacttttaaatacttactactataggaattgg

SEQ ID NO: 395227 - DNA, 120 bp, Artificial Sequence
  ENSG00000145681_27 (sequence is synthesized)
tgctgatcaaaatctctggagtgactgttagctgattaaaatctataccacttacacatcatttttccattcgtgtaaaaaacaaaaaatcttaacacagtgaatactgctgagcagaat

SEQ ID NO: 395228 - DNA, 120 bp, Artificial Sequence
  ENSG00000145681_28 (sequence is synthesized)
tttttcttctcattttgctcaaaggaccagaatttccatgccctttatactcatacttgaatgagtctttttaatgttctcattttgctgtttttccaccaaatgtctattttcctactt

SEQ ID NO: 395229 - DNA, 120 bp, Artificial Sequence
  ENSG00000145681_29 (sequence is synthesized)
cattccccaagatgtctcactgagcaggtctgaaaaagaaaggttattctaatacaattcctaacagaaagttggtacaacactggctaattcagaaatcgctcctcagacttagattcc

SEQ ID NO: 395230 - DNA, 120 bp, Artificial Sequence
  ENSG00000145681_30 (sequence is synthesized)
aagagtatcaaagagattagatgggaggctgggccaggaacccttgttttaatgtatttgtccataattaacactggtgaccatataaggaacaaagtatatctgcacatttcactgaga

SEQ ID NO: 395231 - DNA, 120 bp, Artificial Sequence
  ENSG00000145681_31 (sequence is synthesized)
catctacattggaaaacccaaacaaaaagaagcaattcaaataaaaagacaacataagaacgaaaataagttggtcacattaacactggaagccatctttaagtgagtgctgtcatattg

SEQ ID NO: 395232 - DNA, 120 bp, Artificial Sequence
  ENSG00000145681_32 (sequence is synthesized)
tgtcacagtaatttttagccaaatatggcgtttgtaaatttaaactttctctcatggaaagggggctggtacctgtcaaagtgttattttatgcaacaatatagtcactttttattttgg

SEQ ID NO: 395233 - DNA, 120 bp, Artificial Sequence
  ENSG00000145681_33 (sequence is synthesized)
caattagaagtagactcaaaggagattacaatttggttgctggcagccattctgggtttcttgattttagtactccaaagaatatggtggtctcatggagtagctgaccactaaggaggg

SEQ ID NO: 395234 - DNA, 120 bp, Artificial Sequence
  ENSG00000145681_34 (sequence is synthesized)
gaggattaaaagggaatcacttatcagtttttagcataggatgcattaagaaatatcaacggataactgacatcgttttgttaagaagttaactgtatcgtagctcactactgccagagc

SEQ ID NO: 395235 - DNA, 120 bp, Artificial Sequence
  ENSG00000145681_35 (sequence is synthesized)
ggcaatggatgtacaacgaaagagatgaaaaatacaaaagttattaagccacctgattaaaagaaaaccaatatttaaaggcatttaatagatatcaagtataactttgaggagaagaat

SEQ ID NO: 395236 - DNA, 120 bp, Artificial Sequence
  ENSG00000145681_36 (sequence is synthesized)
caatctgtattaccaaaaaaaaaatgttttgattttctgtaagatacaatgaactggtacattaaaagtcaattttgtgttactgcagtatcttttaattcttctgagttgtagaatctt

SEQ ID NO: 395237 - DNA, 120 bp, Artificial Sequence
  ENSG00000145681_37 (sequence is synthesized)
agctatttttctttgtgtcaaactctgtcaatacattatttccaagaaaggcatttaattcattcttgttctgatacatttgacttcaaattgtaaatacgtacaattttcatttcctag

SEQ ID NO: 395238 - DNA, 120 bp, Artificial Sequence
  ENSG00000145681_38 (sequence is synthesized)
tactcttgcaaagtcaaaaaaaaaaaaagagcatttatatggtgtcgctaaatcaactatagtattatcccaaaatatattgacttttttctctttgtatatgactcaaagcataattaa

SEQ ID NO: 395239 - DNA, 120 bp, Artificial Sequence
  ENSG00000145681_39 (sequence is synthesized)
ttttgcccaccagttcagcaatcccagaaatctattgtgttgttgattagattaacacattttaaatgctttataacttaatcatgagtgctgaattaaaaaaaggtttttcttttcata

SEQ ID NO: 395240 - DNA, 120 bp, Artificial Sequence
  ENSG00000145681_40 (sequence is synthesized)
gactgcatgaagtgcattggagagaacagaagtttctgctgctaaaaaccattaatatattatttttatttttattatgacttagtataactaggtaccacagtaaatcgatgatcataa

SEQ ID NO: 395241 - DNA, 120 bp, Artificial Sequence
  ENSG00000145681_41 (sequence is synthesized)
aacttttcattgtatgtagtacaaaatcagaattgacacatatttaaaaatcttcctatgccttctcagagtctggtgactttttaaaatatgttgaagaagattctttgggctataaag

SEQ ID NO: 395242 - DNA, 120 bp, Artificial Sequence
  ENSG00000145681_42 (sequence is synthesized)
tctagtggttaacacagtaataaagtgaaaaaccaaagtccttgcctggcatcttattcttttgtattctacagtctgcctatgattccagctttcatgtttgaaatgcatacacaatgc

SEQ ID NO: 395243 - DNA, 120 bp, Artificial Sequence
  ENSG00000145681_43 (sequence is synthesized)
ttatgtgcaaaattgaagctatttgtaactaggagaaacgtgcagtggaactgaattaacagttttcagatactgccttatgttattcaaaatcatctaaattccattatatggttattg

SEQ ID NO: 395244 - DNA, 120 bp, Artificial Sequence
  ENSG00000145681_44 (sequence is synthesized)
agaaattcagactgtgtactttttttattttgtttctaaaattatctcagtttcaaaataatggcatgttttgtaaaggacatctgctaactaaaatatatgtaattgtattctgtaaaa

SEQ ID NO: 395245 - DNA, 120 bp, Artificial Sequence
  ENSG00000145681_45 (sequence is synthesized)
gtggatccgctgactgcagagaccctacctggcactctaagttggtgcgtcagcattttaggttgaaatgaatgaaaaatcaatcaggatgactgcagtggtagcgtgcacaactctaac

SEQ ID NO: 395246 - DNA, 120 bp, Artificial Sequence
  ENSG00000145681_46 (sequence is synthesized)
ggtagcaggaattgttcaaagctgccgtcttcggctcttaaaggcagctacagtaactttctgaacagattgggttaaatatttttacagacccattctatgatgataaggcggtaataa

SEQ ID NO: 395247 - DNA, 120 bp, Artificial Sequence
  ENSG00000145681_47 (sequence is synthesized)
gttgtgcagtgcaacactccaaagggttccaaatctcacaagcctctttgtatgtgatgctctcgcagtgaagaagattctttgggctataaagatgaagagtctacttcttctggtgct

SEQ ID NO: 395248 - DNA, 120 bp, Artificial Sequence
  ENSG00000145681_48 (sequence is synthesized)
ccgaactcctggatttcaggacaagcgccccttctctgattcctgtaaacaagcagagagcacatcacaactctgtgaagaagattctttgggctataaagatgaagagtctacttcttc

SEQ ID NO: 395249 - DNA, 120 bp, Artificial Sequence
  ENSG00000145681_49 (sequence is synthesized)
aataagtgaattaggttctggagtagaggctctcctacaaggacctccaggaacagactcagagctctttaataagtatcccagggagtcaggctttcttggaaaaaacaaattagtgtg

SEQ ID NO: 395250 - DNA, 120 bp, Artificial Sequence
  ENSG00000145681_50 (sequence is synthesized)
agaagccagtactgtgcaatttcagttttaaaaatagccggtattgtcaaggctgctgtgtgcatgagagaaatagaaggtccttgttaattttcgtgtcagcttccacattaaaaccaa

SEQ ID NO: 395251 - DNA, 120 bp, Artificial Sequence
  ENSG00000145685_0 (sequence is synthesized)
ctccctctccccgagtgctagcccgggcggccgccgagcttggcgctctctcgcctcgctgcctcctcccccgcgccgcggaccctctcccctcccttgcgttgcccccctctcccgccg

SEQ ID NO: 395252 - DNA, 120 bp, Artificial Sequence
  ENSG00000145685_1 (sequence is synthesized)
cctcctcccgctctcctctcgctctcctcccgcctccttcttccaggcgcggccagcgggggcaagagcgaggtggctgcgaggaggcgtcactgaaagccctgacttggggaaggctgc

SEQ ID NO: 395253 - DNA, 120 bp, Artificial Sequence
  ENSG00000145685_2 (sequence is synthesized)
gggctcggagccggagacgccgagctggggccgggtgagttgggaatcagactcttgagttgacagctggcctatggtttctgcattttgttaagaagcacctcatgcaagcgagggacc

SEQ ID NO: 395254 - DNA, 120 bp, Artificial Sequence
  ENSG00000145685_3 (sequence is synthesized)
tgggactgctcacagccaggtggcatttttctgaagttgttcattaagacttcccagcattcctacagatataaataggtgaggccgcaggcggtgctctgggtccgggagcgctgtccc

SEQ ID NO: 395255 - DNA, 120 bp, Artificial Sequence
  ENSG00000145685_4 (sequence is synthesized)
cagcatgaacgcggccggcggcgggagtgaatgactgcagctgcgacttccttcccgggccgcccgagcctccttccccaccgactttcttgttttgattaactccgtggactcctgact

SEQ ID NO: 395256 - DNA, 120 bp, Artificial Sequence
  ENSG00000145685_5 (sequence is synthesized)
ctttcttcgcccggaacatcaatatgtgtcatgtcattgtcacctgtcgctcgatgctctggaccttgctgagtattgtggtggcttttgccgagctcattgccttcatgagtgcagact

SEQ ID NO: 395257 - DNA, 120 bp, Artificial Sequence
  ENSG00000145685_6 (sequence is synthesized)
ggctgatcgggaaagcgaggagccgcggcggcgtggagccggcgggcccgggcgggggctccccggagccctaccaccccaccctgggcatctacgcccgctgcatccggaacccagggg

SEQ ID NO: 395258 - DNA, 120 bp, Artificial Sequence
  ENSG00000145685_7 (sequence is synthesized)
tgcagcacttccagcgggacacgctgtgcgggccctacgccgagagcttcggcgagatcgccagcggcttctggcaggccacagctattttcctggctgtgggaatctttattctctgca

SEQ ID NO: 395259 - DNA, 120 bp, Artificial Sequence
  ENSG00000145685_8 (sequence is synthesized)
tggtggccttggtgtccgtcttcaccatgtgtgtacagagcatcatgaagaaaagcatcttcaatgtctgtgggctgttgcaaggaattgcaggtctattccttatcctcggtttgatac

SEQ ID NO: 395260 - DNA, 120 bp, Artificial Sequence
  ENSG00000145685_9 (sequence is synthesized)
tctaccctgctggctggggttgccagaaggccatagactactgtggacattatgcatctgcctacaaacctggagactgctccttgggctgggccttttataccgccattgggggcacag

SEQ ID NO: 395261 - DNA, 120 bp, Artificial Sequence
  ENSG00000145685_10 (sequence is synthesized)
tcctcactttcatctgtgctgtcttctctgcacaagcagaaattgcaacctctagtgacaaagtacaggaagaaattgaagaggggaaaaatctgatctgcctcctttagtttggaagag

SEQ ID NO: 395262 - DNA, 120 bp, Artificial Sequence
  ENSG00000145685_11 (sequence is synthesized)
acaatgccattttctcccttgagtaatcttgtgaaacagtccacagtttcatcatttgagtcaagtggagaactaacctttacctaccaaagccacgttccacggcccgaggcttaaaca

SEQ ID NO: 395263 - DNA, 120 bp, Artificial Sequence
  ENSG00000145685_12 (sequence is synthesized)
ggaccaatgagaggccacatccagctacgcaaagttactggacatgcggtctgcagtgcacattataaggaatggaacatgaaaatagtatataatcctagacctggagttgccaagttc

SEQ ID NO: 395264 - DNA, 120 bp, Artificial Sequence
  ENSG00000145685_13 (sequence is synthesized)
tgtcagactccatctcccccaggttcaatgaaggataataatctaaatcattagggcagcagtttctctggtaacggaagagaccgtccgccagatctgcaggctgtttctgctccaaca

SEQ ID NO: 395265 - DNA, 120 bp, Artificial Sequence
  ENSG00000145685_14 (sequence is synthesized)
ctgcttgcttgtgagcatctctgcctcagaatggggttttgggttggagttcttgttttcctctgttctttcaagttgtctccaacgaacagaaaactataaacttactggggacaggat

SEQ ID NO: 395266 - DNA, 120 bp, Artificial Sequence
  ENSG00000145685_15 (sequence is synthesized)
gtgtgctaaagggcacagcaagacactgtcttttgcttagctgaccaaaggggtcagcagggatggcgtggagtcatgctgtggaacttattctaggctgaatcctagggtaaggtggat

SEQ ID NO: 395267 - DNA, 120 bp, Artificial Sequence
  ENSG00000145685_16 (sequence is synthesized)
caactgaactgtcactccagagattttagaaatttgagtaaagaaacaataaggacctatacaatcatatgagaacaaaaatatgaaatcttgctagtgaagacgtattttttcttcttc

SEQ ID NO: 395268 - DNA, 120 bp, Artificial Sequence
  ENSG00000145685_17 (sequence is synthesized)
ccagcagccaggctagcaccagttctggcccagtctcctcttcttctggagatcacatgtttttcttctaaggttaggattgtgctttgactgcgaaaggaaacctcactgtttcctcct

SEQ ID NO: 395269 - DNA, 120 bp, Artificial Sequence
  ENSG00000145685_18 (sequence is synthesized)
tccagggactgaggtctccaagctagctgtggcttatgcagatgttcactgggaggacctgccagaatctcggcacttggggggagacctttactcccagtttggtgaccatgctgtagt

SEQ ID NO: 395270 - DNA, 120 bp, Artificial Sequence
  ENSG00000145685_19 (sequence is synthesized)
cagctctatttccaatcccgacagtagcagaatggcattctacaacaaaaagaagctagttatgggagttaagtttttgtagttactggtgttgatcctgaaagcagactgagataacat

SEQ ID NO: 395271 - DNA, 120 bp, Artificial Sequence
  ENSG00000145685_20 (sequence is synthesized)
gacaaagttaattcaaaaagaggcgctagatcaaggtcacagcactgcctacacctgtttacaaaaagaatcaaataccactatgaataaggattcaggggtttttaatctactttccat

SEQ ID NO: 395272 - DNA, 120 bp, Artificial Sequence
  ENSG00000145685_21 (sequence is synthesized)
aaattaccaatatcactgattcaggaagatagtatctcagaatgaccagagcagcacagaaacaagctactctgacattatgggagcttcaaaattgtatcatgatacagaaacactcct

SEQ ID NO: 395273 - DNA, 120 bp, Artificial Sequence
  ENSG00000145685_22 (sequence is synthesized)
tagcactttaagaaagtgagatggaactgccagatttctggaaggagaaaaagtgtaggtatttgggttcattaatctgctcacttgaggactttgttttgaaaaagtaccttctgtgga

SEQ ID NO: 395274 - DNA, 120 bp, Artificial Sequence
  ENSG00000145685_23 (sequence is synthesized)
caaggtattgtgctaccagctatacaaccctgacttcagagtttgcaaccttgccctgagtgaatcatgttaaagctgtctgagtctaaagcaccgtatcttggtgcagaacagataatt

SEQ ID NO: 395275 - DNA, 120 bp, Artificial Sequence
  ENSG00000145685_24 (sequence is synthesized)
atacagagatggaatgggacaaccgcagttttactacattctggtgtttggcctatatgagaaaccatcttctcacagattaagggctaagggcaaaaggggtgggaggtgtggaactag

SEQ ID NO: 395276 - DNA, 120 bp, Artificial Sequence
  ENSG00000145685_25 (sequence is synthesized)
ccttaatgagtttcccattcctgaaccaaaattcaaagtgagtgagatgtaaatcctgtgattttggtgaagaaaaaaacgggtatcttcatagcagcctaggaaaccttaaccatatct

SEQ ID NO: 395277 - DNA, 120 bp, Artificial Sequence
  ENSG00000145685_26 (sequence is synthesized)
ctaacaccacacagaaagaggctggaggagccactggacaaagcttctgtctctgtgtgtacatttataatgttctaaccaagtctcaaaccttgatgaaaaacacaaaatttttccata

SEQ ID NO: 395278 - DNA, 120 bp, Artificial Sequence
  ENSG00000145685_27 (sequence is synthesized)
aacttatcagaagactcacttttctttctttcttggatagagaaaccattttctgacactaggtttacaatctcagtgtccttacaagttaagtcctaagctcacaggatcctccgagca

SEQ ID NO: 395279 - DNA, 120 bp, Artificial Sequence
  ENSG00000145685_28 (sequence is synthesized)
tgtccatcacctgctctttggctaaggtggcagtgtacctctagatcaacctgggaacagtcacaagggagtgtgacttcttggccataataaactcactcgatagtgtttatgttatta

SEQ ID NO: 395280 - DNA, 120 bp, Artificial Sequence
  ENSG00000145685_29 (sequence is synthesized)
atctgaatgcaacagaagacaaaagcacaggcatgcacacacacagaaccccaaaccactaaaaactacctaaacactgacttagtaaatagtaaaaaggtaatgttgggacttttaaac

SEQ ID NO: 395281 - DNA, 120 bp, Artificial Sequence
  ENSG00000145685_30 (sequence is synthesized)
cttgaatccattagccaggcttgggatgaaaggaccatctaaaatcatgctagtctaaaccatgctcttccacacagctgtttaaaaaccactgggtatgaggaatatgctagaaagaaa

SEQ ID NO: 395282 - DNA, 120 bp, Artificial Sequence
  ENSG00000145685_31 (sequence is synthesized)
tgttaaaaatagattgttggctcacacttatttttctaataaataggaccattattactaccaggaaagtcttatttattttgcctgaaattggcttaaagaaagtctcatgacgggatg

SEQ ID NO: 395283 - DNA, 120 bp, Artificial Sequence
  ENSG00000145685_32 (sequence is synthesized)
ggatgggctgcgcttctcaatgaactctgaggcagaaatatttgccttggattctgtggattctttaaacctgtgtgctaataattcaaacaatgttgcattaattgtataagggttttt

SEQ ID NO: 395284 - DNA, 120 bp, Artificial Sequence
  ENSG00000145685_33 (sequence is synthesized)
gtatagttttcaaacatctgtggtgtaatgatctttgttaaacatatattctgtaaagtgccatagtctttttttatgtgtagcatatttaaaaatatatatgtatattatacatacaca

SEQ ID NO: 395285 - DNA, 120 bp, Artificial Sequence
  ENSG00000145685_34 (sequence is synthesized)
agtttgtgtgaaagatgtgcaataacaaaggtgtatgtatgttttgttgttttgttttggaaactggacaggagtcaaaacagggatgtttgtttctgttttggcaaggagagttccaca

SEQ ID NO: 395286 - DNA, 120 bp, Artificial Sequence
  ENSG00000145685_35 (sequence is synthesized)
tttttgccttcatggcttattcagtaacccataattttaatgctacacaaatcttatgtgaagaaaagactggtatgaaatcattttttcctgggtctaaaataatcgctagtgttatgt

SEQ ID NO: 395287 - DNA, 120 bp, Artificial Sequence
  ENSG00000145685_36 (sequence is synthesized)
caaagttaagcccgcacgccaggcccagttaatgctagtctttcatgtgaaatgtgaagctgccatgttgccttttctcttagtaggataactagtagctggtacataatcactgaggag

SEQ ID NO: 395288 - DNA, 120 bp, Artificial Sequence
  ENSG00000145685_37 (sequence is synthesized)
ctatttcttaacatgcttttatagaccatgctaatgctagaccagtatttaagggctaatctcacacctccttagctgtaagagtctggcttagaacagacctctctgtgcaataacttg

SEQ ID NO: 395289 - DNA, 120 bp, Artificial Sequence
  ENSG00000145685_38 (sequence is synthesized)
tggccactggaaatccctgggccggcatttgtattggggttgcaatgactcccaagggccaaaagagttaaaggcacgactgggatttcttctgagactgtggtgaaactccttccaagg

SEQ ID NO: 395290 - DNA, 120 bp, Artificial Sequence
  ENSG00000145685_39 (sequence is synthesized)
ctgagggggtcagtaggtgctctggagggactcggcaccacttgatattcaacagccacttgagccaaatataaaattgtatttacagctgatggactcaatttgagccttcaaacttgt

SEQ ID NO: 395291 - DNA, 120 bp, Artificial Sequence
  ENSG00000145685_40 (sequence is synthesized)
agttatcctattatattgtaaactaatacattgtctagcattgatttggttcctgtgcatatgtattttcactatgtgctcccctccccagatcttaattaaaccagattttgcaattca

SEQ ID NO: 395292 - DNA, 120 bp, Artificial Sequence
  ENSG00000145685_41 (sequence is synthesized)
acacgtgaaggaagcctttgtgggccttcctgcgcagctgactagctgaaagccatcgtgagccagcccaggagaaaccagcagaggaacagccagccgaaccctgggattgtgagaaat

SEQ ID NO: 395293 - DNA, 120 bp, Artificial Sequence
  ENSG00000145685_42 (sequence is synthesized)
atagagagggccgtggggttagaaagacttccttgtgaatcacccctcttcaaacaatgagcatctgaattgattccctctactccacccctgctacaaagtcccttgaggccatctgag

SEQ ID NO: 395294 - DNA, 120 bp, Artificial Sequence
  ENSG00000145685_43 (sequence is synthesized)
aagaacaatgggatggggtggagacactgaaatcccaaaatgccctggtagtgacatgccaagctggacaccatcacaggatgaagaccactgtgaaagttgtgatgtgtctattcctta

SEQ ID NO: 395295 - DNA, 120 bp, Artificial Sequence
  ENSG00000145685_44 (sequence is synthesized)
attatgagaaaaggaagagagaccagagctcactctccagtgtgtgaggatgcagcaaaaaggcgactgtctgtctgcaagccaggaagagggccctcatcaggaaccaaatctcctggc

SEQ ID NO: 395296 - DNA, 120 bp, Artificial Sequence
  ENSG00000145685_45 (sequence is synthesized)
accttaatcttggacttcccagccttcagaactgtgagttgggaatcagactcttgagttgacagctggcctatggtttctgcattttgttaagaagcacctcatgcaagcgagggacct

SEQ ID NO: 395297 - DNA, 120 bp, Artificial Sequence
  ENSG00000145685_46 (sequence is synthesized)
gggactgctcacagccaggagctggtattttcccctgccagttgatgatggagactgcggacacctccctttcagttggatgcggtgccctcagaaactcccagaaggcaagactccagc

SEQ ID NO: 395298 - DNA, 120 bp, Artificial Sequence
  ENSG00000145685_47 (sequence is synthesized)
caggggttctcctgaaatgtctgaagggaattgctgggggtggggcgtggagagggaagaatgtgcacttgatcgcttaaggcttctccgtatcctgtacgtgaatctttgcccttctct

SEQ ID NO: 395299 - DNA, 120 bp, Artificial Sequence
  ENSG00000145685_48 (sequence is synthesized)
acgcggatgcaagagtcctcttgctttggccacgtgctgctcctttccttcaggactgtggctaatcagaagttggctgcacttcagtgcctcttaaaagcttttttccctggctgtgtt

SEQ ID NO: 395300 - DNA, 120 bp, Artificial Sequence
  ENSG00000145685_49 (sequence is synthesized)
caggatgttgaagtgcagtgtcagaaatgatgtgagttgatgaagaagaaataaacaaacccaggcagcatgtgaggaaggcttggcagccctgctcctgtttttctttagtttggatct

SEQ ID NO: 395301 - DNA, 120 bp, Artificial Sequence
  ENSG00000145685_50 (sequence is synthesized)
gaaggaaccagatttcctcattggaaggaatggggctatgagggtccctgtgccatggagcctgagatgtgcatgccagtgggccttctggactagggcaccggttagtttaataactct

SEQ ID NO: 395302 - DNA, 120 bp, Artificial Sequence
  ENSG00000145685_51 (sequence is synthesized)
gggatgaaaatgtgtagtttatggttggcagaatggagagaagtcacctggccgcaacccgacctatatgtctatatgtaagtggagttaaaatagcatctgttcagggaggcggaacat

SEQ ID NO: 395303 - DNA, 120 bp, Artificial Sequence
  ENSG00000145685_52 (sequence is synthesized)
aagctgggagagacttcacagagcttcttgtctaagccccttaatttcagtttaggacactgaataacttggctaaagccccgtgaggccaggggctcttgtctgtcttgtttgttcacc

SEQ ID NO: 395304 - DNA, 120 bp, Artificial Sequence
  ENSG00000145685_53 (sequence is synthesized)
ttcatacctttggtgcctgcattgtattaggtacttaaacatgcatttgtttggtgaatgaatgacataaatgaagatacgacttccgactcctaatccagtgctctctctgagatattt

SEQ ID NO: 395305 - DNA, 120 bp, Artificial Sequence
  ENSG00000145685_54 (sequence is synthesized)
gtaggcagaaaagtctgtagaagtgttgccaaataacttgtatgtagttgaggctatcttgagattatatataggttagaaaatggagatgtagcaaaatcaaactggctccttaaagtt

SEQ ID NO: 395306 - DNA, 120 bp, Artificial Sequence
  ENSG00000145685_55 (sequence is synthesized)
ggtggtgaagacaggcttgttcaggtttgggggtgggtaggaggcaggactgccactttgctcagcagatggggctcctttcacattggattgtgtgtgagtggtgccctctgaagttgg

SEQ ID NO: 395307 - DNA, 120 bp, Artificial Sequence
  ENSG00000145685_56 (sequence is synthesized)
acgatggccccaatagctcagcttccccagaagaatcaagatgactgtggaaaaaataggcttgaagttgcccctttccttaccagcagctaggagcctaccctcgttttgcagcccagt

SEQ ID NO: 395308 - DNA, 120 bp, Artificial Sequence
  ENSG00000145685_57 (sequence is synthesized)
agcagctaggagcctaccctcgttttgcagcccagtccccgccttttcagagggatgtgtgacttggagctcatcagacttaccctctgtttgtagaggggtgtgtgtgtgtgtgtgtgt

SEQ ID NO: 395309 - DNA, 120 bp, Artificial Sequence
  ENSG00000145685_58 (sequence is synthesized)
ggtcacgtttggtcactgtagcaacaggagtaggatgaagtcctgcacacagggtctctgccactgtccaactccatttggagaattgcaactctgttgccatgggccccaaccaaggaa

SEQ ID NO: 395310 - DNA, 80 bp, Artificial Sequence
  ENSG00000145685_59 (sequence is synthesized)
gagaattgcaactctgttgccatgggccccaaccaaggaaaccaggtcttacagtgggctgcacttagaaaaccagggta

SEQ ID NO: 395311 - DNA, 120 bp, Artificial Sequence
  ENSG00000145685_60 (sequence is synthesized)
gtcttcctggaccaaaagggatgaaaaagagctatcatgaggaacgagctctagtagagccatgtgtgtgaaagtgtgggtgtttgtataatgatgcaagagcatttcgtagcaggtggc

SEQ ID NO: 395312 - DNA, 120 bp, Artificial Sequence
  ENSG00000145685_61 (sequence is synthesized)
cgggacggaggcggcgatggtgactgggcagcggcgcggggccggggcctgggcagggcggctcggccgcctctttctctcgctgcccccgcccctcctcctcctccctctccccgagtg

SEQ ID NO: 395313 - DNA, 120 bp, Artificial Sequence
  ENSG00000145685_62 (sequence is synthesized)
ggccatctgtgccatcttcccagtgaacttgcagacaaaaccaacagcacaatgctgatatgaagaacagatgaaatttacagatgtttgcacttttccatgtgtttattggcccccatg

SEQ ID NO: 395314 - DNA, 120 bp, Artificial Sequence
  ENSG00000145685_63 (sequence is synthesized)
gctctttcctgagtggcctgaccagccctctcccccagtctcctgggccccatagtagagggagcagaagagggtgggaaggagccccagctgggaggagacaggaaggaaaaaccagcc

SEQ ID NO: 395315 - DNA, 120 bp, Artificial Sequence
  ENSG00000145685_64 (sequence is synthesized)
tggctaccagtcctcctgttccagccttccttttccagtatgaataatcccagtttctttcatctgaactcctgaacctccttcagctcttccagtccaccagcaccctcgtgattctgg

SEQ ID NO: 395316 - DNA, 120 bp, Artificial Sequence
  ENSG00000145685_65 (sequence is synthesized)
gcttaacacaggtgagttgggaatcagactcttgagttgacagctggcctatggtttctgcattttgttaagaagcacctcatgcaagcgagggacctgggactgctcacagccaggtgg

SEQ ID NO: 395317 - DNA, 120 bp, Artificial Sequence
  ENSG00000145687_0 (sequence is synthesized)
ggcttagccgccaccgcgcgcttcggaaggccagagggagggggaggcctgtcagtctcgcgcgttgcctgggcgaagggggcggagctttggcgtggggcggccaatagtgggggtggc

SEQ ID NO: 395318 - DNA, 120 bp, Artificial Sequence
  ENSG00000145687_1 (sequence is synthesized)
tgcgtgggtcgccatggggacggggctgttcccggggaggctgtgatgggttgacaggtgcgtgacagtgggagctgctctcggcacaagcatgtacggcaaaggcaagagtaacagcag

SEQ ID NO: 395319 - DNA, 120 bp, Artificial Sequence
  ENSG00000145687_2 (sequence is synthesized)
cgccgtcccgtccgacagccaggcccgggagaagttagcactctacgtatatgaatatctgctccatgtaggagctcagaaatcagctcaaacatttttatcagagataagatgggaaaa

SEQ ID NO: 395320 - DNA, 120 bp, Artificial Sequence
  ENSG00000145687_3 (sequence is synthesized)
aaacatcacattgggggaaccaccaggattcttacattcttggtggtgtgtattttgggatctctactgtgcagctccagagagacgtgaaacatgtgaacactcaagtgaagcaaaagc

SEQ ID NO: 395321 - DNA, 120 bp, Artificial Sequence
  ENSG00000145687_4 (sequence is synthesized)
cttccatgattacagtgctgcagcagctcccagtccagtgctaggaaacattcccccaggagatggcatgccagtaggtcctgtaccaccagggttctttcagccttttatgtcacctcg

SEQ ID NO: 395322 - DNA, 120 bp, Artificial Sequence
  ENSG00000145687_5 (sequence is synthesized)
gtaccctggaggtccaaggcccccattgaggatacctaatcaggcacttggaggtgtcccaggaagtcagccattactccccagtggaatggatccaactcgacaacaaggacatccaaa

SEQ ID NO: 395323 - DNA, 120 bp, Artificial Sequence
  ENSG00000145687_6 (sequence is synthesized)
tatgggtgggccaatgcagagaatgactcctccaagaggaatggtgcccttaggaccacagaactatggaggtgcaatgagacccccactgaatgctttaggtggccctggaatgcctgg

SEQ ID NO: 395324 - DNA, 120 bp, Artificial Sequence
  ENSG00000145687_7 (sequence is synthesized)
aatgaacatgggtccaggtggtggtagaccttggccaaacccaacaaatgccaattcaataccatactcctcagcatctcctgggaattatgtaggtcctccaggaggtggagggccacc

SEQ ID NO: 395325 - DNA, 120 bp, Artificial Sequence
  ENSG00000145687_8 (sequence is synthesized)
aggaacacccatcatgcctagtccagcagattcaaccaactctggtgataacatgtatactttaatgaatgcagtacctcctggacctaacagacctaattttccaatgggtcctgggtc

SEQ ID NO: 395326 - DNA, 120 bp, Artificial Sequence
  ENSG00000145687_9 (sequence is synthesized)
agatggtcccatgggtggattaggaggaatggagtcacatcacatgaatggctctttaggctcaggagatatggacagtatttccaagaattctcccaataatatgagcctgagtaatca

SEQ ID NO: 395327 - DNA, 120 bp, Artificial Sequence
  ENSG00000145687_10 (sequence is synthesized)
accgggcactccaagggatgatggcgaaatggggggaaatttcttaaatccttttcagagtgagagttactcccctagcatgacaatgagcgtgtgatccattaccaagtctcctcatga

SEQ ID NO: 395328 - DNA, 120 bp, Artificial Sequence
  ENSG00000145687_11 (sequence is synthesized)
aaaccacagtgagtcagcccttcacagaactactacggaagaaaattattcatcacagtgtacagttaaacaaaggaatctcagtcacaccaaaccaacctttttatttcctgctctctc

SEQ ID NO: 395329 - DNA, 120 bp, Artificial Sequence
  ENSG00000145687_12 (sequence is synthesized)
ccctcttttgtgaagaaagcgggtccaaatgtgattcaaacaactgtacggagtggcatattagaattgccctaaactgaactgcaaataattatgtgtgtatgtatatgtgtgggaaag

SEQ ID NO: 395330 - DNA, 120 bp, Artificial Sequence
  ENSG00000145687_13 (sequence is synthesized)
agaatgtactgtatatgtgtatgttatacagacatatacacatacatacattgacccacaggacattgtaaaatattatcacatgacatcttaagtagaaataagtagggacttttattc

SEQ ID NO: 395331 - DNA, 120 bp, Artificial Sequence
  ENSG00000145687_14 (sequence is synthesized)
catcctttttttcacgtttacattttaattattacaagttgctcctgccccctccctgaactattttgtgctgtgtatatcactgctttatataagttattttttaaggtgaactcagat

SEQ ID NO: 395332 - DNA, 120 bp, Artificial Sequence
  ENSG00000145687_15 (sequence is synthesized)
gttatggttttgtaaatgtctgcaatcatggataggaataaaatcgcttatttgagagctttcattaaattgcgtctgatgcaagttatcctgtgaatcacaaagtgtactgtctcaaaa

SEQ ID NO: 395333 - DNA, 120 bp, Artificial Sequence
  ENSG00000145687_16 (sequence is synthesized)
aatagaagaaaatgtgtcttcgtctttatgttgaatcaaacaatttctcagttaccttcagtgaaaagtatttttttaatttttatttgagaaaaacacttcaaatcagtaaaagcttaa

SEQ ID NO: 395334 - DNA, 120 bp, Artificial Sequence
  ENSG00000145687_17 (sequence is synthesized)
ctggggcctcacacagtatatttctgcaataactgctttaaacggagttcttgatttgtttgtcttagatgatacagaaatcattaaatagcccaaatcatttagaccatagcaataaag

SEQ ID NO: 395335 - DNA, 120 bp, Artificial Sequence
  ENSG00000145687_18 (sequence is synthesized)
tgaccggggttgtcatatatttagcaacatcttttctctttaacatgatgaagcccaaaagtgataacaaaagcatttgcttgaatttgtcacttctcaccaggagtactagaggtaaat

SEQ ID NO: 395336 - DNA, 120 bp, Artificial Sequence
  ENSG00000145687_19 (sequence is synthesized)
ttttaataacatactaatgtgaaatggtatctggtttttattcagactttttgtgagcatattcttatagacactagaaataaatacatagaaggagactttgagcacaagggagaagag

SEQ ID NO: 395337 - DNA, 120 bp, Artificial Sequence
  ENSG00000145687_20 (sequence is synthesized)
agttattagcactcctgaggcctctggaatgctgcttttctatccaggtatcttgcttgctaccagcagaattgactggtattggttctcactggccagggagcctctgctctgttcctg

SEQ ID NO: 395338 - DNA, 120 bp, Artificial Sequence
  ENSG00000145687_21 (sequence is synthesized)
gaatataaggcttttattcaggagcaaatcattgatagtaactttgctttatctagccattgacttcagcaggctaaaactacattgtgtaactgactgttcaaaaaagaataagtaaat

SEQ ID NO: 395339 - DNA, 120 bp, Artificial Sequence
  ENSG00000145687_22 (sequence is synthesized)
tttttttaatctaattcccttatggaaagcaccttgctctatggcactttccagatcttttgggattttgtgcttaattatacatacatacaccaaaatcacaatagaaagatatgaaga

SEQ ID NO: 395340 - DNA, 120 bp, Artificial Sequence
  ENSG00000145687_23 (sequence is synthesized)
ctttaattttagactctgaaagataactgggtgatcctttgtgttaaaattgtgatacaaacaaccattgataaataccaactatgaatccaaactctagagactttgaaaagcattgtt

SEQ ID NO: 395341 - DNA, 120 bp, Artificial Sequence
  ENSG00000145687_24 (sequence is synthesized)
taattgcaggtaagaggaatcttctctttcctttaggcttatagtctctaaagtgaaaatttggcaggatatagtcatgcagctcataatgacattccaatcaaccacagactgcatata

SEQ ID NO: 395342 - DNA, 120 bp, Artificial Sequence
  ENSG00000145687_25 (sequence is synthesized)
cagcagtggtcctataagattataataccatatttttagcatatcttttctatgcttagatacacaaataccattgtattacagttgcctttggtattcagtacagtaacatgctgtaca

SEQ ID NO: 395343 - DNA, 78 bp, Artificial Sequence
  ENSG00000145687_26 (sequence is synthesized)
aggtgtgtaggagagacaaggacaatattgcctgacaatgcatttctcagaatgtatacttatcattaagtaacatat

SEQ ID NO: 395344 - DNA, 120 bp, Artificial Sequence
  ENSG00000145687_27 (sequence is synthesized)
tgcatttctcagaatgtatacttatcattaagtaacatatgactgtatgtactagttcctgatgacttacttctctcaaattcataatgatttagtccttgtaaaaataaagattttgcc

SEQ ID NO: 395345 - DNA, 120 bp, Artificial Sequence
  ENSG00000145687_28 (sequence is synthesized)
tgtgcctaaacagggatactaggcagaactgttgagaaaaaaaagctgaattaaatttatgttgcagatttaaactatcataaaatgagcctcagttaatcacacacagtattcaggtgc

SEQ ID NO: 395346 - DNA, 120 bp, Artificial Sequence
  ENSG00000145687_29 (sequence is synthesized)
ctaggagtgcacaccggagaacagcctcatgctgtcaagctgcagaaacctttcatgcaaattcagatgaaaaggtctttacctcaagccagggtaacctgaatgaaggtgatagtttgt

SEQ ID NO: 395347 - DNA, 120 bp, Artificial Sequence
  ENSG00000145687_30 (sequence is synthesized)
ccagacacctgactttaccaagaagaattttgactttcatattttatgacaatcatataaaaattgacagtcctttgattattaagcttaatcttataatgctagaattttcaaatattt

SEQ ID NO: 395348 - DNA, 120 bp, Artificial Sequence
  ENSG00000145687_31 (sequence is synthesized)
tgttgactcttctccattgttaccgatcttgaaattcttttcttcgccttctgagaaggtattatttcttatcacaaagaatgatgaatatgattttatctacccttattttgggggtaa

SEQ ID NO: 395349 - DNA, 120 bp, Artificial Sequence
  ENSG00000145687_32 (sequence is synthesized)
tacgagaatatgaattgcatcatgatccccattatttctaacctaaaagtaaaattcgttttttttttcaaggcagagcagtcaattgattataagtatttatttcttttttcttcttgg

SEQ ID NO: 395350 - DNA, 120 bp, Artificial Sequence
  ENSG00000145687_33 (sequence is synthesized)
agcccagattaaaaagagttattttagatttaaaaatttcctgaaatagttgaaaaattatttttgaggagaaaattgtatccaagaaacccagaatgtaaggatacttgatttttatat

SEQ ID NO: 395351 - DNA, 120 bp, Artificial Sequence
  ENSG00000145687_34 (sequence is synthesized)
ccagataattctttcatgcactgaatggaagacagtatatctgtatattaatttttgtttagattttgaatcatttaacccttatccttttttcttgtaataagactatttaatgttttt

SEQ ID NO: 395352 - DNA, 120 bp, Artificial Sequence
  ENSG00000145687_35 (sequence is synthesized)
ctcttgtgttttccatctttatcaatgcattcgtgttggtcttgatgtatactacctgttcctagtgttatttttacacgtcatctcacagtaataatatcagcaattcttgctgcattg

SEQ ID NO: 395353 - DNA, 120 bp, Artificial Sequence
  ENSG00000145687_36 (sequence is synthesized)
aaaatgaaaaagtaagcagtaggtaaaatcttgttactctgctttgcattctgcctaactcactgcatttgaaaatacatgtcaaattctttctgagggtatgtatgattcttaactacg

SEQ ID NO: 395354 - DNA, 120 bp, Artificial Sequence
  ENSG00000145687_37 (sequence is synthesized)
tgtcttacagcaaagttgcccatgggaacaaaggctgtagggtgtcattgatcttgtaatacaacacatatttgatgggtgaatcttattagcactcctttgaaaatgttccagtatgga

SEQ ID NO: 395355 - DNA, 120 bp, Artificial Sequence
  ENSG00000145687_38 (sequence is synthesized)
tgaaaatgttccagtatggagtcagttgctgataaagaggaagttcacagctaggaatccgaagttaagatttctcaattgccgcctgggcactcatgcctgtaatcccagcacttggga

SEQ ID NO: 395356 - DNA, 120 bp, Artificial Sequence
  ENSG00000145687_39 (sequence is synthesized)
caattgccaaaaagattaacaagtaaatcaattctgctcccccagccatgaaaagtgcccaaaacagccctttccctccagaataaaataaaacttccatttctatttttatgattctct

SEQ ID NO: 395357 - DNA, 120 bp, Artificial Sequence
  ENSG00000145687_40 (sequence is synthesized)
aagatatctgaactccattgcatttcatagggttattcagttagcacttctgtggtttaaaagacaacaaatgaaaataagtaagttcagtttggggcatgaagaagtcccacatctgtc

SEQ ID NO: 395358 - DNA, 120 bp, Artificial Sequence
  ENSG00000145687_41 (sequence is synthesized)
tatatcttttcttcatcatattgtccctaggaatgtatagcaaagcattcagaactgctcctttggctggggaagttttccaccgtccttaatactatgaagtcttgattacttcttccg

SEQ ID NO: 395359 - DNA, 120 bp, Artificial Sequence
  ENSG00000145687_42 (sequence is synthesized)
tggctttatccttgcctccctcccaatccctgcatcttccaggagaaataaaataccaactgaacactgttaccttctcagcccttaccattttcatctgcatatagtgtatagtactaa

SEQ ID NO: 395360 - DNA, 120 bp, Artificial Sequence
  ENSG00000145687_43 (sequence is synthesized)
gagtagttttcccaggagaaataattgcaattttcatttcttgattatcactgctaattcgaaggagtgccacaaatcatagccacttgattttgattttggaatgcattttagtgtttt

SEQ ID NO: 395361 - DNA, 84 bp, Artificial Sequence
  ENSG00000145687_44 (sequence is synthesized)
gcagtggcacaatcttggctcactgccgtctccgcctcccaggttccttacaggcatgcgtcacaggctaatttttgtattttt

SEQ ID NO: 395362 - DNA, 66 bp, Artificial Sequence
  ENSG00000145687_45 (sequence is synthesized)
ttgatcaggttttcctcttttttttttttttttttgagtcagaatcttgctctgtcacccaggctg

SEQ ID NO: 395363 - DNA, 120 bp, Artificial Sequence
  ENSG00000145687_46 (sequence is synthesized)
acaggcatgagccaccgtacctggcccaggttttcctttttttttatgtcttctgtacaatagagttggccctccatatccacaggttccacatccctgattcaatcaactcctgataaa

SEQ ID NO: 395364 - DNA, 120 bp, Artificial Sequence
  ENSG00000145687_47 (sequence is synthesized)
ttcaatcaactcctgataaaaaatattggaaaaaatttttataacaataaaaaccaataatacaacaataattacaaataatacattgtaacaatgatttccatggcatttataatacat

SEQ ID NO: 395365 - DNA, 120 bp, Artificial Sequence
  ENSG00000145687_48 (sequence is synthesized)
agtaaacgagatgatttgaagtatattggaggatgtgcataggttatactatgccgttttatataaaggacttaagcgtctgtggattttggtatctgcagaggtcctggaaccggtctc

SEQ ID NO: 395366 - DNA, 120 bp, Artificial Sequence
  ENSG00000145687_49 (sequence is synthesized)
ccttggatacggagggacaactgtagttctctgtctttgaaaacattaatcgatacaagtggccagtgaatgtatagtatgggagggagtaatccagtatgggggacaaggttgccatat

SEQ ID NO: 395367 - DNA, 120 bp, Artificial Sequence
  ENSG00000145687_50 (sequence is synthesized)
atttgccaaaagtagttgaatcttctttctgtttttccctcctggtggaataagtttattgtttgctatgaggagccagaggctgtgtttgtttaaagcaatggtacccaatcttaagca

SEQ ID NO: 395368 - DNA, 120 bp, Artificial Sequence
  ENSG00000145687_51 (sequence is synthesized)
tgtgtaaaggtctccctgggtctgtgaaccataccttgagaaataactagaaaagtaaaagaatggtgaaccactattaataatacttccattttgcatactaaatatgttgcgtgtacc

SEQ ID NO: 395369 - DNA, 120 bp, Artificial Sequence
  ENSG00000145687_52 (sequence is synthesized)
tgtgtgtgtgtgttgggaatagtaatatgaagtttgctcacaaaacactcccactgtgattcacattattttatagcacaaccaataatgattaaacataattatttcctttgactactt

SEQ ID NO: 395370 - DNA, 120 bp, Artificial Sequence
  ENSG00000145687_53 (sequence is synthesized)
ttcatttcagtggtaaaacagctgatgaaagttatttgggatggaaagagtaatacaagacatacgcagatggagtctcctgtgcgtaggtttagcacacccatgttagcttgtccacat

SEQ ID NO: 395371 - DNA, 120 bp, Artificial Sequence
  ENSG00000145687_54 (sequence is synthesized)
taggccttcttttgaaggtactgtatctaaagataagggcataagtgatcatttaattctcagccacttcactgatactacaaggtgttacacagtaattatagtggtttgatacagaca

SEQ ID NO: 395372 - DNA, 120 bp, Artificial Sequence
  ENSG00000145687_55 (sequence is synthesized)
tttgtttacaagaaactgaattggcattattaacttatttcacacaaaaaaagttagctttacccatgaactgtaattcagattgataaggtgacctacccatgaaaaagacacctgaga

SEQ ID NO: 395373 - DNA, 120 bp, Artificial Sequence
  ENSG00000145687_56 (sequence is synthesized)
cctgtttacttttttaaactatgaagtgaaatcctcagttcaataagtgtcccaaggagaatttcctctgttaaattttccctgttaacttagtataattggttttcttgaatagaagaa

SEQ ID NO: 395374 - DNA, 120 bp, Artificial Sequence
  ENSG00000145687_57 (sequence is synthesized)
tttaatgtgaatatttttgctgtcttcatctttaaaaattaaatacagtactatatatagatattaaaattttaaagtgggactaggtgtttttatgtatacaattacagtttgtctcct

SEQ ID NO: 395375 - DNA, 120 bp, Artificial Sequence
  ENSG00000145687_58 (sequence is synthesized)
acaattacagtttgtctcctctctttgcaaatttactggctattatcagaataaaggttggactcattttgcttatcccagtcattaaaatgttgtgatctgtttctaacatatttagca

SEQ ID NO: 395376 - DNA, 120 bp, Artificial Sequence
  ENSG00000145687_59 (sequence is synthesized)
tttcatttttaaaatgagatgtgccattatcataacaaaggcaactattaatgttcctagaaaaaatgatgtaaaggacttactcctagtcaatattaacacttaatcccactttctttt

SEQ ID NO: 395377 - DNA, 120 bp, Artificial Sequence
  ENSG00000145687_60 (sequence is synthesized)
ttccaccaaatggcctcagtacattgccaagagagtgaaatttggattcctcacagtactcagaacacaatatgatatttgtcagctaactttccatcatgtcttggtaaaattgctcag

SEQ ID NO: 395378 - DNA, 120 bp, Artificial Sequence
  ENSG00000145687_61 (sequence is synthesized)
ttaaatataattggccatctacttattaaaaaacaattcaaataatctgtacagttaccataatttgacaacaaattactttaaatttagcaccatcttagaaatcttcttaatataaac

SEQ ID NO: 395379 - DNA, 120 bp, Artificial Sequence
  ENSG00000145687_62 (sequence is synthesized)
tactgattgaaatgtgtttatactttctatcatatttcaaactgttttactttccttgcattaagacaattaaaacacaaactacatgttagaatgaataatttaaaggacatgctgctg

SEQ ID NO: 395380 - DNA, 120 bp, Artificial Sequence
  ENSG00000145687_63 (sequence is synthesized)
tttcagcataaaaaatggtaaagtctttataaatagaatacttatgatagccattaacgtattgaattgtttaattaacctagttgtgattttccgaatttaagacgttttcttactaca

SEQ ID NO: 395381 - DNA, 120 bp, Artificial Sequence
  ENSG00000145687_64 (sequence is synthesized)
tgtgttaaattgttacctataatatcttcctggaaaaatagaagtatttgtaaggtttttataaatgcacaatttatgtataaatataattggaatctgggatgactcttagtaatctac

SEQ ID NO: 395382 - DNA, 120 bp, Artificial Sequence
  ENSG00000145687_65 (sequence is synthesized)
tattcttaattcaacgatggccaccagctacctgacacattttgtaaatttagcatctgtgtatgtgtgttcgtgtatgtgtgtgtgcgtgcatgtgcacattactgcatttattctcaa

SEQ ID NO: 395383 - DNA, 120 bp, Artificial Sequence
  ENSG00000145687_66 (sequence is synthesized)
atggatttataatttagtgtttttgtacaagtacttgagctattcatgtaatgggataagttgccataaagatgtacataaatgacccttaatttggcacgttttcacatttaatttttt

SEQ ID NO: 395384 - DNA, 120 bp, Artificial Sequence
  ENSG00000145687_67 (sequence is synthesized)
aaaatacagcttttcatatacagttcctaccctttcatttctagcctgtacttcattacttgttgaaaaagtcaagtttgtatgaagccagcataaacatcaaaatataactaatgtgga

SEQ ID NO: 395385 - DNA, 120 bp, Artificial Sequence
  ENSG00000145687_68 (sequence is synthesized)
tgggccaatgcagagaatgactcctccaagaggaatggtgcccttaggaccacagtctgacccttggttatcattacagaactatggaggtgcaatgagacccccactgaatgctttagg

SEQ ID NO: 395386 - DNA, 120 bp, Artificial Sequence
  ENSG00000145687_69 (sequence is synthesized)
ggggaaccaccaggattcttacattcttggtggtggtaagtatcctttattccatttttactggcttgatgatgcatttcaataggcctgtactatacctgtttatgatttcatgcttcc

SEQ ID NO: 395387 - DNA, 120 bp, Artificial Sequence
  ENSG00000145687_70 (sequence is synthesized)
tcttaaaaaatacactggctcatctattcttttgttttggtacttaagaaattgtttggtctcttttttcttgaaaagtaggttcataactttaaatgtgaaatagaaaggggcatttga

SEQ ID NO: 395388 - DNA, 120 bp, Artificial Sequence
  ENSG00000145687_71 (sequence is synthesized)
gtcttgttaaagcttaggataaagcgtaggcctaattctaagctattaaagaaatttcttatctttaagcatgtctgatttgtgaaatttcagattttatgaaaattaaatatatagtaa

SEQ ID NO: 395389 - DNA, 120 bp, Artificial Sequence
  ENSG00000145687_72 (sequence is synthesized)
acagacactctccgcccggggagcgccgggggtgggctggcagggggaggggtgccgcgatgggggcgtgtggtgcggggagctgcgctttcccgggaggttagcactctacgtatatga

SEQ ID NO: 395390 - DNA, 120 bp, Artificial Sequence
  ENSG00000145687_73 (sequence is synthesized)
gtgctggaagaagctggcttttagttcaaacaggagaattacattattctaattgtatactcttactctaatctttttctttcggaattaagccaggatagtccaccagctttcactaat

SEQ ID NO: 395391 - DNA, 120 bp, Artificial Sequence
  ENSG00000145687_74 (sequence is synthesized)
aagtaaaaagactatttttaaaatttgtatattggaaacttaaggaaataaaactgaaaagcaactgaatctgaattttaagagatattatatattacatatacacacatacacacacat

SEQ ID NO: 395392 - DNA, 120 bp, Artificial Sequence
  ENSG00000145687_75 (sequence is synthesized)
acatagaattgcttgaagtaaaaaagtatcttttttaaaaagaaaaactttactataattttttaaatttctaataatccttttacctgaattattgaagtgattcctcatacctaattt

SEQ ID NO: 395393 - DNA, 120 bp, Artificial Sequence
  ENSG00000145687_76 (sequence is synthesized)
tagagagaggtatctgtatgcaaaccatctttgatcattactttgtgatgaattgggtatagactctaaagaaatattttaattaagtaatattttgtttcagattcaaccaactctggt

SEQ ID NO: 395394 - DNA, 120 bp, Artificial Sequence
  ENSG00000145687_77 (sequence is synthesized)
aaatgttcagaggtggtggctagctggaggggaaaaaaagaacgcataagaagaaaatcagtgagcatttcactctccatggaaatagtattttattaacatagtgaaaagcacacactg

SEQ ID NO: 395395 - DNA, 120 bp, Artificial Sequence
  ENSG00000145687_78 (sequence is synthesized)
gcgagtcgctgtcggtcgctcagccagaaggtcgagggaaccgcgcgggtgtccctcgccagccggccctctgggaacagggcgggggcgacaccccagggagtagggctgaggaccgca

SEQ ID NO: 395396 - DNA, 76 bp, Artificial Sequence
  ENSG00000145687_79 (sequence is synthesized)
caattgtattttgggatctctactgtgcagctccagagagacgtgaaacatgtgaacactcaagtgaagcaaaagc

SEQ ID NO: 395397 - DNA, 120 bp, Artificial Sequence
  ENSG00000145687_80 (sequence is synthesized)
gatatctctatatatgttatatatacatttttaaatttttaattgggtagggtatataaaatggtctttctaaaatttcacatttaggaatctatgataacaacagttttcttcatgctt

SEQ ID NO: 395398 - DNA, 120 bp, Artificial Sequence
  ENSG00000145687_81 (sequence is synthesized)
caacagttttcttcatgcttccataaaaaaaaaacgattgggaactaaggatagaactccttgcattttccatcagatggtactgattcactatactgtataaaagaagaggaatttttt

SEQ ID NO: 395399 - DNA, 120 bp, Artificial Sequence
  ENSG00000145687_82 (sequence is synthesized)
cagatttaaaaactcaggagctatatgctggaaaatacatatagtatacttcacttatttaaattaaaggagtgtttaatttataaatgaaatcttacctaataaaggctttctttttat

SEQ ID NO: 395400 - DNA, 120 bp, Artificial Sequence
  ENSG00000145687_83 (sequence is synthesized)
taacagcagcgccgtcccgtccgacagccaggcccgggagaaaattcatctgtgccttattccagttcactcttgtaagggtgatgcttgtgatcccctcagccctcatgtattcattcg

SEQ ID NO: 395401 - DNA, 120 bp, Artificial Sequence
  ENSG00000145692_0 (sequence is synthesized)
agctcggggctgcgcagcgggaaggctcgcctagtcggtccgcatccgtgtcgaccacctgtctggacaccacgaagatgccacccgttgggggcaaaaaggccaagaagggcatcctag

SEQ ID NO: 395402 - DNA, 120 bp, Artificial Sequence
  ENSG00000145692_1 (sequence is synthesized)
aacgtttaaatgctggagagattgtgattggagatggagggtttgtctttgcactggagaagaggggctacgtaaaggcaggaccctggactcctgaagctgctgtggagcacccagaag

SEQ ID NO: 395403 - DNA, 120 bp, Artificial Sequence
  ENSG00000145692_2 (sequence is synthesized)
cagttcgccagcttcatcgagagttcctcagagctggctcaaacgtcatgcagaccttcaccttctatgcgagtgaagacaagctggagaacaggggcaactatgtcttagagaagatat

SEQ ID NO: 395404 - DNA, 120 bp, Artificial Sequence
  ENSG00000145692_3 (sequence is synthesized)
ctgggcaggaagtcaatgaagctgcttgcgacatcgcccgacaagtggctgatgaaggagatgctttggtagcaggaggagtgagtcagacaccttcataccttagctgcaagagtgaaa

SEQ ID NO: 395405 - DNA, 120 bp, Artificial Sequence
  ENSG00000145692_4 (sequence is synthesized)
ctgaagtcaaaaaagtatttctgcaacagttagaggtctttatgaagaagaacgtggacttcttgattgcagagtattttgaacacgttgaagaagctgtgtgggcagttgaaaccttga

SEQ ID NO: 395406 - DNA, 120 bp, Artificial Sequence
  ENSG00000145692_5 (sequence is synthesized)
tagcatccggtaaacctgtggcagcaaccatgtgcattggcccagaaggagatttgcatggcgtgccccccggcgagtgtgcagtgcgcctggtgaaagcaggagcatccatcattggtg

SEQ ID NO: 395407 - DNA, 120 bp, Artificial Sequence
  ENSG00000145692_6 (sequence is synthesized)
tgaactgccactttgaccccaccattagtttaaaaacagtgaagctcatgaaggagggcttggaggctgcccgactgaaagctcacctgatgagccagcccttggcttaccacactcctg

SEQ ID NO: 395408 - DNA, 120 bp, Artificial Sequence
  ENSG00000145692_7 (sequence is synthesized)
actgcaacaagcagggattcatcgatctcccagaattcccatttggactggaacccagagttgccaccagatgggatattcaaaaatacgccagagaggcctacaacctgggggtcaggt

SEQ ID NO: 395409 - DNA, 120 bp, Artificial Sequence
  ENSG00000145692_8 (sequence is synthesized)
acattggcgggtgctgtggatttgagccctaccacatcagggcaattgcagaggagctggccccagaaaggggctttttgccaccagcttcagaaaaacatggcagctggggaagtggtt

SEQ ID NO: 395410 - DNA, 120 bp, Artificial Sequence
  ENSG00000145692_9 (sequence is synthesized)
tggacatgcacaccaaaccctgggttagagcaagggccaggaaggaatactgggagaatcttcggatagcctcaggccggccatacaacccttcaatgtcaaagccagatggctggggag

SEQ ID NO: 395411 - DNA, 120 bp, Artificial Sequence
  ENSG00000145692_10 (sequence is synthesized)
tgaaaaacaaaaattcaaatcacagtagcctcgatagaagctatttttgatgaatttctaggtgtttgggtcacagttcctacaaatacggaaaagggggttaaaaagcagtgctttcat

SEQ ID NO: 395412 - DNA, 120 bp, Artificial Sequence
  ENSG00000145692_11 (sequence is synthesized)
gaatgccatcctacacatattattgctattacctgaacaaaatagaattacaaatagcacttgataattttaaagtatgttttagaaattttcttaggagcaaaataagtacaaagtaaa

SEQ ID NO: 395413 - DNA, 120 bp, Artificial Sequence
  ENSG00000145692_12 (sequence is synthesized)
tcttgaacaggttcactaagcacccaccctgtgaaaagtattatggaaatcactgctgcacaggaaaagtaattcagatgttaatgccacttgaagaagttggtaggctagcaaagagga

SEQ ID NO: 395414 - DNA, 120 bp, Artificial Sequence
  ENSG00000145692_13 (sequence is synthesized)
tgagacatgaactgtcataaaggactcagcaaccagccagggacagataaagcgctatggaaaggggcttccaagttcttttgaacatgacccttagtaacaaacacaatttatataatg

SEQ ID NO: 395415 - DNA, 120 bp, Artificial Sequence
  ENSG00000145692_14 (sequence is synthesized)
acccagcaaaacacatcacatcttactgtcgaaattaaatgtgtgatccatcctagtattttctgttccattccttttcattctatttcatttataaaacatgctagttgagacttttca

SEQ ID NO: 395416 - DNA, 120 bp, Artificial Sequence
  ENSG00000145692_15 (sequence is synthesized)
aatggatttttatgacccactactgggtttggatccacagtttgaaaaatattgctacaagacacttaaggagaccatcctgtttaagtttattcttataagtaggtcagtcatatgaga

SEQ ID NO: 395417 - DNA, 120 bp, Artificial Sequence
  ENSG00000145692_16 (sequence is synthesized)
cctgatcaataaatatccaatacccagagtcctgctctcagagttcttctgtttcgtgacccacttttctaccagtaaaagacatagaccaatggggaggaggggaggagagatggatat

SEQ ID NO: 395418 - DNA, 120 bp, Artificial Sequence
  ENSG00000145692_17 (sequence is synthesized)
ttcagccctctccatcctagtcaacactggatccacctagtgcctctgggccataaggctgagcagagtgagcttgtattagttggtagcttttaaaaaatataataagaaaaaagtaga

SEQ ID NO: 395419 - DNA, 120 bp, Artificial Sequence
  ENSG00000145692_18 (sequence is synthesized)
gattctccaaactctagcctggtttcctagattgagaactatgatatttttctctgataatttaatatctactctcctacaaaagctcaagcctgaagatacaagactattagaagaaac

SEQ ID NO: 395420 - DNA, 120 bp, Artificial Sequence
  ENSG00000145692_19 (sequence is synthesized)
atgactaccctcagtgtattagaaaagaggtcatgcagctttctaaacattattgaattgtttgagctgttttgaaattgtaattcttttcagctattaaaaagaagagcaatgagacta

SEQ ID NO: 395421 - DNA, 120 bp, Artificial Sequence
  ENSG00000145692_20 (sequence is synthesized)
taataatacaaaaatgagaggcgtgaataacaaccttaggttttatttagctggaatccccaaaattaacaaagaggcatttagcgaagcagatgaagaagaggtatttaatgattaatg

SEQ ID NO: 395422 - DNA, 88 bp, Artificial Sequence
  ENSG00000145692_21 (sequence is synthesized)
ggaccctggactcctgaagctgctgtggagcacccagaagcaggttggtgcagagctctattgtaagttctcataaaggagccactca

SEQ ID NO: 395423 - DNA, 73 bp, Artificial Sequence
  ENSG00000145692_22 (sequence is synthesized)
cccaggagttcaagaccagcctgggcacatagggagacctagtctctcagaagttttttaaaaattagctgga

SEQ ID NO: 395424 - DNA, 120 bp, Artificial Sequence
  ENSG00000145692_23 (sequence is synthesized)
atctgcagcgcttttgtaatttagactgagtggtagctagaattgatggaaacccctgaagagtcttcctgcaagctggacttcacctgcaacatttttatatatctcatgcctgggcct

SEQ ID NO: 395425 - DNA, 120 bp, Artificial Sequence
  ENSG00000145692_24 (sequence is synthesized)
gactttttcatgttctgggcaaaaagaaaggagtggttatgctacaggcccacaatcccctgtccaaaccacattttggggtcaaacatatcttggaatccaggaatctggggatgttag

SEQ ID NO: 395426 - DNA, 120 bp, Artificial Sequence
  ENSG00000145692_25 (sequence is synthesized)
cacaccaaaccctgggttagagcaaggtaagcatctttttactaacccaaactaatttagattatgaatatgttcaagtgaggccatttagaagactgcagcaaatttgttgtgtgatga

SEQ ID NO: 395427 - DNA, 120 bp, Artificial Sequence
  ENSG00000145692_26 (sequence is synthesized)
tgaagaatcagtcatccccaaattctctcccagagatgtttacaaagcatccttattaggtgatttctggagattgttttaagaatatagaacgtatttgacctgattttggattttgaa

SEQ ID NO: 395428 - DNA, 120 bp, Artificial Sequence
  ENSG00000145700_0 (sequence is synthesized)
agactgctaccccgccgcgctcgcggccgcctgcgtcctcctcagcagccctgcgacaagtcccggctcctgctgcgattatattatttttatttttaattcacaatttcccctggccct

SEQ ID NO: 395429 - DNA, 120 bp, Artificial Sequence
  ENSG00000145700_1 (sequence is synthesized)
caaagcgtttttttgtttgcgggcaagagggagttagaggagggtaaaaaagactttgaatgtgaggcaaagatggaggaaggcgtccaggccccagactgggacagtgatgaaactgtg

SEQ ID NO: 395430 - DNA, 120 bp, Artificial Sequence
  ENSG00000145700_2 (sequence is synthesized)
atagagggttcagtgacggagagcgacctggaagaaaaggagctgccctggagaaggttgctgtttgatcaagacgcatctcttaaatctgagttcagtctgcatcctgatacaagagga

SEQ ID NO: 395431 - DNA, 120 bp, Artificial Sequence
  ENSG00000145700_3 (sequence is synthesized)
atgtgcaaaggcatgccttctcctgagattcaacttggatttaagctcagagaggatctgcaagagcaaatgaataaaaataagatgatgcctgttcttagcgaggatacaatattacag

SEQ ID NO: 395432 - DNA, 120 bp, Artificial Sequence
  ENSG00000145700_4 (sequence is synthesized)
tctcaagatgaaacagaacgaaatcaagctctgttacagactagaaaaaactgttcaatgttcattgggtcgtttcgccagtctggactttcattgaaccaccaaaatattgaagggcca

SEQ ID NO: 395433 - DNA, 120 bp, Artificial Sequence
  ENSG00000145700_5 (sequence is synthesized)
gaggctgaaagtcctgaagttttgccacacatagaaaaggaactaagtgaaggcagagattctcctgaagttagccttctctcaggcactgctattacagtatctgatacagttgctgta

SEQ ID NO: 395434 - DNA, 120 bp, Artificial Sequence
  ENSG00000145700_6 (sequence is synthesized)
aaggagacatcattagtagagccagagaagattttagcagcaccaaatacattttttgagcctagaaaggaagtcacaatgaccatgacttctgaagaaactaaggatgaagaaagctct

SEQ ID NO: 395435 - DNA, 120 bp, Artificial Sequence
  ENSG00000145700_7 (sequence is synthesized)
cttgaaacctttgtgtctgccttagaaagtttacttacatcaccagaaagcacccaggaggaaagattgtttgaattagtaagtgattttgatcgtaaagaattgatgaacccattgagt

SEQ ID NO: 395436 - DNA, 120 bp, Artificial Sequence
  ENSG00000145700_8 (sequence is synthesized)
gactctcttagttccatatcaatacctttgaattcctggtcggcatgtcatagagatttactagaagatgcaaaagatgatgcattgccagctgagttattggaagccctgaacacattg

SEQ ID NO: 395437 - DNA, 120 bp, Artificial Sequence
  ENSG00000145700_9 (sequence is synthesized)
tcagaagccaaggtggaaaccatctgtcacagaaaagagggaggtagcagtctcattgccagaaatgaatgtttagaagtggagttcaatacgtctcagaccaatgaagattgtacacaa

SEQ ID NO: 395438 - DNA, 120 bp, Artificial Sequence
  ENSG00000145700_10 (sequence is synthesized)
atagcagagactctgcaagacccaaatccatctggattgcaaactttggctcatcaaaatatcacttcttgtgagccactaagtaataagagaaattcaaattcagtgacaaatagctct

SEQ ID NO: 395439 - DNA, 120 bp, Artificial Sequence
  ENSG00000145700_11 (sequence is synthesized)
gatcaggaaactgcgtgtgtgttgaggagatcatccagactagaaaaactgaaagtaagcagagatgcaaagtactcagatcacatgtataagatgccagaaaagattttaccaaaaatc

SEQ ID NO: 395440 - DNA, 120 bp, Artificial Sequence
  ENSG00000145700_12 (sequence is synthesized)
cttggctgtgaggacctaacaaataataactcttcagctcagaatttcagaatgcaggatccggctttaatgattgatggtaaagagaagaatatgcattcagcaaggttcaagaatgga

SEQ ID NO: 395441 - DNA, 120 bp, Artificial Sequence
  ENSG00000145700_13 (sequence is synthesized)
aaacagatcaggaaaaatgaacaattttcaggaaaaaaagaaaaaatgaaggtgaacaaaatatctcttcatagcattaaccggagaaacatttttggagagaacttagtatataaggct

SEQ ID NO: 395442 - DNA, 120 bp, Artificial Sequence
  ENSG00000145700_14 (sequence is synthesized)
gctctacacgatgatgctgatcttgttcatcattgtataaaaaaaggtggaaatgttaatcagccaagttatgctggttggacagcacttcatgaagctagtgtaggaggattttatcgg

SEQ ID NO: 395443 - DNA, 120 bp, Artificial Sequence
  ENSG00000145700_15 (sequence is synthesized)
acagcaagtgaactattaaaaggtggagcagatgtaaatatcaaaggattataccagattactcccctacatgatgcagtgatgaatggacattataaggtggcagagttacttcttctg

SEQ ID NO: 395444 - DNA, 120 bp, Artificial Sequence
  ENSG00000145700_16 (sequence is synthesized)
aatggagctgatccattatttagaaatgatgatggaaaatgtgctttggatgaggccaaggatttatgtatgaagcgtctccttgagagatatatccctaaacatcaaaaatgccttaca

SEQ ID NO: 395445 - DNA, 120 bp, Artificial Sequence
  ENSG00000145700_17 (sequence is synthesized)
tcagctcaaaggagtagcattgacccactagacatagaggatgtgtaccaacacaagaaaccaaagttcagttctaaaagtcacatttggcatgtttataatgaaaattccaacagacag

SEQ ID NO: 395446 - DNA, 120 bp, Artificial Sequence
  ENSG00000145700_18 (sequence is synthesized)
aagctggaacatgtaaaagtcaataaaggaagcaaagcgagtttatttataaataaagaagatgtatatgaatattaccaaaaagatcccaaaaacacaaaatttggtaaatccaagcat

SEQ ID NO: 395447 - DNA, 120 bp, Artificial Sequence
  ENSG00000145700_19 (sequence is synthesized)
aaacaatcaactcttgaccagatatactctacaggactcagaaagggcaatctccataacgtcaaagatcccaacacaaacgtaccaaaaggtataggaagaagaaaaacacaacataaa

SEQ ID NO: 395448 - DNA, 120 bp, Artificial Sequence
  ENSG00000145700_20 (sequence is synthesized)
aggacccaagtagatgatgtagactgtaatccaagaaagatactagctgtctctccttccaggagaataaacagattggttacctatcagcagcatattccagaaactcataatgacctt

SEQ ID NO: 395449 - DNA, 120 bp, Artificial Sequence
  ENSG00000145700_21 (sequence is synthesized)
ccagaagaattgtgtgaaccttccagcttaactctgtcaagcctgagaaatggattagatagcagtactgaggcttgttcagtttccaaagagaaacacatccagaacctggatttatca

SEQ ID NO: 395450 - DNA, 120 bp, Artificial Sequence
  ENSG00000145700_22 (sequence is synthesized)
gatagtcaagaagttcaatgcttggaattagaatctgttgaccaaactgaagctgtttctttcccagggcttttattacataaagaaatcaagttaccagttgttactacagataagcag

SEQ ID NO: 395451 - DNA, 120 bp, Artificial Sequence
  ENSG00000145700_23 (sequence is synthesized)
cctcacactctccaggaacaacaccatgtactttataaatctcatgaaaacagtaacttggtcccaaaagatgagagatttaacaaatgggaaaattctttcctatcctttgtaaaggaa

SEQ ID NO: 395452 - DNA, 120 bp, Artificial Sequence
  ENSG00000145700_24 (sequence is synthesized)
aattctgataatgatgatgatgatgattgctctacctctgagaaggctataacatctaaaaaggtgttgtgttctacaggtggcaaaaaacactataattttaaggagaatttaacaaat

SEQ ID NO: 395453 - DNA, 120 bp, Artificial Sequence
  ENSG00000145700_25 (sequence is synthesized)
gaagatcatctttcacaggaaaatgagttaaaagcagtcagcctaaccacacttccagaacaggaagctgttaatttttcttattcagataatgcagttatttctgaacatgttgcaaat

SEQ ID NO: 395454 - DNA, 120 bp, Artificial Sequence
  ENSG00000145700_26 (sequence is synthesized)
tatgaacaatgcatatttggaccttcttttgatcactcaaatggcaatcctgagcaaaattccctggcttgtatgagaacacttttgacacatgaggcttcaaagttgactaatcatgtg

SEQ ID NO: 395455 - DNA, 120 bp, Artificial Sequence
  ENSG00000145700_27 (sequence is synthesized)
gagctattcaaaaagccacaggattatattcccagagcaccaacttttttaatgaatcaaacagatacacatattgtggaaaagatggcaaagaattgtgacactgagaggaattacatt

SEQ ID NO: 395456 - DNA, 120 bp, Artificial Sequence
  ENSG00000145700_28 (sequence is synthesized)
gacagagaccaaaaaataatttattcaaatgagcctttatccatagttgctcattctcaagtaatagaaacaactaaagttgaaaaaaggagacaaaaccatctagaaagtgagactata

SEQ ID NO: 395457 - DNA, 120 bp, Artificial Sequence
  ENSG00000145700_29 (sequence is synthesized)
cacaatatagattctcattccactgacaatatgagtaaagaattggccaacatctcaaaacttagtcaaagagaaaagaaggaaatttctcacaaaccaggaatgaaagcaggtaggatc

SEQ ID NO: 395458 - DNA, 120 bp, Artificial Sequence
  ENSG00000145700_30 (sequence is synthesized)
aacaagaggaatgccagaggggaaagccagcttcatttagctgtcagaagaggaaatctgcccctagtgaaagccctgatagaatctggagcagatgtgaatctaaatgataatgcaggt

SEQ ID NO: 395459 - DNA, 120 bp, Artificial Sequence
  ENSG00000145700_31 (sequence is synthesized)
tggacaccacttcatgaggcatctaatgaaggatctattgatataattgtagagttattaaaagctggtgctaaggttaattgtgaaaatatagatggaattctgcccttacatgatgct

SEQ ID NO: 395460 - DNA, 120 bp, Artificial Sequence
  ENSG00000145700_32 (sequence is synthesized)
gttgcaaacaatcatttaaaggcagctgagattctactacaaaatggagcaaaccctaatcaaaaagatcaaaaacagaagagtgctttggatgaagcagatgatgaaaaaatgaaagaa

SEQ ID NO: 395461 - DNA, 120 bp, Artificial Sequence
  ENSG00000145700_33 (sequence is synthesized)
ttactaagatcttatggtgctattgagactgttaatagagatgagagtgatgctatagtcaatgaaaaaattcctgctgtccggtctaaaagacataaacagtgtttttgtgatgatggc

SEQ ID NO: 395462 - DNA, 120 bp, Artificial Sequence
  ENSG00000145700_34 (sequence is synthesized)
aaaactattgactcatcttccctttcacaccaagaaagatcaagagaaagcctttctgtgcatcagaccctcagtgccattctacaagatatagaagaaaaacaagaatatttattagag

SEQ ID NO: 395463 - DNA, 120 bp, Artificial Sequence
  ENSG00000145700_35 (sequence is synthesized)
tttgaaataagaaaccctgaagatgcagaacaatacattgaaaagatgttaaagataaaaaagattatggataatgtgcttgccaagcagaaagcagaaagggatgatctggctaaaaaa

SEQ ID NO: 395464 - DNA, 120 bp, Artificial Sequence
  ENSG00000145700_36 (sequence is synthesized)
tacagggtatccatagagtcatttaagcatggagccctgagagaacaattggccaacttggctgcaagacagaagagccttttagttgtggcaaaaaaacagaaaaaaataagcctgaaa

SEQ ID NO: 395465 - DNA, 120 bp, Artificial Sequence
  ENSG00000145700_37 (sequence is synthesized)
attcaaaactgtaggaatgttacatcattgccttgtcttagtttaaggaagctcccacccagatcagaaatctctagtgaaaaagacagccaagagctcactagtctggaaaatttagag

SEQ ID NO: 395466 - DNA, 120 bp, Artificial Sequence
  ENSG00000145700_38 (sequence is synthesized)
catccccaatcaggttcactttctcctgtttctggaagcatgcaggaaacacaattgtctctggaaacttggaactacagccaaaataccaacatttgtctaaattcagaggcagtgaga

SEQ ID NO: 395467 - DNA, 120 bp, Artificial Sequence
  ENSG00000145700_39 (sequence is synthesized)
aggggagaattttctggaaatgatatgaattctaaacaaaatggcagtgattgtaccttggatggttttccaaaatccagacattcagatggcacagagaagaataaattaccatcccaa

SEQ ID NO: 395468 - DNA, 120 bp, Artificial Sequence
  ENSG00000145700_40 (sequence is synthesized)
cctgttgcttttattggtcaaacagaatattcacagaaagagaatgatcttacagaagctacagacaaagaccatgaattctatgtttcttccccagtaatcggcaaattaaatatttca

SEQ ID NO: 395469 - DNA, 120 bp, Artificial Sequence
  ENSG00000145700_41 (sequence is synthesized)
gaaactgcaagtgtccttgccgaaaatgctgcccatccatcaaatattatttgtgatcaggacctttccaattatgatcccaaaagaggaaacagaaaaacaagttcccagcaatcacct

SEQ ID NO: 395470 - DNA, 120 bp, Artificial Sequence
  ENSG00000145700_42 (sequence is synthesized)
acaggggcatcagaatctctggcacatcaagggattgctgtcttaggcagtgatacagtgcatcagatgaaaccatatcttaaaaaatcagtttctgttgttccatgtgcagatgacagt

SEQ ID NO: 395471 - DNA, 120 bp, Artificial Sequence
  ENSG00000145700_43 (sequence is synthesized)
cagatctcctcttcctctggatctgggcaacaagatacaataaaaaaggctttaaactacagtacagctcctaaaaagaaatgtattcagataaaagatttgatattactaggaagaatt

SEQ ID NO: 395472 - DNA, 120 bp, Artificial Sequence
  ENSG00000145700_44 (sequence is synthesized)
aacccaggaaataacattctggaattcaaaacacaggagactacccacaaagccagtattttattgaatggtaaacttaaggtagaaagtggtcagatttataaaaacccagtcacctgg

SEQ ID NO: 395473 - DNA, 120 bp, Artificial Sequence
  ENSG00000145700_45 (sequence is synthesized)
ctcaaggatcttctgggaggcaacagttatgtgacctggaattatgcttggagtaaggtaacgtatcttgggaaggagcttttaaggtatgtttctgaggatgcacccatacttccagaa

SEQ ID NO: 395474 - DNA, 120 bp, Artificial Sequence
  ENSG00000145700_46 (sequence is synthesized)
ccaaactcagtacctcagcaatatcaaccttgtcttccagaagttgcttgtttagatgacccagtacaggaaccaaacaaatcaatgtttgagaaaacaaaatttggacaaggaacttcc

SEQ ID NO: 395475 - DNA, 120 bp, Artificial Sequence
  ENSG00000145700_47 (sequence is synthesized)
agagagtcaatgcaaagcagcccacgttatctacaaataaatgaaatactattaatcagtgatcaagaatttctcccatgccacataatggatcagcattggaagttttgtgtggaatgt

SEQ ID NO: 395476 - DNA, 120 bp, Artificial Sequence
  ENSG00000145700_48 (sequence is synthesized)
gaggaactaacaccctaaaaccttggtttcttaatattttattggatatttgttcaaattaccaacaaacatttatatttcatcttgtataatctggtgggcctattttaacatacactt

SEQ ID NO: 395477 - DNA, 120 bp, Artificial Sequence
  ENSG00000145700_49 (sequence is synthesized)
tatgagttgctatttaggatgtatgtttactgttcttaagatgtatgtaactgttcaacaattatataagattaatgcttttttgccattgaaataaaggcacatttgaactagaccata

SEQ ID NO: 395478 - DNA, 120 bp, Artificial Sequence
  ENSG00000145700_50 (sequence is synthesized)
acggagtcagaaattcacatgcctactaatagccaagaacacaaaacagttcagaatttcagaaaaagacaaagtttcttaaaaactacctgcaacctaggaatgaaagcaggtaggatc

SEQ ID NO: 395479 - DNA, 120 bp, Artificial Sequence
  ENSG00000145703_0 (sequence is synthesized)
aaacctgctgcgggaggcggcggcgaccggccagggagcgagggaggagagttcacttttacttcagtgtcagcgcgcggcggccgtggctggctctggcgagagagcaccgagggagtg

SEQ ID NO: 395480 - DNA, 120 bp, Artificial Sequence
  ENSG00000145703_1 (sequence is synthesized)
agtgggtcgcagatcttcgggcggctaggggaaatcggcgagaggcgggatccgagcgcgccggcggggcgcagagcccgcgagcctggccagcgagggtagccgcggggggcgcgcccc

SEQ ID NO: 395481 - DNA, 120 bp, Artificial Sequence
  ENSG00000145703_2 (sequence is synthesized)
gggcccccggagacgcgcaggatgccacacgaagagctgccgtcgctgcagagaccccgctatggctctattgtggacgatgaaaggctctctgcagaggagatggatgagaggaggcgg

SEQ ID NO: 395482 - DNA, 120 bp, Artificial Sequence
  ENSG00000145703_3 (sequence is synthesized)
cagaacattgcttatgaatatctgtgccacttagaggaagccaaaaggtggatggaagtttgcttagttgaagaattgccaccaaccactgaattggaagaagggctccggaatggagtt

SEQ ID NO: 395483 - DNA, 120 bp, Artificial Sequence
  ENSG00000145703_4 (sequence is synthesized)
taccttgcaaagttagccaagttctttgccccgaaaatggtatcagagaaaaagatctatgatgtggaacaaacacgttataagaagtctggccttcattttcgacacacagataatacc

SEQ ID NO: 395484 - DNA, 120 bp, Artificial Sequence
  ENSG00000145703_5 (sequence is synthesized)
gtccagtggttaagagcgatggagtctattggtctacccaagatattttatccagaaacaacagatgtctatgatcggaaaaacataccaagaatgatatattgcattcacgcactgagt

SEQ ID NO: 395485 - DNA, 120 bp, Artificial Sequence
  ENSG00000145703_6 (sequence is synthesized)
ttgtatctgttcaaactaggaatagcaccccagatccaggatttgttgggcaaagtagacttcacagaggaggaaatcagtaatatgagaaaagaacttgagaaatatggaatacagatg

SEQ ID NO: 395486 - DNA, 120 bp, Artificial Sequence
  ENSG00000145703_7 (sequence is synthesized)
ccatctttcagcaaaataggtggtattctggccaatgaactgtccgtggatgaagctgcattacatgctgcagttatagccattaatgaagcagttgaaaaaggaatagcagagcaaacc

SEQ ID NO: 395487 - DNA, 120 bp, Artificial Sequence
  ENSG00000145703_8 (sequence is synthesized)
gttgtaacactaagaaacccaaatgcggttttaactttagtggatgacaaccttgcaccagaatatcagaaagaactctgggatgccaaaaagaaaaaagaggaaaatgcaagactgaag

SEQ ID NO: 395488 - DNA, 120 bp, Artificial Sequence
  ENSG00000145703_9 (sequence is synthesized)
aatagctgtatttcagaagaagaaagagatgcttatgaagaactgctgacacaagcagaaatccaaggcaatattaataaagtcaacaggcaggctgcagtggaccatatcaatgctgtc

SEQ ID NO: 395489 - DNA, 120 bp, Artificial Sequence
  ENSG00000145703_10 (sequence is synthesized)
attccggaaggtgaccccgagaatacgctgcttgcactgaagaaaccagaggcccagctgcctgctgtttatccctttgctgctgccatgtatcagaacgaacttttcaacctccagaaa

SEQ ID NO: 395490 - DNA, 120 bp, Artificial Sequence
  ENSG00000145703_11 (sequence is synthesized)
cagaacaccatgaactacttggcccacgaggagcttttgattgctgtggaaatgttgtctgctgttgctttactaaaccaggccttggaaagcaacgatcttgtgtctgtgcagaatcaa

SEQ ID NO: 395491 - DNA, 120 bp, Artificial Sequence
  ENSG00000145703_12 (sequence is synthesized)
ctcagaagccccgcaataggcttaaacaatctggacaaggcatatgtggaacgttatgcaaacacactactctctgttaaactagaagttttatcccaagggcaagataacttaagctgg

SEQ ID NO: 395492 - DNA, 120 bp, Artificial Sequence
  ENSG00000145703_13 (sequence is synthesized)
aatgaaattcagaattgtattgatatggttaatgctcaaattcaagaagaaaatgaccgagttgtagctgtagggtacatcaatgaagctattgatgaagggaatcctttgaggacttta

SEQ ID NO: 395493 - DNA, 120 bp, Artificial Sequence
  ENSG00000145703_14 (sequence is synthesized)
gaaactttgctcctacctactgcgaatattagtgatgtggacccagcccatgcccagcactaccaggatgttttataccatgctaaatcacagaaactcggagactctgagagtgtttcc

SEQ ID NO: 395494 - DNA, 120 bp, Artificial Sequence
  ENSG00000145703_15 (sequence is synthesized)
aaagtgctttggctggatgagatacagcaagccgtcgatgatgccaacgtggacaaggacagagcaaaacaatgggttactctggtggttgatgttaatcagtgtttggaaggaaaaaaa

SEQ ID NO: 395495 - DNA, 120 bp, Artificial Sequence
  ENSG00000145703_16 (sequence is synthesized)
tcaagtgatattttgtctgtattgaagtcttccacttctaatgcaaatgacataatcccggagtgtgctgacaaatactatgatgcccttgtgaaggcaaaagagctcaaatctgaaaga

SEQ ID NO: 395496 - DNA, 120 bp, Artificial Sequence
  ENSG00000145703_17 (sequence is synthesized)
gtgtctagtgacggttcatggctcaaactcaacctgcacaaaaaatatgactactattacaacactgattcaaaagagagttcctgggtcacacctgaatcatgcttgtataaagaatca

SEQ ID NO: 395497 - DNA, 120 bp, Artificial Sequence
  ENSG00000145703_18 (sequence is synthesized)
tggctcacaggaaaagaaatcgaggacattattgaggaagtcacagtaggttacattcgtgagaatatatggtctgcttcagaagagttgcttcttcgctttcaagccacaagctcagga

SEQ ID NO: 395498 - DNA, 120 bp, Artificial Sequence
  ENSG00000145703_19 (sequence is synthesized)
cccatccttagggaagagtttgaagctagaaaatcatttttgcatgaacaagaagagaatgtggtcaaaatacaggctttttggaaaggatataaacaacggaaggagtatatgcacagg

SEQ ID NO: 395499 - DNA, 120 bp, Artificial Sequence
  ENSG00000145703_20 (sequence is synthesized)
cggcaaacgttcattgataatactgattctattgtgaagattcagtcctggttccgaatggcaactgcaagaaagagctatctttcaagactacagtatttcagagatcataataatgaa

SEQ ID NO: 395500 - DNA, 120 bp, Artificial Sequence
  ENSG00000145703_21 (sequence is synthesized)
attgtgaaaatacagtcactgttgagagcgaacaaagctagagatgactacaaaacattggttggctctgaaaacccaccattaacagtaattcgcaaatttgtatacctgctggaccaa

SEQ ID NO: 395501 - DNA, 120 bp, Artificial Sequence
  ENSG00000145703_22 (sequence is synthesized)
agtgatttggatttccaggaggaactagaggttgcacgattaagggaagaagtagtgaccaagatcagggccaatcaacagctggaaaaagacctgaacctgatggacatcaagattgga

SEQ ID NO: 395502 - DNA, 120 bp, Artificial Sequence
  ENSG00000145703_23 (sequence is synthesized)
ctgctggtgaagaacaggatcacactagaggatgtaatttcacatagtaaaaagctgaacaagaaaaaaggaggagaaatggaaatactgaataacaccgacaaccaaggaataaaaagt

SEQ ID NO: 395503 - DNA, 120 bp, Artificial Sequence
  ENSG00000145703_24 (sequence is synthesized)
taccttttacagaccaaccctttatacttggctaagctgattttccagatgccacagaacaagtccactaaatttatggatactgttattttcacactatataattatgcctctaatcag

SEQ ID NO: 395504 - DNA, 120 bp, Artificial Sequence
  ENSG00000145703_25 (sequence is synthesized)
cgagaagaatatctacttctcaagctttttaaaactgctctggaggaagaaataaaatcaaaagtggaccaggtacaggacatagttactggtaaccctacagtcatcaagatggtcgtc

SEQ ID NO: 395505 - DNA, 120 bp, Artificial Sequence
  ENSG00000145703_26 (sequence is synthesized)
agcttcaatagaggtgcccggggacagaacaccctgcgccaactcctggctccagtggtaaaagagatcatcgacgacaagtcgctgattatcaacacaaaccctgtagaggtgtacaag

SEQ ID NO: 395506 - DNA, 120 bp, Artificial Sequence
  ENSG00000145703_27 (sequence is synthesized)
gcttgggtgaaccaactagaaacacagactggagaggccagcaagttgccttatgatgtgaccacagaacaagctctaacatacccagaagtgaaaaataaactggaggcttccattgag

SEQ ID NO: 395507 - DNA, 120 bp, Artificial Sequence
  ENSG00000145703_28 (sequence is synthesized)
aacctgagaagggtcaccgacaaagtcctgaattctatcatttcttcccttgatctactgccttatggattgaggtatatagccaaagtactgaagaattcgatccatgagaaattcccc

SEQ ID NO: 395508 - DNA, 120 bp, Artificial Sequence
  ENSG00000145703_29 (sequence is synthesized)
gatgcaacagaagatgagctattaaagattgttggaaacctcctgtactatcggtacatgaatccagccattgtagctccagatggctttgatatcatcgacatgacagctggaggtcag

SEQ ID NO: 395509 - DNA, 120 bp, Artificial Sequence
  ENSG00000145703_30 (sequence is synthesized)
ataaattctgaccaaaggagaaacttaggatcagtggccaaggttcttcagcacgcagcctccaacaagctgtttgaaggagaaaatgagcatctctcatctatgaacaattatttatca

SEQ ID NO: 395510 - DNA, 120 bp, Artificial Sequence
  ENSG00000145703_31 (sequence is synthesized)
gagacgtatcaggaattcaggaaatatttcaaagaagcatgtaatgtccctgagccagaagagaagtttaatatggacaaatacacagacctggtgacagtcagcaaaccagtcatttat

SEQ ID NO: 395511 - DNA, 120 bp, Artificial Sequence
  ENSG00000145703_32 (sequence is synthesized)
atttcaattgaagaaatcatcagcacacactcactcctgttggaacaccaggatgcaattgcccctgagaaaaatgacttactgagtgaattgctggggtcgctgggagaggtgccaacc

SEQ ID NO: 395512 - DNA, 120 bp, Artificial Sequence
  ENSG00000145703_33 (sequence is synthesized)
gtggaatcttttcttggggaaggagcagttgaccccaatgaccctaacaaggcaaatacactaagtcagctttcaaagaccgagatttctcttgtcttgacaagcaaatatgacatagag

SEQ ID NO: 395513 - DNA, 120 bp, Artificial Sequence
  ENSG00000145703_34 (sequence is synthesized)
gacggtgaagctatagatagccgaagcctcatgataaagaccaagaagctgataattgatgtgatccggaaccagccagggaacacattgacagaaatcttagagacaccagcaactgcg

SEQ ID NO: 395514 - DNA, 120 bp, Artificial Sequence
  ENSG00000145703_35 (sequence is synthesized)
caacaggaggtagaccatgccacggacatggtgagccgtgcaatgatagattccaggactccagaagaaatgaagcatagccaatctatgattgaagatgcacagctgcctcttgagcag

SEQ ID NO: 395515 - DNA, 120 bp, Artificial Sequence
  ENSG00000145703_36 (sequence is synthesized)
aagaagaggaaaatccagaggaatcttcggacgttggaacagactggacacgtgtcatccgaaaataaataccaagacattctcaatgagattgccaaggatattcgaaatcaaagaatc

SEQ ID NO: 395516 - DNA, 120 bp, Artificial Sequence
  ENSG00000145703_37 (sequence is synthesized)
tatcgtaagcttcgaaaagctgaattggcaaaacttcagcagaccctgaatgcacttaacaagaaggcagcattttatgaagagcaaatcaattattatgacacctacataaagacttgt

SEQ ID NO: 395517 - DNA, 120 bp, Artificial Sequence
  ENSG00000145703_38 (sequence is synthesized)
ttagacaacttaaaaagaaaaaatactcggagatcaattaaactagatggaaaaggagaacccaaaggggcgaagagagcgaagccagtgaagtacactgcagcaaagctgcatgagaaa

SEQ ID NO: 395518 - DNA, 120 bp, Artificial Sequence
  ENSG00000145703_39 (sequence is synthesized)
ggtgtcctgctagatatagatgatcttcaaacaaaccagtttaagaatgttacatttgatatcatagctactgaagatgtaggcattttcgatgtaagatcaaaattccttggtgttgag

SEQ ID NO: 395519 - DNA, 120 bp, Artificial Sequence
  ENSG00000145703_40 (sequence is synthesized)
atggaaaaggtgcaactcaatattcaggatttacttcagatgcaatatgaaggagtagctgtaatgaaaatgtttgataaggttaaagtgaatgtaaaccttctcatatacctgctgaac

SEQ ID NO: 395520 - DNA, 120 bp, Artificial Sequence
  ENSG00000145703_41 (sequence is synthesized)
aagaagttctatggaaagtgaagtgcctacagaaatttcttggattctgtatcatctggattaggaaatgaatttgtttaatatttttgtttttaaacatgattgaaatcactgcttata

SEQ ID NO: 395521 - DNA, 120 bp, Artificial Sequence
  ENSG00000145703_42 (sequence is synthesized)
aatgtgtgatttttttaaaacgaccaaaactgttctgaagaatgtacccaggtgcctttttgctaatttgatactataatagaatgagacataaaatgaattaatggaaacatatccaca

SEQ ID NO: 395522 - DNA, 120 bp, Artificial Sequence
  ENSG00000145703_43 (sequence is synthesized)
ctgtactgtgatataggtactctgatttaaaactttggacatcctgtgatctgttttaaagttggggggtgggaaatttagctgactagggacaaacatgtaaacctattttcctatgaa

SEQ ID NO: 395523 - DNA, 120 bp, Artificial Sequence
  ENSG00000145703_44 (sequence is synthesized)
aaaaattttaaatgtcccacttgaataacgtaattcttcatagtttttttaatctatggataaatggaaacctaattatttgtaatgaattatttagacagttctaagccctgtcttctg

SEQ ID NO: 395524 - DNA, 120 bp, Artificial Sequence
  ENSG00000145703_45 (sequence is synthesized)
ggagttatcaattttaaagagaacttttgtgcaattcaaatgaagtttttataagtaattgaaaatgacaacacaataacactttctgtataaaagtatatattttatgtgatttattcc

SEQ ID NO: 395525 - DNA, 120 bp, Artificial Sequence
  ENSG00000145703_46 (sequence is synthesized)
tactaaatgaaagtgcactactgcctcatgtaaagactcttgcacgcagagcctttaagtgactaaggaacaacatagatagtgagcatagtccccacctccacccctcacaatttattt

SEQ ID NO: 395526 - DNA, 120 bp, Artificial Sequence
  ENSG00000145703_47 (sequence is synthesized)
gaatacttcaattgtgcctctcaattttttgtaatgctaaaaaatcagtatctagatggtttttaaatgtattctctggaaattgttttatgtaaaataaatgttacttaattccattaa

SEQ ID NO: 395527 - DNA, 120 bp, Artificial Sequence
  ENSG00000145703_48 (sequence is synthesized)
aaaacaaacagaaagttggcctgctgtctctccaaggtggccctgtcagtgaacccaaggccgaagaccacaggttaatctttgcccaggctggccttggtggcagagctattgtggacg

SEQ ID NO: 395528 - DNA, 120 bp, Artificial Sequence
  ENSG00000145703_49 (sequence is synthesized)
atcactttcttgtcctaaaatctcaagggaagccagactcactggcatttgccttttctttaactcctgccttccttcaaagcctgacttctgtttatcccatgaaacctcctgacaaca

SEQ ID NO: 395529 - DNA, 87 bp, Artificial Sequence
  ENSG00000145703_50 (sequence is synthesized)
agcctgacttctgtttatcccatgaaacctcctgacaacaccaactcagaagaaaatgcttcttccagagatggagtctcactctgc

SEQ ID NO: 395530 - DNA, 120 bp, Artificial Sequence
  ENSG00000145703_51 (sequence is synthesized)
atcccacagcctgctctttacaaaatgcagcaagaatcagaaaatacaaatttcacatgagacttaaaggctagggatatgctaggaagaaattgatctgcggaaacctttcacatcttg

SEQ ID NO: 395531 - DNA, 120 bp, Artificial Sequence
  ENSG00000145703_52 (sequence is synthesized)
attaaattacattagaccaagatttttacaaaggactctgagagtgtttccaaagtgctttggctggatgagatacagcaagccgtcgatgatgccaacgtggacaaggacagagcaaaa

SEQ ID NO: 395532 - DNA, 120 bp, Artificial Sequence
  ENSG00000145703_53 (sequence is synthesized)
agcagcttgtattcttagaaacgcagcagacagcaactttagcaggtgatttcaatcaagtcagctgaaatgcactcacttccaggagttgtagctgtagggtacatcaatgaagctatt

SEQ ID NO: 395533 - DNA, 120 bp, Artificial Sequence
  ENSG00000145703_54 (sequence is synthesized)
agcagcttgtattcttagaaacgcagcagacagcaactttagcaggtgatttcaatcaagtcagctgaaatgcactcacttccaggtgatcggccttggttctgttaagaccatttttgg

SEQ ID NO: 395534 - DNA, 120 bp, Artificial Sequence
  ENSG00000145703_55 (sequence is synthesized)
caacgtggacaaggacagagcaaaacaatatgggcttttcaacctcggaagcatctgtgagaaacatctgggctttatctccttagcttagaaaaatgggttactctggtggttgatgtt

SEQ ID NO: 395535 - DNA, 120 bp, Artificial Sequence
  ENSG00000145703_56 (sequence is synthesized)
tctctacaggacttattgtacacatgtgctaatactcatattcttaaccctaaaaatctcgcaattatttattccatgactcttatacattaataaaactccttctcccaaacaacaaaa

SEQ ID NO: 395536 - DNA, 120 bp, Artificial Sequence
  ENSG00000145703_57 (sequence is synthesized)
aactactcagctgaagttgactggaacaattgctgtgtgttttttcctcactccgccttttttccattattttcttttgtcatctgttttatatgtagttatggattgaggtatatagcc

SEQ ID NO: 395537 - DNA, 120 bp, Artificial Sequence
  ENSG00000145703_58 (sequence is synthesized)
actatggtgttcacatgatgagaaatccttaaggactggagcaatctgaaggcttcagggaagaaatgagaccagagctggtcctataaggaaggattttggaaggaagtcatgctactc

SEQ ID NO: 395538 - DNA, 120 bp, Artificial Sequence
  ENSG00000145703_59 (sequence is synthesized)
aggaatgatctcataccctaagctccatcaatgctaaggttcttgtaggcactaattccaaagattggattagtttgaattactgagataacattttcaaagccttacctaccctctgcc

SEQ ID NO: 395539 - DNA, 120 bp, Artificial Sequence
  ENSG00000145703_60 (sequence is synthesized)
ctacagtggctcatagagcgccagcggccagcaaccaagcgaacgttctggacaacggggagatgagcagccacaggaggctgccagttacatgggcatgtgaatgccccaggctggtcc

SEQ ID NO: 395540 - DNA, 120 bp, Artificial Sequence
  ENSG00000145703_61 (sequence is synthesized)
tccagacctcataaagacaccagggcaattgtggaggagaaaataagaaaaacagcattttataaacagaaataatcatctcttctaaatattcaggaataaaactacagtttaaatgtt

SEQ ID NO: 395541 - DNA, 120 bp, Artificial Sequence
  ENSG00000145703_62 (sequence is synthesized)
caccgacaaagtcctgaattctatcatttcttcccttgatctactgccgtaagttgtacttgcagcaagtttaacattctttcctggaacgttcttggaatacgatgtaaaataagcccc

SEQ ID NO: 395542 - DNA, 120 bp, Artificial Sequence
  ENSG00000145703_63 (sequence is synthesized)
tgtagtgaagacagcagttttcccttatattgtgtttactattttaaaagattgcctacatttaccttttaaattcctgactgttctctaaagaaggggcaatacttcagtagcaaacac

SEQ ID NO: 395543 - DNA, 120 bp, Artificial Sequence
  ENSG00000145708_0 (sequence is synthesized)
agcttctagctctcagtctgcgcgagggtgtaggaaggaaagcccaggacctccggagcagagcacagcagctgcagaggcaaggccagcatgtcgcccaacttcaaacttcagtgtcac

SEQ ID NO: 395544 - DNA, 120 bp, Artificial Sequence
  ENSG00000145708_1 (sequence is synthesized)
ttcattctcatcttcctgacggctctaagaggggaaagccggtacctagagctgagggaagcggcggactacgatcctttcctgctcttcagcgccaacctgaagcgggagctggctggg

SEQ ID NO: 395545 - DNA, 120 bp, Artificial Sequence
  ENSG00000145708_2 (sequence is synthesized)
gagcagccgtaccgccgcgctctgcggtgcctggacatgctgagcctccagggccagttcaccttcaccgccgaccggccgcagctgcactgcgcagccttcttcatcagcgagcccgag

SEQ ID NO: 395546 - DNA, 120 bp, Artificial Sequence
  ENSG00000145708_3 (sequence is synthesized)
gagttcattaccatccactacgaccaggtctccatcgactgtcagggcggcgacttcctgaaggtatttgatggttggattctcaagggggagaagttccccagttcccaggatcatcct

SEQ ID NO: 395547 - DNA, 120 bp, Artificial Sequence
  ENSG00000145708_4 (sequence is synthesized)
ctcccctcagctgagcggtacatagatttctgtgagagtggtcttagcaggaggagcatcagatcttcccagaatgtggccatgatcttcttccgagtccatgaaccaggaaatggattc

SEQ ID NO: 395548 - DNA, 120 bp, Artificial Sequence
  ENSG00000145708_5 (sequence is synthesized)
acattaaccataaagacagaccccaacctctttccttgcaatgtcatttctcagactccaaatggaaagtttaccctggtagttccacaccagcatcgaaactgcagcttctccataatt

SEQ ID NO: 395549 - DNA, 120 bp, Artificial Sequence
  ENSG00000145708_6 (sequence is synthesized)
gaataggagactttgtggagctgctgggaggaactggattggacccttccaagatgacgcctttagctgatctctgctacccctttcatggcccggcccagatgaaagttggctgtgaca

SEQ ID NO: 395550 - DNA, 120 bp, Artificial Sequence
  ENSG00000145708_7 (sequence is synthesized)
acactgtggtgcgcatggtctccagtggaaaacacgtaaatcgtgtgacttttgagtatcgtcagctggagccgtacgagctggaaaacccaaatggaaacagtatcggggaattctgtt

SEQ ID NO: 395551 - DNA, 120 bp, Artificial Sequence
  ENSG00000145708_8 (sequence is synthesized)
tgtctggtctttgaataaccaacccagtgatttacatgctgatagctaagtgagtttttaatggccattgtgtatgattttgatgcacaactagttaaaagcctttcataccagtcagta

SEQ ID NO: 395552 - DNA, 120 bp, Artificial Sequence
  ENSG00000145708_9 (sequence is synthesized)
ttcccagccttgagcgcacgcgcgcacacacacacacacatacacacacgcattaatttttgtactttgcttcttttatgtttgtaatctgtaaatgaacacatggcagaaaataacccc

SEQ ID NO: 395553 - DNA, 120 bp, Artificial Sequence
  ENSG00000145708_10 (sequence is synthesized)
tgattggtaggatcatagttctaaatggaaatgtttgtaattctttgatgtgctacaaacctgaaactggtaagacaagcacaaagcaacgtgcaatacaaaaatcgtatctcaagggaa

SEQ ID NO: 395554 - DNA, 120 bp, Artificial Sequence
  ENSG00000145708_11 (sequence is synthesized)
aatactcaaagaaagaaaagtggcagcacttatattagttttataacaggataaagtcttgtgtatagcaaagtagttgcatctgtttattttctatttattattgttacaataggtaat

SEQ ID NO: 395555 - DNA, 120 bp, Artificial Sequence
  ENSG00000145708_12 (sequence is synthesized)
agttatagcaattatttattgatttgtaacaacttgtttttaaccaaactttgtagcatggaaaaaattttccatccacaaatacaaacatgaataaatacattcagaatgttggcacca

SEQ ID NO: 395556 - DNA, 120 bp, Artificial Sequence
  ENSG00000145708_13 (sequence is synthesized)
aggatgttgagggctgattgagtgaattcatggacccgctgttggtcaaatggtttgacttctgtaattggtttaaatgtgtctttctctgctgctttattcccttagaaatcctcagca

SEQ ID NO: 395557 - DNA, 120 bp, Artificial Sequence
  ENSG00000145708_14 (sequence is synthesized)
gcccggttttgtttaggaccagcccagaatgcaatctatcctgtgtggaatggatgggatgagagatggatgggcccagccttagaagcaagatctagacctataagtatagtcaacaga

SEQ ID NO: 395558 - DNA, 120 bp, Artificial Sequence
  ENSG00000145708_15 (sequence is synthesized)
atggagagggaagaacccagacttcaggaacccaatgtagagtcctgcatgaccccttgttcactatcaaactgacttccacatacaggagcacgaaaggcacaggaatggatgccaata

SEQ ID NO: 395559 - DNA, 120 bp, Artificial Sequence
  ENSG00000145708_16 (sequence is synthesized)
gactcattagcacctcctcaatatcacctcagtccacttaactgagaaacagctgttgaagatggcgagatccaaaataaaacccagttctcaaccaaataaaatatctctaaaaagagg

SEQ ID NO: 395560 - DNA, 120 bp, Artificial Sequence
  ENSG00000145708_17 (sequence is synthesized)
cgctggggataccctggcctgatggagagggtctaagaccttcccgtcttctccggacacgggaaaacattacccctctctctttattcgctatgctgagtggcagggagggtgccccgc

SEQ ID NO: 395561 - DNA, 120 bp, Artificial Sequence
  ENSG00000145708_18 (sequence is synthesized)
ttgtttcctaaccgtttgataaggccacaactttatcagagcagaagcaatcatatagggaaaacctggacactagcaaattggcgtagtacgttgctctgatgaactcttaaatctcaa

SEQ ID NO: 395562 - DNA, 120 bp, Artificial Sequence
  ENSG00000145715_0 (sequence is synthesized)
actcactgagagctccaggtagtgagcagttcagtcgatttcctcgttaccccgcccccctttctcttgcccccccacccctctcatctgcctggtggaggatgaagcggctgcagtggc

SEQ ID NO: 395563 - DNA, 120 bp, Artificial Sequence
  ENSG00000145715_1 (sequence is synthesized)
cccagcctcagcagcggcaccggcggtggctgcggtgtgggtggccggaactggggtggtgaagaagcggtggtggcggctgaaggagcggtagcagcctcagcctctttccctgtgctt

SEQ ID NO: 395564 - DNA, 120 bp, Artificial Sequence
  ENSG00000145715_2 (sequence is synthesized)
cctttcctctttagtgcagcgaggaagttttcgcttctgtacatgtgtttgtgtgcgtgagtgtgggtgtgtgcggtgaggtttgggtggcgtttgtgcaggcgttgggttttttgccca

SEQ ID NO: 395565 - DNA, 120 bp, Artificial Sequence
  ENSG00000145715_3 (sequence is synthesized)
cttggcttcccgtaacccaggcagctggggagcctgggctgtggccctaggagggggcgcggcggcgggctctctccttttgttgttgtttcctcagcctggggagctgaaggggagacg

SEQ ID NO: 395566 - DNA, 120 bp, Artificial Sequence
  ENSG00000145715_4 (sequence is synthesized)
cgtctgggtggggctgctcggagcccgggcctggtggcccctggggctcccgggcgggcagggtagggcagagtagagcgggcttcaacatgatggcggccgaggccggcagtgaggagg

SEQ ID NO: 395567 - DNA, 120 bp, Artificial Sequence
  ENSG00000145715_5 (sequence is synthesized)
gcggcccggtaacagccggagctggaggaggcggcgcggcagcgggctccagtgcctatcccgcagtgtgtcgggtgaagatacccgcggccctgcctgtggcagccgccccctatcctg

SEQ ID NO: 395568 - DNA, 120 bp, Artificial Sequence
  ENSG00000145715_6 (sequence is synthesized)
ggctggtggagaccggagtggctggaactctgggtggcggagccgctttggggtcagagttcctaggagccgggtctgtggcaggggcactggggggagctggactgacagggggaggta

SEQ ID NO: 395569 - DNA, 120 bp, Artificial Sequence
  ENSG00000145715_7 (sequence is synthesized)
ctgctgctggcgtagctggtgctgctgctggcgtggccggtgctgctgttgctggacctagtggagacatggctctcaccaaactgcccacttcgttgcttgctgagactctcgggccag

SEQ ID NO: 395570 - DNA, 120 bp, Artificial Sequence
  ENSG00000145715_8 (sequence is synthesized)
gcggcggttttccccctctgccccctcccccttacctgccccctttgggggcgggcctcgggacagtggacgaaggtgactctctggatggaccagaatacgaggaggaagaggtggcca

SEQ ID NO: 395571 - DNA, 120 bp, Artificial Sequence
  ENSG00000145715_9 (sequence is synthesized)
taccgttgaccgctcctccaactaaccagtggtatcacggaaaacttgacagaacgatagcagaagaacgcctcaggcaggcagggaagtctggcagttatcttataagagagagtgatc

SEQ ID NO: 395572 - DNA, 120 bp, Artificial Sequence
  ENSG00000145715_10 (sequence is synthesized)
ggaggccagggtcctttgtactttcatttcttagccagatgaatgttgtcaaccattttaggattattgctatgtgtggagattactacattggtggaagacgtttttcttcactgtcag

SEQ ID NO: 395573 - DNA, 120 bp, Artificial Sequence
  ENSG00000145715_11 (sequence is synthesized)
acctaataggttattacagtcatgtttcttgtttgcttaaaggagaaaaattactttacccagttgcaccaccagagccagtagaagatagaaggcgtgtacgagctattctaccttaca

SEQ ID NO: 395574 - DNA, 120 bp, Artificial Sequence
  ENSG00000145715_12 (sequence is synthesized)
caaaagtaccagacactgatgaaataagtttcttaaaaggagatatgttcattgttcataatgaattagaagatggatggatgtgggttacaaatttaagaacagatgaacaaggcctta

SEQ ID NO: 395575 - DNA, 120 bp, Artificial Sequence
  ENSG00000145715_13 (sequence is synthesized)
ttgttgaagacctagtagaagaggtgggccgggaagaagatccacatgaaggaaaaatatggttccatgggaagatttccaaacaggaagcttataatttactaatgacagttggtcaag

SEQ ID NO: 395576 - DNA, 120 bp, Artificial Sequence
  ENSG00000145715_14 (sequence is synthesized)
tctgcagttttcttgtgaggccctcagataatactcctggcgattattcactttatttccggaccaatgaaaatattcagcgatttaaaatatgtccaacgccaaacaatcagtttatga

SEQ ID NO: 395577 - DNA, 120 bp, Artificial Sequence
  ENSG00000145715_15 (sequence is synthesized)
tgggaggccggtattataacagcattggggacatcatagatcactatcgaaaagaacagattgttgaaggatattatcttaaggaacctgtaccaatgcaggatcaagaacaagtactca

SEQ ID NO: 395578 - DNA, 120 bp, Artificial Sequence
  ENSG00000145715_16 (sequence is synthesized)
atgacacagtggatggcaaggaaatctataataccatccgtcgtaaaacaaaggatgccttttataaaaacattgttaagaaaggttatcttctgaaaaagggcaaaggaaaacgttgga

SEQ ID NO: 395579 - DNA, 120 bp, Artificial Sequence
  ENSG00000145715_17 (sequence is synthesized)
aaaatttatattttatcttagagggtagtgatgcccaacttatttattttgaaagcgaaaaacgagctaccaaaccaaaaggattaatagatctcagtgtatgttctgtctatgtcgttc

SEQ ID NO: 395580 - DNA, 120 bp, Artificial Sequence
  ENSG00000145715_18 (sequence is synthesized)
atgatagtctctttggcaggccaaactgttttcagatagtagttcagcactttagtgaagaacattacatcttttactttgcaggagaaactccagaacaagcagaggattggatgaaag

SEQ ID NO: 395581 - DNA, 120 bp, Artificial Sequence
  ENSG00000145715_19 (sequence is synthesized)
tcagcagccttgttttacatattgaagaagcccataaactcccagtaaaacattttactaatccatattgtaacatctacctgaatagtgtccaagtagcaaaaactcatgcaagggaag

SEQ ID NO: 395582 - DNA, 120 bp, Artificial Sequence
  ENSG00000145715_20 (sequence is synthesized)
ggcaaaacccagtatggtcagaagagtttgtctttgatgatcttcctcctgacatcaatagatttgaaataactcttagtaataaaacaaagaaaagcaaagatcctgatatcttattta

SEQ ID NO: 395583 - DNA, 120 bp, Artificial Sequence
  ENSG00000145715_21 (sequence is synthesized)
tgcgctgccagttgagccgattacagaaagggcatgccacagatgaatggtttctgctcagctcccatataccattaaaaggtattgaaccagggtccctgcgtgttcgagcacgatact

SEQ ID NO: 395584 - DNA, 120 bp, Artificial Sequence
  ENSG00000145715_22 (sequence is synthesized)
ctatggaaaaaatcatgccagaagaagagtacagtgaatttaaagagcttatactgcaaaaggaacttcatgtagtctatgctttatcacatgtatgtggacaagaccgaacactactgg

SEQ ID NO: 395585 - DNA, 120 bp, Artificial Sequence
  ENSG00000145715_23 (sequence is synthesized)
ccagcatcctactgaggatttttcttcacgaaaagcttgaatcgttgttgttatgcacactaaatgacagagaaataagcatggaagatgaagccactaccctatttcgagccacaacac

SEQ ID NO: 395586 - DNA, 120 bp, Artificial Sequence
  ENSG00000145715_24 (sequence is synthesized)
ttgcaagcaccttgatggagcagtatatgaaagccactgctacacagtttgttcatcatgctttgaaagactctattttaaagataatggaaagcaagcagtcttgtgagttaagtccat

SEQ ID NO: 395587 - DNA, 120 bp, Artificial Sequence
  ENSG00000145715_25 (sequence is synthesized)
caaagttagaaaaaaatgaagatgtgaacactaatttaacacacctattgaacatactttcagagcttgtggagaaaatattcatggcttcagaaatacttccaccgacattgagatata

SEQ ID NO: 395588 - DNA, 120 bp, Artificial Sequence
  ENSG00000145715_26 (sequence is synthesized)
tttatgggtgtttacagaaatctgttcagcataagtggcctacaaataccaccatgagaacaagagttgttagtggttttgtttttcttcgactcatctgtcctgccatcctgaatccac

SEQ ID NO: 395589 - DNA, 120 bp, Artificial Sequence
  ENSG00000145715_27 (sequence is synthesized)
ggatgttcaatatcatctcagattctccatctcctattgctgcaagaacactgatattagtggctaaatctgtgcagaacttagcaaatcttgtggaatttggagctaaggagccctaca

SEQ ID NO: 395590 - DNA, 120 bp, Artificial Sequence
  ENSG00000145715_28 (sequence is synthesized)
tggaaggtgtcaatccattcatcaaaagcaacaaacatcgtatgatcatgtttttagatgaacttgggaatgtacctgaacttccggacactacagagcattctagaacggacctgtccc

SEQ ID NO: 395591 - DNA, 120 bp, Artificial Sequence
  ENSG00000145715_29 (sequence is synthesized)
gtgatttagcagcattgcatgagatttgcgtggctcattcagatgaacttcgaacgctcagtaatgagcgtggtgcacagcagcacgtattgaaaaagcttctggctataacagaactgc

SEQ ID NO: 395592 - DNA, 120 bp, Artificial Sequence
  ENSG00000145715_30 (sequence is synthesized)
ttcaacaaaaacaaaaccagtatacaaaaaccaatgatgtcaggtagcagccttcgccccagtgttctgcatggattcagcatgtccaacatggtaattcacttcagtttaatgtctcct

SEQ ID NO: 395593 - DNA, 120 bp, Artificial Sequence
  ENSG00000145715_31 (sequence is synthesized)
ttgctcttgccaaaaaatagcacacttttccacattccagtgatgtgtgagctatgcaaacaaaatccaagattctgctggtgaataactatgccagcaaccttgtaagctatctgtgca

SEQ ID NO: 395594 - DNA, 120 bp, Artificial Sequence
  ENSG00000145715_32 (sequence is synthesized)
ggatatttgcactatttccacatggaatcaatctttaacaacctctgagccttggtgtacagaccacctttcacaaaacgaaatgctatgactgtatcttgatatctcgaactttcaaaa

SEQ ID NO: 395595 - DNA, 120 bp, Artificial Sequence
  ENSG00000145715_33 (sequence is synthesized)
tatattttcagtacacccagttgccaaagttttgctgtctcttagagaaagaactatgaaatcaactgacaagaaacacattcttattgacaattgtgtataactggattgcagactgtt

SEQ ID NO: 395596 - DNA, 120 bp, Artificial Sequence
  ENSG00000145715_34 (sequence is synthesized)
cttactgtaactacttcctgattaggaatatgaccatttgactgttcaatgattatttgtatttacagtttccagagtttgtcattataataggaacaatctttgctgtatacttttaaa

SEQ ID NO: 395597 - DNA, 120 bp, Artificial Sequence
  ENSG00000145715_35 (sequence is synthesized)
aaatactctgctatttctcttgctggaactgttgaaagaaaatatatagaatgatctattgctcatcagctttattttttaaacatacgacttattttgttgaaattgtcaaagactgta

SEQ ID NO: 395598 - DNA, 120 bp, Artificial Sequence
  ENSG00000145715_36 (sequence is synthesized)
tttagatctcataatgctttgttaaatgtttacaagtaaatagtttgaattcagtaaatattattggttgttgtattgatcaatgcatgttacccattcaaccattttatagactaccaa

SEQ ID NO: 395599 - DNA, 120 bp, Artificial Sequence
  ENSG00000145715_37 (sequence is synthesized)
tttcttttatgttaactagaatgcttttgttaaaagttatttgttcattatttgtgctacccctttgattatgcagacaacctcatcagctgcctaacttatccatctttgaacttctga

SEQ ID NO: 395600 - DNA, 120 bp, Artificial Sequence
  ENSG00000145715_38 (sequence is synthesized)
ctacttgttgtatctgctggatatttagttcaactgtatagttttatttacttctgtatgtgtatttttgtgaagtattcacaaaggttaagttaaaataaaaccaagggatatcttgca

SEQ ID NO: 395601 - DNA, 120 bp, Artificial Sequence
  ENSG00000145715_39 (sequence is synthesized)
gaccagaatacgaggaggaagaggtggccataccgttgaccgctcctccaactaaccagtaagttaagactgctgttcaggaatttgggaagctggctccagaaaagaagtggaaatgaa

SEQ ID NO: 395602 - DNA, 120 bp, Artificial Sequence
  ENSG00000145715_40 (sequence is synthesized)
gaggaggaagaggtggccataccgttgaccgctcctccaactaaccagtaagttaagactgctgttcaggaatttgggaagctggctccagaaaagaagtggaaatgaaggggttccatg

SEQ ID NO: 395603 - DNA, 120 bp, Artificial Sequence
  ENSG00000145715_41 (sequence is synthesized)
gaggaggaagaggtggccataccgttgaccgctcctccaactaaccagtaagttaagactgctgttcaggaatttgggaagctggctccagaaaagaagtggaaatgaaggggcatacta

SEQ ID NO: 395604 - DNA, 120 bp, Artificial Sequence
  ENSG00000145715_42 (sequence is synthesized)
cctggcgtcttcctacatttattgctcctctgggaaagtgtaaagtctttaagatggaaagcatgagaaaatgtgtatctaatgagaaccggatatagttctgtcccttccaagttgagg

SEQ ID NO: 395605 - DNA, 120 bp, Artificial Sequence
  ENSG00000145715_43 (sequence is synthesized)
agtctctttggcagatgcagttagattggaagtctgttggcacaatcaaaagaaaggtccacattacacttgatggtaaaagagaaagaattgccagagtaaaaagaaggatcagatcct

SEQ ID NO: 395606 - DNA, 120 bp, Artificial Sequence
  ENSG00000145721_0 (sequence is synthesized)
actctgtacaggaggctcacacaggcagacccaagatggacagaaccttggaatctctgagacacatcattgcccaagtcttgcctcacagagatccggctctagtcttcaaagacttga

SEQ ID NO: 395607 - DNA, 120 bp, Artificial Sequence
  ENSG00000145721_1 (sequence is synthesized)
acgttgtgtcaatgttacaggaattttgggaaagcaagcagcagcagaaggctgcattcccaagtgaaggtgtggtggtctatgagtcactgccagctcctgggcctccctttgtgagtt

SEQ ID NO: 395608 - DNA, 120 bp, Artificial Sequence
  ENSG00000145721_2 (sequence is synthesized)
acgtgaccctcccagggggaagctgttttggcaactttcagtgctgcttaagtagagccgaggccaggcgggatgcagctaaagtggccctgatcaactccctcttcaatgagctgccct

SEQ ID NO: 395609 - DNA, 120 bp, Artificial Sequence
  ENSG00000145721_3 (sequence is synthesized)
ctcgcaggatcaccaaggaattcattatggaaagtgttcaggaagcagtagcctccaccagcggcaccttagatgatgcagatgaccccagcaccagtgttggggcctatcactacatgc

SEQ ID NO: 395610 - DNA, 120 bp, Artificial Sequence
  ENSG00000145721_4 (sequence is synthesized)
tggagtcaaacatggggaagactatgctggagtttcaggagctgatgaccattttccaactattgcactggaatggaagcctaaaagcccttcgtgaaacaaagtgttcccgacaggaag

SEQ ID NO: 395611 - DNA, 120 bp, Artificial Sequence
  ENSG00000145721_5 (sequence is synthesized)
tcatctcctactattctcagtattctctagatgaaaagatgcgcagccacatggccctggactggatcatgaaggagcgggactcaccaggaattgtctctcaagagctacgaatggccc

SEQ ID NO: 395612 - DNA, 120 bp, Artificial Sequence
  ENSG00000145721_6 (sequence is synthesized)
tgaggcagttggaggaagccaggaaagcaggacaagaactacggttttacaaagaaaagaaagaaatattgagcttagccctgactcagatctgcagtgaccctgacacttcctcaccca

SEQ ID NO: 395613 - DNA, 120 bp, Artificial Sequence
  ENSG00000145721_7 (sequence is synthesized)
gtgatgatcagctgagccttacggccctgtgtggctatcactagcaaggccaagccccgggtaccctcagtgatggcagaggccagattaacattaggaatctcagtgcagaggtcctca

SEQ ID NO: 395614 - DNA, 120 bp, Artificial Sequence
  ENSG00000145721_8 (sequence is synthesized)
gaggctccagcatctctagtactacctgaaggctctcctaaccctctccacacattccatttacagagtatgagagtcgtaggacccttacaagacccaacaagccactcgatgcatttt

SEQ ID NO: 395615 - DNA, 120 bp, Artificial Sequence
  ENSG00000145721_9 (sequence is synthesized)
tctatcacattctcaatagttccagctcaggatgaaaggatagacacaaaattgtttgaaaaacattttccaggcctggctccaacctaaagcctgactgtcacgtgccttgcttgattt

SEQ ID NO: 395616 - DNA, 120 bp, Artificial Sequence
  ENSG00000145721_10 (sequence is synthesized)
tatatatattgtttcaagaatagtccaatatagcattccccaaatgaacagcagccagaattaggtgaagtagcatgatagcagtgtttaaaaatacttaggattaaataaataatatgg

SEQ ID NO: 395617 - DNA, 120 bp, Artificial Sequence
  ENSG00000145721_11 (sequence is synthesized)
attgttttaaaaaatatccaaggatcagagtctctttctaagctttgtaagctaagcaatagtttatgtcctactagatacactgcaaactacagtggggattttatctggacatcccac

SEQ ID NO: 395618 - DNA, 120 bp, Artificial Sequence
  ENSG00000145721_12 (sequence is synthesized)
catcaaagatcttgaaatagtaatagtatgaaaatactagataaaattaatgtttaaaatgtttttgtaacaataatttttaaaacccacactcttccatatatggggataaatatcacc

SEQ ID NO: 395619 - DNA, 120 bp, Artificial Sequence
  ENSG00000145721_13 (sequence is synthesized)
tagaaaagtagcctcactcttattcctcaagaattaatatccaatgtttatgagtcttgcaatcaattttgttcatttttaatttgcaaatcgataacctgaactaatttgttcttattt

SEQ ID NO: 395620 - DNA, 120 bp, Artificial Sequence
  ENSG00000145721_14 (sequence is synthesized)
tttgccactgcaaacatatatctacagagagaaaaattaatggcattttaaaggttaaaacattttgaaaaattattagcatgtaacaaagaatgcttgcatttgattagtttcaccagc

SEQ ID NO: 395621 - DNA, 120 bp, Artificial Sequence
  ENSG00000145721_15 (sequence is synthesized)
aagcaaccagtagctcaaatgtagtatcattattaagtttaagtcactggaatcttctttaaaggaaggataagacattgccatctctatttaactcatccatatgggtcaatcaactga

SEQ ID NO: 395622 - DNA, 73 bp, Artificial Sequence
  ENSG00000145721_16 (sequence is synthesized)
ccatctctatttaactcatccatatgggtcaatcaactgattagaaaatcaaaaaacaataaaaaccccaggc

SEQ ID NO: 395623 - DNA, 120 bp, Artificial Sequence
  ENSG00000145721_17 (sequence is synthesized)
ggtgtgagccaccatgcctggcctaaactaatttttagatagttcctggtcactcaaatttaagaatgtcagcaatgtcaattttaaatgctcataggtctttccatatctgtaacatga

SEQ ID NO: 395624 - DNA, 120 bp, Artificial Sequence
  ENSG00000145721_18 (sequence is synthesized)
ggtctttccatatctgtaacatgaaaatgattattctgcattttattcagtagtccaaattaaagaaaatgtttttctcaatttaaaataatttctttttcttttgtttatgcaagtgca

SEQ ID NO: 395625 - DNA, 120 bp, Artificial Sequence
  ENSG00000145721_19 (sequence is synthesized)
tacatgcttcactgaaagcaaaaccattataattacattaaagtttataaaatatgatattttaacctcatatctaataagtatgtacaaaggtaaccatcactccttaaatccacatga

SEQ ID NO: 395626 - DNA, 120 bp, Artificial Sequence
  ENSG00000145721_20 (sequence is synthesized)
aaactactgtaactgatcatgtattttggaattagacttgataataaaagattatcatgtatcacatatctcacaccaggggaacaattagctacataattgtcataccttaatatcttt

SEQ ID NO: 395627 - DNA, 120 bp, Artificial Sequence
  ENSG00000145721_21 (sequence is synthesized)
taaaggtaacagtaattttcaacacattttattttaaaatattattttaacaaaagttacattcctctccacaatgaggctaaatgtcacccacgaaagaactttattcccttatattcc

SEQ ID NO: 395628 - DNA, 120 bp, Artificial Sequence
  ENSG00000145721_22 (sequence is synthesized)
tgaaaagaaatcagaattaacatttttatgttgaataaattttaaaatttaggaaatgttctatttaaagttaatttctttcataaagccattactctttacattgtcatttccaaaaag

SEQ ID NO: 395629 - DNA, 120 bp, Artificial Sequence
  ENSG00000145721_23 (sequence is synthesized)
ccacaatttcccatgctggatgtgatgaaagttaggcacacctttactgcattagcagcctttgacaatgacttcctcaaactgacaccatcttaattagatgcagggacagggatcaga

SEQ ID NO: 395630 - DNA, 120 bp, Artificial Sequence
  ENSG00000145721_24 (sequence is synthesized)
tgggacaatatcaaatttactttgtgccctacaagttaaaaactgcacccattctgtaaattgaatatagaggttctcccttggccactgtcagcttttcttgactggccaaaactgccc

SEQ ID NO: 395631 - DNA, 120 bp, Artificial Sequence
  ENSG00000145721_25 (sequence is synthesized)
attcttcctggaatggtatgaaagcttcagcaaaataaataaaagtcagaatctttgctggtccctttaatgctgatttgatagtaaatcaatttcagctgagacataagggctgtcagt

SEQ ID NO: 395632 - DNA, 120 bp, Artificial Sequence
  ENSG00000145721_26 (sequence is synthesized)
ctatcatataaacatctttaactatagcctagagaaaagagggttgaagagcaaagcagattttttttttccttttctatatcttgttctgaacaacacactgtgataaaggggactaga

SEQ ID NO: 395633 - DNA, 120 bp, Artificial Sequence
  ENSG00000145721_27 (sequence is synthesized)
gtggaagattccctatttaaacacatgaagctctgggtcctagccttttttggttataagccctttgagaatctgataaaagctgtggatcatctcctaggaaaatagaacaaaacatac

SEQ ID NO: 395634 - DNA, 120 bp, Artificial Sequence
  ENSG00000145721_28 (sequence is synthesized)
atattcacattacacagttccagagtatgtggaccccccaaagtccagagattgccctaggggatctttagattcttgtttagaactgttgattttgaacacaacatacactgtcaaact

SEQ ID NO: 395635 - DNA, 120 bp, Artificial Sequence
  ENSG00000145721_29 (sequence is synthesized)
ttacatcagggatccaacataactcagacatagcccaggtagcctgtttctaacacaactgtcataatcctgaaatccaaaattgcactgtgtttgacatgagatagtttaagttccaca

SEQ ID NO: 395636 - DNA, 120 bp, Artificial Sequence
  ENSG00000145721_30 (sequence is synthesized)
aaatccaaatttaccatattattgtttttaaaaaagcagtttagagcaaactgtcactaaacttggataaatgggtcagaaagtacagatttaataaagtcgtacctctaatgttcagaa

SEQ ID NO: 395637 - DNA, 120 bp, Artificial Sequence
  ENSG00000145721_31 (sequence is synthesized)
ctgggaagagggccccctgaggggtctttagattctgggaaatgtctgattggcagatgttaaaagggattccttggtaatccagtgcatcaatgagctgcagaaattcagcccaggact

SEQ ID NO: 395638 - DNA, 120 bp, Artificial Sequence
  ENSG00000145721_32 (sequence is synthesized)
gcaagaattcaggcatgaggacactctgtacaggaggctcacacaggcagacccaagatggacagaaccttggaatctctgagacacatcattgcccaagtcttgcctcacagagatccg

SEQ ID NO: 395639 - DNA, 120 bp, Artificial Sequence
  ENSG00000145723_0 (sequence is synthesized)
agttccgcttccggcagcgcgagataaatcacgagaggaagcttaaatctgtcgtttgaatttaggaccacctcggttcacaatggtccgtagtggaaaaaatggtgaccttcatcttaa

SEQ ID NO: 395640 - DNA, 120 bp, Artificial Sequence
  ENSG00000145723_1 (sequence is synthesized)
acagattgcatattacaaacgaactggtgaatatcattcaactacactgccaagtgagagaagtggcataagaagagcagcaaaaaaatttgtcttcaaagaaaaaaagctgttttatgt

SEQ ID NO: 395641 - DNA, 120 bp, Artificial Sequence
  ENSG00000145723_2 (sequence is synthesized)
tggaaaagacagaaaacaaaatcgtttggtaattgtttcagaagaggaaaaaaagaaagtcttaagagaatgccatgaaaatgacagtggagctcatcatggtatatccaggaccctcac

SEQ ID NO: 395642 - DNA, 120 bp, Artificial Sequence
  ENSG00000145723_3 (sequence is synthesized)
tctggtagaatccaattattattggacatctgtgaccaatgatgtcaaacagtgggtatatgcttgtcagcattgccaagtggcaaaaaatacagttattgtagcaccgaaacagcacct

SEQ ID NO: 395643 - DNA, 120 bp, Artificial Sequence
  ENSG00000145723_4 (sequence is synthesized)
tctcaaggtggaaaatccatggagtttagttactgttgatctgatggggccttttcatacaagcaacagaagtcatgtatatgctataatcatgacagatttgttcaccaaatggattgt

SEQ ID NO: 395644 - DNA, 120 bp, Artificial Sequence
  ENSG00000145723_5 (sequence is synthesized)
gattttgcctctatgtgatgtttcagcatcagaagtttctaaagctattatcaatatatttttcttatatggacctcctcagaaaataataatggaccaaagagatgaattcattcaaca

SEQ ID NO: 395645 - DNA, 120 bp, Artificial Sequence
  ENSG00000145723_6 (sequence is synthesized)
gatcaatattgaactgtacagattgtttggcataaagcaaattgtaatttctcacacctctggaactgttaacccaacggaaagtacacctaacacaatcaaagcatttctctccaaaca

SEQ ID NO: 395646 - DNA, 120 bp, Artificial Sequence
  ENSG00000145723_7 (sequence is synthesized)
ctgtgctgaccacccaaacaattgggatgatcacctatcagctgtttcatttgccttcaatgtaactcacttggaacctactaaaaatacaccatattttcaaatgtttagtcgaaatcc

SEQ ID NO: 395647 - DNA, 120 bp, Artificial Sequence
  ENSG00000145723_8 (sequence is synthesized)
ttatatgcctgagacttcagatagtcttcatgaagtggatggtgataatacaagtatgtttgccaaaattctagatgcaattaaagaagctgataaaataatggagaataagacaacttc

SEQ ID NO: 395648 - DNA, 120 bp, Artificial Sequence
  ENSG00000145723_9 (sequence is synthesized)
actgggccagatggagaacaacaatttggatgaactaaataaaagcaagatcattgttaaaaagaaacccaaacaattaaatccatttcatttaaaagtgggtcatgaagttttaagaca

SEQ ID NO: 395649 - DNA, 120 bp, Artificial Sequence
  ENSG00000145723_10 (sequence is synthesized)
aaggaaaaattggtggaaggatggtcgttttcagtctgaatgggttggtccttgtgtcatagactatattacagaaagtggatgtgctgtcctgagagacaacactggggttagactgaa

SEQ ID NO: 395650 - DNA, 120 bp, Artificial Sequence
  ENSG00000145723_11 (sequence is synthesized)
aagacctatcaaaatgtcccaccttaagccctacataagagaatccagtgaacaagaaagtctttatctcttgcaaggttcagtagtggcagatcatgactacattggattgcctgaaat

SEQ ID NO: 395651 - DNA, 120 bp, Artificial Sequence
  ENSG00000145723_12 (sequence is synthesized)
tccgattggagcatatcaagcaaatattctggtggaagatgcaactattggtatagtcgataatgaattactgacatcaagcaaggatcgtgaactattagaatatagaaatacgaaaat

SEQ ID NO: 395652 - DNA, 120 bp, Artificial Sequence
  ENSG00000145723_13 (sequence is synthesized)
ctctccattgatagacgatcatagttctcttgaaaagcagactttcagtctgttggactcttcaaaccaggttcttgaatacttaagttagtaaataccaaaatttatttaaattgtttg

SEQ ID NO: 395653 - DNA, 120 bp, Artificial Sequence
  ENSG00000145723_14 (sequence is synthesized)
ttcttaatgactatattctgaaggtttattttatagttcttatctaaaattatgccacatttgaatatcagtatacgtacatatgaaggcaaaggaagcatgtaatatatagaattcact

SEQ ID NO: 395654 - DNA, 120 bp, Artificial Sequence
  ENSG00000145723_15 (sequence is synthesized)
ttttcttctaaaaagagaacaggcaaagcacccctacttcttgggaaataaattccagcccaaatctctcaaacctttgtatggttttggcaccgtttctaagttttaaattttctgaaa

SEQ ID NO: 395655 - DNA, 120 bp, Artificial Sequence
  ENSG00000145723_16 (sequence is synthesized)
ttctctaccatttaaacagtaagtttgaactaccttgaatggaattgataaatactgaatcaactgtaacaatgaatgaaatgaagcttctttctgtttcattagaacttctaaaaacaa

SEQ ID NO: 395656 - DNA, 120 bp, Artificial Sequence
  ENSG00000145723_17 (sequence is synthesized)
gattgtatgaaaaaatatagggttatttaataggctttcacagaatattggtaatttcaaattatctaattggttagatagggtcaggattagggtctgaaactatgtattggttgggaa

SEQ ID NO: 395657 - DNA, 90 bp, Artificial Sequence
  ENSG00000145723_18 (sequence is synthesized)
gggtcaggattagggtctgaaactatgtattggttgggaaacaatttgtttattttcatactatatattaaagataaaaccatcgaccag

SEQ ID NO: 395658 - DNA, 77 bp, Artificial Sequence
  ENSG00000145723_19 (sequence is synthesized)
ctttgggaagccaaggcaggatgatcacttgaatctctacagaaaaatgtttaaaaattagccaggtgtggtggcac

SEQ ID NO: 395659 - DNA, 120 bp, Artificial Sequence
  ENSG00000145723_20 (sequence is synthesized)
cattgcttgaccccaggaggtcgaggctgcagtgagccgcgctcatgccacagctctccagcctgggcgacagggcaagacctgtctcaacaacaacaacaaaagtatccgttaagaatt

SEQ ID NO: 395660 - DNA, 120 bp, Artificial Sequence
  ENSG00000145723_21 (sequence is synthesized)
tctcaacaacaacaacaaaagtatccgttaagaattttttctgcaatcataaaatcataaaataaccagtatcaaagattttaaactgtaatttctatgatattcataaatataaaataa

SEQ ID NO: 395661 - DNA, 120 bp, Artificial Sequence
  ENSG00000145723_22 (sequence is synthesized)
aaaagaactgtgggaaaagtaaaagatgagtcaaacgtgtacctcattcttataaaggacttactgtctggtaggtaataaactatgtaagccatgtacagcacaagttaaggcatgcta

SEQ ID NO: 395662 - DNA, 120 bp, Artificial Sequence
  ENSG00000145723_23 (sequence is synthesized)
aattgcagaagacaggtgtagataatgtacttagggaggcaaaaagagagaagttgtttttacataggaaatttgtgtttatccttatggaagaaggatcatttaagcttgaccttgaag

SEQ ID NO: 395663 - DNA, 120 bp, Artificial Sequence
  ENSG00000145723_24 (sequence is synthesized)
aatgtataggatttggtaaatggatacaaaagaattaggggagaagtaatacacagaaatggaaaagtattgtaatgattcataaaaaggcagggcttcttgttgtctacactgcctcgg

SEQ ID NO: 395664 - DNA, 120 bp, Artificial Sequence
  ENSG00000145723_25 (sequence is synthesized)
gtataaagtgaagaagcaagataatgagggataaagctgaaaaggtaagtaggaaaccttatggagagctttgaatactattaaggattgatatgtgcccctcccaaaatttgtgttgaa

SEQ ID NO: 395665 - DNA, 120 bp, Artificial Sequence
  ENSG00000145723_26 (sequence is synthesized)
gtcttaacccccaccacctcaaaatgtgaccttatttggaaatgaggttgttgcaagtgtaattagttgagatcatatttcaatagggtgggctctaatacagtattactggtgttctga

SEQ ID NO: 395666 - DNA, 120 bp, Artificial Sequence
  ENSG00000145723_27 (sequence is synthesized)
taaaaggggaaaatttgaacacagactcaaggagaatgccatgtgaagataaaggcagagtttaagattatgtttctatatgccaagaaatgacagagattgccagaaaactaccagaag

SEQ ID NO: 395667 - DNA, 120 bp, Artificial Sequence
  ENSG00000145723_28 (sequence is synthesized)
ttaggggagaggcattgaatacatttttcctcattcctcagaagaccaaccctgtcaataccttatctcagacttttgcctccagaactgtgagacaataaaattctattgtttcagcca

SEQ ID NO: 395668 - DNA, 85 bp, Artificial Sequence
  ENSG00000145723_29 (sequence is synthesized)
aaagctattatcaatatatttttcttatatggacctcctcagaaaataataatggaccaaagagatgaattcattcaacagagac

SEQ ID NO: 395669 - DNA, 120 bp, Artificial Sequence
  ENSG00000145723_30 (sequence is synthesized)
cctgaactcacatgatccacctgcctcgacctcccagagtgctggaattactggcgtgagctaccgcacccagccctttcatttcattcttaaccataattacttgctaatgggtaatgt

SEQ ID NO: 395670 - DNA, 120 bp, Artificial Sequence
  ENSG00000145723_31 (sequence is synthesized)
gtttcacactgatttttacatagtaactgctttttatcacagcattcgatgaagaaaacagttctgtaaagatatgatgtcatcaaacaaattgtaacctgatctaatgttgaaactgaa

SEQ ID NO: 395671 - DNA, 120 bp, Artificial Sequence
  ENSG00000145723_32 (sequence is synthesized)
ctaccttaaactggtagttttcatggtgtcaaacagatgttaagggggcaacttggcacaaagtttggtaacaatggtttaaatgataaagctagtgtcacaaatgtgtctagtagagga

SEQ ID NO: 395672 - DNA, 120 bp, Artificial Sequence
  ENSG00000145723_33 (sequence is synthesized)
atgtctttctgatagatacttaaaatttattatttctccagatttattctgggtatcacctctcattaagtatttttggcaatcacttaaagggagttgtatttcccttcacagttattt

SEQ ID NO: 395673 - DNA, 120 bp, Artificial Sequence
  ENSG00000145723_34 (sequence is synthesized)
ctaacacaatcaaagcatttctctccaaacactgtgctgaccacccaaacaattgggatgatcacctatcagctgtttcatttgccttcaatgtaactcacttgaaagtctttatctctt

SEQ ID NO: 395674 - DNA, 120 bp, Artificial Sequence
  ENSG00000145725_0 (sequence is synthesized)
gactgatcatttggctcttgccggaaatcgttccgcccggtgaggtttcggcgtgagacccgaggagggcggggaagaggcgtgacggagattcctgaggtgtagtagcctgaggttccc

SEQ ID NO: 395675 - DNA, 120 bp, Artificial Sequence
  ENSG00000145725_1 (sequence is synthesized)
ttatgtggccctatagctgttactgaaggaagtagcctacgtccacgcctacaactgaagtctcttgacaaacacctcacccctgcctccgggatgaaagggggtaacctagacctgaat

SEQ ID NO: 395676 - DNA, 120 bp, Artificial Sequence
  ENSG00000145725_2 (sequence is synthesized)
gggcttgaccatctcacaactgctcgcgtgacgaccgcattcgtggcaggtaagaagattgctgtatcaactcaagaaagcagtaacttcactgtctttgtattttgaattgcaacaaca

SEQ ID NO: 395677 - DNA, 120 bp, Artificial Sequence
  ENSG00000145725_3 (sequence is synthesized)
actttgatatcaacaatgaagcaatgatatctaagaacaaaagagtatttgccaacagtcatcataatatcaagtgattgtataagcagaaacaagctgtcacagacctgtgcgtcagct

SEQ ID NO: 395678 - DNA, 120 bp, Artificial Sequence
  ENSG00000145725_4 (sequence is synthesized)
aatatatggagaatgctttcttctgatactatttacttagaggcagttttaatataaatcatttcaattatatctacatcaaataaaataaaaatgagtgaagcccccagattcttcgtt

SEQ ID NO: 395679 - DNA, 120 bp, Artificial Sequence
  ENSG00000145725_5 (sequence is synthesized)
ggaccagaagatacagaaataaatcctggaaattatcgacatttcttccaccatgcagatgaagacgatgaggaggaagatgattctccaccagaaaggcagattgtggttggaatatgt

SEQ ID NO: 395680 - DNA, 120 bp, Artificial Sequence
  ENSG00000145725_6 (sequence is synthesized)
tccatggcaaagaaatccaaatccaaaccaatgaaggaaattcttgaacggatctccttatttaaatatatcacagtagtagtatttgaagaggaggttattttgaatgaaccagtggaa

SEQ ID NO: 395681 - DNA, 120 bp, Artificial Sequence
  ENSG00000145725_7 (sequence is synthesized)
aactggcctttatgtgattgtcttatttctttccattctaaaggatttccactggacaaagcggttgcctatgcaaaactcaggaatccatttgtaatcaatgacttgaatatgcagtat

SEQ ID NO: 395682 - DNA, 120 bp, Artificial Sequence
  ENSG00000145725_8 (sequence is synthesized)
ctcatacaagataggagagaagtatatagtattcttcaagctgaaggtattttacttcctcgttatgctattttgaaccgtgacccaaataatcccaaagaatgtaatctgattgaaggg

SEQ ID NO: 395683 - DNA, 120 bp, Artificial Sequence
  ENSG00000145725_9 (sequence is synthesized)
gaagatcatgtagaagtaaatggggaagtttttcaaaagccatttgtagaaaagccagtcagtgcagaagatcacaatgtttacatttattacccaacttctgctggtggtggaagtcaa

SEQ ID NO: 395684 - DNA, 120 bp, Artificial Sequence
  ENSG00000145725_10 (sequence is synthesized)
agactctttagaaagattggcagtagaagtagtgtttattctccagaaagcaatgtacgaaaaacaggctcatatatatatgaagagtttatgcccacagatggtactgatgttaaggtt

SEQ ID NO: 395685 - DNA, 120 bp, Artificial Sequence
  ENSG00000145725_11 (sequence is synthesized)
tatacagtgggtccagattatgcccatgctgaagctcgaaaatctccagcacttgatggcaaggtggaacgagacagtgaaggaaaagaagtaagataccctgttattctcaatgcacga

SEQ ID NO: 395686 - DNA, 120 bp, Artificial Sequence
  ENSG00000145725_12 (sequence is synthesized)
gagaaattaattgcttggaaagtctgccttgcttttaagcaaacagtttgtggctttgatttgttacgggccaatggacagtcctatgtctgtgatgtcaatggcttcagttttgtgaaa

SEQ ID NO: 395687 - DNA, 120 bp, Artificial Sequence
  ENSG00000145725_13 (sequence is synthesized)
aattccatgaagtattatgatgactgtgcaaaaatacttggaaatattgtaatgcgagaacttgctccacaatttcatattccatggtcaatacccttagaagctgaagatatcccaatt

SEQ ID NO: 395688 - DNA, 120 bp, Artificial Sequence
  ENSG00000145725_14 (sequence is synthesized)
gtaccaactacatctggaactatgatggaacttagatgtgtcatagctgttatacgtcatggggatcgaacaccaaaacaaaaaatgaaaatggaagtgagacatcagaaattttttgat

SEQ ID NO: 395689 - DNA, 120 bp, Artificial Sequence
  ENSG00000145725_15 (sequence is synthesized)
ctttttgaaaagtgtgatggatataaatcagggaaattaaaactcaaaaaaccaaaacagttacaggaagtgctagatattgcacgacagcttcttatggagctagggcaaaataatgat

SEQ ID NO: 395690 - DNA, 120 bp, Artificial Sequence
  ENSG00000145725_16 (sequence is synthesized)
tctgaaattgaagaaaacaagccaaaacttgaacaacttaagactgtattagagatgtatggtcatttttctggaataaatcgtaaggttcagttgacctatctccctcatggttgtcct

SEQ ID NO: 395691 - DNA, 120 bp, Artificial Sequence
  ENSG00000145725_17 (sequence is synthesized)
aaaacatctagtgaagaggaggacagccgaagagaagaaccatctttacttttggttctaaaatggggaggtgaattaactcctgcaggcagggtccaggctgaagaacttggaagagcc

SEQ ID NO: 395692 - DNA, 120 bp, Artificial Sequence
  ENSG00000145725_18 (sequence is synthesized)
ttcaggtgtatgtatcctggaggtcaaggagattatgcaggatttcctggttgtggtttacttagattacatagcacctacagacatgacctcaaaatatatgcctctgatgaaggacga

SEQ ID NO: 395693 - DNA, 120 bp, Artificial Sequence
  ENSG00000145725_19 (sequence is synthesized)
gtccagatgactgcagctgcttttgcaaaggggcttttagctttggaaggagagcttacacccattcttgttcaaatggtgaaaagtgcaaatatgaacggtcttttggatagtgatagt

SEQ ID NO: 395694 - DNA, 120 bp, Artificial Sequence
  ENSG00000145725_20 (sequence is synthesized)
gactctctgagcagttgtcagcaacgtgtgaaggcaaggcttcatgaaatacttcagaaagacagagattttactgctgaagattatgaaaagcttactccatctggaagcatttctctt

SEQ ID NO: 395695 - DNA, 120 bp, Artificial Sequence
  ENSG00000145725_21 (sequence is synthesized)
atcaaatcaatgcatttaattaaaaaccctgtgaagacctgtgataaagtttattccttaattcagagtttgacttctcaaatcagacatcgaatggaagatcctaaatcatcagatatt

SEQ ID NO: 395696 - DNA, 120 bp, Artificial Sequence
  ENSG00000145725_22 (sequence is synthesized)
cagctttaccatagtgaaacattggagcttatgctacgtagatggtccaagttagagaaagactttaaaacaaagaatggaagatatgatattagtaaaatccctgacatatatgactgt

SEQ ID NO: 395697 - DNA, 120 bp, Artificial Sequence
  ENSG00000145725_23 (sequence is synthesized)
ataaaatatgatgtccagcataatggttccttgaaattagaaaacacaatggaattatataggctttcgaaggcattagcagatattgttatccctcaggaatatggtataactaaagct

SEQ ID NO: 395698 - DNA, 120 bp, Artificial Sequence
  ENSG00000145725_24 (sequence is synthesized)
gaaaaactggagattgccaaaggctactgtactcctctggttagaaaaattcgctcagaccttcagaggacacaagatgatgacactgtaaataaacttcatcctgtgtattctagaggt

SEQ ID NO: 395699 - DNA, 120 bp, Artificial Sequence
  ENSG00000145725_25 (sequence is synthesized)
gttctgtctcctgaacgtcatgttcgtactagattatattttaccagtgaaagtcatgtacattctttgctgtctattcttcgctatggtgccttatgcaatgaatcaaaggatgaacag

SEQ ID NO: 395700 - DNA, 120 bp, Artificial Sequence
  ENSG00000145725_26 (sequence is synthesized)
tggaaacgagctatggattatttaaacgttgtcaatgagctcaactacatgactcagattgttatcatgctttatgaggatcctaataaggatctttcctcagaagaacgctttcatgtt

SEQ ID NO: 395701 - DNA, 120 bp, Artificial Sequence
  ENSG00000145725_27 (sequence is synthesized)
gaattacactttagtccgggagccaaaggttgtgaagaagacaaaaatttgccatctggctatggatatagaccagcttccagagagaatgaaggcaggagaccttttaaaattgataat

SEQ ID NO: 395702 - DNA, 120 bp, Artificial Sequence
  ENSG00000145725_28 (sequence is synthesized)
gatgatgaaccacatacttctaaaagagatgaagttgatcgagctgtgatattgtttaaaccaatggtatcagagccaattcatatacacaggaagtctccacttccaagatctaggaag

SEQ ID NO: 395703 - DNA, 120 bp, Artificial Sequence
  ENSG00000145725_29 (sequence is synthesized)
acggctacaaatgatgaagagagccccctgagtgtgtctagcccagagggtactggtacctggctgcattataccagtggtgtgggtactgggcgtcgaagacgcagatcaggggaacaa

SEQ ID NO: 395704 - DNA, 120 bp, Artificial Sequence
  ENSG00000145725_30 (sequence is synthesized)
atcacttcttcccctgtctcccccaaatcattggctttcacatccagtatttttggctcatggcaacaggttgtatctgaaaatgctaattacctgagaacaccaagaactcttgtggaa

SEQ ID NO: 395705 - DNA, 120 bp, Artificial Sequence
  ENSG00000145725_31 (sequence is synthesized)
cagaagcagaatcctactgtagggtctcactgtgcgggcctgtttagcacctcggtgctcgggggttcttcaagcgcacctaacctacaggattatgctcgtactcatcgtaaaaagctg

SEQ ID NO: 395706 - DNA, 120 bp, Artificial Sequence
  ENSG00000145725_32 (sequence is synthesized)
acctcttctggctgcatagatggctttgaattgtattccatggtgccatctatttgtcctctagaaactcttcataatgccctatctttaaagcaagtggatgaatttcttgcttccatt

SEQ ID NO: 395707 - DNA, 120 bp, Artificial Sequence
  ENSG00000145725_33 (sequence is synthesized)
gcttctccatcatctgacgttccacggaagaccgctgaaatttcctctacagctttacgttccagtccaataatgagaaaaaaagtatctttaaatacgtatacacctgcaaagatcctc

SEQ ID NO: 395708 - DNA, 120 bp, Artificial Sequence
  ENSG00000145725_34 (sequence is synthesized)
ccaacaccaccagctaccttaaagagcactaaagcaagcagcaaaccagctacaagtggaccttctagtgcagttgttcctaatacctcatctcggaaaaagaatataactagcaaaaca

SEQ ID NO: 395709 - DNA, 120 bp, Artificial Sequence
  ENSG00000145725_35 (sequence is synthesized)
gaaacgcatgaacacaaaaaaaacactgggaaaaagaaatgaaatcttagcagaagctggaactttttatacttataaaaatagtatgttcttatgtttctccttatgcatttatgtgtt

SEQ ID NO: 395710 - DNA, 120 bp, Artificial Sequence
  ENSG00000145725_36 (sequence is synthesized)
cacttaaaaatgtttttaaatctaaggttttctttgtttatgttcaggtaaggaactgttgtcatgatctggaaatgtttaaaacaatgtttgttagcattctgtgagcagcaaaactta

SEQ ID NO: 395711 - DNA, 120 bp, Artificial Sequence
  ENSG00000145725_37 (sequence is synthesized)
tagtgataaaaatcgattgttgttaatatgatgtttaccatgtgcacatagtaatgaaaaggaacataaaagcccagcaggctcgtaccaaagtcacagcagtaatgctatgtactgcag

SEQ ID NO: 395712 - DNA, 120 bp, Artificial Sequence
  ENSG00000145725_38 (sequence is synthesized)
agtctgatgagctggcctttgtgcacacttttattttcatgggattgcatcttagctgttaaaacttctagattgaaatttgacagccagggttacatattggggacttttaaagtgtct

SEQ ID NO: 395713 - DNA, 120 bp, Artificial Sequence
  ENSG00000145725_39 (sequence is synthesized)
ttccaaagagatttcattaaccgtttagattagaatatctttcccaattgttacagtgacatatatgctgcaatatttaacaactggagtattagccacatgggttattttttcaatctg

SEQ ID NO: 395714 - DNA, 120 bp, Artificial Sequence
  ENSG00000145725_40 (sequence is synthesized)
tgttttgaatttttttattgtgtgttatttaaaatattacatatgcagctgggagaactacacctttgtgcacatagatttatatattaatttgtagaaaatattttctttatatatttc

SEQ ID NO: 395715 - DNA, 120 bp, Artificial Sequence
  ENSG00000145725_41 (sequence is synthesized)
cttaccatacaaggtgccttgttcatcaggaaaacttttgttttgtattttgacaagaaaggcaccttcagagtttctttttaagtatagttgacaagtgtataaatgttacacttactt

SEQ ID NO: 395716 - DNA, 120 bp, Artificial Sequence
  ENSG00000145725_42 (sequence is synthesized)
tcagagttctttttagatctaaagaagtcagttcaaaaatggaaatcaacaatgttaggagaaatctgaattctgttaagttagtaagtattatgtatagcatctgtttttaaccatttc

SEQ ID NO: 395717 - DNA, 120 bp, Artificial Sequence
  ENSG00000145725_43 (sequence is synthesized)
cattcttatccctagtgtatcagttgatcacactaagaaagcttaaagattgagcatttgaaataaatgctctttataaatgattagatttttgaagggatattgaaatcattgcgctgt

SEQ ID NO: 395718 - DNA, 120 bp, Artificial Sequence
  ENSG00000145725_44 (sequence is synthesized)
gatttcatctgtgatgtgaaaaatcaatttattatccttggtgctttcccccccaccaatgcacaaataattgtgaacagcttgaaatgacttaaactgtaatccaaatgggacaatctg

SEQ ID NO: 395719 - DNA, 120 bp, Artificial Sequence
  ENSG00000145725_45 (sequence is synthesized)
ataagaatttcatgcattggtagttaaataacttaaattgctaaagctttagcttgaaatttatgtttagaaaaactattgatttcccatggtatgaatataactattgtaattcttcaa

SEQ ID NO: 395720 - DNA, 120 bp, Artificial Sequence
  ENSG00000145725_46 (sequence is synthesized)
atgagactcttctcaccttaaatagtcatatattaattaacttataggaaataagcatactatatgttagctgttttaaaaggtaccagatgtaagagtcataaatatatgcaattaaag

SEQ ID NO: 395721 - DNA, 120 bp, Artificial Sequence
  ENSG00000145725_47 (sequence is synthesized)
aagttcatagatttcacatgaatgtaaatgtgttatatggagacatgtcttgtaaacagttgaatgtatgtaagttttctgtttgtgaaaatgtagttaatgtactcactgtggaggtca

SEQ ID NO: 395722 - DNA, 120 bp, Artificial Sequence
  ENSG00000145725_48 (sequence is synthesized)
taaggaagctactttttttttaaagtggaacctaattaaaatatttccagaatcaaagagacttaaatggtaaatttttaaaattttcttatctcttactttttagttttcaaagtagaa

SEQ ID NO: 395723 - DNA, 120 bp, Artificial Sequence
  ENSG00000145725_49 (sequence is synthesized)
tcaggaatttttttattaactagtacttacatattaaataaaatttattattggctatatacatagcaatatattactttccaaactagaaagtacagtacaactaactttttccattgt

SEQ ID NO: 395724 - DNA, 120 bp, Artificial Sequence
  ENSG00000145725_50 (sequence is synthesized)
ttgttatgcaagaactattactttcctgtagtcaccaaactcagtagtattgctctgtagactagacactctatttgtaaaaatcttagaatcactttccaaaacaaataaaaagtctac

SEQ ID NO: 395725 - DNA, 120 bp, Artificial Sequence
  ENSG00000145725_51 (sequence is synthesized)
tgtatcagagcaaaatgttatagttatcactgtttagtggcagtttgactgaagcatctgtttctcacttgattctgtcctgagaagatgtgggattttttggttttaaatactagaaga

SEQ ID NO: 395726 - DNA, 120 bp, Artificial Sequence
  ENSG00000145725_52 (sequence is synthesized)
tatttcttcttagagcccagtcctccatcccaaagaggtgaactagcccagcatgaagaattgtctagtcaccctgagatattaatcttcataatgtattattcagttccttcaccctta

SEQ ID NO: 395727 - DNA, 120 bp, Artificial Sequence
  ENSG00000145725_53 (sequence is synthesized)
aaagccatataataggctcagacctaacttagcccttgaagtctagtgctggcagattctgctgccctggtttaaatgagttacgtagtccattctcaaatactagcaaatttggggggc

SEQ ID NO: 395728 - DNA, 120 bp, Artificial Sequence
  ENSG00000145725_54 (sequence is synthesized)
gtggtacagcaattttgggtgaagaaaagtgtgctgaacaccttatgtcagtgatagacaagatatagaggctgaagggaatacagtaaagtaacaaaaacatgtggcagtgtgcttagc

SEQ ID NO: 395729 - DNA, 120 bp, Artificial Sequence
  ENSG00000145725_55 (sequence is synthesized)
ataaacatagagcacaaaggcaatagatggaaattatgagagaaaagttaaagttcttcaagaaatatccaattaaaactcactagccaaggaaaaagtttctgttttcacccggatttc

SEQ ID NO: 395730 - DNA, 120 bp, Artificial Sequence
  ENSG00000145725_56 (sequence is synthesized)
tttttgggttgactctgtctgacctaaatgtccactgttaactagtgccatgccagtttgaaccaagatttcacatttttgttttgtattcatactttggtagaaatttctcagtctttg

SEQ ID NO: 395731 - DNA, 120 bp, Artificial Sequence
  ENSG00000145725_57 (sequence is synthesized)
tgtatttataagaatttgctttacacatagtgtacagtgtttattaactttacatcattttatccttgccttactatctggacagtgtagactgcctatattcttagttggggttgggat

SEQ ID NO: 395732 - DNA, 120 bp, Artificial Sequence
  ENSG00000145725_58 (sequence is synthesized)
ctcttctcttagagtggcccagcagttttagcccctctctaattctcttttcctgtgttgggagatatcaaaacaacagaattcttgccagtgggaacatttttcttttttagacaaggt

SEQ ID NO: 395733 - DNA, 90 bp, Artificial Sequence
  ENSG00000145725_59 (sequence is synthesized)
taataaatctttctgcttcagcctcctaaatagctggtactataggtgcgtgccaccacacccagctcatgggaataatttttacactcc

SEQ ID NO: 395734 - DNA, 120 bp, Artificial Sequence
  ENSG00000145725_60 (sequence is synthesized)
tgccaccacacccagctcatgggaataatttttacactccttcagaaggagtcatttgtgattggagtccacatagaaacaggtttccctctgtacataatcgtaggtaccaaaatatta

SEQ ID NO: 395735 - DNA, 120 bp, Artificial Sequence
  ENSG00000145725_61 (sequence is synthesized)
ctgtgtaaagtgttgtttatataggtcaatttttgtggaagatctaatttctattttcagagaacagagcacattaaaaaatctatttagtattgtgtactatataatctatgtgaatta

SEQ ID NO: 395736 - DNA, 85 bp, Artificial Sequence
  ENSG00000145725_62 (sequence is synthesized)
tatccctcccccagccccccacccactgacaggactgttctcattgttcagttccctcttatgagtgagaacatgcggtgtttgg

SEQ ID NO: 395737 - DNA, 87 bp, Artificial Sequence
  ENSG00000145725_63 (sequence is synthesized)
tgtaagatgatatctcattgagatttttataaactgcttttcttttggttcatgtgctttgtcatggattgtgagaaaaacatcttt

SEQ ID NO: 395738 - DNA, 120 bp, Artificial Sequence
  ENSG00000145725_64 (sequence is synthesized)
gttcatgtgctttgtcatggattgtgagaaaaacatcttttcgcttagggatcactgtcaatttctccttttattatcaatggtttttactttactttttatatagtatgtgggtatgtt

SEQ ID NO: 395739 - DNA, 120 bp, Artificial Sequence
  ENSG00000145725_65 (sequence is synthesized)
ttctggtgcatataaattcatgaatgctagattttcattataggttttaccttatcattattaaaatgtcctttttgtccattggatactttttgttctataaattgtcagatattaaga

SEQ ID NO: 395740 - DNA, 120 bp, Artificial Sequence
  ENSG00000145725_66 (sequence is synthesized)
ttatgacctatgctttattttggcttgcatttgcctgatattcatctttttactttttggtatttgtgtcactttgttttaggttatttaatatagtatatattgggttttgctttgtga

SEQ ID NO: 395741 - DNA, 120 bp, Artificial Sequence
  ENSG00000145725_67 (sequence is synthesized)
ttcaattttaagatcccttttacttaatagattagtgtagtctgttttatgtaatgtatctttgcttttagattgtgcttgctttttttattgctttaaaattcttttgtctttctgtaa

SEQ ID NO: 395742 - DNA, 120 bp, Artificial Sequence
  ENSG00000145725_68 (sequence is synthesized)
caatactttccactgcaagtaggaaaattccaattgaaactggtttaaatcatcagaaaatgtattattacacatttctgaaggtccaaaggtggggttggcttcagccacagttgcatt

SEQ ID NO: 395743 - DNA, 120 bp, Artificial Sequence
  ENSG00000145725_69 (sequence is synthesized)
agccatattgtcatcaaaagcccaagtgacctcccttgtcacctctggcatagtataaactttatcccaaagttgttttctctcgtgttaacaataattgctgtcggtttcagtgaggac

SEQ ID NO: 395744 - DNA, 120 bp, Artificial Sequence
  ENSG00000145725_70 (sequence is synthesized)
tacatattttttttgttcatgtccaacacaataaaaattgagggaagttctgtcccaatcctggaatattaatattaagccatctacttcagtgtgattgagccaacttctttgatcatc

SEQ ID NO: 395745 - DNA, 120 bp, Artificial Sequence
  ENSG00000145725_71 (sequence is synthesized)
tactcacccctagataaatagaatactccaggagattcccatgaccttactgaccctagagcagatgatggagtcagtttttccgaaaagcctcagcactgttgacattttggaccataa

SEQ ID NO: 395746 - DNA, 120 bp, Artificial Sequence
  ENSG00000145725_72 (sequence is synthesized)
aattctacatcataggaagctgttccatgcatagcagcatgtctagtaggatctctgtacctagctgtgaagtgttgagagtcagttaaggtaagtagctgaaatgaaaataacaatcac

SEQ ID NO: 395747 - DNA, 120 bp, Artificial Sequence
  ENSG00000145725_73 (sequence is synthesized)
atctttattcacttactatgataaaattataagcaagagaccaaaaaggaaagtagggccagctccttgttgttccatttttcccctaccatggactagcactggacatgcgtcaatcag

SEQ ID NO: 395748 - DNA, 120 bp, Artificial Sequence
  ENSG00000145725_74 (sequence is synthesized)
acgacatgcagtccaggcagaggaaattgtttcactgctaaggagcaatgaacaaaaggttcctgccatcttatggacctcaaggactgcggacagggagcagggaagggttagaagtag

SEQ ID NO: 395749 - DNA, 120 bp, Artificial Sequence
  ENSG00000145725_75 (sequence is synthesized)
aaaacaactgagtcagagtggagatgagtgtctcagtcaaggcccaccaatagcgaggtctctgtggaggcacctgaaaagtgtctcaaccaaggccccctgataaggaagactcagcat

SEQ ID NO: 395750 - DNA, 120 bp, Artificial Sequence
  ENSG00000145725_76 (sequence is synthesized)
ggaggtacctggtctaggaatgcagctaggtttatagacatggccagcccagggggtcctgagcaccagatacaactccctccagagactggctgtgtttaaatctcatgtgggaagggc

SEQ ID NO: 395751 - DNA, 120 bp, Artificial Sequence
  ENSG00000145725_77 (sequence is synthesized)
acctttcccctacaaagcctgtcaggcaaagcctttgtaattgcttatggtcaggcctgaaagatcacacatcagactttggcctggaacatatctcctcaccctaaatgccagcagcat

SEQ ID NO: 395752 - DNA, 120 bp, Artificial Sequence
  ENSG00000145725_78 (sequence is synthesized)
cgcctccaaactgtggcagtcaaaaatgtctccagacattagtaaatgtcttttgtgagggaagaattgaccctagttaagaaccactgccctaaagcacatgattctgtggaaaagaag

SEQ ID NO: 395753 - DNA, 120 bp, Artificial Sequence
  ENSG00000145725_79 (sequence is synthesized)
gatatatgaccaaaatcatcattttggatagtgagggcatggataatggatacataatcagcaatgtatgctgtatactacacttgcattatgttattcacatttgctatagttcacttg

SEQ ID NO: 395754 - DNA, 120 bp, Artificial Sequence
  ENSG00000145725_80 (sequence is synthesized)
ttgtgctaatggttttttccttcactatgattttgaattatatttaattttaaagtctatatatatatatatatagatcctatctgttgactccttgctgtgaacaatatccaattagtg

SEQ ID NO: 395755 - DNA, 120 bp, Artificial Sequence
  ENSG00000145725_81 (sequence is synthesized)
tattttttcctctactgcacagttttggttgattattttttccttttcatttcttttctgaactttgttagcttatgttgcatttcctttggttgttttgctatggtgtttctgatcaac

SEQ ID NO: 395756 - DNA, 120 bp, Artificial Sequence
  ENSG00000145725_82 (sequence is synthesized)
tacatttctttatgaactctatttccttaagttctttgagttatgacagtatatttggtcacatttttcatgtgctcagctgattcattctttcctgttgagtggtttttatctgctaat

SEQ ID NO: 395757 - DNA, 120 bp, Artificial Sequence
  ENSG00000145725_83 (sequence is synthesized)
tgtttctgcttgttccatttctccttttcttgaagtgtttgtgcatgaacactgtgcaggtttattttcaagtattacttacctttatatgagataaatttctttctggctcatctattt

SEQ ID NO: 395758 - DNA, 79 bp, Artificial Sequence
  ENSG00000145725_84 (sequence is synthesized)
tctggctcatctatttgatacaaaaaatgcaatttcatatgttaggtaggttggcttttctttttctttttcttttttt

SEQ ID NO: 395759 - DNA, 120 bp, Artificial Sequence
  ENSG00000145725_85 (sequence is synthesized)
attacaggcatgagccatcatgcccggccgtaggttggcattttaagctcacacaatcctaccaaggtgacagtgaatctccttatgacaggattgtgggtctgagagagctgttgtagc

SEQ ID NO: 395760 - DNA, 120 bp, Artificial Sequence
  ENSG00000145725_86 (sequence is synthesized)
cttttactctctccagtcaacaaagattggcaactacagggttaccacctttggagtctctttcctcctgtctgccacgtctacagactactgcttgtcaatgtgatatgcatgtatttt

SEQ ID NO: 395761 - DNA, 120 bp, Artificial Sequence
  ENSG00000145725_87 (sequence is synthesized)
cttcttcagctttgcccctcctgccactgtaccagacaatatccaggaaatcccctactactgacactcatcccatttccattgttttagagaaggaactagttgttgttgttttttttt

SEQ ID NO: 395762 - DNA, 120 bp, Artificial Sequence
  ENSG00000145725_88 (sequence is synthesized)
ccctgtctcagattatgtcatctattttggagtattttggtctaatgactttggctgcgatatggagctatctgacctttactgcacctggcagctctatctcctattttggggttgagg

SEQ ID NO: 395763 - DNA, 120 bp, Artificial Sequence
  ENSG00000145725_89 (sequence is synthesized)
ttaaagtgtcttctagttttgttgaagatagtttatgtttctcttcatatttgatgataattttttaaattaagacctaatttctccttcattttcaaactggatatcatttcttttgtg

SEQ ID NO: 395764 - DNA, 120 bp, Artificial Sequence
  ENSG00000145725_90 (sequence is synthesized)
gttaatattctttgacaagaaggaagaggaggaggaagaagaacaaaagaagcctgcctctctttagactgcccatctcaattatattttaaaaatgaagttaatatctgtcctgctaac

SEQ ID NO: 395765 - DNA, 120 bp, Artificial Sequence
  ENSG00000145725_91 (sequence is synthesized)
agtagtgttgtcagaatcaaatgaaataatatttggtaaactataaagtgaagaccaaatttgaaggactatttgtttttgttgtaatagagttgtatatagtccagatgtcaaccaggc

SEQ ID NO: 395766 - DNA, 120 bp, Artificial Sequence
  ENSG00000145725_92 (sequence is synthesized)
ctcttcagcatttttatagtcaaagatgtacaagatagctcctaatgctcttttatggctgctcctgttgccagggcaacagcctgcctagtaacaatctaacagacaccccccaaaaac

SEQ ID NO: 395767 - DNA, 120 bp, Artificial Sequence
  ENSG00000145725_93 (sequence is synthesized)
caaaaaataaaggttattctagcatcttctccttttaaaaatctttaaaataagagaattcagttcttcccaaagcagtgtttaaaaaaaaaaagtatttaaataaaatcaaggatacca

SEQ ID NO: 395768 - DNA, 120 bp, Artificial Sequence
  ENSG00000145725_94 (sequence is synthesized)
tcccacccacctatcttacattttgtgtggtatgagtggcaccattgtgtgacccaggtaggatagtggatgtacagtttagatacccattttaaagcagttagaaagatgtaacttgac

SEQ ID NO: 395769 - DNA, 120 bp, Artificial Sequence
  ENSG00000145725_95 (sequence is synthesized)
aaggaaagcagtctcttttgtcattctacatttagtgcttcaggagtacttgatatatggaaggatttttttaaaaaaaaggaaaaatgaatatgccttcagaaagttttttgctgcttt

SEQ ID NO: 395770 - DNA, 120 bp, Artificial Sequence
  ENSG00000145725_96 (sequence is synthesized)
taaaagccatagatttgtcttaagttagtcaatgctgaatagaaagcttgatgataaaggtgggtgggtggatggatggatggatgaatgaaggaaaaattaggagaaaagagaaagcag

SEQ ID NO: 395771 - DNA, 120 bp, Artificial Sequence
  ENSG00000145725_97 (sequence is synthesized)
aggaggggtgagacagagaacaaaagaacacaggctctactgttaacaaaaagcagcatcgctgatgtgtggggaataaattggaagtcatatcattacgacttttttttcatgccacat

SEQ ID NO: 395772 - DNA, 120 bp, Artificial Sequence
  ENSG00000145725_98 (sequence is synthesized)
agatatgctgatttgtccaacaatgcctgtactcaaaagtcatgacaataaaatgagacctgggagtcccaaatgttattaactaccacaattttatataactgattcttcactggtcat

SEQ ID NO: 395773 - DNA, 120 bp, Artificial Sequence
  ENSG00000145725_99 (sequence is synthesized)
ccagaagcctttttgaaagtcccactgccatacctgcctcctcggtgaaatagatgtaaaagccacaaagagagaatcaatgagccacactcatattggaagcgaatggagttgacttca

SEQ ID NO: 395774 - DNA, 120 bp, Artificial Sequence
  ENSG00000145725_100 (sequence is synthesized)
ccagtgggaaaagcaattacttttcaaagtgaaaactgatcaattcacaactcaaggaaagcatggagtaatttcagaactccagtaagaagtgataaatgtctagtttggaatcatgtg

SEQ ID NO: 395775 - DNA, 120 bp, Artificial Sequence
  ENSG00000145725_101 (sequence is synthesized)
gctgaaaatcttaccatatgctttccacaggctgagcaagaggatagatcattgaatagatgctttaattccatttttgacaatgaaccttgtgcttctgaaaatatttatatttaacca

SEQ ID NO: 395776 - DNA, 120 bp, Artificial Sequence
  ENSG00000145725_102 (sequence is synthesized)
tgaggttatgatgattttttctctacactttttgagaagcctcttcagaaaagagcaaagttgtctgctctaatggatagaataaggagctgggagaaaggagacctgggtattaatctc

SEQ ID NO: 395777 - DNA, 120 bp, Artificial Sequence
  ENSG00000145725_103 (sequence is synthesized)
agctctaccactacatggtagagctatgtagtggtagactatctgggagactctagaatctttaccattccctctactattcctagctcccttttctttcatagtcaacaagtgcttttt

SEQ ID NO: 395778 - DNA, 120 bp, Artificial Sequence
  ENSG00000145725_104 (sequence is synthesized)
gaacaattattgaggtaaataacataccctaaaagttagtactgattcccattatcatgctctgttgttccctggatgctcttttgaggaatttacttggttaatacagttaatagtata

SEQ ID NO: 395779 - DNA, 120 bp, Artificial Sequence
  ENSG00000145725_105 (sequence is synthesized)
atacttataataacaattttgagaattatcagcatgagacaatttatttgcataatagctttttgttattatccagaatacatttagttctggattttgtttgatattgtgaatgcaaac

SEQ ID NO: 395780 - DNA, 120 bp, Artificial Sequence
  ENSG00000145725_106 (sequence is synthesized)
tatttttttgtgttagcctaaataaaatgaaatacagttatggaaatatttctgctgcaagaaaagaattacatacaactagtatacatatttagaggtgctgtagtcttctagactgta

SEQ ID NO: 395781 - DNA, 120 bp, Artificial Sequence
  ENSG00000145725_107 (sequence is synthesized)
aaggcagatggccgtgagtggaaatctgagtgtataggatgtgtttcgtgttcccactgcatatgcattattacccttgtctgagtggttgtttaaactgacatctgtaaaactaatctg

SEQ ID NO: 395782 - DNA, 120 bp, Artificial Sequence
  ENSG00000145725_108 (sequence is synthesized)
taaagtgagatctgggttctgacctatctcttacagtccataatgttgtgattctaagaatatttcattccttactgctttctgccctccattctgaccaatgctgcaaccacaaataaa

SEQ ID NO: 395783 - DNA, 120 bp, Artificial Sequence
  ENSG00000145725_109 (sequence is synthesized)
aacattacttaccctatgagaaagactagaccttatactcattttatcttaacagtttattataactcattttgaccactcctccctcaaaaaaaattgtccctagaaaactagagtgat

SEQ ID NO: 395784 - DNA, 120 bp, Artificial Sequence
  ENSG00000145725_110 (sequence is synthesized)
catagggatcagatgacatgttactgggtgaagccaggaagctaccatatacatagaaaagttagttgccaaatatggtgtgggaatttgggaggaatttatctgctcaaaaactctcac

SEQ ID NO: 395785 - DNA, 120 bp, Artificial Sequence
  ENSG00000145725_111 (sequence is synthesized)
ctacttactagatatagtgtttgtaatgttagccttggagattctaccttaaaaatatcattgagaaagctcagagaactcccaggtaaacacacaggtagccccttctaaaatgcaaat

SEQ ID NO: 395786 - DNA, 120 bp, Artificial Sequence
  ENSG00000145725_112 (sequence is synthesized)
gccctttgaaggccagctttattaatcttgccattaaccccatagttaatcatatgcatttctcacagtgacctgaaaacaggcattccttctctaaatgtgtgctgaatgctggttata

SEQ ID NO: 395787 - DNA, 120 bp, Artificial Sequence
  ENSG00000145725_113 (sequence is synthesized)
aaccagttactacactaagccctgatgatacaaatatgaaaagtcctgtttccagggaatttactttctaatgaggaaccaagtgctcaaaagcagtcataaagttcatggcaaaataac

SEQ ID NO: 395788 - DNA, 120 bp, Artificial Sequence
  ENSG00000145725_114 (sequence is synthesized)
ccacataattaactgctttgttacaaaaacttggaaatatagataaaatatttattttggaaatatatgttacaggtgaaaagcaagaattaaaactagttatctgaatgtaaaaggaat

SEQ ID NO: 395789 - DNA, 120 bp, Artificial Sequence
  ENSG00000145725_115 (sequence is synthesized)
caacggctaaatcaagcttaaagtcttcctgtccaagggatatgaaaggtacctcaacctttggttttggttttggttttggttttgtttttttggtcaacatgaattatagctagggga

SEQ ID NO: 395790 - DNA, 120 bp, Artificial Sequence
  ENSG00000145725_116 (sequence is synthesized)
agagataaacagggggttaggttgtagattatatgcatgacagattgctggaattgggctccattcacaaaggagggagcaggaaagggtttctcttgactggaccacaaatataaaatc

SEQ ID NO: 395791 - DNA, 120 bp, Artificial Sequence
  ENSG00000145725_117 (sequence is synthesized)
tcatgccctctcattatcttgataagccctataggtccataaaagaaataaaatgccaaaacataccatgaggacactttcacaatccagggcacacacatgactcccgcaataggaaac

SEQ ID NO: 395792 - DNA, 120 bp, Artificial Sequence
  ENSG00000145725_118 (sequence is synthesized)
cacactgaagacattctcacaatttaaaacaagttgtaaactacaggaaacagttggcatcccaggagagttgttgcctgaggaactagatggtggtatgttattctggcatatagggaa

SEQ ID NO: 395793 - DNA, 120 bp, Artificial Sequence
  ENSG00000145725_119 (sequence is synthesized)
cagaataagacatgagggtaggaagaggtttttaaaagcaaagttaggcattcaatgatgacttcataaatgtgcctgggctggcctttaatggaaggctttaatttagggaacttaaag

SEQ ID NO: 395794 - DNA, 120 bp, Artificial Sequence
  ENSG00000145725_120 (sequence is synthesized)
aatttcataatattggagtataaactgctggaaataaggatgctatttaatagactctcttagatttttcataaaatgctaatagaatcccaaaggaagtgtgtattctaaaatgttatt

SEQ ID NO: 395795 - DNA, 120 bp, Artificial Sequence
  ENSG00000145725_121 (sequence is synthesized)
gtgtatgttataaaagctttgtaaaataaagtgatgttaagctactattgtaaagttaaaaattttttcagtcatctgtaatctcattacccaagtaaaactgttttcatttttccatta

SEQ ID NO: 395796 - DNA, 120 bp, Artificial Sequence
  ENSG00000145725_122 (sequence is synthesized)
ccaggctggagtacaatggcacgatctccactcaccgcaacctccacctcctggatttgagtgattctcctgcttcagcctcctaagtatctgggattacaggatttccactggacaaag

SEQ ID NO: 395797 - DNA, 120 bp, Artificial Sequence
  ENSG00000145725_123 (sequence is synthesized)
ccgaggggcttgtgctggagagaatgacagcctgggcgtggagtgacagtacagctttgagggtcctttcgcgccttgatttctcctcctgctcccccatggcttccctttttcatttct

SEQ ID NO: 395798 - DNA, 120 bp, Artificial Sequence
  ENSG00000145725_124 (sequence is synthesized)
acgcggttctgctgttaaaaggttttctatctcatttgctcgacacccaaccaatgctgcagcttctaaagaaaccgcatgcctaagaacctcttagaagaaacacagaagtcacaagaa

SEQ ID NO: 395799 - DNA, 120 bp, Artificial Sequence
  ENSG00000145725_125 (sequence is synthesized)
aaacagaagccacaaaaattctaagaagagacattgcaggtttaagaccatagtttttgtactgaatgctgtgtgtttaaaaccagtatttgaggtattattatctaggagaatctgtgt

SEQ ID NO: 395800 - DNA, 120 bp, Artificial Sequence
  ENSG00000145725_126 (sequence is synthesized)
ttaactgaaggtttttaaaaatgaaaaatatttatgttaaatttaatagaaaatagagtaattttatattcctttggtttaggctcttttttaaaaatgtgggttttccgcacatacaaa

SEQ ID NO: 395801 - DNA, 120 bp, Artificial Sequence
  ENSG00000145725_127 (sequence is synthesized)
attttcttctgttattatgaatattcgtagggtcactaaattataagaaactttctatgatgttaagagataattggcaggaaattattaaattaacatgtttgtttattttttttcagc

SEQ ID NO: 395802 - DNA, 120 bp, Artificial Sequence
  ENSG00000145725_128 (sequence is synthesized)
gttactctgataaagcccatgcatggatcaataattgtatggtgatctcaagagtctctgtctgtcctttcttttgtttgtagttgttttttcccccttcaaatacaggagctgtttaag

SEQ ID NO: 395803 - DNA, 120 bp, Artificial Sequence
  ENSG00000145725_129 (sequence is synthesized)
agtgggcatttggcttcttttaagagtgaaattatatcaatctcttaattgcttcttttcatctgtcttgtttcatacatgatgtttcattctgaatgcctgcttcgcaccacttcattg

SEQ ID NO: 395804 - DNA, 120 bp, Artificial Sequence
  ENSG00000145725_130 (sequence is synthesized)
tgcatatgaagtatagacttatgaatttattttactcttttacttcatttattttggattccttatgcaggttgtatctgaaaatgctaattacctgagaacaccaagaactcttgtgga

SEQ ID NO: 395805 - DNA, 120 bp, Artificial Sequence
  ENSG00000145725_131 (sequence is synthesized)
aagttttactacttaatgtcgtctttcaagggactactatataccaagcattttgctagattttagggataaagatgttctcttcagagaagatacatttaagcaaacaataatataaag

SEQ ID NO: 395806 - DNA, 120 bp, Artificial Sequence
  ENSG00000145725_132 (sequence is synthesized)
ctttagcagtctgaagcctatggactcttttttaagagtagtgtttttaaatgctttaaacatgtaagattatgatggagacaaattttattcaaatataataaaatatttaaaaaccaa

SEQ ID NO: 395807 - DNA, 120 bp, Artificial Sequence
  ENSG00000145725_133 (sequence is synthesized)
tgctgttaaaaggttttctatctcatttgctcgacacccaaccaatgaacacctacacctctataggtgctggtccgtttcctctgtggaatttctaggctccagtggctttgaattgta

SEQ ID NO: 395808 - DNA, 120 bp, Artificial Sequence
  ENSG00000145730_0 (sequence is synthesized)
ggcgccgctgcccaaccgccagccccagccccgcgctgcgctgcccggtcctctcccggcggggtcgtatcggcgtggacatggctggccgcgtccctagcctgctagttctccttgttt

SEQ ID NO: 395809 - DNA, 120 bp, Artificial Sequence
  ENSG00000145730_1 (sequence is synthesized)
ttccaagcagctgtttggctttccgaagcccactttctgtctttaagaggtttaaagaaactaccagaccattttccaatgaatgtcttggtaccaccagacccgtagttcctattgatt

SEQ ID NO: 395810 - DNA, 120 bp, Artificial Sequence
  ENSG00000145730_2 (sequence is synthesized)
catcagattttgcattggatattcgcatgcctggggttacacctaaacagtccgatacatacttctgcatgtctatgcgaataccagtggatgaggaagccttcgtgattgacttcaagc

SEQ ID NO: 395811 - DNA, 120 bp, Artificial Sequence
  ENSG00000145730_3 (sequence is synthesized)
ctcgagccagcatggatactgtccatcacatgttactttttggatgcaatatgccttcatccactggaagttactggttttgtgatgaaggaacctgtacagataaagccaatattctgt

SEQ ID NO: 395812 - DNA, 120 bp, Artificial Sequence
  ENSG00000145730_4 (sequence is synthesized)
atgcctgggcgagaaatgctccccctacccggctccccaaaggtgttggattcagagttggaggagagactggaagtaaatactttgtactacaggtacactatggggatattagtgctt

SEQ ID NO: 395813 - DNA, 120 bp, Artificial Sequence
  ENSG00000145730_5 (sequence is synthesized)
ttagagataataacaaggactgttctggtgtgtccttacacctcacacgtctgccacagcctttaattgctggcatgtaccttatgatgtctgttgacactgttatcccagcaggagaaa

SEQ ID NO: 395814 - DNA, 120 bp, Artificial Sequence
  ENSG00000145730_6 (sequence is synthesized)
aagtggtgaattctgacatttcatgccattataaaaattatccaatgcatgtctttgcctatagagttcacactcaccatttaggtaaggtagtaagtggatacagagtaagaaatggac

SEQ ID NO: 395815 - DNA, 120 bp, Artificial Sequence
  ENSG00000145730_7 (sequence is synthesized)
agtggacactgattggacggcagagccctcagctgccacaggctttctaccctgtggggcatccagttgatgtaagttttggtgacctactggctgcaagatgtgtattcactggtgaag

SEQ ID NO: 395816 - DNA, 120 bp, Artificial Sequence
  ENSG00000145730_8 (sequence is synthesized)
gaaggacagaagccacacacattggtggcacgtctagtgatgaaatgtgcaacttatacattatgtattacatggaagccaagcatgcagtttctttcatgacctgtacccagaatgtag

SEQ ID NO: 395817 - DNA, 120 bp, Artificial Sequence
  ENSG00000145730_9 (sequence is synthesized)
ctccagatatgttcagaaccataccaccagaggccaacattccaattcccgtgaagtctgatatggttatgatgcatgaacatcataaagaaacagaatataaagataagattcctttac

SEQ ID NO: 395818 - DNA, 120 bp, Artificial Sequence
  ENSG00000145730_10 (sequence is synthesized)
tacagcagccaaaacgagaagaagaagaagtgttagaccagggtgatttctattcactactttccaagctgctaggagaaagggaagatgttgttcatgtgcacaaatataatcctacag

SEQ ID NO: 395819 - DNA, 120 bp, Artificial Sequence
  ENSG00000145730_11 (sequence is synthesized)
aaaaggcagaatcagagtcagacctggtagctgagattgcaaatgtagtccaaaaaaaggatcttggtcgatctgatgccagagagggtgcagaacatgagaggggtaatgctattcttg

SEQ ID NO: 395820 - DNA, 120 bp, Artificial Sequence
  ENSG00000145730_12 (sequence is synthesized)
aattccacagactagtatctaccttgaggccaccagagagcagagttttctcattacagcagcccccacctggtgaaggcacctgggaaccagaacacacaggagatttccacatggaag

SEQ ID NO: 395821 - DNA, 120 bp, Artificial Sequence
  ENSG00000145730_13 (sequence is synthesized)
aggcactggattggcctggagtatacttgttaccaggccaggtttctggggtggctctagaccctaagaataacctggtgattttccacagaggtgaccatgtctgggatggaaactcgt

SEQ ID NO: 395822 - DNA, 120 bp, Artificial Sequence
  ENSG00000145730_14 (sequence is synthesized)
ttgacagcaagtttgtttaccagcaaataggactcggaccaattgaagaagacactattcttgtcatagatccaaataatgctgcagtactccagtccagtggaaaaaatctgttttact

SEQ ID NO: 395823 - DNA, 120 bp, Artificial Sequence
  ENSG00000145730_15 (sequence is synthesized)
tgccacatggcttgagtatagataaagatgggaattattgggtcacagacgtggctctccatcaggtgttcaaactggatccaaacaataaagaaggccctgtattaatcctgggaagga

SEQ ID NO: 395824 - DNA, 120 bp, Artificial Sequence
  ENSG00000145730_16 (sequence is synthesized)
gcatgcaaccaggcagtgaccagaatcacttctgtcaacccactgatgtggctgtggatccaggcactggagccatttatgtatcagatggttactgcaacagcaggattgtgcagtttt

SEQ ID NO: 395825 - DNA, 120 bp, Artificial Sequence
  ENSG00000145730_17 (sequence is synthesized)
caccaagtggaaagttcatcacacagtggggagaagagtcttcagggagcagtcctctgccaggccagttcactgttcctcacagcttggctcttgtgcctcttttgggccaattatgtg

SEQ ID NO: 395826 - DNA, 120 bp, Artificial Sequence
  ENSG00000145730_18 (sequence is synthesized)
tggcagaccgggaaaatggtcggatccagtgttttaaaactgacaccaaagaatttgtgagagagattaagcattcatcatttggaagaaatgtatttgcaatttcatatataccaggct

SEQ ID NO: 395827 - DNA, 120 bp, Artificial Sequence
  ENSG00000145730_19 (sequence is synthesized)
tgctctttgcagtgaatgggaagcctcattttggggaccaagaacctgtacaaggatttgtgatgaacttttccaatggggaaattatagacatcttcaagccagtgcgcaagcactttg

SEQ ID NO: 395828 - DNA, 120 bp, Artificial Sequence
  ENSG00000145730_20 (sequence is synthesized)
atatgcctcatgatattgttgcatctgaagatgggactgtgtacattggagatgctcataccaacaccgtgtggaagttcaccttgactgagaaattggaacatcgatcagttaaaaagg

SEQ ID NO: 395829 - DNA, 120 bp, Artificial Sequence
  ENSG00000145730_21 (sequence is synthesized)
ctggcattgaggtccaggaaatcaaagattctgaacacaaactcgagacgagttcaggaagagtactgggaagatttagaggaaagggaagtggaggcttaaaccttggtaatttctttg

SEQ ID NO: 395830 - DNA, 120 bp, Artificial Sequence
  ENSG00000145730_22 (sequence is synthesized)
caagccgtaagggctacagtcgaaaagggtttgaccggcttagcactgagggcagtgaccaagagaaagaggatgatggaagtgaatcagaagaggagtattcagcacctctgcctgcgc

SEQ ID NO: 395831 - DNA, 120 bp, Artificial Sequence
  ENSG00000145730_23 (sequence is synthesized)
tcgcaccttcctcctcctgaaaaccaagctttgatttagattgagtaagatttacccagaatgtcagattcctttccctttagcacgtttaaagttctgtgtatttaattgtaaactgta

SEQ ID NO: 395832 - DNA, 120 bp, Artificial Sequence
  ENSG00000145730_24 (sequence is synthesized)
gaggcagttgttgaaaccaaaatggagaacaaacccacctcctcagaattgcagaagatgcaagagaaacagaaactgatcaaagagccaggctcgggagtgcctgttgttctcattaca

SEQ ID NO: 395833 - DNA, 120 bp, Artificial Sequence
  ENSG00000145730_25 (sequence is synthesized)
aatgtattaaagaacctcagctgggatttgctgaggacaaatgctgtaacgtgttagtcatccattatctgcttctatttttgcaggttctgaatgatgactgacgcgggtttgggtgat

SEQ ID NO: 395834 - DNA, 120 bp, Artificial Sequence
  ENSG00000145730_26 (sequence is synthesized)
acccctcacagcccctgtcattccggagtcataaggcacccgcgcgtctagccccagcgccagggcacgcgagcggcgctggagggaggaaagcttccgcctgcgggccggacaaaagtc

SEQ ID NO: 395835 - DNA, 120 bp, Artificial Sequence
  ENSG00000145730_27 (sequence is synthesized)
ccgcctgcccacggctttttgcccgccgctcgtgaccgagacgcctcgccgcggccagctcgctgctctcgctggcggatggtgtgtggccgccgcaggacgcccgccgtgcccgggcca

SEQ ID NO: 395836 - DNA, 120 bp, Artificial Sequence
  ENSG00000145730_28 (sequence is synthesized)
gaggagtttcctaaaagttcataacagtgccattgtctttatatgaacatagactagagaaaccgtcctctttttccatcataattctaatctaacaatggaagatttgcccatttacac

SEQ ID NO: 395837 - DNA, 120 bp, Artificial Sequence
  ENSG00000145730_29 (sequence is synthesized)
ttttgagactttttggtggatgtaaataaccccattctttgcttgaacacagtattttcccaatagcactttcattgccagtgtctttctttggtgcctttcctgttcagcattcttagc

SEQ ID NO: 395838 - DNA, 120 bp, Artificial Sequence
  ENSG00000145730_30 (sequence is synthesized)
ctgtggcagtaaagagaaactttgtgctacatgacgacaaagctgctaaatctcctatttttttaaaatcactaacattatattgcaatgaaggaaataaaaaagtctctatttaaattc

SEQ ID NO: 395839 - DNA, 120 bp, Artificial Sequence
  ENSG00000145730_31 (sequence is synthesized)
ttttttaaattttcttcagttggtgtgtttttgggatgtcttatttttagatggttacactgttagaacactattttcagaatctgaatgtaatttgtgtaataaagtgttttcagagca

SEQ ID NO: 395840 - DNA, 120 bp, Artificial Sequence
  ENSG00000145730_32 (sequence is synthesized)
aacccacaaatattagtgaaacttactcgatgtcttcaactaaaagaaatgtgtgtattgtacaaaatttagaagatactttagccaatataaattaaaaaccagcctgagtttacataa

SEQ ID NO: 395841 - DNA, 120 bp, Artificial Sequence
  ENSG00000145730_33 (sequence is synthesized)
atttgtaaagtcaggctcttctaaaatccaaagagggtttttgcctatatatcaatcagaggataaatactttaataaaaggtaatcacagctaagtggatacctgtgtctcaaattaca

SEQ ID NO: 395842 - DNA, 120 bp, Artificial Sequence
  ENSG00000145730_34 (sequence is synthesized)
tatgcaaatgatccatcagtagggatcactaataatagttttccttttaaaaaataatttcagggcaggtacagtggctcaagcctatacttccaggactttgggaggccaagcagaagg

SEQ ID NO: 395843 - DNA, 120 bp, Artificial Sequence
  ENSG00000145730_35 (sequence is synthesized)
attgtgggaggccaagcagaaggattgtttgagcccagaaattcaaggctgcagtgagctatgatcaatccactgtactccagcctaggctacagagtgagatcctttctctaaaataaa

SEQ ID NO: 395844 - DNA, 120 bp, Artificial Sequence
  ENSG00000145730_36 (sequence is synthesized)
atacaatttccatgtatccataggaatatattcatcttttacagtgattgcagattagttttaaaacgtctttttcgtaattcgtcaatgcaagttagtaagaaccagataattttccat

SEQ ID NO: 395845 - DNA, 120 bp, Artificial Sequence
  ENSG00000145730_37 (sequence is synthesized)
tttaaaatgataggaatctaaaactctttttcaaaaatgccaacctgtttttccggcatcatagtagttggaataatacagatataattgactaatcataaagtacatgagagtacagaa

SEQ ID NO: 395846 - DNA, 120 bp, Artificial Sequence
  ENSG00000145730_38 (sequence is synthesized)
gggaaatttggaaacggtaagtctgctagggcattacaatcctgtcctagcactccacctttattctgccaacctgggttaattaaagatggtagcctggaaagtaatgaatgacattga

SEQ ID NO: 395847 - DNA, 120 bp, Artificial Sequence
  ENSG00000145730_39 (sequence is synthesized)
cttcaggcaatctttccactgattattcttggctgaacttcatttatcgagtcagagaatgcactgcctgagaaatgtcccagaggagtgaatcctaggcctggccacagtagaatcgcc

SEQ ID NO: 395848 - DNA, 120 bp, Artificial Sequence
  ENSG00000145730_40 (sequence is synthesized)
tggagaatttaagaaaaaaattgttgggcactcactctttccagtgatctttatttagttggcttacaatggaatacaggtatggttcatgtttttaaatttgtccaggtgtttctattg

SEQ ID NO: 395849 - DNA, 120 bp, Artificial Sequence
  ENSG00000145730_41 (sequence is synthesized)
tgcagtcacagttgaaaaccattgtcttcgagaatagctattctatcttgccagttacaataagtggatagctatattttcacataaattatagtttacagatgtttggagggggaagac

SEQ ID NO: 395850 - DNA, 120 bp, Artificial Sequence
  ENSG00000145730_42 (sequence is synthesized)
aggatctgaggtgttttgatatgactgttagcaccaaaatctgaatgccttaattgttgaatgtgttaaattggataattaaaatgggcataaatgacttattaaaaaagcaaagggaaa

SEQ ID NO: 395851 - DNA, 90 bp, Artificial Sequence
  ENSG00000145730_43 (sequence is synthesized)
ggaaaaggacagaggaacacagagtgccaggcttattgcccattcttcctatttatttaaaacatttaaaagcgttgtattaaaatgcca

SEQ ID NO: 395852 - DNA, 120 bp, Artificial Sequence
  ENSG00000145730_44 (sequence is synthesized)
atttatttaaaacatttaaaagcgttgtattaaaatgccatgtatgttgtcgtattttccaaagagagtaaagtaaaaatcttgttgagaagaaggctgtctcaaatttaccctttaatg

SEQ ID NO: 395853 - DNA, 120 bp, Artificial Sequence
  ENSG00000145730_45 (sequence is synthesized)
acttgggttagctggctttacaggcatcttatcaaaaggagaagaaaacagtcctaatgcaagttcccagtcacttcatcactcagaaagctacttggaatgtgcatgtggtataattta

SEQ ID NO: 395854 - DNA, 120 bp, Artificial Sequence
  ENSG00000145730_46 (sequence is synthesized)
ataacagctcgaagaataaaatataaggatacatcagtgtcgaggagaagcagatcatagactgtaatagctcacaaggaaacactgagctgtatacaaacgcctcataattactttatt

SEQ ID NO: 395855 - DNA, 120 bp, Artificial Sequence
  ENSG00000145730_47 (sequence is synthesized)
gatgcatgtatataagcatgcctttgttctcaaaagtctttttctatctgattactgtggtatccagtgctttgtctttgcctctcttcgttttttgttttgtttttttccttgcgcctt

SEQ ID NO: 395856 - DNA, 120 bp, Artificial Sequence
  ENSG00000145730_48 (sequence is synthesized)
agttccatgcactcagccaggtctccaggctggagcaagggctgggggtcaatgggtccttccttctctcgggaaacgttcttctggcgcgaagctgggcggagggagagtcggacattt

SEQ ID NO: 395857 - DNA, 120 bp, Artificial Sequence
  ENSG00000145730_49 (sequence is synthesized)
tctctcagggcagctggcgtggccacctcgcaaggctgcttctagggacacgagactcgggagggtcagagactttcaggccgggccttcactcccttccccggggcacttgggcaagag

SEQ ID NO: 395858 - DNA, 120 bp, Artificial Sequence
  ENSG00000145730_50 (sequence is synthesized)
ttccagctcttggctacctctggcccgcgcgttctgaatgatgactgacgcgggtttgggtgatacccctcacagcccctgtcattccggagtcataaggcacccgcgcgtctagcccca

SEQ ID NO: 395859 - DNA, 120 bp, Artificial Sequence
  ENSG00000145730_51 (sequence is synthesized)
agaaggggagaaaaccaacagccttttgggcaccagctggtgggatatctattatactctttttgagaaaatggatccaagctcttcgcgaagcagctgtgcgattgctgggaagtgcct

SEQ ID NO: 395860 - DNA, 120 bp, Artificial Sequence
  ENSG00000145730_52 (sequence is synthesized)
aaagaagatccccatccaactccaggagccccatggatttccttatcacctctgtgtggtcagcagccatggtccagcctaccttccctagtgctgtgatctgtccaccactacaggccc

SEQ ID NO: 395861 - DNA, 120 bp, Artificial Sequence
  ENSG00000145730_53 (sequence is synthesized)
gaccctcgtctaattgaatctgtacagcagaatagacatagcaaatgagggttacttcttgagtcaaatacatttgattgggaagagctgcctggaaagtgttaagaattatgagaccac

SEQ ID NO: 395862 - DNA, 120 bp, Artificial Sequence
  ENSG00000145730_54 (sequence is synthesized)
attgggacttgatgggaaacggtgcagcgacccataaacaacatctgccacgaatgtgaaagataaaagtcgctccagtggccagcctctagaaagaagaatcctgggtgaagattgatt

SEQ ID NO: 395863 - DNA, 120 bp, Artificial Sequence
  ENSG00000145730_55 (sequence is synthesized)
gctaccacaccagattctgaaggggaggagttgtctggaaagaccagagctgggtgctggggatctggagcagctcgggacccgcgctgcagggagctgggatgggagaggttctgaatg

SEQ ID NO: 395864 - DNA, 120 bp, Artificial Sequence
  ENSG00000145730_56 (sequence is synthesized)
ggcttccgtcccggacagagcccgtggtcgcgcagagagcaggatgctgaaccatacttagaattaatcaggagaaacatgggaaacatgcagaaaacaacataattatatgtgcacttt

SEQ ID NO: 395865 - DNA, 120 bp, Artificial Sequence
  ENSG00000145730_57 (sequence is synthesized)
taagctacaaagtgaaattagagtcttttaagtctgcatgtgatttcatcatttttaataataccaatcttaaagaatggccatcatgttctttggacattgattactccagaaggggaa

SEQ ID NO: 395866 - DNA, 120 bp, Artificial Sequence
  ENSG00000145730_58 (sequence is synthesized)
tttgttgtgaaaatagccacacttgaagtctacttttatattgttcttgtaaaacatcaattattatacagtaaaagataaattcagctgaatatgtggggagaagggaaggaaagattt

SEQ ID NO: 395867 - DNA, 120 bp, Artificial Sequence
  ENSG00000145730_59 (sequence is synthesized)
aaggaaagatttgaagattatttaataatgttttaacttttatgttcttcatgtatggcataaaaacttatttaaactcctgaggttttagttgagtgtatgttttaaataaatattatt

SEQ ID NO: 395868 - DNA, 120 bp, Artificial Sequence
  ENSG00000145730_60 (sequence is synthesized)
gcaatcgctggggactcgccagggctccacttcccaagctccgcgccccctgcgcccaaagaggcagggcggagcagaggccgccggcgtggaggaggcgagcgcggggctggcccggga

SEQ ID NO: 395869 - DNA, 120 bp, Artificial Sequence
  ENSG00000145730_61 (sequence is synthesized)
ctgtccccgcccagggagccggagcctccaactaactccgcccgccgctccgccgcccgcaggctccggcttccgtcccggacagagcccgtggtcgcgcaggttctgaatgatgactga

SEQ ID NO: 395870 - DNA, 120 bp, Artificial Sequence
  ENSG00000145730_62 (sequence is synthesized)
agcacattgcttggttaccatagtatcctctgcctccaagtctctcctgatgatgtcagtatgcatacaggggttgttcagatcatctacgtggggatgattcaccccacaataaagccc

SEQ ID NO: 395871 - DNA, 120 bp, Artificial Sequence
  ENSG00000145730_63 (sequence is synthesized)
tacaatccacgttagcaaaacctgaagggaataagaattaatgggtgaaaaaattcatcaatgaaaaggacttatcattagaaaaaaattactcagatttgggctatcagataacatctt

SEQ ID NO: 395872 - DNA, 120 bp, Artificial Sequence
  ENSG00000145730_64 (sequence is synthesized)
tgaagatttttttttgttttggttttggtctattactgcataaatttagtgtctgttctattggtgagccagaactacaaggaccaaaaaatatttggatcatttggggaaaggaggcat

SEQ ID NO: 395873 - DNA, 120 bp, Artificial Sequence
  ENSG00000145730_65 (sequence is synthesized)
atgaaattcaggataaaaattcttacaattgaatatttttcattttgctcaatggaaatacattgaaaatttaaaacctgatatgtaaagtcccagtttaagaaatgctcatatactgtc

SEQ ID NO: 395874 - DNA, 120 bp, Artificial Sequence
  ENSG00000145730_66 (sequence is synthesized)
gcgcaggttggtgttgttgccgctgctgccgccactgcgaggcggtcagggcaagggtgagggtgggggcgcggaagggggcctgggctcgggatcctgctgccaccaattcctggtgcc

SEQ ID NO: 395875 - DNA, 120 bp, Artificial Sequence
  ENSG00000145734_0 (sequence is synthesized)
gagggtgaaatttagccatcggtgtgtggcagggtcatgaaaaagcggcggcggcgggagagaggaggaggcggcggcggggcagtgaaactacggtagctgccccctgagctggtggtg

SEQ ID NO: 395876 - DNA, 120 bp, Artificial Sequence
  ENSG00000145734_1 (sequence is synthesized)
tggctttgtggggagggcgtagttcctaatcccctttccgggcagccgccggggctcggggctgtgagcggccgtgaggctgcctccccgggccccctgcctccgccatgttccgcaggg

SEQ ID NO: 395877 - DNA, 120 bp, Artificial Sequence
  ENSG00000145734_2 (sequence is synthesized)
cacgccttagcgtgaagccgaatgtcaggcctggtgtaggcgccaggggctccacagcttccaatccccagcgtggacgggagtctcccaggccgccggatcctgccacggactctgctt

SEQ ID NO: 395878 - DNA, 120 bp, Artificial Sequence
  ENSG00000145734_3 (sequence is synthesized)
ccaagcccgcggagcccacagatgtgcccacagtcgatttcggtggagcggagccccaagaaaaggctcctaggagcagtactgaaaagactggtggtgacaatgatgttgaagaatcca

SEQ ID NO: 395879 - DNA, 120 bp, Artificial Sequence
  ENSG00000145734_4 (sequence is synthesized)
gtagatcttcctctactgtttcacagagaagaaagcgaatatcaagtacttctagcctggttaagtctagtgtcagtgttccttcagaatctcatcccttatctacaattaatcaagagg

SEQ ID NO: 395880 - DNA, 120 bp, Artificial Sequence
  ENSG00000145734_5 (sequence is synthesized)
ctccacagccaactgccacttcaacaaaagagaaacagccatgctcagacagataccgaatatacaaagcccagaaactgagggaaatgttaaaagaagaattgagaaaagagaagaaac

SEQ ID NO: 395881 - DNA, 120 bp, Artificial Sequence
  ENSG00000145734_6 (sequence is synthesized)
aatggaaaaacaaatatgctataaatgaaagtcagaggccaccagatcgttcaaaaatgactatgagagacttcatatattatctaccagataataatccaatgacttcttcactggaac

SEQ ID NO: 395882 - DNA, 120 bp, Artificial Sequence
  ENSG00000145734_7 (sequence is synthesized)
aagaaaagaaaactgaaaagccatcgactccagtccagacaagagagcaagaaggtaagagtactcctaatgctgaagataatgaaatggaagaagagacagatgatgggccattactgg

SEQ ID NO: 395883 - DNA, 120 bp, Artificial Sequence
  ENSG00000145734_8 (sequence is synthesized)
ttcctcgagtaaaagtggcagaagatggttccattattttggatgaagaaagtttaactgtagaagttttaagaacaaaaggcccttgtgttgttgaagaaaatgaccccatatttgagc

SEQ ID NO: 395884 - DNA, 120 bp, Artificial Sequence
  ENSG00000145734_9 (sequence is synthesized)
gcggttctacaactacatactccagctttaggaaaaactattactctaaaccatggtcaaataaagaaacagatatgttttttttagccatcagcatggtaggaactgacttttctatga

SEQ ID NO: 395885 - DNA, 120 bp, Artificial Sequence
  ENSG00000145734_10 (sequence is synthesized)
tcggacaactttttcctcacagagcaaggatagaaattaagaataaatttaaacgggaagagaaaacaaatggatggagaatagacaaagcattccaggaaaagcgcccttttgacttcg

SEQ ID NO: 395886 - DNA, 120 bp, Artificial Sequence
  ENSG00000145734_11 (sequence is synthesized)
atttttttgctcatttgcttcagaaagttcttgctgaagaagagaaaagaaaacaaaaatctgttaaaaatcacagtttaaaggagaagaaatccaccaaaccacggaaaaatgtaaaag

SEQ ID NO: 395887 - DNA, 120 bp, Artificial Sequence
  ENSG00000145734_12 (sequence is synthesized)
tgaaaaaagttgcctgtgaaggagtgaataatgatccagatgagtctatgagttctagaatttcagacacggaaagatctcagaaggatgctcagacagttgaagaagagtctctgacct

SEQ ID NO: 395888 - DNA, 120 bp, Artificial Sequence
  ENSG00000145734_13 (sequence is synthesized)
tatcaagggaggatgcagagcaggttgcattagaagtagacctaaatcaaaagaaaagaaggaggaagaagcaagatggagctaatgaactgggagtaaacaatcttttagaaaatgcca

SEQ ID NO: 395889 - DNA, 120 bp, Artificial Sequence
  ENSG00000145734_14 (sequence is synthesized)
ctgttcaggcgggtccttctaaaggagaaaaacacaagaataaatgtcaggctataaggcctgagctaaaggaaggtgaatgcagtaaggagcagatgctttcctgcacacaaaacatag

SEQ ID NO: 395890 - DNA, 120 bp, Artificial Sequence
  ENSG00000145734_15 (sequence is synthesized)
atggcattgtgggttttgcctccactgaaaaagttgagaaaagaactgaccccatcctttcattaagtaatcaacaagatgccacatcagtagcaactgagtcttcagaatcaagcactt

SEQ ID NO: 395891 - DNA, 120 bp, Artificial Sequence
  ENSG00000145734_16 (sequence is synthesized)
cagatttgccttcattcgaagttggaattagagcattgtgtgaggtgaataatgctgagggtagttgtatagaagaaagaaatgttgacctaaaaaataattcactggaaattgatcaaa

SEQ ID NO: 395892 - DNA, 120 bp, Artificial Sequence
  ENSG00000145734_17 (sequence is synthesized)
cagaaaatgttaaaccaatgttgagaggtcgcttccaaagacctaaacccaatttgtcaagggctgggaagaaatcagttctttcacaaggcaaaacagagtcagagagcaagaattcac

SEQ ID NO: 395893 - DNA, 120 bp, Artificial Sequence
  ENSG00000145734_18 (sequence is synthesized)
attcaaaaacttcagttgaaaagaaccacgtggaaaaagataaaatgaatacattggacattttgagaatggagactacagagagagagaatccagaagctgaaactgtatctgttttgg

SEQ ID NO: 395894 - DNA, 120 bp, Artificial Sequence
  ENSG00000145734_19 (sequence is synthesized)
gtgaaaaaaattgtctgcaggaagggagtcaactaaaggctttaagacctgtacaagtgaggggccgattgcaaaagccaaagccaaatgcaggtaaagctgctgaaagaaaagaaattc

SEQ ID NO: 395895 - DNA, 120 bp, Artificial Sequence
  ENSG00000145734_20 (sequence is synthesized)
tcatatcacaggaagaaattggggccaatgtagagaagaatgaaaatgaatcctgtgctgatagagatactcctcaacacatggaagatcaatcgcgtaaagattttgaagaggaagatg

SEQ ID NO: 395896 - DNA, 120 bp, Artificial Sequence
  ENSG00000145734_21 (sequence is synthesized)
tcatattacagcctgagaaaaatgattcttttcaaaatgtgcagccagatgagcccaaggttcttaatgaatgtctaagcgttcaagagaataataaggcaaataaacttaaccaagtcc

SEQ ID NO: 395897 - DNA, 120 bp, Artificial Sequence
  ENSG00000145734_22 (sequence is synthesized)
caattctaaggactcgatttcagaaaccaaagccaaatataggaagaggaactggaaggagagaaatttcctcaaaggaagaggtactagagaagattcttgtctctggggaaatggcgg

SEQ ID NO: 395898 - DNA, 120 bp, Artificial Sequence
  ENSG00000145734_23 (sequence is synthesized)
cagcattgagagaaactgtaagactagacacctcaccaaaggagatggtaccagcagagattaatactaaagaaatgcagtcagatttaaaagaaactggaagaagagccatttctccca

SEQ ID NO: 395899 - DNA, 120 bp, Artificial Sequence
  ENSG00000145734_24 (sequence is synthesized)
gggagaagattctagatgtgattgatgacaccatagaaatggagacaggtctgaaagcaatgggaagagagatttgtctaagggagaagacgccagaggtgattgatgccactgaggaaa

SEQ ID NO: 395900 - DNA, 120 bp, Artificial Sequence
  ENSG00000145734_25 (sequence is synthesized)
tagacaaagatttggaagaagctggaagaagagaaatatccccacagaaaaatggcccagaggaggttaagcctctaggtgaagtggagacagatttgaaagcaactggaaatgagagtt

SEQ ID NO: 395901 - DNA, 120 bp, Artificial Sequence
  ENSG00000145734_26 (sequence is synthesized)
ccccaagggagaagacaccagaggtgactgatgccactgaggaaatagacaaaaatttggaagaaactggaagaagaaaaatatccccaagggaaaatggcccagaggaggtcaagcctg

SEQ ID NO: 395902 - DNA, 120 bp, Artificial Sequence
  ENSG00000145734_27 (sequence is synthesized)
tagatgaaatggagacagatttgaacgcaactggaagagagagttctccaagggagaagacaccagaggtgattgatgctactgaggaaatagatttggaagaaactgaaagagaagtat

SEQ ID NO: 395903 - DNA, 120 bp, Artificial Sequence
  ENSG00000145734_28 (sequence is synthesized)
ccccacaggaaaatggactagaggaggtcaagcctctaggtgaaatggagacggatttgaaagcaactggaagagacagtttcccaagggggaagacaccagaggtgattgatgccattg

SEQ ID NO: 395904 - DNA, 120 bp, Artificial Sequence
  ENSG00000145734_29 (sequence is synthesized)
aggaaatagagatagatttggaagaaactgaaagagaaatatccccacaggaaaatggcctagaggaggttaagcctctaggtgaaatgcaaacagatttgaaagcaaccggaagggaga

SEQ ID NO: 395905 - DNA, 120 bp, Artificial Sequence
  ENSG00000145734_30 (sequence is synthesized)
tttccccaagggagaagacaccagaggtgattgatgccactgaggaaatagacaaagatctggaagaaactggaagaagagaaatatccccagaggaaaatggcccagaggaggtcaagc

SEQ ID NO: 395906 - DNA, 120 bp, Artificial Sequence
  ENSG00000145734_31 (sequence is synthesized)
ctgtagatgaaatggagacagacttgaaaacaactggaagagagggttcctcaagggagaagacacgagaggtgattgatgctgctgaggtaatagagacagatttggaagaaactgaaa

SEQ ID NO: 395907 - DNA, 120 bp, Artificial Sequence
  ENSG00000145734_32 (sequence is synthesized)
gagaaatatcgccacaggaaaatggcccagaggaggtcaagcctgtaggtaaaatggagacagatttgaaagaaattagagaagaaatttcccaaagggaaaaggtgctagcagagttca

SEQ ID NO: 395908 - DNA, 120 bp, Artificial Sequence
  ENSG00000145734_33 (sequence is synthesized)
gtgctataagggaaaaggagattgatttgaaagaaactggaaaaagagacattcccatcatggagaaagtatcaggaaagatggctgttgttgaagaaatggaggcagatttgaaagaaa

SEQ ID NO: 395909 - DNA, 120 bp, Artificial Sequence
  ENSG00000145734_34 (sequence is synthesized)
ctggaaaagaaaattttagagagagaggatctgaagagatctgtgttactgaggaaaaggtggcagaattgaaacaaactggaaaaacagacatttctccaagggaaaacgagctagagg

SEQ ID NO: 395910 - DNA, 120 bp, Artificial Sequence
  ENSG00000145734_35 (sequence is synthesized)
agaccagtacctcaagacaaactgacacacatttaatgcagagcggtagcaatgacttcagtgctgtgccttcactagatattcagaacattagcagtgaagtactgtcgatgatgcata

SEQ ID NO: 395911 - DNA, 120 bp, Artificial Sequence
  ENSG00000145734_36 (sequence is synthesized)
cacctgtagaagaaaaaagaaattctgaaaaagaagtatcaagtcacttcagtcatttcaagatttcttcacagactcatgaatctgataaaacagaagtccaggggattcaatctccag

SEQ ID NO: 395912 - DNA, 120 bp, Artificial Sequence
  ENSG00000145734_37 (sequence is synthesized)
atgttccagagcagttttcagatattaatttaagcaaatctcttcctcaagaacagaagccacttgaaattaaaccagcaccttttgtgaggagccgattcaaaagaccaaaaccaaact

SEQ ID NO: 395913 - DNA, 120 bp, Artificial Sequence
  ENSG00000145734_38 (sequence is synthesized)
tagcaagagcagctttgaagagagagactacagaatcagaaaaatatatatatgagaagaaatcagaaaccaagaaaatggagactattgtgatgcaagaaaataatgaacaaactgata

SEQ ID NO: 395914 - DNA, 120 bp, Artificial Sequence
  ENSG00000145734_39 (sequence is synthesized)
ctctcccttctcaacatgatgaagcttccctaatgatatcaagagaaaaagacacattaggtcacaggaatgaggaggctgtgatattgccatgtacacagactgaaaggaacctttcac

SEQ ID NO: 395915 - DNA, 120 bp, Artificial Sequence
  ENSG00000145734_40 (sequence is synthesized)
cttcaaattcttgtgaacctaaagaggagtctcagtcagcaccagtccagaaaaatgactcagttgtttctgtggggactaataatgtaaacactttccagcaagaaatgaaggaaagtg

SEQ ID NO: 395916 - DNA, 120 bp, Artificial Sequence
  ENSG00000145734_41 (sequence is synthesized)
ttatccaaactgctcgacaagtaaggggccgacttcagagaccgagaccaaatataagaaagacaggacagaggcaaatagtagacaaaggtgaagccaaaggcataattaaggaaggaa

SEQ ID NO: 395917 - DNA, 120 bp, Artificial Sequence
  ENSG00000145734_42 (sequence is synthesized)
gaacgatattaccaaaagatgaaactgaaaagaaagtcttaactgtgtcaaattctcaaattgaaactgaaattgaagttccatcgtccgcagttccagaacacagaatgtatgaaaatc

SEQ ID NO: 395918 - DNA, 120 bp, Artificial Sequence
  ENSG00000145734_43 (sequence is synthesized)
aaagtcaggtggttcttgtagaaaaccttcatgttaacaaaacaaatgaaacaatcagacatgaaaataaaccgtatgttcctagttcagcacaaatgacaagaaggaaattccaaaagg

SEQ ID NO: 395919 - DNA, 120 bp, Artificial Sequence
  ENSG00000145734_44 (sequence is synthesized)
ctaagccaaatttgggaagagcacacagtaagaaagaggaaccagttttagaaaaagtcacaacagatcagagcaaggaaggcaagccagaagatcatttgctgcagaaaggagcttcca

SEQ ID NO: 395920 - DNA, 120 bp, Artificial Sequence
  ENSG00000145734_45 (sequence is synthesized)
aagaagttggaccatcaagaagggttggagaggaaactgtaggagataattcaccatcttcagttgttgaagagcaatatctcaataaactaacaagctgtccacaaccgttaaacgaaa

SEQ ID NO: 395921 - DNA, 120 bp, Artificial Sequence
  ENSG00000145734_46 (sequence is synthesized)
caagttactctaaaattgccctggatgggaaaacaactatctcttctacatctgagtatgagagaaatcgtggtgaaaggagaagtcataaaaagttcaaaccaaatgtcaccagaggtc

SEQ ID NO: 395922 - DNA, 120 bp, Artificial Sequence
  ENSG00000145734_47 (sequence is synthesized)
gtggatcaaaacgagttcggggtaagacctctaagaaggaacctagagcttccaaggccatgctggtgactcttcgggcttcccaggaagaagatgatgatgctgacgattttgagtctg

SEQ ID NO: 395923 - DNA, 120 bp, Artificial Sequence
  ENSG00000145734_48 (sequence is synthesized)
actatgaggaagaaagctatcatcttgctcccgaagaagtaaacaaagctccagtatttgtacctgttggtctcagatctcctgaacctgtttctgctcagattgaggaaacaatggaag

SEQ ID NO: 395924 - DNA, 120 bp, Artificial Sequence
  ENSG00000145734_49 (sequence is synthesized)
agcttgaaataactgtgaatgtcccagatgtaggatgcatagctgttgttgaacatgagctaccaaacacagatgtgactactgaagaaatgaaacaagaagaaaatttgagtgtaccgt

SEQ ID NO: 395925 - DNA, 120 bp, Artificial Sequence
  ENSG00000145734_50 (sequence is synthesized)
ttgaaatgaccacaagtgaacatatccaagatgaaccaggtaccaatgatggaagcaccgaagctgcaataactttacttacaatgggagatctagtattgcagtcagagatcagtagtg

SEQ ID NO: 395926 - DNA, 120 bp, Artificial Sequence
  ENSG00000145734_51 (sequence is synthesized)
aacagggtgatgtaggagtatgtataattcctcatgttcattcaaaggataaaagccatattccttctagcctagataatgtaaatcacaaaattgttcatgaatgtcaggaactttctt

SEQ ID NO: 395927 - DNA, 120 bp, Artificial Sequence
  ENSG00000145734_52 (sequence is synthesized)
cacctgtcattactacatctcctgcatcatttgaagaaaacaagattgtattggaggaacaaagttccagagaagaaataagtttaatggagaaagtaaaggagaatgctacaccaacca

SEQ ID NO: 395928 - DNA, 120 bp, Artificial Sequence
  ENSG00000145734_53 (sequence is synthesized)
ggaatacaatttctaaagtgaccagtaatttgagaataagaagtaggcttgctaagcctaaaccaaatcttgagaagactttagggaccaacaggcttgatgattatcaggaagtttcca

SEQ ID NO: 395929 - DNA, 120 bp, Artificial Sequence
  ENSG00000145734_54 (sequence is synthesized)
gtttgtgtgtaaccaaaggggcagaaatggaaactcaaagagaaacagagaaaaatgcttccaaagcaacagaattggaaaataaaaacctcggaccagttacaacagcagagaataagg

SEQ ID NO: 395930 - DNA, 120 bp, Artificial Sequence
  ENSG00000145734_55 (sequence is synthesized)
atcagagcaaattggcatgtgtacatggtatcaaagggaccagtatttcttcagaagtaaacctaactgaaagaaacgaaaatcaagaagagagctctcaggaggttcacatgttgtcag

SEQ ID NO: 395931 - DNA, 120 bp, Artificial Sequence
  ENSG00000145734_56 (sequence is synthesized)
ttgctccagttgcttcctctgagacagggccctgcacacttggtttggataggggtcttggtgaaaattctgttgaagagccccagataaaggactctaaaggagacagtgtgcttacac

SEQ ID NO: 395932 - DNA, 120 bp, Artificial Sequence
  ENSG00000145734_57 (sequence is synthesized)
ttcctgtgccagagtatacaccaacaagtattccagaagtccaacaagagaatataatcaatcctcaagacctaacagtgaatctagttgctaatgtacctcaagatggagaagatgaac

SEQ ID NO: 395933 - DNA, 120 bp, Artificial Sequence
  ENSG00000145734_58 (sequence is synthesized)
aagcctttattttaactctggtggaaatcccagccaatgcagtagaagaatttactgatgccactgcacagttcatgccaaaccctttactgccagctcccatattggtcaaatcagtga

SEQ ID NO: 395934 - DNA, 120 bp, Artificial Sequence
  ENSG00000145734_59 (sequence is synthesized)
ataccgaagaaaggggtgacatgagtatttgtttaccagcaacttcagttggtcaagatgccatgggtttatctatttctggaagagataattctaaaaagccgcctgataatttggatc

SEQ ID NO: 395935 - DNA, 120 bp, Artificial Sequence
  ENSG00000145734_60 (sequence is synthesized)
ttgtatctaggaagagatttcaatgcaggcttgataaaaatgaccacattcctcctgccaaaaaacgttcactcactttaagagatgactgtcaagaatataccactgaggtgcactcaa

SEQ ID NO: 395936 - DNA, 120 bp, Artificial Sequence
  ENSG00000145734_61 (sequence is synthesized)
aggaattaacaaatgtttttgaggaaacaggggagtctcacaagggacaagatatttttcttacctcaggaagcacactgacaactccagaacctcaaagacagcaagttgaagcagctt

SEQ ID NO: 395937 - DNA, 120 bp, Artificial Sequence
  ENSG00000145734_62 (sequence is synthesized)
ttcagagtagaggatctagatctcctgatgcatgcatggacaagaatgtgcctcagttacctcaggatgaaatgattgtgtctgataaggaagaaagaactgatgctgctcctaagtctc

SEQ ID NO: 395938 - DNA, 120 bp, Artificial Sequence
  ENSG00000145734_63 (sequence is synthesized)
agcaaatggatagcagaacatcgtcttctaaagcctcactatccagacctggcagaagacccctgggatttttatctttaatatgctcaaagaatagtttggagtctgatgaacctatgc

SEQ ID NO: 395939 - DNA, 120 bp, Artificial Sequence
  ENSG00000145734_64 (sequence is synthesized)
aagtccatagtaagaaacgcctaaaacctcttatacctggattaagaaagaaattgaaaagatctaatccattcaatgaaagccaggaaaaaaatcgagagtcctctgatctgcttccat

SEQ ID NO: 395940 - DNA, 120 bp, Artificial Sequence
  ENSG00000145734_65 (sequence is synthesized)
ctccaagtgttattactactcaatctgagaatattagcagctcagcaactcaggtttcttgtgatcagcccttactgaaagaaggatataaaagtgcccaaaagcgggcccctcaagggg

SEQ ID NO: 395941 - DNA, 120 bp, Artificial Sequence
  ENSG00000145734_66 (sequence is synthesized)
aggcaaccacagtctctgaatatttcttcaatgatatcttcattgaagtggatgaaacagaataaaacaatcttttctctttttcttttttaaattaggtctaggatttccagagtcaat

SEQ ID NO: 395942 - DNA, 120 bp, Artificial Sequence
  ENSG00000145734_67 (sequence is synthesized)
tacatcaacaaaacagtatttagagcaaaatatcactgtcttatttttctttaggttgattttgaatacttaatgagcttgatttgaagcttttataatcagtggaaaacatttctgagg

SEQ ID NO: 395943 - DNA, 120 bp, Artificial Sequence
  ENSG00000145734_68 (sequence is synthesized)
ttcctttcattctgactgattcagcattttgcaaatagcaagcaattaagactgctttctcagacagaaataacaactcttgtttacattttgactcttcctgtgctaagcacacatgga

SEQ ID NO: 395944 - DNA, 120 bp, Artificial Sequence
  ENSG00000145734_69 (sequence is synthesized)
catttgggaatgttgtggatatatgtctctgtatgaattgcagtgcagacagatttgggggttaattgtatcatatttaacatttagcaacttcttttgtgaagattttttatttttagg

SEQ ID NO: 395945 - DNA, 120 bp, Artificial Sequence
  ENSG00000145734_70 (sequence is synthesized)
gggagatgatgaaggatgaaggctttttcatttgcttctaagtacagtcatgtatcacataatgaagtttaagtcaatgatggaccacatatattacagtggtcccatgcaattaaaatg

SEQ ID NO: 395946 - DNA, 120 bp, Artificial Sequence
  ENSG00000145734_71 (sequence is synthesized)
atatattacagtggtcccatgcaattaaaatggagataaattcctatcaactagtgacattatagccatcataacacagtgcattgcttttttatgtttagatatgtttagatacacaaa

SEQ ID NO: 395947 - DNA, 120 bp, Artificial Sequence
  ENSG00000145734_72 (sequence is synthesized)
ttcagcatagtaacacattgtagaggtttgtagccgaggagcaataggctataccacatagcctcagtctgtacggtgtgtagcagcctgtaccatctcagtgtttgtaagtacactctg

SEQ ID NO: 395948 - DNA, 120 bp, Artificial Sequence
  ENSG00000145734_73 (sequence is synthesized)
cgttgtttcacacaagatcacctaacaaggcaattcttagaacatgtagttaagggacacgtgactatatgtgaaaacaaattgtcaaacttcactttagtatggcaaatgttaaagaac

SEQ ID NO: 395949 - DNA, 120 bp, Artificial Sequence
  ENSG00000145734_74 (sequence is synthesized)
ttttctattatcagctgtttgtctgactgaaaaatacatatttttctaattcatggtgatgtaacattagtcctaattgaaaaactagtatttaaacataattatttataaagatgacac

SEQ ID NO: 395950 - DNA, 120 bp, Artificial Sequence
  ENSG00000145734_75 (sequence is synthesized)
atcaaagggcttatttatttttaaattttttatttaaaaggatattcagttttagctatttttacccctcagattgtagataaagaaggcattaaatttatgtttgtctcctttttctgt

SEQ ID NO: 395951 - DNA, 120 bp, Artificial Sequence
  ENSG00000145734_76 (sequence is synthesized)
ttaattttaaagatatttaaaatgatataactaaaaatgtttagctggtgtatatgttttgaatacctttttcccctcagtttagtatattgactttgtactgtaaatttttctgctttt

SEQ ID NO: 395952 - DNA, 120 bp, Artificial Sequence
  ENSG00000145734_77 (sequence is synthesized)
cttggataatctcaggattttcatgaggatagggggaactcaactttatttatgagacaaaatttccatacaaagctcaatctcctttatacacccacagacataatattagtttttaaa

SEQ ID NO: 395953 - DNA, 120 bp, Artificial Sequence
  ENSG00000145734_78 (sequence is synthesized)
aagccaatttcttcatagttttttcccattaaattctcaaggaacacttggatctttaagcacggaacataatcatgatgttaaaaacagagaaaataaggctttataaagttaatgatt

SEQ ID NO: 395954 - DNA, 120 bp, Artificial Sequence
  ENSG00000145734_79 (sequence is synthesized)
atcatcagtatgaatttaaggtttgttttaatttcaagatttgattttttatacgtgtaattctattatctacccaagcagatctgtagtggttccaattagacttctcaaacagcaaat

SEQ ID NO: 395955 - DNA, 120 bp, Artificial Sequence
  ENSG00000145734_80 (sequence is synthesized)
ttatcctgattttatttgaaaagcctcttggattgatagtatagtagctcaggcattggaaactttctgcaaactgttttgggtttgcaggccagatggtctctgtggcagctactcagc

SEQ ID NO: 395956 - DNA, 120 bp, Artificial Sequence
  ENSG00000145734_81 (sequence is synthesized)
tctgcaatttcagtgtgaaagaagccatagacagtacttgaatgaaggactgtggctggattggccttttagtttgaccccctacattaggccccaaattttcttaccctgaggtgctga

SEQ ID NO: 395957 - DNA, 120 bp, Artificial Sequence
  ENSG00000145734_82 (sequence is synthesized)
tatctgtatggatgagttatttgtcactaaagttatgagttgtgcctaaaagttaaaactgttgactgtattatgtaatgatcagtatttcagttgggaagatattttagagtctagata

SEQ ID NO: 395958 - DNA, 120 bp, Artificial Sequence
  ENSG00000145734_83 (sequence is synthesized)
attatgtttgtatattgaaaaaatggtggccagtttttaagttccttaatagaagagaattatgtctcagcacatataacagtaatgctaatttattgaaactactgctgttagagcact

SEQ ID NO: 395959 - DNA, 120 bp, Artificial Sequence
  ENSG00000145734_84 (sequence is synthesized)
tcttattcattgtcttttagtgaaatttatggcgtaacactttgtcagagaggaggctatataattcggagcggaaattgtctataagtaggcatttatttcatgattgatatgtcacag

SEQ ID NO: 395960 - DNA, 120 bp, Artificial Sequence
  ENSG00000145734_85 (sequence is synthesized)
aaatcatggtagtaaatcacattgctatttgaataccctgtttttgtaagtttttaaaactcatattctgaaaagatttcattctcttagtgttagcttgggagttagattgccatgatt

SEQ ID NO: 395961 - DNA, 120 bp, Artificial Sequence
  ENSG00000145734_86 (sequence is synthesized)
atttatccttgtgtaatattagtttttaactttaacatctgtttctttttaatctataatgagctagttttatggaaaatggaatttcttactatataaagaatacagagactcattgta

SEQ ID NO: 395962 - DNA, 120 bp, Artificial Sequence
  ENSG00000145734_87 (sequence is synthesized)
tcattgtattagagaatcaagtcagccagctaaagtatcctactgttaaatccttaaacctaattttggaaaagagaaagttaatcaatgtatttaccttacatgttggaaagaactatg

SEQ ID NO: 395963 - DNA, 120 bp, Artificial Sequence
  ENSG00000145734_88 (sequence is synthesized)
ttaggtctgattcatgtgaagaagatgttgcaaaggatttatttcacaaattttaaaggagatatgagtaaaagtttttatcttttcttgactttttctcctgaacacttatgtcttagc

SEQ ID NO: 395964 - DNA, 120 bp, Artificial Sequence
  ENSG00000145734_89 (sequence is synthesized)
aagtggtcaacatgaggatttgaacgcctaattgttggtaaatggttgaggcatgacaaaaatattaatatccactgtttaccatcatgttatttgaaacaaaagtgaccatgtatacta

SEQ ID NO: 395965 - DNA, 120 bp, Artificial Sequence
  ENSG00000145734_90 (sequence is synthesized)
ccatgtatactatcttgcttgaagaagtctttgacagaaaaagcaatatcatgtcatttataaattttcttgttctaaagaaagcagttatatatatatataaattatgtaaataaaagt

SEQ ID NO: 395966 - DNA, 120 bp, Artificial Sequence
  ENSG00000145734_91 (sequence is synthesized)
taataagggatagcaaggtgttttcctccatttaaaaaaaaaaaggtataatttacatacaataaacttcacctcttttatcttcatttttctttatttcttcttttttttttggagaca

SEQ ID NO: 395967 - DNA, 73 bp, Artificial Sequence
  ENSG00000145734_92 (sequence is synthesized)
tcttcatttttctttatttcttcttttttttttggagacagtcttgttctgttgcccaggcaattcaacagat

SEQ ID NO: 395968 - DNA, 120 bp, Artificial Sequence
  ENSG00000145734_93 (sequence is synthesized)
aggcacgtgctaccacacctggctgatatttgaaatattttttaatatagtagttctcactttgcgtaggactatgttaactcaacttgagcttattggagctgtatctttgctttattt

SEQ ID NO: 395969 - DNA, 120 bp, Artificial Sequence
  ENSG00000145734_94 (sequence is synthesized)
gacttttggttacacagtaccctgcatagcaaggattgcctatataaattttaatgaaagctaattcctaaatattagtattattttacgcatgtttgatttgtgaaccacatttaataa

SEQ ID NO: 395970 - DNA, 83 bp, Artificial Sequence
  ENSG00000145734_95 (sequence is synthesized)
ttattttacgcatgtttgatttgtgaaccacatttaataatttctcattttgaagccttttctttttttgaaacagagcttcc

SEQ ID NO: 395971 - DNA, 69 bp, Artificial Sequence
  ENSG00000145734_96 (sequence is synthesized)
agtaggtgggattataggcaaccatgttggccaggatgttccaaactcctggcctcaagtgatctgccc

SEQ ID NO: 395972 - DNA, 120 bp, Artificial Sequence
  ENSG00000145734_97 (sequence is synthesized)
tgggattacaggcgtgagccaccttgtccggccttcattttgaaacttcttgagcatgttcctaagcgtgtaaatttgtggctgctgctttctctggaggtacagtttttataacatgat

SEQ ID NO: 395973 - DNA, 120 bp, Artificial Sequence
  ENSG00000145734_98 (sequence is synthesized)
tacagtttttataacatgatgcaagatggatcatagaaaagctaatgtagcagtttgtattactctataatgtgaagcagcatcttgcaaaatggtgattttgtgtgtttaacattttta

SEQ ID NO: 395974 - DNA, 120 bp, Artificial Sequence
  ENSG00000145734_99 (sequence is synthesized)
ttaagtccaacaacacttaaaaatctctaaaagtctaaagtcttttgtagccctaagtttctatgtttcagtgccttgaagaaactgtatgttcttttttaaaaagataactttaggctg

SEQ ID NO: 395975 - DNA, 120 bp, Artificial Sequence
  ENSG00000145734_100 (sequence is synthesized)
tattactactcaatctgagaatattagcagctcagcaactcagagacccttctgacttgtggaagcaaaaggaagcagtgctgacacccacaagaatttaaggaactgtaaaactagaat

SEQ ID NO: 395976 - DNA, 120 bp, Artificial Sequence
  ENSG00000145736_0 (sequence is synthesized)
ctagctaggcggctgggagcgttttcgtggcggggaacggaggttgaattgccctgcctgggctcatagggaaggaggatgtgaaggagcttgtgaaggcagaggaagattattgaataa

SEQ ID NO: 395977 - DNA, 120 bp, Artificial Sequence
  ENSG00000145736_1 (sequence is synthesized)
taaaatacagttttgaaaaaaatggatgaagaacctgaaagaactaagcgatgggaaggaggctatgaaagaacatgggagattcttaaagaagatgaatctggatcacttaaagctaca

SEQ ID NO: 395978 - DNA, 120 bp, Artificial Sequence
  ENSG00000145736_2 (sequence is synthesized)
atagaagacattctattcaaggcaaagagaaaaagagtatttgagcaccatggacaagttcgacttggaatgatgcgccacctttatgtggtagtagatggatcaagaacaatggaagac

SEQ ID NO: 395979 - DNA, 120 bp, Artificial Sequence
  ENSG00000145736_3 (sequence is synthesized)
caagatttaaagcctaatagactgacgtgtactttaaagttgttggaatactttgtagaggaatattttgatcaaaatcctattagtcagattggaataattgtaactaagagtaaaaga

SEQ ID NO: 395980 - DNA, 120 bp, Artificial Sequence
  ENSG00000145736_4 (sequence is synthesized)
gctgaaaaattgactgaactttcaggaaacccaagaaaacatataacgtctttgaagaaagctgtggatatgacctgccatggagagccatctctttataattccctaagcatagctatg

SEQ ID NO: 395981 - DNA, 120 bp, Artificial Sequence
  ENSG00000145736_5 (sequence is synthesized)
cagactctaaaacacatgcctggacatacaagtcgagaagtactaatcatctttagcagccttacaacttgcgatccatctaatatttatgatctaatcaagaccctaaaggcagctaaa

SEQ ID NO: 395982 - DNA, 120 bp, Artificial Sequence
  ENSG00000145736_6 (sequence is synthesized)
attagagtatctgttattggattgtctgcagaagttcgcgtttgcactgtacttgctcgtgaaactggtggcacgtaccatgttattttagatgaaagccattacaaagagttgctcaca

SEQ ID NO: 395983 - DNA, 120 bp, Artificial Sequence
  ENSG00000145736_7 (sequence is synthesized)
catcatgttagtcctcctcctgctagctcaagttctgaatgctcacttattcgtatgggatttcctcagcacaccattgcttctttatctgaccaggatgcaaaaccctctttcagcatg

SEQ ID NO: 395984 - DNA, 120 bp, Artificial Sequence
  ENSG00000145736_8 (sequence is synthesized)
gcgcatttggatggcaatactgagccagggcttacattaggaggctatttctgcccacagtgtcgggcaaagtactgtgagctacctgttgagtgtaaaatctgtggtcttactttggtg

SEQ ID NO: 395985 - DNA, 120 bp, Artificial Sequence
  ENSG00000145736_9 (sequence is synthesized)
tctgctccccacttggcacggtcttaccatcatttgtttcctttggatgcttttcaagaaattcccctagaagaatataatggagaaagattttgttatggatgtcagggggaattgaaa

SEQ ID NO: 395986 - DNA, 120 bp, Artificial Sequence
  ENSG00000145736_10 (sequence is synthesized)
gaccaacatgtttatgtttgtgctgtgtgccaaaatgttttctgtgtggactgtgatgtttttgttcatgattctctacactgttgccctggctgtattcataagattccagctccttca

SEQ ID NO: 395987 - DNA, 120 bp, Artificial Sequence
  ENSG00000145736_11 (sequence is synthesized)
ggtgtttgattccagcatgtagtatacattgtatgtgttaaaaagaaatttgcaactgtgaataaaaggacttctttagaagaagcttcatttaaaacatgaaaggataatctgacttaa

SEQ ID NO: 395988 - DNA, 120 bp, Artificial Sequence
  ENSG00000145736_12 (sequence is synthesized)
gaaactttttgctaagaaaaggtaatattttattaaattttaaatttgtgttgtcacagaaatacctgaaattcagtagtacttcattcaattaattttgttttctattattttgagtta

SEQ ID NO: 395989 - DNA, 120 bp, Artificial Sequence
  ENSG00000145736_13 (sequence is synthesized)
gttaattcattaatttagtgtaagaagaaagttaagtctgaatgtaaattcagtgtaagatgaaaatttatcaatacttatgaaattaggctgggcgctgtggctcacacctgtaatccc

SEQ ID NO: 395990 - DNA, 120 bp, Artificial Sequence
  ENSG00000145736_14 (sequence is synthesized)
aaaagttatgaaattaatacatatgaaatgatgtactgctacatccaccagagaggtctttttaggtttaaccaaacatctggaatatgtttatcaagttagtacatctgaaattatttg

SEQ ID NO: 395991 - DNA, 120 bp, Artificial Sequence
  ENSG00000145736_15 (sequence is synthesized)
aagtcactttacattaaacattcaaactcacaagactgccatggccatacttggtacccgcttactcagaaggatattaaacagaaacaacagcctgccagcacagcatcaagcagtcct

SEQ ID NO: 395992 - DNA, 120 bp, Artificial Sequence
  ENSG00000145736_16 (sequence is synthesized)
cattagcagtggaagtccttgtagcagtccactagtacaatttgggtgcaaggagataagatcctccacaggcatcaaggaaccaatatctcttaacaattccataaacacagcttccag

SEQ ID NO: 395993 - DNA, 120 bp, Artificial Sequence
  ENSG00000145736_17 (sequence is synthesized)
gtatccacaagggatgtgtcaatttcaagagtcactacactcaggaaagcctaaagcttgaagactccatttatttatagtgcatcccaatccagatacgtaacaattaacgagttattt

SEQ ID NO: 395994 - DNA, 120 bp, Artificial Sequence
  ENSG00000145736_18 (sequence is synthesized)
ttactataagcaaagttgcctaaaatcatagttgatactaatcatggttaacagagctctaaagtttgacagaaagtgagattcaaatcctttcactctcatatgctaaaccttttgcct

SEQ ID NO: 395995 - DNA, 120 bp, Artificial Sequence
  ENSG00000145736_19 (sequence is synthesized)
tactctgggtcatcagagaaatttaggtgagaatgtatgatgaagtctgtgttttagattcaatgcagatatatcattgtgcgcagaactctttctggttatatccagttaagagtaaat

SEQ ID NO: 395996 - DNA, 120 bp, Artificial Sequence
  ENSG00000145736_20 (sequence is synthesized)
tgggcgacagagctagactctgtctcaagaaaaaaaaaaaaagagtaaatcaggctttcatagcaaaggtatgtctattttatgtatataaacttcaggtactctaacttgagtttcact

SEQ ID NO: 395997 - DNA, 74 bp, Artificial Sequence
  ENSG00000145736_21 (sequence is synthesized)
ttcatagcaaaggtatgtctattttatgtatataaacttcaggtactctaacttgagtttcactatgaaatttg

SEQ ID NO: 395998 - DNA, 120 bp, Artificial Sequence
  ENSG00000145736_22 (sequence is synthesized)
cctgacctcaggtcatccacccacctccgccaccgtgcccggccgaaatttgtgattttataactaagaatttttagttaagaacattatcagtaaagacaacgtaatcccaccctggag

SEQ ID NO: 395999 - DNA, 120 bp, Artificial Sequence
  ENSG00000145736_23 (sequence is synthesized)
tttataactaagaatttttagttaagaacattatcagtaaagacaacgtaatcccaccctggagagtttattgggagcccaggaatattcatttttaatacacacacacacacacacaca

SEQ ID NO: 396000 - DNA, 120 bp, Artificial Sequence
  ENSG00000145736_24 (sequence is synthesized)
ctcaggagtcatactccatgagcctggacccagtggttctttacgtggaaacaaatttcacctataggtaacctggtaactgctattttcttctgtgtgctctgtcaacaaagttatcag

SEQ ID NO: 396001 - DNA, 120 bp, Artificial Sequence
  ENSG00000145736_25 (sequence is synthesized)
tggcttgcaagagatgcctttaatactcagagcattctatctccccctatctggtttagaaggaaggccttcattagttaccttttgagaagttactagaactctctattagagacttac

SEQ ID NO: 396002 - DNA, 120 bp, Artificial Sequence
  ENSG00000145736_26 (sequence is synthesized)
cctcctgacctgataaaaagggatacccatgtctctattaacagctttatctctttctacagttttgggtatttgataaggttaaggcaaaattttagttatgcttaaggaggagttctt

SEQ ID NO: 396003 - DNA, 120 bp, Artificial Sequence
  ENSG00000145736_27 (sequence is synthesized)
ttttcacaattacagagaaaattttggtttgttgaagattgcagaaacagcaatggtaatgtaagacagttttggcctttaatttttttcttgaaactctacagtatactacaatagtga

SEQ ID NO: 396004 - DNA, 120 bp, Artificial Sequence
  ENSG00000145736_28 (sequence is synthesized)
aggaaactattaacatgagagatccttctgaataggatgtctttctgagttccactattcagttacaaaactccttaatgcttaaaattcattatgaaaattagatttattttaaatact

SEQ ID NO: 396005 - DNA, 120 bp, Artificial Sequence
  ENSG00000145736_29 (sequence is synthesized)
tcatctttgtggtagatgtattgaatttattactagttttcagagcattctttatttttcaaatacattaaatcttaaatgtttttcttctttcctaaaactatctatctacttggattt

SEQ ID NO: 396006 - DNA, 120 bp, Artificial Sequence
  ENSG00000145736_30 (sequence is synthesized)
tatgaagaccctaaaggcagctaaaattagagtatctgttattggattgtctgcagaagttcgcgtttgcactgtacttgctcgtgaaactggtggcacgtaccatgttattttagatga

SEQ ID NO: 396007 - DNA, 120 bp, Artificial Sequence
  ENSG00000145736_31 (sequence is synthesized)
tactgtgtaggaaataatttattaattaaattaggatgttttaatctgttctgagctactaaacttaaagtagtctaaaatatgggcagtcatcttaaatatatcattgattccataaga

SEQ ID NO: 396008 - DNA, 120 bp, Artificial Sequence
  ENSG00000145736_32 (sequence is synthesized)
aatcatctccaaatgcaaagagttttcagtacttatgtcagtatttagaggaggtattataactcttggaaagctggaaattttactgtatgtaattctttataaagattttataacttg

SEQ ID NO: 396009 - DNA, 120 bp, Artificial Sequence
  ENSG00000145736_33 (sequence is synthesized)
aaggcaggagaatcacttgaggccagaagtttgagatcagtctggttaacatagtgagacctgtctctatttatatgttaaaataataataatagtaataataatcaattgtaattatag

SEQ ID NO: 396010 - DNA, 120 bp, Artificial Sequence
  ENSG00000145736_34 (sequence is synthesized)
atatattacttaaataaggttttaaaagtgataatttagctaaaatcattattttaaaaatgtacattttcagatgatacaacttttacagaattacatagaacgtacagttcgttatgt

SEQ ID NO: 396011 - DNA, 120 bp, Artificial Sequence
  ENSG00000145736_35 (sequence is synthesized)
catagaacgtacagttcgttatgtctatgaaggtgtttttttttcccttttcatcttgttaggcacgtaccatgttattttagatgaaagccattacaaagagttgctcacacatcatgt

SEQ ID NO: 396012 - DNA, 120 bp, Artificial Sequence
  ENSG00000145736_36 (sequence is synthesized)
tagtcctcctcctgctagctcaagttctgaatgctcacttattcgtatgggtaagtgtttttatgtttttaaaaaatacatatctaggctctccattttcatttgcacaagttattttaa

SEQ ID NO: 396013 - DNA, 120 bp, Artificial Sequence
  ENSG00000145736_37 (sequence is synthesized)
tatttaagaatttttaaagaaaaaatatgcttgttgaagcaattttggaaagtacagagaagtggaaaaaaaaaattaaaactaccagtagtcctgtcacccagaaaatactgttggctt

SEQ ID NO: 396014 - DNA, 120 bp, Artificial Sequence
  ENSG00000145736_38 (sequence is synthesized)
ccagtagtcctgtcacccagaaaatactgttggctttctttatttttaaggctagaaaggtataaactgtgtttatagaaaaatacttatattaagccgggctcggtggctcacgcctgt

SEQ ID NO: 396015 - DNA, 120 bp, Artificial Sequence
  ENSG00000145736_39 (sequence is synthesized)
tttgtgacccgcttgagaaagtgaccaacctctgagcctgaatcccatacctgaaaaacaaggacagtaatcacccttgccagtttcacatagcttggctggagtgcagtggcacaacct

SEQ ID NO: 396016 - DNA, 120 bp, Artificial Sequence
  ENSG00000145736_40 (sequence is synthesized)
tattcattttaagcctttctatctataaatactcctcagtacttcattttagctgtgtttcagggtaactgacctattgccttctgactatggggaaagaactagccacctacccttgcc

SEQ ID NO: 396017 - DNA, 120 bp, Artificial Sequence
  ENSG00000145736_41 (sequence is synthesized)
ccagcaggaaatggtctttagagactgtctacaatacctataattgtgtgtattgtattccataagttaattatttactccactaaaaatgcacgttatgacattcttactcagaattag

SEQ ID NO: 396018 - DNA, 120 bp, Artificial Sequence
  ENSG00000145736_42 (sequence is synthesized)
atagactgacgtgtactttaaaggtaaaatttaagtttatactaaatcatttaaatttgtaccaaaatcacttaaacttttactaaaaaagtggggaagaacactggattctaaaggata

SEQ ID NO: 396019 - DNA, 120 bp, Artificial Sequence
  ENSG00000145736_43 (sequence is synthesized)
tttttaaagaatgcaatattttttattttttgccttgtatttttagttaatgctaatgatagctaagtagaagtactgccaggttatttagggaaattttaaaccaacatagctaattat

SEQ ID NO: 396020 - DNA, 120 bp, Artificial Sequence
  ENSG00000145736_44 (sequence is synthesized)
ttgtgtttttaatttctatcctcccaccccacatcaggatcttggtttatcagttatcccttttctttcttgaatcttcattctcctttgccttacttaactctgtctcctcagattaca

SEQ ID NO: 396021 - DNA, 120 bp, Artificial Sequence
  ENSG00000145736_45 (sequence is synthesized)
agtttcacatagcttgattattgaataataaaatacagttttgaaaaaaatggatgaagaacctgaaagaactaagcgatgggaaggaggctatgaaagaacatgggagattcttaaaga

SEQ ID NO: 396022 - DNA, 120 bp, Artificial Sequence
  ENSG00000145736_46 (sequence is synthesized)
taaacccagctataacaaaattgttaagtacaagaattatgtagtgttatttatgatgtttagtgtggtgttggttagtaatctttattttacattttagtaagatattgttaaaggttt

SEQ ID NO: 396023 - DNA, 79 bp, Artificial Sequence
  ENSG00000145736_47 (sequence is synthesized)
aaattgactgaactttcacaatttcggatcactgcaaagtccgcctcacgggttcaagcgattccctgcctcagcctcc

SEQ ID NO: 396024 - DNA, 120 bp, Artificial Sequence
  ENSG00000145736_48 (sequence is synthesized)
ctgggattacaggcttgagccaccgcatccggccttatcctgaaaatattaaaatacagttattgtaatcatttataaaatccagttaatcttaaaattaaattcttataaagttaagca

SEQ ID NO: 396025 - DNA, 120 bp, Artificial Sequence
  ENSG00000145736_49 (sequence is synthesized)
agcatctaatttaaaagggaaaaagtataaaaattaaactgtagctattgctaatgaatcaatttttctgcttccatgacatacctaactgaattttagtttcaaaacgtagtaatggca

SEQ ID NO: 396026 - DNA, 120 bp, Artificial Sequence
  ENSG00000145736_50 (sequence is synthesized)
ctctcccttaaatctggttttcaaccttttatccttgccggcacacataagggaaatgacatactttcttcattagtagtttttcattaaatgcagtgaggagtgaaatgtacattggcc

SEQ ID NO: 396027 - DNA, 120 bp, Artificial Sequence
  ENSG00000145736_51 (sequence is synthesized)
tggagtgattcaagaaactcagttgtgagtaaccaaaagaatgtcacactagcttaagtgcagaaggaaaattttgggctatgttcaaaggtgggccaattccatatatagttgctgcat

SEQ ID NO: 396028 - DNA, 120 bp, Artificial Sequence
  ENSG00000145736_52 (sequence is synthesized)
atgttggggtcctggctttgtctggcttcattctctgatagattttctggaagttgaaaagatgtctcttaattgtcccagtctacattgtacccgtagcctatagcttcagcacacgtc

SEQ ID NO: 396029 - DNA, 120 bp, Artificial Sequence
  ENSG00000145736_53 (sequence is synthesized)
tagggagaactctgattggcctgagttacgatctgcccatccatgaacaaagtggccaggaaatgaagtattttgtttgtacgcttcgattgcctgctgatgcccagagcaggatagaag

SEQ ID NO: 396030 - DNA, 120 bp, Artificial Sequence
  ENSG00000145736_54 (sequence is synthesized)
tagggtcagcaccacatgaactaagcaggattattatatagtggaagaaggatggttcctccaaggtaggaatataaggtcaatattttcctctcactttacccaccccgagttaccagc

SEQ ID NO: 396031 - DNA, 75 bp, Artificial Sequence
  ENSG00000145736_55 (sequence is synthesized)
ctttacccaccccgagttaccagcagtcactctgtcgcccaggcggtgctgtcttggctcactgcaacctccgcc

SEQ ID NO: 396032 - DNA, 120 bp, Artificial Sequence
  ENSG00000145736_56 (sequence is synthesized)
attgactgaactttcaggtgtttgattccagcatgtagtatacattgtatgtgttaaaaagaaatttgcaactgtgaataaaaggacttctttagaagaagcttcatttaaaacatgaaa

SEQ ID NO: 396033 - DNA, 120 bp, Artificial Sequence
  ENSG00000145740_0 (sequence is synthesized)
gtccctaccgccgctgcttcccgggaacctggcgccgccggaactgatcgcggcctagtcccgacgcgtgtgtgctagtgagccggagccggcgacggcggcagtggcggcccggcctgc

SEQ ID NO: 396034 - DNA, 120 bp, Artificial Sequence
  ENSG00000145740_1 (sequence is synthesized)
aggagcccgacggggtctctgccatgggggagtgacgcgcctgcacccgctgttccgcggcagcggcgagacatgaggagaccccgcgacaggggcagcggcggcggctcgtgagccccg

SEQ ID NO: 396035 - DNA, 120 bp, Artificial Sequence
  ENSG00000145740_2 (sequence is synthesized)
ggatggaggagaaatacggcggggacgtgctggccggccccggcggcggcggcggccttgggccggtggacgtacccagcgctcgattaacaaaatatattgtgttactatgtttcacta

SEQ ID NO: 396036 - DNA, 120 bp, Artificial Sequence
  ENSG00000145740_3 (sequence is synthesized)
aatttttgaaggctgtgggacttttcgaatcatatgatctcctaaaagctgttcacattgttcagttcatttttatattaaaacttgggactgcattttttatggttttgtttcaaaagc

SEQ ID NO: 396037 - DNA, 120 bp, Artificial Sequence
  ENSG00000145740_4 (sequence is synthesized)
cattttcttctgggaaaactattaccaaacaccagtggatcaaaatatttaaacatgcagttgctgggtgtattatttcactcttgtggttttttggcctcactctttgtggaccactaa

SEQ ID NO: 396038 - DNA, 120 bp, Artificial Sequence
  ENSG00000145740_5 (sequence is synthesized)
ggactttgctgctatttgagcacagtgatattgttgtcatttcactactcagtgttttgttcaccagttctggaggaggaccagcaaagacaaggggagctgcttttttcattattgctg

SEQ ID NO: 396039 - DNA, 120 bp, Artificial Sequence
  ENSG00000145740_6 (sequence is synthesized)
tgatctgtttattgctttttgacaatgatgatctcatggctaaaatggctgaacaccctgaaggacatcatgacagtgctctaactcatatgctttacacagccattgccttcttaggtg

SEQ ID NO: 396040 - DNA, 120 bp, Artificial Sequence
  ENSG00000145740_7 (sequence is synthesized)
tggcagatcacaagggtggagtattattgctagtactggctttgtgttgtaaagttggttttcatacagcttccagaaagctctctgtcgacgttggtggagctaaacgtcttcaagctt

SEQ ID NO: 396041 - DNA, 120 bp, Artificial Sequence
  ENSG00000145740_8 (sequence is synthesized)
tatctcatcttgtttctgtgcttctcttgtgcccatgggtcattgttctttctgtgacaactgagagtaaagtggagtcttggttttctctcattatgccttttgcaacggttatctttt

SEQ ID NO: 396042 - DNA, 120 bp, Artificial Sequence
  ENSG00000145740_9 (sequence is synthesized)
ttgtcatgatcctggatttctacgtggattccatttgttcagtcaaaatggaagtttccaaatgtgctcgttatggatcctttcccatttttattagtgctctcctttttggaaattttt

SEQ ID NO: 396043 - DNA, 120 bp, Artificial Sequence
  ENSG00000145740_10 (sequence is synthesized)
ggacacatccaataacagaccagcttcgggctatgaacaaagcagcacaccaggagagcactgaacacgtcctgtctggaggagtggtagtgagtgctatattcttcattttgtctgcca

SEQ ID NO: 396044 - DNA, 120 bp, Artificial Sequence
  ENSG00000145740_11 (sequence is synthesized)
atatcttatcatctccctctaagagaggacaaaaaggtacccttattggatattctcctgaaggaacacctctttataacttcatgggtgatgcttttcagcatagctctcaatcgatcc

SEQ ID NO: 396045 - DNA, 120 bp, Artificial Sequence
  ENSG00000145740_12 (sequence is synthesized)
ctaggtttattaaggaatcactaaaacaaattcttgaggagagtgactctaggcagatcttttacttcttgtgcttgaatctgctttttacctttgtggaattattctatggcgtgctga

SEQ ID NO: 396046 - DNA, 120 bp, Artificial Sequence
  ENSG00000145740_13 (sequence is synthesized)
ccaatagtctgggcctgatctcggatggattccacatgctttttgactgctctgctttagtcatgggactttttgctgccctgatgagtaggtggaaagccactcggattttctcctatg

SEQ ID NO: 396047 - DNA, 120 bp, Artificial Sequence
  ENSG00000145740_14 (sequence is synthesized)
ggtacggccgaatagaaattctgtctggatttattaatggactttttctaatagtaatagcgttttttgtgtttatggagtcagtggctagattgattgatcctccagaattagacactc

SEQ ID NO: 396048 - DNA, 120 bp, Artificial Sequence
  ENSG00000145740_15 (sequence is synthesized)
acatgttaacaccagtctcagttggagggctgatagtaaaccttattggtatctgtgcctttagccatgcccatagccatgcccatggagcttctcaaggaagctgtcactcatctgatc

SEQ ID NO: 396049 - DNA, 120 bp, Artificial Sequence
  ENSG00000145740_16 (sequence is synthesized)
gaccatgggcatggtcacagccacggatctgcgggtggaggcatgaatgctaacatgaggggtgtatttctacatgttttggcagatacacttggcagcattggtgtgatcgtatccaca

SEQ ID NO: 396050 - DNA, 120 bp, Artificial Sequence
  ENSG00000145740_17 (sequence is synthesized)
gttcttatagagcagtttggatggttcatcgctgacccactctgttctctttttattgctatattaatatttctcagtgttgttccactgattaaagatgcctgccaggttctactcctg

SEQ ID NO: 396051 - DNA, 120 bp, Artificial Sequence
  ENSG00000145740_18 (sequence is synthesized)
agattgccaccagaatatgaaaaagaactacatattgctttagaaaagatacagaaaattgaaggattaatatcataccgagaccctcatttttggcgtcattctgctagtattgtggca

SEQ ID NO: 396052 - DNA, 120 bp, Artificial Sequence
  ENSG00000145740_19 (sequence is synthesized)
ggaacaattcatatacaggtgacatctgatgtgctagaacaaagaatagtacagcaggttacaggaatacttaaagatgctggagtaaacaatttaacaattcaagtggaaaaggaggca

SEQ ID NO: 396053 - DNA, 120 bp, Artificial Sequence
  ENSG00000145740_20 (sequence is synthesized)
tactttcaacatatgtctggcctaagtactggatttcatgatgttctggctatgacaaaacaaatggaatccatgaaatactgcaaagatggtacttacatcatgtgagataactcaaga

SEQ ID NO: 396054 - DNA, 120 bp, Artificial Sequence
  ENSG00000145740_21 (sequence is synthesized)
attacccctggagaataaacaatgaagattaaatgactcagtatttgtaatattgccagaaggataaaaattacacattaactgtacagaaacagagttccctactactggatcaaggaa

SEQ ID NO: 396055 - DNA, 120 bp, Artificial Sequence
  ENSG00000145740_22 (sequence is synthesized)
tctttcttgaaggaaatttaaatacagaatgaaacattaatggtaaaagtggagtaattatttaaattatgtgtataaaaggaatcaaattttgagtaaacatgatgtattacatcatct

SEQ ID NO: 396056 - DNA, 120 bp, Artificial Sequence
  ENSG00000145740_23 (sequence is synthesized)
tcaaaaatagatatgatggattctagtgaagaccaaaattacttctgtttactttctatcaggaagcatctccattgtaaatatgtatttacatgtttattacaaagacccaaatgaaaa

SEQ ID NO: 396057 - DNA, 120 bp, Artificial Sequence
  ENSG00000145740_24 (sequence is synthesized)
atttttagtccattttttgcatagcctaaagataaaataggaataaaagttctatatttatggattttctgtatataaaactggtttctaattataacttaagtccattaagtaaaatct

SEQ ID NO: 396058 - DNA, 120 bp, Artificial Sequence
  ENSG00000145740_25 (sequence is synthesized)
gtattgccactttaaatgtaaactaaattatttgggagaaacttcaaccactgatatgagataagcaatgagaatagggaagtgtataacatcacagtttttgatgtattacaaaaatca

SEQ ID NO: 396059 - DNA, 120 bp, Artificial Sequence
  ENSG00000145740_26 (sequence is synthesized)
accactctataaaataaattttttttacttttggtaatatttgcaaatgaataattaatttattagggtaaagaacttatactaagttgtgtccatgttattcatttacttaccatgttc

SEQ ID NO: 396060 - DNA, 120 bp, Artificial Sequence
  ENSG00000145740_27 (sequence is synthesized)
ctttaaagtagaatatttcctttcttgttatatatttgacattccaagctgcttatcaagctggtatccaagcagtggtaagctttcatcctttcttagctccataacgttgtgaaacag

SEQ ID NO: 396061 - DNA, 120 bp, Artificial Sequence
  ENSG00000145740_28 (sequence is synthesized)
ccagttaagagaatcgtaaataattgtcaactcacagttgaattctctgcctatgtaggtaacttttttctaatttctggaacatatagatatataagaaatatcaaagaataggtagtt

SEQ ID NO: 396062 - DNA, 120 bp, Artificial Sequence
  ENSG00000145740_29 (sequence is synthesized)
atttcaaagtttaataagtaaaacttgttcataaacatttgagcaccatgaaatcaaaataccctataactactttctatagtcatatctaatttatatttttttcatttccagttgtaa

SEQ ID NO: 396063 - DNA, 120 bp, Artificial Sequence
  ENSG00000145740_30 (sequence is synthesized)
ctagatatgtagtaaagtctgaaaagactttaccatagacaataacatgcagttttatcagcaccaaagaatgttgtccaaaagaaactttttaatacctgtctttctatttataacatc

SEQ ID NO: 396064 - DNA, 120 bp, Artificial Sequence
  ENSG00000145740_31 (sequence is synthesized)
ttaagaattttgataagtagattgaatttagtatgagtactattttcttatatataccacaatggcaaacatgtattataaatcatatttttgtcttaccaattttaatatatgaggggt

SEQ ID NO: 396065 - DNA, 120 bp, Artificial Sequence
  ENSG00000145740_32 (sequence is synthesized)
aattttaatatatgaggggttttagaaatttgttgtaagttatttttatattccttgtcttttgcatattttttggccaaaatcttcaatacatattaaaatttttgagtggtgggaaaa

SEQ ID NO: 396066 - DNA, 63 bp, Artificial Sequence
  ENSG00000145740_33 (sequence is synthesized)
gagttcgagaccagcctggccaacgtgttgaaacaccatctctactaaaaatacgaaaaattg

SEQ ID NO: 396067 - DNA, 120 bp, Artificial Sequence
  ENSG00000145740_34 (sequence is synthesized)
tccatctcaaaaaaaaaaaaaaaaaagttatcaaaatattgcaataggagttttactaaaataagtataattaattctccagtatgatttattcagaggataacacttcaagttctggca

SEQ ID NO: 396068 - DNA, 120 bp, Artificial Sequence
  ENSG00000145740_35 (sequence is synthesized)
agtatgatttattcagaggataacacttcaagttctggcatatttgtttaaaataagtgtctttacttaaaactgtatcttgtgtttaatatggattaatattaatatattaatgtttca

SEQ ID NO: 396069 - DNA, 120 bp, Artificial Sequence
  ENSG00000145740_36 (sequence is synthesized)
gaaaaggtactgtatgtaatttcttcactactttcttccttgaaaatcacatttttgaagtctttgctggaagtaaaacagacaaccaaataaataataaaacaaaacgaggccaaaaaa

SEQ ID NO: 396070 - DNA, 120 bp, Artificial Sequence
  ENSG00000145740_37 (sequence is synthesized)
cactgattaaagatgcctgccaggttctactcctgagattgccaccagaatatgaaaaagaactacatattgctttagaaaaggttacaggaatacttaaagatgctggagtaaacaatt

SEQ ID NO: 396071 - DNA, 120 bp, Artificial Sequence
  ENSG00000145740_38 (sequence is synthesized)
agatttcaaaatctaccagcagacaagaatatagataatggaaaacagaatactgtcctttttttttttctttctttttttgagaaagagtcttgctccatcgcccaggctgcagtgcag

SEQ ID NO: 396072 - DNA, 120 bp, Artificial Sequence
  ENSG00000145740_39 (sequence is synthesized)
gctaattttctattattaattacttagtagtatgaaaatttggacttgtttcctcatttataaagtttatactttaaaaatatttgtccttttccttttctgaaaaatgttctatgtttt

SEQ ID NO: 396073 - DNA, 120 bp, Artificial Sequence
  ENSG00000145740_40 (sequence is synthesized)
gtgctaggattacaggcatgagccacagcacccggcccagaataagaatactgtcttggaaatctagacttagtcaagggatcttatgttttctatttacaaaatatgtaatgatttcac

SEQ ID NO: 396074 - DNA, 120 bp, Artificial Sequence
  ENSG00000145740_41 (sequence is synthesized)
attattatctttctgtattttatttaaaatttggatatatagcaaaatatatgtgactgaaatttttaatttttttgtttccatttatagtggatcaaaatatttaaacatgcagttgct

SEQ ID NO: 396075 - DNA, 120 bp, Artificial Sequence
  ENSG00000145740_42 (sequence is synthesized)
ccatttatagtggatcaaaatatttaaacatgcagttgctgggtgtattatttcactcttgtggttttttggcctcactctttgtggaccactaaggtaaataaaaatgcatattttgaa

SEQ ID NO: 396076 - DNA, 120 bp, Artificial Sequence
  ENSG00000145741_0 (sequence is synthesized)
cttgaaggaagtggccttgtgtcacttccggcctccctttagctgccatcttgcgtccccgcgtgtgtgcgcctaatctcaggtggtccacccgagaccccttgagcaccaaccctagtc

SEQ ID NO: 396077 - DNA, 120 bp, Artificial Sequence
  ENSG00000145741_1 (sequence is synthesized)
ccccgcgcggccccttattcgctccgacaagatgaaagaaacaatcatgaaccaggaaaaactcgccaaactgcaggcacaagtgcgcattggtgggaaaggaactgctcgcagaaagaa

SEQ ID NO: 396078 - DNA, 120 bp, Artificial Sequence
  ENSG00000145741_2 (sequence is synthesized)
gaaggtggttcatagaacagccacagcagatgacaaaaaacttcagttctccttaaagaagttaggggtaaacaatatctctggtattgaagaggtgaatatgtttacaaaccaaggaac

SEQ ID NO: 396079 - DNA, 120 bp, Artificial Sequence
  ENSG00000145741_3 (sequence is synthesized)
cattacaggccatgctgagacaaagcagctgacagaaatgctacccagcatcttaaaccagcttggtgcggatagtctgactagtttaaggagactggccgaagctctgcccaaacaatc

SEQ ID NO: 396080 - DNA, 120 bp, Artificial Sequence
  ENSG00000145741_4 (sequence is synthesized)
tgtggatggaaaagcaccacttgctactggagaggatgatgatgatgaagttccagatcttgtggagaattttgatgaggcttccaagaatgaggcaaactgaattgagtcaacttctga

SEQ ID NO: 396081 - DNA, 120 bp, Artificial Sequence
  ENSG00000145741_5 (sequence is synthesized)
agataaaacctgaagaagttactgggagctgctattttatattatgactgctttttaagaaatttttgtttatggatctgataaaatctagatctctaatatttttaagcccaagcccct

SEQ ID NO: 396082 - DNA, 120 bp, Artificial Sequence
  ENSG00000145741_6 (sequence is synthesized)
tggacactgcagctcttttcagtttttgcttatacacaattcattctttgcagctaattaagccgaagaagcctgggaatcaagtttgaaacaaagattaataaagttctttgcctagta

SEQ ID NO: 396083 - DNA, 120 bp, Artificial Sequence
  ENSG00000145741_7 (sequence is synthesized)
gctctggacggcggcgtggtaggaggacgggagcgggggcgggaagttccctgaaggagcgagacagggagggacagggcagaggaggagaggaaggcgatgcgacggacaggcgcaccc

SEQ ID NO: 396084 - DNA, 120 bp, Artificial Sequence
  ENSG00000145741_8 (sequence is synthesized)
gctcaggctgactctcgggggcgaggtcgagccaggggcggctgccctgggggcgaggcgacgctgtctcaacctccacctcgcggcggaacccgaggacaggagcctcagatgaaagaa

SEQ ID NO: 396085 - DNA, 120 bp, Artificial Sequence
  ENSG00000145741_9 (sequence is synthesized)
tcattgacaccgatctgtacacagtaaaaaaaattgcttatagaaagctaatcatggcatgtaatatggctgataacctttggaatttgattaaagatttaaaatcacggtgtagtgtaa

SEQ ID NO: 396086 - DNA, 120 bp, Artificial Sequence
  ENSG00000145741_10 (sequence is synthesized)
tgcattaaatgggttgttttttttttttttaacttagggacttcaaagtccctaagatgtgtttctaccataaattaataaatatcagggagctcattaagtctgaatgctattagaata

SEQ ID NO: 396087 - DNA, 120 bp, Artificial Sequence
  ENSG00000145741_11 (sequence is synthesized)
tcagcattgctaatttaaatttttcttttcttaataggtgaatatgtttacaaaccaaggaacagtgatccactttaacaaccctaaagttcaggcatctctggcagcgaacactttcac

SEQ ID NO: 396088 - DNA, 120 bp, Artificial Sequence
  ENSG00000145741_12 (sequence is synthesized)
actgcaggcacaagtgcgcattggtgggaaagtaagttttaatagttcgggtttgtgggttttttttttaaggtttaggtattttaaaaaacatattccttttgcgcttcttatattatc

SEQ ID NO: 396089 - DNA, 120 bp, Artificial Sequence
  ENSG00000145741_13 (sequence is synthesized)
ggtgacaaactttgcctatcgagggaaattcacggagctagcaaatctcgaggagcgggggagacgagggttggagacacatcagtgagacgagctaaaaacatcgcctttgtgtaaaca

SEQ ID NO: 396090 - DNA, 120 bp, Artificial Sequence
  ENSG00000145741_14 (sequence is synthesized)
tgtttgtgttttcagtgttacagagtgtaagtagaacacaaaagtgtttcctaatttaattagtaaggaaaatgtgtcatttcagttagatcgttgtgcacatcatacccttgacttgtt

SEQ ID NO: 396091 - DNA, 120 bp, Artificial Sequence
  ENSG00000145741_15 (sequence is synthesized)
ttggcctgagttttctaaagtcagtgcttgtttgtctctcttgtaaattgagacctttctgtactgctttctgaactaaatattctttagggtagttgcatatttcaagggtatttgaag

SEQ ID NO: 396092 - DNA, 120 bp, Artificial Sequence
  ENSG00000145741_16 (sequence is synthesized)
tggatggaaaagcaccacttgctactggagaggatgatgatgatgaagttccaggtaggaacgtttacttgtggttaacctagagaatcttagcaagggagaataagaaatctttgtagg

SEQ ID NO: 396093 - DNA, 120 bp, Artificial Sequence
  ENSG00000145741_17 (sequence is synthesized)
aaaaactacccagggaagaggggtggtaagttaagatggacatagatcttacttagaatgagaaaaataatgcagtattaggtaattgagaattatgtttatagacttgacttggcttgt

SEQ ID NO: 396094 - DNA, 120 bp, Artificial Sequence
  ENSG00000145741_18 (sequence is synthesized)
ttctgtttgggatcccaaggatgtgtaggtatctaaccttaaatattgaataaataagtatatatatatagtaccctaaatataactattacctgcagagcactaatgacccttgctccc

SEQ ID NO: 396095 - DNA, 120 bp, Artificial Sequence
  ENSG00000145741_19 (sequence is synthesized)
tactttgaaactcatgaatttacaagaaggtgtggagttgttcaggtatcttgggatatatatatgcattctaaaatctgtagcagcataactcctttgggaatcatgagacatttttgt

SEQ ID NO: 396096 - DNA, 120 bp, Artificial Sequence
  ENSG00000145741_20 (sequence is synthesized)
tgagcaccaaccctagtcccccgcgcggccccttattcgctccgacaagatgaaagaaacaatcatgaaccaggaaaaactcgccaaactgcaggcacaagtgcgcattggtgggaaagt

SEQ ID NO: 396097 - DNA, 120 bp, Artificial Sequence
  ENSG00000145743_0 (sequence is synthesized)
agagtcgcgggtgcgcgcgccggcggcggatccgcagttaaaatggtccgagcgggacccggcctttccccggccgctccgctgactgactgagccggctggccgggcccggactggtcg

SEQ ID NO: 396098 - DNA, 120 bp, Artificial Sequence
  ENSG00000145743_1 (sequence is synthesized)
cctagccggcaggctcgctcgctccctccctcgcgtccccaaagctcgcgcccatcgttctcccggcttccctgggcaaagcatgtagcccccgtcgggcactccggcggcccgcagctg

SEQ ID NO: 396099 - DNA, 120 bp, Artificial Sequence
  ENSG00000145743_2 (sequence is synthesized)
ccaccccccaccgtcgcgtgtgtgcccgtgtgtgcgtgtgtgtgcgcaggaagggcgacccctccgggggccgagccagcgagcggcctgccccgctgccgggagcccgcctctctgggt

SEQ ID NO: 396100 - DNA, 120 bp, Artificial Sequence
  ENSG00000145743_3 (sequence is synthesized)
gggtctccctccctcccgtcccggtccccctcctcggggccttctatatgggccaccttctctcgaaggagccgcgtaaccgcccgagccagaagaggcctcgctgttgcagttggtgcc

SEQ ID NO: 396101 - DNA, 120 bp, Artificial Sequence
  ENSG00000145743_4 (sequence is synthesized)
gccgccggcgccctctcctcaggctgccccgccggaccccagccaaggtgccccctcagccggcggcgccccggagccgggactgcttcttccgcgggccctgcatgctctgcttcatcg

SEQ ID NO: 396102 - DNA, 120 bp, Artificial Sequence
  ENSG00000145743_5 (sequence is synthesized)
tctgcttcatcgtgcacagtcccggcgcgcccgcccccgccggcccagaggaggagccgccgctctcgccgccgccgcgggacggggcctacgctgccgcctcctcctctcagcacctgg

SEQ ID NO: 396103 - DNA, 120 bp, Artificial Sequence
  ENSG00000145743_6 (sequence is synthesized)
cggccctggccgccgaggactgcgccgctgctgcccgccgcttcctgctatcctcggccgccgccgccgccgccgctgccgcctcggcttcgtcgcccgcctcctgctgcaaagagttgg

SEQ ID NO: 396104 - DNA, 120 bp, Artificial Sequence
  ENSG00000145743_7 (sequence is synthesized)
ggctgcggccgccgcctgggagcagcagggccgaagtctcttcctggccagcttggggccggtgcgcttcctggggccgcccgccgccgtgcagctcttccgggggccgacaccgtcacc

SEQ ID NO: 396105 - DNA, 120 bp, Artificial Sequence
  ENSG00000145743_8 (sequence is synthesized)
cttccgggggccgacaccgtcaccggccgagctccctacgccccccgaaatggtgtgcaagcggaagggggccggggtccccgcctgcaccccctgcaagcagccccgctgcggcggcgg

SEQ ID NO: 396106 - DNA, 80 bp, Artificial Sequence
  ENSG00000145743_9 (sequence is synthesized)
ccccggccccccgacgccggctgctgccaggccccggagcagcccccgcagccgctctgccctccgccctcttctcccac

SEQ ID NO: 396107 - DNA, 120 bp, Artificial Sequence
  ENSG00000145743_10 (sequence is synthesized)
ccacctccgaaggtgcccccaccgaagctggcggggacgctgtccgagccgggggcaccgcccccttgtccgcccagcagcagcatgaatgtggcgacgcggactgtcgggagtcccccg

SEQ ID NO: 396108 - DNA, 120 bp, Artificial Sequence
  ENSG00000145743_11 (sequence is synthesized)
aaaacccctgcgactgtcacagggagccgccccccgaaaccccagacatcaaccagctgccgccgtccatcctgctcaagatattttccaatttgtcactggatgagcgttgcctttccg

SEQ ID NO: 396109 - DNA, 120 bp, Artificial Sequence
  ENSG00000145743_12 (sequence is synthesized)
catcattggtttgcaagtactggcgtgacctttgtttagacttccagttttggaagcagctggatcttagtagtcgtcagcaggtcactgatgaattgttggaaaaaattgcatcaagaa

SEQ ID NO: 396110 - DNA, 120 bp, Artificial Sequence
  ENSG00000145743_13 (sequence is synthesized)
gtcagaatataattgaaatcaacatttctgattgtcgcagtatgtctgataatggcgtatgtgttttagcatttaaatgtcctggacttcttaggtatacagcctacaggtgtaaacagc

SEQ ID NO: 396111 - DNA, 120 bp, Artificial Sequence
  ENSG00000145743_14 (sequence is synthesized)
tttctgacacctctattattgcggttgcctctcactgtcctttacttcagaaagtgcatgtaggcaaccaggacaaactcactgatgaaggactcaagcagctgggctcaaaatgcagag

SEQ ID NO: 396112 - DNA, 120 bp, Artificial Sequence
  ENSG00000145743_15 (sequence is synthesized)
aactcaaagatattcatttcggccagtgttacaagatctcagatgaaggcatgatcgtcatagctaagggctgtctgaaattacaaaggatatacatgcaggaaaacaaattagtgacag

SEQ ID NO: 396113 - DNA, 120 bp, Artificial Sequence
  ENSG00000145743_16 (sequence is synthesized)
atcagtcagtgaaagcatttgctgaacactgtcctgagcttcaatatgtaggcttcatgggttgttcagtcacttctaaaggagtcattcacctaaccaagctaagaaacctttccagct

SEQ ID NO: 396114 - DNA, 120 bp, Artificial Sequence
  ENSG00000145743_17 (sequence is synthesized)
tggacctacgtcatatcactgaactggataatgaaaccgtgatggaaattgtcaagaggtgcaaaaatcttagctctctcaatctctgtctgaactggatcataaatgacaggtgtgtgg

SEQ ID NO: 396115 - DNA, 120 bp, Artificial Sequence
  ENSG00000145743_18 (sequence is synthesized)
aggtcattgcaaaggaaggacaaaacctgaaagagctatatttggtgtcctgtaaaatcacagattatgcactgatagccattgggcgatacagcatgacaatagagactgtggatgtcg

SEQ ID NO: 396116 - DNA, 120 bp, Artificial Sequence
  ENSG00000145743_19 (sequence is synthesized)
gatggtgtaaagaaatcacagaccaaggagccaccctgattgcacagagcagcaagtctctgagatatttggggctgatgagatgtgataaagtcaacgaagtgacggtggaacagctgg

SEQ ID NO: 396117 - DNA, 120 bp, Artificial Sequence
  ENSG00000145743_20 (sequence is synthesized)
tgcagcagtacccccacatcaccttcagcaccgtcctgcaggactgcaagaggaccttggagagagcctatcagatgggctggacccccaacatgtctgccgcctcctcctagcgctcct

SEQ ID NO: 396118 - DNA, 120 bp, Artificial Sequence
  ENSG00000145743_21 (sequence is synthesized)
gcagagcagaggagaattgtacatttggggagctgatctctcggaagggttttaactgtcacctgtctgtgtgtgttcaagtatgtgtatttgtgtcttgtttgcatactgcataccaaa

SEQ ID NO: 396119 - DNA, 120 bp, Artificial Sequence
  ENSG00000145743_22 (sequence is synthesized)
agtgcagttgtcatttgttcccaagtgagctggctttttttcttagaaattaaagattatgaaagccacaaactttttagtttttaacttcaaaggcttctttctctttaaaaaaaaatt

SEQ ID NO: 396120 - DNA, 120 bp, Artificial Sequence
  ENSG00000145743_23 (sequence is synthesized)
atttttaatatagagtcaaaaaattggatgtattattttgagcttctaattgctgccacttggagatgtccaagtaagaaggccttctttttacatgggatgaattgtgcacttctactg

SEQ ID NO: 396121 - DNA, 120 bp, Artificial Sequence
  ENSG00000145743_24 (sequence is synthesized)
atgatgactacagcagaagtgatgttatacgtacaggcacttacactctctcacatattcacacgtgtgcacatctacaccagggctctgatctactctagatcgtttcctgacagagaa

SEQ ID NO: 396122 - DNA, 120 bp, Artificial Sequence
  ENSG00000145743_25 (sequence is synthesized)
gccttcttccaggccactaaggtagcatgttatccactgtggcactgcctaactccgtgtatcctcgggtggccaacttgctatctggtgggtgacttggggactagaaagaataaagcc

SEQ ID NO: 396123 - DNA, 120 bp, Artificial Sequence
  ENSG00000145743_26 (sequence is synthesized)
ttttctaaatttgttatatagaggcaacagtctgaactctcctggccagctcacgaaagttaattatacattattctacaaatgcattctgttgagcactaaatattttagttggtttta

SEQ ID NO: 396124 - DNA, 120 bp, Artificial Sequence
  ENSG00000145743_27 (sequence is synthesized)
tgttaacattgtgttagcttttatttcctggatagtaactggtcaggatatattttaatgatatttgaaactaatcttagcattgaagccaccaatgtaattaatggtgtgcagttattt

SEQ ID NO: 396125 - DNA, 120 bp, Artificial Sequence
  ENSG00000145743_28 (sequence is synthesized)
taaaaactacagatcatttcattattttcttaattttggtaattattaaagtctatttctgagatacgagagggtagtcacattaatagaagattcatgagtgagatataagtagacaat

SEQ ID NO: 396126 - DNA, 120 bp, Artificial Sequence
  ENSG00000145743_29 (sequence is synthesized)
ctttctactgttgttgctctttttgctttgctttgggttcttgaacaggttttttggatatatgcatgttgtcattttggactagttctcatgctactgcaaagatctattgctagctaa

SEQ ID NO: 396127 - DNA, 120 bp, Artificial Sequence
  ENSG00000145743_30 (sequence is synthesized)
tatatgagttaagaaagaaaattagaaaatctgttcattgaaattctgtttacacttgtcagaaataagcatttctttgtttaattaaggattgccagcttcagttaagacaagacctat

SEQ ID NO: 396128 - DNA, 120 bp, Artificial Sequence
  ENSG00000145743_31 (sequence is synthesized)
cagtaaatgaatatatgttttgatttaacacatctttacaattaattcataatagggactcaggctcaaataactgttcctgtgtctagatttataatgaggacatcagggagccttttt

SEQ ID NO: 396129 - DNA, 120 bp, Artificial Sequence
  ENSG00000145743_32 (sequence is synthesized)
aagctaaagagtgattatctttcacagtagaactagaaacaaaaccctaacttgtgaagttgctatttatttttccctgagtgaatataactgttatttggtctttaacagatatactga

SEQ ID NO: 396130 - DNA, 120 bp, Artificial Sequence
  ENSG00000145743_33 (sequence is synthesized)
ggtttgagtttcactttctttaagtctcacattgctaacatgacattagctgtaagaaacaagatagctttacatttgaatgccatttactgatttctaatgattctctttttttgtaaa

SEQ ID NO: 396131 - DNA, 120 bp, Artificial Sequence
  ENSG00000145743_34 (sequence is synthesized)
caactgtttcctttgattatgtcaacatgtttctgatgtggcatttttgttttaatcccaatcggttaggaaaatctagtcagtaagcgccatgagtattcttcccataactaaatgggt

SEQ ID NO: 396132 - DNA, 120 bp, Artificial Sequence
  ENSG00000145743_35 (sequence is synthesized)
ttctaatttaatttgaagggaataaaatttgtgtaagaaaaaagctgtttaacattaataaactatatttcttcttacacattgaactgtatcattttcatatccacttccccaccactg

SEQ ID NO: 396133 - DNA, 120 bp, Artificial Sequence
  ENSG00000145743_36 (sequence is synthesized)
caccactgaaatatcttatttcacaatattttaactgatttttaatccaaaactaatttataagacagtatgtatagtaatagtagcttgagtgaatatgcaaaagtttaatttttatat

SEQ ID NO: 396134 - DNA, 120 bp, Artificial Sequence
  ENSG00000145743_37 (sequence is synthesized)
ctatattttaaatagttaaaaaagacaaaagaagggagagccatctatgatatagatggtaccatttcagttcaaagttgtaataacctttggagtgttacagtttggttgtcaaatggt

SEQ ID NO: 396135 - DNA, 120 bp, Artificial Sequence
  ENSG00000145743_38 (sequence is synthesized)
ttcagaatgtataattgatttttttaaatgttgcattgtttgaatctaaagtacagcactataacatgctttagcttgggggggtgggggtggggtggggacttgcacttattctctaaa

SEQ ID NO: 396136 - DNA, 120 bp, Artificial Sequence
  ENSG00000145743_39 (sequence is synthesized)
atgttgactaatccagaaagcctgatgcaacataatctggaaaactgctttggtacatttgtagaaatccgtagaaataccatatccagcctcaaagcattaatctcaaaaaaaaaaaaa

SEQ ID NO: 396137 - DNA, 120 bp, Artificial Sequence
  ENSG00000145743_40 (sequence is synthesized)
aaaaaaaaaaaaaacagccagaaaaaagcatcaccttgagtggtcctgtgatggttgttgaatgtgttctcattagatgctttgaaatgaggcttaaaataatttttctgggcaatatag

SEQ ID NO: 396138 - DNA, 120 bp, Artificial Sequence
  ENSG00000145743_41 (sequence is synthesized)
agtttcttttttttgcttagaatgtcataaatacatgtgaacacgtttaatgcagggctttttattctctccaaaatgtcaacagtattttcagaataaagactatgaaatatattgctg

SEQ ID NO: 396139 - DNA, 120 bp, Artificial Sequence
  ENSG00000145743_42 (sequence is synthesized)
tagtggaaaattctggtcctttgtctttaatgtctttttgagtggataaagaaaattcacccggtttgtagtttctatatttccgtgaatctttgaccttgcagtgggttgcaataaaag

SEQ ID NO: 396140 - DNA, 120 bp, Artificial Sequence
  ENSG00000145743_43 (sequence is synthesized)
gagatgtgataaagtaagagttgactatcaagttgtttgctttctacatatcagtatagttaatagcttgatgtcatatcctctctccttctctatctccacccccgtgtattatatatt

SEQ ID NO: 396141 - DNA, 120 bp, Artificial Sequence
  ENSG00000145743_44 (sequence is synthesized)
atatatacattttatatgtatatatgcaattatagctatgcattgtttgcctgcttttgtaaactaatctgagattatctttgtatttccccacttaataatgaattttgtgcttaagta

SEQ ID NO: 396142 - DNA, 120 bp, Artificial Sequence
  ENSG00000145743_45 (sequence is synthesized)
gaaagaaaaagtaatcatatacatagtcaactagagtttggcatcctattcataagtccatggaccaaaatgtaaaagattacatgacaaactgcaatttgcagggtctaaccgtaaaat

SEQ ID NO: 396143 - DNA, 120 bp, Artificial Sequence
  ENSG00000145743_46 (sequence is synthesized)
tgtattctgggtttcaagtttccagcaacagtaaaggtggaaagaacagtgccaaattggtttttcacaagtgtgtaattttggtactgaacatctatgtattctggccattcgggacca

SEQ ID NO: 396144 - DNA, 120 bp, Artificial Sequence
  ENSG00000145743_47 (sequence is synthesized)
acaaagggccagtaagggggtatgtgggaatttgcatctccccatacatcagatgccactcccagcacatgataagaagtggttccagaggtcctggtggaaggcctgtagaaccagcca

SEQ ID NO: 396145 - DNA, 120 bp, Artificial Sequence
  ENSG00000145743_48 (sequence is synthesized)
gccagggatgtgagcatgagtttaggaaatggtgtagcatttaacgtgggaccctttgaagactgagaaaacagataataaaaatctatactgacacctgtaatcccagcacattgggag

SEQ ID NO: 396146 - DNA, 89 bp, Artificial Sequence
  ENSG00000145743_49 (sequence is synthesized)
tgagccgaaaaccctgtctctatccccctctcccccaacaaaaaaaaattagccaggcataatggcacacacctgtagtcccagctact

SEQ ID NO: 396147 - DNA, 120 bp, Artificial Sequence
  ENSG00000145743_50 (sequence is synthesized)
ggccgaggttgcagtgagccgtgattgtgccgcaaccacctcagcctggatgacggagcacgactgtgtcccaaacaaacaaaaaaaacctatactggacaccaggcactccacaggtgt

SEQ ID NO: 396148 - DNA, 120 bp, Artificial Sequence
  ENSG00000145743_51 (sequence is synthesized)
tttcttctttgtttattccatgttttacctataacaagtctaagaaatagttatttgcattgtgaaggggagaaaatggaggctcagaaagaccagtcagtggccccaggatactctggc

SEQ ID NO: 396149 - DNA, 120 bp, Artificial Sequence
  ENSG00000145743_52 (sequence is synthesized)
aagacttcatgccgggtctttggagtctgtatccagtgctgctggcacaacccagggggcagtctgtggccacggggactgcttcccttggaaaaggtccagttcagatacttgctcaga

SEQ ID NO: 396150 - DNA, 120 bp, Artificial Sequence
  ENSG00000145743_53 (sequence is synthesized)
aagtgccgccatcttgtactaatttacacatgtgtgctacttttgtaaatggtgattaggaacaaatctagcaaaataatgtgaaactaaatagacacgccattcaaagggcatgcatct

SEQ ID NO: 396151 - DNA, 120 bp, Artificial Sequence
  ENSG00000145743_54 (sequence is synthesized)
tctaaatgtagcaaatgtgggggcaaatgaagtatggcccaaagctcttgtgtcctttgtgattttttgttaattggctaattcttttctccaaacactttagaatcccaacttatacga

SEQ ID NO: 396152 - DNA, 120 bp, Artificial Sequence
  ENSG00000145743_55 (sequence is synthesized)
gacctttgccagctagttatgtttagagaaatgttattatatattctcagcccagcccagaagcgacttactttgtaactaagcaacagcactgagatccggggcttgcgagtctcccac

SEQ ID NO: 396153 - DNA, 120 bp, Artificial Sequence
  ENSG00000145743_56 (sequence is synthesized)
aaatctttccactaaccaacctaatgccgctgctaaccctgccactttaaaatgacttcttttaagacaagttaaagggtccaccataggcatagtcctctagaaacaggaatcaatgac

SEQ ID NO: 396154 - DNA, 120 bp, Artificial Sequence
  ENSG00000145743_57 (sequence is synthesized)
agcagaactcctcagcttccagcagaaggaactgccacatgaatgctaactaaagctaccaaaatgtacacattcatacatatgtgtccgcagccattctcagaaattgtcatatttcta

SEQ ID NO: 396155 - DNA, 120 bp, Artificial Sequence
  ENSG00000145743_58 (sequence is synthesized)
acctgtaatctttagatggttaagatcagctccatcttcggagatacactgtagaagttgtatgttacagttactacaggagaatgttattccagacatatttgctgaccagcattttgc

SEQ ID NO: 396156 - DNA, 120 bp, Artificial Sequence
  ENSG00000145743_59 (sequence is synthesized)
tgatttttagttaagaaatgggttattttctacccaaatgcaaattagtccaaaattaaatagagacagtattcagattagctgtatccctgagggttttagcccttttcctgggctgcc

SEQ ID NO: 396157 - DNA, 120 bp, Artificial Sequence
  ENSG00000145743_60 (sequence is synthesized)
tctgaatcctttctctaaccagagagccactctgagaacccattggctccagcacgacgccgtctggtcagagcctgctgcagtgcagcccagggagatgctggacccagccttgctgtc

SEQ ID NO: 396158 - DNA, 120 bp, Artificial Sequence
  ENSG00000145743_61 (sequence is synthesized)
tggcttcctcagacttaaagcagctcagagccaaacacgagaggctctgtgaggatggaagacagttccaaaccacacacaaagcacaagtaaagccttgcacagaaaagcctgcttgtt

SEQ ID NO: 396159 - DNA, 120 bp, Artificial Sequence
  ENSG00000145743_62 (sequence is synthesized)
ggtttagttggatggaaatctaaagtagctattcagttttcagattttgtatcatgccatccatctccagattttaagttaccatcaagattcaaaggaagatatgagtaacaaagaaaa

SEQ ID NO: 396160 - DNA, 120 bp, Artificial Sequence
  ENSG00000145743_63 (sequence is synthesized)
gaaattagtagcaacggtatggtctgcggagagccagagttcaggttcagatctgggctttgcacttactagttgtgtcaccgcgggcagttactaacctctcagtgcctgttccctcgt

SEQ ID NO: 396161 - DNA, 120 bp, Artificial Sequence
  ENSG00000145743_64 (sequence is synthesized)
ttgcaaaatgaggatgatactagtacctatcttgtagaattgtgagcatgtgaatgagttaacatacataaagcacttagaataatgtctattatatataaaatgctctgttactgatta

SEQ ID NO: 396162 - DNA, 120 bp, Artificial Sequence
  ENSG00000145743_65 (sequence is synthesized)
gtcttatcatccatatcattatattaacctgtgttgtgatactggaattttccaatgagaaaaaaaaattatattgcctactatcccattttgaaagacaattaaaaagaaaggaaaaaa

SEQ ID NO: 396163 - DNA, 120 bp, Artificial Sequence
  ENSG00000145743_66 (sequence is synthesized)
aatgaaccattttcctaatcctttctaagaataaaaagttacaaaatcattgaaagttcttaaaaagaaatcaagaactatatcatagagactgtctatcgtcacttatgctcattgtga

SEQ ID NO: 396164 - DNA, 120 bp, Artificial Sequence
  ENSG00000145757_0 (sequence is synthesized)
agtgagctgtgagttctgtccttgctggctttcccaagtggaaggctaccctcatctttcactaatggcagactaggacaagcattacccaggcctgcaagcttgttaaggactaggaac

SEQ ID NO: 396165 - DNA, 120 bp, Artificial Sequence
  ENSG00000145757_1 (sequence is synthesized)
ccaagcaagaactcaccatgccaatcaaacctgttgggtggatatgtgggcaggtgttgaagaacttttctggaagaatcgaggggatccagaaagcaatcatggaccttgtagatgagt

SEQ ID NO: 396166 - DNA, 120 bp, Artificial Sequence
  ENSG00000145757_2 (sequence is synthesized)
ttaaagatgaatttcccaccatcctaagattatcacagtctaatcagaaaagagaacctgcgcagaaaacatccaaaatcaggatggctattgctttagctaagattaatcgagcaacat

SEQ ID NO: 396167 - DNA, 120 bp, Artificial Sequence
  ENSG00000145757_3 (sequence is synthesized)
taattcgtggattaaacagcatatccagatcctccaaatcagtggccaaacttctgcatcctcagcttgcatgcagacttttagagctaagggacatatctggtcgtctgctgagggaag

SEQ ID NO: 396168 - DNA, 120 bp, Artificial Sequence
  ENSG00000145757_4 (sequence is synthesized)
ttaatgcgccgaggcaacccctatataacattcaggtcagaaagggttctttgtttgaaatcatctcctttccagcaaagactgctttaactagcataatatatgcttcatatgcagcac

SEQ ID NO: 396169 - DNA, 120 bp, Artificial Sequence
  ENSG00000145757_5 (sequence is synthesized)
ggcagtctgtgttaatgctgtgctgaagaaggtaaagaacatcttccaggaagaagaatccataaggcaaaacagagaggagagtgaaaattgtagaaaagccttttctgagcctgtgct

SEQ ID NO: 396170 - DNA, 120 bp, Artificial Sequence
  ENSG00000145757_6 (sequence is synthesized)
ttcggagcctatgtttgctgaaggtgaaatcaaagcaaaaccttataggtcattgccggagaagccagacatttcagattaccccaagcttcttgctaataagcagagtaataacatcca

SEQ ID NO: 396171 - DNA, 120 bp, Artificial Sequence
  ENSG00000145757_7 (sequence is synthesized)
agttttacattctgtgtttgaccaatcagctgaaatgaatgagcaaatctgaatacaggtatcactgaacagaacttaagagttatctatttaatggcacatttcatctgacaaaactca

SEQ ID NO: 396172 - DNA, 120 bp, Artificial Sequence
  ENSG00000145757_8 (sequence is synthesized)
gagtctagtttacatattctgaattgctctgctttcttaaaaaaaagagaagggggctactattaaaatgtcattttctagtatttacatgatagagtaaataaaatgaatattgatgtg

SEQ ID NO: 396173 - DNA, 120 bp, Artificial Sequence
  ENSG00000145757_9 (sequence is synthesized)
gaatatatgtactgactacatacttttaatgaacaagaaaatccatcctctggtaggttagactttacactgtggtttataatataagcatatttataatacattaatgtttttattaaa

SEQ ID NO: 396174 - DNA, 120 bp, Artificial Sequence
  ENSG00000145757_10 (sequence is synthesized)
gcttggaagtctacagtggaagagtgagggaactttggtcagctgcttttcctctcctcagctctcctccctcatcggtttctgcttttggcctcttcaaagctgcaagagggaaggaga

SEQ ID NO: 396175 - DNA, 120 bp, Artificial Sequence
  ENSG00000145757_11 (sequence is synthesized)
tcaaaatcctggggaagagaataactcatttaatattctgacatgtcaaatgttcttgatagactctgaagagtctgctgcagaagaaccaggttaaaaaaacagtaggtctaaggggtt

SEQ ID NO: 396176 - DNA, 120 bp, Artificial Sequence
  ENSG00000145757_12 (sequence is synthesized)
ggggtgacaagattctgcatgtctaagaagctcccatgtgacaccaaagttgctggtctatggacaacagtttgaggagcaaggtcttcaagctctcattatggactgaaactggagaaa

SEQ ID NO: 396177 - DNA, 120 bp, Artificial Sequence
  ENSG00000145757_13 (sequence is synthesized)
attctatggaactattatcagctcacacatataaaaactggtcactgagatgacagctgagctgaaatgcccaaaatgcaaatgaactagacatgccaacagcttggggaagagaattcc

SEQ ID NO: 396178 - DNA, 120 bp, Artificial Sequence
  ENSG00000145757_14 (sequence is synthesized)
atactgaaagaagagcaaatacaaaagcctgaaggaaagaaaagtcttggtgaatgtgttccagaagactggaacataatatgcaagattggtaaacaggcaggagccaggttgtgcagt

SEQ ID NO: 396179 - DNA, 120 bp, Artificial Sequence
  ENSG00000145757_15 (sequence is synthesized)
gctgtgtatggattttactctaagagcaaaggaaagccactgaagagtataaagcaggaaagtgtgaattgatttctttttgaaagaatgctcccggctctgtggagaatggattatagc

SEQ ID NO: 396180 - DNA, 120 bp, Artificial Sequence
  ENSG00000145757_16 (sequence is synthesized)
aaaacaacaatggatgcccagaaatcagaaagctaggggtccatgaaaaaggtggtggcttgccgcagggggttgatgctgtaggggataaaaagtaataacaacagtagcagtagtagc

SEQ ID NO: 396181 - DNA, 120 bp, Artificial Sequence
  ENSG00000145757_17 (sequence is synthesized)
tacaattatattgtgttaactatgtgccaggcactattcaaaggctacatttatttattaactcctttaatcctccatgttactaaaaaggtattattttaattttatagtacagagaag

SEQ ID NO: 396182 - DNA, 120 bp, Artificial Sequence
  ENSG00000145757_18 (sequence is synthesized)
actgaataggagactttacatctctcatggctgggcagcagctgtgtctggcttccttacttcaagatctgccttgatcacagatcacttaacagtggttaagtttcttattttcaagtt

SEQ ID NO: 396183 - DNA, 120 bp, Artificial Sequence
  ENSG00000145757_19 (sequence is synthesized)
ctgtgaggagaaaggccaagaaatgaatggtatttttgcagaatggaaaatcaagagctatatatattttacacatattgagtttaaggtatctcagagacatccaagtagagatgtcaa

SEQ ID NO: 396184 - DNA, 120 bp, Artificial Sequence
  ENSG00000145757_20 (sequence is synthesized)
gtcaacaaccagatatatgagactaaagtcgagaatttctagagagaaaaactggggagtttccaggtcatagaattctatggactcacttggagaggaagtgtagataaggaagaaggt

SEQ ID NO: 396185 - DNA, 120 bp, Artificial Sequence
  ENSG00000145757_21 (sequence is synthesized)
ctaagacaattcctgaaacacttcaacatttagaggtcaggtggaagagaggttgtagagaggcaagatcagtagagtgtccaatctattgctaatcaaatgaaattcattcacagcttt

SEQ ID NO: 396186 - DNA, 120 bp, Artificial Sequence
  ENSG00000145777_0 (sequence is synthesized)
atcagggagactccaacttaaggcaacagcatgggtgaataagggcttcctgtggactggcaatgagaggcaaaacctggtgcttgagcactggcccctaaggcaggccttacagatctc

SEQ ID NO: 396187 - DNA, 120 bp, Artificial Sequence
  ENSG00000145777_1 (sequence is synthesized)
ttacactcgtggtgggaagagtttagtgtgaaactggggtggaattgggtgtccacgtatgttcccttttgccttactatatgttctgtcagtttctttcaggaaaatcttcatcttaca

SEQ ID NO: 396188 - DNA, 120 bp, Artificial Sequence
  ENSG00000145777_2 (sequence is synthesized)
acttgtagggctggtgttaacttacgacttcactaactgtgactttgagaagattaaagcagcctatctcagtactatttctaaagacctgattacatatatgagtgggaccaaaagtac

SEQ ID NO: 396189 - DNA, 120 bp, Artificial Sequence
  ENSG00000145777_3 (sequence is synthesized)
cgagttcaacaacaccgtctcttgtagcaatcggccacattgccttactgaaatccagagcctaaccttcaatcccaccgccggctgcgcgtcgctcgccaaagaaatgttcgccatgaa

SEQ ID NO: 396190 - DNA, 120 bp, Artificial Sequence
  ENSG00000145777_4 (sequence is synthesized)
aactaaggctgccttagctatctggtgcccaggctattcggaaactcagataaatgctactcaggcaatgaagaagaggagaaaaaggaaagtcacaaccaataaatgtctggaacaagt

SEQ ID NO: 396191 - DNA, 120 bp, Artificial Sequence
  ENSG00000145777_5 (sequence is synthesized)
gtcacaattacaaggattgtggcgtcgcttcaatcgacctttactgaaacaacagtaaaccatctttattatggtcatatttcacagcaccaaaataaatcatctttattaagtagatga

SEQ ID NO: 396192 - DNA, 120 bp, Artificial Sequence
  ENSG00000145777_6 (sequence is synthesized)
aacattaactctaactgtgacaaagaagaccacaaatagttatcttttaattacagaagagtttcttaacttacttttgtaagtttttattgtgtaagtttataatgcaggggaagtact

SEQ ID NO: 396193 - DNA, 120 bp, Artificial Sequence
  ENSG00000145777_7 (sequence is synthesized)
actcctcaaatgttgagggaagcttccataacattgatgactggcttcatggcagtaattctcggctgtagttgcataagcattgctcaagaggaaaatccaaaagtgcagcaggagaac

SEQ ID NO: 396194 - DNA, 120 bp, Artificial Sequence
  ENSG00000145777_8 (sequence is synthesized)
tcttttccctgaaaaaggaaaaatattgaactcaatgatagcacctaaacttacatttaaaagacagacattccttctacatgtaatgacacttcttgtgttaaactaaaaatttacaag

SEQ ID NO: 396195 - DNA, 120 bp, Artificial Sequence
  ENSG00000145777_9 (sequence is synthesized)
agaagaaagtgaaagcaaatggggtttcacaaatagttgtaaatatagtgaagcaatttgaaataattttcaagcaaagtattgtgaaagtattctaagccaagttttaaatattatcta

SEQ ID NO: 396196 - DNA, 120 bp, Artificial Sequence
  ENSG00000145777_10 (sequence is synthesized)
aatttattttgtgaacacttttgaaaatgtacatgttcctttgtaattgacactatatatttcttaataaaataattctcaaatttgtttcttatgaatcatctctcaaatctagttaga

SEQ ID NO: 396197 - DNA, 120 bp, Artificial Sequence
  ENSG00000145777_11 (sequence is synthesized)
caatttgcacacatacttttctaagggacattatcttccttcaggtttttacctccactcatccttagagcccactgactgctcccctttatacctgttggccctgcctataggagagaa

SEQ ID NO: 396198 - DNA, 120 bp, Artificial Sequence
  ENSG00000145777_12 (sequence is synthesized)
tatttggagataggcagcttcaggatgcattgcaatcatccttttcttaaattatgtcactagtcttttattttttcccctcttgaactttcctcacacctggaagaaacaaagtaggaa

SEQ ID NO: 396199 - DNA, 120 bp, Artificial Sequence
  ENSG00000145777_13 (sequence is synthesized)
aaagtgaacaggggatgtcaaatcgattcttgaattcccgctgcaagctagagccgcaggcaccctctcactcaatttccactcagaaccctataaacaccagtgggaagggcaacccac

SEQ ID NO: 396200 - DNA, 120 bp, Artificial Sequence
  ENSG00000145777_14 (sequence is synthesized)
tgcacgtgggaatgcactgatttttcctaggagtagacatgttcctctaattactccctgagggttagttggggctaaaccatgacagaagtggggaagttcaatgtccttaaatccatc

SEQ ID NO: 396201 - DNA, 120 bp, Artificial Sequence
  ENSG00000145777_15 (sequence is synthesized)
ttacttgccaacaggtaagaggaagcttacattacatgtccagtccacatttaaagagcacttactgtggaacaagccttcagccaaacaatggggatagaaaagtaggtaagactcagc

SEQ ID NO: 396202 - DNA, 120 bp, Artificial Sequence
  ENSG00000145777_16 (sequence is synthesized)
ctttgtccagagaagctcagggtatagctgaataggcagtttcttttgtcctgaggaaaatcaggacatgcctgctttctaaaaatcttcctctgaagacctgacccaagctcttaaatg

SEQ ID NO: 396203 - DNA, 120 bp, Artificial Sequence
  ENSG00000145777_17 (sequence is synthesized)
ctattgtaagagaaatttctttgtctattaactccattttagtagggattcactgactagattttactgaactatgaaaataaatacacataatttttcacaaaattttgggcccaattc

SEQ ID NO: 396204 - DNA, 120 bp, Artificial Sequence
  ENSG00000145777_18 (sequence is synthesized)
ccctaaaagaattgaggattagggagaaaggagacaactcaaagtcatcccattaagtgcagtttctttgaatcttctgctttatctttaaaaatttgtataatttatatattttattct

SEQ ID NO: 396205 - DNA, 120 bp, Artificial Sequence
  ENSG00000145777_19 (sequence is synthesized)
atgtgttccatagatatcttaatgtaaaattagtcatttaaattacactgtcaattaaaagtaatgggcaagagattgcatcatactaatttagtaagaacgttcccaaatgttgtaaca

SEQ ID NO: 396206 - DNA, 120 bp, Artificial Sequence
  ENSG00000145777_20 (sequence is synthesized)
atgtggatcatacatctctggttttttaaatgtattgaggctttcttggtggactagtatagtatacggtcagttatgtcaatgtttcatggtcaataaaaaggaagttgcaaattgtga

SEQ ID NO: 396207 - DNA, 120 bp, Artificial Sequence
  ENSG00000145777_21 (sequence is synthesized)
gaagttggtgatgggggaagagtggacttttttttcaaagaatgctgtggtgactcgagtacaacacatgaagaattccagaaaagagccatttttgaagtcagcggtgaatcagaggtt

SEQ ID NO: 396208 - DNA, 120 bp, Artificial Sequence
  ENSG00000145777_22 (sequence is synthesized)
ttctgaccctctcgagtgccttctatgaagaagagttcaactctggctccagtttgtcccctactcttttcccgaatccctcgacattccttgctcttttccccaggcaccgcatggcct

SEQ ID NO: 396209 - DNA, 120 bp, Artificial Sequence
  ENSG00000145777_23 (sequence is synthesized)
gtgacatttgctgggactcacacacggcgtccaacctcctttctccgagcgatgactcctaggaacttcccaaggaccagagcgatgcaggctccgacacgcgagggcggggggcggggg

SEQ ID NO: 396210 - DNA, 120 bp, Artificial Sequence
  ENSG00000145777_24 (sequence is synthesized)
tgaggggtgcgatggacgggggagcggaagggaaagagagagagaggggacctgggtgtagagagggcccagggccgcatgagccaagccagggaggagcagggggttcatctcagcaac

SEQ ID NO: 396211 - DNA, 120 bp, Artificial Sequence
  ENSG00000145777_25 (sequence is synthesized)
ctgatcggtgtcggcctttccctcccttcaaccctccattggtgttgctggaactgggaagactgctagacagacatcctctagggcactctccctgactcactttgctgtgcttttaag

SEQ ID NO: 396212 - DNA, 120 bp, Artificial Sequence
  ENSG00000145777_26 (sequence is synthesized)
cgctcttttctggatcaacaagagtttgctagtaaaaatctgagcccgccatctcgatgcttctcctgtctctaaaactggtgcccgggctgaggccccaggtgacagacgttttccagt

SEQ ID NO: 396213 - DNA, 120 bp, Artificial Sequence
  ENSG00000145777_27 (sequence is synthesized)
ctacgctgcgcggggctaagcctctgcgaggcagagcgcactaaagcgtgcgccgcctccgggagagctgagctcaggacagcatcgtctccgtgcggtcgccgctgggcacccagcagc

SEQ ID NO: 396214 - DNA, 120 bp, Artificial Sequence
  ENSG00000145777_28 (sequence is synthesized)
gcggtctggctccgcttcttgtgtcgctggccttaagagtgggactgtgaaggtggctgggcgctggaatttgtggttttaaaagttcttgacacctgctagaaagtgctagaggactct

SEQ ID NO: 396215 - DNA, 120 bp, Artificial Sequence
  ENSG00000145777_29 (sequence is synthesized)
tcagcccctaaggtgcccctagccaccaagagtaggcgtttttcctgaaattgatatgggaaatttgaaaagtagggtttttgagaacaagccacatcagatctttccccacttatttca

SEQ ID NO: 396216 - DNA, 120 bp, Artificial Sequence
  ENSG00000145777_30 (sequence is synthesized)
acctcttatcgttcctgcccctaaggttctggtcacggttgcacatttaatgctttcacatggaagtgctgtcgaagactgagactgcaccccaccctccaaagcatcccataagcaagc

SEQ ID NO: 396217 - DNA, 120 bp, Artificial Sequence
  ENSG00000145777_31 (sequence is synthesized)
caaatccttacagtggctgctggtttcagaaggtgtttctcccaaatagaaaggattggtcacggaaatgccctgtaggagaaagacactggtatccgtttcttaaaggacattcacact

SEQ ID NO: 396218 - DNA, 120 bp, Artificial Sequence
  ENSG00000145777_32 (sequence is synthesized)
accctcgccacgcccctgctcccccgcggttggttcttccttgctctactcaaccctgacctcttctctctgactctcgacttgtgttccccgctcctccctgaccttcctcccctcccc

SEQ ID NO: 396219 - DNA, 120 bp, Artificial Sequence
  ENSG00000145779_0 (sequence is synthesized)
agactccttaaatccatgtcttttgtacgttcttttcactaaatttgccatagtgtttctattggtttttgcctatataaaatcggaaacgaagaaaaagaaacgaactggaaaataaat

SEQ ID NO: 396220 - DNA, 120 bp, Artificial Sequence
  ENSG00000145779_1 (sequence is synthesized)
ttgtcaaaagagtatatttttttctcataatttccaagcggatctttcagatatgttatttgaggactttttgcctcagactggcgataaaacaagtgttctacaaaatacctccgtaag

SEQ ID NO: 396221 - DNA, 120 bp, Artificial Sequence
  ENSG00000145779_2 (sequence is synthesized)
acaggcctatcagtggcagctcttgtccccgctttgcagaagggaaaaccaaggctccacagagctaaggggacttcctctcagccaatttgtaggggcctgtgggccagacccgggggc

SEQ ID NO: 396222 - DNA, 120 bp, Artificial Sequence
  ENSG00000145779_3 (sequence is synthesized)
agaattgagatctgttgtgaaggctgtccggcttctttattctatcagcatttcaaatcctgaaaacctcccctttggcattttgaaggaattcatccccagtttttgctggtagccggg

SEQ ID NO: 396223 - DNA, 120 bp, Artificial Sequence
  ENSG00000145779_4 (sequence is synthesized)
agggaaccgtgctctccccctgaggaaggccctttggagtaactgcagcaatgagtgcccgggctgtgcttggagtaccagtgctcgcccggggctatactgaatgagtaagcagccccg

SEQ ID NO: 396224 - DNA, 120 bp, Artificial Sequence
  ENSG00000145779_5 (sequence is synthesized)
tctgcttttgctgtgcaaagagcgaacttgcggctcgtccgagtacatgtgagcggtaatcgcccctgcagctggttatcctgacattatgcactccgaagcagaagaatccaaggaagt

SEQ ID NO: 396225 - DNA, 120 bp, Artificial Sequence
  ENSG00000145779_6 (sequence is synthesized)
ggccacagatgtctttaattccaaaaacctggccgttcaggcacaaaagaagatcttgggtaaaatggtgtccaaatccatcgccaccaccttaatagacgacacaagtagtgaggtgct

SEQ ID NO: 396226 - DNA, 120 bp, Artificial Sequence
  ENSG00000145779_7 (sequence is synthesized)
ggatgagctctacagagtgaccagggagtacacccaaaacaagaaggaggcagagaagatcatcaagaacctcatcaagacagtcatcaagctggccattctttataggaataatcagtt

SEQ ID NO: 396227 - DNA, 120 bp, Artificial Sequence
  ENSG00000145779_8 (sequence is synthesized)
taatcaagatgagctagcattgatggagaaatttaagaagaaagttcatcagcttgctatgaccgtggtcagtttccatcaggtggattatacctttgaccggaatgtgttatccaggct

SEQ ID NO: 396228 - DNA, 120 bp, Artificial Sequence
  ENSG00000145779_9 (sequence is synthesized)
gttaaatgaatgcagagagatgctgcaccaaatcattcagcgccacctcactgccaagtcacatggacgggttaataatgtgtttgatcatttttcagattgtgaatttttggctgcctt

SEQ ID NO: 396229 - DNA, 120 bp, Artificial Sequence
  ENSG00000145779_10 (sequence is synthesized)
gtgactgatcatgatttatttgaagatggagcactgctgatttatgaaggaaaaaagaagaattttctaaagattacacatatttcagaaagactttacccaattcagttgtcagacata

SEQ ID NO: 396230 - DNA, 120 bp, Artificial Sequence
  ENSG00000145779_11 (sequence is synthesized)
atgatttatttgaaggcttgttttatttgaagaaaagcatattgccaaaaattctggttaaaagcttcctaacgggtaacagaccatgggagagatatgtggttgggtaatgcaaatgta

SEQ ID NO: 396231 - DNA, 120 bp, Artificial Sequence
  ENSG00000145779_12 (sequence is synthesized)
gttatacaaagaaaaatacagatgtctccagacctgaggactttttaatagggcagttgttgtgttggtggcacattggatatttctaacatgtacaaagctatgtattttgatttactt

SEQ ID NO: 396232 - DNA, 120 bp, Artificial Sequence
  ENSG00000145779_13 (sequence is synthesized)
tcatttcttgctatgtatatgtacttttcttaaaatgccaagaactttctcttgctatcattgctccttttgaaacaattcaattttcatgtctacagctgactgttttgttaagattga

SEQ ID NO: 396233 - DNA, 120 bp, Artificial Sequence
  ENSG00000145779_14 (sequence is synthesized)
gtcatcgacattcaggatttaagtctgaggtagtcaaccctcaggaaaaaaaaaatggcttatctgaaatcagtactgtggaaatgaactatattagctattatgaataatgtccagtat

SEQ ID NO: 396234 - DNA, 120 bp, Artificial Sequence
  ENSG00000145779_15 (sequence is synthesized)
aagaatatgcttctggaattgagttctccttttaagtaccaatgatacttaaatttctcagaaatgtaatggtgtgtcattgccttgaaatgcttgcttagggcttcttttatgttatct

SEQ ID NO: 396235 - DNA, 120 bp, Artificial Sequence
  ENSG00000145779_16 (sequence is synthesized)
taaaaagtgctggtgaattttccattttttacatccatttcacatgtaagagacaaaaaagtctagattggtcttgatattgagataataaaaagtaagtagcattaagaaaggtaacaa

SEQ ID NO: 396236 - DNA, 120 bp, Artificial Sequence
  ENSG00000145779_17 (sequence is synthesized)
tcttcattctacagatgaactcattgaaacaatttaggggaatgaggggcaaaaggggagaaatactgctaaagaacatgagcataaaaatgcgtgcgtttcagtgtttaagaaggcttg

SEQ ID NO: 396237 - DNA, 120 bp, Artificial Sequence
  ENSG00000145779_18 (sequence is synthesized)
ataaagaatgtcacttttttatttaactgataagatttttgttattttttactttgataagtaaaccaaagaatatttgtatttcaagcagtttgtgtggtgtttctatataattttctg

SEQ ID NO: 396238 - DNA, 120 bp, Artificial Sequence
  ENSG00000145779_19 (sequence is synthesized)
tgtataaataataaagtaggcatttgtttattttgtaaaaaagaaatgaaaatctgctggccagctatgtcctctaggaaatgacagacccaaccaccagcaataaacatttccattgtc

SEQ ID NO: 396239 - DNA, 65 bp, Artificial Sequence
  ENSG00000145779_20 (sequence is synthesized)
attgtcactgtgtctatgatttttttttttttttttttgagtctcgctctgttgtttaggctaga

SEQ ID NO: 396240 - DNA, 120 bp, Artificial Sequence
  ENSG00000145779_21 (sequence is synthesized)
gattacaggtgtgagccactgtgcctatgatttagtgtactctcttgccttaaatttgcctgcctcccagaatattgacattaaaataatagtttaccaggaaaggttccacaactaaaa

SEQ ID NO: 396241 - DNA, 120 bp, Artificial Sequence
  ENSG00000145779_22 (sequence is synthesized)
aaaaattccagaagttgagatctgctctaacccatttcagcctagagagggtggtcagtttctctgacaccctcatttgcttggctaagacaagcagcaaaggtgtagagtttcttcctg

SEQ ID NO: 396242 - DNA, 120 bp, Artificial Sequence
  ENSG00000145779_23 (sequence is synthesized)
tttgatattaaatcctgacactaagatttgaactgaaagtatcattctcacttcctagagccagtaggtgatcagtatatgctgtaacaataacacagtgactacagaaatgacccttct

SEQ ID NO: 396243 - DNA, 120 bp, Artificial Sequence
  ENSG00000145779_24 (sequence is synthesized)
agcttcataacttgctaagtggcttataaatggaattcagcagccttccttgaccagctgttttcctcacatgtgaaggctgagaatgtgatggggggtgtgagctactgactggatgtg

SEQ ID NO: 396244 - DNA, 120 bp, Artificial Sequence
  ENSG00000145779_25 (sequence is synthesized)
ttctgttctccagatctcaaacagcagaggtatgggaaacgaaagccctgggcagtccatggatgcttcttgctcatctgtagctatagacaggaccaaccagagagagaaaacgtacgg

SEQ ID NO: 396245 - DNA, 120 bp, Artificial Sequence
  ENSG00000145779_26 (sequence is synthesized)
agggagaaatctggatctctctggacacactggatcatagggttgtgccagcaggctagcaatcaaatgtgcatgggattgggggagcaatgcttcatctcccacagagggaaggcagtg

SEQ ID NO: 396246 - DNA, 120 bp, Artificial Sequence
  ENSG00000145779_27 (sequence is synthesized)
aggagtagaccgaaggagggaatcctgtttgctaccatttctcagcattttctggaggggacccatctccttaccagtgctgtgcctgaaaagcatgtcttggatcaggtccaaagtcgt

SEQ ID NO: 396247 - DNA, 120 bp, Artificial Sequence
  ENSG00000145779_28 (sequence is synthesized)
gattagcaagttcatttctaatacaataggactccccttgagcatttagggtggcaaggagcgtgggagctgggaagaatccccacgtgcttagggtagataaatctgagccgagttaat

SEQ ID NO: 396248 - DNA, 120 bp, Artificial Sequence
  ENSG00000145779_29 (sequence is synthesized)
actaatttggggatcctatgaacctttttataaaatagtatctgttcacgttttgaaaaaaattgtgttgtaattgattttattttgtgctggtggcttctctgcaaaaattatgagtgg

SEQ ID NO: 396249 - DNA, 120 bp, Artificial Sequence
  ENSG00000145779_30 (sequence is synthesized)
atatgataagtggatgataatactaatggacaactaacgcagagtagtttgtattatgtgtcgggcacattaactcatttaattctgccacaatcttcaccatcttatagataaggaaac

SEQ ID NO: 396250 - DNA, 120 bp, Artificial Sequence
  ENSG00000145779_31 (sequence is synthesized)
taggggaatagaagttaaggaatttcctgaggtcacatgtgctcgaggtgtcccagccggaatatgtataaaatcttattttcacttaaagatgatatggctaaaggcagtgctaggaac

SEQ ID NO: 396251 - DNA, 120 bp, Artificial Sequence
  ENSG00000145779_32 (sequence is synthesized)
agcgtgggcagtatgctgctgaaatggttcctcatatagtgacattttaggcagtacctaagtcagcacaggtctggcctgttctctaaagatctgtgtagatgttgtacaaagacattt

SEQ ID NO: 396252 - DNA, 120 bp, Artificial Sequence
  ENSG00000145779_33 (sequence is synthesized)
ttcaaagttttcaacatgactcctactttgggggcatcttgtggctcagttttctgtctcgtggaacttcacttctaggtgctcacaatgacttttaacgttgacttctgaggtgcagtg

SEQ ID NO: 396253 - DNA, 120 bp, Artificial Sequence
  ENSG00000145779_34 (sequence is synthesized)
agctgctcccccacagctgtccctagcagtggtgggttcagagcatgacaaggcactcaatgtgcattcaccaagagaagcaaggaagcagcagttcagtactgtgctccctagagtagg

SEQ ID NO: 396254 - DNA, 120 bp, Artificial Sequence
  ENSG00000145779_35 (sequence is synthesized)
cacggcatcagtttcaaacttcaacattattttccagatttggaggctcaaaatatttgagcaagttaagttaagaaatagcctttttctgattattaggcctttcatatacaactcaaa

SEQ ID NO: 396255 - DNA, 120 bp, Artificial Sequence
  ENSG00000145779_36 (sequence is synthesized)
tcatatacaactcaaaattagtttaagagtaaagcatggggtgggtgcggtggcttatgcttgtaagcccagaactttgggaggcggaggtgggaggatcacttgaggtgaggagttcga

SEQ ID NO: 396256 - DNA, 80 bp, Artificial Sequence
  ENSG00000145779_37 (sequence is synthesized)
gggcaacaagaacgaattaagaactttgatcgtacagaaatattgcgttttaaactcttatataatagtatgccattcac

SEQ ID NO: 396257 - DNA, 120 bp, Artificial Sequence
  ENSG00000145779_38 (sequence is synthesized)
gaactttgatcgtacagaaatattgcgttttaaactcttatataatagtatgccattcacaattatctggaaagttctttttctcccaccatgtgaatacacacacacacacacacacac

SEQ ID NO: 396258 - DNA, 120 bp, Artificial Sequence
  ENSG00000145779_39 (sequence is synthesized)
aaggcttaaaatagtactttttgtggtctgtaccggtcagttggatttttactaagaattttaatttatccttgagatacttgatgagtgtatataagcagttgcaatttagcatacaaa

SEQ ID NO: 396259 - DNA, 120 bp, Artificial Sequence
  ENSG00000145779_40 (sequence is synthesized)
acctgacaaatggtaaataaaagaatatgtttatccaaatgatgaaatatttgtagtaaaaagtgctattcaattgccaggaaattaaaatactccagtaaaatgaattaaattagcatg

SEQ ID NO: 396260 - DNA, 120 bp, Artificial Sequence
  ENSG00000145779_41 (sequence is synthesized)
ttaataagagtgataatatttaaaagttttagtcaatcttgcatttccatacttgcattatctaaactagttgaacttttcagtgttttacttgatatattgcattcttgagcattaggc

SEQ ID NO: 396261 - DNA, 120 bp, Artificial Sequence
  ENSG00000145779_42 (sequence is synthesized)
ttctaggtgatttgttaaactcatagcaggttttagtacacagtgctgtttatgacagaaaaaattttatcctacctctgaaataattgtactttctgtgattcagataaaaactttata

SEQ ID NO: 396262 - DNA, 120 bp, Artificial Sequence
  ENSG00000145779_43 (sequence is synthesized)
gaaactccctaatgaaaatattgaagcattaaccagaaaatgagtcagctttttgtttccaaaatgatgcaacaggaaaacctttaactacttataatcccgtatagtcaccatcaccac

SEQ ID NO: 396263 - DNA, 120 bp, Artificial Sequence
  ENSG00000145779_44 (sequence is synthesized)
gaagtattgaaaatctgttttctcttttactaagtgtctgcacggtcacttatgtatacccaaagccagaaagatatttttatctcagggaaattccagaaatggaaacatttttgtgta

SEQ ID NO: 396264 - DNA, 120 bp, Artificial Sequence
  ENSG00000145779_45 (sequence is synthesized)
atattgattcatttctgtctcaccaaagatgtgttttccacgtagcaaagaacatcagccccacgttatagggaacaagcgagtcccaaatcgtaccatctgctgagcactgagaaagga

SEQ ID NO: 396265 - DNA, 120 bp, Artificial Sequence
  ENSG00000145779_46 (sequence is synthesized)
tatggacaagtcagtcagcattcacaattaagagaaaaacatctgtgctttggaaaatgttcttcaaggatagagaattgtgccctatgtccaccaaatttgcatgagatctttataaga

SEQ ID NO: 396266 - DNA, 120 bp, Artificial Sequence
  ENSG00000145779_47 (sequence is synthesized)
ttagacagccagtggataaggccccttatctttcttcatggatggctgaggaaattctccgccttccctgacatcagctgcataactgtatttctgcctcgtggaaataaagtagatgat

SEQ ID NO: 396267 - DNA, 120 bp, Artificial Sequence
  ENSG00000145779_48 (sequence is synthesized)
caggcacttgcggtttgttcttaatacaagaaagacaatttgatttttaaaagttttgatttgtagaataatgtaagacaatatgtttctttctactttggtttttccattcaaaagctt

SEQ ID NO: 396268 - DNA, 75 bp, Artificial Sequence
  ENSG00000145779_49 (sequence is synthesized)
atatgtttctttctactttggtttttccattcaaaagcttacagatgaattcattcgtttaaaactgccaactga

SEQ ID NO: 396269 - DNA, 75 bp, Artificial Sequence
  ENSG00000145779_50 (sequence is synthesized)
gaaactctgtctcgaagtaaataaataaatttttaaaaaccaacctgatgtgaagttgaaacacaagacgcggaa

SEQ ID NO: 396270 - DNA, 120 bp, Artificial Sequence
  ENSG00000145779_51 (sequence is synthesized)
aaaaccaacctgatgtgaagttgaaacacaagacgcggaaataaaaactcagagtataaatatctatattgttaccattatctgggataattgatgatttataagaagctgaggtttcgt

SEQ ID NO: 396271 - DNA, 120 bp, Artificial Sequence
  ENSG00000145779_52 (sequence is synthesized)
cttcctagaaatggacttttattaggccagcaagaatgaccacttagccatttaaatgatttgtcagcatcttttgctgctctcttctaagaccattggttttcactaaaggataaatac

SEQ ID NO: 396272 - DNA, 120 bp, Artificial Sequence
  ENSG00000145779_53 (sequence is synthesized)
ctgctaagcaaattataaaatactataagacatttaatctcctggaagaggacttgctgataattggatcaaagttccagcattattgctcttttcgaatcatatggacttagtgttctc

SEQ ID NO: 396273 - DNA, 120 bp, Artificial Sequence
  ENSG00000145779_54 (sequence is synthesized)
atgaccgaggagtcacatttttagcttgctaaaatattcactggagaacatggtgaaatccacgagtggaaacgttccatggtattttcaaacgccacgtgtcaggaatttggcatgcct

SEQ ID NO: 396274 - DNA, 120 bp, Artificial Sequence
  ENSG00000145779_55 (sequence is synthesized)
tcctctgggagaggcactggagtgtggccagatggaacccagcagggtacagagggcatttgtgggagcagttaggaaaccaggacgtccagcttctgcctgccagggagctcgctcatg

SEQ ID NO: 396275 - DNA, 120 bp, Artificial Sequence
  ENSG00000145779_56 (sequence is synthesized)
ttgtctctgaaatttgcataagagcaattacctcatattctaattttaaagatacaatttttaaagacatggaaggctctgagacctcctgaaggctattcctatgtgaggtattgttta

SEQ ID NO: 396276 - DNA, 120 bp, Artificial Sequence
  ENSG00000145779_57 (sequence is synthesized)
cgggtggcctttcactatttccaaatcagcgatgaaaagaagactgagtctaaaataaatgaagcaacagacttcagcagcctgagagaattttgttcaattccagtctccttaaaaaaa

SEQ ID NO: 396277 - DNA, 120 bp, Artificial Sequence
  ENSG00000145779_58 (sequence is synthesized)
aatcggtttttgctttcaatttaggaaaattgttttgggttgcattgttgaaagtaatgatttctagcagctacttatgtataatctcttaaccaattaaattctgaatctcttaaatca

SEQ ID NO: 396278 - DNA, 120 bp, Artificial Sequence
  ENSG00000145779_59 (sequence is synthesized)
gattttgaatatactcctgtttgcttgtcacaggtaatcttgcatttctatgtagttgtagtttacagggagcaagtgcaggcagcaaccagtccatccctgttgtgaatgtggagacct

SEQ ID NO: 396279 - DNA, 120 bp, Artificial Sequence
  ENSG00000145779_60 (sequence is synthesized)
ctctggactcacaattaaaggctacctaatgcattccactacaagtgacgaaacctagctcccagaataacaagcaagacaactttcaaagtgactgtagttgaccagtgccttctgtgc

SEQ ID NO: 396280 - DNA, 120 bp, Artificial Sequence
  ENSG00000145779_61 (sequence is synthesized)
atttatgtggtaagcttatggtagatttttcaaaagaatagtataaattattttgaattattcttgagaaggactgagtctccccgagggtgatgcaggttccatagtgtacacgtcaac

SEQ ID NO: 396281 - DNA, 120 bp, Artificial Sequence
  ENSG00000145779_62 (sequence is synthesized)
gctcgtccgagtacatgtgagcggtaatcgcccctgcagctggttatcctgacattatgcactccgaagcagaagaatccaaggaaggcctaggcttaaacactggcatatatggagaga

SEQ ID NO: 396282 - DNA, 120 bp, Artificial Sequence
  ENSG00000145779_63 (sequence is synthesized)
gacctcccggctcctccccggcctgcccgccacacccttggtccctcctgcaagttccgcccctggcctctgcctccttttctcccgccggctctaacccgcgcttggctaaggtccgcg

SEQ ID NO: 396283 - DNA, 120 bp, Artificial Sequence
  ENSG00000145779_64 (sequence is synthesized)
caaacagcccagctcgcgcttcagcgtcccggcgccgtcgcgccactcctccgagatcttcctgtgtcacccaggctgaagtgcagtggtgagatcatagctcactgcagcctctaactc

SEQ ID NO: 396284 - DNA, 120 bp, Artificial Sequence
  ENSG00000145780_0 (sequence is synthesized)
acaccatccgtcgcagcagtcgctgcagccgctgcagtccgagccgactaagggcgggaggcagctcgggtggcggggcgtggcgaacagcgcggccggattcattcctttggggcgcgg

SEQ ID NO: 396285 - DNA, 120 bp, Artificial Sequence
  ENSG00000145780_1 (sequence is synthesized)
agcatggaggagctgtgcggccgcaggcggagcagggcggcccgggcggcggtggggacaacggtttccctttgaaggggacggacaaagcccgagtgaccagcggcggcggggaggact

SEQ ID NO: 396286 - DNA, 120 bp, Artificial Sequence
  ENSG00000145780_2 (sequence is synthesized)
agtccccgggcagtttggtgccctggttgtcagatgttggaaagcagtaggacggaacatactcttcgtggttgtgtatccgttctggggtgcagcaattaacattggactttggttcct

SEQ ID NO: 396287 - DNA, 120 bp, Artificial Sequence
  ENSG00000145780_3 (sequence is synthesized)
gtgactcttgcctgtgtcgatagagttaaactggagctctgctttgaaagataaataaagcacagcctctcaactggacataaatggatctaaagacagcagtatttaacgcagctcggg

SEQ ID NO: 396288 - DNA, 120 bp, Artificial Sequence
  ENSG00000145780_4 (sequence is synthesized)
atggcaaactccggcttctcaccaaattgttggcaagcaaatccaaagaggaggtttcctccttgatctctgaaaaaacaaatggggccacgccactcttgatggccgccaggtatgggc

SEQ ID NO: 396289 - DNA, 120 bp, Artificial Sequence
  ENSG00000145780_5 (sequence is synthesized)
accttgacatggtggaattcctcctagagcaatgcagtgcctccatagaagttgggggctccgtcaattttgatggcgaaaccattgagggggctccccctttatgggccgcttctgcag

SEQ ID NO: 396290 - DNA, 120 bp, Artificial Sequence
  ENSG00000145780_6 (sequence is synthesized)
caggacatctgaaggtggtccagtccttgttaaatcatggagcatctgtcaacaacacgactttaaccaattcaactcctcttcgagctgcgtgtttcgatggccatttggaaatagtga

SEQ ID NO: 396291 - DNA, 120 bp, Artificial Sequence
  ENSG00000145780_7 (sequence is synthesized)
agtaccttgtagaacacaaagctgatttggaagtgtcaaaccgacatgggcatacgtgcttgatgatttcatgttacaaaggacataaagagattgctcagtatttacttgaaaaggggg

SEQ ID NO: 396292 - DNA, 120 bp, Artificial Sequence
  ENSG00000145780_8 (sequence is synthesized)
cagatgttaatagaaaaagtgtcaaaggtaatactgcattgcatgattgtgcagaatctggaagtttggacatcatgaagatgcttcttatgtattgtgccaagatggaaaaggatggtt

SEQ ID NO: 396293 - DNA, 120 bp, Artificial Sequence
  ENSG00000145780_9 (sequence is synthesized)
atggaatgactccccttctctcagcaagtgtgactggtcacacaaatattgtggattttctgacacaccatgcacagaccagcaagacagaacgtattaatgctctagagcttctgggag

SEQ ID NO: 396294 - DNA, 120 bp, Artificial Sequence
  ENSG00000145780_10 (sequence is synthesized)
ctacatttgtagacaaaaaaagagatctgcttggggctttgaaatactggaaaaaggcaatgaacatgaggtacagtgataggactaatattattagtaaaccagtgccacagacactaa

SEQ ID NO: 396295 - DNA, 120 bp, Artificial Sequence
  ENSG00000145780_11 (sequence is synthesized)
taatggcttatgattatgccaaggaagtgaacagtgcagaagagctagaaggtcttattgctgatcctgatgagatgagaatgcaggcactattaatcagagaacgtattcttggtcctt

SEQ ID NO: 396296 - DNA, 120 bp, Artificial Sequence
  ENSG00000145780_12 (sequence is synthesized)
ctcatcctgatacctcttactatattagatatagaggcgctgtctatgcagactctggaaatttcaaacgatgcatcaacctatggaagtatgctttggatatgcagcagagcaatttgg

SEQ ID NO: 396297 - DNA, 120 bp, Artificial Sequence
  ENSG00000145780_13 (sequence is synthesized)
atcctttaagcccaatgaccgccagcagcttattatcttttgcagaactattctcctttatgctacaggatagggctaaaggcctgctgggtactactgttacatttgatgatcttatgg

SEQ ID NO: 396298 - DNA, 120 bp, Artificial Sequence
  ENSG00000145780_14 (sequence is synthesized)
gcatactttgcaaaagcgtccttgaaatagagcgagctatcaaacaaactcagtgtccagctgacccattacagttaaataaggccctttctattattttgcacttaatttgcttgttag

SEQ ID NO: 396299 - DNA, 120 bp, Artificial Sequence
  ENSG00000145780_15 (sequence is synthesized)
agaaagttccttgtactctagaacaagaccatttcaaaaagcagactatatacaggtttcttaagctgcatccaaggggaaagaataacttcagccctcttcatctggctgtggacaaga

SEQ ID NO: 396300 - DNA, 120 bp, Artificial Sequence
  ENSG00000145780_16 (sequence is synthesized)
atactacatgtgtagggcggtaccctgtttgtaaatttccatctctacaagttactgcaatactgatagaatgtggtgctgatgtgaacgtcagagactcggatgacaacagtcccctgc

SEQ ID NO: 396301 - DNA, 120 bp, Artificial Sequence
  ENSG00000145780_17 (sequence is synthesized)
atatcgctgctcttaacaaccatccagacatcatgaatctccttattaaatcaggtgcacattttgatgccacaaacttgcacaaacaaactgctagtgacttgctggatgagaaggaaa

SEQ ID NO: 396302 - DNA, 120 bp, Artificial Sequence
  ENSG00000145780_18 (sequence is synthesized)
tagctaaaaatttaatccagcctataaatcataccacattgcagtgtcttgctgctcgtgtcatagtgaatcatagaatatattataaagggcatatcccagaaaagctagagacttttg

SEQ ID NO: 396303 - DNA, 120 bp, Artificial Sequence
  ENSG00000145780_19 (sequence is synthesized)
tttcccttcatagatgataacttgactgtattttagcactgttaaagcacgaattggtaacagttgtttcataaatgagcactgttgtgataacaccagcattcatttagcttgattgat

SEQ ID NO: 396304 - DNA, 120 bp, Artificial Sequence
  ENSG00000145780_20 (sequence is synthesized)
atcattgtgctctcattggctaaagcattataagcatcaaatttacaacattggtttcccaatatttaatataaatataccatataatatattgtttgtgaattattgagaaatgtaaca

SEQ ID NO: 396305 - DNA, 120 bp, Artificial Sequence
  ENSG00000145780_21 (sequence is synthesized)
ttcaaatttctaaaattgtctgccaaaggcttattcattctggttttgtttgctgttgggtgtttggggcagagttaaccatttctccatggtgtctttatactttactggtttgtgaat

SEQ ID NO: 396306 - DNA, 120 bp, Artificial Sequence
  ENSG00000145780_22 (sequence is synthesized)
tttatacaattgaaagtctttttttcttgcttctttcttctcttctcaagtttcccccctgtttctactttattgtttgtcctaaccatttctactacagttttttccttatggacccat

SEQ ID NO: 396307 - DNA, 120 bp, Artificial Sequence
  ENSG00000145780_23 (sequence is synthesized)
atcttctctatgcacaggcttaaacttgactgttgtatgttagcatattttctatgcagcagttggtcaacttcaactcaaaacactgttttcttatgtttgttacaaacttaatttttt

SEQ ID NO: 396308 - DNA, 120 bp, Artificial Sequence
  ENSG00000145780_24 (sequence is synthesized)
gaaagtactctgtagcatgacaatttttagagctgcaggttagctattatagctcaagcttttttgtttgtttttttcttcactttcttcacatctgaggtttctttctctaatccactg

SEQ ID NO: 396309 - DNA, 120 bp, Artificial Sequence
  ENSG00000145780_25 (sequence is synthesized)
aaattattgtgtgctaaatttgggaaacagatctattctaactcattaacccagttgaaatttaggtctgtcatcttaatatatcatgcagtaaaaggaagaatctttttaaagtgaccc

SEQ ID NO: 396310 - DNA, 120 bp, Artificial Sequence
  ENSG00000145780_26 (sequence is synthesized)
acctttcatgctgctccagcattgtcctgcttgtgctgatggtgtgattaggtgtagagaatttgcttaaatttaacttcaaagttcatcacacagcttaatgagtcacattgaaatact

SEQ ID NO: 396311 - DNA, 120 bp, Artificial Sequence
  ENSG00000145780_27 (sequence is synthesized)
cagtaattgaactgcaaatcacttttagttacaaaaagagctaaagcatgtcagtggcatgatgcttgccaagccagatctaggcatctaggataattaaggtattttagtatgcaattt

SEQ ID NO: 396312 - DNA, 120 bp, Artificial Sequence
  ENSG00000145780_28 (sequence is synthesized)
actgccataatatcaaaggtcagtaacagtgttctttctttcttcaagcttatgtatacctttaaagataacttgcatgaattactttgattactttggtctcaattatttgtcacccca

SEQ ID NO: 396313 - DNA, 120 bp, Artificial Sequence
  ENSG00000145780_29 (sequence is synthesized)
gttaaacatgaaaggttgcagtgcttcctgttcccttactggaagttagctttttcttttctctttcttcctttctttctctcactctttctttctctttctctttctctctctctctct

SEQ ID NO: 396314 - DNA, 120 bp, Artificial Sequence
  ENSG00000145780_30 (sequence is synthesized)
ctctcactcactcactcacagatttgctaatgccacagaaagggctcttttaacttaagataagtgaaaagtactaaaaaagattcaggtaattatcattcagcactttattgtaattca

SEQ ID NO: 396315 - DNA, 120 bp, Artificial Sequence
  ENSG00000145780_31 (sequence is synthesized)
gaataaaatttatgatggcatatttgccctgcaaatgtcttaatgaagttgttctcaataaaaagctccttattgatttgagaaaaactcagtttacctgtgagttcaatgagctggatc

SEQ ID NO: 396316 - DNA, 120 bp, Artificial Sequence
  ENSG00000145780_32 (sequence is synthesized)
actcacttggatttttgtgttgacattttattctgagggttgatgttacactatttaaggagtcatcaatgcaaacagtcacattaggtatgtcatcatctttagtcagtaaaaaccttg

SEQ ID NO: 396317 - DNA, 120 bp, Artificial Sequence
  ENSG00000145780_33 (sequence is synthesized)
taatgaggagtagtaaataaacaagagaacattagactttttggttaaataattgagatttaatttttaaaagatattcttactcatttgctaggttgtaaatttgatttcaccattaag

SEQ ID NO: 396318 - DNA, 120 bp, Artificial Sequence
  ENSG00000145780_34 (sequence is synthesized)
aaaaggtaaattggatataaatgaacgatctccaactttttgatgaagaggttttactatctctcactgtgggaaaatttgatgaaatatttgaactgtcacatatattaagaatacttt

SEQ ID NO: 396319 - DNA, 120 bp, Artificial Sequence
  ENSG00000145780_35 (sequence is synthesized)
atgatttagaccaatattctagaaatatcaaatgtcagtatcttgaaatcatctgcctctaactttgtggtataagaattatatatgaataagctattatttttataaaggaaaactttg

SEQ ID NO: 396320 - DNA, 120 bp, Artificial Sequence
  ENSG00000145780_36 (sequence is synthesized)
ccattatagtaaattacattagttgatctcgataatttgaggataacagatgacaattgaatttttaattgatttagtatttcctcctcctctttgggggctgggtgggagggcttacat

SEQ ID NO: 396321 - DNA, 120 bp, Artificial Sequence
  ENSG00000145780_37 (sequence is synthesized)
gctcttatagtgaggcacatctcactgttttgcagcagaatttgaattgtgcaactcctgtgtaaagtaaggatttctttaaatagcatttttgcaccagtaaaaatagataacttagaa

SEQ ID NO: 396322 - DNA, 120 bp, Artificial Sequence
  ENSG00000145780_38 (sequence is synthesized)
ctcagtcttgataactgaaatgacttatttcacttagaatacatttctcccttctctgccatctccacaaatgccattgggaggttttgaaaaaccagttaatttaatagctcaaaattg

SEQ ID NO: 396323 - DNA, 120 bp, Artificial Sequence
  ENSG00000145780_39 (sequence is synthesized)
tccctgattttattttcttttagggaaaattgtttcataaatgtgacactgataaagcctttgtcagaaagtattctcacaattatgagatggattataataaaatacttaaatttgtgt

SEQ ID NO: 396324 - DNA, 120 bp, Artificial Sequence
  ENSG00000145780_40 (sequence is synthesized)
tattttttgaaccacagatgagtaaatttaataatgaaccaattacactcttgagtctaactaaactgtacactgtagcacggtgttattgactggagttaatgtgtaagttattaacat

SEQ ID NO: 396325 - DNA, 120 bp, Artificial Sequence
  ENSG00000145780_41 (sequence is synthesized)
ttctatgaaaatgcccttttggggcctcctgaattttagatgttccactgttttgatcatttctataaaagaaatggtcattttacttagatgccagtctactttataaagacaaatgga

SEQ ID NO: 396326 - DNA, 120 bp, Artificial Sequence
  ENSG00000145780_42 (sequence is synthesized)
ttatagacttaaaaatagtcatttttcttattcataaatctgacaggcataaacccaaatcaaagataatttggtgcccattatgaatttgaagttaagtgatagctcacttgtaaagtg

SEQ ID NO: 396327 - DNA, 120 bp, Artificial Sequence
  ENSG00000145780_43 (sequence is synthesized)
actaccttaatgtgtatagagaccccagtctactattatttgggaaaattgtttaggttatatgggaaaagtagctctttaaaaatcatattgcccaacagaaaccttaggctgaattta

SEQ ID NO: 396328 - DNA, 120 bp, Artificial Sequence
  ENSG00000145780_44 (sequence is synthesized)
caggtatgataatttttgtaattaattttcttagaattgtgcaggctggatgagataatgacatactcttttacactgtaacagcagcattattgcctagaactttaaccattttagagt

SEQ ID NO: 396329 - DNA, 88 bp, Artificial Sequence
  ENSG00000145780_45 (sequence is synthesized)
cttatgtgtcactaaacaactagtttctctcccttttgtcagttcccattgtgtattttttcaaaagaagtactgtattcggatgcca

SEQ ID NO: 396330 - DNA, 120 bp, Artificial Sequence
  ENSG00000145780_46 (sequence is synthesized)
ttgtgtattttttcaaaagaagtactgtattcggatgccagctaataaattgtcacacaatggaaaatcatatgccacaacattcattgtaaggtttaataaaattaaatttgcaccaaa

SEQ ID NO: 396331 - DNA, 120 bp, Artificial Sequence
  ENSG00000145781_0 (sequence is synthesized)
agacggcggcagtgcgagaaagccgaagatggcggtccccgcggcgctgatcctacgggagagccccagcatgaagaaagcagtgtcactgataaatgcaatagatacaggaagatttcc

SEQ ID NO: 396332 - DNA, 120 bp, Artificial Sequence
  ENSG00000145781_1 (sequence is synthesized)
acggttgctcactcggattcttcaaaaacttcacctgaaggctgagagcagtttcagtgaagaagaggaagaaaaacttcaagcggcattttctctagagaaacaagatcttcacctagt

SEQ ID NO: 396333 - DNA, 120 bp, Artificial Sequence
  ENSG00000145781_2 (sequence is synthesized)
tcttgaaacaatatcatttattttagaacaggcagtgtatcacaatgtgaagccagcagctttgcagcagcaattagagaacattcatcttagacaagacaaagctgaagcatttgtcaa

SEQ ID NO: 396334 - DNA, 120 bp, Artificial Sequence
  ENSG00000145781_3 (sequence is synthesized)
tacgtggtcttctatgggtcaagaaacagttgaaaagttccggcagagaattctggctccctgtaagctagagaccgttggatggcagcttaaccttcagatggctcactctgctcaagc

SEQ ID NO: 396335 - DNA, 120 bp, Artificial Sequence
  ENSG00000145781_4 (sequence is synthesized)
aaaactaaaatctcctcaagctgtgttacaactcggagtgaacaatgaagattcaaagagcctggagaaagttcttgtggaattcagtcacaaggagttgtttgatttctataacaagct

SEQ ID NO: 396336 - DNA, 120 bp, Artificial Sequence
  ENSG00000145781_5 (sequence is synthesized)
tttctgaaggattcagtgacttgctttctgtaaattatatggcttatcacttcttagacaaataacaaccaatagagatcattgttaagaatactgaggttctaatatactttctttagt

SEQ ID NO: 396337 - DNA, 120 bp, Artificial Sequence
  ENSG00000145781_6 (sequence is synthesized)
tctgtgagccaacagtaattattaagaacactttccctttaaaggaaacaaaagtgaataccatattgtttttactgtcatagtgttgctttcttgcctgtcctgcttagtttttacttg

SEQ ID NO: 396338 - DNA, 120 bp, Artificial Sequence
  ENSG00000145781_7 (sequence is synthesized)
ctggatgataccataatgtatcaaggagcgtccatggatacaagataagatgtgtaccttagtagaatacagagctttggtaattacatgaataaaattaagaaaatagccatatacaat

SEQ ID NO: 396339 - DNA, 120 bp, Artificial Sequence
  ENSG00000145781_8 (sequence is synthesized)
caaatacactatggcatttttatttgaatatgatgagtatattttgcttcggaaataatataggaaggaaatgtaaaatagtgagtagtatggtatcagttaattccagtctgagcttct

SEQ ID NO: 396340 - DNA, 120 bp, Artificial Sequence
  ENSG00000145781_9 (sequence is synthesized)
ctgtcaacttcagtttctctctcagtttaatgatttaataatagtccaggtttttgtgtgtttttctttatactgcaaattaataatgattcactttatagtttgggagacagaatcagg

SEQ ID NO: 396341 - DNA, 120 bp, Artificial Sequence
  ENSG00000145781_10 (sequence is synthesized)
tcttgaataaaataattgtaatgagtgctaaatgggcaccattattcgaatcagataccttttatattctctttccataaatacgttgatttctgtcaataaaatttttgtgtcttagga

SEQ ID NO: 396342 - DNA, 120 bp, Artificial Sequence
  ENSG00000145781_11 (sequence is synthesized)
gacactctggtgggaaaggctcacgctgctgctggagggtctttaatagccaacatgtgttaataccccttttaaatcagtatcgaataggggaccgaatttttggttggtagaagaatc

SEQ ID NO: 396343 - DNA, 120 bp, Artificial Sequence
  ENSG00000145781_12 (sequence is synthesized)
ttattttgcattgaagatacattgccagctactgcagccgtggaactaagtgttgctaatgaattgtgaatggaagtgatcattcatctccagttgtcttcctctttctgtgattgaaac

SEQ ID NO: 396344 - DNA, 120 bp, Artificial Sequence
  ENSG00000145781_13 (sequence is synthesized)
cagcagtcccaggacaggcagagaccatcaggagcttaaccttcacacagagagagactccagatctcagagagcagtgctcaagattccaagacagaaccctgggattttctactatgt

SEQ ID NO: 396345 - DNA, 120 bp, Artificial Sequence
  ENSG00000145781_14 (sequence is synthesized)
ttttccagggattcaaggcatggaatccttcattaagtggggaagaaccaacagaatttgttccacatattcctctgacacatccccaaaagcatgacttctagcctgaatcctacaatg

SEQ ID NO: 396346 - DNA, 120 bp, Artificial Sequence
  ENSG00000145781_15 (sequence is synthesized)
atgcacatctcagcgcatgctgcctccttcatgtcgtcatgccctgcctggcgatagattgcggctgagagcagaaggccaattaatttgcctgatacgtgacactccattcagggtaat

SEQ ID NO: 396347 - DNA, 120 bp, Artificial Sequence
  ENSG00000145781_16 (sequence is synthesized)
ggacaagatggagtttgcagaggcgaggaaaacacctgttctgtatgggtgcctctcacaccacctctctgatcatcttcttcagctccctttttggaagctcctcttctcattcctcag

SEQ ID NO: 396348 - DNA, 120 bp, Artificial Sequence
  ENSG00000145782_0 (sequence is synthesized)
gtctccaagcaagatggcggaggagccgcagtctgtgttgcagcttcctacttcaattgctgctggaggggaaggacttacggatgtctccccagaaacaaccaccccggagcccccgtc

SEQ ID NO: 396349 - DNA, 120 bp, Artificial Sequence
  ENSG00000145782_1 (sequence is synthesized)
ttccgctgcagtttccccgggaacagaggaacctgctggcgacaccaagaaaaaaattgacattttgctaaaggctgtgggagacactcctattatgaaaacaaagaagtgggcagtaga

SEQ ID NO: 396350 - DNA, 120 bp, Artificial Sequence
  ENSG00000145782_2 (sequence is synthesized)
gcgaacacgaaccatccaaggactcattgacttcatcaaaaagtttcttaaacttgtggcctcagaacagttgtttatttatgtgaatcagtcctttgctccttccccagaccaagaagt

SEQ ID NO: 396351 - DNA, 120 bp, Artificial Sequence
  ENSG00000145782_3 (sequence is synthesized)
tggaactctctatgagtgttttggcagtgatggtaaactggttttacattactgcaagtctcaggcgtggggatgaaccacaaagaaaatcaacttgctactacatgaaatggattttca

SEQ ID NO: 396352 - DNA, 120 bp, Artificial Sequence
  ENSG00000145782_4 (sequence is synthesized)
cggaagagacagctctgaaaagttttgatgcttgtggcaagagacttaacagatgtgatctatttagtatgtgtctactctatgtttatgcataagaaaacatccatagcatgaatggac

SEQ ID NO: 396353 - DNA, 120 bp, Artificial Sequence
  ENSG00000145782_5 (sequence is synthesized)
tcagaaaaatgtgatttgtattaatgcaccagtcatcataaaagatggtcatgatagtacacccattgctcctacttgttactattattgctgcagatctgcctccaaggttgaaaagga

SEQ ID NO: 396354 - DNA, 120 bp, Artificial Sequence
  ENSG00000145782_6 (sequence is synthesized)
gactaagactgtataaacatcttcattgtcagttctcaaaatgactgaaattgttttcatggtaaaagttaatatactaaagggttcctttttttttaatgtttacatttatctctatgt

SEQ ID NO: 396355 - DNA, 120 bp, Artificial Sequence
  ENSG00000145782_7 (sequence is synthesized)
ttacctttttagtcacattgacctgctggctgaatacctcaaatagtccagtagagggcagtccaccaggcagaaaaggttaggcgttttggtttcacatctttgctggggaataatagg

SEQ ID NO: 396356 - DNA, 120 bp, Artificial Sequence
  ENSG00000145782_8 (sequence is synthesized)
ggaaatggctgtttttgctaatttttagctaatatctagccaggagagcaagcacataggacagactgaaagactgtaattttacacaatacacatggcttaattattttattgggatac

SEQ ID NO: 396357 - DNA, 120 bp, Artificial Sequence
  ENSG00000145782_9 (sequence is synthesized)
agaaaaatataaattctggacaaataagtcatatacctgttttcagtcctaacatttaaggattcttgagtcccaatcacataactgtggtgttactctgtcatttatatggtgtcaaaa

SEQ ID NO: 396358 - DNA, 120 bp, Artificial Sequence
  ENSG00000145782_10 (sequence is synthesized)
gcacttgatgagtaaacccagtagcatctttttgagtgtttcataatgcattttccaacttgaaaacaataattgaaaaatagccttattgtatattttatgccatgactaaaagtgcca

SEQ ID NO: 396359 - DNA, 120 bp, Artificial Sequence
  ENSG00000145782_11 (sequence is synthesized)
tttttactgatgctattagactgataatttcttgaagtgaaatttaacctttttttctctttagtattatgtttataatgccatatttttagaaagcattccagatcaggcatggtggct

SEQ ID NO: 396360 - DNA, 120 bp, Artificial Sequence
  ENSG00000145782_12 (sequence is synthesized)
taatcccagcactttggaaggctgaggtgtggggattgcgtgaagccacaagtttgagaccagcctggttagcaaggcaagatccccaactctacaaaaaaataaaaattaaaaaaaaat

SEQ ID NO: 396361 - DNA, 120 bp, Artificial Sequence
  ENSG00000145782_13 (sequence is synthesized)
aaaaaaattattaggctgcagaggcaagaggatcccctgagcccagaagttcaagggtatagtgagtcgtgattgtaccactgcattcctgctgagcaacagagtgagaccccatctcaa

SEQ ID NO: 396362 - DNA, 120 bp, Artificial Sequence
  ENSG00000145782_14 (sequence is synthesized)
aaaagaaaaaaaaaggcattctagtaaatcgaatgtaatgtgaatggaatttcaaaacaggatctaagatggtatgtagtagaattcaaagtaatatcattttaaagttaaatgagtatg

SEQ ID NO: 396363 - DNA, 120 bp, Artificial Sequence
  ENSG00000145782_15 (sequence is synthesized)
gaaaaggtctgttctctagttttgtccagttcagtttactgaaggaatatatttaattatattcatatatttaacaaataaaaatatgttgaattttcgtattgtttgccactgagggtt

SEQ ID NO: 396364 - DNA, 120 bp, Artificial Sequence
  ENSG00000145782_16 (sequence is synthesized)
ataacttaatagtttattaaatctaaggttagctaaatatgtagctaaccttatttgttttctttcctaacaactctgaagaatacataggactttgcactttttttttttttttttttt

SEQ ID NO: 396365 - DNA, 60 bp, Artificial Sequence
  ENSG00000145782_17 (sequence is synthesized)
tttttttttttttttttttaaagagacagcgtttcggtcttgttgcccaggctggactgt

SEQ ID NO: 396366 - DNA, 71 bp, Artificial Sequence
  ENSG00000145782_18 (sequence is synthesized)
gattacaggcacctgccaccacacccgcctaattttttgttatttttagtgacctcaggtgatccacccgc

SEQ ID NO: 396367 - DNA, 120 bp, Artificial Sequence
  ENSG00000145782_19 (sequence is synthesized)
ggattataggtgtgagccaccgtgccgggcctggactttgtactttttcaaatcatatttaattatttcttgatctttactcaaagaattattctgcgctaaatttgcaacattaaacaa

SEQ ID NO: 396368 - DNA, 120 bp, Artificial Sequence
  ENSG00000145782_20 (sequence is synthesized)
aaatttgcaacattaaacaataattaagcctggatccgataagttattgggtgactagaacctacaacacaatttatttttaatttaaactctcaagtctgattaaacttgggggaaaaa

SEQ ID NO: 396369 - DNA, 120 bp, Artificial Sequence
  ENSG00000145782_21 (sequence is synthesized)
ctgaacattcaggtgatattttaaattttctttgtgactaaatagatgtcattaatatcatgcttcatcttactgtgcatagatgacccatggcacacaaagtatatgtataatattgca

SEQ ID NO: 396370 - DNA, 120 bp, Artificial Sequence
  ENSG00000145782_22 (sequence is synthesized)
atattgtacttccatctttaaaagtatgccaaagacttcataatgaattcaccatatttaaggaataaggcaaattaatgtttatccgaaatcaaaatgagattggataattcctggaat

SEQ ID NO: 396371 - DNA, 120 bp, Artificial Sequence
  ENSG00000145782_23 (sequence is synthesized)
ctgatttctgtaagtttcagtcctaaagggaccttaaatatctactagaacgaagtacagtgtatttctcagattacatgacattagtcaaccaatttagttgtaacacaaagtgagaaa

SEQ ID NO: 396372 - DNA, 120 bp, Artificial Sequence
  ENSG00000145782_24 (sequence is synthesized)
gccttaggtgttgaaggagtgtgaaaataaaaatctcttttcatgcagtttctgcttcattttccaaggattataatatgctgagtaaacttttggcactaaggaagccagctacaggcc

SEQ ID NO: 396373 - DNA, 120 bp, Artificial Sequence
  ENSG00000145782_25 (sequence is synthesized)
acgtaatgaaaactattcagaaaacagttcagcaaatactactatttgaatacagttcaaatcgtatttatataaatactctgcctacattatttaacccaaactggattattcaccatt

SEQ ID NO: 396374 - DNA, 120 bp, Artificial Sequence
  ENSG00000145782_26 (sequence is synthesized)
ctttgaagatgccttgtgttttctgttatctacttctgctcgtgcagtttacttacaccttcaccctttcaaatcctaactcttcttcaaggcctgattcagattttaactttttaaagg

SEQ ID NO: 396375 - DNA, 120 bp, Artificial Sequence
  ENSG00000145782_27 (sequence is synthesized)
ctatctgaatcattcaaggagaagataccctttctctcataaaaacacttagagcaaactaccactattaaatcacttattgcatactgcctcagagccatgtgtccagttattctggtt

SEQ ID NO: 396376 - DNA, 120 bp, Artificial Sequence
  ENSG00000145782_28 (sequence is synthesized)
tttatctggtacccacacacacataatacttagtacatttccttatatgtaaataattagtaatgtaacacatcgagtgaatgaaattgtgattagcaaagtatgacagctaaaaacaaa

SEQ ID NO: 396377 - DNA, 120 bp, Artificial Sequence
  ENSG00000145782_29 (sequence is synthesized)
ggaaattttgtatagtttaagtttttgtacagcagaaggtaatggaaaatatttgcaacatatgacagtgtttttaatgtcttaagtatatgaagaatttgtttcaattggtaagaaaag

SEQ ID NO: 396378 - DNA, 120 bp, Artificial Sequence
  ENSG00000145782_30 (sequence is synthesized)
accaactgaaaaataggcaaaacataccaaatttcgattcacaaaaagatacaaatggccaacaaaacatgaaacaccttgaaccccattggttacaaaaaatacaaataaaaacaatgc

SEQ ID NO: 396379 - DNA, 120 bp, Artificial Sequence
  ENSG00000145782_31 (sequence is synthesized)
tgactgacaataaaaataatgtacatcttgctattagcagagttgtggggaaatcctgtcatattttggtgaatagaatatgagttggtatatcacttttagggggccatttggcaatat

SEQ ID NO: 396380 - DNA, 120 bp, Artificial Sequence
  ENSG00000145782_32 (sequence is synthesized)
caaaaaccttgaaacgtaagtataaacttcagtttgttcgtataacctgtcattcacatattgagtgcctactatgtcctaaatattggaataacactaataaagctcataagagactaa

SEQ ID NO: 396381 - DNA, 120 bp, Artificial Sequence
  ENSG00000145782_33 (sequence is synthesized)
atataaaaataaatgcttaaatggaggtgaaatctttttaagtgaattttcacacatctcatattttcttacactggattcctagaagtattattgaatcaaagtatacctttattagga

SEQ ID NO: 396382 - DNA, 120 bp, Artificial Sequence
  ENSG00000145782_34 (sequence is synthesized)
tctgtattaccatactgcattccacaaagggtataccattttacattctcaaaagtagtatcatctacactggtaattactctaattttaactagtttggtgggtgaaaagggacatgac

SEQ ID NO: 396383 - DNA, 120 bp, Artificial Sequence
  ENSG00000145782_35 (sequence is synthesized)
attattttactttgctttttgtgaacttaaatattgtttgtgtattgatcatttgtatttcctctctttggaactgcctgttaagataaaaggcattttaaaaattagtcctgttgggag

SEQ ID NO: 396384 - DNA, 120 bp, Artificial Sequence
  ENSG00000145782_36 (sequence is synthesized)
aactttgtaggatcaagaaaaaaatgatggaaaagaatctaacatttttacatctctcacatatcttcagtatcataaatacgtaagatggatgtagattaaatatttctgatttctaag

SEQ ID NO: 396385 - DNA, 120 bp, Artificial Sequence
  ENSG00000145782_37 (sequence is synthesized)
tcttttatattccattctctttagatgtttcagtgtaattgtcagtaaattttattcttcttttacagttgacattttgctaaaggctgtgggagacactcctattatgaaaacaaagaa

SEQ ID NO: 396386 - DNA, 120 bp, Artificial Sequence
  ENSG00000145782_38 (sequence is synthesized)
atgtttaattgaattaatcgatttattgatagccccaggggatttgagggagcagtgaaaggaggtatgaaagataggctaactaaaatcccacgttatctccaaattcattcctattcc

SEQ ID NO: 396387 - DNA, 120 bp, Artificial Sequence
  ENSG00000145782_39 (sequence is synthesized)
taagataactggacctaggataattaagtagttctttagtaggaagataaagatcatgtgttctagatgcgttcattccaggagtaaacttgaataaaatgacctctgatcttttggccc

SEQ ID NO: 396388 - DNA, 120 bp, Artificial Sequence
  ENSG00000145782_40 (sequence is synthesized)
caatatttaatacctaaagaatggagcaagaagggtgtaatagaatagagttaactttagggggcagcaatacactgttttgctttcaatgtgtcttgctttttgactgtagattttttt

SEQ ID NO: 396389 - DNA, 83 bp, Artificial Sequence
  ENSG00000145782_41 (sequence is synthesized)
ctgtcacccaggctggagtgcagtggcttaatctcggttcactgcaacctccgcgtcccgggttcaagctgggcatgcaccac

SEQ ID NO: 396390 - DNA, 120 bp, Artificial Sequence
  ENSG00000145782_42 (sequence is synthesized)
tcctcctgcctcagcctcccaaagtgtggagattactggcgtgagccaccgcgcccagccagatgtatgtttgttttgttttagcaaataactttatgtctgagagacagattcataggg

SEQ ID NO: 396391 - DNA, 120 bp, Artificial Sequence
  ENSG00000145782_43 (sequence is synthesized)
tttatgtctgagagacagattcatagggtttgggtttgcatatctgtgttttggatcgttgaaaccttaagatttctctttctgcaacttctttttggctttggttgttctattgttaat

SEQ ID NO: 396392 - DNA, 120 bp, Artificial Sequence
  ENSG00000145782_44 (sequence is synthesized)
aacttattgctttcctttattaaaaagtttattacagaaaatttggtagttacaaacagcataagtaaatccaagtaatcattgcctacaatgtcactactgagaaatatcattttgttg

SEQ ID NO: 396393 - DNA, 120 bp, Artificial Sequence
  ENSG00000145782_45 (sequence is synthesized)
gctgttggagagattaaatatccacatatatacccagcaagtggcagagccaggattcgaaccccaggcagttaaaagtgtatgcggtttactacattctatttaatcagtcacctccaa

SEQ ID NO: 396394 - DNA, 120 bp, Artificial Sequence
  ENSG00000145782_46 (sequence is synthesized)
tgcagtttccccgggaacagaggaacctgctggcgacaccaagaaaaaaattggttgtgaattcactccttaaaccaaaaaccaaattcttatgcagaatgaagactgctaagggaaagc

SEQ ID NO: 396395 - DNA, 120 bp, Artificial Sequence
  ENSG00000145782_47 (sequence is synthesized)
ctatcctcaaccctttattgcttgagaatgtttccctttgtaaaagagattgctaaaattacgtgttctaaagcactctgtttagagttagagttgcctatgggaaaagcagcatataag

SEQ ID NO: 396396 - DNA, 120 bp, Artificial Sequence
  ENSG00000145782_48 (sequence is synthesized)
tgggaaaagcagcatataagcatcctcgattcagagaggctgatttcgtccttagacgttttccccgttctgtcttaagatgacagtggtctctggccgggcgcggtggctcactcctgt

SEQ ID NO: 396397 - DNA, 120 bp, Artificial Sequence
  ENSG00000145782_49 (sequence is synthesized)
atagagctttatagtatgcaaacagatttatgtctttctgtcttttgaactaactgaattgcttttttaaaatttccagttaacacctgttacaaaatcacattgaatgcctttggttgg

SEQ ID NO: 396398 - DNA, 120 bp, Artificial Sequence
  ENSG00000145782_50 (sequence is synthesized)
ttctctgctccatcgagtctgctgttttctgtgaacacaacaccatcttactctttgtctcctttgcctgtgaagtcctgattactgctttcttcacctggttaaatcctgcttatttct

SEQ ID NO: 396399 - DNA, 120 bp, Artificial Sequence
  ENSG00000145782_51 (sequence is synthesized)
tatttcccacaaagccatcactgacccttttgctaggctagagtagtgtacatttctgtacgctacatacttcattagatgtacttttctcacccgtatttattcatgtgtgtctctgcc

SEQ ID NO: 396400 - DNA, 120 bp, Artificial Sequence
  ENSG00000145782_52 (sequence is synthesized)
tctcctacagattataagctcattgagggaagagatcacattaatcttcatagttccatgtacaattctcagcacatcatagacactgataaactaagctgttattgagagcccttcccc

SEQ ID NO: 396401 - DNA, 120 bp, Artificial Sequence
  ENSG00000145782_53 (sequence is synthesized)
tcatttataatgtacaagagtaaaatctggatttgctcataaattgtcaggcactgaacacaaattatatctgtattacaaaaaattcacattataatgcacattgttttctgttacagt

SEQ ID NO: 396402 - DNA, 120 bp, Artificial Sequence
  ENSG00000145782_54 (sequence is synthesized)
tctgaaatttttgtgccagaactctactcagccataaccacaaattgatatttcagcatgaactatttaaagataatttaacaataacgtctattgagtacatataccaggcactgaaag

SEQ ID NO: 396403 - DNA, 120 bp, Artificial Sequence
  ENSG00000145782_55 (sequence is synthesized)
ttagtgtattatctcattttgtctttcctaacagacccaagaggtataggtcctattattttccatatcttacaaataaagaggatgagagattatttgtaaagccaggattcaaaccca

SEQ ID NO: 396404 - DNA, 120 bp, Artificial Sequence
  ENSG00000145782_56 (sequence is synthesized)
ggtgtgtctcagagcctatacacttaatcaccacactatattggctaagagagatgcaagcaatattgatggttcatggttggtgatcaaaatagtatctgtcaaccaactattctgata

SEQ ID NO: 396405 - DNA, 120 bp, Artificial Sequence
  ENSG00000145782_57 (sequence is synthesized)
cttttttttttaaatactaagtttaatccaggacattttagtcccaaatttggatattaaaggaaaactaaatatgttacctgcaaataaagttttgttttccaaaaagaaaattattaa

SEQ ID NO: 396406 - DNA, 120 bp, Artificial Sequence
  ENSG00000145782_58 (sequence is synthesized)
agggcacttcaacactgtgactttaagtactagaaatattttagtaaaaacagactaaactgaaacattgagcagtgaatcctttaaagagcaaggttataaggttttaattgttacttt

SEQ ID NO: 396407 - DNA, 120 bp, Artificial Sequence
  ENSG00000145782_59 (sequence is synthesized)
ttttcctgcttcatttgcctgtaagtgactttattaaaaaacctaagtatatatgtcatacatttacccaaggaaagtgtacaaactaccttgaatattagacatattgatttttggctg

SEQ ID NO: 396408 - DNA, 120 bp, Artificial Sequence
  ENSG00000145782_60 (sequence is synthesized)
tgtgcctgtgtaattatcttaggagaaattctttgtgggtaagtggggacatttttacgataatgtaatttcttgaatagccagctcttcaaaagctatttgtaaaaaatatttaaaagt

SEQ ID NO: 396409 - DNA, 120 bp, Artificial Sequence
  ENSG00000145782_61 (sequence is synthesized)
ttcttagttatacaaagttaggaaccactgttctaggaactggaattgtgttatttttattcctctggaggaaaaatgagatcttcgtaatgatctctttaaattgactatttagaaaag

SEQ ID NO: 396410 - DNA, 120 bp, Artificial Sequence
  ENSG00000145782_62 (sequence is synthesized)
aacaatacaaaatagctagctgattggaatgcagaaaaatgcagattaatcaggataccattaaacatctctgtttttccttcctttcttgtagtttatttatgtgaatcagtcctttgc

SEQ ID NO: 396411 - DNA, 120 bp, Artificial Sequence
  ENSG00000145782_63 (sequence is synthesized)
gacatgaaagaaaaacgatcagcattagtaaaactaagaaatgaagctcaggaaaagaattagaaataaaagaaaattatttcagaaatggagactaaagtaggaggaacataaacaacg

SEQ ID NO: 396412 - DNA, 120 bp, Artificial Sequence
  ENSG00000145782_64 (sequence is synthesized)
gataatatgttaagaaaaatagaagatgaaaaaaatttaaaaagtgagtcaacctttggacaagagtctgtgaagaaaaccagagcaagggaacagaaaaaatactgtaaaaatgtcatt

SEQ ID NO: 396413 - DNA, 120 bp, Artificial Sequence
  ENSG00000145782_65 (sequence is synthesized)
gtccgagccagcggcctaactggagtgtgcgcattcgaccgagcacagacacgttgcccaccgctcctctcccgaggtctgtagtcgcggagaaacacatgttgcgttactaacgttcag

SEQ ID NO: 396414 - DNA, 120 bp, Artificial Sequence
  ENSG00000145782_66 (sequence is synthesized)
aggtctgcgacagcttcgatttgaatgactagccgggaacaccaagtttcactgtgtaattgcgtccccctactccggcgcctcctttgcgacgctccctggagaaaagcacgcccactg

SEQ ID NO: 396415 - DNA, 74 bp, Artificial Sequence
  ENSG00000145782_67 (sequence is synthesized)
cattttgctaaaggctgtgggagacactcctattatgaaaacaaagaagtgggcagtagagcgaacacgaacca

SEQ ID NO: 396416 - DNA, 120 bp, Artificial Sequence
  ENSG00000145782_68 (sequence is synthesized)
atccgagtaggggtggcggccagtaaagaagcaaaatttagaggagcgcctgtcctagacctgcattttgaccagtcatcagaagaaaagaagtgtactttttgatttttaaggccttta

SEQ ID NO: 396417 - DNA, 120 bp, Artificial Sequence
  ENSG00000145782_69 (sequence is synthesized)
agttgagtgttaaaataccatctctgtctatcggtgtagggcctgatacttggctgccacacttatttttatactgtatttttttgagttggccagactgcgagctctttgaaggaggga

SEQ ID NO: 396418 - DNA, 120 bp, Artificial Sequence
  ENSG00000145794_0 (sequence is synthesized)
tgggaacgcgttgagacgttcctctttcccgcttctccacctttacgcctgaaagaagactcccaaagattgctttcttctgggacgctgcttggacgctaaccgcgttgattggaacag

SEQ ID NO: 396419 - DNA, 120 bp, Artificial Sequence
  ENSG00000145794_1 (sequence is synthesized)
attttgtgtcttggctggctttgggtgaagaccggggagaaaaggttgcgctgcgattctcaagatctctggacctggattatcattgcaaatccattaaagaaggagaagcaagcggat

SEQ ID NO: 396420 - DNA, 120 bp, Artificial Sequence
  ENSG00000145794_2 (sequence is synthesized)
ttcagagaggttgttcttcagaaaaaaatggttatttctttgaactcatgcctgagctttatttgtttattgttatgccactggattgggacagcatcacctctgaatcttgaagaccct

SEQ ID NO: 396421 - DNA, 120 bp, Artificial Sequence
  ENSG00000145794_3 (sequence is synthesized)
aatgtgtgtagccactgggaaagctactcagtgactgtgcaagagtcatacccacatccctttgatcaaatttactacacgagctgcactgacattctaaactggtttaaatgcacgcgg

SEQ ID NO: 396422 - DNA, 120 bp, Artificial Sequence
  ENSG00000145794_4 (sequence is synthesized)
cacagagtcagctatcggacagcctatcgacatggggagaagactatgtataggcgcaagtctcagtgttgtcctggattttatgaaagcggggaaatgtgtgtcccccactgtgctgat

SEQ ID NO: 396423 - DNA, 120 bp, Artificial Sequence
  ENSG00000145794_5 (sequence is synthesized)
aaatgtgtccatggtcgctgtattgctccaaacacctgtcagtgtgagcctggctggggagggaccaactgctccagtgcctgcgatggtgatcactggggtccccactgcaccagccgg

SEQ ID NO: 396424 - DNA, 120 bp, Artificial Sequence
  ENSG00000145794_6 (sequence is synthesized)
tgccagtgcaaaaatggggctctgtgcaaccccatcaccggggcttgccactgtgctgcgggcttccggggctggcgctgcgaggaccgctgtgagcagggcacctatggtaacgactgt

SEQ ID NO: 396425 - DNA, 120 bp, Artificial Sequence
  ENSG00000145794_7 (sequence is synthesized)
catcagagatgccagtgccagaatggagccacctgcgaccacgtcacgggggaatgccgctgcccaccaggatacaccggagccttctgtgaggatctttgtcctcctggtaaacatggt

SEQ ID NO: 396426 - DNA, 120 bp, Artificial Sequence
  ENSG00000145794_8 (sequence is synthesized)
ccacagtgtgagcagagatgcccttgtcaaaatggaggagtgtgtcatcacgtcactggagaatgctcttgcccttctggctggatgggcacagtgtgtggtcagccttgccccgagggt

SEQ ID NO: 396427 - DNA, 120 bp, Artificial Sequence
  ENSG00000145794_9 (sequence is synthesized)
cgctttggaaagaactgttcccaagaatgccagtgccataatggagggacgtgtgatgctgccacaggccaatgtcattgcagtccaggatacacaggggaacggtgccaggatgagtgt

SEQ ID NO: 396428 - DNA, 120 bp, Artificial Sequence
  ENSG00000145794_10 (sequence is synthesized)
cctgttgggacctatggcgttctctgtgctgagacctgccagtgtgtcaacggagggaagtgttaccacgtgagcggcgcatgcctctgtgaagcaggctttgctggcgagcgctgcgaa

SEQ ID NO: 396429 - DNA, 120 bp, Artificial Sequence
  ENSG00000145794_11 (sequence is synthesized)
gcacgcctgtgtcctgaggggctctacggcatcaaatgtgacaaacggtgtccctgccacctggaaaacactcatagctgtcaccccatgtctggagagtgtgcctgcaagccgggctgg

SEQ ID NO: 396430 - DNA, 120 bp, Artificial Sequence
  ENSG00000145794_12 (sequence is synthesized)
tcaggactctactgtaatgagacatgttctcctggattctacggggaagcttgccagcagatctgcagctgccaaaatggggcagactgtgacagtgtgactggaaagtgcacctgtgcc

SEQ ID NO: 396431 - DNA, 120 bp, Artificial Sequence
  ENSG00000145794_13 (sequence is synthesized)
ccaggattcaaaggaattgactgctctaccccatgccctctgggaacctatgggataaactgttcctctcgctgtggctgtaaaaatgatgcagtctgctctcctgtggacgggtcttgt

SEQ ID NO: 396432 - DNA, 120 bp, Artificial Sequence
  ENSG00000145794_14 (sequence is synthesized)
acttgcaaggcaggctggcacggggtggactgctccatcagatgtcccagtggcacatggggctttggctgtaacttaacatgccagtgcctcaacgggggagcctgcaacaccctggac

SEQ ID NO: 396433 - DNA, 120 bp, Artificial Sequence
  ENSG00000145794_15 (sequence is synthesized)
gggacctgcacgtgtgcacctggatggcgcggggagaaatgcgaacttccctgccaggatggcacgtacgggctgaactgtgctgagcgctgcgactgcagccacgcagatggctgccac

SEQ ID NO: 396434 - DNA, 120 bp, Artificial Sequence
  ENSG00000145794_16 (sequence is synthesized)
cctaccacgggccattgccgctgcctccccggatggtcaggtgtccactgtgacagcgtgtgtgctgagggacgctggggccccaactgctccctgccctgctactgtaaaaatggggct

SEQ ID NO: 396435 - DNA, 120 bp, Artificial Sequence
  ENSG00000145794_17 (sequence is synthesized)
tcatgctcccctgatgatggcatctgcgagtgtgcaccaggcttccgaggcaccacttgtcagaggatctgctcccctggtttttatgggcatcgctgcagccagacatgcccacagtgc

SEQ ID NO: 396436 - DNA, 120 bp, Artificial Sequence
  ENSG00000145794_18 (sequence is synthesized)
gttcacagcagcgggccctgccaccacatcaccggcctgtgtgactgcttgcctggcttcacaggcgccctctgcaatgaagtgtgtcccagtggcagatttgggaaaaactgtgcagga

SEQ ID NO: 396437 - DNA, 120 bp, Artificial Sequence
  ENSG00000145794_19 (sequence is synthesized)
atttgtacctgcaccaacaacggaacctgtaaccccattgacagatcttgtcagtgttaccccggttggattggcagtgactgctctcaaccatgtccacctgcccactggggcccaaac

SEQ ID NO: 396438 - DNA, 120 bp, Artificial Sequence
  ENSG00000145794_20 (sequence is synthesized)
tgcatccacacgtgcaactgccataatggagctttctgcagcgcctacgatggggaatgtaaatgcactcctggctggacagggctctactgcactcagagatgtcctctagggttttat

SEQ ID NO: 396439 - DNA, 120 bp, Artificial Sequence
  ENSG00000145794_21 (sequence is synthesized)
ggaaaagattgtgcactgatatgccaatgtcaaaacggagctgactgcgaccacatttctgggcagtgtacttgccgcactggattcatgggacggcactgtgagcagaagtgcccttca

SEQ ID NO: 396440 - DNA, 120 bp, Artificial Sequence
  ENSG00000145794_22 (sequence is synthesized)
ggaacatatggctatggctgtcgccagatatgtgattgtctgaacaactccacctgcgaccacatcactgggacctgttactgcagccccggatggaagggagcgagatgtgatcaagct

SEQ ID NO: 396441 - DNA, 120 bp, Artificial Sequence
  ENSG00000145794_23 (sequence is synthesized)
ggtgttatcatagttggaaatctgaacagcttaagccgaaccagtactgctctccctgctgattcctaccagatcggggccattgcaggcatcatcattcttgtcctagttgttctcttc

SEQ ID NO: 396442 - DNA, 120 bp, Artificial Sequence
  ENSG00000145794_24 (sequence is synthesized)
ctactggcattgttcattatttatagacacaagcagaagggaaaggaatcaagcatgccagcagttacctacacccctgctatgagggtcgtcaatgcagattataccatttcaggaacc

SEQ ID NO: 396443 - DNA, 120 bp, Artificial Sequence
  ENSG00000145794_25 (sequence is synthesized)
cttcctcacagcaatggtggaaacgctaatagccactacttcaccaatcccagttaccacacgctcacccagtgtgccacatcccctcacgtcaacaacagggacaggatgactgtcacg

SEQ ID NO: 396444 - DNA, 120 bp, Artificial Sequence
  ENSG00000145794_26 (sequence is synthesized)
aagtcaaaaaacaatcaactgtttgtgaatcttaaaaatgtgaaccctgggaagagaggccctgtgggggactgcactgggacattgccggctgactggaaacatggcggctacctcaac

SEQ ID NO: 396445 - DNA, 120 bp, Artificial Sequence
  ENSG00000145794_27 (sequence is synthesized)
gagctcggtgcttttggacttgacagaagctatatgggaaaatccttaaaagacctgggaaagaattctgaatataattcaagtaactgctccctaagcagttctgagaacccatatgcc

SEQ ID NO: 396446 - DNA, 120 bp, Artificial Sequence
  ENSG00000145794_28 (sequence is synthesized)
actattaaagacccacctgtacttatcccgaaaagctcagagtgtggttatgtggagatgaaatcgccggcacgaagagattccccatatgcagagatcaataactcaacttcagccaac

SEQ ID NO: 396447 - DNA, 120 bp, Artificial Sequence
  ENSG00000145794_29 (sequence is synthesized)
aggaatgtctatgaagttgaacctacagtgagtgttgtccaaggagtattcagcaataatgggcgtctctcccaggatccatatgacctcccaaagaacagtcacatcccttgtcattat

SEQ ID NO: 396448 - DNA, 120 bp, Artificial Sequence
  ENSG00000145794_30 (sequence is synthesized)
gacctgctgccagtccgagacagttcatcctcccctaagcaagaggacagtggtggtagcagcagcaacagcagcagcagcagtgaatgacaccaaaggaccgcttggtagccactggaa

SEQ ID NO: 396449 - DNA, 120 bp, Artificial Sequence
  ENSG00000145794_31 (sequence is synthesized)
cctcaattttgccactttcatgtgaatgttagtcaattcggtgggcaatttttggacatgaaccagaaagctgaaagctgaggctgacacggactgtaggtgctttttgttcaggtggat

SEQ ID NO: 396450 - DNA, 120 bp, Artificial Sequence
  ENSG00000145794_32 (sequence is synthesized)
tcgaaggagttagagatgtgatttcccattgctgttagttttagaactatacccgtgaagcatgacttattgtaagatgttggctgaaagcatgaacttgcagaactccctcggagacgc

SEQ ID NO: 396451 - DNA, 120 bp, Artificial Sequence
  ENSG00000145794_33 (sequence is synthesized)
aggttgcagtggacattgggattgttgcttgaaaaattaaaatttgaatattttctctctcatttgcatcatacagctctacctaggattgtacagtttaccataaaatttacttcatga

SEQ ID NO: 396452 - DNA, 120 bp, Artificial Sequence
  ENSG00000145794_34 (sequence is synthesized)
aagtgggaatcactgaacatgtagaagacaaggaacatattgttaactcctgattcttaactttattcaactggactcagaattgtagggataatatgaatgcaggaggaaacattctgt

SEQ ID NO: 396453 - DNA, 120 bp, Artificial Sequence
  ENSG00000145794_35 (sequence is synthesized)
caggcggtatgactggacagactttgaatatactctaaaagtggacagaaaatttacgaaaatcttagattttgtttagaatgagaaaatatacaattagaattattttagaaatagtag

SEQ ID NO: 396454 - DNA, 120 bp, Artificial Sequence
  ENSG00000145794_36 (sequence is synthesized)
gaagtattgcagaagtcaatacacaaatgtgccaggcagaggtggttttctctgtttgactctcaaccaacttcagatctatgacattattctgatcactggctccatcatacatattca

SEQ ID NO: 396455 - DNA, 120 bp, Artificial Sequence
  ENSG00000145794_37 (sequence is synthesized)
ccacttgagattcataacatatcaatagttatttcataaatatagaaatgaaataattttatttttgacagactggatggaatgagtgtgtaatgattgataaaggttgtaaattttaaa

SEQ ID NO: 396456 - DNA, 120 bp, Artificial Sequence
  ENSG00000145794_38 (sequence is synthesized)
tgcaagatgacgcttacgttctgtaaaccattagtaatacatgctgtaatatagaattagtggaacattttgattaatctttccctagaagtgactgaaatatttttgtgcatatttgag

SEQ ID NO: 396457 - DNA, 120 bp, Artificial Sequence
  ENSG00000145794_39 (sequence is synthesized)
aaagggaactttccttttattaattgtcaatttagagaaactatgcttaagctggtcttttgcattgctaatgtgacatgtacccaacttttcattaatttgtatttccatttttaaatt

SEQ ID NO: 396458 - DNA, 120 bp, Artificial Sequence
  ENSG00000145794_40 (sequence is synthesized)
gcatattctatgttttgtagtgtttggattgttaatgaaaaaatattatatgttcgttattccttgtattattgccacttatcttttgcttgataaaaatgcgttgttcttttttctttt

SEQ ID NO: 396459 - DNA, 120 bp, Artificial Sequence
  ENSG00000145794_41 (sequence is synthesized)
ggagggacaagatgaaaatatataatttgaattgattaaaattggtcgttactaaaatagtatagtaaccacaagtgattggcttataaatgaagtagaaatgctttttaatattccaaa

SEQ ID NO: 396460 - DNA, 120 bp, Artificial Sequence
  ENSG00000145794_42 (sequence is synthesized)
atagagttccttttgatctgttggtgctgagccttggttaaaccagggagaaggggagcagaaaggaaacgttgttactgatgagtaccacagactcatcttaaaaaaaactctcattat

SEQ ID NO: 396461 - DNA, 120 bp, Artificial Sequence
  ENSG00000145794_43 (sequence is synthesized)
ggtgatcatagaattgaccatccaaactgggacactcttgagagtaaatggagggcattattaataattatcttgtaatgaacttaaatctggactgttccaggcaaaccagacttatct

SEQ ID NO: 396462 - DNA, 120 bp, Artificial Sequence
  ENSG00000145794_44 (sequence is synthesized)
tgcaatatgagaatgctgacacaatgcaggaaagccagtttcccttttgttgatctacttgaccaagcaaaggggctgaaaaactgaataaggaaacaactttataagagaaacagtggt

SEQ ID NO: 396463 - DNA, 120 bp, Artificial Sequence
  ENSG00000145794_45 (sequence is synthesized)
cttcaatcttttaaagacatgaaatcctatatggcattctgtctcagtgagtcagttaacaaatacgtatgtgcaacccttctgctagtagtgcacataagtgattatccctgccaggta

SEQ ID NO: 396464 - DNA, 120 bp, Artificial Sequence
  ENSG00000145794_46 (sequence is synthesized)
tcgagttggaatatccagttatttcatgtcacacatcggcacgtatgatggtggtttggtcagatggataatacagcagacacacttagaacactcactgcactggtggctgttcatttt

SEQ ID NO: 396465 - DNA, 120 bp, Artificial Sequence
  ENSG00000145794_47 (sequence is synthesized)
gaggaactccaaagtcaattcaaggaaataaggaatgacctggaacaggccttagaaacaattgatttattccaatagttaaccactggctggctcccaactctaggtgataggcatcta

SEQ ID NO: 396466 - DNA, 120 bp, Artificial Sequence
  ENSG00000145794_48 (sequence is synthesized)
attgagacatgtgtgagtcaatagccatcggggtcctttttggtgagaagaaataagacattttctcccttttaaagatcatctcttcagagctgcatggtaaatttgaatttccccatt

SEQ ID NO: 396467 - DNA, 120 bp, Artificial Sequence
  ENSG00000145794_49 (sequence is synthesized)
gttctctagagctaggtcaaaaaaacaactgtttcttttcttattccactattaataaattgaaagcttgctgtacaaaggcaacagcaacttaaaaaagaaaatctggacaatagatgt

SEQ ID NO: 396468 - DNA, 120 bp, Artificial Sequence
  ENSG00000145794_50 (sequence is synthesized)
ggactccaaggggccactgccatcccttcctgtgtgctctttttgacaagtaaatcactccagttagctgatgtcctgaaatgacatttgtacctgaggcaattcttattagagcttact

SEQ ID NO: 396469 - DNA, 120 bp, Artificial Sequence
  ENSG00000145794_51 (sequence is synthesized)
caggacttttcaaacatcaggacacacatagcaatttggatgttgtaaaactacgtgttacatttggagaggtcttgttgagaaggcaaaattttctaaatattttgatatcaatttggg

SEQ ID NO: 396470 - DNA, 120 bp, Artificial Sequence
  ENSG00000145794_52 (sequence is synthesized)
taaagaaaggaatacttttgttagaatgagaattaaagagaaaacaaaagaatcttggcaaaattttccctctgaaattacaaactttaggaacttttccagatgtatcgaatttaattt

SEQ ID NO: 396471 - DNA, 120 bp, Artificial Sequence
  ENSG00000145794_53 (sequence is synthesized)
gacattgatgtcactcttcataccaagtgaatctattctcatgaactttgaacccatgttaattttggaccctataactaatttcctttctgtatcccatggtggtcaaagcagtaaagg

SEQ ID NO: 396472 - DNA, 120 bp, Artificial Sequence
  ENSG00000145794_54 (sequence is synthesized)
agtttagagatacttagcaaatgccattcatatagtattgttagccaaactattattccttccttagaagttgatgtatcagaaaatttataagttatttgtatttatatataagtacat

SEQ ID NO: 396473 - DNA, 120 bp, Artificial Sequence
  ENSG00000145794_55 (sequence is synthesized)
cagaacttgcccacatgataactcatgtttgctttaataaggaaaatatgttatttgaggttaattatatgatagtgaggaacattttacaattatttacagtgtttgacattaattgct

SEQ ID NO: 396474 - DNA, 120 bp, Artificial Sequence
  ENSG00000145794_56 (sequence is synthesized)
gtcctatgatacagtagtaatgttaacagagagtttaatatgtttagcattatctttatggaatttatattcaccaatttcaggaaaaccaaccatagaactttataataggacagttat

SEQ ID NO: 396475 - DNA, 120 bp, Artificial Sequence
  ENSG00000145794_57 (sequence is synthesized)
aacctgactgaaccaaatccatcagcataatgactgtgtgttctgagaaatgcaaacaactttatgaaagtgtggtcatcttgacccccaaagagccacagtagctgtcaattattgaga

SEQ ID NO: 396476 - DNA, 120 bp, Artificial Sequence
  ENSG00000145794_58 (sequence is synthesized)
tttttaaatggtaaatattgcaaaagttaaacaagggtaccacaatatcatttataattgatgtcaatattagtagtccactttatgcttaaaataaaatcataaaaaatcaagttttaa

SEQ ID NO: 396477 - DNA, 120 bp, Artificial Sequence
  ENSG00000145794_59 (sequence is synthesized)
ggttatattttttaaaataatgaattttctatctctaggcaacatgtctttattattcaagctgaatgtttaagagagattttggtcttaaaggcttcacatcatgaaagtgtacatgca

SEQ ID NO: 396478 - DNA, 120 bp, Artificial Sequence
  ENSG00000145794_60 (sequence is synthesized)
tatgcaagtgtgaattacgtggtatggatgtttgcttgtttattaactaaagatgtacagcaaactgcccgtttagagtcctgttaatattgatgtcctaacactgggtctgcttatgct

SEQ ID NO: 396479 - DNA, 120 bp, Artificial Sequence
  ENSG00000145794_61 (sequence is synthesized)
agttcagtatttggtctaggcttcattttgatatgactgaattgcaatctatatttttaaaaagaaaaatcaaaatacattagggtttacttggttgtggcaaacaaacaaaaaatgctt

SEQ ID NO: 396480 - DNA, 120 bp, Artificial Sequence
  ENSG00000145794_62 (sequence is synthesized)
tcagtgttgaaatatctctattttccaaagatgataaactttcatcgttcttagcctacattgtcatttatatcaccaaatgagtttatagattaatgcaataaactttctaataaaaaa

SEQ ID NO: 396481 - DNA, 120 bp, Artificial Sequence
  ENSG00000145794_63 (sequence is synthesized)
agagacagtggcaacaggaagaagagaaggaacctacatgatggactggcactggataatctggccaggatggactggtgagacagatgctcctgtttatctggattaattgaattgcta

SEQ ID NO: 396482 - DNA, 120 bp, Artificial Sequence
  ENSG00000145794_64 (sequence is synthesized)
gaatttccatgtgaatggtaacatcaatatgttaatttccacaaagaagcaaggtggaaatttaatggagattgaatctatagatcaatttggggaatactgtccacttaacaatatgaa

SEQ ID NO: 396483 - DNA, 120 bp, Artificial Sequence
  ENSG00000145794_65 (sequence is synthesized)
gtcttcagattcataaacatgggatgtcaccagcaacctcttcagtagtgtctctcagccccttggaaaatgttgagagcttctttggtttctaaaggagtaaactgagatgaactgtca

SEQ ID NO: 396484 - DNA, 120 bp, Artificial Sequence
  ENSG00000145794_66 (sequence is synthesized)
atggactttattttctaccaataggagctacccacagacacgaggcctccccaaccctgtagttccatcttgacttgcaaaacctgagataacttgacttcacaataggaaattctgcct

SEQ ID NO: 396485 - DNA, 120 bp, Artificial Sequence
  ENSG00000145794_67 (sequence is synthesized)
cctttctcttggacagagctccaatgccacttttaaaaagataatgaagtgaatttttgagggctgatctttactccttgccatttggcagcccttcttcccaacagagggcaatacccc

SEQ ID NO: 396486 - DNA, 120 bp, Artificial Sequence
  ENSG00000145794_68 (sequence is synthesized)
actagccaaacatttcgtgttagaaaactccaagccttcctactggcaggcacttcccatgttggaatcgaggacgtctgattttggtagctcagagtttcccagatctaaagaggactt

SEQ ID NO: 396487 - DNA, 120 bp, Artificial Sequence
  ENSG00000145794_69 (sequence is synthesized)
gtgctgagcgctgcgactgcagccacgcagatggctgccaccctaccacgggccattgccgctgcctccccggatggtcagtctgctcccctggtttttatgggcatcgctgcagccaga

SEQ ID NO: 396488 - DNA, 120 bp, Artificial Sequence
  ENSG00000145794_70 (sequence is synthesized)
ttggtggtctgtgtttcagggcagattgttttgtaaaaaggtccttcagcatttagaatcataaaatcataggaacatttacttgagctggaagcagtgacatggaggcctcttttctca

SEQ ID NO: 396489 - DNA, 120 bp, Artificial Sequence
  ENSG00000145794_71 (sequence is synthesized)
tagcgttatcacttgacggaccataaggaagaactatgtaatgcccaattttgaatttaatgagtaaggtattagggtaatgctatcaggtattatcaggacaaatctttctgtcatgga

SEQ ID NO: 396490 - DNA, 120 bp, Artificial Sequence
  ENSG00000145794_72 (sequence is synthesized)
aaataactttgcacagaacaatatcttctgagctggtgttatcatagttggaaatctgaacagcttaagccgaaccagtactgctctccctgctgattcctaccagatcggggccattgc

SEQ ID NO: 396491 - DNA, 120 bp, Artificial Sequence
  ENSG00000145794_73 (sequence is synthesized)
acagcagcctttctctgggcatggataggccgacaacatctgacaatgaggaatgtttgctttttcttcctgctctgtttccaaattaatgttttatgaactgaaaatatgcaggcatta

SEQ ID NO: 396492 - DNA, 120 bp, Artificial Sequence
  ENSG00000145808_0 (sequence is synthesized)
ggcctcctagcgctccggggaggccgctgcgccccggagtggatcgcgctggaggcgtgcgccgggcgagaagccgcggccgcgggagcgcagtatggggaagaaccgcgagatgcgcct

SEQ ID NO: 396493 - DNA, 120 bp, Artificial Sequence
  ENSG00000145808_1 (sequence is synthesized)
gactcacatctgctgctgctgcctcctttaccagctggggttcctgtcgaatgggatcgtttcagagctgcagttcgcccccgaccgcgaggagtgggaagtcgtgtttcctgcgctctg

SEQ ID NO: 396494 - DNA, 80 bp, Artificial Sequence
  ENSG00000145808_2 (sequence is synthesized)
cccgggctgggtgcgcggcgttgggggcggcggaagcgcccgggcgcaggctgccggcagctcacgcgaggtgcgctctg

SEQ ID NO: 396495 - DNA, 120 bp, Artificial Sequence
  ENSG00000145808_3 (sequence is synthesized)
gcgctctgtggctccggtgcctttggaggagcccgtggagggccgatcagagtcccggctccggcccccgccgccgtcggagggtgaggaggacgaggagctcgagtcgcaggagctgcc

SEQ ID NO: 396496 - DNA, 120 bp, Artificial Sequence
  ENSG00000145808_4 (sequence is synthesized)
ccggcctcgtggcagccgccgcctcccccgcagccgcccccgtccccgcccccggcccagcatgccgagccggatggcgacgaagtgttgctgcggatcccggccttctctcgggacctg

SEQ ID NO: 396497 - DNA, 120 bp, Artificial Sequence
  ENSG00000145808_5 (sequence is synthesized)
cgaagtgttgctgcggatcccggccttctctcgggacctgtacctgctgctccggagagacggccgcttcctggcgccgcgcttcgcagtggaacagcggccaaatcccggccccggccc

SEQ ID NO: 396498 - DNA, 120 bp, Artificial Sequence
  ENSG00000145808_6 (sequence is synthesized)
cacgggggcagcatccgccccgcaacctcccgcgccaccagacgcaggctgcttctacaccggagctgtgctgcggcaccctggctcgctggcttctttcagcacctgtggaggtggcct

SEQ ID NO: 396499 - DNA, 120 bp, Artificial Sequence
  ENSG00000145808_7 (sequence is synthesized)
gatgggatttatacagctcaatgaggacttcatatttattgagccactcaatgatacaatggccataacaggtcacccacaccgtgtatataggcagaaaaggtccatggaggaaaaggt

SEQ ID NO: 396500 - DNA, 120 bp, Artificial Sequence
  ENSG00000145808_8 (sequence is synthesized)
cacagagaagtcagctcttcacagtcattactgtggtatcatttcagataaaggaagacctaggtctagaaaaatagcagaaagtggaagagggaaacgatattcatacaaattacctca

SEQ ID NO: 396501 - DNA, 120 bp, Artificial Sequence
  ENSG00000145808_9 (sequence is synthesized)
agaatacaacatagagactgtagtggttgcagacccagcaatggtttcctatcatggagcagatgcagccaggagattcattctaaccatcttaaatatggtatttaaccttttccaaca

SEQ ID NO: 396502 - DNA, 120 bp, Artificial Sequence
  ENSG00000145808_10 (sequence is synthesized)
caagagtctgagtgtgcaggtcaatcttcgtgtgataaagcttattctgctccatgaaactccaccagaactatatattgggcatcatggagaaaaaatgctagagagtttttgtaagtg

SEQ ID NO: 396503 - DNA, 120 bp, Artificial Sequence
  ENSG00000145808_11 (sequence is synthesized)
gcaacatgaagaatttggcaaaaagaatgatatacatttagagatgtcaacaaactggggggaagacatgacttcagtggatgcagctatacttataacaaggaaagatttctgtgtgca

SEQ ID NO: 396504 - DNA, 120 bp, Artificial Sequence
  ENSG00000145808_12 (sequence is synthesized)
caaagatgaaccatgtgatactgttggtatagcttacttgagtggaatgtgtagtgaaaagagaaaatgtattattgctgaagacaatggcttgaatcttgcttttacaattgctcatga

SEQ ID NO: 396505 - DNA, 120 bp, Artificial Sequence
  ENSG00000145808_13 (sequence is synthesized)
aatgggtcacaacatgggcattaaccatgacaatgaccacccatcgtgtgctgatggtcttcatatcatgtctggtgaatggattaaaggacagaatcttggtgacgtttcatggtctcg

SEQ ID NO: 396506 - DNA, 120 bp, Artificial Sequence
  ENSG00000145808_14 (sequence is synthesized)
atgtagcaaggaagatttggaaagatttctcaggtcaaaggccagtaactgcttgctacaaacaaatccgcagagtgtcaattctgtgatggttccctccaagctgccagggatgacata

SEQ ID NO: 396507 - DNA, 120 bp, Artificial Sequence
  ENSG00000145808_15 (sequence is synthesized)
cactgctgatgaacaatgccagatcctttttgggccattggcttctttttgtcaggagatgcagcatgttatttgcacaggattatggtgcaaggtagaaggtgagaaagaatgcagaac

SEQ ID NO: 396508 - DNA, 120 bp, Artificial Sequence
  ENSG00000145808_16 (sequence is synthesized)
caagctagacccaccaatggatggaactgactgtgaccttggtaagtggtgtaaggctggagaatgtaccagcaggacctcagcacctgaacatctggccggagagtggagcctgtggag

SEQ ID NO: 396509 - DNA, 120 bp, Artificial Sequence
  ENSG00000145808_17 (sequence is synthesized)
tccttgtagccgaacctgcagtgctgggatcagcagtcgagagcgcaaatgtcctgggctagattctgaagcaagggattgtaatggtcccagaaaacaatacagaatatgtgagaatcc

SEQ ID NO: 396510 - DNA, 120 bp, Artificial Sequence
  ENSG00000145808_18 (sequence is synthesized)
accttgtcctgcaggtttgcctggattcagagactggcaatgtcaggcttatagtgttagaacttcctccccaaagcatatacttcagtggcaagctgtcctggatgaagaaaaaccatg

SEQ ID NO: 396511 - DNA, 120 bp, Artificial Sequence
  ENSG00000145808_19 (sequence is synthesized)
tgccttgttttgctctcctgttggaaaagaacagcctattcttctatcagaaaaagtgatggatggaacttcttgtggctatcagggattagatatctgtgcaaatggcaggtgccagaa

SEQ ID NO: 396512 - DNA, 120 bp, Artificial Sequence
  ENSG00000145808_20 (sequence is synthesized)
agttggctgtgatggtttattagggtctcttgcaagagaagatcattgtggtgtatgcaatggcaatggaaaatcatgcaagatcattaaaggggattttaatcacaccagaggagcagg

SEQ ID NO: 396513 - DNA, 120 bp, Artificial Sequence
  ENSG00000145808_21 (sequence is synthesized)
tcaaagttgtggaggaaaagccggcacatagctatttagctctccgagatgctggcaaacagtctattaatagtgactggaagattgaacactctggagccttcaatttggctggaacta

SEQ ID NO: 396514 - DNA, 120 bp, Artificial Sequence
  ENSG00000145808_22 (sequence is synthesized)
ccgttcattatgtaagacgaggcctctgggagaagatctctgccaaaggtcctactacagcacctttacatcttctggtgctcctgtttcaggatcagaattatggtcttcactatgaat

SEQ ID NO: 396515 - DNA, 120 bp, Artificial Sequence
  ENSG00000145808_23 (sequence is synthesized)
acactatcccatcagaccctcttccagaaaaccagagctctaaagcacctgagcccctcttcatgtggacacacacaagctgggaagattgcgatgccacttgtggaggaggagaaagga

SEQ ID NO: 396516 - DNA, 120 bp, Artificial Sequence
  ENSG00000145808_24 (sequence is synthesized)
agacaacagtgtcctgcacaaaaatcatgagcaaaaatatcagcattgtggacaatgagaaatgcaaatacttaaccaagccagagccacagattcgaaagtgcaatgagcaaccatgtc

SEQ ID NO: 396517 - DNA, 120 bp, Artificial Sequence
  ENSG00000145808_25 (sequence is synthesized)
aaacaaggtggatgatgacagaatggaccccttgttcacgaacttgtggaaaaggaatgcagagcagacaagtggcctgtacccaacaactgagcaatggaacactgattagagcccgag

SEQ ID NO: 396518 - DNA, 120 bp, Artificial Sequence
  ENSG00000145808_26 (sequence is synthesized)
agagggactgcattgggcccaagcccgcctctgcccagcgctgtgagggccaggactgcatgaccgtgtgggaggcgggagtgtggtctgagtgttcagtcaagtgtggcaaaggcatac

SEQ ID NO: 396519 - DNA, 120 bp, Artificial Sequence
  ENSG00000145808_27 (sequence is synthesized)
gtcatcggaccgttagatgtaccaacccaagaaagaagtgtgtcctctctaccagacccagggaggctgaagactgtgaggattattcaaaatgctatgtgtggcgaatgggtgactggt

SEQ ID NO: 396520 - DNA, 120 bp, Artificial Sequence
  ENSG00000145808_28 (sequence is synthesized)
ctaagtgctcaattacctgtggcaaaggaatgcagtcccgtgtaatccaatgcatgcataagatcacaggaagacatggaaatgaatgtttttcctcagaaaaacctgcagcatacaggc

SEQ ID NO: 396521 - DNA, 120 bp, Artificial Sequence
  ENSG00000145808_29 (sequence is synthesized)
catgccatcttcaaccctgcaatgagaaaattaatgtaaataccataacatcacccagactggctgctctgactttcaagtgcctgggagatcagtggccagtgtactgccgagtgatac

SEQ ID NO: 396522 - DNA, 120 bp, Artificial Sequence
  ENSG00000145808_30 (sequence is synthesized)
gtgaaaagaacctatgtcaggacatgcggtggtatcagcgctgctgtgaaacatgcagggacttctatgcccaaaagctgcagcagaagagttgacctctagcaggctggctggatcaca

SEQ ID NO: 396523 - DNA, 120 bp, Artificial Sequence
  ENSG00000145808_31 (sequence is synthesized)
gctcttggcaattacattatttataaacacacacactagcatgtttttcagaccaaatattatcagattacatataatttaatcaaattaatttatttttttgcctgccaaacatccaat

SEQ ID NO: 396524 - DNA, 120 bp, Artificial Sequence
  ENSG00000145808_32 (sequence is synthesized)
gtggtgcttgttttggttacacaaacattttgatttatactatatggcttcataaataattttatatgaatgaattagttggatccagtaatataataaaaagaaaaaggaaaaaaatag

SEQ ID NO: 396525 - DNA, 120 bp, Artificial Sequence
  ENSG00000145808_33 (sequence is synthesized)
atcattatacttaaaacaagttttcgttgtttgttagggctatctctaaggtgctactctctccccaccaataacattgaattatccagaatgtatactgacttagcataatagtttagg

SEQ ID NO: 396526 - DNA, 120 bp, Artificial Sequence
  ENSG00000145808_34 (sequence is synthesized)
tgtatatgaagagaaactatttttgttttttggtgtcctgctgcagaattagcccattttctgtcacctgcaggagatgtgtaaacataatgaacctcatgctgttgaacaggtttttag

SEQ ID NO: 396527 - DNA, 120 bp, Artificial Sequence
  ENSG00000145808_35 (sequence is synthesized)
agaatgtattatgaatttggttcagatttatagacatccataggaaaaattctgctgtaattataaccttattttgatatggaaaagaaaagtcaaaatagagactttgatcatgttcat

SEQ ID NO: 396528 - DNA, 120 bp, Artificial Sequence
  ENSG00000145808_36 (sequence is synthesized)
gaacatgtacttgaacacaagtattgtaacaatgaaacactgtaatgatttacactgaatcacaattgcactgttgatatagtgtagagaaatcgttagaaatggtgacatcttacaaaa

SEQ ID NO: 396529 - DNA, 120 bp, Artificial Sequence
  ENSG00000145808_37 (sequence is synthesized)
aatgtgtattattttaacatgttatcactagattttagctttttttaaatatttttaacaaagaaaacattgatccacccatttccctgtatctttttagcagatttattaaagagtata

SEQ ID NO: 396530 - DNA, 120 bp, Artificial Sequence
  ENSG00000145808_38 (sequence is synthesized)
gtacttagcctcacgaatcataattagaaaatttactagtatttctcagccttttccctaggaacaaggaaaaacagaaagcatataatacggtggtcgtttcattgtgtttttcttcct

SEQ ID NO: 396531 - DNA, 120 bp, Artificial Sequence
  ENSG00000145808_39 (sequence is synthesized)
tttaaaaattaaaaagttttacaattatgtgaaacgttcaaaagccagcttaaaatttttcttgtgagaaaatattatacatgattcacatgatttcttagatttttcaataaaatatgt

SEQ ID NO: 396532 - DNA, 120 bp, Artificial Sequence
  ENSG00000145808_40 (sequence is synthesized)
aaaacttcccactgagagacaattcttcatagacttgtcacatatccacatgtctgatgaacaaaggtactgtctacttttgttctggagtatcttctagaggatgtttatagagtgaac

SEQ ID NO: 396533 - DNA, 120 bp, Artificial Sequence
  ENSG00000145808_41 (sequence is synthesized)
tgccttggaagatagtatgtctcttgggagcaaagggcaaacatacttctcattataaaagtttcaggttccctaaaattggggtttctttactataagacaatccaatgtatgttctga

SEQ ID NO: 396534 - DNA, 120 bp, Artificial Sequence
  ENSG00000145808_42 (sequence is synthesized)
ggtcacctggctctcttcatgtcaccctttgggaaatggggctcaacgagccagtacaggaaaagctgattccctggctactactatcgctgtgagtaataaagtcctttgtgtctaatg

SEQ ID NO: 396535 - DNA, 120 bp, Artificial Sequence
  ENSG00000145808_43 (sequence is synthesized)
aggaagacatgtgtatttaaccttttccaacacaagagtctgagtgtgcaggtcaatcttcgtgtgataaagcttattctgctccatgaaactccaccagaactatatattgggcatcat

SEQ ID NO: 396536 - DNA, 120 bp, Artificial Sequence
  ENSG00000145808_44 (sequence is synthesized)
aaataaagtggatggacagaatttcaaggatcgcatcatttctgacttcatatcatcgattttatagccagaaagagctttctaatctttcagcatattcatgaattaaatgagagagaa

SEQ ID NO: 396537 - DNA, 120 bp, Artificial Sequence
  ENSG00000145817_0 (sequence is synthesized)
ggaagccgttctttggccctgtgacacgtagcaacggggctggttcagggtctgaaacagagtttgggggttgtttgggattagtgaagctactgcctttgccgccagcgcagcctcaga

SEQ ID NO: 396538 - DNA, 120 bp, Artificial Sequence
  ENSG00000145817_1 (sequence is synthesized)
gtttgattatttgcaatgtcaggctttgaaaacttaaacacggatttctaccagacaagttacagcatcgatgatcagtcacagcagtcctatgattatggaggaagtggaggaccctat

SEQ ID NO: 396539 - DNA, 120 bp, Artificial Sequence
  ENSG00000145817_2 (sequence is synthesized)
agcaaacagtatgctggctatgactattcgcagcaaggcagatttgtccctccagacatgatgcagccacaacagccatacaccgggcagatttaccagccaactcaggcatatactcca

SEQ ID NO: 396540 - DNA, 120 bp, Artificial Sequence
  ENSG00000145817_3 (sequence is synthesized)
gcttcacctcagcctttctatggaaacaactttgaggatgagccacctttattagaagagttaggtatcaattttgaccacatctggcaaaaaacactaacagtattacatccgttaaaa

SEQ ID NO: 396541 - DNA, 120 bp, Artificial Sequence
  ENSG00000145817_4 (sequence is synthesized)
gtagcagatggcagcatcatgaatgaaactgatttggcaggtccaatggttttttgccttgcttttggagccacattgctactggctggcaaaatccagtttggctatgtatacgggatc

SEQ ID NO: 396542 - DNA, 120 bp, Artificial Sequence
  ENSG00000145817_5 (sequence is synthesized)
agtgcaattggatgtctaggaatgttttgtttattaaacttaatgagtatgacaggtgtttcatttggttgtgtggcaagtgtccttggatattgtcttctgcccatgatcctactttcc

SEQ ID NO: 396543 - DNA, 120 bp, Artificial Sequence
  ENSG00000145817_6 (sequence is synthesized)
agctttgcagtgatattttctttgcaaggaatggtaggaatcattctcactgctgggattattggatggtgtagtttttctgcttccaaaatatttatttctgcattagccatggaagga

SEQ ID NO: 396544 - DNA, 120 bp, Artificial Sequence
  ENSG00000145817_7 (sequence is synthesized)
cagcaacttttagtagcatatccttgcgctttgttatatggagtctttgccctgatttccgtcttttgaaaatttatctgggatgtggacatcagtgggccagatgtacaaaaaggacct

SEQ ID NO: 396545 - DNA, 120 bp, Artificial Sequence
  ENSG00000145817_8 (sequence is synthesized)
tgaactcttaaattggaccagcaaactgctgcagcgcaactctcatgcagatttacatttgactgttggagcaatgaaagtaaacgtgtatctcttgttcatttttatagaacttttgca

SEQ ID NO: 396546 - DNA, 120 bp, Artificial Sequence
  ENSG00000145817_9 (sequence is synthesized)
tactatattggatttacctgcggtgtgactagctttaaatgtttgtgtttatacagataagaaatgctatttctttctggttcctgcagccattgaaaaacctttttccttgcaaattat

SEQ ID NO: 396547 - DNA, 120 bp, Artificial Sequence
  ENSG00000145817_10 (sequence is synthesized)
aatgtttttgatagatttttatcaactgtgggaaaccaaacacaaagctgataacctttcttaaaaacgacccagtcacagtaaagaagacacaagacggccgggcgtggtagctcacgc

SEQ ID NO: 396548 - DNA, 120 bp, Artificial Sequence
  ENSG00000145817_11 (sequence is synthesized)
aaaaaaaaaaaaaaaggagacacaagacttactgcaaaaatatttttccaaggatttaggaaagaaaaattgccttgtattctcaagtcaggtaactcaaagcaaaaaagtgatccaaat

SEQ ID NO: 396549 - DNA, 120 bp, Artificial Sequence
  ENSG00000145817_12 (sequence is synthesized)
gtagagtatgagtttgcactccaaaaatttgacattactgtaaattatctcatggaatttttgctaaaattcagagatacgggaagttcacaatctaccttattgtagacatgaaatgcg

SEQ ID NO: 396550 - DNA, 120 bp, Artificial Sequence
  ENSG00000145817_13 (sequence is synthesized)
aacacttacttacatattaatgttaactcaaccttagggacctggaatggttgcattaatgctataatcgttggatcgccacatttcccaaaaataataaaaaaatcactaacctttttt

SEQ ID NO: 396551 - DNA, 120 bp, Artificial Sequence
  ENSG00000145817_14 (sequence is synthesized)
aaggaaaatatttaaagttttacaaaattcaatattgcaattatcaatgtaaagtacatttgaatgcttattaaaactttcccaattaattttaactgtgttattgaatttacttttact

SEQ ID NO: 396552 - DNA, 120 bp, Artificial Sequence
  ENSG00000145817_15 (sequence is synthesized)
aaactactgttctctttgtctcttttttaactaggctctgattttgacccctaatttaagctttaagaatagaaatcagctaatatagaatcagacaaaaaggggattaaatgagcagtt

SEQ ID NO: 396553 - DNA, 120 bp, Artificial Sequence
  ENSG00000145817_16 (sequence is synthesized)
tgagttacattattttattgtattaaatttatttgatttatattgtcatgttctcttgccagagagaatctgtaggaaaatactgtatcttgtatactgatcattggctttttctagaaa

SEQ ID NO: 396554 - DNA, 120 bp, Artificial Sequence
  ENSG00000145817_17 (sequence is synthesized)
aactgtctctgattctggacaaagctcagttatagttacgagaaagatatggtacagggaggaaaatactgccttttttttttttttaaagagattttcagactaaatagaaatgtcaaa

SEQ ID NO: 396555 - DNA, 120 bp, Artificial Sequence
  ENSG00000145817_18 (sequence is synthesized)
atgatgtatcaatggttcttttttagaacaagttttcaaagcataaaaagaggttgagagaaataacatatttattgattcacataagtatgtttttcttcattaatcgtctggagaaac

SEQ ID NO: 396556 - DNA, 120 bp, Artificial Sequence
  ENSG00000145817_19 (sequence is synthesized)
ccacttgtcattaatttgttttgggctaggttttcaaacttaccaaattgctttaaaaaagcaatttggaaggtaatttgataggctttccaacttaaccaaattttttattgtaattct

SEQ ID NO: 396557 - DNA, 120 bp, Artificial Sequence
  ENSG00000145817_20 (sequence is synthesized)
tggatagtatttttgtctttttcaattcatttgtctttttcagtatagtttttgttaaggcaaatgtcttcccttaatatccaaatattgctaataaacggtagaagatgctttggaaat

SEQ ID NO: 396558 - DNA, 120 bp, Artificial Sequence
  ENSG00000145817_21 (sequence is synthesized)
taaaattatctcgctgttggttagacttaacactgttaatcttcagccaaatatcacatatggatcaaattattttcttttttgttgtttaccctatcctcaacaacatttttagtttaa

SEQ ID NO: 396559 - DNA, 120 bp, Artificial Sequence
  ENSG00000145817_22 (sequence is synthesized)
attattgtagagattttttttgtggtggttattttttattttgctccaaaataataaggtgcaaagctattttatgcttaactgttgctctgtcaaaacagctatgcagtggagttgcat

SEQ ID NO: 396560 - DNA, 120 bp, Artificial Sequence
  ENSG00000145817_23 (sequence is synthesized)
ttgatgttctagagtttgattacatgcagagttgtatatagccaaaacttctcttatcaaactctgttatgtaggcatatttatatatacattaaagactgttgtactgtgtctcaaaaa

SEQ ID NO: 396561 - DNA, 120 bp, Artificial Sequence
  ENSG00000145817_24 (sequence is synthesized)
agcaacggggctggttcagggtctgaaacagagtttgggggttgtttgggattagtgaagctactgcctttgccgccagcgcagcctcagagtttggtgagtgacccaggcccgtggcac

SEQ ID NO: 396562 - DNA, 120 bp, Artificial Sequence
  ENSG00000145817_25 (sequence is synthesized)
agtgttcagcttctctccacacccgtgcaaatgggcttgttgccgtctttcggcgccgcgccctggtcctttcgctcagaccctcgctctcattcaagcccttgccctgacgcggtcccc

SEQ ID NO: 396563 - DNA, 120 bp, Artificial Sequence
  ENSG00000145817_26 (sequence is synthesized)
ttcatttcaaccttcagggtgcaattaaagaacagcctttaaattttaaatgttctaccaaaagccattttgaaactccgctttacacctcaagtctttgatgtgtttggaatagtactg

SEQ ID NO: 396564 - DNA, 120 bp, Artificial Sequence
  ENSG00000145817_27 (sequence is synthesized)
agttgcttgtatttatacctattcattagttctccatctatagtaagtgtagcatgttttaaaaatcatttctttttctaagaaatgattaaattattaggggaaaaaacaaaaaaaaaa

SEQ ID NO: 396565 - DNA, 120 bp, Artificial Sequence
  ENSG00000145819_0 (sequence is synthesized)
agacaccggcggggcggccgaggctgctgtgagagggcgctcgaggctgccgagagctagctagcgaaggaggcggggaggcggcgtctgcactcgctcgcccgctcgctcgcttcccgg

SEQ ID NO: 396566 - DNA, 120 bp, Artificial Sequence
  ENSG00000145819_1 (sequence is synthesized)
cgccgctgcgggtccgcgctgcgtttcctgctcgcgatccgctccgttgcccgcgcccggaacagcagcacctcggccgggtccgagctcggttcgggagtcttgcgcgccggcggacac

SEQ ID NO: 396567 - DNA, 120 bp, Artificial Sequence
  ENSG00000145819_2 (sequence is synthesized)
gagctcggttcgggagtcttgcgcgccggcggacaccgcgcgcggagtgagccagcgccacacctgtggagccggcggccgtcgggggagccggccggggtcccgccgcgtgagtgctct

SEQ ID NO: 396568 - DNA, 120 bp, Artificial Sequence
  ENSG00000145819_3 (sequence is synthesized)
cccccggctgggcgccgcgcgcaccatggggctcccagcgctcgagttcagcgactgctgcctcgatagtccgcacttccgagagacgctcaagtcgcacgaagcagagctggacaagac

SEQ ID NO: 396569 - DNA, 120 bp, Artificial Sequence
  ENSG00000145819_4 (sequence is synthesized)
caacaaattcatcaaggagctcatcaaggacgggaagtcactcataagcgcgctcaagaatttgtcttcagcgaagcggaagtttgcagattccttaaatgaatttaaatttcagtgcat

SEQ ID NO: 396570 - DNA, 120 bp, Artificial Sequence
  ENSG00000145819_5 (sequence is synthesized)
aggagatgcagaaacagatgatgagatgtgtatagcaagatctttgcaggagtttgccactgtcctcaggaatcttgaagatgaacggatacggatgattgagaatgccagcgaggtgct

SEQ ID NO: 396571 - DNA, 120 bp, Artificial Sequence
  ENSG00000145819_6 (sequence is synthesized)
catcactcccttggagaagtttcgaaaggaacagatcggggctgccaaggaagccaaaaagaagtatgacaaagagacagaaaagtattgtggcatcttagaaaaacacttgaatttgtc

SEQ ID NO: 396572 - DNA, 120 bp, Artificial Sequence
  ENSG00000145819_7 (sequence is synthesized)
ttccaaaaagaaagaatctcagcttcaggaggcagacagccaagtggacctggtccggcagcatttctatgaagtatccctggaatatgtcttcaaggtgcaggaagtccaagagagaaa

SEQ ID NO: 396573 - DNA, 120 bp, Artificial Sequence
  ENSG00000145819_8 (sequence is synthesized)
gatgtttgagtttgtggagcctctgctggccttcctgcaaggactcttcactttctatcaccatggttacgaactggccaaggatttcggggacttcaagacacagttaaccattagcat

SEQ ID NO: 396574 - DNA, 120 bp, Artificial Sequence
  ENSG00000145819_9 (sequence is synthesized)
acagaacacaagaaatcgctttgaaggcactagatcagaagtggaatcactgatgaaaaagatgaaggagaatccccttgagcacaagaccatcagtccctacaccatggagggatacct

SEQ ID NO: 396575 - DNA, 120 bp, Artificial Sequence
  ENSG00000145819_10 (sequence is synthesized)
ctacgtgcaggagaaacgtcactttggaacttcttgggtgaagcactactgtacatatcaacgggattccaaacaaatcaccatggtaccatttgaccaaaagtcaggaggaaaaggggg

SEQ ID NO: 396576 - DNA, 120 bp, Artificial Sequence
  ENSG00000145819_11 (sequence is synthesized)
agaagatgaatcagttatcctcaaatcctgcacacggcggaaaacagactccattgagaagaggttttgctttgatgtggaagcagtagacaggccaggggttatcaccatgcaagcttt

SEQ ID NO: 396577 - DNA, 120 bp, Artificial Sequence
  ENSG00000145819_12 (sequence is synthesized)
gtcggaagaggaccggaggctctggatggaagccatggatggccgggaacctgtctacaactcgaacaaagacagccagagtgaagggactgcgcagttggacagcattggcttcagcat

SEQ ID NO: 396578 - DNA, 120 bp, Artificial Sequence
  ENSG00000145819_13 (sequence is synthesized)
aatcaggaaatgcatccatgctgtggaaaccagagggatcaacgagcaagggctgtatcgaattgtgggtgtcaactccagagtgcagaagttgctgagtgtcctgatggaccccaagac

SEQ ID NO: 396579 - DNA, 120 bp, Artificial Sequence
  ENSG00000145819_14 (sequence is synthesized)
tgcttctgagacagaaacagatatctgtgctgaatgggagataaagaccatcactagtgctctgaagacctacctaagaatgcttccaggaccactcatgatgtaccagtttcaaagaag

SEQ ID NO: 396580 - DNA, 120 bp, Artificial Sequence
  ENSG00000145819_15 (sequence is synthesized)
tttcatcaaagcagcaaaactggagaaccaggagtctcgggtctctgaaatccacagccttgttcatcggctcccagagaaaaatcggcagatgttacagctgctcatgaaccacttggc

SEQ ID NO: 396581 - DNA, 120 bp, Artificial Sequence
  ENSG00000145819_16 (sequence is synthesized)
aaatgttgctaacaaccacaagcagaatttgatgacggtggcaaaccttggtgtggtgtttggacccactctgctgaggcctcaggaagaaacagtagcagccatcatggacatcaaatt

SEQ ID NO: 396582 - DNA, 120 bp, Artificial Sequence
  ENSG00000145819_17 (sequence is synthesized)
tcagaacattgtcattgagatcctaatagaaaaccacgaaaagatatttaacaccgtgcccgatatgcctctcaccaatgcccagctgcacctgtctcggaagaagagcagtgactccaa

SEQ ID NO: 396583 - DNA, 120 bp, Artificial Sequence
  ENSG00000145819_18 (sequence is synthesized)
gcccccgtcctgcagcgagaggcccctgacgctcttccacaccgttcagtcaacagagaaacaggaacaaaggaacagcatcatcaactccagtttggaatctgtctcatcaaatccaaa

SEQ ID NO: 396584 - DNA, 120 bp, Artificial Sequence
  ENSG00000145819_19 (sequence is synthesized)
cagcatccttaattccagcagcagcttacagcccaacatgaactccagtgacccagacctggctgtggtcaaacccacccggcccaactcactccccccgaatccaagcccaacttcacc

SEQ ID NO: 396585 - DNA, 120 bp, Artificial Sequence
  ENSG00000145819_20 (sequence is synthesized)
cctctcgccatcttggcccatgttctcggcgccatccagccctatgcccacctcatccacgtccagcgactcatcccccgtcaggtctgttgcagggtttgtttggttttctgttgctgc

SEQ ID NO: 396586 - DNA, 120 bp, Artificial Sequence
  ENSG00000145819_21 (sequence is synthesized)
cgttgttctctcattggctcggtcctctcttcatgcagtgttcagcctcctcgtcaactttgttccctgccatccaaacctgcacttgctttttgacaggccagaagaagcggtacatga

SEQ ID NO: 396587 - DNA, 120 bp, Artificial Sequence
  ENSG00000145819_22 (sequence is synthesized)
agactccagcacaccgttccggaaggcaaaagccttgtatgcctgcaaagctgaacatgactcagaactttcgttcacagcaggcacggtcttcgataacgttcacccatctcaggagcc

SEQ ID NO: 396588 - DNA, 120 bp, Artificial Sequence
  ENSG00000145819_23 (sequence is synthesized)
tggctggttggaggggactctgaacggaaagactggcctcatccctgagaattacgtggagttcctctaaccgtgggccccagcagaactgctgagctttacatggtatccatgacaact

SEQ ID NO: 396589 - DNA, 120 bp, Artificial Sequence
  ENSG00000145819_24 (sequence is synthesized)
gctgattccagtgtcgaggccatttctctttgccactgagaaatgcagcgtgactgactctgttgctacctgtcaacatgaatgtttctgtgagctctggtgtcactcatctccatgatc

SEQ ID NO: 396590 - DNA, 120 bp, Artificial Sequence
  ENSG00000145819_25 (sequence is synthesized)
atctcagccaacatgcatcagtactgcaagaaaagaagtcaatcagcagaggagagcatttgataactaagaggaagacttgcaaagccgttttctcatgagtaccctgaatagggggca

SEQ ID NO: 396591 - DNA, 120 bp, Artificial Sequence
  ENSG00000145819_26 (sequence is synthesized)
ctcattttgtttcaacggtccaaacgcccaaccttcagaaagaggaagtcagatagaaatagtccctgagagcacactgtgtagctaagcctgctggggctgggtgaagaaattggcgct

SEQ ID NO: 396592 - DNA, 120 bp, Artificial Sequence
  ENSG00000145819_27 (sequence is synthesized)
gagatccaggctggatccattgcttttgtttacaataggcactctctctaccccacctctcagtacttgagacttaaagtgctacaggcagctggatctgtttgcatgcaggatgaagag

SEQ ID NO: 396593 - DNA, 120 bp, Artificial Sequence
  ENSG00000145819_28 (sequence is synthesized)
ggttaaaacactgtttatataagatccaatctctcaccatctctaaagcagccgttggcctgtcatcagtgagatacaatccagtcttctcatgcacgggaacacacacaccctgcgttt

SEQ ID NO: 396594 - DNA, 120 bp, Artificial Sequence
  ENSG00000145819_29 (sequence is synthesized)
ctccctcccaggctaggaacctctctgccaccaagggctgccatccatcgcctagtaaccacggcaacccaacctactctaaaaccaaaccaaaaaaataaaataacacatcctctttgc

SEQ ID NO: 396595 - DNA, 120 bp, Artificial Sequence
  ENSG00000145819_30 (sequence is synthesized)
atgacacattttttttctcccctttttggtacactttttttgaatggttttctaacaacttgaagcacaggatcaaggaattagggtggtctacttgaggcagatgggatagtagctggg

SEQ ID NO: 396596 - DNA, 120 bp, Artificial Sequence
  ENSG00000145819_31 (sequence is synthesized)
aactgttccctttctgattaatttcagcagcatcggaatatatttggagcacaccctagtaacctcttgagattaaattacatagtcttaatatttctgttcctccatgcaactgatgtt

SEQ ID NO: 396597 - DNA, 120 bp, Artificial Sequence
  ENSG00000145819_32 (sequence is synthesized)
tgttttttaaagggtaagatgctgcctcccaatgggtgatgccatctgactggtttccccatgtcctcccattcacccatctctgctcccacccttgcctgcctctaacccaccactggc

SEQ ID NO: 396598 - DNA, 120 bp, Artificial Sequence
  ENSG00000145819_33 (sequence is synthesized)
cagcccccttgccctactctgggctgctgaacactggtgctgtggtggttttcaaggttaattcctaggctaaccgtatggcctatagtttaaaagcacatctatgttcactgccactct

SEQ ID NO: 396599 - DNA, 120 bp, Artificial Sequence
  ENSG00000145819_34 (sequence is synthesized)
gaaaaagggaattatttctcagtctttcaaggcttgagactaatataggccattgtgattcaggaagaaacccaaggttggagggtgggatgagtaccctctgaaaaagggaatttgctg

SEQ ID NO: 396600 - DNA, 120 bp, Artificial Sequence
  ENSG00000145819_35 (sequence is synthesized)
gtgaaaagaggctggatcttgtggaagactgtcttggatggggaagtactacctggagatttcaaattcacttggcctgcaaacaacagagttatccgtatcttccacatgtgaatgtca

SEQ ID NO: 396601 - DNA, 120 bp, Artificial Sequence
  ENSG00000145819_36 (sequence is synthesized)
ttgcaagggtgactctagacaaactacaaaccgatggaccgtcaagctccccaggagccccttggatggcagcgttgcttcagagtgtttcctgtttctggaattccttgttagggaact

SEQ ID NO: 396602 - DNA, 120 bp, Artificial Sequence
  ENSG00000145819_37 (sequence is synthesized)
ttaaagaagaaaagaaaaacttgaattgtgttgaattactgtatcttttacttttttttttttgaaaagataaacttgtaaatagagtgatttgaaatactatatggcaaagttttatat

SEQ ID NO: 396603 - DNA, 120 bp, Artificial Sequence
  ENSG00000145819_38 (sequence is synthesized)
ttgatattctttaagttagttgctcacacacttaggctttgattgctgaagaagtatgtttaagagggagagaggggaggcaaagctgaagagagtcaaggtcactgtccccgcttcggc

SEQ ID NO: 396604 - DNA, 120 bp, Artificial Sequence
  ENSG00000145819_39 (sequence is synthesized)
ctctgctgtcctgttggtgggcacgacacatcagtggtgttcagtctttatgtgtttttaagcatcccttgggctttggatttggagatgggaagagcatctccaggcaatgagtttttc

SEQ ID NO: 396605 - DNA, 120 bp, Artificial Sequence
  ENSG00000145819_40 (sequence is synthesized)
aaagaatgcctacttagtagtaagatgaagctcaggatttaaataagtggggtcaggcattcgagtttttgtctttcttctcaggtgtatttcttggtacccccaagatatcaggccaga

SEQ ID NO: 396606 - DNA, 120 bp, Artificial Sequence
  ENSG00000145819_41 (sequence is synthesized)
aagagatgagtcagttgctgtgctctttacttctttttctccacatcttctgaggctttagaaatgtggacaagctagttttcaaattttgtgtgcgtctgtaagttcttaaagaaccag

SEQ ID NO: 396607 - DNA, 120 bp, Artificial Sequence
  ENSG00000145819_42 (sequence is synthesized)
cttcttagaatgttcagttctcaatgtgctgctgctttcccttctcctaaacattttaaaactcttccctttcacctccaattcccgtgatcccaaaagaagaggaagactccaggaggg

SEQ ID NO: 396608 - DNA, 120 bp, Artificial Sequence
  ENSG00000145819_43 (sequence is synthesized)
gtatagattgtgccgtcatagctttacaggtggttttaaagttaacaggggtttgtcatggtgattcactactcagtttatcagctcaaggattatacagctcttttccgggaactcacc

SEQ ID NO: 396609 - DNA, 120 bp, Artificial Sequence
  ENSG00000145819_44 (sequence is synthesized)
caggagcaagcgagacactaccattgaatcagggaatgagaattaagaatggacaggaccaagacagaactcaagaaagccactggggaaaactcgagaagaaagggagtatactagtag

SEQ ID NO: 396610 - DNA, 120 bp, Artificial Sequence
  ENSG00000145819_45 (sequence is synthesized)
gttagatctgtgaacctgaggacaagaagaccttgggaaatggaggcctcaggggatgtgcattcacatactattacgcttctcaaagagagaccaacatcatgcttttaacacatttga

SEQ ID NO: 396611 - DNA, 60 bp, Artificial Sequence
  ENSG00000145819_46 (sequence is synthesized)
tctcaaagagagaccaacatcatgcttttaacacatttgatgaggttttttatttgtgtt

SEQ ID NO: 396612 - DNA, 120 bp, Artificial Sequence
  ENSG00000145819_47 (sequence is synthesized)
caaagtgctgggattccaggtgtgagccgctgcggccgaccacatttgatgtttgaagttgtaatctgtcccatcataaacttacctggagctcatgtggaggaacagaaggccaagatc

SEQ ID NO: 396613 - DNA, 120 bp, Artificial Sequence
  ENSG00000145819_48 (sequence is synthesized)
cctggagctcatgtggaggaacagaaggccaagatccttgctttgggggtgcctcacgaagcatccctgtagacatttggccccagcttcactgcttggaagcatgtccctccctcttga

SEQ ID NO: 396614 - DNA, 120 bp, Artificial Sequence
  ENSG00000145819_49 (sequence is synthesized)
gttggctctgatttgaaatcgggagaaacagagctgctgccaatgggatcttttaggtaactccctccctagcttccgtgtgtctgtgcagtgcccatgagctgctgccaatgggatctt

SEQ ID NO: 396615 - DNA, 120 bp, Artificial Sequence
  ENSG00000145819_50 (sequence is synthesized)
tcaggtaccccctccccagcttccctgtggctgtgcggtgcccttgacagatggcttctctgtttccctttgcccagccaggctcccctccttcctattagctacaaaactggataaact

SEQ ID NO: 396616 - DNA, 120 bp, Artificial Sequence
  ENSG00000145819_51 (sequence is synthesized)
tcagaatatgagccaatgagtaggaaggaacttgaagactaaagattttactctctcccctatccatgccccctacctctgactctctctgtgtgaacaggaaactttagggcagatgag

SEQ ID NO: 396617 - DNA, 120 bp, Artificial Sequence
  ENSG00000145819_52 (sequence is synthesized)
gagaatgaattggttatcagagtggaagaccatggcccaggatccctgagctttcccagtagcctccagtttcctttgtaagacccagggatcacttagccatagcctgaatcttttagg

SEQ ID NO: 396618 - DNA, 120 bp, Artificial Sequence
  ENSG00000145819_53 (sequence is synthesized)
cacttagccatagcctgaatcttttaggggtattaaggtcagcctctcactcttccttcaggttactaacaaaatttcgtagctaaagaatgccatggccgggtgcagtggctcacgcct

SEQ ID NO: 396619 - DNA, 120 bp, Artificial Sequence
  ENSG00000145819_54 (sequence is synthesized)
aaaaaaaaaaaaaaagaatgccatgccaggagaagacagctggtttcaaatccctgcccccaggcaagtaaaaccctgacttgctcaagacagaagatcttttctcctgtttttcaaaat

SEQ ID NO: 396620 - DNA, 120 bp, Artificial Sequence
  ENSG00000145819_55 (sequence is synthesized)
aaacatatatagggatggaccctgtgcattgtggcctgccttggtgtcctagaattggagccagtctttagcttaatgtctgaagtatttatacggccaatatgtgttttcttatgtcag

SEQ ID NO: 396621 - DNA, 120 bp, Artificial Sequence
  ENSG00000145819_56 (sequence is synthesized)
accacactgtctttttgaatatcagttcatttcctctcaccgagtgcttttcggtgagaggcaaagagaaagaatgaacaatcaagtattgacagactggcattagcaggacagagccat

SEQ ID NO: 396622 - DNA, 120 bp, Artificial Sequence
  ENSG00000145819_57 (sequence is synthesized)
actagtgacaagggcatcccaaggcacttgcccagagctgcagagttgtgtgtgccatacctgcggctcaaagggaaggccttctatcccctgagtttctatcagctgaaaatggcaact

SEQ ID NO: 396623 - DNA, 120 bp, Artificial Sequence
  ENSG00000145819_58 (sequence is synthesized)
gctgtctcagtaaaagctctgtcttgactgcagaggctccaaaagcattcacagttgagggggagaaagacagaaagaagaagccaaagataacctgatccctgcctgtctgttggcacc

SEQ ID NO: 396624 - DNA, 120 bp, Artificial Sequence
  ENSG00000145819_59 (sequence is synthesized)
tgtcatcctctggcttctgctcccaaaagcaagtctggatgactgagttttgtggacatggcactcccggagacagcagtggccaccatggcacccagagtttgcccaagtactgaatgt

SEQ ID NO: 396625 - DNA, 120 bp, Artificial Sequence
  ENSG00000145819_60 (sequence is synthesized)
tttgtgagcaaccatgttccccaagtaggtagccagcgctgcagaaaccaaacagcctcttagctacctgactttaaaaggaatgacctaggtgttctgccaaaggagttatctatcatc

SEQ ID NO: 396626 - DNA, 120 bp, Artificial Sequence
  ENSG00000145819_61 (sequence is synthesized)
tctggcaaacttgacaatcatcacttacctcgacaaccctgccccacatcactttataaagtcagcaggatgtcttctcacccaccctgtgctggtgtctaacaaatttatcttgtcatg

SEQ ID NO: 396627 - DNA, 120 bp, Artificial Sequence
  ENSG00000145819_62 (sequence is synthesized)
ctcaaatgtgtttggcagccacaccgatcggctgggtgctgaaccgcctctctgtaattgtagcatcaaaatgacaacagcagcagagcagcgaatcttgcacagccccacagcatgcct

SEQ ID NO: 396628 - DNA, 120 bp, Artificial Sequence
  ENSG00000145819_63 (sequence is synthesized)
gagacaagactccaacaagtaataattagctttttttctcctgccgcctacagtacctgtctaactaaagagcttcccaaagtggagggaaaggccatagaatccaggtgtcattcagag

SEQ ID NO: 396629 - DNA, 120 bp, Artificial Sequence
  ENSG00000145819_64 (sequence is synthesized)
ccagtccttgctgaaatgtggtcttccagtggaagcacctgtattattgagaggaaaaagtgttggatgcaaagtaacaccaggactagagagaaagagaaaggtgaaccatcctaagga

SEQ ID NO: 396630 - DNA, 120 bp, Artificial Sequence
  ENSG00000145819_65 (sequence is synthesized)
gctttggatacttttttagaaggataaatattatgcttactgaggagaaaaaaaaaagcgatcacagaaaaatttcacagctaatatttttacaaaagttgtgccagacattacagagtg

SEQ ID NO: 396631 - DNA, 120 bp, Artificial Sequence
  ENSG00000145819_66 (sequence is synthesized)
aaaacgtctctcaaggtggaatgctttagagagcaaaggcttagcatagacctagacccttgtgtgggtatgacatgacatgacatgtccatgtcaaaattcactttagtcagaaccaga

SEQ ID NO: 396632 - DNA, 120 bp, Artificial Sequence
  ENSG00000145819_67 (sequence is synthesized)
gtattgataaacaaaatgtcagttacctggagcagtcctggagaggttaagacattctatactgttctacgtcaaccatttctacaaagttgtccagacacctaaaagcagctttcttgg

SEQ ID NO: 396633 - DNA, 120 bp, Artificial Sequence
  ENSG00000145819_68 (sequence is synthesized)
ttatccagatgccagaatcaaccttgtatctgacaatgcacatctgttgattctaaagtatatttatgtgtgtgtgtatgtgtgtgtatacagcacatatttacatctatgaagacatag

SEQ ID NO: 396634 - DNA, 120 bp, Artificial Sequence
  ENSG00000145819_69 (sequence is synthesized)
acacttacagagacccacatgagctggcactttctgagcctttacagcctttaagactcggaggttgagaattagagacacaagagaggctgtggatggcctattaaaatgattaaagat

SEQ ID NO: 396635 - DNA, 120 bp, Artificial Sequence
  ENSG00000145819_70 (sequence is synthesized)
gtaaattcagtgccattttaaaactgttcatatttatcaaacaattactgtctacagctacattttttgttaacttacttaaagtcatgtcgcaagaaagatcaaacccatgaatgctta

SEQ ID NO: 396636 - DNA, 120 bp, Artificial Sequence
  ENSG00000145819_71 (sequence is synthesized)
gtagctaaggctagtgttcaaaagcactctaaaagacattttgtccacattttggaaaagaaaatatttgcatgtttaattcataatttaggctatctttgagtatactgtaaagtgctg

SEQ ID NO: 396637 - DNA, 120 bp, Artificial Sequence
  ENSG00000145819_72 (sequence is synthesized)
tgtgatataatatcaataaagtacttattaaatggcactttaatgttttcttttaaaataacgcactgttctaaacttcagtattgactattgactcgtgcatagaatccaatgctgtaa

SEQ ID NO: 396638 - DNA, 120 bp, Artificial Sequence
  ENSG00000145819_73 (sequence is synthesized)
ttagaaagtaatctgtgactagaatagacctttgtccctgttagtagccctgttgccatgttcaggcttttaaaaaatgcttttgtgtcaccaaatatatctataaagaaaacaaaattt

SEQ ID NO: 396639 - DNA, 120 bp, Artificial Sequence
  ENSG00000145819_74 (sequence is synthesized)
ctgttcagaggcctctgaaacttggctttcttacatgtggttggtttatgtgacaatccctatgaaatgagtggacgtatgatttttgaattaaatgacttttccatttggtggtatttt

SEQ ID NO: 396640 - DNA, 120 bp, Artificial Sequence
  ENSG00000145819_75 (sequence is synthesized)
cccaggaaaccttgaaagagagtaatttggcacaaattcatctcctaatgaaggagggctggaagtcctgcattttactattccttctggattttgccagctataaatagaagcaaggtt

SEQ ID NO: 396641 - DNA, 120 bp, Artificial Sequence
  ENSG00000145819_76 (sequence is synthesized)
cccttggatagaatgtttgaatttactaggagaaatgcagggatcaaggatggctgaagaaaaatacttgccaaagtgtggtcttctcttctgcacttcccttgcccaactttccaaggt

SEQ ID NO: 396642 - DNA, 120 bp, Artificial Sequence
  ENSG00000145819_77 (sequence is synthesized)
gagtaggctttgagaagttgctactccaggtgtgaaccaccaggcggtgctgtgggcgtgttgggttggctccagttcccgagtgcagtgggacatgcctccaccccaactttccgccag

SEQ ID NO: 396643 - DNA, 120 bp, Artificial Sequence
  ENSG00000145819_78 (sequence is synthesized)
tgactccagagggacggtaagtgagcctggctggcaaggctgtagtgtagtgacaccttgcattgaaataatgggtcacactttacaaagcattctcgtgtacattatctcctttaatcg

SEQ ID NO: 396644 - DNA, 120 bp, Artificial Sequence
  ENSG00000145819_79 (sequence is synthesized)
tttctgcgttctctcctcaatcatcttactcctgtcagtgaagagagtggaaacttcagttggggcttgatgatgggaacggggattagtttccccagggaacctttacttccgttgtat

SEQ ID NO: 396645 - DNA, 120 bp, Artificial Sequence
  ENSG00000145819_80 (sequence is synthesized)
attgtaggaaaagcacgtggcatagaaggtgatatgtagctatctttggaagagacagttgggcacatatggctccctggtgtccccgccattgggcagctccttgaatgctcctagttc

SEQ ID NO: 396646 - DNA, 120 bp, Artificial Sequence
  ENSG00000145819_81 (sequence is synthesized)
gcaaaactggagaaccaggagtctcgggtctctgaaatccacagccttgttcatcggctcccagagaaaaatcggcagatgttacagctgctcatgaaccacttggcaaagtatgctgga

SEQ ID NO: 396647 - DNA, 120 bp, Artificial Sequence
  ENSG00000145819_82 (sequence is synthesized)
atgccagatggccttcccagaggatgctggggaagtgctcatgcaaccaggccaccaagcagagttttcagggggattttacctatggtgatcaagggcaaattggagtgtgttgtccat

SEQ ID NO: 396648 - DNA, 120 bp, Artificial Sequence
  ENSG00000145819_83 (sequence is synthesized)
gataccaggtcaccacacagaattttgtgggattatatgttcttatgctcatcaagaacaaacaaaaatatgttgtgggtttacagaatttgggtttttagtaaagaggactggattcta

SEQ ID NO: 396649 - DNA, 120 bp, Artificial Sequence
  ENSG00000145819_84 (sequence is synthesized)
attttgtgatgagacctttatagtttggcaggctcttggcaggatgaagatgaagctgttttctctccatctggccaggtctacaactcgaacaaagacagccagagtgaagggagtaag

SEQ ID NO: 396650 - DNA, 120 bp, Artificial Sequence
  ENSG00000145819_85 (sequence is synthesized)
agctgcctaccccacaagggctttggtcagccattccacctagaatttgctgtctggctccatctgactttggaccattatcccctgaacattatttaaacctcctccctaaactgggag

SEQ ID NO: 396651 - DNA, 120 bp, Artificial Sequence
  ENSG00000145819_86 (sequence is synthesized)
acttctaacatagtttaagggtagggtagatgagcattatgaattatgggttgtggtttttccagctcatgatgtatagcatacagtggaatgtatagatattttatgggaaatattacc

SEQ ID NO: 396652 - DNA, 120 bp, Artificial Sequence
  ENSG00000145819_87 (sequence is synthesized)
aatcagtgtgtcgggcctcaaaagagaagagcaatgtgatttcatgtagaaccctatttgtatgctgccacagccctatgctttgctttacttcggattcatatagaaatccaagaattt

SEQ ID NO: 396653 - DNA, 120 bp, Artificial Sequence
  ENSG00000145819_88 (sequence is synthesized)
gtagtaagtaagagaaagaaaacaccatctctgctcagctgagctggcccgtgtgccgaactaggaagatggctcttttcctctggagaggatatgatcttttcaaggttgctttttaca

SEQ ID NO: 396654 - DNA, 120 bp, Artificial Sequence
  ENSG00000145819_89 (sequence is synthesized)
catcaccatggggctggcctggttgcatgctgaagctgtgaaacctgagtgtgtatctgtgcaaagctggggtcgaatcagggcccctaggggccctgcactggttttgttgagtggaac

SEQ ID NO: 396655 - DNA, 120 bp, Artificial Sequence
  ENSG00000145819_90 (sequence is synthesized)
atacaggttggggtttttggaggctgggtggggaagagggaggagagatgagggtgttgtcagtgagggaggaactttggggaacagaaatatctaaaaggaagtttaatggactttctt

SEQ ID NO: 396656 - DNA, 120 bp, Artificial Sequence
  ENSG00000145819_91 (sequence is synthesized)
ctttgctttgagttttataatgttaaaaagccaacaaaataggttcaaaaataagctgtattcctcttctgtgttgcaacccaagactaagcacatcagacaaattctgacaccttcagc

SEQ ID NO: 396657 - DNA, 120 bp, Artificial Sequence
  ENSG00000145819_92 (sequence is synthesized)
ttttagcaaaggctgtttggttgccttggagttaggctatatctctaggagattagctctaggctctgagagggtaaagcaactcagaaacaatcaggatagaccagattcatggtggga

SEQ ID NO: 396658 - DNA, 120 bp, Artificial Sequence
  ENSG00000145819_93 (sequence is synthesized)
ttaataaggagaggatatagatagtgatcacgtagacttacagaaaatgcctgcttatttttactccttacacagagttgttttgtttagccttcacttactatgctaaacctgctaaag

SEQ ID NO: 396659 - DNA, 120 bp, Artificial Sequence
  ENSG00000145819_94 (sequence is synthesized)
tacatgtggtatttattttcatttggatgggtagcatcccttctctttctcaaactggtggttaccaccagctggacttaccttcttaaaaagcccaagcccagcagaaaagaaagagag

SEQ ID NO: 396660 - DNA, 120 bp, Artificial Sequence
  ENSG00000145819_95 (sequence is synthesized)
agcctctttttctcagcagtttgaaatacaggctgagcctaatttctgttggtccacattgagtcccatccccatcccttaaccaatctttgtggccaggggtataagtgagcctctgtg

SEQ ID NO: 396661 - DNA, 120 bp, Artificial Sequence
  ENSG00000145819_96 (sequence is synthesized)
gggctgggcctgaatcacctgttcacccttgactgggtgggaggggagaacaacacccaaggcacacggactctgcggatggagaaggggtggtcctcagagaagagacagccacagatg

SEQ ID NO: 396662 - DNA, 120 bp, Artificial Sequence
  ENSG00000145819_97 (sequence is synthesized)
tcactacactggacctttcttatggggacttcgtgaaggatttggtgactttacactccaggatccaaatttgtactgctttctttcccctcaatagtgttttatatgatctctgaaaat

SEQ ID NO: 396663 - DNA, 120 bp, Artificial Sequence
  ENSG00000145819_98 (sequence is synthesized)
atccccttttttcagtccaaaggcttcttgcataatttattttattcctagttgactgactgcctcctttaagaaaaacgtattttatagttttttaaaaatgaagaaaatgttatcttc

SEQ ID NO: 396664 - DNA, 120 bp, Artificial Sequence
  ENSG00000145819_99 (sequence is synthesized)
ctacttagccctggacacagttgattcatttaaaaaacaaatttctgggaaaaggctttcattatcagtgcccattacaggttattagagaacaaatggcaaacaccggtgtgctggggc

SEQ ID NO: 396665 - DNA, 120 bp, Artificial Sequence
  ENSG00000145819_100 (sequence is synthesized)
tggcctccattcattttaatgacagtgttgtggagagtgcatcttagaatgtgactaagcagaaggaaaagaatctgaaaaggactggccccttgtcttctgtgagagccatgaacatgc

SEQ ID NO: 396666 - DNA, 120 bp, Artificial Sequence
  ENSG00000145819_101 (sequence is synthesized)
aaaaacagtggctcagcagctctgagagctcctcagacacaggccactgggtggtggcatcttttggtggcctgccagaaacagtggggcagccagcatccacctcacgagctttgcaaa

SEQ ID NO: 396667 - DNA, 120 bp, Artificial Sequence
  ENSG00000145819_102 (sequence is synthesized)
agtctccaacttgttgtgacattgtccaaaacctatgagtttggataagaactgtttcttctgccaggaatcacattgagcggctggaaaattccacctcagtttgatcttccagtgcct

SEQ ID NO: 396668 - DNA, 120 bp, Artificial Sequence
  ENSG00000145819_103 (sequence is synthesized)
ggttcatatcctgagaacaaattttgttctcaaaggttgaaatgaagtctccatgagctatggtgatgataatggtggtaatgacaatgataattcacattaaggaagccccagtgtccc

SEQ ID NO: 396669 - DNA, 120 bp, Artificial Sequence
  ENSG00000145819_104 (sequence is synthesized)
ttaccatgtctacggcatgccaggatactgttgggaaggtagtattccgtgtacgtgagacctgcacccaggtttctttaaggtagcctggcagtgctgtgacagagacagactcaggat

SEQ ID NO: 396670 - DNA, 120 bp, Artificial Sequence
  ENSG00000145819_105 (sequence is synthesized)
aggtagcctggcagtgctgtgacagagacagactcaggatgcagtgggacccaggggagggacactgagcctcaccctctgggctgcatcttgtgttttatcagagactaggattgcaac

SEQ ID NO: 396671 - DNA, 60 bp, Artificial Sequence
  ENSG00000145819_106 (sequence is synthesized)
aaactacagaccactgctcgaggaaataagacaaggacacaaacaaatggaaaaacattc

SEQ ID NO: 396672 - DNA, 81 bp, Artificial Sequence
  ENSG00000145819_107 (sequence is synthesized)
attccatgttcatggataggaagaatcagtatcatgaaaatagccataaaatagccatactgcccaaagtaattgccttca

SEQ ID NO: 396673 - DNA, 61 bp, Artificial Sequence
  ENSG00000145819_108 (sequence is synthesized)
aacaaagctggagggaacatgctacctggattcaaactatattacaaggctccagaaacca

SEQ ID NO: 396674 - DNA, 74 bp, Artificial Sequence
  ENSG00000145819_109 (sequence is synthesized)
agacaatcctaagcaaaaaaacaaagctggagggaacatgctacctggattcaaactatattacaaggctccag

SEQ ID NO: 396675 - DNA, 78 bp, Artificial Sequence
  ENSG00000145819_110 (sequence is synthesized)
atggaacagaacagaggcctcagaaatgacgccacacatctacaaccatctgatctctgacaaacctgactgttggga

SEQ ID NO: 396676 - DNA, 120 bp, Artificial Sequence
  ENSG00000145819_111 (sequence is synthesized)
cttttgcgttcagggatggtcgggaggtgacccagcgcgggtggtgctctggggcagcgcgggtgggcgtgggcgtgcgcggcacgcaggtgtcccagcagtggggccagagtgccgagc

SEQ ID NO: 396677 - DNA, 120 bp, Artificial Sequence
  ENSG00000145819_112 (sequence is synthesized)
gcgccgcagccagcgggcagatcccatcgtgtccacagctccagctcccttaggggcagagttgctcagccttgagtgcccaaccgtgagaatggagcgtgccctgccgagggggcgctg

SEQ ID NO: 396678 - DNA, 120 bp, Artificial Sequence
  ENSG00000145819_113 (sequence is synthesized)
gtctacaactcgaacaaagacagccagagtgaagggactgcgcagttggacagcattggcttcagcataatcaggaaatgcatccatgctgtggaaaccagagaactcttcagatgctgc

SEQ ID NO: 396679 - DNA, 120 bp, Artificial Sequence
  ENSG00000145819_114 (sequence is synthesized)
agggctgaagtgtgcagcacatccgtgaaatcctagacagctgtaccaaatcccactcgtttgctaagagctgagctgagtgacaggggactttaattagagcagcttttaggaggactg

SEQ ID NO: 396680 - DNA, 120 bp, Artificial Sequence
  ENSG00000145819_115 (sequence is synthesized)
acctccacctctcacctgggcacttccactggccgcctgacacatcttctcacatctgctcttgctgccataaccccctctttacagagcagcgagagtgatctttgaaaaacggaaatg

SEQ ID NO: 396681 - DNA, 120 bp, Artificial Sequence
  ENSG00000145819_116 (sequence is synthesized)
gcattaaagcccttcagtggcctcccattgctctgagaattacttacaaggccctccagggcccagttcctgcccctctgacctcacgccctcacttgacatactacagcctcatgcctt

SEQ ID NO: 396682 - DNA, 120 bp, Artificial Sequence
  ENSG00000145819_117 (sequence is synthesized)
cttcatgttctcaagcaaggtcggcaaactatgacctgcccgtcaaatccaacctgccacctgtcacctaacaattctgtaactgctcccacatacaacatggtcgtcatcataaatcct

SEQ ID NO: 396683 - DNA, 120 bp, Artificial Sequence
  ENSG00000145819_118 (sequence is synthesized)
ctgaagattggtgaaagtcagaatagtggaggccagaaagatttttgaaagatctgaagaatctactggaaccctcagcaccctcatttcaaatatgtttgtatggcaggctgcatgatg

SEQ ID NO: 396684 - DNA, 120 bp, Artificial Sequence
  ENSG00000145819_119 (sequence is synthesized)
acatctgtaagatggggtgaattatcactacattgcaggattttttctgaaggtggaacacactaatattcccctctgatggagtcctatgtctgaaaacatggctgttgaatttttttc

SEQ ID NO: 396685 - DNA, 120 bp, Artificial Sequence
  ENSG00000145819_120 (sequence is synthesized)
tataccctaaaacctggggctttattgttgtgatggtgaaccttagctttggtggatattcctgtgagcctgctttttgtcttaatggtgctccttttcctgtagtgtcatgagttttca

SEQ ID NO: 396686 - DNA, 120 bp, Artificial Sequence
  ENSG00000145819_121 (sequence is synthesized)
agttatctataagctgagaggaaatacaggtgcattcgggttatatgtgcaaagggcctgctagggtaagattccattttcaaactgtgtatgtgataacctgttgttgatacatgcttc

SEQ ID NO: 396687 - DNA, 120 bp, Artificial Sequence
  ENSG00000145819_122 (sequence is synthesized)
cactgcactggggatttggaatgtgtttggagggttgtactgaggtgcagagtcctgcttcgtgatgggcacaagggttcatgcgagttcagcaagcagttaccatgtctacggcatgcc

SEQ ID NO: 396688 - DNA, 120 bp, Artificial Sequence
  ENSG00000145819_123 (sequence is synthesized)
aggatactgttgggaaggtagtattccgttgttcagcctcctcgtcaactttgttccctgccatccaaacctgcacttgctttttgacaggccagaagaagcggtacatgaagactccag

SEQ ID NO: 396689 - DNA, 85 bp, Artificial Sequence
  ENSG00000145819_124 (sequence is synthesized)
ggcggaaaacagactccattgagaagaggttttgctttgatgtggaagcagtagacagtggagacggaatttcaccgtgttggct

SEQ ID NO: 396690 - DNA, 120 bp, Artificial Sequence
  ENSG00000145819_125 (sequence is synthesized)
gccgccacgcctggcctgaatctcctcttaatgaacaggaggccaggggttatcaccatgcaagctttgtcggaagaggaccggaggctctggatggaagccatggatggccgggaacct

SEQ ID NO: 396691 - DNA, 120 bp, Artificial Sequence
  ENSG00000145819_126 (sequence is synthesized)
attccctagctagagtgccaggtggaattaacctgcatttctgggtcatccttaatggttaatgattaaaaagatgaagggagccttgggaagcaattgactttaggcatctgtatgtgc

SEQ ID NO: 396692 - DNA, 120 bp, Artificial Sequence
  ENSG00000145819_127 (sequence is synthesized)
caaggaattaaaatccataacataatagccagagctggaaaggctccccaaggcccatgacactccttccacctcatggcccctttctgttttccagcaagatctttgcaggagtttgcc

SEQ ID NO: 396693 - DNA, 120 bp, Artificial Sequence
  ENSG00000145819_128 (sequence is synthesized)
tagacaggggaaatttggacccagagatggacatgtacacgagaagataccgtgttaacatgaaggcagaagtcgaggtgatgcacctacaagccaatgaacaccaaaggttggcagcag

SEQ ID NO: 396694 - DNA, 120 bp, Artificial Sequence
  ENSG00000145819_129 (sequence is synthesized)
agcaccagaagctagaggagaggcatggagcagattcttcctcacagacctcaggaggaacccttgatcttgaacttttagcctctagacctgtgaagcaataaatttctgttgattaag

SEQ ID NO: 396695 - DNA, 120 bp, Artificial Sequence
  ENSG00000145819_130 (sequence is synthesized)
ccttacccaagccttcctgtggtctctaggagtcatggcagagttcgctgacactggtctgcttttaaccagccttgccagtgacctttcaaattccctgaggagcaaaaggccaaattg

SEQ ID NO: 396696 - DNA, 120 bp, Artificial Sequence
  ENSG00000145819_131 (sequence is synthesized)
agccagagatggagtccctgccagtgcagagctcttgacttctgccccatctcacttgcccggaatggaacctcttgcaccaagccctagaatttggacttgtgttttctattttggcat

SEQ ID NO: 396697 - DNA, 120 bp, Artificial Sequence
  ENSG00000145824_0 (sequence is synthesized)
aatgtgtgcgcgctgtggtatgggtgtgcaagtgtgcgaaggcggcgtgttgtgtgagcgagagggtagcggatgtgtgtgtgcgtgtgcgcgcgtggctccgggtgtgcgccgctgcga

SEQ ID NO: 396698 - DNA, 120 bp, Artificial Sequence
  ENSG00000145824_1 (sequence is synthesized)
tagcgggtcctttcccggggcgggcgacgggcgggctgggaaggtctcctcccctcaccacattgagaaatctcagtgagtcaccgagtggttctgcatattaatgagctcgctcgctgc

SEQ ID NO: 396699 - DNA, 120 bp, Artificial Sequence
  ENSG00000145824_2 (sequence is synthesized)
gagggcaggagcggatttaaaagaggccagggcgggcggagggaggctgtggagagagcgcggagacaagcgcagagcgcagcgcacggccacagacagccctgggcatccaccgacggc

SEQ ID NO: 396700 - DNA, 120 bp, Artificial Sequence
  ENSG00000145824_3 (sequence is synthesized)
gcagccggagccagcagagccggaaggcgcgccccgggcagagaaagccgagcagagctgggtggcgtctccgggccgccgctccgacgggccagcgccctccccatgtccctgctccca

SEQ ID NO: 396701 - DNA, 120 bp, Artificial Sequence
  ENSG00000145824_4 (sequence is synthesized)
cgccgcgcccctccggtcagcatgaggctcctggcggccgcgctgctcctgctgctgctggcgctgtacaccgcgcgtgtggacgggtccaaatgcaagtgctcccggaagggacccaag

SEQ ID NO: 396702 - DNA, 120 bp, Artificial Sequence
  ENSG00000145824_5 (sequence is synthesized)
atccgctacagcgacgtgaagaagctggaaatgaagccaaagtacccgcactgcgaggagaagatggttatcatcaccaccaagagcgtgtccaggtaccgaggtcaggagcactgcctg

SEQ ID NO: 396703 - DNA, 120 bp, Artificial Sequence
  ENSG00000145824_6 (sequence is synthesized)
caccccaagctgcagagcaccaagcgcttcatcaagtggtacaacgcctggaacgagaagcgcagggtctacgaagaatagggtgaaaaacctcagaagggaaaactccaaaccagttgg

SEQ ID NO: 396704 - DNA, 84 bp, Artificial Sequence
  ENSG00000145824_7 (sequence is synthesized)
tctttctcacaggcataagacacaaattatatattgttatgaagcactttttaccaacggtcagtttttacattttatagctgc

SEQ ID NO: 396705 - DNA, 120 bp, Artificial Sequence
  ENSG00000145824_8 (sequence is synthesized)
ttccagatgggagacccatctctcttgtgctccagacttcatcacaggctgctttttatcaaaaaggggaaaactcatgcctttcctttttaaaaaatgcttttttgtatttgtccatac

SEQ ID NO: 396706 - DNA, 120 bp, Artificial Sequence
  ENSG00000145824_9 (sequence is synthesized)
gtcactatacatctgagctttataagcgcccgggaggaacaatgagcttggtggacacatttcattgcagtgttgctccattcctagcttgggaagcttccgcttagaggtcctggcgcc

SEQ ID NO: 396707 - DNA, 120 bp, Artificial Sequence
  ENSG00000145824_10 (sequence is synthesized)
tcggcacagctgccacgggctctcctgggcttatggccggtcacagcctcagtgtgactccacagtggcccctgtagccgggcaagcaggagcaggtctctctgcatctgttctctgagg

SEQ ID NO: 396708 - DNA, 120 bp, Artificial Sequence
  ENSG00000145824_11 (sequence is synthesized)
aactcaagtttggttgccagaaaaatgtgcttcattcccccctggttaatttttacacaccctaggaaacatttccaagatcctgtgatggcgagacaaatgatccttaaagaaggtgtg

SEQ ID NO: 396709 - DNA, 120 bp, Artificial Sequence
  ENSG00000145824_12 (sequence is synthesized)
gggtctttcccaacctgaggatttctgaaaggttcacaggttcaatatttaatgcttcagaagcatgtgaggttcccaacactgtcagcaaaaaccttaggagaaaacttaaaaatatat

SEQ ID NO: 396710 - DNA, 120 bp, Artificial Sequence
  ENSG00000145824_13 (sequence is synthesized)
gaatacatgcgcaatacacagctacagacacacattctgttgacaagggaaaaccttcaaagcatgtttctttccctcaccacaacagaacatgcagtactaaagcaatatatttgtgat

SEQ ID NO: 396711 - DNA, 120 bp, Artificial Sequence
  ENSG00000145824_14 (sequence is synthesized)
tccccatgtaattcttcaatgttaaacagtgcagtcctctttcgaaagctaagatgaccatgcgccctttcctctgtacatatacccttaagaacgccccctccacacactgccccccag

SEQ ID NO: 396712 - DNA, 120 bp, Artificial Sequence
  ENSG00000145824_15 (sequence is synthesized)
tatatgccgcattgtactgctgtgttatatgctatgtacatgtcagaaaccattagcattgcatgcaggtttcatattctttctaagatggaaagtaataaaatatatttgaaatgtacc

SEQ ID NO: 396713 - DNA, 120 bp, Artificial Sequence
  ENSG00000145826_0 (sequence is synthesized)
taaactttttgtgtctcacactaaagaaatgagagatgcagaattctaaggctaaatagctaggaagtattcattcaaacttgaatattcttcaaagagagtgtgggggcaactctaatc

SEQ ID NO: 396714 - DNA, 120 bp, Artificial Sequence
  ENSG00000145826_1 (sequence is synthesized)
agaggaagaaactaaaggaagtaaaaccagatgttttccaccaaagccctccttttggctggtctgatttctaccgcactggcagggccatgggctaatatatgtgctggcaagtcttcc

SEQ ID NO: 396715 - DNA, 120 bp, Artificial Sequence
  ENSG00000145826_2 (sequence is synthesized)
aatgagatccggacgtgtgaccgccatggctgtggacagtactctgctcaaagaagtcagaggcctcaccagggtgtggacatcttgtgctctgctggatctactgtgtacgcaccattc

SEQ ID NO: 396716 - DNA, 120 bp, Artificial Sequence
  ENSG00000145826_3 (sequence is synthesized)
actggaatgattgtgggccaggagaaaccttatcaaaacaagaatgctatcaataatggtgttcgaatatctggaagaggtttttgtgtcaaaatgttctacattaagccaattaagtat

SEQ ID NO: 396717 - DNA, 120 bp, Artificial Sequence
  ENSG00000145826_4 (sequence is synthesized)
cgcatgtgcacattgaaaactgtgactcgagtgaccctactgcatacctgtaaatcgaaggccaatggtcagatcttcaaaataaaaagtcatcttaaaaacctggatgcatacccttct

SEQ ID NO: 396718 - DNA, 120 bp, Artificial Sequence
  ENSG00000145826_5 (sequence is synthesized)
tcttaaaaacctggatgcatacccttctcttcaagaaatttgtgttcacaaaggaaaaatgcatgaagggatggataccccattttccatgacatgattattacacattgcatgcctgta

SEQ ID NO: 396719 - DNA, 120 bp, Artificial Sequence
  ENSG00000145826_6 (sequence is synthesized)
aatacacctatgtacccacaaaaattttttaattaaaaaaaggaaatttgagtttaaatagaaacatgataaatgcaagaaagaaaacattttgattttaactcattgtcactctgatgt

SEQ ID NO: 396720 - DNA, 120 bp, Artificial Sequence
  ENSG00000145826_7 (sequence is synthesized)
tcatgtgaactggttgcttcgggctctttgatctgtcacctatggaatctgagtggttttattttttagatttctcagtcccgaagatctaagataaataaacaagagaacttacgctgg

SEQ ID NO: 396721 - DNA, 120 bp, Artificial Sequence
  ENSG00000145826_8 (sequence is synthesized)
ctgaatcaggaaataaaattctggaaggacgatcttcccataaatacataaagtccagggaaaactacagtgaaaacagaattgtcaggatcaactgtgtgactgataaggcaaatgggg

SEQ ID NO: 396722 - DNA, 120 bp, Artificial Sequence
  ENSG00000145826_9 (sequence is synthesized)
tcttagagtgtcactattattggccacaagaatcttcaatgaaggatcatccactggtgtatcttcaattttgattgatgataatgattttgagttgataaaaacaactcacatcccttt

SEQ ID NO: 396723 - DNA, 120 bp, Artificial Sequence
  ENSG00000145826_10 (sequence is synthesized)
agaagataaacaggccagcaaaaatacttgctagaagagtgccatgactcagtttataagagagaggctgctattcctctatcctcctccataggaaaatttccattagccagctttacc

SEQ ID NO: 396724 - DNA, 120 bp, Artificial Sequence
  ENSG00000145826_11 (sequence is synthesized)
aactaccataatttaatgcctatcatatatcaggtactattctgactctgggtttataatggtaaacaaaatagaatctctgccttcaatgagtttatgtttggtataaggagaagagaa

SEQ ID NO: 396725 - DNA, 120 bp, Artificial Sequence
  ENSG00000145826_12 (sequence is synthesized)
accctgatcagtcagcggccgtcaacatcaagacgagatcctccaccagcaagaagatgatgactcactgaaggttcagatgatggttagcatttttttttcagtcaagcatttttaaat

SEQ ID NO: 396726 - DNA, 120 bp, Artificial Sequence
  ENSG00000145826_13 (sequence is synthesized)
ctggaagaggtaagagaggtggagtctacacctggggtgcctcctggagatgttgatgctcatttatttaatgcaggttccatacgtagagattttgtacttctttcaaaatgataaaac

SEQ ID NO: 396727 - DNA, 120 bp, Artificial Sequence
  ENSG00000145826_14 (sequence is synthesized)
ctggaacagaaagaatatagagtgtacccaaactagctgatgcattttttaaaaaacttttattttaggttcaggggtacatgtgcacatttgttatataggtaaaccacatgtcacaga

SEQ ID NO: 396728 - DNA, 73 bp, Artificial Sequence
  ENSG00000145826_15 (sequence is synthesized)
ccgatagatatttttttctgatcctctcccagctgaggcactttcaaggacgtttcaccattttctctgaaaa

SEQ ID NO: 396729 - DNA, 120 bp, Artificial Sequence
  ENSG00000145832_0 (sequence is synthesized)
gtttggagtaggacctgcggcgtgctcgagactccgacttcggtcttgcggcgcgctcgcgcccgcgggccatgccccactgactctaagtgggcactgccccggctccgggagggcgag

SEQ ID NO: 396730 - DNA, 120 bp, Artificial Sequence
  ENSG00000145832_1 (sequence is synthesized)
accgagcgccggccatgggaagcttccagctggaagactttgcggcgggctggatcggaggtgcagccagtgtcatcgttggccaccctctggacacagtcaagactcgcctgcaggctg

SEQ ID NO: 396731 - DNA, 120 bp, Artificial Sequence
  ENSG00000145832_2 (sequence is synthesized)
gcgttggctacggaaacaccctcagctgcatccgcgtggtgtacaggagggagagtatgttcggcttcttcaagggcatgtccttccccctcgccagcattgccgtctacaactccgtgg

SEQ ID NO: 396732 - DNA, 120 bp, Artificial Sequence
  ENSG00000145832_3 (sequence is synthesized)
tgtttggggtcttcagtaacacgcagcggttcctcagccagcaccgctgcggggagccagaggccagtcctccccgcacgctgtcagacctgctcctggccagcatggtggccggcgtgg

SEQ ID NO: 396733 - DNA, 120 bp, Artificial Sequence
  ENSG00000145832_4 (sequence is synthesized)
tctctgtcgggctgggagggcccgtggacctcatcaagatccggttgcagatgcagacacaaccgtttcgggacgccaacctcggtttgaagtccagggcagtggctcctgcggagcagc

SEQ ID NO: 396734 - DNA, 120 bp, Artificial Sequence
  ENSG00000145832_5 (sequence is synthesized)
cagcataccaggggccagtgcactgcattacaaccattgtgaggaatgagggcctggcggggctataccggggggccagtgccatgctgctgagggatgtcccaggctattgcctctact

SEQ ID NO: 396735 - DNA, 120 bp, Artificial Sequence
  ENSG00000145832_6 (sequence is synthesized)
agtggatcacacctgaggcctgcacaggccccagcccctgtgccgtgtggctggcgggcggcatggcaggagcaatttcttgggggacagcgactcctatggatgtcgtgaaaagtcgac

SEQ ID NO: 396736 - DNA, 120 bp, Artificial Sequence
  ENSG00000145832_7 (sequence is synthesized)
tccaagctgatggggtttatttaaacaaatataaaggtgtcctggactgtatctcccagagttaccagaaggaaggtcttaaagtgtttttcagaggcatcactgtgaacgcggtgcggg

SEQ ID NO: 396737 - DNA, 120 bp, Artificial Sequence
  ENSG00000145832_8 (sequence is synthesized)
gcttccccatgagtgcggccatgttccttgggtacgagctgtcgctgcaggctatccgcggggaccacgcagtgacgagcccataagcgccagggtctcatcccattaacaggtcaatgc

SEQ ID NO: 396738 - DNA, 120 bp, Artificial Sequence
  ENSG00000145832_9 (sequence is synthesized)
taaaagtgtctgcagaacccatgatgtgaatttactgaagagaaagactctccaccaggtgggctttcagccaggcaggctgtcctcagaacctcttccttccttcacaattacaagcat

SEQ ID NO: 396739 - DNA, 120 bp, Artificial Sequence
  ENSG00000145832_10 (sequence is synthesized)
tctcatccccaccccggctggggcagcggagcttctgccttggagggattcaactgaccattggtcaactgatcaccaactattccagctttggacctgcacctggtaacaaacaaacga

SEQ ID NO: 396740 - DNA, 120 bp, Artificial Sequence
  ENSG00000145832_11 (sequence is synthesized)
acagaacaaaacaaaactggagtaaaatagaccctccccccatggccattgtaaactcactgtgaattcatggaagagctggagttggctctaagtttcaaaataaaagcattaaaaacc

SEQ ID NO: 396741 - DNA, 120 bp, Artificial Sequence
  ENSG00000145832_12 (sequence is synthesized)
gggtgccaggaatacaactgactgagacaatcatagccttggccctcatggagctgctgtttcatgagaagagattaatgatgaacgactaaataaaccggcaaataaaatagatcccac

SEQ ID NO: 396742 - DNA, 120 bp, Artificial Sequence
  ENSG00000145832_13 (sequence is synthesized)
tttaaatagtatgaagaaaacatacaagttctgagatacatacaggtgcctgagtgagggaaggggtactgttcagatgaggtgattggagaagcctcatctccgagggtgacttttata

SEQ ID NO: 396743 - DNA, 120 bp, Artificial Sequence
  ENSG00000145832_14 (sequence is synthesized)
cagagacctgaacatgaccagacagctgtgtagagttgcagaaccatattccagacagaaggacgcagaatgagttccattgacatctctggcaggtggtttacaaatcttccttacaag

SEQ ID NO: 396744 - DNA, 120 bp, Artificial Sequence
  ENSG00000145832_15 (sequence is synthesized)
gatcatgggaagtaacctgagaccactgggttacagattaacccatgtctaagatagcagcccagcttaaagaaagaaaggaggaaaaaaaccctgctggacgttggatgtacagccaaa

SEQ ID NO: 396745 - DNA, 120 bp, Artificial Sequence
  ENSG00000145832_16 (sequence is synthesized)
cacctgggttgggaatgcagaaaacaggcatggaatgccaggaacgcagcacctgtggctaagttgtggtctcacaggcaaatactttttaagaatctgctgcatgccaggcctgcgctg

SEQ ID NO: 396746 - DNA, 120 bp, Artificial Sequence
  ENSG00000145832_17 (sequence is synthesized)
tgccaccgtgttaagaagaaaccaagtagccatagccacattggggagagtcatctctccagggcagatggggctctaaagaccaagaactctggagccagatgaattccttattcatgg

SEQ ID NO: 396747 - DNA, 120 bp, Artificial Sequence
  ENSG00000145832_18 (sequence is synthesized)
tctaaatgctttacaggcattacatcattcaacctccagcccgaccctgggagacaggaaggccattattatcctattctatagatggagcaaaggaagcacaaaatggccaagtacttg

SEQ ID NO: 396748 - DNA, 120 bp, Artificial Sequence
  ENSG00000145832_19 (sequence is synthesized)
cccaaagtcactgctatcatccctcctgttatatttgcatcttctctgcacacctccacctgtgatgtcttcctaggactctccaatgtgtctggccctgaccaagctttttgccctaag

SEQ ID NO: 396749 - DNA, 120 bp, Artificial Sequence
  ENSG00000145832_20 (sequence is synthesized)
tgtggcttatctgcgatgtctttctccctaacatccagttccaacccctttgcggggtccaagggctcctggaggaggagatgacttctggggcacagcaaaccaagatgtgtgctcccc

SEQ ID NO: 396750 - DNA, 120 bp, Artificial Sequence
  ENSG00000145832_21 (sequence is synthesized)
agagctgacttggaagctgtccggcccctctgcattcaccccagctgcccatgtacaccaggcagcaggagggacagccactgcaggctgccagcctgtcctttgctgtctgtgtctgtg

SEQ ID NO: 396751 - DNA, 120 bp, Artificial Sequence
  ENSG00000145832_22 (sequence is synthesized)
tcaagagtgaatgaagtgataaaaccaggagagcagtgtgctgtgaaaaagttaaaggtgagtgccagctgcaggtggagaagaggcggctgcttctgggggaactggatccaagggctt

SEQ ID NO: 396752 - DNA, 120 bp, Artificial Sequence
  ENSG00000145832_23 (sequence is synthesized)
agctacgggccccaagccccgtaaaactcaagcctgcctttaattatgagaggggcccccggggttgttgggataccacttacctaatcttgttagaacataaagctgatttcttttgaa

SEQ ID NO: 396753 - DNA, 120 bp, Artificial Sequence
  ENSG00000145832_24 (sequence is synthesized)
gtttccctgggctgtgtctcctctgttcttcctacagctcaagagcttaacttaacacacaccccttcccaccacctgaaaaggtgctgccccaggatagaccagacttccatgtctggt

SEQ ID NO: 396754 - DNA, 120 bp, Artificial Sequence
  ENSG00000145832_25 (sequence is synthesized)
gtccaaggtaatacacagattcatcaccctccgcaggaactatcctgctggctcttgcttgcacgggctccttgctttcttggtgtggctcttagagtcagcagacatgggttcaaagtc

SEQ ID NO: 396755 - DNA, 120 bp, Artificial Sequence
  ENSG00000145832_26 (sequence is synthesized)
agatgtagctactgtgagctggcaggatccaagcaagcagcttcatgtctcagggcctcagtttctcccagaatgatcatcccttccatgaagggcggggcatttgtgggttaatacaaa

SEQ ID NO: 396756 - DNA, 120 bp, Artificial Sequence
  ENSG00000145832_27 (sequence is synthesized)
aagcactccattcaatatgtaacccatagggaagagttaaccatttctcatttgcattagtattatcagtgttgatttttttagcaccggtattaccctggagctctgagtcttttctca

SEQ ID NO: 396757 - DNA, 120 bp, Artificial Sequence
  ENSG00000145832_28 (sequence is synthesized)
catggctgccccaccccaggccctgccagatgaatctgccccatccttccaggcccagtgcagtccgctgccattcccaggatccatgtccttggcttgcttctcctgtacctctctcaa

SEQ ID NO: 396758 - DNA, 120 bp, Artificial Sequence
  ENSG00000145832_29 (sequence is synthesized)
gggcaacagctatttctatactgccccttctctgcctcttacagcaagttttctgacgtcctgttttactctctcccccaacttgggaaagatccagagttggatgacccagtgttgagg

SEQ ID NO: 396759 - DNA, 120 bp, Artificial Sequence
  ENSG00000145832_30 (sequence is synthesized)
taaataactaacatgccacatgagagggacaagatccaaaagctagatcaaagggccacactaaaagacagaactaccagaagtcactgtaaagtccagcccttagtattcaatcatgga

SEQ ID NO: 396760 - DNA, 120 bp, Artificial Sequence
  ENSG00000145832_31 (sequence is synthesized)
tcaatcatctctgtagaggatggggcaatccgatttgatgaaggcttctagggaaaaatgcctaagggctttagttttcaaatgcttatttttagagcacctagtatgtggtaggcacag

SEQ ID NO: 396761 - DNA, 120 bp, Artificial Sequence
  ENSG00000145832_32 (sequence is synthesized)
ttctaggagctggggacagagcagtaagcaaaagagaaaaagcccattctctgatcagctaatgttggcagtgagcgaacagtgagacctgtcctaaggttgcattaatagaagtacagt

SEQ ID NO: 396762 - DNA, 120 bp, Artificial Sequence
  ENSG00000145832_33 (sequence is synthesized)
gggtagaataagggaggtggaggcctctgccctgaccagattgcagctggaatgttgcatccacctttggtcactacccattaagcaagaccctagtggtgccctgggaatgaagagcag

SEQ ID NO: 396763 - DNA, 120 bp, Artificial Sequence
  ENSG00000145832_34 (sequence is synthesized)
gatatcatagcatgtgaggagaagctggaccctggttagtataagaagatgtgatacggaggaaacttgagttctgtctttatgttttaaggatggagaaactcaaagctttcctattct

SEQ ID NO: 396764 - DNA, 120 bp, Artificial Sequence
  ENSG00000145832_35 (sequence is synthesized)
cattattttaaattccttttttaaatttttaacaagagctgctctgacagaagggtgaagcccagccctggtgcggcctcaattgtcttttgtatcttttttttcttcttcttttttttt

SEQ ID NO: 396765 - DNA, 120 bp, Artificial Sequence
  ENSG00000145832_36 (sequence is synthesized)
tttttttttttttttttttttagcagaaatacagtttgtgattcagccaatgagtatagagggatataaaagtgtttcaagtggatgattcatttttatttgagatgtttttgtctactt

SEQ ID NO: 396766 - DNA, 120 bp, Artificial Sequence
  ENSG00000145832_37 (sequence is synthesized)
ccccaaatattaatgtgtcataattcgtaaaaagtctgtagaggcaaaatatattgctgatattatttcctctgaaaattactgtgctcttttaaaaaaatgaagtcctggaagtcagct

SEQ ID NO: 396767 - DNA, 120 bp, Artificial Sequence
  ENSG00000145832_38 (sequence is synthesized)
atgcccttctcagcccagggggagggcaggacacatttaggtactcacccaacaattctttgttaggtacctactctgtccccggccctctcccacctcagtctcatcccttccctatgc

SEQ ID NO: 396768 - DNA, 120 bp, Artificial Sequence
  ENSG00000145832_39 (sequence is synthesized)
agctatgagaatggcagttcccatttgactttcaggcaacagatatattttgaacacatactctgtgtcaggcattactaagctttggaaaggaaatccattatcatggttcagtttatt

SEQ ID NO: 396769 - DNA, 120 bp, Artificial Sequence
  ENSG00000145832_40 (sequence is synthesized)
aaatgcaatctttgtaatgtaaggatgccattagttctacaaggtaggaatcggtttccccatttcacagatgagaaaactcaggtccagaaatgttaagtagccaatcccaggtcatac

SEQ ID NO: 396770 - DNA, 120 bp, Artificial Sequence
  ENSG00000145832_41 (sequence is synthesized)
agctggagctgacagtatagcaggactctgcagtcagaaagatttaagttcaaatccacacttcatcattttgtgaccatggacttgttgcttaacctccctgctcagaatcctgcacca

SEQ ID NO: 396771 - DNA, 120 bp, Artificial Sequence
  ENSG00000145832_42 (sequence is synthesized)
catccttctttcatttaaggtaaaagttgatatctttgcaatggttttccaggccctcagtgatctagctccctgttccccacccacctcacttctactcctctccccttcctcactttc

SEQ ID NO: 396772 - DNA, 120 bp, Artificial Sequence
  ENSG00000145832_43 (sequence is synthesized)
tccagtcacactggtctctgctgcaacttgaccatgcctggcccttccctgaccacagggcctttgtacctgctactcaccacctcctgaatttaacaacgtggagaccactggggattt

SEQ ID NO: 396773 - DNA, 120 bp, Artificial Sequence
  ENSG00000145832_44 (sequence is synthesized)
tggcaagggccatttgatggagagaagggtgtaaaaacctgatgaagtgggataaagaaagaatgggatgaaggatattggtgcacccaagtatacacaactcttctgagggttctgcta

SEQ ID NO: 396774 - DNA, 120 bp, Artificial Sequence
  ENSG00000145832_45 (sequence is synthesized)
tgctgtaatgaggaacagagaaacagagccatagccagaagggcctttggaagccaagagaggatactttttaagaaggctgacatcatgacatgtttgatgtgatgggaaagatctaac

SEQ ID NO: 396775 - DNA, 120 bp, Artificial Sequence
  ENSG00000145832_46 (sequence is synthesized)
aagcgccaggtctttgctcaggctgtcccctctgcctgacatcctcttctcgctcctttcctacttgtccttggcttcaccagctctttgccatccaggctgtagaagtctcctcctcca

SEQ ID NO: 396776 - DNA, 120 bp, Artificial Sequence
  ENSG00000145832_47 (sequence is synthesized)
acacatccgctaccctctcgctcacacaacacgccgccttcgcacacttgcacacccataccacagcgcgcacacatttccagcgtcccgctctgcctttggggagcccagacggtggag

SEQ ID NO: 396777 - DNA, 120 bp, Artificial Sequence
  ENSG00000145832_48 (sequence is synthesized)
aggctgctgaagggcactgcttttctgaatcgtgtggttctctctctggcccggcaggccagcttttccgagccggcgggagacccaggcccagggctcagatcctcaaagacctgaaag

SEQ ID NO: 396778 - DNA, 120 bp, Artificial Sequence
  ENSG00000145832_49 (sequence is synthesized)
ggttttggagcaggtgccaagtgtgagtgcctgcaggcctgacccccaagggcccctgctgggccagaacacaaggccagttctggacaggggcttgtcatagactgtccagcagcaaag

SEQ ID NO: 396779 - DNA, 120 bp, Artificial Sequence
  ENSG00000145832_50 (sequence is synthesized)
gagagctgcagatgtttggcctttggacctccaagtggacatcaattagcaagcgtgggctaggatggtgcagacactgacgtggcccttctgatgcctgggatgcctcatgagtcactg

SEQ ID NO: 396780 - DNA, 120 bp, Artificial Sequence
  ENSG00000145832_51 (sequence is synthesized)
attcaagccctccaaggttctgatccccaatgcccactctgctaggctggcatcaaagagctttccaagaaatgtttggtccagctgagaagtcctgaccatgagcaccagggagccaga

SEQ ID NO: 396781 - DNA, 120 bp, Artificial Sequence
  ENSG00000145832_52 (sequence is synthesized)
aaccacccagagaaacgttgcttcactcctctgtctgaggatggggaggggccagtgagctctgggctcagccactccctccagtctcaagtaacacgtccccgtgcctccagtctcctc

SEQ ID NO: 396782 - DNA, 120 bp, Artificial Sequence
  ENSG00000145832_53 (sequence is synthesized)
tcagcaccgaccaggtttttccccgctcctgcacccgtggatcctgaggacagcggtagcgccttcctcaccgcacgctgagtccagtgcgtgctcctcactgtgcacttattagtgtct

SEQ ID NO: 396783 - DNA, 120 bp, Artificial Sequence
  ENSG00000145832_54 (sequence is synthesized)
gttgagtgattaaatcacatcctcaggtctgcagcaaataaatgaaagtttctttattttttattaactaaattgagatttttttcaagctgatgacagaaaaaaataattttgccattt

SEQ ID NO: 396784 - DNA, 120 bp, Artificial Sequence
  ENSG00000145832_55 (sequence is synthesized)
cagggtaaaacttcgaaattccaagttaaatgcccagttcaagattttttccttctccaccttcccctggggttgactttagatctgggaggtttgggatttagggagaggcttcagggt

SEQ ID NO: 396785 - DNA, 120 bp, Artificial Sequence
  ENSG00000145832_56 (sequence is synthesized)
cctgggaggtgctctgtcctaccctggtgttcttcctggctagtcctgggcatggctttccctccagggtggcttctgtataagcatcttcagtcccatttggtccctgtcccgtggtcc

SEQ ID NO: 396786 - DNA, 120 bp, Artificial Sequence
  ENSG00000145832_57 (sequence is synthesized)
gagcctgacatatgtgcccatcccaaggcctctccagccttaccatcctccaagacacatcagtgcccctctctgccctgtgtgaaaatctttggtttctccgttgaaactattcagggg

SEQ ID NO: 396787 - DNA, 120 bp, Artificial Sequence
  ENSG00000145832_58 (sequence is synthesized)
gctgcatcaagcccagcttcctagggccagtgggtggtcctccctataccacaccttaggtgtggtggcaagaggcattctcttttcgtgtcatctcccaggccattcaggggatacagc

SEQ ID NO: 396788 - DNA, 120 bp, Artificial Sequence
  ENSG00000145832_59 (sequence is synthesized)
tcatgtgcccttcactcttggttttctaccctccccaggagttctgccctctaccccgaggctctgctgggggccaggcagagagctcttctccagggaactcaatagtgtctgccatca

SEQ ID NO: 396789 - DNA, 120 bp, Artificial Sequence
  ENSG00000145832_60 (sequence is synthesized)
tcctctcctctcggacttctcttccatagtccaaggagttactttctatcccagggctaggaaggttaccactggaaactctaaagccaagaattaacttctgtatcaataacctctata

SEQ ID NO: 396790 - DNA, 120 bp, Artificial Sequence
  ENSG00000145832_61 (sequence is synthesized)
ccaataagtgcagaaaatacatcagacacagtccaatctcattcatgataaaagtgctcaacagactgagaataaaagggaattttctcagcctgatactgagcatttatgaaaagtcca

SEQ ID NO: 396791 - DNA, 120 bp, Artificial Sequence
  ENSG00000145832_62 (sequence is synthesized)
cagctcacatcatattaatatttaatcgtgaatgactggatcctttcccactaaaatcaggaacaaaacaagaatgtgtactctcaccacttctattcaacattgtattggaagttctag

SEQ ID NO: 396792 - DNA, 120 bp, Artificial Sequence
  ENSG00000145832_63 (sequence is synthesized)
ccagaaattagccaaggaagtgaaagaaaaggcatccaagttggaaaaaaagaagtcagttacctctatttacagataatatgacacagtttaaaaagtgagggttgtgcaacctgccaa

SEQ ID NO: 396793 - DNA, 120 bp, Artificial Sequence
  ENSG00000145832_64 (sequence is synthesized)
gccccggcaaccctgagagcctctgccagtctgtactttgcctcttactgcttcacaaacccagtctccaaatgggttgtttgaccccaagatccaagatttcaagactcccgttagaag

SEQ ID NO: 396794 - DNA, 120 bp, Artificial Sequence
  ENSG00000145833_0 (sequence is synthesized)
ggccgccacagctgtaggtgctgctagtgtttagcgctggtctttgccgggcgttgagggcagctcagcctccttgtttgtccggttcgcctgtgcgtggtactcaagggcaccagtatt

SEQ ID NO: 396795 - DNA, 120 bp, Artificial Sequence
  ENSG00000145833_1 (sequence is synthesized)
cccgcggtcggcagcatgggtcgggagtcacgccactatcgaaaacgatcggcatcccggggtcgctctggaagtcggtctagaagtcgctcaccctcagacaaaagaagtaaacgtgga

SEQ ID NO: 396796 - DNA, 120 bp, Artificial Sequence
  ENSG00000145833_2 (sequence is synthesized)
gatgacagacggtctagaagtagagatagagataggaggagagagaggtctcgtagcagggataaaagaagatctcggtcaagggacaggaagcgtctgagacgttccagaagtagagag

SEQ ID NO: 396797 - DNA, 120 bp, Artificial Sequence
  ENSG00000145833_3 (sequence is synthesized)
agagacagaagccgagagcgaagaagatctcgaagtagagacaggagacgctcaaggagtagaagccggggccggcgatcccgatcctccagtcctggaaataaaagcaagaaaactgag

SEQ ID NO: 396798 - DNA, 120 bp, Artificial Sequence
  ENSG00000145833_4 (sequence is synthesized)
aatagatctaggtccaaagagaaaactgatggtggggaaagttctaaagagaagaaaaaagacaaagatgacaaggaggatgaaaaagaaaaagatgctggcaactttgaccagaataag

SEQ ID NO: 396799 - DNA, 120 bp, Artificial Sequence
  ENSG00000145833_5 (sequence is synthesized)
ctggaagaagaaatgagaaagcgaaaagaaagagtagaaaaatggcgagaagagcaacgtaaaaaggctatggaaaacataggagaactgaaaaaggaaatcgaagagatgaaacaaggg

SEQ ID NO: 396800 - DNA, 120 bp, Artificial Sequence
  ENSG00000145833_6 (sequence is synthesized)
aaaaagtggagtttagaggacgatgatgatgacgaagatgatcctgcagaagctgaaaaggagggaaatgaaatggagggtgaggagttagatccattagatgcttacatggaagaagtg

SEQ ID NO: 396801 - DNA, 120 bp, Artificial Sequence
  ENSG00000145833_7 (sequence is synthesized)
aaagaggaagtaaaaaaatttaacatgagaagtgtaaaaggtggtgggggaaatgaaaagaagtctgggccaacggtcacaaaagttgtcactgttgtgacaaccaaaaaagcagttgtg

SEQ ID NO: 396802 - DNA, 120 bp, Artificial Sequence
  ENSG00000145833_8 (sequence is synthesized)
gattctgataagaagaaaggtgagctgatggagaatgaccaggatgccatggagtattcttcagaggaggaagaagttgatcttcagacagcccttacagggtatcaaacaaaacagcga

SEQ ID NO: 396803 - DNA, 120 bp, Artificial Sequence
  ENSG00000145833_9 (sequence is synthesized)
aagcttctagaaccagttgatcatggaaaaattgagtatgagccatttaggaaaaacttctatgttgaagttccagaactagcaaaaatgtctcaagaagaggtaaatgtgtttcgattg

SEQ ID NO: 396804 - DNA, 120 bp, Artificial Sequence
  ENSG00000145833_10 (sequence is synthesized)
gaaatggagggcattacagttaaaggaaaaggttgccccaaaccaattaaatcctgggtccagtgtggaatttccatgaagatcttaaattccctcaagaagcatggctatgaaaagccc

SEQ ID NO: 396805 - DNA, 120 bp, Artificial Sequence
  ENSG00000145833_11 (sequence is synthesized)
acgcccatccaaacccaagctattcctgctataatgtctggacgagatttgattggcattgccaaaacaggaagtggaaagaccattgcttttctgttgcccatgtttagacacatcatg

SEQ ID NO: 396806 - DNA, 120 bp, Artificial Sequence
  ENSG00000145833_12 (sequence is synthesized)
gatcagaggtcattagaggaaggagaggggccaatagctgtcatcatgactccaactcgagaactggctttacagattactaaagagtgtaagaagttttccaagactttgggacttaga

SEQ ID NO: 396807 - DNA, 120 bp, Artificial Sequence
  ENSG00000145833_13 (sequence is synthesized)
gtggtctgtgtttacggaggaacaggaatcagtgagcagattgctgagctgaaaagaggtgctgaaattattgtttgcacacctggtcgaatgattgacatgttagccgctaacagtggt

SEQ ID NO: 396808 - DNA, 120 bp, Artificial Sequence
  ENSG00000145833_14 (sequence is synthesized)
cgggtcacaaatcttcgaagagtgacatatgttgttttagatgaagcagacagaatgtttgacatgggttttgaaccccaggtcatgcgcatcgtggataatgttcgtcctgatcgacag

SEQ ID NO: 396809 - DNA, 120 bp, Artificial Sequence
  ENSG00000145833_15 (sequence is synthesized)
ttgctcagatgtggagcaacaagtgattgtgattgaagaagaaaagaaattcttgaagttacttgagcttctaggccattatcaagagtcaggatctgtcattatatttgtggataagca

SEQ ID NO: 396810 - DNA, 120 bp, Artificial Sequence
  ENSG00000145833_16 (sequence is synthesized)
ggaacatgctgatggtcttcttaaggatttaatgagagcatcttatccttgcatgtctcttcatggaggcattgatcaatatgacagagatagcatcataaatgactttaagaatgggac

SEQ ID NO: 396811 - DNA, 120 bp, Artificial Sequence
  ENSG00000145833_17 (sequence is synthesized)
ctgcaaacttcttgtggctacctctgttgctgcccgaggtctagatgtgaaacatctgattcttgtagtaaattatagctgccccaaccattatgaggattatgtacacagagcagggcg

SEQ ID NO: 396812 - DNA, 120 bp, Artificial Sequence
  ENSG00000145833_18 (sequence is synthesized)
gactggaagagcaggaaacaagggttatgcttatacttttatcacagaggatcaagctcgctatgctggtgacataattaaagctcttgaattgtcagggactgcagtacctcctgattt

SEQ ID NO: 396813 - DNA, 120 bp, Artificial Sequence
  ENSG00000145833_19 (sequence is synthesized)
agagaaactgtggagtgatttcaaagatcagcagaaagctgaggggaaaataattaaaaagagtagtgggttctctggtaagggattcaagtttgatgaaacagaacaagctttggctaa

SEQ ID NO: 396814 - DNA, 120 bp, Artificial Sequence
  ENSG00000145833_20 (sequence is synthesized)
tgagaggaagaagttacaaaaagcagctcttggtctacaagattcagatgatgaggatgctgcagttgatattgatgagcaaattgaaagcatgtttaattcaaagaagagagtaaagga

SEQ ID NO: 396815 - DNA, 120 bp, Artificial Sequence
  ENSG00000145833_21 (sequence is synthesized)
tatggctgctcctggaacatcaagtgttcctgctccaactgcaggaaatgctgagaaattagaaattgctaagagattggctcttagaatcaatgcccagaagaatttgggcatcgagtc

SEQ ID NO: 396816 - DNA, 120 bp, Artificial Sequence
  ENSG00000145833_22 (sequence is synthesized)
tcaggatgtgatgcagcaggccaccaatgcaattcttaggggtggcaccattctggctcccactgtttctgcaaaaaccattgcagaacaacttgctgaaaagatcaatgccaagctcaa

SEQ ID NO: 396817 - DNA, 120 bp, Artificial Sequence
  ENSG00000145833_23 (sequence is synthesized)
ttatgtgccgttagagaaacaagaagaagagagacaggatggtggacagaatgaatcttttaagagatatgaagaagaattagagatcaatgacttcccacagactgctaggtggaaagt

SEQ ID NO: 396818 - DNA, 120 bp, Artificial Sequence
  ENSG00000145833_24 (sequence is synthesized)
tacctctaaggaagctctgcagagaatcagtgaatactctgaagccgcaattacaatcagaggaacctacttccctcctggcaaagaacccaaggaaggcgagcggaagatttacttggc

SEQ ID NO: 396819 - DNA, 120 bp, Artificial Sequence
  ENSG00000145833_25 (sequence is synthesized)
aattgaaagtgccaatgaactggctgtgcagaaagcaaaggcagaaatcaccaggctcataaaagaagagctgatccggctgcaaaattcataccaaccaacaaataaaggaagatacaa

SEQ ID NO: 396820 - DNA, 120 bp, Artificial Sequence
  ENSG00000145833_26 (sequence is synthesized)
agtcttatagacatccggaaaaaagatttttacctgtgctggtctatgatgtatgtggcagttgctgtctgcagtttacaatgtattgtaaatgaagattttttaaattctatcttgctg

SEQ ID NO: 396821 - DNA, 120 bp, Artificial Sequence
  ENSG00000145833_27 (sequence is synthesized)
attttttttaaatataagaaactggtacttggtaaagaaatctgtccgtaagtacccccacaatcagtcaaactatatttaaagccagcctgttttcagagtatgatgtcctttaatgta

SEQ ID NO: 396822 - DNA, 120 bp, Artificial Sequence
  ENSG00000145833_28 (sequence is synthesized)
aactcaaatatcaatattttaaatgtccggataatattctagaggtttaaaaaatggaaatatttgaactttctattgaagacaataaagtacacaagtcgttaaggggctattcacttt

SEQ ID NO: 396823 - DNA, 120 bp, Artificial Sequence
  ENSG00000145833_29 (sequence is synthesized)
atcctgtactttcaatgaaattgtgatcatttcctaagaaaaggtaaaattcactatcatattttgtgtccccaccttgatgttacatgactctggaacaatatgaactggatttaagaa

SEQ ID NO: 396824 - DNA, 120 bp, Artificial Sequence
  ENSG00000145833_30 (sequence is synthesized)
tgttataatagaagtcttacaaaatgggttgagagtttttgtttcaatttttatcatcataaatgggcaaaaagtagttggactaatttcggtttttatacaagtaaagatttaatagta

SEQ ID NO: 396825 - DNA, 120 bp, Artificial Sequence
  ENSG00000145833_31 (sequence is synthesized)
actgagtgtaaaactctacaaagagttatagtatttactactttgaggtttccctcacaacttctggctccatacctagcccctcttttataatcttccttaaaagaaagagtgtagcct

SEQ ID NO: 396826 - DNA, 120 bp, Artificial Sequence
  ENSG00000145833_32 (sequence is synthesized)
gcctataaatactaaatatgataccttttccttctagaaagtgtttatttatatatctatacatgttgtatgtacaaatatcctactacttttaatctgatttttcttcaggattattga

SEQ ID NO: 396827 - DNA, 120 bp, Artificial Sequence
  ENSG00000145833_33 (sequence is synthesized)
gttgtgaattttctttcttaaaaattgtaaaacataatggtacccaagttttaaacttagatgtgcttcatcttagtgaaatttaattcacaaggaatcataaattgtgtttttgaggct

SEQ ID NO: 396828 - DNA, 62 bp, Artificial Sequence
  ENSG00000145833_34 (sequence is synthesized)
atttaattcacaaggaatcataaattgtgtttttgaggctgggcgcagtgactcacacctgt

SEQ ID NO: 396829 - DNA, 73 bp, Artificial Sequence
  ENSG00000145833_35 (sequence is synthesized)
actaaaaatacaaaaattagtcggcatggtggtgagccaagataacaccattgcactccagcctgggcgacag

SEQ ID NO: 396830 - DNA, 120 bp, Artificial Sequence
  ENSG00000145833_36 (sequence is synthesized)
tcaaaaataaataaataaataaataaatagtatttttgagccttcaagatacagttcctgaatattctaatttaaattgttataattggattacctaatattcttttcaagactcctgat

SEQ ID NO: 396831 - DNA, 120 bp, Artificial Sequence
  ENSG00000145833_37 (sequence is synthesized)
tgatgtattaacttcatgttattgtcacttttcaaaaaaggaatttttttcaggagttaaataaagtcagtcttttatatccaagggtttcaaacccacagattaaaccaaccacagatc

SEQ ID NO: 396832 - DNA, 120 bp, Artificial Sequence
  ENSG00000145833_38 (sequence is synthesized)
aaaaaaagaaaaaaagaatgtaaaattttaaaaatacagtttaacagctgtaaaagttttactataacatttacattgtgttaggtattttaagtaatttaaaggttacagtatacaggc

SEQ ID NO: 396833 - DNA, 120 bp, Artificial Sequence
  ENSG00000145833_39 (sequence is synthesized)
gttacagtatacaggcggttaaagtatacaggaggatgtgcatcggttatatgcatatagcaagccatttcatataagaggcttgaacatccatggattttggtatagaggaggggttta

SEQ ID NO: 396834 - DNA, 120 bp, Artificial Sequence
  ENSG00000145833_40 (sequence is synthesized)
aggggtgtcctgcaatcagtccccctctcataccaaaggatgactgtatatttcttaaatgaagagactttcattctttaaatattattgacttacagtttaaaaataaataaataaaag

SEQ ID NO: 396835 - DNA, 120 bp, Artificial Sequence
  ENSG00000145833_41 (sequence is synthesized)
catactatagttgtaaaaacaaataattttaatagtatattcagtggctgaagtgatagggagtattaatcattatttcttcagtataaagttattcttcctgaaaaagtaagatatacc

SEQ ID NO: 396836 - DNA, 120 bp, Artificial Sequence
  ENSG00000145833_42 (sequence is synthesized)
tgggaaatattcttggatccttcacacatccacttaatttcttgaaggaagaaaacagacaaaagacatgtaacaacagaaacaaataaaccacttactgtaaaatttcagaaattgtgg

SEQ ID NO: 396837 - DNA, 120 bp, Artificial Sequence
  ENSG00000145833_43 (sequence is synthesized)
gctcattccctccctctagtttatttatttgctcatctttatcacctaatggtagtttgttttctttggtagagtatatggcagtcccacatcgatgataattggtgctcccttcatcca

SEQ ID NO: 396838 - DNA, 120 bp, Artificial Sequence
  ENSG00000145833_44 (sequence is synthesized)
actggatcactttgagattcagttttacatcattttagcattttgtttgtatatcagttgtgatgagccactgataaaattttgttctaaaatgaaacatattactttgttagtacattt

SEQ ID NO: 396839 - DNA, 120 bp, Artificial Sequence
  ENSG00000145833_45 (sequence is synthesized)
tttagtgtcacactgacttttaaaatttgaatgatatatagactttgtttttttaatgcaatatgaatatttgctcatgttttctaaattccttataaaataaaattaattcgaattcaa

SEQ ID NO: 396840 - DNA, 120 bp, Artificial Sequence
  ENSG00000145833_46 (sequence is synthesized)
gccaacggtcacaaaagttgtcactgttgtgacaaccaaaaaagcagttgtggattctgataagaagaaaggtgagctgatggagaatgaccaggatgccatggagaggtaaatgtgttt

SEQ ID NO: 396841 - DNA, 120 bp, Artificial Sequence
  ENSG00000145833_47 (sequence is synthesized)
taacagctttgttgtcaaacagaaagaccttatagtttataatgttcttaattatgacaatgaagttgtctttatgtacattttctttatcaatttggcactttggggctgatttcccct

SEQ ID NO: 396842 - DNA, 120 bp, Artificial Sequence
  ENSG00000145833_48 (sequence is synthesized)
tatttccaattggatgtctgatgagcacctcaactacagcaattttagaattaaatttcacccattatcactgtccagaaaacacctgtttacctcctggaatcagtatattcttttact

SEQ ID NO: 396843 - DNA, 120 bp, Artificial Sequence
  ENSG00000145833_49 (sequence is synthesized)
tctgccttttttcacttgccagccagctcttaatatcttaatttgtttctctttttcactgttcatatcccatcagaaaaaatatcttgtccattctacctcaaaagtgtgctcttgtga

SEQ ID NO: 396844 - DNA, 120 bp, Artificial Sequence
  ENSG00000145833_50 (sequence is synthesized)
tggtataaatacaatattgtgagagcactaaggaaaaaaacacttaactgtgcctttcagagtcaggaaaacttcctaaaagtggtatttaaaagtgaagtttgtgaactacttcctttt

SEQ ID NO: 396845 - DNA, 120 bp, Artificial Sequence
  ENSG00000145833_51 (sequence is synthesized)
catcctgttttgatatctttacaagtttgtttttctagtctgtaagcttttaaagagcatgaatttgttatttatatgttaaatgtctcacagtatgtgagaggtgagtgcttaatgttt

SEQ ID NO: 396846 - DNA, 120 bp, Artificial Sequence
  ENSG00000145833_52 (sequence is synthesized)
atgaaattgataactgtgaatgaatgtctgcagcctacctcatctagtcagctatcttgcggtgttctttcatactccttttccaaccacgctacgcttctcttattcttcaataattaa

SEQ ID NO: 396847 - DNA, 120 bp, Artificial Sequence
  ENSG00000145833_53 (sequence is synthesized)
gcatgcttgtcttaactctgtaccattacgcatgtaattaatttcctttgcaaaatactcttatggtatctttcctccctccaattggctagtcctcctttcattttaaagattttgttc

SEQ ID NO: 396848 - DNA, 120 bp, Artificial Sequence
  ENSG00000145833_54 (sequence is synthesized)
cttcagtgaacatcataaatgtctaataaatacttactaaatgaataaaccaaggaagttatatttccctttagccttctcttactatctcctggacaaatcactaatagtctttttatt

SEQ ID NO: 396849 - DNA, 120 bp, Artificial Sequence
  ENSG00000145833_55 (sequence is synthesized)
ccactctttttaatcaccatactaggaactcttaacacataatatgacctcagtggttacatttgaaactctgaaagtaatcaaaataataagcagccattatataatgtgggtaatgtt

SEQ ID NO: 396850 - DNA, 120 bp, Artificial Sequence
  ENSG00000145833_56 (sequence is synthesized)
ccaccaggcattaaatggctatcttggcaggcagtacagtgtttctgaaagtcacctacagtgtttcttcctggacctccgtgatatgggtaaacacagtgtaagtttagtaatttgaat

SEQ ID NO: 396851 - DNA, 120 bp, Artificial Sequence
  ENSG00000145833_57 (sequence is synthesized)
ccagaaaatgatgcatcctgttgccagcagtaatccagctttctgtgggcctggcaagccttcctgcctcaatgaagatgccatgagagctgctgatcagtttgacatatattcctccca

SEQ ID NO: 396852 - DNA, 120 bp, Artificial Sequence
  ENSG00000145833_58 (sequence is synthesized)
gcaaagcaaatacagccacacagtcaaccacaaaccaatggtttgtcagaggcaagacccattaaatgaaacacacttgcagactacaagtggcagaagcatagaaataaaagatgaact

SEQ ID NO: 396853 - DNA, 120 bp, Artificial Sequence
  ENSG00000145833_59 (sequence is synthesized)
gagttctccattgcattgtcctactgattggcatgactttgtaaagctaacagttttctttctcctcatctgagagatggcagtactttttctgagtaccagagatactggtaaatttta

SEQ ID NO: 396854 - DNA, 120 bp, Artificial Sequence
  ENSG00000145833_60 (sequence is synthesized)
aataactcagttggctcagtgccctggctcacacctgcaatcccagaactttggtaggctgaggctggtggatcactggagccaagtagttcaagaccagcctgggcaacatagcatgac

SEQ ID NO: 396855 - DNA, 120 bp, Artificial Sequence
  ENSG00000145833_61 (sequence is synthesized)
tctttctactaaaaaacaaaaaaaattaactgggtttggtgacatgtgcttgtagtcctagcaactcaggaggactgatgggacgaatccttgagcccagaaatttgaggttacagtgag

SEQ ID NO: 396856 - DNA, 120 bp, Artificial Sequence
  ENSG00000145833_62 (sequence is synthesized)
aaagatgaaattgtgtcagttactgtgtgcttcagcagtcatataacttgtgtttcagctttgcaaaatattctatatttgttctttattttagaagtctgggccaacggtcacaaaagt

SEQ ID NO: 396857 - DNA, 120 bp, Artificial Sequence
  ENSG00000145833_63 (sequence is synthesized)
tagaaatcattaatgtgactaaaccttgattatttaattcttggaaatcttttatttaacacttgaaaattttgctacgactatttttatttctctctagagggaaaaatgagtgaaagc

SEQ ID NO: 396858 - DNA, 120 bp, Artificial Sequence
  ENSG00000145833_64 (sequence is synthesized)
taaaatcctatcttattcttgaacttagtattttgtggtgtctatgtagagctcttagtttatcttacatgctagatgaagtgtttttattacattgacatacaccaccttgaaaaatat

SEQ ID NO: 396859 - DNA, 120 bp, Artificial Sequence
  ENSG00000145833_65 (sequence is synthesized)
aaacaagttgtcctagacattgagtttgtgagaatttaacattctcaatacagaattttttgataattgcatttggatgatttctcagtgctattgactgaggactttgggcctattctg

SEQ ID NO: 396860 - DNA, 120 bp, Artificial Sequence
  ENSG00000145833_66 (sequence is synthesized)
gaatttctaactgttagccactggtagttttatagggtagtattctgatgagtcttaacaaaatcttaaagatgtattaataattctctttttctttctttatctgcttttattgggcac

SEQ ID NO: 396861 - DNA, 120 bp, Artificial Sequence
  ENSG00000145833_67 (sequence is synthesized)
acaactccctggatatacaaacacccagttacatgactcaaatcaatatggtcttaaacagtggagaaatgtgatttttaaatatttcacgttatctttttcttggaagcttacttgtta

SEQ ID NO: 396862 - DNA, 120 bp, Artificial Sequence
  ENSG00000145833_68 (sequence is synthesized)
aggaattagagtatgcaaatgattttcgaaatatttactgtgtctgacatcaagagttagctaattatcaactacatctctatgatctagtagaatatttaatagagttgaatgttctcc

SEQ ID NO: 396863 - DNA, 120 bp, Artificial Sequence
  ENSG00000145833_69 (sequence is synthesized)
agttttcttatccactaggaggtacattaaactacattataaatatatattgctaaatcacacatatcaatgagactatgcattagaaaggtttatttattaaacttgcatacaaagtta

SEQ ID NO: 396864 - DNA, 120 bp, Artificial Sequence
  ENSG00000145839_0 (sequence is synthesized)
aagcgagctccagtccgctgtcaagatgcttctggccatggtccttacctctgccctgctcctgtgctccgtggcaggccaggggtgtccaaccttggcggggatcctggacatcaactt

SEQ ID NO: 396865 - DNA, 120 bp, Artificial Sequence
  ENSG00000145839_1 (sequence is synthesized)
cctcatcaacaagatgcaggaagatccagcttccaagtgccactgcagtgctaatgtgaccagttgtctctgtttgggcattccctctgacaactgcaccagaccatgcttcagtgagag

SEQ ID NO: 396866 - DNA, 120 bp, Artificial Sequence
  ENSG00000145839_2 (sequence is synthesized)
ctcagatgaccaataccaccatgcaaacaagatacccactgattttcagtcgggtgaaaaaatcagttgaagtactaaagaacaacaagtgtccatatttttcctgtgaacagccatgca

SEQ ID NO: 396867 - DNA, 120 bp, Artificial Sequence
  ENSG00000145839_3 (sequence is synthesized)
accaaaccacggcaggcaacgcgctgacatttctgaagagtcttctggaaattttccagaaagaaaagatgagagggatgagaggcaagatatgaagatgaaatattatttatcctattt

SEQ ID NO: 396868 - DNA, 120 bp, Artificial Sequence
  ENSG00000145839_4 (sequence is synthesized)
attaaatttaaaaagctttctctttaagttgctacaatttaaaaatcaagtaagctactctaaatcagtatcagttgtgattatttgtttaacattgtatgtctttattttgaaataaat

SEQ ID NO: 396869 - DNA, 120 bp, Artificial Sequence
  ENSG00000145850_0 (sequence is synthesized)
agactcctgggtccggtcaaccgtcaaaatgtccaaagaacctctcattctctggctgatgattgagttttggtggctttacctgacaccagtcacttcagagactgttgtgacggaggt

SEQ ID NO: 396870 - DNA, 120 bp, Artificial Sequence
  ENSG00000145850_1 (sequence is synthesized)
tttgggtcaccgggtgactttgccctgtctgtactcatcctggtctcacaacagcaacagcatgtgctgggggaaagaccagtgcccctactccggttgcaaggaggcgctcatccgcac

SEQ ID NO: 396871 - DNA, 120 bp, Artificial Sequence
  ENSG00000145850_2 (sequence is synthesized)
tgatggaatgagggtgacctcaagaaagtcagcaaaatatagacttcaggggactatcccgagaggtgatgtctccttgaccatcttaaaccccagtgaaagtgacagcggtgtgtactg

SEQ ID NO: 396872 - DNA, 120 bp, Artificial Sequence
  ENSG00000145850_3 (sequence is synthesized)
ctgccgcatagaagtgcctggctggttcaacgatgtaaagataaacgtgcgcctgaatctacagagagcctcaacaaccacgcacagaacagcaaccaccaccacacgcagaacaacaac

SEQ ID NO: 396873 - DNA, 120 bp, Artificial Sequence
  ENSG00000145850_4 (sequence is synthesized)
aacaagccccaccaccacccgacaaatgacaacaaccccagctgcacttccaacaacagtcgtgaccacacccgatctcacaaccggaacaccactccagatgacaaccattgccgtctt

SEQ ID NO: 396874 - DNA, 120 bp, Artificial Sequence
  ENSG00000145850_5 (sequence is synthesized)
aacacgtgcctttcactaaccccaagcacccttccggaggaagccacaggtcttctgactcccgagccttctaaggaagggcccatcctcactgcagaatcagaaactgtcctccccagt

SEQ ID NO: 396875 - DNA, 120 bp, Artificial Sequence
  ENSG00000145850_6 (sequence is synthesized)
gattcctggagtagtgttgagtctacttctgctgacactgtcctgctgacatccaaagagtccaaagtttgggatctcccatcaacatcccacgtgtcaatgtggaaaacgagtgattct

SEQ ID NO: 396876 - DNA, 120 bp, Artificial Sequence
  ENSG00000145850_7 (sequence is synthesized)
gtgtcttctcctcagcctggagcatctgatacagcagttcctgagcagaacaaaacaacaaaaacaggacagatggatggaatacccatgtcaatgaagaatgaaatgcccatctcccaa

SEQ ID NO: 396877 - DNA, 120 bp, Artificial Sequence
  ENSG00000145850_8 (sequence is synthesized)
ctactgatgatcatcgccccctccttgggatttgtgctcttcgcattgtttgtggcgtttctcctgagagggaaactcatggaaacctattgttcgcagaaacacacaaggctagactac

SEQ ID NO: 396878 - DNA, 120 bp, Artificial Sequence
  ENSG00000145850_9 (sequence is synthesized)
attggagatagtaaaaatgtcctcaatgacgtgcagcatggaagggaagacgaagacggcctttttaccctctaacaacgcagtagcatgttagattgaggatgggggcatgacactcca

SEQ ID NO: 396879 - DNA, 120 bp, Artificial Sequence
  ENSG00000145850_10 (sequence is synthesized)
gtgtcaaaataagtcttagtagatttccttgtttcataaaaaagactcacttattccatggatgtcattgatccaggcttgctttagtttcatgaatgaagggtactttagagaccacaa

SEQ ID NO: 396880 - DNA, 120 bp, Artificial Sequence
  ENSG00000145850_11 (sequence is synthesized)
gtgttctagaatccctggtttccttctatctacctaatctgcgtgaaatgtgacagtatctcaccatttctttctctttctgaaccacattgggtgccaacagaacttgctctctgttct

SEQ ID NO: 396881 - DNA, 85 bp, Artificial Sequence
  ENSG00000145860_0 (sequence is synthesized)
agactccctgtctttgcggtttgggagatgatgagaaaccacagaattgctagtagtttatgtggagatcaggtcttctgctgca

SEQ ID NO: 396882 - DNA, 120 bp, Artificial Sequence
  ENSG00000145860_1 (sequence is synthesized)
aaggagaaactggaggcagtgttaaatgtggccctgagggtgccaagcatcatgctgttggatgtcctgtacagatgggatgtcagctcctttttccagcagatccaaagaagtagcctt

SEQ ID NO: 396883 - DNA, 120 bp, Artificial Sequence
  ENSG00000145860_2 (sequence is synthesized)
agtaataaccctcttttccagtataagtatttggctcttaatatgcattatgtaggttatatcttaagtgtggtgctgctaacattgcccaggcagcatctggttcagctttatctatat

SEQ ID NO: 396884 - DNA, 120 bp, Artificial Sequence
  ENSG00000145860_3 (sequence is synthesized)
tttttgactgctctgctcctctatgctggacatcaaatttccagggactatgttcggagtgaactggagtttgcctatgagggaccaatgtatttagaacctctctctatgaatcggttt

SEQ ID NO: 396885 - DNA, 120 bp, Artificial Sequence
  ENSG00000145860_4 (sequence is synthesized)
accacagccttaataggtcagttggtggtgtgtactttatgctcctgtgtcatgaaaacaaagcagatttggctgttttcagctcacatgcttcctctgctagcacgactctgccttgtt

SEQ ID NO: 396886 - DNA, 120 bp, Artificial Sequence
  ENSG00000145860_5 (sequence is synthesized)
cctttggagacaattgttatcatcaataaatttgctatgatttttactggattggaagttctctattttcttgggtctaatcttttggtaccttataaccttgctaaatctgcatacaga

SEQ ID NO: 396887 - DNA, 120 bp, Artificial Sequence
  ENSG00000145860_6 (sequence is synthesized)
gaattggttcaggtagtggaggtatatggccttctcgccttgggaatgtccctgtggaatcaactggtagtccctgttcttttcatggttttctggctcgtcttatttgctcttcagatt

SEQ ID NO: 396888 - DNA, 120 bp, Artificial Sequence
  ENSG00000145860_7 (sequence is synthesized)
tactcctatttcagtactcgagatcagcctgcatcacgtgagaggcttcttttcctttttctgacaagtattgcggaatgctgcagcactccttactctcttttgggtttggtcttcacg

SEQ ID NO: 396889 - DNA, 120 bp, Artificial Sequence
  ENSG00000145860_8 (sequence is synthesized)
gtttcttttgttgccttgggtgttctcacactctgcaagttttacttgcagggttatcgagctttcatgaatgatcctgccatgaatcggggcatgacagaaggagtaacgctgttaatc

SEQ ID NO: 396890 - DNA, 120 bp, Artificial Sequence
  ENSG00000145860_9 (sequence is synthesized)
ctggcagtgcagactgggctgatagaactgcaggttgttcatcgggcattcttgctcagtattatccttttcattgtcgtagcttctatcctacagtctatgttagaaattgcagatcct

SEQ ID NO: 396891 - DNA, 120 bp, Artificial Sequence
  ENSG00000145860_10 (sequence is synthesized)
attgttttggcactgggagcatctagagacaagagcttgtggaaacacttccgtgctgtaagcctttgtttatttttattggtattccctgcttatatggcttatatgatttgccagttt

SEQ ID NO: 396892 - DNA, 120 bp, Artificial Sequence
  ENSG00000145860_11 (sequence is synthesized)
ttccacatggatttttggcttcttatcattatttccagcagcattcttacctctcttcaggttctgggaacactttttatttatgtcttatttatggttgaggaattcagaaaagagcca

SEQ ID NO: 396893 - DNA, 120 bp, Artificial Sequence
  ENSG00000145860_12 (sequence is synthesized)
gtggaaaacatggatgatgtcatctactatgtgaatggcacttaccgcctgctggagtttcttgtggccctctgtgtggtggcctatggcgtctcagagaccatctttggagaatggaca

SEQ ID NO: 396894 - DNA, 120 bp, Artificial Sequence
  ENSG00000145860_13 (sequence is synthesized)
gtgatgggctcaatgatcatcttcattcattcctactataacgtgtggcttcgggcccagctggggtggaagagctttcttctccgcagggatgctgtgaataagattaaatcgttaccc

SEQ ID NO: 396895 - DNA, 120 bp, Artificial Sequence
  ENSG00000145860_14 (sequence is synthesized)
ctacgaaagagcagcttgagaaacacaatgatatttgtgccatctgttatcaggacatgaaatctgctgtgatcacgccttgcagtcattttttccatgcaggctgtcttaagaaatggc

SEQ ID NO: 396896 - DNA, 120 bp, Artificial Sequence
  ENSG00000145860_15 (sequence is synthesized)
tgtatgtccaggagacctgccctctgtgccactgccatctgaaaaactcctcccagcttccaggattaggaactgagccagttctacagcctcatgctggagctgagcaaaacgtcatgt

SEQ ID NO: 396897 - DNA, 120 bp, Artificial Sequence
  ENSG00000145860_16 (sequence is synthesized)
ttcaggaaggtactgaacccccaggccaggagcatactccagggaccaggatacaggaaggttccagggacaataatgagtacattgccagacgaccagataaccaggaaggggcttttg

SEQ ID NO: 396898 - DNA, 120 bp, Artificial Sequence
  ENSG00000145860_17 (sequence is synthesized)
accccaaagaatatcctcacagtgcgaaagatgaagcacatcctgttgaatcagcctagaggagaagcagcaggaatgatgctttgatactctggaggagaagttaactcaagatggaat

SEQ ID NO: 396899 - DNA, 120 bp, Artificial Sequence
  ENSG00000145860_18 (sequence is synthesized)
tcatgttctgatttgaggaatgaaaatgagatgatcaggcaggaaactgacattccaaggatctaatccaggaagtactctcagtggggaccacctgctttcatcccctgacattgtggg

SEQ ID NO: 396900 - DNA, 120 bp, Artificial Sequence
  ENSG00000145860_19 (sequence is synthesized)
agaaattttgcaatgtatgctaatcaaaatgtatttatatgttctctgctgatgttttatagaggtttgtgaagaaaattcaacctcagcaacttcagaaactgcccctgatacgtgtga

SEQ ID NO: 396901 - DNA, 120 bp, Artificial Sequence
  ENSG00000145860_20 (sequence is synthesized)
gagagaaataaaatcagattttgagtgttgaagggactgaggaagtgaggataaagagcatgaggacagcatggaaagaaggaggcagaagtggaactgaactttcactctccatgggac

SEQ ID NO: 396902 - DNA, 120 bp, Artificial Sequence
  ENSG00000145860_21 (sequence is synthesized)
agatcaatctcattatcaagtctgaatagcaaccagccctctcctccaccccgtttctcctcagttaattggagctcagtcaggtgattattgagtcttgtacagcactgaaatgaaatc

SEQ ID NO: 396903 - DNA, 120 bp, Artificial Sequence
  ENSG00000145860_22 (sequence is synthesized)
aaagatgaagaagcattgattgtattcaaagattgaagcacgctcatactttgtatgtgctttagggaaggggtgggtgggcacttgggccttgcgggtgcattcatgtaatctgagact

SEQ ID NO: 396904 - DNA, 120 bp, Artificial Sequence
  ENSG00000145860_23 (sequence is synthesized)
cttgaactttatgacggagtcttcagtattttgatgtatatgaaacttttgttaaatatgttgtatacttcgctggctgtgtgaagtaaactaaaactctgatgaacactttggagtctg

SEQ ID NO: 396905 - DNA, 120 bp, Artificial Sequence
  ENSG00000145860_24 (sequence is synthesized)
ctttagtgaaggagaccaaagtgggaagggctttagggcactgatagaggccctgggtgtacttttcaatcctgtgtaatgtttaattcttgcaactgaatcaaaacagtgttaaattat

SEQ ID NO: 396906 - DNA, 120 bp, Artificial Sequence
  ENSG00000145860_25 (sequence is synthesized)
ggcaatatttgcactttgggaatgagtacataactgtatgatcacactctgcaaatgccacttttaaagctgttaatagactttgcaccttttctttgacaaggatgtgtcatatttaaa

SEQ ID NO: 396907 - DNA, 120 bp, Artificial Sequence
  ENSG00000145860_26 (sequence is synthesized)
tttttacattcatcatggctacaggtagaactggggaggggggaatgtaattttttatgggaattttgatatgaaaagaaactagtcatttatttatacaataggcttggctcaaaaagt

SEQ ID NO: 396908 - DNA, 120 bp, Artificial Sequence
  ENSG00000145860_27 (sequence is synthesized)
gtttttcagacctcggtattcctaatgtgggatgtgactttattttatttttagtagcaaatttggatgtagactgacagacatagctgaatgtcttaataaatttaaatttgaagataa

SEQ ID NO: 396909 - DNA, 120 bp, Artificial Sequence
  ENSG00000145860_28 (sequence is synthesized)
agagcgccgggggcgggaggagcaaacgcaggaggccatggccgccgacgccggcgccggctgctaaggggctcggcccgcgagcgcctgctgccgcggacgatggtgaccgtacgggcc

SEQ ID NO: 396910 - DNA, 120 bp, Artificial Sequence
  ENSG00000145860_29 (sequence is synthesized)
gggccgctgccgctgccgctgcctccgcctccccagaagcaacatccgaggctcggcgcagaagagccgccgctgtgagccgtgccgtaccggcccccgccgccgcccgaggagaacggg

SEQ ID NO: 396911 - DNA, 120 bp, Artificial Sequence
  ENSG00000145860_30 (sequence is synthesized)
cgggagggcgggcgagagagccggggagttgcggagcccgcccgccggcagcgccgctccccagggagggagtccgcagcctgaggtcttctccaagaaaaaaaaaaagaaaaaaaaaaa

SEQ ID NO: 396912 - DNA, 120 bp, Artificial Sequence
  ENSG00000145860_31 (sequence is synthesized)
attcattcatccagtcacttactccacaggggtttgagtgcctgcacttggtgctgggcacggctgagccatcccagacgccaaggagtttacagtctagtccagtcagtgacgaggtta

SEQ ID NO: 396913 - DNA, 120 bp, Artificial Sequence
  ENSG00000145860_32 (sequence is synthesized)
gttaaaacgaattctcgcatcattgctactgcgaatgcaccgggacaggatcagcccttcaaattctcccacgtggtccctgcaggtcttctccaagaaaaaaaaaaagaaaaaaaaaaa

SEQ ID NO: 396914 - DNA, 120 bp, Artificial Sequence
  ENSG00000145860_33 (sequence is synthesized)
agtggatggccttgcgtcgcagtctgcagtaaagaggaaactagtctgaaagggaaggagaggactgtgtgtctttttattttttaaaatacggagtgtgcagttttactgaatcttgaa

SEQ ID NO: 396915 - DNA, 120 bp, Artificial Sequence
  ENSG00000145860_34 (sequence is synthesized)
acttagaattttaggctctagctttgtgctcttaacattttcagtgaggcctaccatcctaaccgatggacagcccgaaaatttacttttcttaagatcagttttagttgatggtagaat

SEQ ID NO: 396916 - DNA, 120 bp, Artificial Sequence
  ENSG00000145860_35 (sequence is synthesized)
tccttcaataagaatgtgtttgggtaagtcatacagtgtatcccttgggactgtaaccatattaaccaaattcaacttaaatttctaggcaaaattatcttctggattaaaaaaaatgga

SEQ ID NO: 396917 - DNA, 120 bp, Artificial Sequence
  ENSG00000145860_36 (sequence is synthesized)
agaatggcgcctgtcacagtgcgcgtccaggtgtctctgcagtacgcctctccatagccacccgagccgggctgtatgggcttggctaggcttatgtctcccgcccacgcaccggaggcg

SEQ ID NO: 396918 - DNA, 120 bp, Artificial Sequence
  ENSG00000145861_0 (sequence is synthesized)
cgggatgggaaaactatgcctggggccgacgctctgcccggctgctgccgctgaggaaagccgggacgcggagccccgccgagagcttctttgctccggacgcccctggacgtggcgggc

SEQ ID NO: 396919 - DNA, 120 bp, Artificial Sequence
  ENSG00000145861_1 (sequence is synthesized)
agccgcgagggtaaccaccatgatcccctgggtgctcctggcctgtgccctcccctgtgctgctgacccactgcttggcgcctttgctcgcagggacttccggaaaggctcccctcaact

SEQ ID NO: 396920 - DNA, 120 bp, Artificial Sequence
  ENSG00000145861_2 (sequence is synthesized)
ggtctgcagcctgcctggcccccagggcccacccggccccccaggagccccagggccctcaggaatgatgggacgaatgggctttcctggcaaagacggccaagatggacacgacggcga

SEQ ID NO: 396921 - DNA, 120 bp, Artificial Sequence
  ENSG00000145861_3 (sequence is synthesized)
ccggggggacagcggagaggaaggtccacctggccggacaggtaaccggggaaagccaggaccaaagggcaaagccggggccattgggcgggctggcccccgtggccccaagggggtcaa

SEQ ID NO: 396922 - DNA, 120 bp, Artificial Sequence
  ENSG00000145861_4 (sequence is synthesized)
cggtacccccgggaagcatggcacaccaggcaagaaggggcccaagggcaagaagggggagccaggcctcccaggcccctgcagctgtggcagtggccataccaagtcagctttctcggt

SEQ ID NO: 396923 - DNA, 120 bp, Artificial Sequence
  ENSG00000145861_5 (sequence is synthesized)
ggcagtgaccaagagctacccacgggagcggctgcccatcaagtttgacaagattctgatgaacgagggtggccactacaatgcttccagcggcaagttcgtctgcggcgtgcctgggat

SEQ ID NO: 396924 - DNA, 120 bp, Artificial Sequence
  ENSG00000145861_6 (sequence is synthesized)
ctactacttcacctacgacatcacgctggccaacaagcacctggccatcggcctggtgcacaacggccagtaccgcatccggacctttgatgccaacaccggcaaccacgatgtggcctc

SEQ ID NO: 396925 - DNA, 120 bp, Artificial Sequence
  ENSG00000145861_7 (sequence is synthesized)
aggctccaccatcctggctctcaagcagggtgacgaagtttggctgcagatcttctactcagagcagaacgggctcttctatgacccttactggacagacagcctctttacgggcttcct

SEQ ID NO: 396926 - DNA, 120 bp, Artificial Sequence
  ENSG00000145861_8 (sequence is synthesized)
aatctatgccgaccaggatgaccccaacgaggtatagacatgccacggcggtcctccaggcagggaacaagcttctggacttgggcttacagagcaagaccccacaactgtaggctgggg

SEQ ID NO: 396927 - DNA, 120 bp, Artificial Sequence
  ENSG00000145861_9 (sequence is synthesized)
tcacttctttttaaagtatctactgtgtaacaggcactatgctattctctgaaagatgcagcagtggacaagacagagtatctgtcctcatgcagcttacattctagcaggagatacaat

SEQ ID NO: 396928 - DNA, 120 bp, Artificial Sequence
  ENSG00000145861_10 (sequence is synthesized)
ttacaaatatacaagcaaataatataatattatgccaggatagaaatgaacatgccatggttgacagtaataggaataacaggagacagggaagaggtggaaatttgtttctttttttaa

SEQ ID NO: 396929 - DNA, 120 bp, Artificial Sequence
  ENSG00000145861_11 (sequence is synthesized)
gtttgcgtttttaggtttacttacatacagtgactctccagattttaagttgacaactcagtgaataatttttgcttatgtgcacactctgaaacctccatgtagatcaaagaacaagct

SEQ ID NO: 396930 - DNA, 120 bp, Artificial Sequence
  ENSG00000145861_12 (sequence is synthesized)
atttccaacttctcacctcccttccccaaaagctctcttaagacccctctaagtcagtacctggaaaatttccatttttgagctgagttccaaagaaggaaatagagcaacacaaaggcc

SEQ ID NO: 396931 - DNA, 120 bp, Artificial Sequence
  ENSG00000145861_13 (sequence is synthesized)
tcgaaaagaggtctccagcaaaaggctctgcaagtgcaaagaccttgacaggaaagagggaggggccaaggtaagaactgagaagggaggcatgaggcgtgaggctggaagataatacag

SEQ ID NO: 396932 - DNA, 120 bp, Artificial Sequence
  ENSG00000145861_14 (sequence is synthesized)
aatgtcccaggccatggcagagctcgttccattcacgaaggcttatcagaatacaaagtgacactgataggcggatcatcttgaatctgctcattgcatgagtcaagtcggccacagact

SEQ ID NO: 396933 - DNA, 120 bp, Artificial Sequence
  ENSG00000145861_15 (sequence is synthesized)
tgagcgctttattattagttaatcttttgcaggcccgcttctcaatgaatgagatacaccaggatatgcacgtgcatctgagaaccgctgctctgagatggcaggaatggatcccacgca

SEQ ID NO: 396934 - DNA, 120 bp, Artificial Sequence
  ENSG00000145861_16 (sequence is synthesized)
aatgaatcgcaccccaagcacaggtgttgccagtatgcagggatctgggggcttaagaagctgcagtaaaagtgccaggtgctggcgggatgtggtagctcatgcctataatcccaggac

SEQ ID NO: 396935 - DNA, 67 bp, Artificial Sequence
  ENSG00000145861_17 (sequence is synthesized)
ggatcgtctaaaaaaatacaaaaattagacaggcgtggtgttgggtgcctgtaatcccagctactgg

SEQ ID NO: 396936 - DNA, 120 bp, Artificial Sequence
  ENSG00000145863_0 (sequence is synthesized)
agtcagaggagcctgggtgtctgcaggacataatctaagaccacaaaccaccttgttccacgtgagaaggaaacaagaaagaagggagccaggggaatcctgcaaatttttaggcaacct

SEQ ID NO: 396937 - DNA, 120 bp, Artificial Sequence
  ENSG00000145863_1 (sequence is synthesized)
ctttatctattggattactgacttgaggcaaacaaggaacagagatatgaagggtttgaaagatttctccagttgattggcagagaagagctggctagcagggaggacgaccctaggagg

SEQ ID NO: 396938 - DNA, 120 bp, Artificial Sequence
  ENSG00000145863_2 (sequence is synthesized)
gtgaattctgcatttcagtgcactgcaggatggcgtcgtctctgccctggctgtgcattattctgtggctagaaaatgccctagggaaactcgaagttgaaggcaacttctactcagaaa

SEQ ID NO: 396939 - DNA, 120 bp, Artificial Sequence
  ENSG00000145863_3 (sequence is synthesized)
acgtcagtcggatcctggacaacttgcttgaaggctatgacaatcggctgcggccgggatttggaggtgctgtcactgaagtcaaaacagacatttatgtgaccagttttgggcccgtgt

SEQ ID NO: 396940 - DNA, 120 bp, Artificial Sequence
  ENSG00000145863_4 (sequence is synthesized)
cagatgtggagatggagtatacgatggatgtttttttccgccagacctggactgatgagaggttgaagtttggggggccaactgagattctgagtctgaataatttgatggtcagtaaaa

SEQ ID NO: 396941 - DNA, 120 bp, Artificial Sequence
  ENSG00000145863_5 (sequence is synthesized)
tctggacgcctgacacctttttcagaaatggtaaaaagtccattgctcacaacatgacaactcctaataaactcttcagaataatgcagaatggaaccattttatacaccatgaggctta

SEQ ID NO: 396942 - DNA, 120 bp, Artificial Sequence
  ENSG00000145863_6 (sequence is synthesized)
ccatcaatgctgactgtcccatgaggctggttaactttcctatggatgggcatgcttgtccactcaagtttgggagctatgcttatcccaaaagtgaaatcatatatacgtggaaaaaag

SEQ ID NO: 396943 - DNA, 120 bp, Artificial Sequence
  ENSG00000145863_7 (sequence is synthesized)
gaccactttactcagtagaagtcccagaagaatcttcaagccttctccagtatgatctgattggacaaacagtatctagtgagacaattaaatctaacacaggtgaatacgttataatga

SEQ ID NO: 396944 - DNA, 120 bp, Artificial Sequence
  ENSG00000145863_8 (sequence is synthesized)
cagtttacttccacttgcaaaggaagatgggctacttcatgatacagatatacactccttgcattatgacagtcattctttcccaggtgtctttctggattaataaggagtccgtcccag

SEQ ID NO: 396945 - DNA, 120 bp, Artificial Sequence
  ENSG00000145863_9 (sequence is synthesized)
caagaactgtttttgggatcaccactgttttaactatgaccactttgagcatcagtgcccggcactctttgccaaaagtgtcatatgccactgccatggattggttcatagctgtttgct

SEQ ID NO: 396946 - DNA, 120 bp, Artificial Sequence
  ENSG00000145863_10 (sequence is synthesized)
accaatcttcagacacagaaggccaaaaggaaggcacagtttgcagccccacccacagtgacaatatcaaaagctactgaacctttggaagctgagattgttttgcatcctgactccaaa

SEQ ID NO: 396947 - DNA, 120 bp, Artificial Sequence
  ENSG00000145863_11 (sequence is synthesized)
tatcatctgaagaaaaggatcacttctctgtctttgccaatagtttcatcttccgaggccaataaagtgctcacgagagcgcccatcttacaatcaacacctgtcacacccccaccactc

SEQ ID NO: 396948 - DNA, 120 bp, Artificial Sequence
  ENSG00000145863_12 (sequence is synthesized)
tcgccagcctttggaggcaccagtaaaatagaccagtattctcgaattctcttcccagttgcatttgcaggattcaaccttgtgtactgggtagtttatctttccaaagatacaatggaa

SEQ ID NO: 396949 - DNA, 120 bp, Artificial Sequence
  ENSG00000145863_13 (sequence is synthesized)
gtcagtagcagtgttgaatagcttgcggccaggacaacctgaattctataagttcttgttttctgtttcctatgttttcttaaaaaatagcattgagacttgtgtagatgcttctcagaa

SEQ ID NO: 396950 - DNA, 120 bp, Artificial Sequence
  ENSG00000145863_14 (sequence is synthesized)
catgaaatcaaattggaaatctgtaacgcagcttccgtaagcatgtgtgggcaaaaaagcaataatcctactcctcaaaatagaaagttgaagattgctgaaaaatatgacttttctgta

SEQ ID NO: 396951 - DNA, 120 bp, Artificial Sequence
  ENSG00000145863_15 (sequence is synthesized)
tgttagagaaaaactttatgaggatgaaatgggttcaagatgaatttgtcaacttttgtcttccattgttcagtatttttaattgtcactgtaaataacatttaccacaaggcagataaa

SEQ ID NO: 396952 - DNA, 120 bp, Artificial Sequence
  ENSG00000145863_16 (sequence is synthesized)
ataagaaatgctgacacttccaaaggttgccttaaaatatgtttattttggcttagttcccgagagggcaaaatataaatacagtctaaatatttatcagtaggttaataccagcatgtt

SEQ ID NO: 396953 - DNA, 120 bp, Artificial Sequence
  ENSG00000145863_17 (sequence is synthesized)
ggaggcctttatgctagtaaaatggctttcagtggcattgtaaagcctacattgagcttagccatttgtttttaacctcgctgtgctcttttacctcaataaaatgtggtgtttgtatac

SEQ ID NO: 396954 - DNA, 120 bp, Artificial Sequence
  ENSG00000145863_18 (sequence is synthesized)
atataaattatacatagctcataaattatgtatgcatatgtacatagctgtagttggactaaaattcagtgtgttttatcctactaaattctccttttaaaataatacacttaccataat

SEQ ID NO: 396955 - DNA, 120 bp, Artificial Sequence
  ENSG00000145863_19 (sequence is synthesized)
tctatgaggttgtagaaaaaagtactcattataaggaagccttgtatattatgactatggttatctcttgtgttttccacatttccaattataacactaaataaaacaacaataaacatg

SEQ ID NO: 396956 - DNA, 120 bp, Artificial Sequence
  ENSG00000145863_20 (sequence is synthesized)
atctcagaggaaaggaaaagtatacatccattgggtgactcctatatcaaatcatgaaagaggccagaagtggtgttgcatgtatttgtaacagggtggaatagagtagattagacaaaa

SEQ ID NO: 396957 - DNA, 120 bp, Artificial Sequence
  ENSG00000145863_21 (sequence is synthesized)
gaggagagcaggtgtggcgtgccagcggaagataggtgccgacagggccttactctgtcactcaggctggatggagtgcagtggcacgatcatcactgcaaccttgaccttctgggctct

SEQ ID NO: 396958 - DNA, 120 bp, Artificial Sequence
  ENSG00000145863_22 (sequence is synthesized)
gatgaccctcccacctcagccacttgagcagctgggaccacagcccactgagaccaaagtccatgtggtcagacacaaaagagccatcgattgctgaacctgttcactcctaccttcaaa

SEQ ID NO: 396959 - DNA, 120 bp, Artificial Sequence
  ENSG00000145863_23 (sequence is synthesized)
ctatgtttgtatttccttttttatagacaatgtgcactttgaaggaaaaaaagacaactcgtcaaattcactgctatatttaatttgtttcaaatatttagatgcttatcccaaaagtga

SEQ ID NO: 396960 - DNA, 120 bp, Artificial Sequence
  ENSG00000145863_24 (sequence is synthesized)
cacaggtaagaatttgaccaaaggatggaaataatccctcaggatgactccagtgcacattttcaaaatatctatttctttttccttcgccttagccattctcagctaagcatgctgttt

SEQ ID NO: 396961 - DNA, 120 bp, Artificial Sequence
  ENSG00000145863_25 (sequence is synthesized)
tgcagtgatgagtagctttccttaaaactgattttgcaaccaggtgcatataaagatttgtgtaatcttggaataagtagttttttttatgtatatgatataaagaaccctactgaaaac

SEQ ID NO: 396962 - DNA, 120 bp, Artificial Sequence
  ENSG00000145863_26 (sequence is synthesized)
aataagttgatgtgtctcttcgctctatcatctgctgatcaagtagctttctcatatactgaaatgtacctttgcttgttttcttccagtcaatgttaatttaaaagttgtcaagattta

SEQ ID NO: 396963 - DNA, 120 bp, Artificial Sequence
  ENSG00000145864_0 (sequence is synthesized)
gcgcggggaagggaagaagaggacgaggtggcgcggagaccgcgggagaacacagtgcctccggaggaaatctgctcggtccccggcagccgccgcttcccctttgatgttttggtacgc

SEQ ID NO: 396964 - DNA, 120 bp, Artificial Sequence
  ENSG00000145864_1 (sequence is synthesized)
cgtgcgcatgcgcctcacattagaattactgcactgggcagactaagttggatctcctctcttcagtgaaaccctcaattccatcaaaaactaaagggatgtggagagtgcggaaaaggg

SEQ ID NO: 396965 - DNA, 120 bp, Artificial Sequence
  ENSG00000145864_2 (sequence is synthesized)
gctactttgggatttggtccttccccttaataatcgccgctgtctgtgcgcagagtgtcaatgaccctagtaatatgtcgctggttaaagagacggtggatagactcctgaaaggctatg

SEQ ID NO: 396966 - DNA, 120 bp, Artificial Sequence
  ENSG00000145864_3 (sequence is synthesized)
acattcgtctgagaccagattttggaggtccccccgtggctgtggggatgaacattgacattgccagcatcgatatggtttctgaagtcaatatggattataccttgacaatgtactttc

SEQ ID NO: 396967 - DNA, 120 bp, Artificial Sequence
  ENSG00000145864_4 (sequence is synthesized)
aacaagcctggagagataagaggctgtcctataatgtaatacctttaaacttgactctggacaacagagtggcagaccagctctgggtgcctgatacctatttcctgaacgataagaagt

SEQ ID NO: 396968 - DNA, 120 bp, Artificial Sequence
  ENSG00000145864_5 (sequence is synthesized)
catttgtgcacggagtgactgttaagaaccgcatgattcgcctgcatcctgatggcaccgtcctttatggactcagaatcacaaccacagctgcctgcatgatggacctaaggaggtacc

SEQ ID NO: 396969 - DNA, 120 bp, Artificial Sequence
  ENSG00000145864_6 (sequence is synthesized)
cactggatgaacaaaactgcaccttggaaattgagagctatggatacacaactgatgacattgagttttactggcgtggcgatgataatgcagtaacaggagtaacgaaaattgaacttc

SEQ ID NO: 396970 - DNA, 120 bp, Artificial Sequence
  ENSG00000145864_7 (sequence is synthesized)
cacagttctctattgtagattacaaacttatcaccaagaaggttgttttttccacaggttcctatcccaggttatccctcagctttaagcttaagagaaacattggctactttatcctgc

SEQ ID NO: 396971 - DNA, 120 bp, Artificial Sequence
  ENSG00000145864_8 (sequence is synthesized)
aaacatacatgccttccatcctgattaccatcctctcctgggtctccttctggattaattacgatgcttcagctgcaagggtggcattaggaatcacaactgtcctcacaatgaccacaa

SEQ ID NO: 396972 - DNA, 120 bp, Artificial Sequence
  ENSG00000145864_9 (sequence is synthesized)
tcaacacccacctccgggaaactctccctaaaatcccctatgtgaaggccattgacatgtacctgatggggtgctttgtcttcgttttcatggcccttctggaatatgccctagtcaact

SEQ ID NO: 396973 - DNA, 120 bp, Artificial Sequence
  ENSG00000145864_10 (sequence is synthesized)
acatcttctttgggagggggccccaacgccaaaagaaagcagctgagaaggctgccagtgccaacaatgagaagatgcgcctggatgtcaacaagattttttataaagatattaaacaaa

SEQ ID NO: 396974 - DNA, 120 bp, Artificial Sequence
  ENSG00000145864_11 (sequence is synthesized)
atgggacccaatatcgatccttgtgggaccctactggaaacctctccccaactagacggactaccaattacgatttctctctgtatacgatggacccccatgagaacatcttactgagca

SEQ ID NO: 396975 - DNA, 120 bp, Artificial Sequence
  ENSG00000145864_12 (sequence is synthesized)
ctctcgagataaaaaatgaaatggccacatctgaggctgtgatgggacttggagaccccagaagcacaatgctagcctatgatgcctccagcatccagtatcggaaagctgggttgccca

SEQ ID NO: 396976 - DNA, 120 bp, Artificial Sequence
  ENSG00000145864_13 (sequence is synthesized)
ggcatagttttggccgaaatgctctggaacgacatgtggcgcaaaagaaaagtcgcctgaggagacgcgcctcccaactgaaaatcaccatccctgacttgactgatgtgaatgccatag

SEQ ID NO: 396977 - DNA, 120 bp, Artificial Sequence
  ENSG00000145864_14 (sequence is synthesized)
atcggtggtcccgcatattcttcccagtggttttttccttcttcaacatcgtctattggctttattatgtgaactaaaacatggcctcccactggaagcaaggactagattcctcctcaa

SEQ ID NO: 396978 - DNA, 120 bp, Artificial Sequence
  ENSG00000145864_15 (sequence is synthesized)
accagttgtacagcctgatgtaggacttggaaaacacatcaatccaggacaaaagtgacgctaaaataccttagttgctggcctatcctgtggtccatttcataccatttgggttgcttc

SEQ ID NO: 396979 - DNA, 120 bp, Artificial Sequence
  ENSG00000145864_16 (sequence is synthesized)
tgctaagtaatgaatacactaaggtccttgtggttttccagttaaaacgcaagtgatttttacacatggtggctagacagcctgagtgctccatgttgtctgtttagtatgcagcctact

SEQ ID NO: 396980 - DNA, 120 bp, Artificial Sequence
  ENSG00000145864_17 (sequence is synthesized)
cagaggggaataatttggaagatattcttagaaggctcaacagcattgtcagtcatttggtcataaccagatactcctcatcttcctttttaaggtcggcatgctgttgagatggcattg

SEQ ID NO: 396981 - DNA, 120 bp, Artificial Sequence
  ENSG00000145864_18 (sequence is synthesized)
tccttatgaaacattatctgtaatgccatgcaaacacattacttgaagatgatctatgattttcttactgagatgataatggtgtcatgggaagattattcccactggtttctaaaagat

SEQ ID NO: 396982 - DNA, 120 bp, Artificial Sequence
  ENSG00000145864_19 (sequence is synthesized)
tctcttgtgatttgagcaggctaggggaatcaagacagagactcaggaaaccgatttggccagtccctttgcttgagcacggagaatcaactatgatgtctttcattttggcatttagag

SEQ ID NO: 396983 - DNA, 120 bp, Artificial Sequence
  ENSG00000145864_20 (sequence is synthesized)
atgaggagacttctggacaatatcatgcatggtggccaagaaaatttttgctaaacggctatttcctaggtggttaaagtaagagttaacaacacagagcagagtagaaaatcagaaacg

SEQ ID NO: 396984 - DNA, 120 bp, Artificial Sequence
  ENSG00000145864_21 (sequence is synthesized)
acggttgtaacaaaaagcaagcaagcaagaaagcatgacccttatcagctccacacagcatctggtctatacatactgtgtctagtggcagagggtgagtaagagagattgtttttccaa

SEQ ID NO: 396985 - DNA, 120 bp, Artificial Sequence
  ENSG00000145864_22 (sequence is synthesized)
catcactagcttttgacagcatacctaaagaggtttttatagtttaatcgaagataaccatgaaatacaaaaattagagaaatgagaattgtcttagatattcaggttagattcagagtc

SEQ ID NO: 396986 - DNA, 120 bp, Artificial Sequence
  ENSG00000145864_23 (sequence is synthesized)
attcaaatatacaaatacagagcacaaactagcaaacagattgtttttctcagacgaagtcagctgtccctgcaatttttgtccctataattttatttcttaatttaatagagtatttca

SEQ ID NO: 396987 - DNA, 120 bp, Artificial Sequence
  ENSG00000145864_24 (sequence is synthesized)
agagaaggatttgttcatcactttaaaggattcatggtcctctccagctttttttttgcttccaaaattctgattatattcttaggagactggcaaagtaaggctttggagagattgagt

SEQ ID NO: 396988 - DNA, 120 bp, Artificial Sequence
  ENSG00000145864_25 (sequence is synthesized)
gaactatattttcttatatgcaatgaaattcaccattgtatttttcaaagcaaataatacttcaaggagtatgaacacacagagagttaatttgtgcattcattggtttggggcttgatt

SEQ ID NO: 396989 - DNA, 120 bp, Artificial Sequence
  ENSG00000145864_26 (sequence is synthesized)
ttcttaagagtgctttcattgtatatgttgcaatctgcctaatcaaggaaaatatgaaaactagtggaaaataataacaaagccacattaacatgataaatgttatgagcctcagttgat

SEQ ID NO: 396990 - DNA, 120 bp, Artificial Sequence
  ENSG00000145864_27 (sequence is synthesized)
attgcagaaaaatatataactgttaatcaggcaggcatgatgtattttttttctatttttaagttatgccattgtgcttctttctacactaattggacataagcattcatatgttggaca

SEQ ID NO: 396991 - DNA, 120 bp, Artificial Sequence
  ENSG00000145864_28 (sequence is synthesized)
agaggagaataagctaatatgtcttccttctatcaatataaggctcatattttgcttttcttatagaaaatagtgaattgctaaattttccttaaagttgaatttgattgaactttttct

SEQ ID NO: 396992 - DNA, 120 bp, Artificial Sequence
  ENSG00000145864_29 (sequence is synthesized)
tggaggatgactttgctatttctattttgaaaacaaagaaagctcttctttttagagtaatatccctaattgtgcatagcagccagtatccacctgtgaataatgtatgttttcttgatt

SEQ ID NO: 396993 - DNA, 120 bp, Artificial Sequence
  ENSG00000145864_30 (sequence is synthesized)
tatccttcagctttctgaatttgccccaaaatggaatggtattttgtttttcaccagtgtaggaaaccttggccattatattttgattacataatcttgagcacctctgagtatcatctt

SEQ ID NO: 396994 - DNA, 120 bp, Artificial Sequence
  ENSG00000145864_31 (sequence is synthesized)
tgggcagaatctgaccaagattcttctcacaggctcagagtagagattcctcatgtttctccaggacacactttctcctaggcaatcattttggggcatcacactaagtaaagtgcctgc

SEQ ID NO: 396995 - DNA, 120 bp, Artificial Sequence
  ENSG00000145864_32 (sequence is synthesized)
cccttgtcaacagggggtaaagtttgactaaaaaacatcaggaaggaacatattgataactcaggggcacaactccaaaatgccattctgaaaaggctcttctagagtcaactcagagcc

SEQ ID NO: 396996 - DNA, 120 bp, Artificial Sequence
  ENSG00000145864_33 (sequence is synthesized)
caagtgtagaagtgggctcttatgtgcaatcactgtacaagccataaaaatctttgatattgccatttatgattacaacaaaattttagatgtccaagaaagtcaacagaacaatccaga

SEQ ID NO: 396997 - DNA, 120 bp, Artificial Sequence
  ENSG00000145864_34 (sequence is synthesized)
tcaaagtgtagagaagcatctttgcagcttgagcctcaaaagcataaaaccaggaattcatttctgctctcagtgatacaagaaacaaggcaaaggaaaaaagatgggaccttagaagca

SEQ ID NO: 396998 - DNA, 120 bp, Artificial Sequence
  ENSG00000145864_35 (sequence is synthesized)
atgccctagagtaaaaagcatacattggcactcagtaaccacagagatagaaacaactgactcagcctctccagaaataacagtagatgtagaatttgttcttaaatatatgtttcgttg

SEQ ID NO: 396999 - DNA, 120 bp, Artificial Sequence
  ENSG00000145864_36 (sequence is synthesized)
aaatgaaatgcagtcatcaaatgcgaggaggggtgctagacctgataagtctaggaagaccagtcagcttgatagccagttgttaaactaaaggaccacaaaggtgtgtttagtagttct

SEQ ID NO: 397000 - DNA, 120 bp, Artificial Sequence
  ENSG00000145864_37 (sequence is synthesized)
gatatgggattactatcagtttatacatatgtatagattttcttttaattataaacagccagatagccagcaattaaggtgttttttcatctttgtgaaattcatggacaaattctgact

SEQ ID NO: 397001 - DNA, 120 bp, Artificial Sequence
  ENSG00000145864_38 (sequence is synthesized)
ctaaaatgcacagtctacatgaaatctttgatctcaatctgtatatatatatattgtacatgaccgctagtaggtatgaaatgcatttcagagttgaaaactcatgcaacataatcatgt

SEQ ID NO: 397002 - DNA, 120 bp, Artificial Sequence
  ENSG00000145864_39 (sequence is synthesized)
gtttgcataaggaatgttaaaattctttctactacaatttattaacaggggaaaagattcaagcagtgccatctagaccttttctcttctcatttcttcaaaagcagtgctaagtaaaat

SEQ ID NO: 397003 - DNA, 120 bp, Artificial Sequence
  ENSG00000145864_40 (sequence is synthesized)
aataataataaaaatggtttatgaaccaaaagactttacattctagcattaggaacacacacaaaaaaatctgtcagcttacaaaagcacaacacataaagaaagagcagtggaatgcgt

SEQ ID NO: 397004 - DNA, 120 bp, Artificial Sequence
  ENSG00000145864_41 (sequence is synthesized)
aatggggaaatgaatcatgtttaaagcaagacttgcattaaattggcaactaagataatttccattttctataggtaaccgtgttccagtttaatgattaccttcatactcaacaagaaa

SEQ ID NO: 397005 - DNA, 120 bp, Artificial Sequence
  ENSG00000145864_42 (sequence is synthesized)
aatggcaaagcaacatcatcaaaataggtcttacaacatatctacatgtatatatgtgtatatatagattcatataaacatacatacatatatatgcattcatatgttggaaaacaaaag

SEQ ID NO: 397006 - DNA, 120 bp, Artificial Sequence
  ENSG00000145864_43 (sequence is synthesized)
gaataagctaatatgttttatttccttcattaaaccagtatatgagtatttttaatttggcaaacaaaaatcaacatactgaaataagtaatacagggtactgagcatttctctatcagc

SEQ ID NO: 397007 - DNA, 120 bp, Artificial Sequence
  ENSG00000145864_44 (sequence is synthesized)
aaatcaatgcctacagtttttatgaaccattgcacagttcaactcgacaatagtactgtaccccagaacatcagaagttaagtagttgtcacattgcttgtctaattgctctctttttca

SEQ ID NO: 397008 - DNA, 120 bp, Artificial Sequence
  ENSG00000145864_45 (sequence is synthesized)
aggaaacaaataacattgtccattggtgagtcaaaaacaaacatgtcttaagaaaatgaaaaatgataaaaattcctccaaagaggaagaaaaaaaaaaaactaaaccccaccatgttgg

SEQ ID NO: 397009 - DNA, 120 bp, Artificial Sequence
  ENSG00000145864_46 (sequence is synthesized)
ttagggcaaaatactaagtattcacaactgtagcaatcatgccatttggctaaatgtacagagtacatgtaatgtgagcaaccataactttcactgaacgtgtgtaaatattaaaacaga

SEQ ID NO: 397010 - DNA, 120 bp, Artificial Sequence
  ENSG00000145864_47 (sequence is synthesized)
tttcttaaatatttttaacttctaatttgtattttatggtaaggcaatgtgctaattccgtttatggcttaagttgatgtgttataatatgtaaataattaaacatgctgtaaatgaata

SEQ ID NO: 397011 - DNA, 120 bp, Artificial Sequence
  ENSG00000145864_48 (sequence is synthesized)
gtcaatagatacaaataattgtttagtttttttcttaatttttatttattttttactaagtactattactgcagtgcccccagcagagtaatttaaacacccttttgcataaatggtttg

SEQ ID NO: 397012 - DNA, 120 bp, Artificial Sequence
  ENSG00000145864_49 (sequence is synthesized)
ggaatcccagacagaagggtttcaatttgctatcacacacacagtcacacacagtcacacacacacacacacacacactcaaacacacataatcttttgctcacccactctgtctctctg

SEQ ID NO: 397013 - DNA, 120 bp, Artificial Sequence
  ENSG00000145864_50 (sequence is synthesized)
cccgtctatgggaaacactctactatttatgtagtcaatataacaaacaagagatagcctttgaaatggcaattgggaaaagcaaaaatgatcattgataacttaatagacttttttata

SEQ ID NO: 397014 - DNA, 120 bp, Artificial Sequence
  ENSG00000145864_51 (sequence is synthesized)
tgtcagagttcaagaaaccaaagtttgcaacttaaatctcagttttcaaacagtaaaagtttgtatagatggcactacagaaaaataaaaatggttattcctaccagctccagaaatgtg

SEQ ID NO: 397015 - DNA, 120 bp, Artificial Sequence
  ENSG00000145864_52 (sequence is synthesized)
ttacacaatatacactagaagactttttttttaataatagtattttgtccttaggtagtattgttcctttcaaccaaagactccagaattattgaaaaacaaaaaaggaaaaaaaaaatg

SEQ ID NO: 397016 - DNA, 120 bp, Artificial Sequence
  ENSG00000145864_53 (sequence is synthesized)
agataatgggggaaaaaaaggacgctgcttcacaccaaaggtttaaaaaaatattttccaaatgcactaggaacattgtaaaaaccagaaaggagtgaacagaatgctaatgaagatact

SEQ ID NO: 397017 - DNA, 120 bp, Artificial Sequence
  ENSG00000145864_54 (sequence is synthesized)
gccctaaagaaatctgtacaaaaaaaaaaaaaaaaagcagcactcttaaaaagctactaggtttttggaaattgaagtaaaatatttctgtagatatattcaaaattctgacatcaaatt

SEQ ID NO: 397018 - DNA, 120 bp, Artificial Sequence
  ENSG00000145864_55 (sequence is synthesized)
ttaatttgcttaaagaagttttatttgtgatgaagatcaatatgattcaaatgatgaaaaacaaaactgtatgtcctttgagttcccaaaccaaatgtcactgccgtgtcacatcctcta

SEQ ID NO: 397019 - DNA, 120 bp, Artificial Sequence
  ENSG00000145864_56 (sequence is synthesized)
atctgatgcccatgtgtgtgtccttgcgccatttgaagcaagttgacagttccatcagtttgtttttgtttttgtttttggttcaataatttgagttcaaccatcgtcattttaaacata

SEQ ID NO: 397020 - DNA, 120 bp, Artificial Sequence
  ENSG00000145864_57 (sequence is synthesized)
attaatcccaacaaagttgcctatagtttaatttaaacctcacagcatttttaatttattttgcatgggtgtttaaatagttctgttacgaatattgtccctgcacagttctaaattgtc

SEQ ID NO: 397021 - DNA, 120 bp, Artificial Sequence
  ENSG00000145864_58 (sequence is synthesized)
cttttataaaaaaaaaaagtgatattctagtttcttcacaatgtagtgattatcagccttactaattaccttgtagcctttcttaatatgcacataatgcacattttccgatggctagaa

SEQ ID NO: 397022 - DNA, 120 bp, Artificial Sequence
  ENSG00000145864_59 (sequence is synthesized)
aaatgcaaaacacagtggatatcattgcatctattttcatgtctttctaaaaacaggactattaaaatctctgggatacatgagatagtaaaaaatgaggattataaatgaatagcacat

SEQ ID NO: 397023 - DNA, 120 bp, Artificial Sequence
  ENSG00000145864_60 (sequence is synthesized)
aagaattattttcttgaatttaaacttattgcagccagtttcagcatgtaaatatataataatgttggctagtgtgtaattcttgaactaagaaatataaataaaaataaaaagattgtg

SEQ ID NO: 397024 - DNA, 120 bp, Artificial Sequence
  ENSG00000145864_61 (sequence is synthesized)
gcgcggggaagggaagaagaggacgaggtggcgcggagaccgcgggagaacacagtgcctccggaggtgaggggctcttcctcattttgcctgccttctagggaccgctccggcttcttg

SEQ ID NO: 397025 - DNA, 120 bp, Artificial Sequence
  ENSG00000145864_62 (sequence is synthesized)
tatccagaggtacagcccctgaacagccgggagtccccgtcccctgtcccggacgaggggccgggggcgccagctccgcacgccgcgggagtgggcggcgagcgcgggcctgcgaggaaa

SEQ ID NO: 397026 - DNA, 120 bp, Artificial Sequence
  ENSG00000145864_63 (sequence is synthesized)
caggttgatgaccttgttgagcaaatgaggaaaccaagcccagggaagagaatgggtaattttccccaaagcacacaaacaattaatgatggaagcacaattagggaccaaactcatgac

SEQ ID NO: 397027 - DNA, 120 bp, Artificial Sequence
  ENSG00000145864_64 (sequence is synthesized)
tcacatattgagtatagtacctataattatttatgcattctttaaatttattcacctaatttatttaaaaaggaaatttaatgttgcttcagtcagtattacttgctggacaatagcttt

SEQ ID NO: 397028 - DNA, 120 bp, Artificial Sequence
  ENSG00000145864_65 (sequence is synthesized)
acaaatatataagtaacaaatttaaaaaactatatcattaagttctaatttatactagatgaagtctctggccctgaaatctgcattctctttgacttaaaggaaagataagcaagtata

SEQ ID NO: 397029 - DNA, 120 bp, Artificial Sequence
  ENSG00000145864_66 (sequence is synthesized)
cagatgtgttacagacccaccaagcaacaaactgagactttttctttgaagcgatcagaagaacataagaagagtaagggggaaaagacaaataattttctcctttaaatgacaatgcct

SEQ ID NO: 397030 - DNA, 120 bp, Artificial Sequence
  ENSG00000145864_67 (sequence is synthesized)
tgcacatataccacttatcattgcagcatttgactatatgaggccaccatcttgcttaagtcagacatggtcaaagattcccacaaaactataaaccctgtttatttgttaagtcagtag

SEQ ID NO: 397031 - DNA, 120 bp, Artificial Sequence
  ENSG00000145864_68 (sequence is synthesized)
ttttcaatcatgggtgccaatggaatgacctgaacagattaaaaaaaaatactgaagccttggtcccctccccagaaaatctgatttgattttcttggagaaagcatgggcaacacaatt

SEQ ID NO: 397032 - DNA, 120 bp, Artificial Sequence
  ENSG00000145864_69 (sequence is synthesized)
ttaaaaagttccccaagttattctaatctgcatccaaatttgagaatcaccactttaaggtttttgatggtagtcccagtagagccagctctctttactctcaatattaaacttcacctg

SEQ ID NO: 397033 - DNA, 120 bp, Artificial Sequence
  ENSG00000145864_70 (sequence is synthesized)
gcttcctgttatagcacttgctgcactaacagaatacttgtatatgtatcttcccagaggccacatttagacctttagcaatagccaaagaaaagtcttattttcatatctgccctaaat

SEQ ID NO: 397034 - DNA, 120 bp, Artificial Sequence
  ENSG00000145864_71 (sequence is synthesized)
actgtttatgaagtagtgtctaatattggaccaataaatagttcatcatgatgggactaggaaaacattaatcaatcctcttaaaccatttggaattattaattataacaaaagctgatt

SEQ ID NO: 397035 - DNA, 120 bp, Artificial Sequence
  ENSG00000145864_72 (sequence is synthesized)
atttccttgatgttttgatatttctaacttcaaattaatttcaaggatagcaaagtataaataatctctgccattgagttgtatttggagcaaaccatatggaagcttctaactcagtaa

SEQ ID NO: 397036 - DNA, 120 bp, Artificial Sequence
  ENSG00000145864_73 (sequence is synthesized)
tgtttttcacatatccataggtctaatatttggttttagactcttctctaatccaaggcacttcttgcttagaagatgatatttgcaacaatgcaaattttaagtatggcccttggaaac

SEQ ID NO: 397037 - DNA, 120 bp, Artificial Sequence
  ENSG00000145864_74 (sequence is synthesized)
ccccaattcaaaatataacttttcctgaacaaaatagctgttaattttcattggatggaaatattgtgctattttccttatctttcttcaattctactaagaaacagttaagcctcctat

SEQ ID NO: 397038 - DNA, 120 bp, Artificial Sequence
  ENSG00000145864_75 (sequence is synthesized)
ccactagacatttgagagcttaaggtagcatgcttacaaaggaacttaacctcagctaagactacatttttctgaattatcttccaatatcagctgctgatcctaaagctgctttcttta

SEQ ID NO: 397039 - DNA, 120 bp, Artificial Sequence
  ENSG00000145864_76 (sequence is synthesized)
aggactagggataaagaatatcaaaatagctgagacatagggtttctttaaaatacaaaaacattgtgaatgccaactaattgtttgaatatgggagatgctgtgttttgtaaattgctt

SEQ ID NO: 397040 - DNA, 120 bp, Artificial Sequence
  ENSG00000145864_77 (sequence is synthesized)
ctgagctgcctcaacgggatcatggccctctgatgatgagaaagcttattgtgacctcttaccttccaaggagcaatcagacttgcaaataaataaagtagtcatctcatgtttattaat

SEQ ID NO: 397041 - DNA, 120 bp, Artificial Sequence
  ENSG00000145864_78 (sequence is synthesized)
tatcagaaggtaagtgggtcaagagtgcagcacggaacaggaccctgaggagcccccagggctgccggggtcgcaagcctgtggagctacttccgccgcctgccgccaactctgcgggcc

SEQ ID NO: 397042 - DNA, 120 bp, Artificial Sequence
  ENSG00000145864_79 (sequence is synthesized)
ggcgacccctcctctccgcagacaccggccgggtctagctcgtgcggtccgcgctcaactccacccgcagccgccgcgggctcctcgggcgccaggagcttgacccgccacagcaaagcg

SEQ ID NO: 397043 - DNA, 120 bp, Artificial Sequence
  ENSG00000145868_0 (sequence is synthesized)
atgcgagcggcggcggaagcggaagtgcctcagcggtaggggccggggaagtgtctgtagcgtccctccctctcaaccacaataacaggcggagggtcggcgtaggtactttgaactcaa

SEQ ID NO: 397044 - DNA, 120 bp, Artificial Sequence
  ENSG00000145868_1 (sequence is synthesized)
gtaaacaaaagggaagattttctcgttgatactggagactgcacaacaatggggccacgaaagaaaagtgtgaaaacatgtatcatgaataatgaaattccagaagaaatgacagcagat

SEQ ID NO: 397045 - DNA, 120 bp, Artificial Sequence
  ENSG00000145868_2 (sequence is synthesized)
gaaacaaaggactatatgaatcaactttcacatgaagtactttgccatatttttaggtacctccctctgcaggatatcatgtgtatggaatgtctttcccggaagctaaaggaagcagtg

SEQ ID NO: 397046 - DNA, 120 bp, Artificial Sequence
  ENSG00000145868_3 (sequence is synthesized)
accctatatctgcgagttgtgagagttgtagatctctgtgcagggcggtggtgggaatacatgccaagtggctttacagatgccagttttctaacactattaaagaagatgccagatgtt

SEQ ID NO: 397047 - DNA, 120 bp, Artificial Sequence
  ENSG00000145868_4 (sequence is synthesized)
gaacagctatatggccttcaccctcgataccttgagaggcgaagagtaaggggccatgaggcttttagcattccaggagtcctagaagctttgcaggcatgcccaaacttagtgggtgtg

SEQ ID NO: 397048 - DNA, 120 bp, Artificial Sequence
  ENSG00000145868_5 (sequence is synthesized)
gaaacttctcatttggagttggtagaatccatttggacatatatgccccatgttcatattttggggaaatttcgtaatcgtaatggagcttttccaattcctcctgaaaataaactgaaa

SEQ ID NO: 397049 - DNA, 120 bp, Artificial Sequence
  ENSG00000145868_6 (sequence is synthesized)
attcctataggagccaaaattcaaactttacatttagttggggtgaatgttcctgaaattccttgtatcccaatgctaaggcacctttatatgaagtgggtaagactcactaaaccacag

SEQ ID NO: 397050 - DNA, 120 bp, Artificial Sequence
  ENSG00000145868_7 (sequence is synthesized)
ccatttaaagacttcctttgtatcagcttaagaactttcgtcatgaggaactgtgcaggacccacaaattccttgaaatatgtccctttagtaacaggcttagcctctgcccgaaacttg

SEQ ID NO: 397051 - DNA, 120 bp, Artificial Sequence
  ENSG00000145868_8 (sequence is synthesized)
gaacacttagaaatggttcgagttcctttccttggaggtcttatccaacatgttgttgaagacagttggagatcaggtggttttagaaatttgcacactattgttctgggagcttgcaaa

SEQ ID NO: 397052 - DNA, 120 bp, Artificial Sequence
  ENSG00000145868_9 (sequence is synthesized)
aatgctcttgaagtagatcttggttacctcatcattactgctgcccgtaggttacatgaagttcggatccagccttccctaaccaaagatggtgtcttttctgccctaaagatggcagag

SEQ ID NO: 397053 - DNA, 120 bp, Artificial Sequence
  ENSG00000145868_10 (sequence is synthesized)
ttggagtttccccagtttgaaacccttcatctaggatatgtagatgagtttttgctacagagcagaatggctaatgcggatctggtgaagtatggtttggctgatgtggtagaaaatcct

SEQ ID NO: 397054 - DNA, 120 bp, Artificial Sequence
  ENSG00000145868_11 (sequence is synthesized)
ggtatcatcactgatatagggatgaaagcagtcaatgaagttttttcctgtatcaaatatctggcaatttacaattgccctcatctacacaacccatacaattggatctcagaccactca

SEQ ID NO: 397055 - DNA, 120 bp, Artificial Sequence
  ENSG00000145868_12 (sequence is synthesized)
agatggactcgattggttgatatcaacctagtacggtgccatgctttgaagctggactcttttggccagtttattgaattattacccagcctagagtttatttcactggatcagatgttt

SEQ ID NO: 397056 - DNA, 120 bp, Artificial Sequence
  ENSG00000145868_13 (sequence is synthesized)
cgtgaaccacccaagggttgtgctcgagttggtctgagtgcaggcacaggaattggtgtttcatcagctcttgttagcaaccagaactccaacaatgacgataataatgcccagaataac

SEQ ID NO: 397057 - DNA, 120 bp, Artificial Sequence
  ENSG00000145868_14 (sequence is synthesized)
aatgccaacatccacgacaacaatcaccatcatccagatgactcagacgaggagaatgactttcggcaagatctgcagccaggagagcagcagtttgcagctgacgcattaaatgagatg

SEQ ID NO: 397058 - DNA, 120 bp, Artificial Sequence
  ENSG00000145868_15 (sequence is synthesized)
gaagacatcgtccaagaagatggagaggtggtggccgagagtggaaataatactccagctcacagccaggcaattattcctgtggatgttgatgaggaacaagcaggacccagtggtctt

SEQ ID NO: 397059 - DNA, 120 bp, Artificial Sequence
  ENSG00000145868_16 (sequence is synthesized)
cagcgtgtagtaaaaccaacctcaattactgttcatgattcagagagtgatgatgaagaagatagtctagaactccaagaagtctggattcctaagaacggtactcggcgttactctgaa

SEQ ID NO: 397060 - DNA, 120 bp, Artificial Sequence
  ENSG00000145868_17 (sequence is synthesized)
cgtgaagaaaaaactggagagtcagtgcagtccagagaattgtcagtaagtggaaaaggcaagactccacttcgaaagaggtacaactcccatcagatgggccagtcgaagcagtttccc

SEQ ID NO: 397061 - DNA, 120 bp, Artificial Sequence
  ENSG00000145868_18 (sequence is synthesized)
tgtttatcccagctgcagcagcaccaccgccagcacagtgggaaactccagctcacacaacactgcttctcaaagccccgactttgtaaggacggtgaacagcggcggctcttccgagcc

SEQ ID NO: 397062 - DNA, 120 bp, Artificial Sequence
  ENSG00000145868_19 (sequence is synthesized)
tagccctacagaagtggatgtgtccaggcagtgtgcctgctcccccggtgggtcagaggactctgaggccatggaggagggagatgcagagagttctgtctgccccagatgctgctgtca

SEQ ID NO: 397063 - DNA, 120 bp, Artificial Sequence
  ENSG00000145868_20 (sequence is synthesized)
caggccccaggaatcccaaaggagaactagcaggtgttctgatgaggaacgtccttcaaccagccgagcctgtgttgtgaatggcccggatggtacgagatccgccttttcctttaggac

SEQ ID NO: 397064 - DNA, 120 bp, Artificial Sequence
  ENSG00000145868_21 (sequence is synthesized)
tctgccacaaggggggtcttcaggcccagcacatgatgagaggactaatgggagtggctctggggctacaggtgaggacaggagggggagctcccagcctgagagttgtgacgtgcagtc

SEQ ID NO: 397065 - DNA, 120 bp, Artificial Sequence
  ENSG00000145868_22 (sequence is synthesized)
taatgaagactaccctcggaggcccctaaccagggccaggagcagactgtcccatgtactgctggtatctgagtcagaagtagccaaaacaaagccacgtcacgccatgaaacggaagcg

SEQ ID NO: 397066 - DNA, 120 bp, Artificial Sequence
  ENSG00000145868_23 (sequence is synthesized)
gacagcagataaatccactagtacaagtgatcctgtgatcgaggatgaccatgtgcaggttcttgtattaaaatccaagaatcttgttggagtcactatgaccaattgtggaatcacaga

SEQ ID NO: 397067 - DNA, 120 bp, Artificial Sequence
  ENSG00000145868_24 (sequence is synthesized)
tctagtgctaaaagactgtccaaagatgatgttcatccatgctaccaggtgcagggtactaaaacatttaaaggtagaaaatgcaccaattgtaaaccgatttgactatgcacagtgcaa

SEQ ID NO: 397068 - DNA, 120 bp, Artificial Sequence
  ENSG00000145868_25 (sequence is synthesized)
gaaactgaacatggatcaggtactagaccagatactaagaatgccacccgagagaaaccgcatcatatacctacgcccaatgcagcaggtggacactctaactttggagcagaagctatt

SEQ ID NO: 397069 - DNA, 120 bp, Artificial Sequence
  ENSG00000145868_26 (sequence is synthesized)
tagtggtccctacccctatcacatctgtattatccatgaattcagtaaccctcccaatgtccggaataaggtgcgcattcgcagctggatggacactatagcaaacatcaatcaagagct

SEQ ID NO: 397070 - DNA, 120 bp, Artificial Sequence
  ENSG00000145868_27 (sequence is synthesized)
cattaaatatgaattcttccctgaagccactcgaagtgaagaagacttaaagaaataccccaagtacccctgggggagagaaatctatactttagaaggtgttgtggatggagctccata

SEQ ID NO: 397071 - DNA, 120 bp, Artificial Sequence
  ENSG00000145868_28 (sequence is synthesized)
ttccatgatttctgacttcccttggctgaggtcattacgagctgcagagcccaacagcttcgctcgatacgactttgaagacgatgaagaaagcactatctatgctcctagaaggaaagg

SEQ ID NO: 397072 - DNA, 120 bp, Artificial Sequence
  ENSG00000145868_29 (sequence is synthesized)
acagctgtctgcagacatctgtatggaaacaataggagaggaaatttcagagatgcgtcagatgaagaagggtgtatttcagcgagtagtggcaatttttatccactattgtgatgtcaa

SEQ ID NO: 397073 - DNA, 120 bp, Artificial Sequence
  ENSG00000145868_30 (sequence is synthesized)
tggagagccagttgaagatgactacatttaattggtccctcctcctttccagctattttgtcagaaagcaagtagggccatccagctgccagagtgctccacagggacttgaggcatgca

SEQ ID NO: 397074 - DNA, 120 bp, Artificial Sequence
  ENSG00000145868_31 (sequence is synthesized)
gttgggaggtcctggctcggtttgctatatagggaatatataaggaacatcgaaattgtatacaaagatttgtacataaaaaatatacaaagacgcttcctaaagtaccaactttatatc

SEQ ID NO: 397075 - DNA, 120 bp, Artificial Sequence
  ENSG00000145868_32 (sequence is synthesized)
atatgtttatacaatttaatttaaaaattcattttaaggaagacagataatttgaaagacttttgtttttcttgacttaattcatgaagtatcattttttgactgagtctccatttactt

SEQ ID NO: 397076 - DNA, 120 bp, Artificial Sequence
  ENSG00000145868_33 (sequence is synthesized)
cattcttaatgattattgtcatccctttaaatctgtgcctttttcttcttgagcgaagctgtttgagtaaacctgttgaagagtgtttgtgtcttttgtgcttttttgttgttattaaaa

SEQ ID NO: 397077 - DNA, 120 bp, Artificial Sequence
  ENSG00000145868_34 (sequence is synthesized)
caccaactaaaccttatagtcaagacaaggctctatgtttctgtacaaagctgtagttctttcttagtattatagttgccatgtttcttaaaatcaagtaaaaagacttatgagcttaaa

SEQ ID NO: 397078 - DNA, 120 bp, Artificial Sequence
  ENSG00000145868_35 (sequence is synthesized)
aaaaagtgagtttgagagggaaatggaaaagtttccagagtatttctagtaatttatttccacattgaattgtgtatatgctttatcttgaatataaaataaaagtttattaaaaacttt

SEQ ID NO: 397079 - DNA, 120 bp, Artificial Sequence
  ENSG00000145868_36 (sequence is synthesized)
tttgaagtaatggagggtgatcctgttttgaaacaatccactggaaataccaatgtaactgtattccactgggaaccaaattgtagatttgggaattaccttgattatgttcatacgtat

SEQ ID NO: 397080 - DNA, 120 bp, Artificial Sequence
  ENSG00000145868_37 (sequence is synthesized)
gctaaaagactgtccaaagatgatgttcatccatggtatgtatttgggcccatattatacaagagtatcatgaatgagttaaaagaattaggaactcataaatactgtaatagcattact

SEQ ID NO: 397081 - DNA, 120 bp, Artificial Sequence
  ENSG00000145868_38 (sequence is synthesized)
gtcttattttcttaaaggaaatattgtgttgggttatctttagttccgcctttgttctagttctcaaattattactccatagtatttctgagcatcatatatagaaacttcgttcatctt

SEQ ID NO: 397082 - DNA, 120 bp, Artificial Sequence
  ENSG00000145868_39 (sequence is synthesized)
ttaaaatagcctgtctccaaaagataattactgcctgatctggcagagtaaataacagcctgcacaggctttggagtcagatagacctcagcttgattgctggcttggtcatttactagc

SEQ ID NO: 397083 - DNA, 120 bp, Artificial Sequence
  ENSG00000145868_40 (sequence is synthesized)
tgtgtgacttgggcatggtttttgagggaagcagcggttgggcctcaagtgtataactgctctgtatttgattgagatgattaattgtatctttactttgtggcccattatcattaatcc

SEQ ID NO: 397084 - DNA, 120 bp, Artificial Sequence
  ENSG00000145868_41 (sequence is synthesized)
gttaatctcatctgctcccaccatctacactcgtgtattaaatatattaaatatatatctttccagtgcaccttttatgtctttctttatatatgtgtctgtctcaaacatagggcatta

SEQ ID NO: 397085 - DNA, 120 bp, Artificial Sequence
  ENSG00000145868_42 (sequence is synthesized)
gttttgtgctttcttaaaatttaggtacatagtgtatcctataattgatctattaattttaccttttttattcaaaattatattttagatatccatccatgtaaaattatgaagatctga

SEQ ID NO: 397086 - DNA, 120 bp, Artificial Sequence
  ENSG00000145868_43 (sequence is synthesized)
cttatttacttgccttgggcaagttatataattttctgtcttcatttttttcaatctgtaagccgtgcataattttgcttaactcataaagcatttgtgaaagttaaatgcagtgatgga

SEQ ID NO: 397087 - DNA, 120 bp, Artificial Sequence
  ENSG00000145868_44 (sequence is synthesized)
tttaaatgttaaatgtttgtgtatgtgtatgtatacaggcacacctcagagacactgcaggtttggttctagaccaccataataaaaggaatatcacaaagtgaatcataagaatttttt

SEQ ID NO: 397088 - DNA, 120 bp, Artificial Sequence
  ENSG00000145868_45 (sequence is synthesized)
ttattttccagcacatataaaagttacgtttatactatagtctattatatgtgaagtagcattgtatttttttaaaaaactttacgtgccttaatttaaaaacacttcattggccaggca

SEQ ID NO: 397089 - DNA, 120 bp, Artificial Sequence
  ENSG00000145868_46 (sequence is synthesized)
tgtatgagtttgatgggctttctccaacaaatgatcctttcccatctgtgattttctctcctgtagactgattaaatacttcttaatatctgcagtaacaagcacagtgtatgcagtata

SEQ ID NO: 397090 - DNA, 120 bp, Artificial Sequence
  ENSG00000145868_47 (sequence is synthesized)
tgctgttctttcagggcaggcctagtaatcagcgggactgttcagttcttagggcggccacagttttgcctgccattgtagttctttatacttcttttggtttttactttgtgtatattt

SEQ ID NO: 397091 - DNA, 120 bp, Artificial Sequence
  ENSG00000145868_48 (sequence is synthesized)
ccatatttttaggggtaagaagagggacgagaagtagaaaaaataaatggatctgctaaatattcaacaggtacctccctctgcaggatatcatgtgtatggaatgtctttcccggaagc

SEQ ID NO: 397092 - DNA, 120 bp, Artificial Sequence
  ENSG00000145868_49 (sequence is synthesized)
gtgttgtgagagggacccagtgggagatgactgaatcatgggggtggtctttcccatgctgtcctcatgatagtgaataagtctcactagatccaatggttttaaaaatgggagtgtccc

SEQ ID NO: 397093 - DNA, 120 bp, Artificial Sequence
  ENSG00000145868_50 (sequence is synthesized)
tgcacagcctctctttttttgcctgctgccatcaggcaaaaatgtgacttgctgccatcagtcaagatgtgacttgctcctttttgccttcagccatgttcgtgaggcctccccagccat

SEQ ID NO: 397094 - DNA, 120 bp, Artificial Sequence
  ENSG00000145868_51 (sequence is synthesized)
aagtaaaattggaagtttggagaagatggattgtttttaacatgttgtagctaaagttgtaaatccctgtgatattcagggcagcttcaccagagtggcagtgttttttttttgtcctgc

SEQ ID NO: 397095 - DNA, 120 bp, Artificial Sequence
  ENSG00000145868_52 (sequence is synthesized)
atattggttgattgcagactgtgagagacgtattcccatgagctcttgtatccccagcactatgctagacactaaagatgtaactatgaactaacagaatcttggagcgtgagggggcag

SEQ ID NO: 397096 - DNA, 120 bp, Artificial Sequence
  ENSG00000145868_53 (sequence is synthesized)
gcagatgggagaaatgataagaggcaagggatgaggtgtgattcttagtgacatgatctagaataaaggatcctcctttacttattcccaaacccctagtttgtgaccagagagtaggca

SEQ ID NO: 397097 - DNA, 120 bp, Artificial Sequence
  ENSG00000145868_54 (sequence is synthesized)
ctaaagcccagtggcatgtgtttgagttagaagtgcacttttagggtatagatagatgttactaaccagtgccatgggttctaacaatgaatcttaaattctcagagtttacctttctct

SEQ ID NO: 397098 - DNA, 120 bp, Artificial Sequence
  ENSG00000145868_55 (sequence is synthesized)
acacatgtccacactgggctccaagaacatcattttattgtaagggagttgagtttttaagattttgttttccttttaaatgataaagctaaaactttaccatggtatgaaccagtatga

SEQ ID NO: 397099 - DNA, 120 bp, Artificial Sequence
  ENSG00000145868_56 (sequence is synthesized)
atttttcctactagctgtcccttgacttttaatataatttattattttgtacaagaagtgctaccatatgtacggaatacctaacctaaaattatacctgaacccaatgataagcagatg

SEQ ID NO: 397100 - DNA, 120 bp, Artificial Sequence
  ENSG00000145868_57 (sequence is synthesized)
atacagaatgatggtagagactttttatactgactggtaagatacaaagttggtaacactccctaacacttaagaatttgactttttttttttttaattgattgctctttttaggcagaa

SEQ ID NO: 397101 - DNA, 120 bp, Artificial Sequence
  ENSG00000145868_58 (sequence is synthesized)
gtagtaacaatggtttcataaaaagttacttgttgtcttgagaaaggcaatctaagtcaccttgtaggctggcaagattttgtctaaattatttatgttgggttttaggttgtaaaatgc

SEQ ID NO: 397102 - DNA, 120 bp, Artificial Sequence
  ENSG00000145868_59 (sequence is synthesized)
gttttacctgaggctttattgttttaatagtctgctcttttcatttcctgtccttaagtaactatatcagcctgttccacacatctgtgattggagaacatgagcctttggttaattgag

SEQ ID NO: 397103 - DNA, 120 bp, Artificial Sequence
  ENSG00000145868_60 (sequence is synthesized)
tatatgtgtatcacattagacactgtgtgtcctttactgtctgatgcatgttttccggtgaatggtaacagttttcatcatagatttcctctgcaactaaactgcaccctttagttaaat

SEQ ID NO: 397104 - DNA, 120 bp, Artificial Sequence
  ENSG00000145868_61 (sequence is synthesized)
ctggccaagggcaactggtcacttaggaaggttcctgtgcaatgagaagctctgtccagaaaactttgttttatacacctaaaccagcagtgtaaatcactacaaagtgaaaaacaggag

SEQ ID NO: 397105 - DNA, 120 bp, Artificial Sequence
  ENSG00000145868_62 (sequence is synthesized)
accttgatttttgttccaaagttgctattaacttgatggtttactttggccaaatcccttcctctctctgaacttgagatttttttatctgctaaaggaagacgttggattaggtcactg

SEQ ID NO: 397106 - DNA, 120 bp, Artificial Sequence
  ENSG00000145868_63 (sequence is synthesized)
attctctagtttaagtatagcctactgtgttacatacttaatatctttttgtgagttaggagcagtgcagtgttaaatggtttcccatagaaataatttgtatttactcacttcaaaaca

SEQ ID NO: 397107 - DNA, 120 bp, Artificial Sequence
  ENSG00000145868_64 (sequence is synthesized)
gttctttatttgtgcagtagatgttcagtggacttactagggatatataaaggctggtagaaaggattcctttagacagattttcctacaagatttttatattacctaaatatttataat

SEQ ID NO: 397108 - DNA, 120 bp, Artificial Sequence
  ENSG00000145868_65 (sequence is synthesized)
tgagtttttgctacagagtaagatttatcccattttaattcctagaattactgtaagaaatttacttgacaaactgaaatctgaattgggttgtgccatgtctttttgaacataagacaa

SEQ ID NO: 397109 - DNA, 120 bp, Artificial Sequence
  ENSG00000145879_0 (sequence is synthesized)
atggtcgatgcagctgtagtgacaatctcagagcagcttctacaccacagccatttccagcatgaagatcactgggggtctccttctgctctgtacagtggtctatttctgtagcagctc

SEQ ID NO: 397110 - DNA, 120 bp, Artificial Sequence
  ENSG00000145879_1 (sequence is synthesized)
agaagctgctagtctgtctccaaaaaaagtggactgcagcatttacaagaagtatccagtggtggccatcccctgccccatcacatacctaccagtttgtggttctgactacatcaccta

SEQ ID NO: 397111 - DNA, 120 bp, Artificial Sequence
  ENSG00000145879_2 (sequence is synthesized)
gctaaattctccatggacatagagagaaaggaatgatattctcatcatcatcttcatcatcccaggctctgactgagtttctttcagttttactgatgttctgggtgggggacagagcca

SEQ ID NO: 397112 - DNA, 120 bp, Artificial Sequence
  ENSG00000145879_3 (sequence is synthesized)
gattcagagtaatcttgactgaatggagaaagtttctgtgctacccctacaaacccatgcctcactgacagaccagcattttttttttaacacgtcaataaaaaaataatctcccagaaa

SEQ ID NO: 397113 - DNA, 120 bp, Artificial Sequence
  ENSG00000145879_4 (sequence is synthesized)
gctagtatttgtcatagtgataacactagtacttaaagaagtggccaagcaacatctgaatatctgagctgggacttccagcccttgtagtatatctaatagtggcctagcttggggtct

SEQ ID NO: 397114 - DNA, 120 bp, Artificial Sequence
  ENSG00000145879_5 (sequence is synthesized)
agctgctagtctgtctccaaaaaaagtaagtatgttgaataacattttaatgtcaataactattgactgtcatttagtcaacatatatgtaggataaattatgtttagggggattcgaga

SEQ ID NO: 397115 - DNA, 120 bp, Artificial Sequence
  ENSG00000145879_6 (sequence is synthesized)
gggaggcaaacacacatggagaaatggtacctgttctccagaaggcaactaaacaaatatgacatacatataaacaaccatattttaaaaatgttttttaaaaatgccagagttaaagaa

SEQ ID NO: 397116 - DNA, 120 bp, Artificial Sequence
  ENSG00000145879_7 (sequence is synthesized)
gggagaaccgccttccagctgagaagttggtgatgttttcataaaaggcataacgtgtaaaaggcagagcaaaagtaccctgataaattgcacaggctctagattcaaatcctaactcta

SEQ ID NO: 397117 - DNA, 120 bp, Artificial Sequence
  ENSG00000145879_8 (sequence is synthesized)
ctacttaccagcatttatcttcaacaagttatctctatttctaagctttaattttcacatttgtaaagagaggtaatagtagaatttactctagttgttctgaagattaaacaagaaaat

SEQ ID NO: 397118 - DNA, 120 bp, Artificial Sequence
  ENSG00000145879_9 (sequence is synthesized)
gaagaaaatgagatctggagtcagtgctctctactacaaacgcttctactttccaggatccagcttaaatctctataagctgtaatttataattattcccacccagaacagcaggtgggg

SEQ ID NO: 397119 - DNA, 120 bp, Artificial Sequence
  ENSG00000145879_10 (sequence is synthesized)
atagaaaactgactgttgcacaatcagacagggtagagtcacctgctctgccagcttggactagtcccatcccatcacagaacctccagttcctgtctgtcaattgtgagaatccagtaa

SEQ ID NO: 397120 - DNA, 120 bp, Artificial Sequence
  ENSG00000145882_0 (sequence is synthesized)
gccatggcccgcgcagccccgctgctcgccgcgttgaccgcgctcctcgccgccgccgctgctggcggagatgccccgccgggcaaaatcgcggtggttggggctgggattgggggctct

SEQ ID NO: 397121 - DNA, 120 bp, Artificial Sequence
  ENSG00000145882_1 (sequence is synthesized)
gggctgggattgggggctctgctgtggcccattttctccagcagcactttggacctcgggtgcagatcgacgtgtacgagaagggaaccgtgggtggccgcttggccaccatctcagtca

SEQ ID NO: 397122 - DNA, 120 bp, Artificial Sequence
  ENSG00000145882_2 (sequence is synthesized)
acaagcagcactatgagagcggggctgcctccttccactccctgagcctgcacatgcaggacttcgtcaagctgctggggctgaggcaccggcgcgaggtggtgggcaggagcgccatct

SEQ ID NO: 397123 - DNA, 120 bp, Artificial Sequence
  ENSG00000145882_3 (sequence is synthesized)
tcggcggggagcacttcatgctggaggagactgactggtacctgctgaacctcttccgcctctggtggcactatggcatcagcttcctgaggctgcagatgtgggtggaggaggtcatgg

SEQ ID NO: 397124 - DNA, 120 bp, Artificial Sequence
  ENSG00000145882_4 (sequence is synthesized)
agaagttcatgaggatctataagtaccaggcccacggctatgccttctcgggtgtggaggagctgctctactcactgggggagtccacctttgttaacatgacccagcactctgtggctg

SEQ ID NO: 397125 - DNA, 120 bp, Artificial Sequence
  ENSG00000145882_5 (sequence is synthesized)
agtccctgctgcaggtgggcgtcacgcagcgctttattgatgatgtcgtttctgctgtcctgcgggccagctatggccagtcagcagcgatgcccgcctttgcaggagccatgtcactag

SEQ ID NO: 397126 - DNA, 120 bp, Artificial Sequence
  ENSG00000145882_6 (sequence is synthesized)
ccggggcccaaggcagcctgtggtctgtggaaggaggcaataagctggtttgttccggtttgctgaagctcaccaaggccaatgtgatccatgccacagtgacctctgtgaccctgcaca

SEQ ID NO: 397127 - DNA, 120 bp, Artificial Sequence
  ENSG00000145882_7 (sequence is synthesized)
gcacagaggggaaagccctgtaccaggtggcgtatgagaatgaggtaggcaacagctctgacttctatgacatcgtggtcatcgccacccccctgcacctggacaacagcagcagcaact

SEQ ID NO: 397128 - DNA, 120 bp, Artificial Sequence
  ENSG00000145882_8 (sequence is synthesized)
taacctttgcaggcttccacccgcccattgatgacgtgcagggctctttccagcccaccgtcgtctccttggtccacggctacctcaactcgtcctacttcggtttcccagaccctaagc

SEQ ID NO: 397129 - DNA, 120 bp, Artificial Sequence
  ENSG00000145882_9 (sequence is synthesized)
ttttcccctttgccaacatccttaccacagatttccccagcttcttctgcactctggacaacatctgccctgtcaacatctctgccagcttccggcgaaagcagccccaggaggcagctg

SEQ ID NO: 397130 - DNA, 120 bp, Artificial Sequence
  ENSG00000145882_10 (sequence is synthesized)
ggctcccgccccacgctcccgaggtttgcactccatgaccagctcttctacctcaatgccctggagtgggcggccagctccgtggaggtgatggccgtggctgccaagaatgtggccttg

SEQ ID NO: 397131 - DNA, 120 bp, Artificial Sequence
  ENSG00000145882_11 (sequence is synthesized)
ctggcttacaaccgctggtaccaggacctagacaagattgatcaaaaagatttgatgcacaaggtcaagactgaactgtgagggctctagggagagcctgggaactttcatcccccactg

SEQ ID NO: 397132 - DNA, 120 bp, Artificial Sequence
  ENSG00000145882_12 (sequence is synthesized)
aagatggatcatcccacagcagcccaggactgaataagccatgctcgcccaccaggcttctttctgacccctcatgtatcaagcatctccaggtgacctactgtctgcctatattaaggg

SEQ ID NO: 397133 - DNA, 120 bp, Artificial Sequence
  ENSG00000145882_13 (sequence is synthesized)
tccacacggcggctgctgcttttttttaagggggaaagtaagaaaagagaaggaaatccaagccagtatatttgttttatttattttttttaagaagaaaaaagttcatcttcacaaggt

SEQ ID NO: 397134 - DNA, 120 bp, Artificial Sequence
  ENSG00000145882_14 (sequence is synthesized)
gcttcagacttggtttcttagctagaaaccagaagactacgggagggaatataaggcagagaactatgagtcttattttattactgtttttcactacctactcccacaatggacaatcaa

SEQ ID NO: 397135 - DNA, 120 bp, Artificial Sequence
  ENSG00000145882_15 (sequence is synthesized)
ttgaggcaacctacaagaaaacatttacaaccagatggttacaaataaagtagaagggaagatcagaaaacctaagaaatgatcatagctcctggttactgtggacttgatggatttgaa

SEQ ID NO: 397136 - DNA, 120 bp, Artificial Sequence
  ENSG00000145882_16 (sequence is synthesized)
gtacctagttcagaactccctagtcaccatctccaagcctgtcaacatcactgcatattggaggagatgactgtggtaggacccaaggaagagatgtgtgcctgaatagtcgtcaccata

SEQ ID NO: 397137 - DNA, 120 bp, Artificial Sequence
  ENSG00000145882_17 (sequence is synthesized)
tctccaagcttcctggcaaccagtgggaaaagaaacatgcgaggctgtaggaagagggaagctcttccttggcacctagaggaattagccattctcttccttatgcaaagattgaggaat

SEQ ID NO: 397138 - DNA, 120 bp, Artificial Sequence
  ENSG00000145882_18 (sequence is synthesized)
gcaacaatataaagaagagaagtccccagatggtagagagcagtcatatcttacccctagatgttcatcccagcagaagaaagaagaaggtgttggggtaggattcttcagaggttagcc

SEQ ID NO: 397139 - DNA, 120 bp, Artificial Sequence
  ENSG00000145882_19 (sequence is synthesized)
tggtactttctcatcagacactagcttgaagtaagaggagaattatgcttttctttgctttttctacaaacccttaaaaatcacttgttttaaaaagaaagtaaaagcccttttcattcc

SEQ ID NO: 397140 - DNA, 120 bp, Artificial Sequence
  ENSG00000145882_20 (sequence is synthesized)
ccaaacactgatcactgaacagaactggtcagtaacttttaacaattcatagggaaataagaaagttagaagcaaggtagtgagttttatataaaactaaatttattctctttaattggt

SEQ ID NO: 397141 - DNA, 120 bp, Artificial Sequence
  ENSG00000145882_21 (sequence is synthesized)
catcctgactttcagtattctttgctggtcttttgctgcaaaatacctttttctttatgaaacgaaagtatagtaggcagcagttttcaggtttgcctttgcttattaatagctctactg

SEQ ID NO: 397142 - DNA, 120 bp, Artificial Sequence
  ENSG00000145882_22 (sequence is synthesized)
acaactcagtccgcagatttccttttggaaatgttataagcctaggaaatttaagcacctgggaaccaccagcgcaggaggatacaaagtgtgaactacagcctctcactctcatgttct

SEQ ID NO: 397143 - DNA, 120 bp, Artificial Sequence
  ENSG00000145882_23 (sequence is synthesized)
tttctttccctttcaatttgctgcctctaaataatcgtgattatatcaccttccacatgctagtgcttgccaggcaccttctgggtggtatgtaggcattacctcagctcccctctacca

SEQ ID NO: 397144 - DNA, 120 bp, Artificial Sequence
  ENSG00000145882_24 (sequence is synthesized)
acctgcaagatgagtgttatatctcctcttaaggcaactgaggctcagaaaatgtatagatttaagctaaagccattacagcgagaggtgggattcaaacccagcagcatctgtccaata

SEQ ID NO: 397145 - DNA, 120 bp, Artificial Sequence
  ENSG00000145882_25 (sequence is synthesized)
cacgttctgtttgatgcagaaactctgcttctcagaagtgatgctacaggtggtcttacagatgtgcaaagtagcatagataccaagttattcactacagcattgtttgtaatagcaaaa

SEQ ID NO: 397146 - DNA, 120 bp, Artificial Sequence
  ENSG00000145882_26 (sequence is synthesized)
ggctgaaagtatcctagctgcctatccactaggacctggggttaaacaaattattgtataactacacaataggctgttcagcagtcagaatggggaagtctttatgcccagatacagggc

SEQ ID NO: 397147 - DNA, 120 bp, Artificial Sequence
  ENSG00000145882_27 (sequence is synthesized)
aatctccaagatacagtgtattgttaaagtggagagcagtgtgtgtagtatgtgggggtggggaaggaacaagtcatagcagctctgtctgtgtttaggagtccactgctctgtcaagtt

SEQ ID NO: 397148 - DNA, 120 bp, Artificial Sequence
  ENSG00000145882_28 (sequence is synthesized)
gcagagtgcaggatggctgtaaggagctaggataacttccaagtgatctcagtgcccaaggccaccatctccaaacaagcccagtggctgtcaccccctggacattctgggataaaatct

SEQ ID NO: 397149 - DNA, 120 bp, Artificial Sequence
  ENSG00000145882_29 (sequence is synthesized)
gaatttccctcacttgtggatcctcctggggaaaaaaaatgtaaaatgttacattattttcattttcatttttttattgacttggtagtccaaacattttcccagtgcatctgtttactg

SEQ ID NO: 397150 - DNA, 120 bp, Artificial Sequence
  ENSG00000145882_30 (sequence is synthesized)
tttattaacaagcagcacaaatgaacaaaccatagcatttgtgtttcctttaatggaccagtccatttgcatcaagagggccccaagtcttggaggggacctgaggggctcctctttgtc

SEQ ID NO: 397151 - DNA, 120 bp, Artificial Sequence
  ENSG00000145882_31 (sequence is synthesized)
ggaaccagcttgcctgtactttgtgaaaaaggaaaaggtccttgctgaattgagccagcacaattcagtgcaggctcagagcaagcccctggcatgaggaatggccgtatttggtccagt

SEQ ID NO: 397152 - DNA, 120 bp, Artificial Sequence
  ENSG00000145882_32 (sequence is synthesized)
aatggtctccctagtattgtcacattgactctcattttcttaccctctactacactgatactaataaaagcatgggttgcaaactcagtcgcttaacaagggctgaactgggatgcgagt

SEQ ID NO: 397153 - DNA, 120 bp, Artificial Sequence
  ENSG00000145882_33 (sequence is synthesized)
cagtgaatcagcaggtggaagagagcagaacaaggccccctctgaaggaggcagccagccctccaccgcagccatctgcagccagccgtgtacaatgcccacctcatgtggctagatcta

SEQ ID NO: 397154 - DNA, 120 bp, Artificial Sequence
  ENSG00000145882_34 (sequence is synthesized)
ctcacttttcagaagaagctggaaatccagagtcgtgtgtgaaatcttttcagtttttcaacatttgcaaccaattcatcttgtaagccaaatgaaacacttctgcagggcagatgcagc

SEQ ID NO: 397155 - DNA, 120 bp, Artificial Sequence
  ENSG00000145882_35 (sequence is synthesized)
ctgtggaccactcatttgcaaactttgttgtcctcatttttccatctagaataaacacctttcttcaccactcctcctatccctgggctccagccccctccccatcacctttggtcccag

SEQ ID NO: 397156 - DNA, 120 bp, Artificial Sequence
  ENSG00000145882_36 (sequence is synthesized)
atgtggagggcaagtggtctgttccctccctgttcaccaagctgtcactccacctttccccaaagtccctcctgaaggtgctccctgcttccagcctaaggcgcaggggctgctccccgg

SEQ ID NO: 397157 - DNA, 120 bp, Artificial Sequence
  ENSG00000145882_37 (sequence is synthesized)
accccatcactgtctgcctcccttcagtgtcactcaagtgtggcctgtgccctcctgccctggttcctggcacttctccactcccttcccattctataactctgctgtttatagcacttc

SEQ ID NO: 397158 - DNA, 120 bp, Artificial Sequence
  ENSG00000145882_38 (sequence is synthesized)
ttccttatattctccagatgtcacccaaagcttatttccttacctctctttctgatatttttctcccttatcaattatatccagaccaataatgttgacttctacgttttatgggaaatg

SEQ ID NO: 397159 - DNA, 120 bp, Artificial Sequence
  ENSG00000145882_39 (sequence is synthesized)
acttctccctctcagccctagtttcctcttcacttccagacccacatttcaactttctggacacctccatctcgtgtcctattgataaccaaactcaacatgtttacaaaagaagcccta

SEQ ID NO: 397160 - DNA, 120 bp, Artificial Sequence
  ENSG00000145882_40 (sequence is synthesized)
gaatgggcaacatttcaaaggccagccagtcaggaaatccatcgatggttccaatccatgctagtgagattgcatgagtgatagagcgacaggacatgagcctgggggtgagtgggagcc

SEQ ID NO: 397161 - DNA, 120 bp, Artificial Sequence
  ENSG00000145882_41 (sequence is synthesized)
ctagaagctgtggcagaaccgacactgttggagaaggagatgtgtcagcaggggtgggccgtagccccagctgggtgaagaaagggttatgaactatgacctcaggcagggagtggctca

SEQ ID NO: 397162 - DNA, 120 bp, Artificial Sequence
  ENSG00000145882_42 (sequence is synthesized)
gagcagtgatacagttgttactcagcacagccgtgatgtgaagccaggcctagaaggattccataccttcacactccctttaggtgggacaggcccgccacagtcagagaacaggtgcca

SEQ ID NO: 397163 - DNA, 120 bp, Artificial Sequence
  ENSG00000145882_43 (sequence is synthesized)
gggaacatgaccagcctcttctgccaccactccatgtagaggaagtgatgggttcctggtgggcctcccaggcactataacccaggggcaggtggtcaggcaaaaagccttcctgcacaa

SEQ ID NO: 397164 - DNA, 120 bp, Artificial Sequence
  ENSG00000145882_44 (sequence is synthesized)
tttcaggccatgcagtctctgttgcagctactcaactctgcctaaaatgaaaacagtcatagacaataattgaaagaaagagcatcatggctgtgtttcaataaaactctagtttgcaaa

SEQ ID NO: 397165 - DNA, 120 bp, Artificial Sequence
  ENSG00000145882_45 (sequence is synthesized)
acagcactgggcccttctcagacttcccagaccatcaaggccagaaggtcatgtggcccaatctcattttacagatggagcaacagaaacaagagaggggaaggaacttgcctgaggtta

SEQ ID NO: 397166 - DNA, 120 bp, Artificial Sequence
  ENSG00000145888_0 (sequence is synthesized)
gggagccaacagacacgctggagtttaacaaacagcaatactcttcgcgctcctgaaaagcaggtctggacgctctccgtggtgctgaaacgcctcgcagccgccgctgtccgtggtatc

SEQ ID NO: 397167 - DNA, 120 bp, Artificial Sequence
  ENSG00000145888_1 (sequence is synthesized)
tacgaccccctcgctccaatttcccctggggctctccctccgcgcccctgttccccgcctccctttaacatctggattattttttgcaatagcgctttctggttttgtaagtgccaattt

SEQ ID NO: 397168 - DNA, 120 bp, Artificial Sequence
  ENSG00000145888_2 (sequence is synthesized)
gaaacatttttgcccccataactcgtggactacaaagcacaaggacctgaaaaatgtacagcttcaatactcttcgactctacctttgggagaccattgtattcttcagccttgctgctt

SEQ ID NO: 397169 - DNA, 120 bp, Artificial Sequence
  ENSG00000145888_3 (sequence is synthesized)
ctaaggaggctgaagctgctcgctccgcacccaagcctatgtcaccctcggatttcctggataagctaatggggagaacctccggatatgatgccaggatcaggcccaattttaaaggtc

SEQ ID NO: 397170 - DNA, 120 bp, Artificial Sequence
  ENSG00000145888_4 (sequence is synthesized)
ccccagtgaacgtgagctgcaacattttcatcaacagctttggttccattgctgagacaaccatggactatagggtcaacatcttcctgcggcagcaatggaacgacccccgcctggcct

SEQ ID NO: 397171 - DNA, 120 bp, Artificial Sequence
  ENSG00000145888_5 (sequence is synthesized)
ataatgaataccctgacgactctctggacctggacccatccatgctggactccatctggaaacctgacctgttctttgccaacgagaagggggcccacttccatgagatcaccacagaca

SEQ ID NO: 397172 - DNA, 120 bp, Artificial Sequence
  ENSG00000145888_6 (sequence is synthesized)
acaaattgctaaggatctcccggaatgggaatgtcctctacagcatcagaatcaccctgacactggcctgccccatggacttgaagaatttccccatggatgtccagacatgtatcatgc

SEQ ID NO: 397173 - DNA, 120 bp, Artificial Sequence
  ENSG00000145888_7 (sequence is synthesized)
tggaaagctttggatatacgatgaatgacctcatctttgagtggcaggaacagggagccgtgcaggtagcagatggactaactctgccccagtttatcttgaaggaagagaaggacttga

SEQ ID NO: 397174 - DNA, 120 bp, Artificial Sequence
  ENSG00000145888_8 (sequence is synthesized)
gatactgcaccaagcactacaacacaggtaaattcacctgcattgaggcccggttccacctggagcggcagatgggttactacctgattcagatgtatattcccagcctgctcattgtca

SEQ ID NO: 397175 - DNA, 120 bp, Artificial Sequence
  ENSG00000145888_9 (sequence is synthesized)
tcctctcatggatctccttctggatcaacatggatgctgcacctgctcgtgtgggcctaggcatcaccactgtgctcaccatgaccacccagagctccggctctcgagcatctctgccca

SEQ ID NO: 397176 - DNA, 120 bp, Artificial Sequence
  ENSG00000145888_10 (sequence is synthesized)
aggtgtcctatgtgaaagccattgacatttggatggcagtttgcctgctctttgtgttctcagccctattagaatatgctgccgttaactttgtgtctcggcaacataaggagctgctcc

SEQ ID NO: 397177 - DNA, 120 bp, Artificial Sequence
  ENSG00000145888_11 (sequence is synthesized)
gattcaggaggaagcggagacatcacaaggaggatgaagctggagaaggccgctttaacttctctgcctatgggatgggcccagcctgtctacaggccaaggatggcatctcagtcaagg

SEQ ID NO: 397178 - DNA, 120 bp, Artificial Sequence
  ENSG00000145888_12 (sequence is synthesized)
gcgccaacaacagtaacaccaccaacccccctcctgcaccatctaagtccccagaggagatgcgaaaactcttcatccagagggccaagaagatcgacaaaatatcccgcattggcttcc

SEQ ID NO: 397179 - DNA, 120 bp, Artificial Sequence
  ENSG00000145888_13 (sequence is synthesized)
ccatggccttcctcattttcaacatgttctactggatcatctacaagattgtccgtagagaggacgtccacaaccagtgaagggtctgaaaggttgggggaggctgggagaggggaacgt

SEQ ID NO: 397180 - DNA, 120 bp, Artificial Sequence
  ENSG00000145888_14 (sequence is synthesized)
gggaatagcacaggaatctgagagactaaggaagagaaggggaacggagggagggggcacacttacacaactctctctgcaatatgtgcaatagcaaaatgcagtgatgcatgaatttta

SEQ ID NO: 397181 - DNA, 120 bp, Artificial Sequence
  ENSG00000145888_15 (sequence is synthesized)
tttgaaattcccactgggcaggcatgacctcagcattagtacccaccatcttggctccagcatacaagcaggcctggtaatgggcctccacgatgtccctgccatgggctttgcctgctc

SEQ ID NO: 397182 - DNA, 120 bp, Artificial Sequence
  ENSG00000145888_16 (sequence is synthesized)
ccacactgcagtaatatggaccctggggtcctgggaagccattggaaggccaaccaaagtggtacccatctgtccccatgagggtatattcctgctccatgccaaaccagggtgctggtt

SEQ ID NO: 397183 - DNA, 120 bp, Artificial Sequence
  ENSG00000145888_17 (sequence is synthesized)
gctcaccatgtccattatccacttacaagtgtgcctcaaattggtcactgcaggctttcggttgtactcgaaaacttcacagaacaccagcttgtagggtccttactgaaggtatcccaa

SEQ ID NO: 397184 - DNA, 120 bp, Artificial Sequence
  ENSG00000145888_18 (sequence is synthesized)
actgaaggtatcccaaaacatggcaggaggcatgaaatgcatgtcactgttggagccttcagactgtaaaatactagagccatcaaaattctaggctaggcatggtggctcatgcctgta

SEQ ID NO: 397185 - DNA, 120 bp, Artificial Sequence
  ENSG00000145901_0 (sequence is synthesized)
agtgagccgaggagccttcatagggacagccgcccctggtgcacacaccctcgtattctcctgcccttccccagccaggcgggcaccacggcaggggctgagctaccctcatggaaggga

SEQ ID NO: 397186 - DNA, 120 bp, Artificial Sequence
  ENSG00000145901_1 (sequence is synthesized)
gaggaccgtaccggatctacgaccctgggggcagcgtgccctcaggagaggcatccgcagcttttgagcgcctagtgaaggagaattcccggctgaaggaaaaaatgcaagggataaaga

SEQ ID NO: 397187 - DNA, 120 bp, Artificial Sequence
  ENSG00000145901_2 (sequence is synthesized)
tgttaggggagcttttggaagagtcccagatggaagcgaccaggctccggcagaaggcagaggagctagtgaaggacaacgagctgctcccaccaccttctccctccttgggctccttcg

SEQ ID NO: 397188 - DNA, 120 bp, Artificial Sequence
  ENSG00000145901_3 (sequence is synthesized)
accccctggctgagctcacaggaaaggactcaaatgtcacagcatctcccacagcccctgcatgccccagtgacaagccagcaccagtccagaagcctccatccagtggcacctcctctg

SEQ ID NO: 397189 - DNA, 120 bp, Artificial Sequence
  ENSG00000145901_4 (sequence is synthesized)
aatttgaagtggtcactcctgaggagcagaattcaccagagagcagcagccatgccaatgcgatggcgctgggccccctgccccgtgaggacggcaacctgatgctgcacctgcagcgcc

SEQ ID NO: 397190 - DNA, 120 bp, Artificial Sequence
  ENSG00000145901_5 (sequence is synthesized)
tggagaccacgctgagtgtgtgtgccgaggagccggaccacggccagctcttcacccacctgggccgcatggccctggagttcaaccgactggcatccaaggtgcacaagaatgagcagc

SEQ ID NO: 397191 - DNA, 120 bp, Artificial Sequence
  ENSG00000145901_6 (sequence is synthesized)
gcacctccattctgcagaccctgtgtgagcagcttcggaaggagaacgaggctctgaaggccaagttggataagggcctggaacagcgggatcaggctgccgagaggctgcgggaggaaa

SEQ ID NO: 397192 - DNA, 120 bp, Artificial Sequence
  ENSG00000145901_7 (sequence is synthesized)
atttggagctcaagaagttgttgatgagcaatggcaacaaagagggtgcgtctgggcggccaggctcaccgaagatggaagggacaggcaagaaggcagtggctggacagcagcaggcta

SEQ ID NO: 397193 - DNA, 120 bp, Artificial Sequence
  ENSG00000145901_8 (sequence is synthesized)
gtgtgacggcaggtaaggtcccagaggtggtggccttgggcgcagccgagaagaaggtgaagatgctggagcagcagcgcagtgagctgctggaagtgaacaagcagtgggaccagcatt

SEQ ID NO: 397194 - DNA, 120 bp, Artificial Sequence
  ENSG00000145901_9 (sequence is synthesized)
tccggtccatgaagcagcagtatgagcagaagatcactgagctgcgtcagaagctggctgatttgcagaagcaggtgactgacctggaggccgagcgggagcagaagcagcgtgactttg

SEQ ID NO: 397195 - DNA, 120 bp, Artificial Sequence
  ENSG00000145901_10 (sequence is synthesized)
accgcaagctcctcctggccaagtccaagattgaaatggaggagaccgacaaggagcagctgacagcagaggccaaggagctgcgccaaaaggtcaagtacctgcaggatcagctgagcc

SEQ ID NO: 397196 - DNA, 120 bp, Artificial Sequence
  ENSG00000145901_11 (sequence is synthesized)
ggaaaaggagatccagcggctcaacaaggccctggaggaagcactgagcatccaaaccccgccatcatctccaccaacagcatttgggagcccagaaggagcaggggccctcctaaggaa

SEQ ID NO: 397197 - DNA, 120 bp, Artificial Sequence
  ENSG00000145901_12 (sequence is synthesized)
acaggagctggtcacgcagaatgagttgctgaaacagcaggtgaagatcttcgaggaggacttccagagggagcgcagtgatcgtgagcgcatgaatgaggagaaggaagagctgaagaa

SEQ ID NO: 397198 - DNA, 120 bp, Artificial Sequence
  ENSG00000145901_13 (sequence is synthesized)
gcaagtggagaagctgcaggcccaggtcaccctgtcaaatgcccagctaaaagcattcaaagatgaggagaaggcaagagaagccctcagacagcagaagaggaaagcaaaggcctcagg

SEQ ID NO: 397199 - DNA, 120 bp, Artificial Sequence
  ENSG00000145901_14 (sequence is synthesized)
agagcgttaccatgtggagccccacccagaacatctctgcggggcctacccctacgcctacccgcccatgccagccatggtgccacaccatggcttcgaggactggtcccagatccgcta

SEQ ID NO: 397200 - DNA, 120 bp, Artificial Sequence
  ENSG00000145901_15 (sequence is synthesized)
cccccctccccccatggccatggagcacccgcccccactccccaactcgcgcctcttccatctgccggaatacacctggcgtctaccctgtggaggggttcgaaatccaaatcagagctc

SEQ ID NO: 397201 - DNA, 120 bp, Artificial Sequence
  ENSG00000145901_16 (sequence is synthesized)
ccaagtgatggaccctcccacagccaggcctacagaaccagagtctccaaaaaatgaccgtgaggggcctcagtgagaccagattgtgtcatttggctccaccttcatcttgcagagcca

SEQ ID NO: 397202 - DNA, 120 bp, Artificial Sequence
  ENSG00000145901_17 (sequence is synthesized)
gctgatctcagattgccaagaaactagaagccacttgcacggtgtggccagagcctcagctggatgagaggctgagatgggtggccagcttgtacaccagtccctgaactgagctgttta

SEQ ID NO: 397203 - DNA, 120 bp, Artificial Sequence
  ENSG00000145901_18 (sequence is synthesized)
caggactggggaggctccacccagaaggctttcatttgtactctgctgggagtgactgggaaaaactccttccctgctgctgagtggagagaggcctcatccggctttgacccaccatcc

SEQ ID NO: 397204 - DNA, 120 bp, Artificial Sequence
  ENSG00000145901_19 (sequence is synthesized)
gttgcagaagcctccaggagcagcaatcctaagagtgggaggcagccaagacccccttccttcaaaacctcccggaagtggtttcaggccctctagttgccatgaccaatttgtgtgtgt

SEQ ID NO: 397205 - DNA, 120 bp, Artificial Sequence
  ENSG00000145901_20 (sequence is synthesized)
gtttaatttttgcttcaagctctgtagcaggacctgccccacgcacacccctacccctctgtgaggagctgtgggaagtgtgggtttgtctccagaacagaagagaatgatggatattct

SEQ ID NO: 397206 - DNA, 120 bp, Artificial Sequence
  ENSG00000145901_21 (sequence is synthesized)
ggctctggggccctctccaccaccactcacagtagccttgctgaagccatcacagatgggagaaggccatgccagccacgtccgccgaggggcgccagcctgaagctgccaggccctgag

SEQ ID NO: 397207 - DNA, 120 bp, Artificial Sequence
  ENSG00000145901_22 (sequence is synthesized)
gttcagaccctggaccccatagctggaggcctgtggtgccagaagcccagattagggtggctgtccatccctggatagctatttgcacgaatcatggacataaatccaagttgaagaaga

SEQ ID NO: 397208 - DNA, 120 bp, Artificial Sequence
  ENSG00000145901_23 (sequence is synthesized)
gactttcccaggggtggggcggcccggccaggcccccggcacttcctcgtcctcggcccgggtgccctgcccccgtccaggagccctaggagtgctacggggggccggagccttgcccgg

SEQ ID NO: 397209 - DNA, 120 bp, Artificial Sequence
  ENSG00000145901_24 (sequence is synthesized)
gccgctgccccgtccctggattcggggctggacgcagcaagcggggcgctgtgtccccaagctccccgtcctcggccaggcgggcaccacggcaggggctgagctaccctcatggaaggg

SEQ ID NO: 397210 - DNA, 120 bp, Artificial Sequence
  ENSG00000145901_25 (sequence is synthesized)
cacacagaggctgccccagacaccttccagagaggaaggttaagtgaggggttcagaaactgcatccttctgaactaaacagcaccgtggtggcagccggaatacacctggcgtctaccc

SEQ ID NO: 397211 - DNA, 120 bp, Artificial Sequence
  ENSG00000145901_26 (sequence is synthesized)
acaaagagggtgcgtctgggcggccaggctcaccgaagatggaagggacaggcaagaaggcagtggctggacagcagcaggctagtgtgacggcaggtaaggtcccagaggcgtgagcca

SEQ ID NO: 397212 - DNA, 120 bp, Artificial Sequence
  ENSG00000145901_27 (sequence is synthesized)
ctgcgcctggcctcttttcccttcttatcattcttcttccaaagatctgctgtcacttgtcccattttccccagtcctctgccacagccccaccttaggcatcccagctctcccctggac

SEQ ID NO: 397213 - DNA, 120 bp, Artificial Sequence
  ENSG00000145901_28 (sequence is synthesized)
cattacagaaacctcctggctggcctctttttcagcttctcccatatgacccttcttggtacacatctttaaacaccagagtatatagtatggcgcttaagagattggctctggatttac

SEQ ID NO: 397214 - DNA, 120 bp, Artificial Sequence
  ENSG00000145901_29 (sequence is synthesized)
acctgtgaaatgggagtgccagcctgggttgttataaagattcaattatacttgactaatacagatttagtattgtcctggcacagtaggtgctattgtaatttttgggtgtgattattg

SEQ ID NO: 397215 - DNA, 120 bp, Artificial Sequence
  ENSG00000145901_30 (sequence is synthesized)
attattaagcaccagttttgtcgcagccggaatacacctggcgtctaccctgtggaggggttcgaaatccaaatcagagctcccaagtgatggaccctcccacagccaggcctacagaac

SEQ ID NO: 397216 - DNA, 120 bp, Artificial Sequence
  ENSG00000145901_31 (sequence is synthesized)
caggtgagcccctaatactgagtcttggtcctccctgggggagataatatcttatctgccagcattgcctgagtttgggggtgatgtcgttagtttctgctcttggtggaggagaggccc

SEQ ID NO: 397217 - DNA, 120 bp, Artificial Sequence
  ENSG00000145901_32 (sequence is synthesized)
agctttccaaaacagtgttgaatggagagtaatggcaaccacagagtgaggggggctgaaaccattcattctagtgcattatctaatgccaggcattgtgctaggtgctatggatgccta

SEQ ID NO: 397218 - DNA, 120 bp, Artificial Sequence
  ENSG00000145901_33 (sequence is synthesized)
atgggaatgggttgctgaaagtgaagaatctcagggcagggcagttgttggggagactgaagcttcccccggaggacttaatcttccttctaggtctgggtgctaagaattgagccacac

SEQ ID NO: 397219 - DNA, 120 bp, Artificial Sequence
  ENSG00000145901_34 (sequence is synthesized)
atgttcagggaaggggaggtttccccttctgcatgacaaccccagtttagcctgctgggtaggagcatgtgctgggcttgaatctgtgctctgccacttactagctgtgtgaccttgacc

SEQ ID NO: 397220 - DNA, 120 bp, Artificial Sequence
  ENSG00000145901_35 (sequence is synthesized)
ttggacaagccccttcaggtctctgagcctcagttttcacatctgtaaaatgaggatgatgatcatagtcttttcttcatggcactgtgcagaagatccaatgaaatgatatgtgtagaa

SEQ ID NO: 397221 - DNA, 120 bp, Artificial Sequence
  ENSG00000145901_36 (sequence is synthesized)
tgcaaataaatagggcagcatttattaaataggactggtagtggtggctattattagtatgattattattaggaaggagttccctgaggatgacccctccaaagggccctgatttccagg

SEQ ID NO: 397222 - DNA, 120 bp, Artificial Sequence
  ENSG00000145901_37 (sequence is synthesized)
atacatactgttctgtgactccccgaaagagggattctctctacattctgaaatttgttgtccctatcctggtattgagaagtcaccttcctgatacaaaaagaaggaacaagttgggag

SEQ ID NO: 397223 - DNA, 120 bp, Artificial Sequence
  ENSG00000145901_38 (sequence is synthesized)
tatactatttctgttgaacatattttgtatgcacattgttggaggcatttgtgtgcatgtgcaggatggatgagtttccaggagtgcttctggggatggagtatgaaggctgagctttcc

SEQ ID NO: 397224 - DNA, 120 bp, Artificial Sequence
  ENSG00000145901_39 (sequence is synthesized)
actgtaggacatttgtgtgcacgtgtgcattgtacattcattgtgcgtacaggagcagatgggaattttgtgcgactggaatagaagggggtgagcagggacctccttagtcctctcgag

SEQ ID NO: 397225 - DNA, 120 bp, Artificial Sequence
  ENSG00000145901_40 (sequence is synthesized)
tattggtacagaggcagtgcccacaatgtattagctgtcatcactgttgacattctgtgtccaggtagcaaccttccgtgcccatgtgactagccttctttggccgtgtatgagccttcc

SEQ ID NO: 397226 - DNA, 120 bp, Artificial Sequence
  ENSG00000145901_41 (sequence is synthesized)
gtgcccatgtatccaactttctatgcccatgttccagccctccgtgcccatgtaccagccttttgtgcccatgcccagccttttgtgcccatgcccagccttccatgcccatgtaccagc

SEQ ID NO: 397227 - DNA, 120 bp, Artificial Sequence
  ENSG00000145901_42 (sequence is synthesized)
cttccgtgtccatgtaccagccttccatgcccatgtgctcagccttccgtttccatgtatcagccttccgtgcccatgtgcccagccttctgtgtccatttacccagccttccgtgccca

SEQ ID NO: 397228 - DNA, 120 bp, Artificial Sequence
  ENSG00000145901_43 (sequence is synthesized)
gttttatagaatgagtatatctatatctatatctgtctgtatctacatctcaaatgtcttaccttccaggccagagagttttttggctgatgtgtgtagggagtgaggagagtggctggt

SEQ ID NO: 397229 - DNA, 120 bp, Artificial Sequence
  ENSG00000145901_44 (sequence is synthesized)
agtaccttagaggttgtacctaaacagggagaatgaccgtagggaggggagaagggaaggggagagggcctggcagccaccctgagtcagggagggggaatcatcatcttgtagacttct

SEQ ID NO: 397230 - DNA, 120 bp, Artificial Sequence
  ENSG00000145907_0 (sequence is synthesized)
gtgcggacgcagttgcgtgaggggtttgtactatcctcggtgctgtggtgcagagctagttcctctccagctcagccgcgtaggtttggacatatttgactcttttccccccaggttgaa

SEQ ID NO: 397231 - DNA, 120 bp, Artificial Sequence
  ENSG00000145907_1 (sequence is synthesized)
ttgaccaaagcaatggtgatggagaagcctagtcccctgctggtcgggcgggaatttgtgagacagtattacacactgctgaaccaggccccagacatgctgcatagattttatggaaag

SEQ ID NO: 397232 - DNA, 120 bp, Artificial Sequence
  ENSG00000145907_2 (sequence is synthesized)
aactcttcttatgtccatgggggattggattcaaatggaaagccagcagatgcagtctacggacagaaagaaatccacaggaaagtgatgtcacaaaacttcaccaactgccacaccaag

SEQ ID NO: 397233 - DNA, 120 bp, Artificial Sequence
  ENSG00000145907_3 (sequence is synthesized)
attcgccatgttgatgctcatgccacgctaaatgatggtgtggtagtccaggtgatggggcttctctctaacaacaaccaggctttgaggagattcatgcaaacgtttgtccttgctcct

SEQ ID NO: 397234 - DNA, 120 bp, Artificial Sequence
  ENSG00000145907_4 (sequence is synthesized)
gaggggtctgttgcaaataaattctatgttcacaatgatatcttcagataccaagatgaggtctttggtgggtttgtcactgagcctcaggaggagtctgaagaagaagtagaggaacct

SEQ ID NO: 397235 - DNA, 120 bp, Artificial Sequence
  ENSG00000145907_5 (sequence is synthesized)
gaagaaagacagcaaacacctgaggtggtacctgatgattctggaactttctatgatcaggcagttgtcagtaatgacatggaagaacatttagaggagcctgttgctgaaccagagcct

SEQ ID NO: 397236 - DNA, 120 bp, Artificial Sequence
  ENSG00000145907_6 (sequence is synthesized)
gatcctgaaccagaaccagaacaagaacctgtatctgaaatccaagaggaaaagcctgagccagtattagaagaaactgcccctgaggatgctcagaagagttcttctccagcacctgca

SEQ ID NO: 397237 - DNA, 120 bp, Artificial Sequence
  ENSG00000145907_7 (sequence is synthesized)
gacatagctcagacagtacaggaagacttgaggacattttcttgggcatctgtgaccagtaagaatcttccacccagtggagctgttccagttactgggataccacctcatgttgttaaa

SEQ ID NO: 397238 - DNA, 120 bp, Artificial Sequence
  ENSG00000145907_8 (sequence is synthesized)
gtaccagcttcacagccccgtccagagtctaagcctgaatctcagattccaccacaaagacctcagcgggatcaaagagtgcgagaacaacgaataaatattcctccccaaaggggaccc

SEQ ID NO: 397239 - DNA, 120 bp, Artificial Sequence
  ENSG00000145907_9 (sequence is synthesized)
agaccaatccgtgaggctggtgagcaaggtgacattgaaccccgaagaatggtgagacaccctgacagtcaccaactcttcattggcaacctgcctcatgaagtggacaaatcagagctt

SEQ ID NO: 397240 - DNA, 120 bp, Artificial Sequence
  ENSG00000145907_10 (sequence is synthesized)
aaagatttctttcaaagttatggaaacgtggtggagttgcgcattaacagtggtgggaaattacccaattttggttttgttgtgtttgatgattctgagcctgttcagaaagtccttagc

SEQ ID NO: 397241 - DNA, 120 bp, Artificial Sequence
  ENSG00000145907_11 (sequence is synthesized)
aacaggcccatcatgttcagaggtgaggtccgtctgaatgtcgaagagaagaagactcgagctgccagggaaggcgaccgacgagataatcgccttcggggacctggaggccctcgaggt

SEQ ID NO: 397242 - DNA, 120 bp, Artificial Sequence
  ENSG00000145907_12 (sequence is synthesized)
gggctgggtggtggaatgagaggccctccccgtggaggcatggtgcagaaaccaggatttggagtgggaagggggcttgcgccacggcagtgaatcttcatggatcttcatgcagccata

SEQ ID NO: 397243 - DNA, 120 bp, Artificial Sequence
  ENSG00000145907_13 (sequence is synthesized)
caaaccctggttccaacagaatggtgaattttcgacagcctttggtatcttggagtatgaccccagtctgttataaactgcttaagtttgtataattttactttttttgtgtgttaatgg

SEQ ID NO: 397244 - DNA, 120 bp, Artificial Sequence
  ENSG00000145907_14 (sequence is synthesized)
tgtgtgctccctctccctctcttccctttcctgacctttagtctttcacttccaattttgtggaatgatattttaggaataacggacttttaaagaagcaaaaaaaaagactgaatttcc

SEQ ID NO: 397245 - DNA, 120 bp, Artificial Sequence
  ENSG00000145907_15 (sequence is synthesized)
ttgcttactttgcatatacagactggattttttttttttttttacagccatttccccaaaggaatgtcttgcatattactgacatttggtatgtttcattcattggaatatttcttattt

SEQ ID NO: 397246 - DNA, 120 bp, Artificial Sequence
  ENSG00000145907_16 (sequence is synthesized)
tctacgtgtttgaaaagcctgtaagaaatacaggatttgataatattttgaaggcaggaaaaacccaaattgtttcttctttgagagtcatgactaccttctggtgtggagaaattgcca

SEQ ID NO: 397247 - DNA, 120 bp, Artificial Sequence
  ENSG00000145907_17 (sequence is synthesized)
ttggaaaatttgacaattttgattctcactggtatgtttaaaaactgaataaaaggaatagaatttttttttgataaaggatcacaaaacaattctaaaacctaactgtttttaccattg

SEQ ID NO: 397248 - DNA, 120 bp, Artificial Sequence
  ENSG00000145907_18 (sequence is synthesized)
aaatttaaattgtgataataggttttaaatgtctagaatgcaactgataggcttttcttgaactgttagtttttttgaagtagttttttcatgtttaatttgtatttgtaaaaaaacaaa

SEQ ID NO: 397249 - DNA, 120 bp, Artificial Sequence
  ENSG00000145907_19 (sequence is synthesized)
aagcaaaaaaattcccaaaacccagataacaaccagagcaaaactgttgtgccttctatttatctttgatttcagtcttggcaattgtttaaaaaaaaaatctagatttgttttattagg

SEQ ID NO: 397250 - DNA, 120 bp, Artificial Sequence
  ENSG00000145907_20 (sequence is synthesized)
ttcagagtatgtggggaattatagaatccctctttcatcactttgtgtatgtcttttgttaacatatttgttatgccttattctaaaattgagtctcaaactggaatgcctttgaagaca

SEQ ID NO: 397251 - DNA, 120 bp, Artificial Sequence
  ENSG00000145907_21 (sequence is synthesized)
gatgcttctatagaggttctttgacctaaatagttcagcatttgtatttttattctggtatctaatcagattcctaatcatagcccgtaagaaggaatgttactttaatattggactttg

SEQ ID NO: 397252 - DNA, 120 bp, Artificial Sequence
  ENSG00000145907_22 (sequence is synthesized)
ctcatgtgctcgtgtccgcatttttttttttcttaaaatcatagccatatggtaaattttctattttgttatggttctcttttattgatgggcatgcagtgggtgttacttggaaatggc

SEQ ID NO: 397253 - DNA, 120 bp, Artificial Sequence
  ENSG00000145907_23 (sequence is synthesized)
caatttttattaaaatatttctggaagaaaatttaatctggcaatatagactaatactcgtttcacatatgtgttatttgttgagtgctgtgtgtgagatgggtgaaggttttgtttaca

SEQ ID NO: 397254 - DNA, 120 bp, Artificial Sequence
  ENSG00000145907_24 (sequence is synthesized)
cgtgtgaaacaaacttttgtgtgattgtcattactaattgaagggcaaccaggttgtaaaattcagcgtatttattttcttaacagtattcatctttaggactgtcgtttgaggatagca

SEQ ID NO: 397255 - DNA, 120 bp, Artificial Sequence
  ENSG00000145907_25 (sequence is synthesized)
taggaatatttggtttgcattactgagaaactctaggtttgctgtgatggttaagaccacagtgaagttggtattaccagtttggttccagttcctcaaatatttgaaaattggcagcat

SEQ ID NO: 397256 - DNA, 120 bp, Artificial Sequence
  ENSG00000145907_26 (sequence is synthesized)
ctcctttacataaacttaatgtaactgaatcacatggcttttttgtagggttaaagtaactttggtaaccacttttggcccagatcactgataataggaagaaatacaacttatactttt

SEQ ID NO: 397257 - DNA, 120 bp, Artificial Sequence
  ENSG00000145907_27 (sequence is synthesized)
gtagcttatattaagcatgtggtgggtggaaagaaaagtttagtctgagtcactttggaaaaaaaaattactttgtggtaacttcaaggtcataaattatggatagcctagaaattatcc

SEQ ID NO: 397258 - DNA, 120 bp, Artificial Sequence
  ENSG00000145907_28 (sequence is synthesized)
ttcatgagtgaatactaaattatacatttcaaaacagaagttcttcctacttggagacttaagggcattaactagatgcagcaatcctcagcttggtgttatcacatactagaggacatt

SEQ ID NO: 397259 - DNA, 120 bp, Artificial Sequence
  ENSG00000145907_29 (sequence is synthesized)
tggaaatgtgtgaaatttggaagggttgttggagagacatgcatctggcatttattgggtggggtctaaggataccaaatgttgtgtaaaaatgaagcaaccccattgagaacactgata

SEQ ID NO: 397260 - DNA, 120 bp, Artificial Sequence
  ENSG00000145907_30 (sequence is synthesized)
gtccctattcctgtgggtgggtggagctgtgggattaggaaaactggaatgaagactcattcttttgaaactcagcctcagataaataacaaactaggaaatggaaatctgtttcaagaa

SEQ ID NO: 397261 - DNA, 120 bp, Artificial Sequence
  ENSG00000145907_31 (sequence is synthesized)
ttgcagtaacatctactctaaggaattagtaatttcactttttattatttgtaccaaatgtatgtgtgtgttgtgtatgttggtgtaaatgtggagaggtggtagcaatacatactgatg

SEQ ID NO: 397262 - DNA, 120 bp, Artificial Sequence
  ENSG00000145907_32 (sequence is synthesized)
ctgcttgtaatttgttgcagggaattactgcacaatctcagaaaatagaaagcttccccagtgctttctgtcatcagagttgggatgattgtgaggttttgaatgatagtattggaccta

SEQ ID NO: 397263 - DNA, 120 bp, Artificial Sequence
  ENSG00000145907_33 (sequence is synthesized)
agaaataggattagcatcatgatcagaactgttgagaatccttgtacaattatgtacattattgcatgtagagtaaacctgagagcttagagatgtatacgtttccactgctggaaaatc

SEQ ID NO: 397264 - DNA, 120 bp, Artificial Sequence
  ENSG00000145907_34 (sequence is synthesized)
attataagttagggcaacattttctataggtggcagcagtaggagctcatcacattgaacattttcagattttaaaatgaaaattttcatccgtaggaatggcccaatgtatagttatta

SEQ ID NO: 397265 - DNA, 120 bp, Artificial Sequence
  ENSG00000145907_35 (sequence is synthesized)
gctactgagcttagaactcttgacccatgagattttttttttaaatttttatttttatagaggcaaggtcttgctatgttgtcaggctggtctcaagctcctggcctcatcagttctcct

SEQ ID NO: 397266 - DNA, 120 bp, Artificial Sequence
  ENSG00000145907_36 (sequence is synthesized)
gccttccaagtagccggaactacaggtgtgcaccattgcacctggcctcatgagtattttagttagataagatttgtttggttcagtgggtcttagttttttaagacctgttaatttgta

SEQ ID NO: 397267 - DNA, 120 bp, Artificial Sequence
  ENSG00000145907_37 (sequence is synthesized)
attagacatcttgggccttaaactgtatttttgttttagtggtgaggttgggttttactttgtgtattccagcgttctcaactttgtcagatattgctagggaccagtgagatagataat

SEQ ID NO: 397268 - DNA, 120 bp, Artificial Sequence
  ENSG00000145907_38 (sequence is synthesized)
ccaaaaataataatttgactttggttgagtatgtcattaccacagtgttagttgaattgcactttaggttagaaaagttaattttcacatctgtgctgcgggttaggtgatattgtcctc

SEQ ID NO: 397269 - DNA, 120 bp, Artificial Sequence
  ENSG00000145907_39 (sequence is synthesized)
agcacaatagatgaggaagaaactgaatcagaacagttaaatgacaggcttccaagtcatccatgtagcaaggagcacatttgcctcccaaactgatgctttttctctagaaccataatg

SEQ ID NO: 397270 - DNA, 120 bp, Artificial Sequence
  ENSG00000145907_40 (sequence is synthesized)
cccccctaattacatttcagtagcatagaccgcaatgaacttcctactgtagggagacttgagtctggaatacattcagaacaaggttaacattacagttcttaatttcctttagggcaa

SEQ ID NO: 397271 - DNA, 120 bp, Artificial Sequence
  ENSG00000145907_41 (sequence is synthesized)
acaagataattaaacttgggttttgtgagtctttttttgatttgcagattatatatggtaacacaataatggtggtttgtttttaagttttttctcatcaggtttgataatttaatgcaa

SEQ ID NO: 397272 - DNA, 120 bp, Artificial Sequence
  ENSG00000145907_42 (sequence is synthesized)
atttttattatagtataatccaggtgagtttatagaatttgtgttttgtgcttataaactgtcaccttctgatacttttcttcatccctctatttgaaaaacccttgtagaatttaacga

SEQ ID NO: 397273 - DNA, 120 bp, Artificial Sequence
  ENSG00000145907_43 (sequence is synthesized)
tttaatggaaaatgttgcactttatagaaggccattttagaacttacaggtaacctttttgaagagcttagatttgtagaccactgtttatgctgagtgacatttcttttaaatggttgc

SEQ ID NO: 397274 - DNA, 120 bp, Artificial Sequence
  ENSG00000145907_44 (sequence is synthesized)
atttgtcaaatctataaagatgttttttatattgcagttttctttttgtgctacttaaaggaatctttgcaatgctgcatatagataattgttgacctttttagttcagcagtttttaaa

SEQ ID NO: 397275 - DNA, 120 bp, Artificial Sequence
  ENSG00000145907_45 (sequence is synthesized)
cttgaagtaacatcagcatttatttgaatatcaggttttagctaactgcctaatgtaccaaaaaaaaattagcaatgtcttatgtgggatgaggggttaagttaaagttgctgatcaagt

SEQ ID NO: 397276 - DNA, 120 bp, Artificial Sequence
  ENSG00000145907_46 (sequence is synthesized)
aatggccgtgtggcacaagatgataactaagaatttctggttctaaggtagtaatgccttttgggatttatatttgtttaatgttgagattctggggaccataggtgggcctgtcaactc

SEQ ID NO: 397277 - DNA, 120 bp, Artificial Sequence
  ENSG00000145907_47 (sequence is synthesized)
ttaacagactatagtaaaggagagatggtggcacatgtgagataaaacttgtttatatttacattcttattagtggatagatatcacctcagtacaacactgaaattaaactgccttgtt

SEQ ID NO: 397278 - DNA, 120 bp, Artificial Sequence
  ENSG00000145907_48 (sequence is synthesized)
catgctttcatgtctcaaatcaaggcctaaatgagtaaaaagatgattacagattacctaaaacccttaaccagttttggtttttgattatgcatatgtgttggcttgcaattaggtttt

SEQ ID NO: 397279 - DNA, 120 bp, Artificial Sequence
  ENSG00000145907_49 (sequence is synthesized)
tagtttctgtttatgtgacttgtttgaaaacattggattcgtcttctctccacagtttctacttgaacctagtagcttattttaattccctgtaagaggaaaataatatagggaatctgt

SEQ ID NO: 397280 - DNA, 120 bp, Artificial Sequence
  ENSG00000145907_50 (sequence is synthesized)
tcaactattcctttaataaatcatgtgacttggccaattacagaaattcctaagtgtagtattttgaaatgtggccagtgtcccagatttgtaaggtacagtgtgcatacagtgtgtctt

SEQ ID NO: 397281 - DNA, 120 bp, Artificial Sequence
  ENSG00000145907_51 (sequence is synthesized)
aggatttttttaagtaaattaaggatgtttaccagaaattattgatttactgaaccaagtatttattttcagaagcccacttttggggaaggttgcctatatttttgatagtaattagat

SEQ ID NO: 397282 - DNA, 120 bp, Artificial Sequence
  ENSG00000145907_52 (sequence is synthesized)
atttttgatagtaattagatggaagattaaatcctgtttaacctggatagaaacagttttaactattgctgaagttaaaatcactttggggtggggtggggtggctcatgcctgtaatcc

SEQ ID NO: 397283 - DNA, 120 bp, Artificial Sequence
  ENSG00000145907_53 (sequence is synthesized)
gggcaacatagcaagaccctgtctctacagataattgaaaagtgagccagatgtggtggcgcattcctatagtctccgtctctcaggaggctgaggcaggagattgcttgagcccaggag

SEQ ID NO: 397284 - DNA, 83 bp, Artificial Sequence
  ENSG00000145907_54 (sequence is synthesized)
agtgagccagatgtggtggcgcattcctatagtctccgtctctcaggaggctgaggcaggatatgatcataccactgcactct

SEQ ID NO: 397285 - DNA, 120 bp, Artificial Sequence
  ENSG00000145907_55 (sequence is synthesized)
aaaattagaaaacaacaaaaaccacttcggttactcactgtcctcatgctttgatgtcagttgttctcctaaattttaaaattttgttatgaagattggatgtacactgatttggccctt

SEQ ID NO: 397286 - DNA, 120 bp, Artificial Sequence
  ENSG00000145907_56 (sequence is synthesized)
taaatgacattataccaagaagttggtataagggagtaggagatgagaaaactttttgaaaaatcatttggtgcatgctaaggtagcttgtaggacatgtggttttaaaaaattcatgga

SEQ ID NO: 397287 - DNA, 120 bp, Artificial Sequence
  ENSG00000145907_57 (sequence is synthesized)
ttttgaagaaggatagggtggaagtaaaatttagctgatagcatagggatcatttgtgatttatatagaaaataattatatttttgagtgagaagcatcagacttaaatttttttcttct

SEQ ID NO: 397288 - DNA, 120 bp, Artificial Sequence
  ENSG00000145907_58 (sequence is synthesized)
attttggttattaccaaaaggaacagagaaactctcagaattctttgaatcatagaatgttagtgctggaaaggactaggaagtgacttgtacaaccccttcattttacaaaggatcaga

SEQ ID NO: 397289 - DNA, 120 bp, Artificial Sequence
  ENSG00000145907_59 (sequence is synthesized)
gagaattggttagtagagtcccaaatctgcttttagaagtaatatggtgatcatcagtttagattcactgtaggaagggcagccctgttaaagtttgtcaggagaaaaagggaaggtatc

SEQ ID NO: 397290 - DNA, 120 bp, Artificial Sequence
  ENSG00000145907_60 (sequence is synthesized)
actttttgtatgttcacccagttgcttctgtagttttcatacccctgttttctcaattttcttagaactgtctttaatggcccagctctaccagggcttgttgtctaaggacattaactt

SEQ ID NO: 397291 - DNA, 120 bp, Artificial Sequence
  ENSG00000145907_61 (sequence is synthesized)
gtgctcccctcagggatgggtttactactagctgtcagaaagctattgggtatcctaatgtgttaatagctgaaactcagctgtaatttctcctaaatacttcagcattttgcattctgt

SEQ ID NO: 397292 - DNA, 120 bp, Artificial Sequence
  ENSG00000145907_62 (sequence is synthesized)
acattgtggtgctttttccaccttgtattgttgtaactgtaagctcctagggggcagcaatttggtcttaggcgtgtaccctgtttagtgcctggcaatgccatgtttatatcaaggtct

SEQ ID NO: 397293 - DNA, 120 bp, Artificial Sequence
  ENSG00000145907_63 (sequence is synthesized)
taatattacttttgagttatttctcccactcttcatggaagtgatgctccagccttgctaaaacactgagggtcctcccgataagccaggcattgtgattccttggcttcaagtgccttc

SEQ ID NO: 397294 - DNA, 120 bp, Artificial Sequence
  ENSG00000145907_64 (sequence is synthesized)
tgtcttccccgaaggtccactgagatctacaatcccccctttcctctgatctcttgccatgtaagtaattttttaaaagatcagtacaagagctatattttttcctaagaaaaaatttca

SEQ ID NO: 397295 - DNA, 120 bp, Artificial Sequence
  ENSG00000145907_65 (sequence is synthesized)
acaggaatggggagtagccccgttttggggctgatctgtccagaatttggagtgaggaacaaatccattctcatctactttccacattttccctcttgtttgaggtcctgttccaacctt

SEQ ID NO: 397296 - DNA, 120 bp, Artificial Sequence
  ENSG00000145907_66 (sequence is synthesized)
catttctgaaactgttctagagcactttgtctttctcgtagttcataacttaccccttcagtctagaattagaattacattatctgttttactactttactagactgtaagctcctagaa

SEQ ID NO: 397297 - DNA, 120 bp, Artificial Sequence
  ENSG00000145907_67 (sequence is synthesized)
gataaggactagggagttcatctctgtattccaccagaaggtacagtgactcataactagagtctttagatgaaacttactgagttgaataacttaatatatttctgttttcattcccaa

SEQ ID NO: 397298 - DNA, 120 bp, Artificial Sequence
  ENSG00000145907_68 (sequence is synthesized)
gggaggccatgtctggagatagaccttgaatttaataaattttaggcactataccatttcagtggagaaaattgttgggaaatttggggggatggatatataagggggaggaagtcactg

SEQ ID NO: 397299 - DNA, 120 bp, Artificial Sequence
  ENSG00000145907_69 (sequence is synthesized)
gccagtttgaggtgcttccattggtctgggtaactagccatttcttcctgattgtgcctagtatatcccagacagtttgtttctatgcagaagaattttatatgaaattttcatttcttt

SEQ ID NO: 397300 - DNA, 120 bp, Artificial Sequence
  ENSG00000145907_70 (sequence is synthesized)
gcaaaaacttgttccttctttcagttcatgacatcatccatgctaaagtctgagtcatctgcttccatttttgttattccccacatccagtcttcagctaagtcctgtcagttctacctc

SEQ ID NO: 397301 - DNA, 120 bp, Artificial Sequence
  ENSG00000145907_71 (sequence is synthesized)
aagtctttcccgtctttcttcctcacctatgtaatttcagtagtctctcagcttcacttaacctcttactccagcctactttatacacaatgttagattcatcttactgaaacatagttc

SEQ ID NO: 397302 - DNA, 120 bp, Artificial Sequence
  ENSG00000145907_72 (sequence is synthesized)
tgaccatgtattccatgtatgtgttctctctcccctattagactgtaagctccttatgggcaggatctgtgtctgagtcatctttgtatcttgcctagcacctatcaataaatacttctt

SEQ ID NO: 397303 - DNA, 120 bp, Artificial Sequence
  ENSG00000145907_73 (sequence is synthesized)
gaatgaacaaatgaattctcatttctcgacataaagccttgtctaaagtgagatgttttccaggtcatacataggtttctccctggggtaattggaagttcttgcatataaagttggtta

SEQ ID NO: 397304 - DNA, 120 bp, Artificial Sequence
  ENSG00000145907_74 (sequence is synthesized)
aatagtaataattatgagttaaccacagaaaatttcagaaaactttaatttttttccattggaatcagcatggatatgtgtatatggatggttcaataaatatacttttatatacatgtt

SEQ ID NO: 397305 - DNA, 120 bp, Artificial Sequence
  ENSG00000145907_75 (sequence is synthesized)
tcacagaaattttacattccatcttcaaactgcagaaatagattttttttttttacaagccaaaaaataactgccataacttttgtgacttcatgcaaaaaaaggggggaagagtaaggg

SEQ ID NO: 397306 - DNA, 120 bp, Artificial Sequence
  ENSG00000145907_76 (sequence is synthesized)
gcaaaagggaattagttgttcaaggttgagtgtccagtaagaagtaaaaatgttacattaaggaagcgattgcttaacacgctgcttaaggtggtagccagacaaatccttaactgcagc

SEQ ID NO: 397307 - DNA, 120 bp, Artificial Sequence
  ENSG00000145907_77 (sequence is synthesized)
attaaggccataccaagtttatacatatatacaaagaaatttccatataaaagacatactatcacattttcttcttcataaggatgaggaactttgtaattctgacctgattttccaggc

SEQ ID NO: 397308 - DNA, 120 bp, Artificial Sequence
  ENSG00000145907_78 (sequence is synthesized)
caattaattaaaatgtccccaggctgctttttagaagtatcttctactttggctagctgtcagagttgccgctatgtgagcttgtgacttctggtctggcgtgaaagtatgaatcatctt

SEQ ID NO: 397309 - DNA, 120 bp, Artificial Sequence
  ENSG00000145907_79 (sequence is synthesized)
gaacctcttccatcatagcactatgttgctgagctaattcatgctgcccagctaagcacattttctacatccccaaagtatttggaatcacagcattgtaacttgtgattgtcttacctg

SEQ ID NO: 397310 - DNA, 120 bp, Artificial Sequence
  ENSG00000145907_80 (sequence is synthesized)
taacagactccacagtcatgctggcattgtgacctgaagaattacacagtgcccttcttagattctttggggttaaggtaacttcttgaataatgtactaatgaacgatagtgtttcagg

SEQ ID NO: 397311 - DNA, 120 bp, Artificial Sequence
  ENSG00000145907_81 (sequence is synthesized)
aaacatgccctagctattggaagttcgtatctaacttttaccccttgtgtgtcatgatacatttaagttggtagctacatttttggaataaaggaaatgtaaaattatttgcagaataat

SEQ ID NO: 397312 - DNA, 120 bp, Artificial Sequence
  ENSG00000145907_82 (sequence is synthesized)
aacctgggatttgctcttctgcctaaacatcgaactagggaactttaaagacaaagggtgcatcttttgtgcaagtatctaagcgggcaaaatggggaaaacatgaagggcaagtccttt

SEQ ID NO: 397313 - DNA, 120 bp, Artificial Sequence
  ENSG00000145907_83 (sequence is synthesized)
ggggatgacttctaattaatgcagaagtcatttgctttggccaggttgggtgggactctgagattgcacactcttgccctgttggcagaaactagcccatcttaagttagtcaatgaatc

SEQ ID NO: 397314 - DNA, 120 bp, Artificial Sequence
  ENSG00000145907_84 (sequence is synthesized)
ctgagtcaaaatgaaaggttgctaaatctaagatcgagtgtataaataaaataaccccttcctccagtgactgtgcatttattttgtaataaactcattttggaatgttttagcaatgaa

SEQ ID NO: 397315 - DNA, 120 bp, Artificial Sequence
  ENSG00000145907_85 (sequence is synthesized)
agggtgagtggcagttatatagaccggcggcggagcacgcgtgtgtgcggacgcagttgcgtgaggggtttgtactatcctcggtgctgtggtgcagagctagttcctctccagctcagc

SEQ ID NO: 397316 - DNA, 120 bp, Artificial Sequence
  ENSG00000145907_86 (sequence is synthesized)
gcgcgtcgcagaagcgccttcggttttgcagagagcaaagagggagcagcgagtgcacggagtggtagtaacaaccaatgttctttccacgccctcactgtgtgtccggcactgtgcgga

SEQ ID NO: 397317 - DNA, 120 bp, Artificial Sequence
  ENSG00000145907_87 (sequence is synthesized)
gcctgggccccagggcggtctctggggccaggggtcccgcgcccagcgtttcccgcccgccaccctctccgccacgcgcccgcggcaccttttcctcccctggccaagggatccagtcgg

SEQ ID NO: 397318 - DNA, 120 bp, Artificial Sequence
  ENSG00000145907_88 (sequence is synthesized)
tatgtggtacttatctttgagattctcccactcatcatcttatgctttgtagggttgttgcataatacttatttacatataaatatcccccaattttttatttgagacagagtctcgccc

SEQ ID NO: 397319 - DNA, 120 bp, Artificial Sequence
  ENSG00000145907_89 (sequence is synthesized)
gagtctcgccctgttgtccagactggagtgcagtggtgcgatctggactgactgcaacgtccacctccccagtttaagtgattcttctgccccagcctcctgagtagctgggaccacagg

SEQ ID NO: 397320 - DNA, 120 bp, Artificial Sequence
  ENSG00000145907_90 (sequence is synthesized)
ctgcgcctagccccaaaaaataatttttgaaagttaaactaagttatctaaacttgtacattattggaaaataacaattgaaatgtaaaggtatagtcatgcattatttactaagaatgt

SEQ ID NO: 397321 - DNA, 120 bp, Artificial Sequence
  ENSG00000145907_91 (sequence is synthesized)
attaaagattgctggagctgaggtggatgtaaaaaataagaatgtattgaagacaatccatgactgttcctgtaataccatacttttgtgttgatgcgctttaaaaaattagtgtcttta

SEQ ID NO: 397322 - DNA, 120 bp, Artificial Sequence
  ENSG00000145907_92 (sequence is synthesized)
atttcagacttacagaaaacttggaataatagtacactaactcctatatactccttacctagagcagctgtcaccacttgcccacatgtgtataattctttctctaaaatagtttagtgg

SEQ ID NO: 397323 - DNA, 120 bp, Artificial Sequence
  ENSG00000145907_93 (sequence is synthesized)
gcatttcctaagaataattctcttccattctgtagtacagttatcaaattcaggaaatgttgatgcaatataatctataatccatttttaaaatttggaaattatctcaataatgtctta

SEQ ID NO: 397324 - DNA, 120 bp, Artificial Sequence
  ENSG00000145907_94 (sequence is synthesized)
acagtaattttttttccttgtccaacatggaatctataattacacattgcatttagctatcatgtctctagtctcttctaatctgcacttgttccttaatcttttgtttttttttattgc

SEQ ID NO: 397325 - DNA, 120 bp, Artificial Sequence
  ENSG00000145907_95 (sequence is synthesized)
attgacatttttgaagagcacactttttttgtaggatgctttatgggtgtcattcagtgcttcacattaggcatattatgtcatttagttgtgatatgaattttgattagttaggttttg

SEQ ID NO: 397326 - DNA, 120 bp, Artificial Sequence
  ENSG00000145907_96 (sequence is synthesized)
tgaattttgattagttaggttttgccactgtaaagttaaatatcttttctctctctctctttttttttgagacggagtctcactgtatcgtccaggctggagtgcagtggctccatctct

SEQ ID NO: 397327 - DNA, 120 bp, Artificial Sequence
  ENSG00000145907_97 (sequence is synthesized)
acaaagggagcctcgccacacgcccgcggccgcctcgcagcgcccgccaagaagcgcctggcggaagggcgcactctcaggccttccaccggcgaccttccggcgggagcctgcgggcgg

SEQ ID NO: 397328 - DNA, 120 bp, Artificial Sequence
  ENSG00000145908_0 (sequence is synthesized)
agtacgaagacgaccgggctctcaagatggcggccccatgcggaaacagctccagggagcagccatgttgcttcctgaacaaagcctctgaagatgcggaacgggcaaaaccgcccagta

SEQ ID NO: 397329 - DNA, 120 bp, Artificial Sequence
  ENSG00000145908_1 (sequence is synthesized)
cggaacggcgcagcctcgggagcccggtgtggtgctcgcggacaggaagcaggagagtttgccaatagggatgtgacagcggttcccattaagcggtgatggtggttttgggacctgata

SEQ ID NO: 397330 - DNA, 120 bp, Artificial Sequence
  ENSG00000145908_2 (sequence is synthesized)
atcgagctgggagtcagaggcgggatgtgtgcggtgaaggatgttttgatacccccatataaaataatctgtctgtcatgggagcccccacgtcctctgaaatagttcagctctgtctgc

SEQ ID NO: 397331 - DNA, 120 bp, Artificial Sequence
  ENSG00000145908_3 (sequence is synthesized)
atgacttgtcctgggactgaggaaaatttaccagtcatctggccttttggaagagcaaaaaatgatgaagtcccaggggttagtatcattcaaggatgtggctgtggatttcacccagga

SEQ ID NO: 397332 - DNA, 120 bp, Artificial Sequence
  ENSG00000145908_4 (sequence is synthesized)
ggagtggcagcaacttgacccttctcagaggaccctgtacagggatgtgatgctggagaactacagccacctggtctcaatggggtatccagtttccaaaccagatgtcatctccaagtt

SEQ ID NO: 397333 - DNA, 120 bp, Artificial Sequence
  ENSG00000145908_5 (sequence is synthesized)
ggaacaaggagaagagccatggatcataaagggagacatatcaaattggatctatccagatgaatatcaggcagatgggagacaagacaggaagagtaaccttcacaactcccagtcatg

SEQ ID NO: 397334 - DNA, 120 bp, Artificial Sequence
  ENSG00000145908_6 (sequence is synthesized)
tattttggggacagtttccttccatcataagatactgaaaggagtcacaagggatggttcattgtgctccattttaaaagtctgtcaaggtgatggtcagctgcagagatttctagagaa

SEQ ID NO: 397335 - DNA, 120 bp, Artificial Sequence
  ENSG00000145908_7 (sequence is synthesized)
tcaagacaaactcttcaggcaggtcacatttgttaacagcaaaacagtgactgaggcatcagggcataaatataatccactggggaaaatatttcaagagtgcatagaaacagatatatc

SEQ ID NO: 397336 - DNA, 120 bp, Artificial Sequence
  ENSG00000145908_8 (sequence is synthesized)
aatacagagattccataaatatgatgcttttaaaaagaacttaaaaccaaatattgacctaccgagttgttataagagcaattcaagaaaaaaacctgatcagagttttggaggtggaaa

SEQ ID NO: 397337 - DNA, 120 bp, Artificial Sequence
  ENSG00000145908_9 (sequence is synthesized)
atcatctagccagagtgagcccaattctaatcttgagaagattcacaatggagtaataccttttgatgataatcagtgtggaaacgtttttagaaatacacaatcccttattcaatatca

SEQ ID NO: 397338 - DNA, 120 bp, Artificial Sequence
  ENSG00000145908_10 (sequence is synthesized)
gaatgtggaaactaaagagaaaagctgtgtatgtgttacatgtggaaaagcctttgctaagaagtcacaactcattgtacatcaaagaattcatactggaaagaaaccatatgattgtgg

SEQ ID NO: 397339 - DNA, 120 bp, Artificial Sequence
  ENSG00000145908_11 (sequence is synthesized)
tgcatgcggaaaagccttcagtgagaagtttcatcttgttgtacatcagagaactcatactggggagaaaccttatgattgttctgaatgtggaaaagccttctctcagaaatcgtccct

SEQ ID NO: 397340 - DNA, 120 bp, Artificial Sequence
  ENSG00000145908_12 (sequence is synthesized)
tattatacatcagagagttcacactggggaaaaaccctatgaatgtagtgaatgcgggaaagccttctcccagaaatcacccctcattatacatcagagaatacatactggggaaaaacc

SEQ ID NO: 397341 - DNA, 120 bp, Artificial Sequence
  ENSG00000145908_13 (sequence is synthesized)
ttttcccagaagtcacagctgattatacaccacagagctcatactggagagaagccgtatgagtgtaccgaatgtgggaaagccttctgtgagaagtcccacctcattatacataaaaga

SEQ ID NO: 397342 - DNA, 120 bp, Artificial Sequence
  ENSG00000145908_14 (sequence is synthesized)
attcacactggtgagaaaccctacaaatgtgctcaatgtgaggaagccttcagcaggaagacagaactcattacacatcagttagttcatactggggaaaaaccttatgaatgtactgaa

SEQ ID NO: 397343 - DNA, 120 bp, Artificial Sequence
  ENSG00000145908_15 (sequence is synthesized)
tgtggaaagacattctcccgcaagtcacagctcatcatacatcagagaacacatactggagaaaaaccctataaatgtagtgaatgtggcaaagccttctgccagaagtcacatctcatt

SEQ ID NO: 397344 - DNA, 120 bp, Artificial Sequence
  ENSG00000145908_16 (sequence is synthesized)
ggacatcagagaattcacacaggagaaaaaccttatatatgtactgaatgtgggaaagccttctctcagaagtcccaccttccgggacaccagcgaattcatacaggagagaaaccttac

SEQ ID NO: 397345 - DNA, 120 bp, Artificial Sequence
  ENSG00000145908_17 (sequence is synthesized)
atatgtgctgaatgtggaaaggccttttctcagaagtcagaccttgttttacatcagaggattcatactggggaaagaccctatcaatgtgctatatgtgggaaggccttcatccagaag

SEQ ID NO: 397346 - DNA, 120 bp, Artificial Sequence
  ENSG00000145908_18 (sequence is synthesized)
tcacaactaactgtacaccagagaattcacacagtggtaaaatcataatgaactggccacagaaaagccttagtattagctcaagccttaataattactagaaacccaattaatttgata

SEQ ID NO: 397347 - DNA, 120 bp, Artificial Sequence
  ENSG00000145908_19 (sequence is synthesized)
agcttggggacaacatcccaatagataaaaatttttaagggaatttgtttctagtttggtgatgcctaacttttccagcaaagatgatggaaaatagttatataaatgaagaacattttt

SEQ ID NO: 397348 - DNA, 120 bp, Artificial Sequence
  ENSG00000145908_20 (sequence is synthesized)
aatatggcatgtaaagcttttaaagttatgaactcagtgatcagcacagcaagttaagcatacagaatattgtcaagttgcatattccttatactacaaaatgataatcagccattgtga

SEQ ID NO: 397349 - DNA, 120 bp, Artificial Sequence
  ENSG00000145908_21 (sequence is synthesized)
aactgctaatattagcttgtcataattatggccataaactaatttttctataaaagacgtggaagaaagcttaagtaaacaataaaataaaacctatacactattttaagaaggggcttg

SEQ ID NO: 397350 - DNA, 120 bp, Artificial Sequence
  ENSG00000145908_22 (sequence is synthesized)
agcatgacccctaaagctacatgtaaagttcttgtacaaaaaatggaatgataggttgatcagattcagtaaagttgatctgtatgcattttcccatctcaagcatataagttgacctgc

SEQ ID NO: 397351 - DNA, 120 bp, Artificial Sequence
  ENSG00000145908_23 (sequence is synthesized)
atctctggaaggaccttgagattgatgcattttgagcaggtctcccttttactcttcccaactgggaacttggagctgaaaaacattggcactgaggccagatggccttgggtttaatcc

SEQ ID NO: 397352 - DNA, 120 bp, Artificial Sequence
  ENSG00000145908_24 (sequence is synthesized)
tggctcagtgcctcacagattgtgtgactttaggcaaacatacttctcctagctgagtattttttatcagtaagtacaaatacaatgcagagctcattttcagttaatattagtactttt

SEQ ID NO: 397353 - DNA, 120 bp, Artificial Sequence
  ENSG00000145908_25 (sequence is synthesized)
taaatctttactctctatcttgaagcattagatgttaagactaatgtgtaaaaaccacgtctgagcttgcttttccctctggacactctgcttttgattgcctatccctataagtggctc

SEQ ID NO: 397354 - DNA, 120 bp, Artificial Sequence
  ENSG00000145908_26 (sequence is synthesized)
attttactgtcttctgatcctggtggccttatttttgctatgttaaggttgtgttttttaatacttggatttattttcatatacttacataaaccgtggtgattgcacataaagaccctg

SEQ ID NO: 397355 - DNA, 120 bp, Artificial Sequence
  ENSG00000145908_27 (sequence is synthesized)
atgacttgtcctgggactgaggaaaatttaccaggtacaagaggagtaaagaatgatccctcctccacatggtgcctgctgagacttcttcatctggccttttggaagagcaaaaaatga

SEQ ID NO: 397356 - DNA, 120 bp, Artificial Sequence
  ENSG00000145908_28 (sequence is synthesized)
atgggagacaagggaagtgaaatatcaatttatgtttttttaattgattggtgcctgaggtttatgtttctatccttatcaaaatctcctattctttgcttctatgctgagaatttagta

SEQ ID NO: 397357 - DNA, 120 bp, Artificial Sequence
  ENSG00000145908_29 (sequence is synthesized)
gtcactcaacaagtaattgtgaagcctttcagaggagttctatttgttgttgatcctgtctcttgtgtgtatatatatatgtttatatttgttgtctttcctgaaagggttttaaaggca

SEQ ID NO: 397358 - DNA, 120 bp, Artificial Sequence
  ENSG00000145908_30 (sequence is synthesized)
atagaaggcaaattcctttcaagaacacaagctgtgctttaaaaggcaatattcccagataaatgactgtattaaattaaatgtcaaatacagttactgttttagaagttcagagaaaat

SEQ ID NO: 397359 - DNA, 120 bp, Artificial Sequence
  ENSG00000145908_31 (sequence is synthesized)
taagagtctaaagagatgtgagcgtatttgagaaacatttttcagagcatgcaactgtaactgctctgaatgacataaatgctgatgaggctgaaggaggagggtgaaggcaagcagtgt

SEQ ID NO: 397360 - DNA, 120 bp, Artificial Sequence
  ENSG00000145908_32 (sequence is synthesized)
tggagagagagtatatgaacaaaaccttagggtcaggaagatacagcttttctgggagaactttactagttttacttgacatgtatagaaagtagtttattgggagtagtggaatttacg

SEQ ID NO: 397361 - DNA, 120 bp, Artificial Sequence
  ENSG00000145908_33 (sequence is synthesized)
tctgtattctcagtttgactctgatactgaatctgtagcaggatattggatttttctattatttgttagttgttaggaaaatagatggaggagagttaaagtattttgcatacagaagat

SEQ ID NO: 397362 - DNA, 120 bp, Artificial Sequence
  ENSG00000145908_34 (sequence is synthesized)
accttgttttttagagtgatggtaggataataagaatgtgtagcacatgatttataatataaatgaaattaaaaggtgaaaaggggtttctattcagaaagcagaagtgaaatattctag

SEQ ID NO: 397363 - DNA, 120 bp, Artificial Sequence
  ENSG00000145908_35 (sequence is synthesized)
aagaataatcaaaaattagtgatgagaccccactttttcatctcttttaagtttagtttttacatgaatatttctgtttaacattcttgtctgtctattcacctgataacactatatgct

SEQ ID NO: 397364 - DNA, 120 bp, Artificial Sequence
  ENSG00000145908_36 (sequence is synthesized)
gtactgtcttctgagatgacctgtttccatcctttttttgtgagttcatctactatgttggatcatccatttgttctacttctttaccctcttaattgactcttgtgatgactcttaaat

SEQ ID NO: 397365 - DNA, 120 bp, Artificial Sequence
  ENSG00000145911_0 (sequence is synthesized)
gttttccctccgcctttggggcaggcgatcgagcgccgcggagcgcgtccctccctcgccaatccggctccggcgccggcgcccgcccgcgttttcccggcgcctgccgctccgccgctc

SEQ ID NO: 397366 - DNA, 120 bp, Artificial Sequence
  ENSG00000145911_1 (sequence is synthesized)
cgacccggcacgcagtcccggcccgagccgacgccttgcaggagggttcaaatccgcgcgggggagctgcgacgcgcaagggctgcggagccgcgggccggcgagcgcgtcgccaccatg

SEQ ID NO: 397367 - DNA, 120 bp, Artificial Sequence
  ENSG00000145911_2 (sequence is synthesized)
aagcagctgcctgtaccctgttgaaacttcatggccacagccccaggccctgctggcattgccatgggcagcgtgggcagcctgttggaacggcaggacttctcccctgaagagctgcgg

SEQ ID NO: 397368 - DNA, 120 bp, Artificial Sequence
  ENSG00000145911_3 (sequence is synthesized)
gcggcacttgccgggtctcggggctcccgccagcctgatgggctcctccggaagggcttgggccagcgtgagttcctcagctacctgcacctccccaagaaggacagcaagagcaccaag

SEQ ID NO: 397369 - DNA, 120 bp, Artificial Sequence
  ENSG00000145911_4 (sequence is synthesized)
aacaccaagcgggcccctcggaacgagcctgccgactatgccaccctctactaccgggaacattctcgcgcgggtgacttcagcaagacctcgctgccagaacggggtcgctttgacaag

SEQ ID NO: 397370 - DNA, 120 bp, Artificial Sequence
  ENSG00000145911_5 (sequence is synthesized)
tgccgcattcgcccctcagtgttcaagcctacggcgggcaacgggaaaggcttcctatccatgcaaagtctggcgtcccacaaaggccagaagctgtggcgcagcaatggcagcctgcac

SEQ ID NO: 397371 - DNA, 120 bp, Artificial Sequence
  ENSG00000145911_6 (sequence is synthesized)
ctgccacccgcccctgagccccgggccccgggccagccaggcccgggcacagctgctgcacgccctcagcctagatgagggcggccctgagcccgagcccagcctgtccgactcctccag

SEQ ID NO: 397372 - DNA, 120 bp, Artificial Sequence
  ENSG00000145911_7 (sequence is synthesized)
tcctccagtgggggtagttttggtcgcagtcctggtactggccctagccccttcagctcctcccttggccaccttaaccacctcgggggctccctggaccgggcctctcaaggacccaag

SEQ ID NO: 397373 - DNA, 120 bp, Artificial Sequence
  ENSG00000145911_8 (sequence is synthesized)
gaggctgggccaccagctgtgctgagctgcctgcccgagccaccacccccctacgagttctcctgctcctctgccgaggaaatgggagccgtgctgcccgagacctgtgaggagctcaag

SEQ ID NO: 397374 - DNA, 120 bp, Artificial Sequence
  ENSG00000145911_9 (sequence is synthesized)
aggggccttggcgatgaggacggctccaaccccttcacgcaggtgctggaggagcgccagcggctgtggctggctgagctgaagcgcctgtatgtggagcggctgcacgaggtgacccag

SEQ ID NO: 397375 - DNA, 120 bp, Artificial Sequence
  ENSG00000145911_10 (sequence is synthesized)
aaggctgagcgcagcgagcgcaacctccagctgcagctgtttatggctcagcaggagcagcggcgcctgcgcaaggagctgcgggctcagcagggcctggctccggagcctcgggccccc

SEQ ID NO: 397376 - DNA, 120 bp, Artificial Sequence
  ENSG00000145911_11 (sequence is synthesized)
ggcaccctcccagaggctgaccccagtgcacgaccagaggaggaagcccgatgggaggtgtgccagaagacagcagagattagcctcttgaagcagcagctgcgtgaagcccaggcggaa

SEQ ID NO: 397377 - DNA, 120 bp, Artificial Sequence
  ENSG00000145911_12 (sequence is synthesized)
ctggcccagaagctggcggagatcttcagtctgaagacacaacttcggggcagccgggcacaagcccaggctcaggacgcagagctggtccggctgcgcgaggctgtgcgcagcctgcag

SEQ ID NO: 397378 - DNA, 120 bp, Artificial Sequence
  ENSG00000145911_13 (sequence is synthesized)
gagcaggcccctcgggaggaagccccaggcagctgtgagactgatgactgcaagagcaggggcctgctaggggaggcaggaggcagcgaggccagagacagtgctgagcagctgcgggct

SEQ ID NO: 397379 - DNA, 120 bp, Artificial Sequence
  ENSG00000145911_14 (sequence is synthesized)
gagctgctgcaggagcgacttcggggccaggagcaggcgctgcgctttgagcaggagcggcggacttggcaggaggagaaggagcgcgtgctgcgctaccagcgggagatccagggaggg

SEQ ID NO: 397380 - DNA, 120 bp, Artificial Sequence
  ENSG00000145911_15 (sequence is synthesized)
tacatggacatgtaccgccgcaaccaggcactggagcaggaactgcgggcactgcgggagccccccacaccctggagtccccggctcgagtcctccaagatctgaggccagcagagcgag

SEQ ID NO: 397381 - DNA, 120 bp, Artificial Sequence
  ENSG00000145911_16 (sequence is synthesized)
ctgacagcagcaacactgtcagaaggtgccctgagacggccggctcagccttcccttgcactggttggggtggaacctgcagaggccagcccggggctggggaggcgcaaggagaggagg

SEQ ID NO: 397382 - DNA, 120 bp, Artificial Sequence
  ENSG00000145911_17 (sequence is synthesized)
gatccagtggggccgtgggctgggtagggtgccttggcaggagccaggacaaggccctcctggcagaggagcacctaggcagggcccagccctgcttcctggagtggatgtggcccagag

SEQ ID NO: 397383 - DNA, 120 bp, Artificial Sequence
  ENSG00000145911_18 (sequence is synthesized)
aaggaggctgggggatcaccagccccaaggtcccgaagggcaggtcagagggagagaggctggagacctgggctggggccttcctccagggaaggaggctggggtgggaacactggcctc

SEQ ID NO: 397384 - DNA, 120 bp, Artificial Sequence
  ENSG00000145911_19 (sequence is synthesized)
ccccagaataaaaccatgttttctaccagaggctcagaatacgctgagcctgtgaccagaggatgatggatggtcgggattgaggctgttgacctgggcagtagctcctcccatggccag

SEQ ID NO: 397385 - DNA, 120 bp, Artificial Sequence
  ENSG00000145911_20 (sequence is synthesized)
tggtcagtgggagggtgtgccctgcgcctgtctgcatggccactgggcatgtgtgttgggagcagaggagtcctactccttgcctcagccccacacggttccttagctgccgtgtgggct

SEQ ID NO: 397386 - DNA, 120 bp, Artificial Sequence
  ENSG00000145911_21 (sequence is synthesized)
gaaattcctttctttagcaccagtggagttttcagaaggaacaacaccagggaatgccaaaaaaacaaagggcaagtcaaccaaggcattttgagaacatgaaatgtcttcttggtggga

SEQ ID NO: 397387 - DNA, 120 bp, Artificial Sequence
  ENSG00000145911_22 (sequence is synthesized)
aggctgggccccaggagtatccacaggctcaggccatgcccctccccgcacccacctcctgtctccctccctccctccataggagtggggggcccctagaagtgctctgcctcattccct

SEQ ID NO: 397388 - DNA, 120 bp, Artificial Sequence
  ENSG00000145911_23 (sequence is synthesized)
gttcgtaggaaggtgcaggagaggaggtgggcaagcttatgggtttcttggtaaagagcctttaccacagcaaggaatgggaacatttccccatcagcaacggggctctagggcattatt

SEQ ID NO: 397389 - DNA, 120 bp, Artificial Sequence
  ENSG00000145911_24 (sequence is synthesized)
agtcctcccggatccctgctctcagctaaggctggtccctaaaacccacacctgcctttggtctctcagaggcctggcttgccctctgggcctttgctcccccgctgggtgcccggcctg

SEQ ID NO: 397390 - DNA, 120 bp, Artificial Sequence
  ENSG00000145911_25 (sequence is synthesized)
gaacacaggttctgtctggctgtgtgagtggcgtctctcccttcctttgagggaagctcagctttcttacgcgctcatcgttggacgggctgccatgcattgcgtgcttactgggcgcca

SEQ ID NO: 397391 - DNA, 120 bp, Artificial Sequence
  ENSG00000145911_26 (sequence is synthesized)
ggtgctgtgctgggcccttgtgagtgtgggggcacaggctgaattagatgagctcctgccgcagggggccctgcacactgatgtcagctcaccagtctcttccctgacagggcagctcag

SEQ ID NO: 397392 - DNA, 120 bp, Artificial Sequence
  ENSG00000145911_27 (sequence is synthesized)
ggaacttctgagaagttatctgcagagagccccacctcactccctttggctaccctggccgtgcctggcagcccctcaggccccacaggtgggtcctggttgtgaagtggagttagtgca

SEQ ID NO: 397393 - DNA, 120 bp, Artificial Sequence
  ENSG00000145911_28 (sequence is synthesized)
catggatgtcaggggacgggtgtgaggcatgagctgggggggccccctttttcagggcagagaatgaggcgtgtgcactgtctgctgtggggatggtgtgtttatggccatgtaagtggc

SEQ ID NO: 397394 - DNA, 120 bp, Artificial Sequence
  ENSG00000145911_29 (sequence is synthesized)
aggtgtgtgtaaagatgtgcttgtgggtggtgggtgtgtctgagggggtgtgtttgggagcctggcctccaaaagccagtgtctgggttggagacagtgcaggccccttcttggccccac

SEQ ID NO: 397395 - DNA, 120 bp, Artificial Sequence
  ENSG00000145911_30 (sequence is synthesized)
cctctaccccattccttcctgtcagccccagtctgtcttggcactggccaggcttgggtggagcctgtgtcccagacagatcccctaggcctatctgagacccatacaggcccacacctg

SEQ ID NO: 397396 - DNA, 120 bp, Artificial Sequence
  ENSG00000145911_31 (sequence is synthesized)
agctcctgtctgcctgaggagggaaagggggagtggccaggtcaggcaggccagtcgtctacacacccccttggtacccattcccatttcacaaactcctccaaaccccaaaccccaaac

SEQ ID NO: 397397 - DNA, 120 bp, Artificial Sequence
  ENSG00000145911_32 (sequence is synthesized)
ggaaatctctgggacaatggctcctccagagggcccctcagagccaggtgctggccagatgccttgatcacagcctccatggccaggggcctgtcaagccaggggcccacacacctggtg

SEQ ID NO: 397398 - DNA, 120 bp, Artificial Sequence
  ENSG00000145911_33 (sequence is synthesized)
ccagggtccaccttggtataccagctcggcagaacagttccccacccagcgattagggagctgggctggccagtacagccagtggggagtgggtgggaggcaccaaaacttggcagctgt

SEQ ID NO: 397399 - DNA, 120 bp, Artificial Sequence
  ENSG00000145911_34 (sequence is synthesized)
gccagaaaccaaagccaggcccagatgtagggggagggcacgagagctgaacctgagcctggggcgtctcggagctggatccccgtcagctcatccaggctggacaaaccagttcctggg

SEQ ID NO: 397400 - DNA, 120 bp, Artificial Sequence
  ENSG00000145911_35 (sequence is synthesized)
tcccccagccggctgggtggctctggggccaaccgaccacaggtgtcactgatcacaggtgtcaccgtagtggctaccacctcagggcagcccctccctccagctggcggggcctcagct

SEQ ID NO: 397401 - DNA, 120 bp, Artificial Sequence
  ENSG00000145911_36 (sequence is synthesized)
tcccagctgccctggcttagccttccctgcagcccctccccaacaggcttggtccgggcagcctgctctgcggaaggtggcagcctcctggtgctgggctccctgcctctggggcctcca

SEQ ID NO: 397402 - DNA, 120 bp, Artificial Sequence
  ENSG00000145911_37 (sequence is synthesized)
gtccttcactcagtgtcatcccttccagcagctccctgggcctcttggtccatcccttcaggcttctgacacactagtggcctcgagtcactgatagtggtgcctcctccttaccttggc

SEQ ID NO: 397403 - DNA, 120 bp, Artificial Sequence
  ENSG00000145911_38 (sequence is synthesized)
aagcccttgtagccctctgagccctcatcctgcaggcagagcccctcagtgctctgagaaacctgccctgaactcaccgcctcccctgcctgggcactccctcctccctgcgcccacagc

SEQ ID NO: 397404 - DNA, 120 bp, Artificial Sequence
  ENSG00000145911_39 (sequence is synthesized)
ccccatgccaatctccgtcagctctttctgtgctgctgtaattgttggtttgcctgtctcctttgagctgtgggcattgccggggtagggtggtgtcttcaccacagctccagaaggcac

SEQ ID NO: 397405 - DNA, 120 bp, Artificial Sequence
  ENSG00000145911_40 (sequence is synthesized)
tggtgggatgtggagtcaggagcaaccagagaccccccaatactagaatgggtttgagcttggggtggggtggatggggaagacttactctgaatgttcgttcaccatccgtgggcacca

SEQ ID NO: 397406 - DNA, 120 bp, Artificial Sequence
  ENSG00000145911_41 (sequence is synthesized)
ggtctgtgccaagcacagggactccaggggcagctgccattcgttccagtgatgtatttggggccttctcaggtgaggaagccaaggtggccaaggccctcggtcccctgccctgatagg

SEQ ID NO: 397407 - DNA, 120 bp, Artificial Sequence
  ENSG00000145911_42 (sequence is synthesized)
gcttacctgtgggtgggggagggagaccacacatgtcagaggtagtgaaggccgctccaaatagtgactggggccaggcaggcggaaaagagaacagaagagaatccagaagtgttcaga

SEQ ID NO: 397408 - DNA, 120 bp, Artificial Sequence
  ENSG00000145911_43 (sequence is synthesized)
cagaactagggacaacagaggggcctccatggtggcatgggtcagcagagcatggagcaggcagaggaagcctatctgtggggctgggtacatttctctgagactcacggaatgtaagtg

SEQ ID NO: 397409 - DNA, 120 bp, Artificial Sequence
  ENSG00000145911_44 (sequence is synthesized)
ttgaggtttctgcaaagagggcgcaggccctgcagtgacggttcagatattgataacccatcccccttggcaggtgggggcttaggcatccatattggattcagaaaagaaaaagaatga

SEQ ID NO: 397410 - DNA, 120 bp, Artificial Sequence
  ENSG00000145911_45 (sequence is synthesized)
tgcttcttgcaacaaaaacaaaagtgattatgtcacgagaggagaggctggagggccatgggagttcccagctggctcactcatccgtccaggaggtgggtctcatggtttcattttgct

SEQ ID NO: 397411 - DNA, 120 bp, Artificial Sequence
  ENSG00000145911_46 (sequence is synthesized)
ttgggcttacttagagttttggcaaatgcagagttatgtaacgaacccaacaatgaagatacagttctgtcacccccccagcattctcctgtggccctctagtccaccccccgccccacc

SEQ ID NO: 397412 - DNA, 120 bp, Artificial Sequence
  ENSG00000145911_47 (sequence is synthesized)
ccagcccctggcaaccactgatctgctttcacaataaccgtatggggttttttctctttccttttttgtgagcggtatttaattcctttgctctaatatgtaatattagaacatattaca

SEQ ID NO: 397413 - DNA, 120 bp, Artificial Sequence
  ENSG00000145911_48 (sequence is synthesized)
aagtagcaagaaaaatacgacattggtgtaaaaataatctacacctcatggaaagaatgaagagccagaaatagattctattctgtagaaaatcttacacaataaaggacttcaaaataa

SEQ ID NO: 397414 - DNA, 120 bp, Artificial Sequence
  ENSG00000145912_0 (sequence is synthesized)
gtcaacgattgggctgagtcggagacttcctttcctgattggccgtgttgtacggcggcttctcgcgcagctgatgacctggaagtgatgcctaaagctgtggaccgcgtgggctcgcct

SEQ ID NO: 397415 - DNA, 120 bp, Artificial Sequence
  ENSG00000145912_1 (sequence is synthesized)
ccctgggactaggtttcagcggccgctgcgatgaccaaaataaaggcagatcccgacgggcccgaggctcaggcggaggcgtgttccggggagcgcacctaccaggagctgctggtcaac

SEQ ID NO: 397416 - DNA, 120 bp, Artificial Sequence
  ENSG00000145912_2 (sequence is synthesized)
cagaaccccatcgcgcagcccctggcttctcgccgcctcacgcggaagctctacaaatgcatcaagaaagcggtgaagcagaagcagattcggcgcggggtgaaagaggttcagaaattt

SEQ ID NO: 397417 - DNA, 120 bp, Artificial Sequence
  ENSG00000145912_3 (sequence is synthesized)
tggttttggcaggagacacactgcccattgaggtatactgccatctcccagtcatgtgtgaggaccgaaatttgccctatgtctatatcccctctaagacggacctgggtgcagccgcag

SEQ ID NO: 397418 - DNA, 120 bp, Artificial Sequence
  ENSG00000145912_4 (sequence is synthesized)
gctccaagcgccccacctgtgtgataatggtcaagccccatgaggagtaccaggaggcttacgatgagtgcctggaggaggtgcagtccctgcccctacccctatgaggggctccggtag

SEQ ID NO: 397419 - DNA, 120 bp, Artificial Sequence
  ENSG00000145912_5 (sequence is synthesized)
cacctgggcacctgccgctggaagctattgggctggcagcaggacgactggctgtcctcctgcccacccacactgacggcatcttcccagttccccaaggcacgccttcttcccaggcag

SEQ ID NO: 397420 - DNA, 120 bp, Artificial Sequence
  ENSG00000145912_6 (sequence is synthesized)
ctctaacagccctttcatgaaggtaatgctagtcttctgtccatcagtgccatttcctgtagaactaaaggctgttccaagaatgtggggtggggaaagtaaatgctaagactaaaatgt

SEQ ID NO: 397421 - DNA, 120 bp, Artificial Sequence
  ENSG00000145912_7 (sequence is synthesized)
atttctaaacgttaacggagaaatctctacttagtaggcgcgcagtaaaaaggttaactctgacctagccccatatacagaagccaatcaagcagtcggtaaagtccctttggtacaata

SEQ ID NO: 397422 - DNA, 120 bp, Artificial Sequence
  ENSG00000145912_8 (sequence is synthesized)
ccggtacgacaataccggtacaccacgtataccagctcaaagtgaattccaaagtgaagcgaattgtgtaagcaaagtcccttagagtaaacccaccttcattaattcagggaccctcct

SEQ ID NO: 397423 - DNA, 120 bp, Artificial Sequence
  ENSG00000145912_9 (sequence is synthesized)
attctcagctccacatcttcttagttttgggactacagatatgttacttcttgcatttcagttcccatcttgtaaagtgggaatcccagcccaggcgctgtggctcacacctgtaatcct

SEQ ID NO: 397424 - DNA, 120 bp, Artificial Sequence
  ENSG00000145912_10 (sequence is synthesized)
agtgctttgggaggccaagacaggaggatcagttgaggacaggagttcaggaataacctgcgcaacaaagtgagactccatctctacaaaaaaaatttttttaattagctgggtgtggtg

SEQ ID NO: 397425 - DNA, 120 bp, Artificial Sequence
  ENSG00000145916_0 (sequence is synthesized)
gacagtggcgccggaagccggggccggggctgcggggcgagttgtcggccctgggccgggagctggagtcccagactcataggtcccggcccagcccccgaagagccgcctcagccgggg

SEQ ID NO: 397426 - DNA, 120 bp, Artificial Sequence
  ENSG00000145916_1 (sequence is synthesized)
ggagttgctcggactcaaacgtccagtcctcgtgcgaccgcgctgggtcggaagtgagcaggctgaggccaccatggagcagtgtgcgtgcgtggagagagagctggacaaggtcctgca

SEQ ID NO: 397427 - DNA, 120 bp, Artificial Sequence
  ENSG00000145916_2 (sequence is synthesized)
gaagttcctgacctacgggcagcactgtgagcggagcctggaggagctgctgcactacgtgggccagctgcgggctgagctggccagcgcagccctccaggggacccctctctcagccac

SEQ ID NO: 397428 - DNA, 120 bp, Artificial Sequence
  ENSG00000145916_3 (sequence is synthesized)
cctctctctggtgatgtcacagtgctgccggaagatcaaagatacggtgcagaaactggcttcggaccataaggacattcacagcagtgtatcccgagtgggcaaagccattgacaggaa

SEQ ID NO: 397429 - DNA, 120 bp, Artificial Sequence
  ENSG00000145916_4 (sequence is synthesized)
cttcgactctgagatctgtggtgttgtgtcagatgcggtgtgggacgcgcgggaacagcagcagcagatcctgcagatggccatcgtggaacacctgtatcagcagggcatgctcagcgt

SEQ ID NO: 397430 - DNA, 120 bp, Artificial Sequence
  ENSG00000145916_5 (sequence is synthesized)
ggccgaggagctgtgccaggaatcaacgctgaatgtggacttggatttcaagcagcctttcctagagttgaatcgaatcctggaagccctgcacgaacaagacctgggtcctgcgttgga

SEQ ID NO: 397431 - DNA, 120 bp, Artificial Sequence
  ENSG00000145916_6 (sequence is synthesized)
atgggccgtctcccacaggcagcgcctgctggaactcaacagctccctggagttcaagctgcaccgactgcacttcatccgcctcttggcaggaggccccgcgaagcagctggaggccct

SEQ ID NO: 397432 - DNA, 120 bp, Artificial Sequence
  ENSG00000145916_7 (sequence is synthesized)
cagctatgctcggcacttccagccctttgctcggctgcaccagcgggagatccaggtgatgatgggcagcctggtgtacctgcggctgggcttggagaagtcaccctactgccacctgct

SEQ ID NO: 397433 - DNA, 120 bp, Artificial Sequence
  ENSG00000145916_8 (sequence is synthesized)
ggacagcagccactgggcagagatctgtgagacctttacccgggacgcctgttccctgctggggctttctgtggagtccccccttagcgtcagctttgcctctggctgtgtggcgctgcc

SEQ ID NO: 397434 - DNA, 120 bp, Artificial Sequence
  ENSG00000145916_9 (sequence is synthesized)
tgtgttgatgaacatcaaggctgtgattgagcagcggcagtgcactggggtctggaatcacaaggacgagttaccgattgagattgaactaggcatgaagtgctggtaccactccgtgtt

SEQ ID NO: 397435 - DNA, 120 bp, Artificial Sequence
  ENSG00000145916_10 (sequence is synthesized)
cgcttgccccatcctccgccagcagacgtcagattccaaccctcccatcaagctcatctgtggccatgttatctcccgagatgcactcaataagctcattaatggaggaaagctgaagtg

SEQ ID NO: 397436 - DNA, 120 bp, Artificial Sequence
  ENSG00000145916_11 (sequence is synthesized)
tccctactgtcccatggagcagaacccggcagatgggaaacgcatcatattctgattcctacctggaaggaattttgttgaaaggggttttcacctgtgagccttggtctgtctcggtag

SEQ ID NO: 397437 - DNA, 120 bp, Artificial Sequence
  ENSG00000145916_12 (sequence is synthesized)
ggtggtcaacttcagtggactgtggttggtttcagagcgcctggctgaggagttccactgaggggagcactggagcagccctttggcagaggctgaggagggagatggaccagcccacgc

SEQ ID NO: 397438 - DNA, 120 bp, Artificial Sequence
  ENSG00000145916_13 (sequence is synthesized)
ctggcacctggctccatggcataaggaaagggagatgctggcctctgtgctcctgctgtcttttcctgtttctgtttgcgtttgacttagtagcaaccgacagagtggcaagggatttgg

SEQ ID NO: 397439 - DNA, 120 bp, Artificial Sequence
  ENSG00000145916_14 (sequence is synthesized)
tcttcagcagtagacatccttccacccctgccctcagccaagtctcttgctgccatgccaatgctatgtccacccttgcccctcggcccaagagtgtccagcggtggcccacctcttcct

SEQ ID NO: 397440 - DNA, 120 bp, Artificial Sequence
  ENSG00000145916_15 (sequence is synthesized)
cccactacagcctcaacagtatgtaccatctcccactgtaaatagtcccagttagaacggaatgccgttgttttataactttgaacaaatgtatttactgcccttctcatttctcctggc

SEQ ID NO: 397441 - DNA, 120 bp, Artificial Sequence
  ENSG00000145916_16 (sequence is synthesized)
ctgccgcaaacaaaaacatggccagcaggtatccagtgtccaggcaggaagaacacaacttgcatccctgactgcggggagcttagatgtcagaccccgggcaaggtgcttttacatata

SEQ ID NO: 397442 - DNA, 120 bp, Artificial Sequence
  ENSG00000145916_17 (sequence is synthesized)
cccataccagatcttactaactccataggagaaatccgtgtaatgggattcaggaaaatgaagtaacttgcacaacagggctcacagcttagaaaggagagagcttggagttttaaccag

SEQ ID NO: 397443 - DNA, 120 bp, Artificial Sequence
  ENSG00000145916_18 (sequence is synthesized)
atctgaccctcaagcccaagctatttccagtttattccagggtgcctgaacttggctgttatgtatactgagtcctgtgcagggcctctgacagcaggaaggggccccaagtctaaaata

SEQ ID NO: 397444 - DNA, 120 bp, Artificial Sequence
  ENSG00000145916_19 (sequence is synthesized)
cttgaagggattgggttactagggccattatgttaagcaagagagctcgggggaatgcattttagcttcatattcctatttaaaatgtgctgtgtgggtgggtaaattgcttccataagc

SEQ ID NO: 397445 - DNA, 120 bp, Artificial Sequence
  ENSG00000145916_20 (sequence is synthesized)
ttcacagtggcatttaaggctcctgggttaagttaggaatgggggtgttcctgatgtgggggctttaggcttccatgaagtgggtctgggccccctgccttacctcacagcccccatcta

SEQ ID NO: 397446 - DNA, 120 bp, Artificial Sequence
  ENSG00000145916_21 (sequence is synthesized)
ccctggaagagggagttgaaaatgctgggatagcagcaggatcagttctcagcttgagccaaagcacccggccctgggcagctgagcatcagcacagaaccctctgagtcctttgggctc

SEQ ID NO: 397447 - DNA, 120 bp, Artificial Sequence
  ENSG00000145916_22 (sequence is synthesized)
tctgctgaggaagactgcttcactcttcccgcccaccaactcgctggcccaaccagcagctgctgcttaagaaaacacccacagactcaccacattttagtcttagcatttactttcccc

SEQ ID NO: 397448 - DNA, 120 bp, Artificial Sequence
  ENSG00000145916_23 (sequence is synthesized)
accccacattcttggaacagcctttagttctacaggaaatggcactgatggacagaagactagcattaccttcatgaaagggctgttagagctgcctgggaagaaggcgtgccttgggga

SEQ ID NO: 397449 - DNA, 120 bp, Artificial Sequence
  ENSG00000145916_24 (sequence is synthesized)
actgggaagatgccgtcagtgtgggtgggcaggaggacagccagtcgtcctgctgccagcccaatagcttccagcggcaggtgcccaggtgctaccggagcccctcataggggtaggggc

SEQ ID NO: 397450 - DNA, 120 bp, Artificial Sequence
  ENSG00000145916_25 (sequence is synthesized)
agggactgcacctcctccaggcactcatcgtaagcctcctggtactcctcatggggcttgaccattatcacacaggtggggcgcttggagcctgcggctgcacccaggtcctacagaggg

SEQ ID NO: 397451 - DNA, 120 bp, Artificial Sequence
  ENSG00000145916_26 (sequence is synthesized)
gaaagaagtgctgtttggaaaaaagctgtacaacctgtatgccaggaagtcaccaactgatgacccaccagcctaatctggcccacaaccatgttctgttcggtccatgttctatttaaa

SEQ ID NO: 397452 - DNA, 120 bp, Artificial Sequence
  ENSG00000145916_27 (sequence is synthesized)
agcatcttgaattggttgccatcatttaaactcaatcagactttgaaggcatggtccagccacacagggcctacattcccacatggcaactatgaaagggctccagcccagcaggggctg

SEQ ID NO: 397453 - DNA, 120 bp, Artificial Sequence
  ENSG00000145916_28 (sequence is synthesized)
tcccggtccctgccacccccacttcctgtgcctcagatctggcccctgttacgtaagataaggacagctacaggtccctctgagcctaaacccacctaaccggactaacatgggtgaagc

SEQ ID NO: 397454 - DNA, 120 bp, Artificial Sequence
  ENSG00000145916_29 (sequence is synthesized)
atcttagcttacaaagctctttcacatacatctatctctttattctcatagtccacagataactgactatttggttcttaccatcaggccaaacggtaagttccttcagaacagggcctc

SEQ ID NO: 397455 - DNA, 120 bp, Artificial Sequence
  ENSG00000145916_30 (sequence is synthesized)
caggccaaacggtaagttccttcagaacagggcctcctgctttatcccaagaagtgatactgtaggtacccaagatccacccccagcctctattttttttttttgagacagggcctcact

SEQ ID NO: 397456 - DNA, 120 bp, Artificial Sequence
  ENSG00000145916_31 (sequence is synthesized)
tggctgactgcagccttgacctcccgggctcaagcagtcctccgtcccacctcagccttctgaggagctgggaccacaggcgtgtgccaccatgcccaggctgaggccaccatggagcag

SEQ ID NO: 397457 - DNA, 120 bp, Artificial Sequence
  ENSG00000145916_32 (sequence is synthesized)
gggtgggccagcagcattctgcttcgacctctcagggcacagggcttgactgtggtcttcatttcacccagatgtacttgacttgcctgcagccctgtctcaagagcctcacacaggctt

SEQ ID NO: 397458 - DNA, 120 bp, Artificial Sequence
  ENSG00000145916_33 (sequence is synthesized)
atggctgactgcagccttgacctcccgggctcaagcagtcctccgtcccacctcagccttctgaggagctgggaccacaggcgtgtgccaccatgcccagccctccaggggacccctctc

SEQ ID NO: 397459 - DNA, 120 bp, Artificial Sequence
  ENSG00000145916_34 (sequence is synthesized)
attttcatccctgctcagtctcctcaggggcttgggagccaccgggctcagcatattgtgctgtgctgcacagtcctgctgcccgcttgggggtggacccagagccctgcaccccctgag

SEQ ID NO: 397460 - DNA, 120 bp, Artificial Sequence
  ENSG00000145916_35 (sequence is synthesized)
tcatcatttgccaaggccctgccatgtgccaggaacagtgctcggtgctttcagagaccgaaactggctttcttagtcattcttcaggagaggaattacctgtttttacagttaaactga

SEQ ID NO: 397461 - DNA, 120 bp, Artificial Sequence
  ENSG00000145916_36 (sequence is synthesized)
gactaggaagagttatggcccgaggtcaccatgaggtcagtggcatggtcaaggttcccattttgtaaggtctcctgaatgaggtccctgcctctcttgcacctcaccctggatcattgc

SEQ ID NO: 397462 - DNA, 120 bp, Artificial Sequence
  ENSG00000145916_37 (sequence is synthesized)
aagaccttcccagctaacccacgcccctctgcagcccgccttcctcatgacctaatgtcttaaacaccacttgccttcaggggagatgtgagtggttgagtaatatgtattcagcactgc

SEQ ID NO: 397463 - DNA, 120 bp, Artificial Sequence
  ENSG00000145916_38 (sequence is synthesized)
tgctgacacctccctcagagctcccagcaaccctgggagggagagccacgttatcctccttctacagatgaggaaatggaggcccaagatgtgcacgcacttgcccaaggcctcgcaggg

SEQ ID NO: 397464 - DNA, 120 bp, Artificial Sequence
  ENSG00000145916_39 (sequence is synthesized)
aataatgggcacttgaacctgaccccagagccacacactccgccacagtggacagctgtcactgtgtatttagactgttgatggtgtctgagtacagcacctcaatatagtggactgatt

SEQ ID NO: 397465 - DNA, 120 bp, Artificial Sequence
  ENSG00000145916_40 (sequence is synthesized)
ctacgctcatctgatttgttaccatggactcagtttatagaacgtcatttcccagcaagaacaacatcagcaccttaggatgattctgttgcgcaggactaccctgtgcactgtggggta

SEQ ID NO: 397466 - DNA, 120 bp, Artificial Sequence
  ENSG00000145916_41 (sequence is synthesized)
tgtgttatgactacacagcagggtacgtcctacaggcaggctggggccctttggaactgctcactgttccctagtcacaccaaggacttttcagtcattaggatgagcagatatctgccc

SEQ ID NO: 397467 - DNA, 120 bp, Artificial Sequence
  ENSG00000145916_42 (sequence is synthesized)
ctagagctataggaagtcttccctgtaggttctcaaattttggggtgcattagaatgagtctgtagagtcagacatacataagtacatatgtgacatcttatgaacaatgtgagggatct

SEQ ID NO: 397468 - DNA, 120 bp, Artificial Sequence
  ENSG00000145916_43 (sequence is synthesized)
ttgaggaccgatttgaccgtgcaccattttagagccctgtctcaaggtccatgctgaagcatggcgcgctggccctttttgcctgtctgctgtgatctgagccactctagcccctgttcc

SEQ ID NO: 397469 - DNA, 78 bp, Artificial Sequence
  ENSG00000145916_44 (sequence is synthesized)
gggtgacagagcaagactctgtatcaaaataaataaataaagtacaactctggacttgaggcgggtagattgcttgag

SEQ ID NO: 397470 - DNA, 120 bp, Artificial Sequence
  ENSG00000145916_45 (sequence is synthesized)
aggcgggtagattgcttgagtccgggagtttgagaccagtctgggtaatatggtaaccctgtctaccaaaaatacaggtattagccagtctcataactcggtctcaaaataaataaatac

SEQ ID NO: 397471 - DNA, 120 bp, Artificial Sequence
  ENSG00000145916_46 (sequence is synthesized)
atacatacatagatgaaaatttaaaaaataaagtccaactcagcggttttcagcatatttacagagttgtacaatcttcaccactatctaatttcagaacattttcatcacccccaaaag

SEQ ID NO: 397472 - DNA, 120 bp, Artificial Sequence
  ENSG00000145916_47 (sequence is synthesized)
aaacctaacccattgactgtctctccatttcctccctctccctagcctctggcaaccactaatctcttttttgtctctatagatttgcctattttggacagttcatatacaaggaatcat

SEQ ID NO: 397473 - DNA, 120 bp, Artificial Sequence
  ENSG00000145916_48 (sequence is synthesized)
accacatgtagccttttgtgtccggcttctttgattaatagaatgttttcaaggctcatctatgctgtagcctgtatcagcacttcattcctttctatggctgaataatagtccactgta

SEQ ID NO: 397474 - DNA, 120 bp, Artificial Sequence
  ENSG00000145916_49 (sequence is synthesized)
gggatgtgccatgtttttccactagctgatggacatttgggttgtttccaccttctggctattataaatattgctgctataaatattcacttacaagtttttgtgtggacatatgttttt

SEQ ID NO: 397475 - DNA, 120 bp, Artificial Sequence
  ENSG00000145916_50 (sequence is synthesized)
atttcttctggtatatccttcggagtggaactgctggatcaggtggtaactctaggtctaacctggcagttaaacagaatcctatgcatgctgtagtccatgagttgaaataaacacttg

SEQ ID NO: 397476 - DNA, 120 bp, Artificial Sequence
  ENSG00000145916_51 (sequence is synthesized)
acccatagtaagtgccagatcatcttcatttcacagcaaccagtaatttcacagatgaggaaatgaaggctcccagaggtgaactggcttttcccatttgagcagttccaagtcagacag

SEQ ID NO: 397477 - DNA, 120 bp, Artificial Sequence
  ENSG00000145916_52 (sequence is synthesized)
ttaaaaagtggcaggacctggaagagaagctagttctttcaccctggcattcagggctgcctcctgggctacggggctggcatttagaatagagctaaggtctgctgccaaggcaggtgc

SEQ ID NO: 397478 - DNA, 120 bp, Artificial Sequence
  ENSG00000145916_53 (sequence is synthesized)
tccagtcctcgtgcgaccgcgctgggtcggaagtgagcagtggcctgtgaagctggtcctgggagtacctgtgatgtgaagtacgtagagaaggactctgaggccagagccagactgtct

SEQ ID NO: 397479 - DNA, 80 bp, Artificial Sequence
  ENSG00000145916_54 (sequence is synthesized)
gcgggcttgggagccggcaggtgcgggccgagggcgggcacagcggccggcggagctgaggcgcgcggcggggaaagctc

SEQ ID NO: 397480 - DNA, 120 bp, Artificial Sequence
  ENSG00000145916_55 (sequence is synthesized)
ggccggcctcccgggccccagccttctccagaacccctgctacccacgactaagccccgaacaatctgcccttgggcttgttctcttcgcagttgtcggccctgggccgggagctggagt

SEQ ID NO: 397481 - DNA, 120 bp, Artificial Sequence
  ENSG00000145919_0 (sequence is synthesized)
gtttctgccgcgtccaccacaacctctgctgtatcagagggggccttcgccgccgccgcccccaccaccgcccctgccgccatcgccacctccgccgctgccgccttggggccctcctcc

SEQ ID NO: 397482 - DNA, 120 bp, Artificial Sequence
  ENSG00000145919_1 (sequence is synthesized)
ttcaccgcccccttcaccacctctacacgttctaggccttctgtcctggagaagaagctatagtcgttctcccttgtgggcccggggcgcagccatggcggacggcggcggcggcggggg

SEQ ID NO: 397483 - DNA, 120 bp, Artificial Sequence
  ENSG00000145919_2 (sequence is synthesized)
gggcggcggcggaactagccaggcctctgccggggcagcgactggcgctactggggccagcgggggcggtggccccatcaacccggcctcgctgcctcccggcgacccgcagctcatcgc

SEQ ID NO: 397484 - DNA, 120 bp, Artificial Sequence
  ENSG00000145919_3 (sequence is synthesized)
gcagctcatcgctctcatcgtggagcagctcaagagccggggcctttttgacagcttccgccgggactgcctggccgacgtggacaccaagccagcttaccaaaacctgaggcagaaagt

SEQ ID NO: 397485 - DNA, 120 bp, Artificial Sequence
  ENSG00000145919_4 (sequence is synthesized)
ggataattttgtgtcaacacatctggacaagcaggaatggaatcctacgatgaacaaaaaccagttgcgaaatggtctgaggcagagtgtggttcagtcagggatgttggaagctggagt

SEQ ID NO: 397486 - DNA, 120 bp, Artificial Sequence
  ENSG00000145919_5 (sequence is synthesized)
agacaggattatttctcaggtggtggatccaaaacttaaccacatcttcaggccacaaatagaacgagcaattcatgagttcctggcggcccagaaaaaagcagctgtgccagcaccccc

SEQ ID NO: 397487 - DNA, 120 bp, Artificial Sequence
  ENSG00000145919_6 (sequence is synthesized)
tccagagcccgaaggccaggaccctccagctccatctcaggacacttcctaagaatacgccagacaccttttgaaagctaatttttggtgaagaaatggattcggttacataagagtgca

SEQ ID NO: 397488 - DNA, 120 bp, Artificial Sequence
  ENSG00000145919_7 (sequence is synthesized)
acttcagactgaagataggccaaggtcgtcactgatctcaagatttcaaccttgaccatgggcagtgaccagattgaaaggggagcaagttcggcagtgggagagttgaccgtgtcaccc

SEQ ID NO: 397489 - DNA, 120 bp, Artificial Sequence
  ENSG00000145919_8 (sequence is synthesized)
ctgcattgtgctgccatttggccagcctgtccaagggcatgacaccaagtagacactacagagagagaaacactacagcaacccagggttgtcctgaaacagacttttatacttgaacat

SEQ ID NO: 397490 - DNA, 120 bp, Artificial Sequence
  ENSG00000145919_9 (sequence is synthesized)
ggagactgcacatggactttagggtttgtgctgtgggataaacggaagctacagtgagaacatagccagtcccaaagacaatttcaaagaaaaatgacagtaaagattagctgggagtag

SEQ ID NO: 397491 - DNA, 120 bp, Artificial Sequence
  ENSG00000145919_10 (sequence is synthesized)
tctttgacagtgcttatttgatactgtctctcagagtttgcaaaccagattgtacaagtcattagcgtcagatagctttaaagttgtgaccttcttgtacatgaatcttctagccagttt

SEQ ID NO: 397492 - DNA, 120 bp, Artificial Sequence
  ENSG00000145919_11 (sequence is synthesized)
cctttcctttgtaacgaaacatgaaatcctagaatgtatgagaagttcagacattaggcataaggaaactcgtttgcaggctctctgtccagggctgcttcctgtcctggaggggccagt

SEQ ID NO: 397493 - DNA, 120 bp, Artificial Sequence
  ENSG00000145919_12 (sequence is synthesized)
gagtcttaggtatgtttattttattctcacatttgtgtttttttagaaaagtgaatggtcaataaatggcttatctttcataataaaattatttgatacttttactccgaagcttcagct

SEQ ID NO: 397494 - DNA, 120 bp, Artificial Sequence
  ENSG00000145919_13 (sequence is synthesized)
gaagcttaaacctcaggtctgtgaagggcaacctttgtcttctgcctctgtgcaccacacatgatctactggcagtgaagattggtacatataacttggaactatgaaactagtaggtgt

SEQ ID NO: 397495 - DNA, 120 bp, Artificial Sequence
  ENSG00000145919_14 (sequence is synthesized)
agctagtagtgggctgtttctctcctccctgagccattactgacactggtctttagttgaggtagtccgtggtatgtgtcagtgtttgtcatccttgtgtgtgcagaagtagcacctggg

SEQ ID NO: 397496 - DNA, 120 bp, Artificial Sequence
  ENSG00000145919_15 (sequence is synthesized)
gatttaagggaaaatgcatatttctgattaagaagttctggggtgggacctaagagtgagtgtttctgacaagctgccaggtgatgctgatgctgccaggcctctgaacatactctgtat

SEQ ID NO: 397497 - DNA, 120 bp, Artificial Sequence
  ENSG00000145919_16 (sequence is synthesized)
aggcagagtgtggttcagttgggtgattgtgggtgagattgtgcagtaggaataacagctgctggttgagaattacccctcaaaagtgaaaatagcgtgagctgtatatggtaagtggat

SEQ ID NO: 397498 - DNA, 120 bp, Artificial Sequence
  ENSG00000145919_17 (sequence is synthesized)
caccatgctgtcatttgtttgttgttttggagcaactcacttagttttgtttttgattcttttgtacaaggttgggtgattgtgggtgagattgtgcagtaggaataacagctgctggtt

SEQ ID NO: 397499 - DNA, 120 bp, Artificial Sequence
  ENSG00000145919_18 (sequence is synthesized)
gagaattacccctcaaaagtgaaaatagcgtgagctgtatatggtaagtggattgacctctaaactccctagaagggctgtagctttgaaggtggacatttattgggctcgcacgtgaca

SEQ ID NO: 397500 - DNA, 120 bp, Artificial Sequence
  ENSG00000145919_19 (sequence is synthesized)
agtactacctgaggtttcaggcacccactggggatcttggaacgtatcccctgaggggggaggggactaccctcttgagcggctggtgagggagagtggttggaaccttcccatgtacag

SEQ ID NO: 397501 - DNA, 120 bp, Artificial Sequence
  ENSG00000145920_0 (sequence is synthesized)
ggggttggcaacagagcaggtaggtagacctgcatttggttgctggtcacagaaatggagagtgagagatatttctaagtcaggatgccctagtggcagacccccaagtcctcgaacttc

SEQ ID NO: 397502 - DNA, 120 bp, Artificial Sequence
  ENSG00000145920_1 (sequence is synthesized)
agggcagaactgcctgggtgggaactctcccatgtctccttgatttcactgccacctctgctggcgtcctctctcatctccgccgccagcccccgcctcctttctcgggaagcttgggtc

SEQ ID NO: 397503 - DNA, 120 bp, Artificial Sequence
  ENSG00000145920_2 (sequence is synthesized)
tccctgggagcgggtctgcccttagggggaggcctctgggctctgtgccctgcagctcggcaggcattcgaggcggacagaaacggggcttggcgccccccgcgtgcacgtgtgctagcc

SEQ ID NO: 397504 - DNA, 120 bp, Artificial Sequence
  ENSG00000145920_3 (sequence is synthesized)
caggcaggagggagcgcctcggcggaggagtcaaggaagagggggagggagaaacgcgccagaacctcggcccgggcgccctcgtcggccgcggaggagctgcagcctccaacaggaagg

SEQ ID NO: 397505 - DNA, 120 bp, Artificial Sequence
  ENSG00000145920_4 (sequence is synthesized)
tgtggtccctgccatgctatctgctctgctcagcgactgaaggtgcccgcatcccagctctgccaggaagcaaaggttgtcacatcttcccaagccaggccagccaggagcgctgcatgc

SEQ ID NO: 397506 - DNA, 120 bp, Artificial Sequence
  ENSG00000145920_5 (sequence is synthesized)
aaattctgccgtgggctaaggcacgctaaccagagccggcggcatggacttcgtcatgaagcaggcccttggaggggccacaaaggacatggggaagatgctggggggagaggaggagaa

SEQ ID NO: 397507 - DNA, 120 bp, Artificial Sequence
  ENSG00000145920_6 (sequence is synthesized)
ggaccccgacgcgcagaaaaaggaggaggagcggcaggaggcgctgcggcagcaggaggaggagcgtaaggccaagcacgcgcgcatggaggcggagcgggagaaggtccggcagcagat

SEQ ID NO: 397508 - DNA, 120 bp, Artificial Sequence
  ENSG00000145920_7 (sequence is synthesized)
ccgagataagtatgggctgaagaagaaggaggagaaggaagcagaggagaaagcagccctggagcagccctgcgaggggagcctgacccggcccaagaaggccatccctgcgggctgcgg

SEQ ID NO: 397509 - DNA, 120 bp, Artificial Sequence
  ENSG00000145920_8 (sequence is synthesized)
ggacgaggaggaggaggaagaggagagcatcctggacacggtgctcaaatacctgcccgggccgctgcaggacatgttcaagaagtaaccaggcctcctgccccagcctactccacctgt

SEQ ID NO: 397510 - DNA, 120 bp, Artificial Sequence
  ENSG00000145920_9 (sequence is synthesized)
tactacttctttttggttctttcttttctttttattaggttaagtctcaattctgaaggggaaaacctcagttggcctctgcccctcttccctggccaggggcttctccccctcagctct

SEQ ID NO: 397511 - DNA, 120 bp, Artificial Sequence
  ENSG00000145920_10 (sequence is synthesized)
ccctcacacctcccttcatcccagggtatccacctgcaccccactcccaagtagcttgaaaaagggaggacagtctttccccagcaggggtcaggggggcccctcaggaagcctaaggtc

SEQ ID NO: 397512 - DNA, 120 bp, Artificial Sequence
  ENSG00000145920_11 (sequence is synthesized)
gtgctagtgtggtgacccccatacattcctccctgctccccactgccaggaggaccactgtccccagccagccaaagtaatgacacattccagccctgcccagcatgctgacctttggcc

SEQ ID NO: 397513 - DNA, 120 bp, Artificial Sequence
  ENSG00000145920_12 (sequence is synthesized)
tctaaccctcagtgggcccccaggtcagggcaggggcactgagtggcctggctctgaggaagggagtcaggggaagcctgtcccgggaaggcccaggctgagaggccctggctctggcca

SEQ ID NO: 397514 - DNA, 120 bp, Artificial Sequence
  ENSG00000145920_13 (sequence is synthesized)
ggctgggatctgggtgggaggctggggctcttcttcttccatctccttggtgacacccagcccaggggcacccccttccccagcccccacctggagagacatggcccctgccaagctggt

SEQ ID NO: 397515 - DNA, 120 bp, Artificial Sequence
  ENSG00000145920_14 (sequence is synthesized)
cccttcaaatggatcctttgtggactttagctcatttgtggaggaaccccaggtagggacgccccttgttcctcacccccaccccacttaggtcctgggcccccactgccaggctgggcc

SEQ ID NO: 397516 - DNA, 120 bp, Artificial Sequence
  ENSG00000145920_15 (sequence is synthesized)
cagcttgctcagtcaaggggctgccaggcccccagaaaacacttggagccatcgggtagcgatggtctatgccatggggaacacctccattggtgtggccaagctgcccccattcctatc

SEQ ID NO: 397517 - DNA, 120 bp, Artificial Sequence
  ENSG00000145920_16 (sequence is synthesized)
cacccctctccccaccccgtcctgtccatgcgcttccagggccccacggtccccaggaggacgcttcctggccaaagccccaagcctttggtgagaagccaattcccacttgacagaagg

SEQ ID NO: 397518 - DNA, 120 bp, Artificial Sequence
  ENSG00000145920_17 (sequence is synthesized)
cgtccatccattcatctcattggccaaggacaaactctcctctgggacgtctgggactggcatttgtcccccactcaaattatcaaagctttctgctcagtcagttgtgtggggatggtg

SEQ ID NO: 397519 - DNA, 120 bp, Artificial Sequence
  ENSG00000145920_18 (sequence is synthesized)
agggaagaggggtcacatgagggaggaaactgtatccatgcatgcatgataatgcgtggcagagactgcaacagggattgtgtgttcagagatcatatgcatatgtgtagggctggagcg

SEQ ID NO: 397520 - DNA, 120 bp, Artificial Sequence
  ENSG00000145920_19 (sequence is synthesized)
tgtgtgtgtcttgagattgtgtgtgttgcagtcatcatatctatgtgttacagattgtgtatgttagccttgtgtatgtgtgcttgattgaggtggtgtatttgggttgaaattgtgtca

SEQ ID NO: 397521 - DNA, 120 bp, Artificial Sequence
  ENSG00000145920_20 (sequence is synthesized)
aggtatgtgatgggttgtagaagcgtgtgtttgagagaattcagagacatttgaaggctgctgtgtgcatgtttgggggtctgaaaagacagttgtgtgcatggatgtgtgcgtggggag

SEQ ID NO: 397522 - DNA, 120 bp, Artificial Sequence
  ENSG00000145920_21 (sequence is synthesized)
aaagaacgtgggtaagatgtcccttcccagccctgagaccactggtcacagttggccacctccaacgggagaccttgtccttggcctagagtcctcccacccttggggggctcctgcctg

SEQ ID NO: 397523 - DNA, 120 bp, Artificial Sequence
  ENSG00000145920_22 (sequence is synthesized)
aggtcctcagaatcccactgcaatggacccaggcagcgccccaggaagccatgctgggcccccgccagggcctatcccaaaagcaggggccagggagggggcgacttgcctgcccctgaa

SEQ ID NO: 397524 - DNA, 120 bp, Artificial Sequence
  ENSG00000145920_23 (sequence is synthesized)
gcccttgttcccattggccccagtttgcattctgcaggttttccattttagtgggttctgcttttatttcagagacagacatgtgtcttctctgtccgtttccaataggtaaagccatat

SEQ ID NO: 397525 - DNA, 120 bp, Artificial Sequence
  ENSG00000145920_24 (sequence is synthesized)
cagttagactgcaatactttaaacacgagacaaaacaatccatatgtttagggaaccagaaaagtcccctggtctgtcccttctttggggagcagggcctcgacagctccagctcccttg

SEQ ID NO: 397526 - DNA, 120 bp, Artificial Sequence
  ENSG00000145920_25 (sequence is synthesized)
acctaccttcctccccgcaccccgcccccaccttgtgcccctgtgtccagccccccagggggcctgtgtctgtgtctgtgcctgtgtctgtgatggggagccgcctcgcacccctgttgt

SEQ ID NO: 397527 - DNA, 120 bp, Artificial Sequence
  ENSG00000145920_26 (sequence is synthesized)
ctgcttgtctctttgtgtctgttatcctgggcaggatggtcattctcaaaaaccctggggtcctgggccagagacaggcagggcccagtccaggggccccaggcctccccagtcccagtg

SEQ ID NO: 397528 - DNA, 120 bp, Artificial Sequence
  ENSG00000145920_27 (sequence is synthesized)
tgcgagccccacttggacacaagtgttcagagaggtccccctctgccacttgacagggaccttcaaacctcgacagtgatgcaaggacacagagagtaccagataggtagcagagaccaa

SEQ ID NO: 397529 - DNA, 120 bp, Artificial Sequence
  ENSG00000145920_28 (sequence is synthesized)
ggcgcagggtgcttcagatgagcaagagaacccagtcgaaccagataccccaggtgggccggagggaccccagaccttcagagggctgccctggtgttctccacagtgcagtccctctgt

SEQ ID NO: 397530 - DNA, 120 bp, Artificial Sequence
  ENSG00000145920_29 (sequence is synthesized)
attcccagagtgggatcggggctttcagccccaccctgatgcctgccctccaggatggctggtttagtctgggtccatgtcccagacccctctattctgctccaggacagcaggacttca

SEQ ID NO: 397531 - DNA, 120 bp, Artificial Sequence
  ENSG00000145920_30 (sequence is synthesized)
ggtcttcctgggggtggatataggagaaaatttctgcctggcacacacctggctccaaccactgccaagtgatcactcttaggcccaggggaacacaatgactatcattactgatgcaga

SEQ ID NO: 397532 - DNA, 120 bp, Artificial Sequence
  ENSG00000145920_31 (sequence is synthesized)
cctggctgtggagagcagctaatgtgtggcccagagagcctgtctgtgtggagcacgtagtgcacagaatacgtgagagttgctctggcaggggcagaatcctcacaggatcgcctggga

SEQ ID NO: 397533 - DNA, 120 bp, Artificial Sequence
  ENSG00000145920_32 (sequence is synthesized)
ggtgaggtgtgtgtgacccactggatgggagggcaatgagtgtgcacatacaaatggggcagtgtgcatgcaacacacttaggggaggagtggccccagaattcagcacgcacacaacac

SEQ ID NO: 397534 - DNA, 120 bp, Artificial Sequence
  ENSG00000145920_33 (sequence is synthesized)
acaagggagagaacccccagatgagaaaataggaaggagcaatcatttgtagatgggtgaaaaaagaatgaggttcaagggagcgtgcaccaggtgaggtgagcgtgtgtgctctcaggg

SEQ ID NO: 397535 - DNA, 120 bp, Artificial Sequence
  ENSG00000145920_34 (sequence is synthesized)
aagggcccaggatcccatgcctgggaggagctgccagagagaagcaaaaaggcggctgtggatcgccctgggctgggcaccagtgacaggtcaggatctccaaacatggacgtcctcccc

SEQ ID NO: 397536 - DNA, 120 bp, Artificial Sequence
  ENSG00000145920_35 (sequence is synthesized)
tccaaatccagaagctcccagaaggtgtccttaactgcaaagctgtgcagggtactcctccagatggaatcaggaagtcgagacaccatcccaggtgtgtgtaagagagagagagagaac

SEQ ID NO: 397537 - DNA, 120 bp, Artificial Sequence
  ENSG00000145920_36 (sequence is synthesized)
agggaggatacagaagtattgcagcccagatcccctatcagggggacagctggtgggcaaagcagccaccccacagccttgtggctagagtacagtggggtagaccctccagccccaata

SEQ ID NO: 397538 - DNA, 120 bp, Artificial Sequence
  ENSG00000145920_37 (sequence is synthesized)
gccctagtacccagctggcagggttgcccacccctgctgtccacctgctccatcctctagggttccacaggcccctgaccgcacagggaggctggggccagcctggtctcccaggcctga

SEQ ID NO: 397539 - DNA, 120 bp, Artificial Sequence
  ENSG00000145920_38 (sequence is synthesized)
ggacatgcctcccaccaaatgtcccctgctccagtcccactcctgtcaccccacgctctgcactggggagaaaacgggaggtgctcgtgctggccctgggtgggagcggggagtcctggt

SEQ ID NO: 397540 - DNA, 120 bp, Artificial Sequence
  ENSG00000145920_39 (sequence is synthesized)
gagaccccggtgagatggaccatcctgcccccgtgggggatcccctttcccacatccgtgctgtgtcattgttgctctgcttcctttcaatgtgtcagtgcctggggggaggggaggagc

SEQ ID NO: 397541 - DNA, 120 bp, Artificial Sequence
  ENSG00000145920_40 (sequence is synthesized)
accccctcagcccccctgaacctgaccaaaagccatggctgttgctcccccctttgtatgatgcaaatgctgaaatgtacaaaatcaaccatgacaacaaagaaaaagaccttgtacagc

SEQ ID NO: 397542 - DNA, 120 bp, Artificial Sequence
  ENSG00000145920_41 (sequence is synthesized)
agaagccgcggctccagctcgcctggcggaattgcacgcggcggcgggagctggaatagcagaaggaaccacctcgtggagtcgggccggagccctgcagtggctcagacggttgcaggg

SEQ ID NO: 397543 - DNA, 120 bp, Artificial Sequence
  ENSG00000145920_42 (sequence is synthesized)
aatctccgccggagccggggaaaggtggcattgccatttctctcttagagaggaggaaactggggactcgagcaggttgtcacatcttcccaagccaggccagccaggagcgctgcatgc

SEQ ID NO: 397544 - DNA, 120 bp, Artificial Sequence
  ENSG00000145920_43 (sequence is synthesized)
agctggaggcggggagagccttgatcaaagtcaggcaggggagcacagcggcttcctgacgctggacccaggtggggacagagcggccctgtgaagtcaaagagaatgttgctttgttca

SEQ ID NO: 397545 - DNA, 120 bp, Artificial Sequence
  ENSG00000145920_44 (sequence is synthesized)
agtggctcagacggttgcagggaccgccaggtcggtgctggccgagggccgggagggcggagctgggctgtgggcaacagggtcccggctctcgcctcgaggccttggggcagctcggga

SEQ ID NO: 397546 - DNA, 120 bp, Artificial Sequence
  ENSG00000145920_45 (sequence is synthesized)
agctggggagcacggctttcggggggacagctccccaaggctgcctgggcaccggatggggactgagaggcggtaaaggggacactcccgggtgcgctctccgtggtgctgaaaggacag

SEQ ID NO: 397547 - DNA, 120 bp, Artificial Sequence
  ENSG00000145920_46 (sequence is synthesized)
ctccttgcgaggggccgcgagcaggcagctagctgcgaactaagaggaagcgtgggccctagccggagactccgggcagagcccgaacggccggggtcccggagccaggaccgccccggc

SEQ ID NO: 397548 - DNA, 120 bp, Artificial Sequence
  ENSG00000145920_47 (sequence is synthesized)
tgcggcggagactcaagtctgaacccagagaacaactttgagctcgcgggagtgggggacgtcgatctaagctacttctggctgtgcttaacccgaagcccgccggagcacgcttcgccc

SEQ ID NO: 397549 - DNA, 120 bp, Artificial Sequence
  ENSG00000145920_48 (sequence is synthesized)
cgggcgccctcgtcggccgcggaggagctgcagcctccaacagaagggaaaacggacacctgtggaggggaagaaacgtgtccaagatcattcacacagagcgtcagctctggggtcaga

SEQ ID NO: 397550 - DNA, 120 bp, Artificial Sequence
  ENSG00000145920_49 (sequence is synthesized)
ggtccctgccatgctatctgctctgctcagcgactgaaggtgcccgcatcccagctctgccaggaagcaaagttacagatgagaaaactgaagctcagagagtgaaaggacttgcctaaa

SEQ ID NO: 397551 - DNA, 120 bp, Artificial Sequence
  ENSG00000145920_50 (sequence is synthesized)
gacacacagctggttgtcacatcttcccaagccaggccagccaggagcgctgcatgcaaattctgccgtgggctaaggcacgctaaccagagccggcggcatggacttcgtcatgaagca

SEQ ID NO: 397552 - DNA, 120 bp, Artificial Sequence
  ENSG00000145920_51 (sequence is synthesized)
cctgagcaatttccatctctactcagctggatgggcgtggtgaataaattcattcagttcattgttgctccacagctaacaataaagctgggagctgggtccaaatggtgacttggctgt

SEQ ID NO: 397553 - DNA, 120 bp, Artificial Sequence
  ENSG00000145920_52 (sequence is synthesized)
ctaccagctgcttggccatgggcaacccccaccccctctgagccttggtttccgtatctgtaaaatgtacatgatgctccctgttggttgggtcagcctccccagtgttaccaagccacg

SEQ ID NO: 397554 - DNA, 120 bp, Artificial Sequence
  ENSG00000145920_53 (sequence is synthesized)
agacttgaatcataaaaacagaaaaacggccataaggacaaccactgcaggttacccgagtcagcctgtcagatggcggggcccagtcccgaaaacctctaggggctcagatggtcgagc

SEQ ID NO: 397555 - DNA, 120 bp, Artificial Sequence
  ENSG00000145920_54 (sequence is synthesized)
ctgagtcggtgcttgggctgggacgggctcggagggagtcggagaggggaaggaagctgaaggcgcgccctgggtccccggcgcactgaaggttgtcacatcttcccaagccaggccagc

SEQ ID NO: 397556 - DNA, 120 bp, Artificial Sequence
  ENSG00000145920_55 (sequence is synthesized)
aatctccgccggagccggggaaaggtggcattgccatttctctcttagagaggaggaaactggggactcgagcaggttagggccttgctgaaggtcccatggcaaataaggaaatgacgg

SEQ ID NO: 397557 - DNA, 120 bp, Artificial Sequence
  ENSG00000145920_56 (sequence is synthesized)
tggcgttggaaaccagatctgcctgactccaagttccaggctctttccaatgctcctggcttcaatcaaatctgaacaatagggtcaagatgaaggctttaaaatagggaccaaaccgct

SEQ ID NO: 397558 - DNA, 120 bp, Artificial Sequence
  ENSG00000145934_0 (sequence is synthesized)
cttttctgaaaacatcagcattctgccatatctggaataatggatgtaaaggaccggcgacaccgctctttgaccagaggacgctgtggcaaagagtgtcgctacacaagctcctctctg

SEQ ID NO: 397559 - DNA, 120 bp, Artificial Sequence
  ENSG00000145934_1 (sequence is synthesized)
gacagtgaggactgccgcgtgcccacacagaaatcctacagctccagtgagactctgaaggcctatgaccatgacagcaggatgcactatggaaaccgagtcacagacctcatccaccgg

SEQ ID NO: 397560 - DNA, 120 bp, Artificial Sequence
  ENSG00000145934_2 (sequence is synthesized)
gagtcagatgagtttcctagacaaggaaccaacttcacccttgccgaactgggcatctgtgagccctccccacaccgaagcggctactgctccgacatggggatccttcaccagggctac

SEQ ID NO: 397561 - DNA, 120 bp, Artificial Sequence
  ENSG00000145934_3 (sequence is synthesized)
tcccttagcacagggtctgacgccgactccgacaccgagggagggatgtctccagaacacgccatcagactgtggggcagagggataaaatccaggcgcagttccggcctgtccagtcgt

SEQ ID NO: 397562 - DNA, 120 bp, Artificial Sequence
  ENSG00000145934_4 (sequence is synthesized)
gaaaactcggcccttaccctgactgactctgacaacgaaaacaaatcagatgatgagaacggtcgtcccattccacctacatcctcgcctagtctcctcccatctgctcagctgcctagc

SEQ ID NO: 397563 - DNA, 120 bp, Artificial Sequence
  ENSG00000145934_5 (sequence is synthesized)
tcccataatcctccaccagttagctgccagatgccattgctagacagcaacacctcccatcaaatcatggacaccaaccctgatgaggaattctcccccaattcatacctgctcagagca

SEQ ID NO: 397564 - DNA, 120 bp, Artificial Sequence
  ENSG00000145934_6 (sequence is synthesized)
tgctcagggccccagcaagcctccagcagtggccctccgaaccaccacagccagtcgactctgaggccccctctcccaccccctcacaaccacacgctgtcccatcaccactcgtccgcc

SEQ ID NO: 397565 - DNA, 120 bp, Artificial Sequence
  ENSG00000145934_7 (sequence is synthesized)
aactccctcaacaggaactcactgaccaatcggcggagtcagatccacgccccggccccagcgcccaatgacctggccaccacaccagagtccgttcagcttcaggacagctgggtgcta

SEQ ID NO: 397566 - DNA, 120 bp, Artificial Sequence
  ENSG00000145934_8 (sequence is synthesized)
aacagcaacgtgccactggagacccggcacttcctcttcaagacctcctcggggagcacacccttgttcagcagctcttccccgggataccctttgacctcaggaacggtttacacgccc

SEQ ID NO: 397567 - DNA, 120 bp, Artificial Sequence
  ENSG00000145934_9 (sequence is synthesized)
ccgccccgcctgctgcccaggaatactttctccaggaaggctttcaagctgaagaagccctccaaatactgcagctggaaatgtgctgccctctccgccattgccgcggccctcctcttg

SEQ ID NO: 397568 - DNA, 120 bp, Artificial Sequence
  ENSG00000145934_10 (sequence is synthesized)
gctattttgctggcgtatttcatagcaatgcatctgctcggactcaattggcaactccagcctgcagatgggcacacctttaacaatgggataaggaccggcttaccaggaaacgatgat

SEQ ID NO: 397569 - DNA, 120 bp, Artificial Sequence
  ENSG00000145934_11 (sequence is synthesized)
gtggcaacaatgccatctggaggcaaagtgccctggtcgttgaaaaacagcagcatagacagtggtgaagcagaagttggtcggcgggtaacacaagaagtcccaccaggggtgttttgg

SEQ ID NO: 397570 - DNA, 120 bp, Artificial Sequence
  ENSG00000145934_12 (sequence is synthesized)
aggtcacaaattcacatcagtcagccccagttcttaaagttcaacatctccctcgggaaggacgctctctttggtgtttacataagaagaggacttccaccatctcatgcccagtatgac

SEQ ID NO: 397571 - DNA, 120 bp, Artificial Sequence
  ENSG00000145934_13 (sequence is synthesized)
ttcatggaacgtctggacgggaaggagaagtggagtgtggttgagtctcccagggaacgccggagcatacagaccttggttcagaatgaagccgtgtttgtgcagtacctggatgtgggc

SEQ ID NO: 397572 - DNA, 120 bp, Artificial Sequence
  ENSG00000145934_14 (sequence is synthesized)
ctgtggcatctggccttctacaatgatggaaaagacaaagagatggtttccttcaatactgttgtcctagattcagtgcaggactgtccacgtaactgccatgggaatggtgaatgtgtg

SEQ ID NO: 397573 - DNA, 120 bp, Artificial Sequence
  ENSG00000145934_15 (sequence is synthesized)
tccggggtgtgtcactgtttcccaggatttctaggagcagactgtgctaaagctgcctgccctgtcctgtgcagtgggaatggacaatattctaaagggacgtgccagtgctacagcggc

SEQ ID NO: 397574 - DNA, 120 bp, Artificial Sequence
  ENSG00000145934_16 (sequence is synthesized)
tggaaaggtgcagagtgcgacgtgcccatgaatcagtgcatcgatccttcctgcgggggccacggctcctgcattgatgggaactgtgtctgctctgctggctacaaaggcgagcactgt

SEQ ID NO: 397575 - DNA, 120 bp, Artificial Sequence
  ENSG00000145934_17 (sequence is synthesized)
gaggaagttgattgcttggatcccacctgctccagccacggagtctgtgtgaatggagaatgcctgtgcagccctggctggggtggtctgaactgtgagctggcgagggtccagtgccca

SEQ ID NO: 397576 - DNA, 120 bp, Artificial Sequence
  ENSG00000145934_18 (sequence is synthesized)
gaccagtgcagtgggcatggcacgtacctgcctgacacgggcctctgcagctgcgatcccaactggatgggtcccgactgctctgttgaagtgtgctcagtagactgtggcactcacggc

SEQ ID NO: 397577 - DNA, 120 bp, Artificial Sequence
  ENSG00000145934_19 (sequence is synthesized)
gtctgcatcgggggagcctgccgctgtgaagagggctggacaggcgcagcgtgtgaccagcgcgtgtgccacccccgctgcattgagcacgggacctgtaaagatggcaaatgtgaatgc

SEQ ID NO: 397578 - DNA, 120 bp, Artificial Sequence
  ENSG00000145934_20 (sequence is synthesized)
cgagagggctggaatggtgaacactgcaccattggtaggcaaacggcaggcaccgaaacagatggctgccctgacttgtgcaacggtaacgggagatgcacactgggtcagaacagctgg

SEQ ID NO: 397579 - DNA, 120 bp, Artificial Sequence
  ENSG00000145934_21 (sequence is synthesized)
cagtgtgtctgccagaccggctggagagggcccggatgcaacgttgccatggaaacttcctgtgctgataacaaggataatgagggagatggcctggtggattgtttggaccctgactgc

SEQ ID NO: 397580 - DNA, 120 bp, Artificial Sequence
  ENSG00000145934_22 (sequence is synthesized)
tgcctgcagtcagcctgtcagaacagcctgctctgccgggggtcccgggacccactggacatcattcagcagggccagacggattggcccgcagtgaagtccttctatgaccgtatcaag

SEQ ID NO: 397581 - DNA, 120 bp, Artificial Sequence
  ENSG00000145934_23 (sequence is synthesized)
ctcttggcaggcaaggatagcacccacatcattcctggagagaaccctttcaacagcagcttggtttctctcatccgaggccaagtagtaactacagatggaactcccctggtcggtgtg

SEQ ID NO: 397582 - DNA, 120 bp, Artificial Sequence
  ENSG00000145934_24 (sequence is synthesized)
aacgtgtcttttgtcaagtacccaaaatacggctacaccatcacccgccaggatggcacgttcgacctgatcgcaaatggaggtgcttccttgactctacactttgagcgagccccgttc

SEQ ID NO: 397583 - DNA, 120 bp, Artificial Sequence
  ENSG00000145934_25 (sequence is synthesized)
atgagccaggagcgcactgtgtggctgccgtggaacagcttttacgccatggacaccctggtgatgaagaccgaggagaactccatccccagctgtgacctcagtggctttgtccggcct

SEQ ID NO: 397584 - DNA, 120 bp, Artificial Sequence
  ENSG00000145934_26 (sequence is synthesized)
gatccaatcatcatctcctccccactgtccaccttctttagtgctgcccctgggcagaatcccatcgtgcctgagacccaggttcttcatgaagaaatcgagctccctggttccaatgtg

SEQ ID NO: 397585 - DNA, 120 bp, Artificial Sequence
  ENSG00000145934_27 (sequence is synthesized)
aaacttcgctatctgagctctagaactgcagggtacaagtcactgctgaagatcaccatgacccagtccacagtgcccctgaacctcattagggttcacctgatggtggctgtcgagggg

SEQ ID NO: 397586 - DNA, 120 bp, Artificial Sequence
  ENSG00000145934_28 (sequence is synthesized)
catctcttccagaagtcattccaggcttctcccaacctggcctacaccttcatctgggacaagacagatgcgtatggccaaagggtgtatggactctcagatgctgttgtgtctgtcggg

SEQ ID NO: 397587 - DNA, 120 bp, Artificial Sequence
  ENSG00000145934_29 (sequence is synthesized)
tttgaatatgagacctgtcccagtctaattctctgggagaaaaggacagccctccttcagggattcgagctggacccctccaacctcggtggctggtccctagacaaacaccacatcctc

SEQ ID NO: 397588 - DNA, 120 bp, Artificial Sequence
  ENSG00000145934_30 (sequence is synthesized)
aatgttaaaagtggaatcctacacaaaggcactggggaaaaccagttcctgacccagcagcctgccatcatcaccagcatcatgggcaatggtcgccgccggagcatttcctgtcccagc

SEQ ID NO: 397589 - DNA, 120 bp, Artificial Sequence
  ENSG00000145934_31 (sequence is synthesized)
tgcaacggccttgctgaaggcaacaagctgctggccccagtggctctggctgttggaatcgatgggagcctctatgtgggtgacttcaattacatccgacgcatctttccctctcgaaat

SEQ ID NO: 397590 - DNA, 120 bp, Artificial Sequence
  ENSG00000145934_32 (sequence is synthesized)
gtgaccagcatcttggagttacgaaataaagagtttaaacatagcaacaacccagcacacaagtactacttggcagtggaccccgtgtccggctcgctctacgtgtccgacaccaacagc

SEQ ID NO: 397591 - DNA, 120 bp, Artificial Sequence
  ENSG00000145934_33 (sequence is synthesized)
aggagaatctaccgcgtcaagtctctgagtggaaccaaagacctggctgggaattcggaagttgtggcagggacgggagagcagtgtctaccctttgatgaagcccgctgcggggatgga

SEQ ID NO: 397592 - DNA, 120 bp, Artificial Sequence
  ENSG00000145934_34 (sequence is synthesized)
gggaaggccatagatgcaaccctgatgagcccgagaggtattgcagtagacaagaatgggctcatgtactttgtcgatgccaccatgatccggaaggttgaccagaatggaatcatctcc

SEQ ID NO: 397593 - DNA, 120 bp, Artificial Sequence
  ENSG00000145934_35 (sequence is synthesized)
gtccggccgctgagctgtgattccagcatggatgtagcccaggttcgtctggagtggccaacagaccttgctgtcaatcccatggataactccttgtatgttctagagaacaatgtcatc

SEQ ID NO: 397594 - DNA, 120 bp, Artificial Sequence
  ENSG00000145934_36 (sequence is synthesized)
cttcgaatcaccgagaaccaccaagtcagcatcattgcgggacgccccatgcactgccaagttcctggcattgactactcactcagcaaactagccattcactctgccctggagtcagcc

SEQ ID NO: 397595 - DNA, 120 bp, Artificial Sequence
  ENSG00000145934_37 (sequence is synthesized)
agtgccattgccatttctcacactggggtcctctacatcactgagacagatgagaagaagattaaccgtctacgccaggtaacaaccaacggggagatctgccttttagctggggcagcc

SEQ ID NO: 397596 - DNA, 120 bp, Artificial Sequence
  ENSG00000145934_38 (sequence is synthesized)
tcggactgcgactgcaaaaacgatgtcaattgcaactgctattcaggagatgatgcctacgcgactgatgccatcttgaattccccatcatccttagctgtagctccagatggtaccatt

SEQ ID NO: 397597 - DNA, 120 bp, Artificial Sequence
  ENSG00000145934_39 (sequence is synthesized)
tacattgcagaccttggaaatattcggatcagggcggtcagcaagaacaagcctgttcttaatgccttcaaccagtatgaggctgcatcccccggagagcaggagttatatgttttcaac

SEQ ID NO: 397598 - DNA, 120 bp, Artificial Sequence
  ENSG00000145934_40 (sequence is synthesized)
gctgatggcatccaccaatacactgtgagcctggtgacaggggagtacttgtacaatttcacatatagtactgacaatgatgtcactgaattgattgacaataatgggaattccctgaag

SEQ ID NO: 397599 - DNA, 120 bp, Artificial Sequence
  ENSG00000145934_41 (sequence is synthesized)
atccgtcgggacagcagtggcatgccccgtcacctgctcatgcctgacaaccagatcatcaccctcaccgtgggcaccaatggaggcctcaaagtcgtgtccacacagaacctggagctt

SEQ ID NO: 397600 - DNA, 120 bp, Artificial Sequence
  ENSG00000145934_42 (sequence is synthesized)
ggtctcatgacctatgatggcaacactgggctcctggccaccaagagcgatgaaacaggatggacgactttctatgactatgaccacgaaggccgcctgaccaacgtgacgcgccccacg

SEQ ID NO: 397601 - DNA, 120 bp, Artificial Sequence
  ENSG00000145934_43 (sequence is synthesized)
ggggtggtaaccagtctgcaccgggaaatggagaaatctattaccattgacattgagaactccaaccgtgatgatgacgtcactgtcatcaccaacctctcttcagtagaggcctcctac

SEQ ID NO: 397602 - DNA, 120 bp, Artificial Sequence
  ENSG00000145934_44 (sequence is synthesized)
acagtggtacaagatcaagttcggaacagctaccagctctgtaataatggtaccctgagggtgatgtatgctaatgggatgggtatcagcttccacagcgagccccatgtcctagcgggc

SEQ ID NO: 397603 - DNA, 120 bp, Artificial Sequence
  ENSG00000145934_45 (sequence is synthesized)
accatcacccccaccattggacgctgcaacatctccctgcctatggagaatggcttaaactccattgagtggcgcctaagaaaggaacagattaaaggcaaagtcaccatctttggcagg

SEQ ID NO: 397604 - DNA, 120 bp, Artificial Sequence
  ENSG00000145934_46 (sequence is synthesized)
aagctccgggtccatggaagaaatctcttgtccattgactatgatcgaaatattcggactgaaaagatctatgatgaccaccggaagttcaccctgaggatcatttatgaccaggtgggc

SEQ ID NO: 397605 - DNA, 120 bp, Artificial Sequence
  ENSG00000145934_47 (sequence is synthesized)
cgccccttcctctggctgcccagcagcgggctggcagctgtcaacgtgtcatacttcttcaatgggcgcctggctgggcttcagcgtggggccatgagcgagaggacagacatcgacaag

SEQ ID NO: 397606 - DNA, 120 bp, Artificial Sequence
  ENSG00000145934_48 (sequence is synthesized)
caaggccgcatcgtgtcccgcatgttcgctgacgggaaagtgtggagctactcctaccttgacaagtccatggtcctcctgcttcagagccaacgtcagtatatatttgagtatgactcc

SEQ ID NO: 397607 - DNA, 120 bp, Artificial Sequence
  ENSG00000145934_49 (sequence is synthesized)
tctgaccgcctccttgccgtcaccatgcccagcgtggcccggcacagcatgtccacacacacctccatcggctacatccgtaatatttacaacccgcctgaaagcaatgcttcggtcatc

SEQ ID NO: 397608 - DNA, 120 bp, Artificial Sequence
  ENSG00000145934_50 (sequence is synthesized)
tttgactacagtgatgacggccgcatcctgaagacctcctttttgggcaccggacgccaggtgttctacaagtatgggaaactctccaagttatcagagattgtctacgacagtaccgcc

SEQ ID NO: 397609 - DNA, 120 bp, Artificial Sequence
  ENSG00000145934_51 (sequence is synthesized)
gtcaccttcgggtatgacgagaccactggtgtcttgaagatggtcaacctccaaagtgggggcttctcctgcaccatcaggtaccggaagattggccccctggtggacaagcagatctac

SEQ ID NO: 397610 - DNA, 120 bp, Artificial Sequence
  ENSG00000145934_52 (sequence is synthesized)
aggttctccgaggaaggcatggtcaatgccaggtttgactacacctatcatgacaacagcttccgcatcgcaagcatcaagcccgtcataagtgagactcccctccccgttgacctctac

SEQ ID NO: 397611 - DNA, 120 bp, Artificial Sequence
  ENSG00000145934_53 (sequence is synthesized)
cgctatgatgagatttctggcaaggtggaacactttggtaagtttggagtcatctattatgacatcaaccagatcatcaccactgccgtgatgaccctcagcaaacacttcgacacccat

SEQ ID NO: 397612 - DNA, 120 bp, Artificial Sequence
  ENSG00000145934_54 (sequence is synthesized)
gggcggatcaaggaggtccagtatgagatgttccggtccctcatgtactggatgacggtgcaatatgacagcatgggcagggtgatcaagagggagctaaaactggggccctatgccaat

SEQ ID NO: 397613 - DNA, 120 bp, Artificial Sequence
  ENSG00000145934_55 (sequence is synthesized)
accacgaagtacacctatgactacgatggggacgggcagctccagagcgtggccgtcaatgaccgcccgacctggcgctacagctatgaccttaatgggaatctccacttactgaaccca

SEQ ID NO: 397614 - DNA, 120 bp, Artificial Sequence
  ENSG00000145934_56 (sequence is synthesized)
ggcaacagtgtgcgcctcatgcccttgcgctatgacctccgggatcggataaccagactcggggatgtgcagtacaaaattgacgacgatggctatctgtgccagagagggtctgacatc

SEQ ID NO: 397615 - DNA, 120 bp, Artificial Sequence
  ENSG00000145934_57 (sequence is synthesized)
ttcgaatacaattccaagggcctcctaacaagagcctacaacaaggccagcgggtggagtgtccagtaccgctatgatggcgtaggacggcgggcttcctacaagaccaacctgggccac

SEQ ID NO: 397616 - DNA, 120 bp, Artificial Sequence
  ENSG00000145934_58 (sequence is synthesized)
cacctgcagtacttctactctgacctccacaacccgacgcgcatcacccatgtctacaatcactccaactcggagattacctcactgtactacgacctccagggccacctctttgccatg

SEQ ID NO: 397617 - DNA, 120 bp, Artificial Sequence
  ENSG00000145934_59 (sequence is synthesized)
gagagcagcagtggggaggagtactatgttgcctctgataacacagggactcctctggctgtgttcagcatcaacggcctcatgatcaaacagctgcagtacacggcctatggggagatt

SEQ ID NO: 397618 - DNA, 120 bp, Artificial Sequence
  ENSG00000145934_60 (sequence is synthesized)
tattatgactccaaccccgacttccagatggtcattggcttccatgggggactctatgaccccctgaccaagctggtccacttcactcagcgtgattatgatgtgctggcaggacgatgg

SEQ ID NO: 397619 - DNA, 120 bp, Artificial Sequence
  ENSG00000145934_61 (sequence is synthesized)
acctccccagactataccatgtggaaaaacgtgggcaaggagccggccccctttaacctgtatatgttcaagagcaacaatcctctcagcagtgagctagatttgaagaactacgtgaca

SEQ ID NO: 397620 - DNA, 120 bp, Artificial Sequence
  ENSG00000145934_62 (sequence is synthesized)
gatgtgaaaagctggcttgtgatgtttggatttcagcttagcaacatcattcctggcttcccgagagccaaaatgtatttcgtgcctcctccctatgaattgtcagagagtcaagcaagt

SEQ ID NO: 397621 - DNA, 120 bp, Artificial Sequence
  ENSG00000145934_63 (sequence is synthesized)
gagaatggacagctcattacaggtgtccaacagacaacagagagacataaccaggccttcatggctctggaaggacaggtcattactaaaaagctccacgccagcatccgagagaaagca

SEQ ID NO: 397622 - DNA, 120 bp, Artificial Sequence
  ENSG00000145934_64 (sequence is synthesized)
ggtcactggtttgccaccaccacgcccatcattggcaaaggcatcatgtttgccatcaaagaagggcgggtgaccacgggcgtgtccagcatcgccagcgaagatagccgcaaggtggca

SEQ ID NO: 397623 - DNA, 120 bp, Artificial Sequence
  ENSG00000145934_65 (sequence is synthesized)
tctgtgctgaacaacgcctactacctggacaagatgcactacagcatcgagggcaaggacacccactactttgtgaagattggctcagccgatggcgacctggtcacactaggcaccacc

SEQ ID NO: 397624 - DNA, 120 bp, Artificial Sequence
  ENSG00000145934_66 (sequence is synthesized)
atcggccgcaaggtgctagagagcggggtgaacgtgaccgtgtcccagcccacgctgctggtcaacggcaggactcgaaggttcacgaacattgagttccagtactccacgctgctgctc

SEQ ID NO: 397625 - DNA, 120 bp, Artificial Sequence
  ENSG00000145934_67 (sequence is synthesized)
agcatccgctatggcctcacccccgacaccctggacgaagagaaggcccgcgtcctggaccaggcgagacagagggccctgggcacggcctgggccaaggagcagcagaaagccagggac

SEQ ID NO: 397626 - DNA, 120 bp, Artificial Sequence
  ENSG00000145934_68 (sequence is synthesized)
gggagagaggggagccgcctgtggactgagggcgagaagcagcagcttctgagcaccgggcgcgtgcaagggtacgagggatattacgtgcttcccgtggagcaatacccagagcttgca

SEQ ID NO: 397627 - DNA, 120 bp, Artificial Sequence
  ENSG00000145934_69 (sequence is synthesized)
gacagtagcagcaacatccagtttttaagacagaatgagatgggaaagaggtaacaaaataatctgctgccattccttgtctgaatggctcagcaggagtaactgttatctcctctccta

SEQ ID NO: 397628 - DNA, 120 bp, Artificial Sequence
  ENSG00000145934_70 (sequence is synthesized)
aggagatgaagacctaacaggggcactgcggctgggctgctttaggagaccaagtggcaagaaagctcacattttttgagttcaaatgctactgtccaagcgagaagtccctcatcctga

SEQ ID NO: 397629 - DNA, 120 bp, Artificial Sequence
  ENSG00000145934_71 (sequence is synthesized)
tttgatgcgtgtggataaatgcaaatcaaagcccattatttatttgtaactgactctgggatgcctgccgcagtcttatctgtcgctctagcttgcagctttcagcaattgtcagcttag

SEQ ID NO: 397630 - DNA, 120 bp, Artificial Sequence
  ENSG00000145934_72 (sequence is synthesized)
agactttggtttgaaactctcctccagtggtttgcagagtgcctgagactggaatttgcagacgctaacagtcatttctcctttttttttcaggccctccgaaccaccacagccagtcga

SEQ ID NO: 397631 - DNA, 120 bp, Artificial Sequence
  ENSG00000145934_73 (sequence is synthesized)
atgcttttccttcccagctggagaaggcctcagctgtgtcagactgggactgctggtgatttttctgtagttagagggaaacacaaaacgaagagcggcccactcccagcttacgccgat

SEQ ID NO: 397632 - DNA, 120 bp, Artificial Sequence
  ENSG00000145934_74 (sequence is synthesized)
ggtgagcccacctctcctgatcattagcgttgctggcacaattgaatgcaagccagatcatctcttatggagacccggcagtacctcacctcagtctgtgagttttctccatgggaaggt

SEQ ID NO: 397633 - DNA, 120 bp, Artificial Sequence
  ENSG00000145934_75 (sequence is synthesized)
cccctaaaatatgacccacttgttctgggtctacgcagaaaagagacgcaaagtgtccaaaaggaacaaaagaacaaaaacgaataagcaaagaagaaaacaaacaaaaacaaaacaaaa

SEQ ID NO: 397634 - DNA, 120 bp, Artificial Sequence
  ENSG00000145934_76 (sequence is synthesized)
caaacacacggaccaataaacaaagaagcgaagataagaaagaaggcctcatatccaattacctcactcattcacatgtgagcgacacgcagacatccgcgagggccagcgtcaccagac

SEQ ID NO: 397635 - DNA, 120 bp, Artificial Sequence
  ENSG00000145934_77 (sequence is synthesized)
cagctgcgggacaaaccactcagactgcttgtaggacaaatacttctgacattttcgtttaagcaaatacaggtgcatttaaaacacgactttgggggtgatttgtgtgtagcgcctggg

SEQ ID NO: 397636 - DNA, 120 bp, Artificial Sequence
  ENSG00000145934_78 (sequence is synthesized)
gaggggggataaaagaggaggagtgagcactggaaatactttttaaagaaaaaaaaacatgagggaataaaagaaattcctatcaaaaatcaaagtgaaataataccatccagcacttaa

SEQ ID NO: 397637 - DNA, 120 bp, Artificial Sequence
  ENSG00000145934_79 (sequence is synthesized)
ctctcaggtcccaactaagtctggcctgagctaatttatttgagcgcagagtgtaaaatttaattcaaaatggtggctataatcactacagataaatttcatactcttttgtctttggag

SEQ ID NO: 397638 - DNA, 120 bp, Artificial Sequence
  ENSG00000145934_80 (sequence is synthesized)
attccattgtggacagtaatacgcagttacagggtgtagtctgtttagattccgtagttcgtgggtatcagtttcggtagaggtgcagcatcgtgacacttttgctaacaggtaccactt

SEQ ID NO: 397639 - DNA, 120 bp, Artificial Sequence
  ENSG00000145934_81 (sequence is synthesized)
ctgatcaccctgtacatacatgagccgaaaggcacaatcactgtttcagatttaaaattattagtgtgtttgtttggtccagaaactgagacaatcacatgacagtcaccacgaggagag

SEQ ID NO: 397640 - DNA, 120 bp, Artificial Sequence
  ENSG00000145934_82 (sequence is synthesized)
gacagtcaccacgaggagagaaaatttaaaaaataaaaataaaaacaaaaaaaattttaaaaattaaaaaaacaaaaataaagtctaataagaactttggtacaggaacttttttgtaat

SEQ ID NO: 397641 - DNA, 120 bp, Artificial Sequence
  ENSG00000145934_83 (sequence is synthesized)
tcgagtttttatattaattttaatttgctgctaagcaaagactagggacaggcaaagataatttatggcaaagtgtttaaattgtttatacataaataaagtctctaaaactcctgtgga

SEQ ID NO: 397642 - DNA, 120 bp, Artificial Sequence
  ENSG00000145934_84 (sequence is synthesized)
cctatctttctgaccaccactgtgtgttttgctctgaaaatgatggctccaatcccgtataattcagacggcattaacttttggacctgtttttaaaaaaataaaaaatcctactactca

SEQ ID NO: 397643 - DNA, 120 bp, Artificial Sequence
  ENSG00000145934_85 (sequence is synthesized)
ttgtagaggatcttcagggacaggctctgggcatttagtgaaagggacagcgattcctttgcctatactctggtggtttagaaaaggacctcagggaacatttgttttgttttgttttgt

SEQ ID NO: 397644 - DNA, 120 bp, Artificial Sequence
  ENSG00000145934_86 (sequence is synthesized)
tttccttttgattaaggcatttggggtctagaaaagaagattcaagcaggatccatttaatttatttagtttgcctcacagacatgaagcttcagaatggtcgtcccattccacctacat

SEQ ID NO: 397645 - DNA, 120 bp, Artificial Sequence
  ENSG00000145934_87 (sequence is synthesized)
catcattcctggagagaaccctttcaacagcaggtaggcaccctctgtccctgcaaactcctgaagtctctgattttcttcctgttggagccagaggcagttctccagctttcccgggga

SEQ ID NO: 397646 - DNA, 120 bp, Artificial Sequence
  ENSG00000145934_88 (sequence is synthesized)
cccaattggcctggaatctgcccccctagaggcagctccctccaagggggactcagagaagtgccctttcctcactttgtgttgggctccagaacagagccctagtgtctttgcaggatg

SEQ ID NO: 397647 - DNA, 120 bp, Artificial Sequence
  ENSG00000145934_89 (sequence is synthesized)
tcaacatctttaacccagaacctgctggagacacctgttgattccctggtttttagatcatttttaaaatctgttattttatgatgttattgtcattatattaaatctccctttaaaatg

SEQ ID NO: 397648 - DNA, 120 bp, Artificial Sequence
  ENSG00000145936_0 (sequence is synthesized)
gaggccaaacttcctgctgaagctctgtggcctcttttggggtgggggcgggggtccaggcagaaagaaactgtctgctgctcaagacccacaggacgccgggaagactaaatgatcact

SEQ ID NO: 397649 - DNA, 120 bp, Artificial Sequence
  ENSG00000145936_1 (sequence is synthesized)
gcccccagtgaatatggtgaagaagctggtgatggcccagaagcggggagagacacgagccctttgcctgggtgtaaccatggtggtgtgtgccgtcatcacctactacatcctggtcac

SEQ ID NO: 397650 - DNA, 120 bp, Artificial Sequence
  ENSG00000145936_2 (sequence is synthesized)
gactgtgctgcccctctaccagaaaagcgtgtggacccaggaatccaagtgccacctgattgagaccaacatcagggaccaggaggagctgaagggcaagaaggtgccccagtacccatg

SEQ ID NO: 397651 - DNA, 120 bp, Artificial Sequence
  ENSG00000145936_3 (sequence is synthesized)
cctgtgggtcaacgtgtcagctgccggcaggtgggctgtgctgtaccacacggaggacactcgggaccagaaccagcagtgctcctacatcccaggcagcgtggacaattaccagacggc

SEQ ID NO: 397652 - DNA, 120 bp, Artificial Sequence
  ENSG00000145936_4 (sequence is synthesized)
ccgggccgacgtggagaaggtcagagccaaattccaagagcagcaggtcttctactgcttctccgcacctcgggggaacgaaaccagcgtcctattccagcgcctctacgggccccaggc

SEQ ID NO: 397653 - DNA, 120 bp, Artificial Sequence
  ENSG00000145936_5 (sequence is synthesized)
cctcctcttctccctcttctggcccaccttcctgctgaccggtggcctcctcattatcgccatggtgaagagcaaccagtacctgtccatcctggcggcccagaagtagagccatccatc

SEQ ID NO: 397654 - DNA, 120 bp, Artificial Sequence
  ENSG00000145936_6 (sequence is synthesized)
catgccataccacttgtcagggcacaggggactggctgggcccccagggctgctccccacttgcagcacaatgccttctccacctgccctcccactcttccagtccaatccacgctgtct

SEQ ID NO: 397655 - DNA, 120 bp, Artificial Sequence
  ENSG00000145936_7 (sequence is synthesized)
tctgttgcaggactaacctttgagaaatccttttgtgaagtcattgcctgctcaagaatgtacagtggctccccaatgccttggaggccataaggccagccagttctagctctctattac

SEQ ID NO: 397656 - DNA, 120 bp, Artificial Sequence
  ENSG00000145936_8 (sequence is synthesized)
ctgtccccactcaactgactcatacctgtttccggctgcatcactatgtgccccacagagaacgatgatcgtcacctctgtgcctgagttctccctgttgtctcaaagcggtacccatcc

SEQ ID NO: 397657 - DNA, 120 bp, Artificial Sequence
  ENSG00000145936_9 (sequence is synthesized)
tcccccagaagctgtccccagcgagcctcccttctttgtttgaattctctaataagagcaacagcagctcccatttctagaacacatttacagtattactattttctaggatataaagtg

SEQ ID NO: 397658 - DNA, 120 bp, Artificial Sequence
  ENSG00000145936_10 (sequence is synthesized)
ccatatatatttttaattccaatattaataaatgtatgccaaacaacaatcagctgcaaggaaacacatgagaactcatcaaaattttagcggtgggatggtggttaatttctgttttct

SEQ ID NO: 397659 - DNA, 120 bp, Artificial Sequence
  ENSG00000145936_11 (sequence is synthesized)
tccttatcccctttttatttttgctgcttttctaaatttttgattataggaagggtgtgtttcgtttgcttttaatcagaaaagccatggtagatgccattttggaaaagttgaaagagt

SEQ ID NO: 397660 - DNA, 120 bp, Artificial Sequence
  ENSG00000145936_12 (sequence is synthesized)
gtgtccccctcacagaaaaagatggaagtgggtctggggacggagttgggttccagtcagagacaggccattcagaacacacaatcttaaaaacccctctgggccgggcgcggtggctca

SEQ ID NO: 397661 - DNA, 120 bp, Artificial Sequence
  ENSG00000145936_13 (sequence is synthesized)
aaacaaaaaacaaaaaatgaaaaacaaccctctggaggaaaggtcatgatatagaggaggatttgttatttaaattgagggtatggactctggcactgagcctgctggggaagcctatct

SEQ ID NO: 397662 - DNA, 120 bp, Artificial Sequence
  ENSG00000145936_14 (sequence is synthesized)
gcactgagcctgctggggaagcctatctcagatttgaaaagggcaaaatgggaagaagccatcacctttaccattcccactccaggaagttttcctagaacgatgactgtccaagtgtgg

SEQ ID NO: 397663 - DNA, 120 bp, Artificial Sequence
  ENSG00000145936_15 (sequence is synthesized)
tccctgggccagcagcatcaggatcctgtggcagcttgtgagaaatgcacactctcaggcccctgtcccagccccaccacgccagaagccctgcacggggtgggggtagcaatgttctgt

SEQ ID NO: 397664 - DNA, 120 bp, Artificial Sequence
  ENSG00000145936_16 (sequence is synthesized)
gttctaacaatgcgtaggggattctgtggcacacctcgagccagagaactaccggtgtaggaagtgagcgtcctgtcgcgaggattttcagagcaggtgagtgaccattcggcagggcca

SEQ ID NO: 397665 - DNA, 120 bp, Artificial Sequence
  ENSG00000145936_17 (sequence is synthesized)
gatgcagatcttgggtttgaatcctgtctctactctgcccgatttcatctctttgattcttagttttttcatctataaaagaaggactctttctggatagttgggagggctgaaggaatg

SEQ ID NO: 397666 - DNA, 120 bp, Artificial Sequence
  ENSG00000145936_18 (sequence is synthesized)
tttgacacatcataggtgtttaaaatggcaactatagttttttttgtttgttttgtgtgtgtgtttttttcttaactttcattttaagttgcagggtacacgttcaggtttgttacatag

SEQ ID NO: 397667 - DNA, 78 bp, Artificial Sequence
  ENSG00000145936_19 (sequence is synthesized)
attttaagttgcagggtacacgttcaggtttgttacataggtacacttgtgtcaagggagtttgttgtgttaaagaaa

SEQ ID NO: 397668 - DNA, 77 bp, Artificial Sequence
  ENSG00000145936_20 (sequence is synthesized)
aatattatccttagcaaactaacacagggacacaaaactaaatactgtatattctcacttataagtgggagctaaat

SEQ ID NO: 397669 - DNA, 120 bp, Artificial Sequence
  ENSG00000145936_21 (sequence is synthesized)
agctaaatgatgaaaacacatggacacaaagaggggaacaacacacactgaggcctattggagggcgggaggtaggaggagggagaggatcagggaaaaagagctattgttagtaacaag

SEQ ID NO: 397670 - DNA, 70 bp, Artificial Sequence
  ENSG00000145936_22 (sequence is synthesized)
tgaatactcagaaacttccagaagttatactgacaatgttatctggcatgtatgggtgcttatttattct

SEQ ID NO: 397671 - DNA, 120 bp, Artificial Sequence
  ENSG00000145936_23 (sequence is synthesized)
tgacaatgttatctggcatgtatgggtgcttatttattctgtgccaggcactgtactaattagtttgccttggaaaaaaaaatgagatactcctgaacctgcctcacagatgatgagaag

SEQ ID NO: 397672 - DNA, 120 bp, Artificial Sequence
  ENSG00000145936_24 (sequence is synthesized)
caacagaggacagtggctaagtatgtggacttgggatgtgcactgtttgggttcaaattccagctgtgctgttcacaagctgggtgactttggacgaataacctttctgtgcctgtttcc

SEQ ID NO: 397673 - DNA, 120 bp, Artificial Sequence
  ENSG00000145936_25 (sequence is synthesized)
tcgtttgcaaaacgaaactgataatagtatctttccatagagttttggcatgaaacaaatttttatgtaaatttcctaggatagtgacatatggtaagtgctatctaagttactatgaaa

SEQ ID NO: 397674 - DNA, 120 bp, Artificial Sequence
  ENSG00000145936_26 (sequence is synthesized)
aactgaggctgtaagaggtaactggccaaggccatctgtaaagtgaggggctaggactcaagcctggagctgtgtgttccagtacctggcatctcaaccacagaactcagcagagccagc

SEQ ID NO: 397675 - DNA, 120 bp, Artificial Sequence
  ENSG00000145936_27 (sequence is synthesized)
tgtgaagggctgagggacagagccagctgtgaagggctgaggggcagagccagctgtgaagggctgaggggcagagccagctgtgaagggctgagggacacagccactcaaagccacagg

SEQ ID NO: 397676 - DNA, 120 bp, Artificial Sequence
  ENSG00000145936_28 (sequence is synthesized)
ggccaggcagggagctgcgttgcatccctggaacccaggtgccctcatgcaggttggagttctgaggggaggccctggcatctgcaccagcatctgccaattccagccagggagcccaga

SEQ ID NO: 397677 - DNA, 120 bp, Artificial Sequence
  ENSG00000145936_29 (sequence is synthesized)
ggtatccctgtggcctccagtttcttacctggtggaccttccttccaaaggcaggcagctcatcattccctggaattttttccttctggggtcagggaagtctcaaaggtcctcatgtga

SEQ ID NO: 397678 - DNA, 120 bp, Artificial Sequence
  ENSG00000145936_30 (sequence is synthesized)
gtcttttaagaaagtcttaattgtaatattgtactatagttttgcaaaatattaaatattaccattggggacattaggtagagggggcacggaatgtctctgtattatttcgtaaagctt

SEQ ID NO: 397679 - DNA, 120 bp, Artificial Sequence
  ENSG00000145936_31 (sequence is synthesized)
catgtgaatctacaattatctcaaaaatttaagttaaaaaaggaagaaaaataagaaaggaagtcccaacttggagtctgatttaaagggtctattttgtcaatggtttccatgcacctg

SEQ ID NO: 397680 - DNA, 120 bp, Artificial Sequence
  ENSG00000145936_32 (sequence is synthesized)
aatttgggactaaaatacacagaaactcagaatacccaaacaatccctgcaggggaaaaggccatgttcctctagaaaaattagtatgtgaggatgcctaacccccactgtcccataaat

SEQ ID NO: 397681 - DNA, 120 bp, Artificial Sequence
  ENSG00000145936_33 (sequence is synthesized)
tattaatgatgaccttcatttgcttgagatagatgttctcctcctgtcaataaagactggccttctagcaaatgccacaactgtctgctgctcacagaactttatgcacgggataagcat

SEQ ID NO: 397682 - DNA, 120 bp, Artificial Sequence
  ENSG00000145936_34 (sequence is synthesized)
gaaataatgggaatttaggcatgatggagttagaccctgtgcctacgtgtttttttgcaataatatctgcctgggagcagagaaccttcatcagttcttaataaaccactctgctaatga

SEQ ID NO: 397683 - DNA, 120 bp, Artificial Sequence
  ENSG00000145936_35 (sequence is synthesized)
cagagagaagaagaaatatttccaaatataccaggctgatctttcgtagtttctcagtcttgctgtctgttgttgtttgaaatctgtttcccacgagactctgggaagatggaggtgcag

SEQ ID NO: 397684 - DNA, 120 bp, Artificial Sequence
  ENSG00000145936_36 (sequence is synthesized)
ggcttgggtaacagctgccttcctcagggctgggtacctgctctccgagtctgtgtctccaggctgtgtgctcagacttgaccatgtttgggcatggaggcttgccccagatggggacca

SEQ ID NO: 397685 - DNA, 120 bp, Artificial Sequence
  ENSG00000145936_37 (sequence is synthesized)
ggatggggacacatccctttatccctgtcaggtgtgtgagcctgttcctaactgtccctgtccccgaggctgagaaagatcaacccacttgaccaggtctcacagctggaatgagactga

SEQ ID NO: 397686 - DNA, 120 bp, Artificial Sequence
  ENSG00000145936_38 (sequence is synthesized)
cgctaactggctgtgtaaacataggcaggccacttagcctctcacctcctcagtttccacccttgtaaagtggaatgctaatgctgcaccttgaagagctgttatcaagtcagagacgct

SEQ ID NO: 397687 - DNA, 120 bp, Artificial Sequence
  ENSG00000145936_39 (sequence is synthesized)
gtatataaagtgccacgcttgatgctgagtggatagtgggcactcaaacaaaagcagtgattagtgttagtactttcattctacaacctcagtcaaatgagggaccaggcccagggccag

SEQ ID NO: 397688 - DNA, 120 bp, Artificial Sequence
  ENSG00000145936_40 (sequence is synthesized)
atcctcaaagtggaatcccggtgactccccaggaaaccagggactcagggctggagtaacctccataaacaaacatttagatggtttttccatccttgcatcccaacatcccaccctccc

SEQ ID NO: 397689 - DNA, 120 bp, Artificial Sequence
  ENSG00000145936_41 (sequence is synthesized)
cctccaaaacacaaaactcaccaccatatcctttcctaaagcgatcagttggcccatattctgtctctcttccttccttctttctttccttcttttttccctttcttccctccttctttc

SEQ ID NO: 397690 - DNA, 89 bp, Artificial Sequence
  ENSG00000145936_42 (sequence is synthesized)
gtttccttctttcctcctctcatttatttattcaacagccattgagcacctcctgtgtcaagcctgtaggactcaagaggagagagctc

SEQ ID NO: 397691 - DNA, 120 bp, Artificial Sequence
  ENSG00000145936_43 (sequence is synthesized)
ctcctgtgtcaagcctgtaggactcaagaggagagagctcatgcatgaacagtgcctagcagggaagaattggcaccggggagaagaacagaggaagttacaggggttagaggaggggga

SEQ ID NO: 397692 - DNA, 120 bp, Artificial Sequence
  ENSG00000145936_44 (sequence is synthesized)
agaacagaggaagttacaggggttagaggagggggatgttttccagctgacaatgatgggggtatcagaaaggctcttggtgagattgcaccattgcactccagcctggcaacaagagtg

SEQ ID NO: 397693 - DNA, 120 bp, Artificial Sequence
  ENSG00000145945_0 (sequence is synthesized)
acggctgtcgcgagagcccggggcgagtgggcctctgctcgtgggtggttctcgtggaggtcagctcccgcgtgtctccgctcgacagggtgcttgggcaggtaagggtccgctcagtag

SEQ ID NO: 397694 - DNA, 120 bp, Artificial Sequence
  ENSG00000145945_1 (sequence is synthesized)
cccaaccctctctgtatgcagctccccaaattcagcgctgcgctcaggcatggcagccacccgttacgtggggccgttcgcatttgcatttattgaggtcaaataaaatgctggaaattg

SEQ ID NO: 397695 - DNA, 120 bp, Artificial Sequence
  ENSG00000145945_2 (sequence is synthesized)
gtgcctggtgacactgtcaggttggtggttaccctagcaggtcggcccagcccctgaacgcttccatcactgccgaaagccctgtgaggaggcgcagagctgagcattccccgccgttgc

SEQ ID NO: 397696 - DNA, 120 bp, Artificial Sequence
  ENSG00000145945_3 (sequence is synthesized)
gtgggcccccctctacctgccgcgtttttcctctttgctgcagagcccatcgggtaggcgcgggccatggcgcagtacaagggcaccatgcgcgaggcaggccgtgccatgcacctcctc

SEQ ID NO: 397697 - DNA, 120 bp, Artificial Sequence
  ENSG00000145945_4 (sequence is synthesized)
aagaagcgcgaaaggcagcgggagcagatggaggtgctgaagcagcgcatcgccgaggagaccatcctcaagtcgcaggtggacaagaggttctcggcgcattacgacgccgtggaggcc

SEQ ID NO: 397698 - DNA, 120 bp, Artificial Sequence
  ENSG00000145945_5 (sequence is synthesized)
gagctgaagtccagcacggtgggcctggtgaccctgaacgacatgaaggcccggcaggaggccctggtcagggagcgcgagcggcagctggccaagcgccagcacctggaggagcagcgg

SEQ ID NO: 397699 - DNA, 120 bp, Artificial Sequence
  ENSG00000145945_6 (sequence is synthesized)
ctgcagcaggagcggcagcgggagcaggagcagcggcgcgagcgcaagcgtaagatctcctgcctgtcctttgcactagacgacctcgatgaccaggccgacgcggccgaggccaggcgc

SEQ ID NO: 397700 - DNA, 120 bp, Artificial Sequence
  ENSG00000145945_7 (sequence is synthesized)
gccggaaacctgggcaagaaccccgacgtggacaccagcttcctgccagaccgcgaccgcgaggaggaggagaaccggctccgagaggagctgcgccaagagtgggaggcgcagcgcgag

SEQ ID NO: 397701 - DNA, 120 bp, Artificial Sequence
  ENSG00000145945_8 (sequence is synthesized)
gagatggaggtcaccttcagctactgggacggctcgggccaccggcgcacggtgcgggtgcgcaagggcaacacggtgcagcagttcctgaagaaggcgctgcaggggctgcgcaaggac

SEQ ID NO: 397702 - DNA, 120 bp, Artificial Sequence
  ENSG00000145945_9 (sequence is synthesized)
ttcctggagctgcgctccgccggcgtggagcagctcatgttcatcaaggaggacctcatcctgccgcactaccacaccttctacgacttcatcatcgccagggcgaggggcaagagcggg

SEQ ID NO: 397703 - DNA, 120 bp, Artificial Sequence
  ENSG00000145945_10 (sequence is synthesized)
ccgctcttcagcttcgatgtgcacgatgacgtgcgcctgctcagcgacgccaccatggagaaggacgagtcgcacgcgggcaaggtggtgctgcgcagctggtacgagaagaacaagcac

SEQ ID NO: 397704 - DNA, 120 bp, Artificial Sequence
  ENSG00000145945_11 (sequence is synthesized)
atcttccccgccagccgctgggaggcctatgaccccgagaagaagtgggacaagtacaccatccgctaacacccgcctgccagagcggaaaccgggggtggggggagacactcatttcta

SEQ ID NO: 397705 - DNA, 120 bp, Artificial Sequence
  ENSG00000145945_12 (sequence is synthesized)
ggccccatcaccagtcacttgatttcgtgaccttgatttcttcccccaaatttaataaagacagagggttctcatgattcacattggttgtgctattgctgatgttatgctttggttgct

SEQ ID NO: 397706 - DNA, 120 bp, Artificial Sequence
  ENSG00000145945_13 (sequence is synthesized)
tggttggtcttttctgagtattttagtgttgccacctggatttgctgcattgctctgctgagctgtattgaaaccatgactgggcccactgtcagacagaaattagaataggaggcacat

SEQ ID NO: 397707 - DNA, 120 bp, Artificial Sequence
  ENSG00000145945_14 (sequence is synthesized)
tttttacctggtggttatgagcatggacttgggggccacagtgactgagtttgattcccgacacagcctcctccttgctgtgtagttttgggtaagcttattaaacccccatgcctcagt

SEQ ID NO: 397708 - DNA, 120 bp, Artificial Sequence
  ENSG00000145945_15 (sequence is synthesized)
ttggtcacctgtaaaaggaaataacaagagcacttactttataagattgatgtgagtattaagtgaattaatatttgtaaaacgcttagctcttaataaatgtttctgttgttattatta

SEQ ID NO: 397709 - DNA, 120 bp, Artificial Sequence
  ENSG00000145945_16 (sequence is synthesized)
acttcctgtgtccacggctgtcgcgagagcccggggcgagtgggcctctgctcgtgggtggttctcgtggaggtcagctcccgcgtgtctccgctcgacagggtgcttgggcagagccca

SEQ ID NO: 397710 - DNA, 120 bp, Artificial Sequence
  ENSG00000145949_0 (sequence is synthesized)
tgagagagaagatacttcctctcgtagtggacacttgtcttttcagaagatttatacgactgagagtcaaaacttttaccagagactttcatagtcagtttgaattctgcaaaatttctc

SEQ ID NO: 397711 - DNA, 120 bp, Artificial Sequence
  ENSG00000145949_1 (sequence is synthesized)
tttatcttctggaatgtatgctctagacttggagtggctcaagctcttcgatgtgatcctatcaatgtcaagagaaagaagcactgaagagtcataattgtgtcctgatttataaatcgg

SEQ ID NO: 397712 - DNA, 120 bp, Artificial Sequence
  ENSG00000145949_2 (sequence is synthesized)
agacagagggagacgaaaaccacactccagaaagtagcttaatcggactcactactaagatgttaaaagtgaagaggctggaagaattcaacacgtgttataacagcaaccagctggaga

SEQ ID NO: 397713 - DNA, 120 bp, Artificial Sequence
  ENSG00000145949_3 (sequence is synthesized)
aaatggccttttttcagtgcagggaagaggtggagaaagtgaagtgttttctggaaaaaaattctggggaccaggattcaagatctggacataatgaggcgaaggaggtgtggtcaaacg

SEQ ID NO: 397714 - DNA, 120 bp, Artificial Sequence
  ENSG00000145949_4 (sequence is synthesized)
ccgacctgacggaaaggatgcccgtcaaaagcaaaaggacatcagccctcgcagttgacatcccggctcctccggccccatttgatcatcgtattgtgacagccaagcaaggagcggtca

SEQ ID NO: 397715 - DNA, 120 bp, Artificial Sequence
  ENSG00000145949_5 (sequence is synthesized)
acagcttctatactgtgagcaagacagaaatcctaggaggagggcgtttcggccaggttcacaagtgtgaggagacggccacaggtctgaagctggcagccaaaatcatcaagaccagag

SEQ ID NO: 397716 - DNA, 120 bp, Artificial Sequence
  ENSG00000145949_6 (sequence is synthesized)
gcatgaaggacaaggaggaggtgaagaacgagatcagcgtcatgaaccagctggaccacgcgaacctcatccagctgtacgatgccttcgagtctaagaacgacattgtcctggtcatgg

SEQ ID NO: 397717 - DNA, 120 bp, Artificial Sequence
  ENSG00000145949_7 (sequence is synthesized)
agtatgtggatggtggggagctgtttgaccgcatcatcgatgagagctacaatttgacggagcttgataccatcctgttcatgaagcagatatgtgaggggataaggcacatgcatcaga

SEQ ID NO: 397718 - DNA, 120 bp, Artificial Sequence
  ENSG00000145949_8 (sequence is synthesized)
tgtacattctccacttggacctgaagcctgagaatatcctgtgtgtgaatcgggatgctaagcaaataaaaattattgattttggattggccagaagatacaaacccagagagaagctga

SEQ ID NO: 397719 - DNA, 120 bp, Artificial Sequence
  ENSG00000145949_9 (sequence is synthesized)
aggtgaactttggaaccccagaatttctcgcccctgaagttgtgaactatgattttgtttcatttcccactgacatgtggagtgtgggggtcatcgcctatatgctacttagcggtttgt

SEQ ID NO: 397720 - DNA, 120 bp, Artificial Sequence
  ENSG00000145949_10 (sequence is synthesized)
cgcctttcctgggtgacaatgatgctgagacgctgaacaacatcctggcctgcaggtgggacttagaggatgaagaatttcaggacatctcggaggaggccaaggagttcatctctaagc

SEQ ID NO: 397721 - DNA, 120 bp, Artificial Sequence
  ENSG00000145949_11 (sequence is synthesized)
ttctgattaaggagaagagttggcgaataagtgcaagcgaagctctcaagcacccctggttgtcagaccacaagctccactccagactcaatgcccagaagaagaagaatcgtggctctg

SEQ ID NO: 397722 - DNA, 120 bp, Artificial Sequence
  ENSG00000145949_12 (sequence is synthesized)
atgcccaggactttgtgaccaaatagtctacaggaggcagccatttggaaggaaaactgctgtggttgctgctgcttcgagaaaattttttgaaaaatcagcagttctgatgccttgacc

SEQ ID NO: 397723 - DNA, 120 bp, Artificial Sequence
  ENSG00000145949_13 (sequence is synthesized)
cctgtgatgacctggtagtcttagcagggggagccctcgaccctgaatgtgaacttgaactggagtgcctctgctgcgctcagaggaacacccagcgctgcggtctggtctcagggcgca

SEQ ID NO: 397724 - DNA, 120 bp, Artificial Sequence
  ENSG00000145949_14 (sequence is synthesized)
aacacatccctgcacccggtggtggtgatgttgggaagatgtttccctgccatcttgagattttttacttttttaaaaaaattttttgatcttagtcactggggcagggggtgcattatg

SEQ ID NO: 397725 - DNA, 120 bp, Artificial Sequence
  ENSG00000145949_15 (sequence is synthesized)
tctgccatttctcaaatgactacagctgtgacacttaagattgattggagattttaaaactggaggatgcatttagagggagaaagctacttccagccattagactatgcctttggaagg

SEQ ID NO: 397726 - DNA, 120 bp, Artificial Sequence
  ENSG00000145949_16 (sequence is synthesized)
ggcaattagatggccagaaagaattctgactcccatgcacccttggagacttagtttcacagactctgtcattttgatttggtctgtggtcacgtgactacaatggataaataatttgtt

SEQ ID NO: 397727 - DNA, 120 bp, Artificial Sequence
  ENSG00000145949_17 (sequence is synthesized)
tgctggaacagaagccgtctttgaattctccaacaagaggcatcagccactgtgtctttcatttattctgaattgtccccagcgtgcgttttcttccatgtagctgattctgtttttcac

SEQ ID NO: 397728 - DNA, 120 bp, Artificial Sequence
  ENSG00000145949_18 (sequence is synthesized)
atctatactccctgcacccttctgactgacagttcatccccacaaaacacattggttttgagaggtgatgcaaaaagtatctgtttatggttggactttgaaattctgacctttgaaata

SEQ ID NO: 397729 - DNA, 120 bp, Artificial Sequence
  ENSG00000145949_19 (sequence is synthesized)
atgtcaacagtcacaacaggtttcctcaagccccatttgtcaactaaaagagacggatctgcacctcctggagcaagatagcactgagctttcaacattgaagtgacttgggaaataaca

SEQ ID NO: 397730 - DNA, 120 bp, Artificial Sequence
  ENSG00000145949_20 (sequence is synthesized)
ttcaagcttctgggtaaacacatacaaacagtggcaaagaccaagtacagtctctcgcctgtgctgtctcatgggactcaatggtggtgaagaaatctcaatcggacaccagaggtgggg

SEQ ID NO: 397731 - DNA, 120 bp, Artificial Sequence
  ENSG00000145949_21 (sequence is synthesized)
gcaactctgcaagctcacctgctggacgtgagaatgttggaacgttccagttggaaggttcctatgcctagcctgtgtgccatttcatggcagatatgtaagaaaggaaatggccctact

SEQ ID NO: 397732 - DNA, 120 bp, Artificial Sequence
  ENSG00000145949_22 (sequence is synthesized)
gtagacagcttatggggcccagaaaggcactgggctttaaagagcgaaatgagtgtgtcatttccacatgaaggagaggcaaggaaaagccccacaaaattcctgttacccgctgaactc

SEQ ID NO: 397733 - DNA, 120 bp, Artificial Sequence
  ENSG00000145949_23 (sequence is synthesized)
agagatggggtttctccatgttggccagaatggtctcaattactgttgtcgcaatagcaatgaaaggcataagaattacttggtggcctcatgagggatggcagtttcactttgcatcag

SEQ ID NO: 397734 - DNA, 120 bp, Artificial Sequence
  ENSG00000145949_24 (sequence is synthesized)
tcatgagggatggcagtttcactttgcatcagctttcccccattatctctcagatccacttaaggaatccttacagcatgccgtgaatgtgtgcaacatccttattctcatctttaaggt

SEQ ID NO: 397735 - DNA, 120 bp, Artificial Sequence
  ENSG00000145949_25 (sequence is synthesized)
aaggaggaagtagagatagaaggaaatacgtgatttggtgaaggccacatgcgaattttgtggtcgtgttagttataaaactgactcctttccagcctttgctcttacattatgatgcgt

SEQ ID NO: 397736 - DNA, 120 bp, Artificial Sequence
  ENSG00000145949_26 (sequence is synthesized)
ttctttttctcctttggccttgcatttatccgaggttggtttcttatgttcctgtgatgtgactatgcttaagtgtttaatttagtttgcttaaaacacacacaccacacacacacacac

SEQ ID NO: 397737 - DNA, 120 bp, Artificial Sequence
  ENSG00000145949_27 (sequence is synthesized)
acacaaaaccctgtgactggagtgttatattactatgctatctttagctgatgatattcattgagcctggaaaaatacaagccagtgcatgcattaatacttagttagaccgcagagagc

SEQ ID NO: 397738 - DNA, 120 bp, Artificial Sequence
  ENSG00000145949_28 (sequence is synthesized)
tggcattcactcaaatgctaaacaggacacaggggtctgatttgaagcccctcgtggcagggcgttttctgtcctgtggtgtgcattctctaccaaatcaagcaggagatcttttgcacg

SEQ ID NO: 397739 - DNA, 120 bp, Artificial Sequence
  ENSG00000145949_29 (sequence is synthesized)
acgtgcaatttgcatccaccttcccttctgactcaggttggcagataaactgtccccagaccctgccacacatggaagagacagctcaggccaaatacaggcatgatttctttgccaagt

SEQ ID NO: 397740 - DNA, 120 bp, Artificial Sequence
  ENSG00000145949_30 (sequence is synthesized)
taatgcactgatgaccctgcagtgagtgggtgtgatttttgttttgttttgaggtttagaaaggagactgtactttgaaaatggatcttgtttgattctgtagttaaatttccacatttg

SEQ ID NO: 397741 - DNA, 120 bp, Artificial Sequence
  ENSG00000145949_31 (sequence is synthesized)
gaatgggaaggcatctccatgccagcagggtgccttttatatgagtgctgagggtagtttgcattgcagagttcatgattacagtctagagttacttgaaatgggagattatcagtctag

SEQ ID NO: 397742 - DNA, 120 bp, Artificial Sequence
  ENSG00000145949_32 (sequence is synthesized)
tgttcatcccgcccctgctccatgtccttgtgtggctgctccagcgagagctggtaactaggtagactgctgctctaatggggaaagggggctttgcaaagccgaggaatcaagccagat

SEQ ID NO: 397743 - DNA, 120 bp, Artificial Sequence
  ENSG00000145949_33 (sequence is synthesized)
gcgagcatggactcagaaaagctgagtctggctagaccagggctatggagatcaatttttccaacaggtcattaggatttgggaggctgtatttctcctccaccctcttaatggatggta

SEQ ID NO: 397744 - DNA, 120 bp, Artificial Sequence
  ENSG00000145949_34 (sequence is synthesized)
tggctttgctcactcactaggcagttcccactttctttagcaaatggaggaaattaagcaccgatgtagcacttcccactgcctggagagaaataaacctcgcaagttattaaggagaag

SEQ ID NO: 397745 - DNA, 120 bp, Artificial Sequence
  ENSG00000145949_35 (sequence is synthesized)
gcatgcctcattggtaatttggaagacaccaacacttacccagaatctgttgctatttaaaaatcagggagaggagggcacatgtccccatttgctacattacaaactttggacgagact

SEQ ID NO: 397746 - DNA, 120 bp, Artificial Sequence
  ENSG00000145949_36 (sequence is synthesized)
ctcatctgaactaacttggggaaacaatttctaggttgaagctggtaacactcatgtctgttgagtgccataagtttgttttcagttatttcctctaacttgatattaatttgctttctt

SEQ ID NO: 397747 - DNA, 120 bp, Artificial Sequence
  ENSG00000145949_37 (sequence is synthesized)
tcctcaaaaatgtaagtaggcatgttgccattgttgtggcttgctttgatgtatgtttggaaagatgtgtgaatacttaatttttatccattttatggaaattagcttagcaattttttt

SEQ ID NO: 397748 - DNA, 120 bp, Artificial Sequence
  ENSG00000145949_38 (sequence is synthesized)
ttctcttttaagaatcaaaatatggatttgatactaggaacagaatctgctctttatttcattccttttttgtctcttctgcttcctctgcccctcccccagccacgcagcacgggtgcc

SEQ ID NO: 397749 - DNA, 120 bp, Artificial Sequence
  ENSG00000145949_39 (sequence is synthesized)
agtgtgcatgcgtgtgctgggggccaaatgacagaaccccggttgaaagtccgcttgtaaaagcacaagtgagaggcagcatcaggcccctggagggctgtggtcctcggactcggttct

SEQ ID NO: 397750 - DNA, 120 bp, Artificial Sequence
  ENSG00000145949_40 (sequence is synthesized)
ttcctgtcccctggccgtcctgtcatccctgtgtgctgcagcatcaccacggcctacttcccaatatccacaaagcttcgcctttgcttttgcactctcttttacatttttttacttctt

SEQ ID NO: 397751 - DNA, 120 bp, Artificial Sequence
  ENSG00000145949_41 (sequence is synthesized)
tcctttttcttaagttcggatccaagtttgtcttcttatccatcaccatgctccctgaaagcctttttgagattaagaaattttcttaccaggaggcaactttccgtctgtcctaaaggg

SEQ ID NO: 397752 - DNA, 120 bp, Artificial Sequence
  ENSG00000145949_42 (sequence is synthesized)
aagtgggtgctggatttattagatattgggttcctggattaagatgacttcctcacatagcttggagtctgcagtttctcagttagaagtgttctatatttctttttgctccattttagt

SEQ ID NO: 397753 - DNA, 120 bp, Artificial Sequence
  ENSG00000145949_43 (sequence is synthesized)
gcgctgtgctttgtataagtggtctttctatgggcagtttcaccttccatgaaggcttataactcaaccactactacccattcagaagagcagaaagcatctgctgtgtgagcgttcata

SEQ ID NO: 397754 - DNA, 120 bp, Artificial Sequence
  ENSG00000145949_44 (sequence is synthesized)
tgttacctaatgtgtattttgctgtcgtctcagctgatagatgtcagtgagtctttctgactaggtttattggtgttgataagaaattaaaaaaaggattcataacgtggtgattgtgtc

SEQ ID NO: 397755 - DNA, 120 bp, Artificial Sequence
  ENSG00000145949_45 (sequence is synthesized)
tatcatgtatattttaaatttctgaacgtactttcatttagctgtttttctttgctttctaaagatgtataacaatcatgtatatgtattatattgaagaataaacatggaccttattta

SEQ ID NO: 397756 - DNA, 120 bp, Artificial Sequence
  ENSG00000145949_46 (sequence is synthesized)
acccactcctcagggcagagcaaagggtgacactgcttgagaagtgctggtgctagatcagggcagggaaggaacatataagccaagcaacatccacagctgctcccaaagaatggactt

SEQ ID NO: 397757 - DNA, 120 bp, Artificial Sequence
  ENSG00000145949_47 (sequence is synthesized)
cacactcagaagaaaagacgtctgggttgtaggtagcgtgtgccttctctcgtcttcagttctctggtgcttgatccggttcgtgatgacccggggaggccactggcagactcctgctct

SEQ ID NO: 397758 - DNA, 80 bp, Artificial Sequence
  ENSG00000145975_0 (sequence is synthesized)
ggtggggaagcccgcggagccgcagccccggccccggaaggtctctctgggccccgggcccgactcccacccctgcgccg

SEQ ID NO: 397759 - DNA, 120 bp, Artificial Sequence
  ENSG00000145975_1 (sequence is synthesized)
ctgcactgccgaccgggctgcgctcaaggccgccagccgcccgccgccctctttgtccccccgctgcaggaaggccgcggcagagggggcgccctccaagccgtcagccacgcacgcgga

SEQ ID NO: 397760 - DNA, 120 bp, Artificial Sequence
  ENSG00000145975_2 (sequence is synthesized)
gcgcaccgggagagcacgccggggaggacacgtgggccttcgcgcggattttaaggaaacagagcaacagctacaacaaaatggggagaagaaatgagaactgtgctaacagcctacgtg

SEQ ID NO: 397761 - DNA, 120 bp, Artificial Sequence
  ENSG00000145975_3 (sequence is synthesized)
tgtcaaacatctctcaggagaacttatctcactggaatttggattcagaagtacctgtttctgaaaataaaaacctcccagctggaagggatggagcagcaggtggcaaaattaacaaga

SEQ ID NO: 397762 - DNA, 120 bp, Artificial Sequence
  ENSG00000145975_4 (sequence is synthesized)
actatttggaaattccagtggagcaactgatgctagaacctaatttgtcggtgcatagtcaaaaaagtacacagaatagtaaacaagggatctttcaattatggaattgtcctcttaatg

SEQ ID NO: 397763 - DNA, 120 bp, Artificial Sequence
  ENSG00000145975_5 (sequence is synthesized)
aaggaagtaccatagagaagagggaattcaaaaaatcttcagtggaaactggctttaatgtaatcaatcatcctataagggtcttcactctgaaccacccattaacaattgcttcagttg

SEQ ID NO: 397764 - DNA, 120 bp, Artificial Sequence
  ENSG00000145975_6 (sequence is synthesized)
ataagcaagttggtccttaccctggactgccaatgccattaggtctctgctggccctatgctgatggagacttttttaagaacagaaatgagattcatgttagttcatgttcaactatag

SEQ ID NO: 397765 - DNA, 120 bp, Artificial Sequence
  ENSG00000145975_7 (sequence is synthesized)
aaaacaatgatggtgaaacattacctgctccaaattggaatttgaaacatggaaacagcagtgtggaagaaaatttcacagatgaaagtgatttatcagaaaatgagaagacaaatgata

SEQ ID NO: 397766 - DNA, 120 bp, Artificial Sequence
  ENSG00000145975_8 (sequence is synthesized)
ctttactcagctattttaaaaaggtggacctgaacttgaagccagaaacaataaaaaatgttgaggaacctttcaccgaggagccaaatgaagtatttccatatcctgattttctccctc

SEQ ID NO: 397767 - DNA, 120 bp, Artificial Sequence
  ENSG00000145975_9 (sequence is synthesized)
agacttgcacaatttagccctctccaaatctgacaattggaaagtgacagtggaccctgcagaaacctctgttgaacacttgataactcgtttactggaactagaacgattacaacatat

SEQ ID NO: 397768 - DNA, 120 bp, Artificial Sequence
  ENSG00000145975_10 (sequence is synthesized)
gactattcaaaaagagaggccaagactacaaacgactttctgtactccagcagttactgaacgaccctcttcctccaaagctacaccaaaagtgagacagccaaaactttgcgactcttt

SEQ ID NO: 397769 - DNA, 120 bp, Artificial Sequence
  ENSG00000145975_11 (sequence is synthesized)
gagtcttcagataccttgtgtagataaaagtcaagaaaaaagtaaaaacaactctggttcttgtaagcttgaacaaaatgctttaaaacggaattggagcaatgctggcaaatatagatg

SEQ ID NO: 397770 - DNA, 120 bp, Artificial Sequence
  ENSG00000145975_12 (sequence is synthesized)
gaattctagaccactgtctctaaaaagttcttccaccccaaaacaattgattgaaacttatgataagaatcccaaaagttctattttaagtccatgccaagaactctcattcaaacctac

SEQ ID NO: 397771 - DNA, 120 bp, Artificial Sequence
  ENSG00000145975_13 (sequence is synthesized)
tattggccatacaaatcaatcaatggttaaaatggtctccacaagatgtctgccatggaggtctccaatgccagtttcacctatacctctgacttttcccgaaaatcagaaggaagaaat

SEQ ID NO: 397772 - DNA, 120 bp, Artificial Sequence
  ENSG00000145975_14 (sequence is synthesized)
taaggcaccgaagagaaactttgggaccaaaaagaaactttaccgacaaaatatagtgttgaatagaccattctctattcagaagctaaactgtttgtcgccttcccttattgctaagga

SEQ ID NO: 397773 - DNA, 120 bp, Artificial Sequence
  ENSG00000145975_15 (sequence is synthesized)
taagtgctgctcacccattgaacaaaaataactcttttctttcatacatctcaatgtgaacacatctactctaagaagcccaactaagatatggttaattattccaagacacaggtacta

SEQ ID NO: 397774 - DNA, 120 bp, Artificial Sequence
  ENSG00000145975_16 (sequence is synthesized)
ttaacagtcccccaaaatcaccaaacagttgcttgatgtgatatggagtagaacttgtgaaaagcactgctgagatgtctatatataaacccacaggcttctatactgacatatttcaca

SEQ ID NO: 397775 - DNA, 120 bp, Artificial Sequence
  ENSG00000145975_17 (sequence is synthesized)
atcttttgcatgttgtgtttcaagtaaatggttcacttggtagactattctattcaaaaggctactcttttttcagtgattgttttccagtataattccatcaataaatggtataattga

SEQ ID NO: 397776 - DNA, 120 bp, Artificial Sequence
  ENSG00000145975_18 (sequence is synthesized)
atgcccagattaacacagagggttgctgtgtctcctgaataccttcttcttccccctcgccatggtgggtgtgacaagatcagctggcttccagaaggcaaggtgttcagtaatgttcac

SEQ ID NO: 397777 - DNA, 120 bp, Artificial Sequence
  ENSG00000145975_19 (sequence is synthesized)
agagagaagattagctccaagttttttaaggaaagcattctaaagaaagtgttctgttcacaacaaatgaggtgggaggggtctgacgaccagaaagggacttcaagttacacctttcct

SEQ ID NO: 397778 - DNA, 120 bp, Artificial Sequence
  ENSG00000145975_20 (sequence is synthesized)
gagaaaaccagcccattgaaaatatcctgccaagtcatttggggatttgtggcagaaactccagtcttgcgtctggacatggaccatttctggggaaaactgagagctttgctaaaagga

SEQ ID NO: 397779 - DNA, 120 bp, Artificial Sequence
  ENSG00000145975_21 (sequence is synthesized)
agaggggaaagcgggggcgcgcgtatccagtggtattttcccatctggtactttgtagaagccttgctcccagtatgtacctaattaaggctccacagacctacgaggccccaagagaga

SEQ ID NO: 397780 - DNA, 120 bp, Artificial Sequence
  ENSG00000145975_22 (sequence is synthesized)
ggttacatcagtgcagtcctcagcagaactgaggaaagagcttcatcgtccaaaactgaggaaatgcccagattaacacagaatagtaaacaagggatctttcaattatggaattgtcct

SEQ ID NO: 397781 - DNA, 120 bp, Artificial Sequence
  ENSG00000145975_23 (sequence is synthesized)
cttaatgaaggaagtaccatagagaagaggtcaccatagtgacagctaatcaacatgatcctttcatttctcaactcgtcttcagataaagcaaaggacggcataagacagacaatagag

SEQ ID NO: 397782 - DNA, 120 bp, Artificial Sequence
  ENSG00000145975_24 (sequence is synthesized)
ttcatttctcaactcgtcttcagataaagcaaaggacggcataagacagacaatagagggaaggagtttaagttgttattggtgcatacaacacaatgaagaatcaaagccatgcctcca

SEQ ID NO: 397783 - DNA, 120 bp, Artificial Sequence
  ENSG00000145975_25 (sequence is synthesized)
gcatgcctacttcagatcactacaagagttcctgttgtcctatcaactgctgatgattttaacattaagtttttccaattgtagtcccgcatgacaaataccgcatgactggcatccaaa

SEQ ID NO: 397784 - DNA, 120 bp, Artificial Sequence
  ENSG00000145979_0 (sequence is synthesized)
gcggcggcggcagcggcagcggcagcggcgctgagttttgtctcccgggccgtctgggcgcgcgcgggtgtcccagaatgaaatatgactgaggactctcagagaaactttcgttcagta

SEQ ID NO: 397785 - DNA, 120 bp, Artificial Sequence
  ENSG00000145979_1 (sequence is synthesized)
tattatgagaaagtggggtttcgtggagttgaagaaaagaaatcattagaaattctcctaaaagatgaccgtctggatactgagaaactttgtacttttagtcagaggttccctctcccg

SEQ ID NO: 397786 - DNA, 120 bp, Artificial Sequence
  ENSG00000145979_2 (sequence is synthesized)
tccatgtaccgtgcattggtatggaaggtgcttctaggaatcttgcctccacaccacgagtcccatgccaaggtgatgatgtatcgtaaggagcagtacttggatgtccttcatgccctg

SEQ ID NO: 397787 - DNA, 120 bp, Artificial Sequence
  ENSG00000145979_3 (sequence is synthesized)
aaagtcgttcgctttgttagtgatgccacacctcaggctgaagtctatctccgcatgtatcagctggagtctgggaagttacctcgaagtccctcttttccactggagccagatgatgaa

SEQ ID NO: 397788 - DNA, 120 bp, Artificial Sequence
  ENSG00000145979_4 (sequence is synthesized)
gtggaagatagtgtcgactgttactggatcacccgacgctttgtgaaccaattaaataccaagtaccgggattccttgccccagttgccaaaagcgtttgaacaatacttgaatctggaa

SEQ ID NO: 397789 - DNA, 120 bp, Artificial Sequence
  ENSG00000145979_5 (sequence is synthesized)
gatggcagactgctgactcatctgaggatgtgttccgcggcgcccaaacttccttatgatctctggttcaagaggtgctttgcgggatgtttgcctgaatccagtttacagagggtttgg

SEQ ID NO: 397790 - DNA, 120 bp, Artificial Sequence
  ENSG00000145979_6 (sequence is synthesized)
gataaagttgtgagtggatcctgtaagatcctagtttttgtagctgtcgaaattttattaacctttaaaataaaagttatggcactgaacagtgcagagaagataacaaagtttctggaa

SEQ ID NO: 397791 - DNA, 120 bp, Artificial Sequence
  ENSG00000145979_7 (sequence is synthesized)
aatattccccaggacagctcagacgcgatcgtgagcaaggccattgacttgtggcacaaacactgtgggaccccggtccattcaagctgaacgcacccgctggttgtggaccgtctgcca

SEQ ID NO: 397792 - DNA, 120 bp, Artificial Sequence
  ENSG00000145979_8 (sequence is synthesized)
ggcaccacagtgagcattgtgttcttggcatgtgatctgggaaactgattgaataatacacttttcttgctttggtgctcaaagtggtttttttcccccaataaaattatttaattgaaa

SEQ ID NO: 397793 - DNA, 120 bp, Artificial Sequence
  ENSG00000145979_9 (sequence is synthesized)
ctcctggccctgggccccaacggtgcccgcctgcccggcggtcggtcagcgcacagggcacggcttcctctgcttctcccggaccacttagtctcaacccgggtgtgtttgcactactag

SEQ ID NO: 397794 - DNA, 120 bp, Artificial Sequence
  ENSG00000145979_10 (sequence is synthesized)
ctgagtttgagacgctggctgagatcaaatgataagaattccaatttttgttttcctaagtctttcatctgctaatctacccaacatgaaccacgggccacatgaagggccagacacatt

SEQ ID NO: 397795 - DNA, 120 bp, Artificial Sequence
  ENSG00000145979_11 (sequence is synthesized)
tttccaaggactggcatgtaataaaatatcctcaaaacaacaagcaagttgggcgtgacttagactttcactgcccatgtagaaggcactgtacattcttgcagcatctcagttggccag

SEQ ID NO: 397796 - DNA, 120 bp, Artificial Sequence
  ENSG00000145979_12 (sequence is synthesized)
caagaggtgagtcagaaaaaaaccattcagcagccacatggaagtggggctcactgggcacaaggcaaaactgtgaagaagataaagtgtctgtggttctgcattgactctattccctgg

SEQ ID NO: 397797 - DNA, 120 bp, Artificial Sequence
  ENSG00000145979_13 (sequence is synthesized)
agtcctcccctctcgagttcctagaattatgttatcactcttgctctatctcattcctatcaagacctgttttagaaatgggtgccacagactcagttacattcaaatgtaaacccattc

SEQ ID NO: 397798 - DNA, 120 bp, Artificial Sequence
  ENSG00000145979_14 (sequence is synthesized)
attcatttagcaagttacttattagtgccagtgctgtgtcaggttctacattaggtaccagagtacagtgatgagcaaaaccagtccctgcccttctggaacagagaagactggaagagg

SEQ ID NO: 397799 - DNA, 120 bp, Artificial Sequence
  ENSG00000145979_15 (sequence is synthesized)
atgggggtagccattaatcaaacagtcacagaaatgagtgcaaaatgtagctggagtaagggcttccatggtgaggcacttggtgcagggatctctggatctgaccaaatcaggaggtca

SEQ ID NO: 397800 - DNA, 120 bp, Artificial Sequence
  ENSG00000145979_16 (sequence is synthesized)
ggaaaggcttccaggaggaagtgacactgtgcccagagctcagggatggaagaaggatgctccttctgggcagagagtaaggagagaagattggtgggaaggagggcaggggccagatgc

SEQ ID NO: 397801 - DNA, 120 bp, Artificial Sequence
  ENSG00000145979_17 (sequence is synthesized)
cgtgggtgtgatttggatctgtgtccctgccaatcacatgttgaattgtagtccccagtgttggaggtggagcctggtgggacatgattggatcatgggggtagtttttcatgaacggtt

SEQ ID NO: 397802 - DNA, 88 bp, Artificial Sequence
  ENSG00000145979_18 (sequence is synthesized)
gacatgattggatcatgggggtagtttttcatgaacggtttagtaccaaccacttggtgctgttctagtgagttgagtgcattctcgc

SEQ ID NO: 397803 - DNA, 120 bp, Artificial Sequence
  ENSG00000145979_19 (sequence is synthesized)
atgtgagactccttgctttccctctgttttccaccatgattggaagcttcctgaggcctcaccagaggcagatgccagcatcatgcttcctgtgcagcctgcagaactgtgagccaatta

SEQ ID NO: 397804 - DNA, 120 bp, Artificial Sequence
  ENSG00000145979_20 (sequence is synthesized)
caacagggaccgaccaaatcgtcatgcagctgtttggatgctttaaaaaaataaatccccacactcattacgcgttttatgctgctgacttttttatttttaagacatctgctcccgaaa

SEQ ID NO: 397805 - DNA, 120 bp, Artificial Sequence
  ENSG00000145979_21 (sequence is synthesized)
gctcagagccctttagcatttcattttctaaacgaatcctaatctttcctgtgactgaatcggttcagaggatatcttttcaataaggaaggaagccctcccctgctcactggggacgtc

SEQ ID NO: 397806 - DNA, 120 bp, Artificial Sequence
  ENSG00000145979_22 (sequence is synthesized)
gcagggtttttaaacctaaagatttactcttttgtgcacagacgctggaagcatttggactcacttttccccttcgtctttctctccctttctgtctttctgtgtctcctccaagaatga

SEQ ID NO: 397807 - DNA, 120 bp, Artificial Sequence
  ENSG00000145979_23 (sequence is synthesized)
gcggcggcggcagcggcagcggcagcggcgctgagttttgtctcccgggccgtctgggcgcgcgcgggtgtcccagactcacttttccccttcgtctttctctccctttctgtctttctg

SEQ ID NO: 397808 - DNA, 120 bp, Artificial Sequence
  ENSG00000145979_24 (sequence is synthesized)
acttagtctcaacccgggtgtgtttgcactactagaggtgaagcatccatcatagagagaatgggacctggggtcttggaccagggtgtttttacttttcccatcaggtggacgcgcatg

SEQ ID NO: 397809 - DNA, 120 bp, Artificial Sequence
  ENSG00000145979_25 (sequence is synthesized)
tgctttttgggaaatgcatcagatcttttctgttcttgaaacgccaaatctaacttggtctttttttggatgaattaccgccagtattatgaaggttactgtgaaggaacttgagaccac

SEQ ID NO: 397810 - DNA, 120 bp, Artificial Sequence
  ENSG00000145979_26 (sequence is synthesized)
ctcaggctgaagtctatctccgcatgtatcagctggagtctgggaagttacctcgaagtccctcttttccactgaagctgggaagtccaggattcaggggctacatctggtgaaggcctt

SEQ ID NO: 397811 - DNA, 120 bp, Artificial Sequence
  ENSG00000145979_27 (sequence is synthesized)
ttccttgccccagttggaaggcataaatgttggctgactgtcaaatgcttgtgggaggtccccacggagtggagaagcgggagactcagcttaatcacagacaaagttgtgcatgagaga

SEQ ID NO: 397812 - DNA, 120 bp, Artificial Sequence
  ENSG00000145979_28 (sequence is synthesized)
ccgagtagctgggattacaggtcccttcagagccgtgaaggcgggcatcctgtgacacagctgacacagcatggagccttcatctcctatgtgcgtttcttaggtcactctgaggggtgg

SEQ ID NO: 397813 - DNA, 120 bp, Artificial Sequence
  ENSG00000145979_29 (sequence is synthesized)
ggccacaagctaccacctacagaattgatacctttagttcaaagccattgaccaacccaggttcatgaattttcaggcagaaggtaccaagacaaccccattaggcaactaggaagacag

SEQ ID NO: 397814 - DNA, 120 bp, Artificial Sequence
  ENSG00000145979_30 (sequence is synthesized)
gccaggaaaggcctacgatgtcgtcattacagctgccaccgtcagagggttcattatgtgctcagaggtgcacagggcctcactggctgctggacagaacaggggctgctcccaggacca

SEQ ID NO: 397815 - DNA, 120 bp, Artificial Sequence
  ENSG00000145979_31 (sequence is synthesized)
ggcagggtggggctggaaaccaacccaaggctctcaaagctccagggctgagccatggcatctctgtgccctgttccccaccacccaacaccgagcagttcctcaaatggctgaaagctc

SEQ ID NO: 397816 - DNA, 120 bp, Artificial Sequence
  ENSG00000145979_32 (sequence is synthesized)
agaaaatcagttttaaaacaaactattggaggatgttttcttataccactagacattttttttgtttaacaatcgcaatagattaaatttaaaaaaatatttaggagaacatagttccag

SEQ ID NO: 397817 - DNA, 120 bp, Artificial Sequence
  ENSG00000145979_33 (sequence is synthesized)
aatacagggaaaaataagaacctatgggaaaacaagttgatttctgaaaagtttcaaaactatgaaatgaccaacctgttagaattggtcaagtagttctttaatttgcaactatgtggc

SEQ ID NO: 397818 - DNA, 120 bp, Artificial Sequence
  ENSG00000145979_34 (sequence is synthesized)
atgttttgccttaaaaacttttggtggctccctgttgttattagaataaaagtgacacatctttacttggcattcatggccatgcacattctgacccaaccttcttactttttgtttttt

SEQ ID NO: 397819 - DNA, 120 bp, Artificial Sequence
  ENSG00000145979_35 (sequence is synthesized)
taaaatacgttttattttgaagtaatttcaaacttccagaaaagttgcaagaatactaccaagaatttgcatataccctttacccagattctccagttgttaacattatgcaactttttt

SEQ ID NO: 397820 - DNA, 120 bp, Artificial Sequence
  ENSG00000145979_36 (sequence is synthesized)
ctacatccaacattatttaaaaagttaaaaaataaaaaattgtaggtgctaagtagctttaagcatctgttttgctttgtgtgcatctgttttgctttgttgttttaaaacgtatttttt

SEQ ID NO: 397821 - DNA, 120 bp, Artificial Sequence
  ENSG00000145979_37 (sequence is synthesized)
taaacacattttttttttcctaaatcatttgagagtaagatgcagacaggattccctattacctcagattccttcagtgtacacttcctaaagacaggacacccctgtagatagccatag

SEQ ID NO: 397822 - DNA, 120 bp, Artificial Sequence
  ENSG00000145979_38 (sequence is synthesized)
tacagtcctcaaaactaagacattaacattgatacaatattaacgtaatctaccagctccatttgaatttcaccaataatgccttcacaaataatcaaacggtcaaagttctgggtgagg

SEQ ID NO: 397823 - DNA, 120 bp, Artificial Sequence
  ENSG00000145979_39 (sequence is synthesized)
actggatcctggtttaggcattgcactgggttatcatattgctttagtctcctttgacttgggacagttctgtctttttttatctttcatgcctttgacatttttgaagggcataatcag

SEQ ID NO: 397824 - DNA, 120 bp, Artificial Sequence
  ENSG00000145979_40 (sequence is synthesized)
gggataccaagtaggtgatgctgtgtccttctcagtgtctcttatcaggaggcacatagtgtgaatttgccccataagaggtagtgttaacttggatcacttggcgagggtgctgcctgc

SEQ ID NO: 397825 - DNA, 120 bp, Artificial Sequence
  ENSG00000145979_41 (sequence is synthesized)
tggagttttccgctggaaagtttttacttttccctttgtaattgctatttctctttgtggggagacactttaaaactgctatgtaaacatcctattccttattaaacttttgctcatgag

SEQ ID NO: 397826 - DNA, 120 bp, Artificial Sequence
  ENSG00000145979_42 (sequence is synthesized)
tattctcatttgacgatttctaaaaaatttttattttttaactttttaaataatgttggatgtagaaaaaagttgcaaaaatagtgcagtgttctgaaataccttcacccagtgtcctca

SEQ ID NO: 397827 - DNA, 120 bp, Artificial Sequence
  ENSG00000145979_43 (sequence is synthesized)
aatgttacatctcatacaaccgtaatgtaatgatcaaaaccggagaatcacaatactgacagctactctgtaggcctcactgggattttgctgatgtcccactgatgctcttcttctgat

SEQ ID NO: 397828 - DNA, 120 bp, Artificial Sequence
  ENSG00000145979_44 (sequence is synthesized)
gatgtcccactgatgctcttcttctgatccaagatccagttccggatcacacattacatttagctgccacgtcttagtctttaatctggaagagttctttttttttttttttttttcttt

SEQ ID NO: 397829 - DNA, 120 bp, Artificial Sequence
  ENSG00000145979_45 (sequence is synthesized)
gtgagccactgtgcctggcctggaacagttcttcagtctttgtctttcatgaccttgacacttttgaagagccctggccagtagagcatttctcaatttgggtctgtctcatgtttctcc

SEQ ID NO: 397830 - DNA, 120 bp, Artificial Sequence
  ENSG00000145979_46 (sequence is synthesized)
atgattaaactctggtcacgcattattggcaggaatatcacagaagtatgggactcattactgtgctgctaactttgatcacttgggtaagatggtgtctgtggagtttctccactgtaa

SEQ ID NO: 397831 - DNA, 120 bp, Artificial Sequence
  ENSG00000145979_47 (sequence is synthesized)
ggttactattttcctctttgtaattaataaataactgtggagaagtactttgagacttgtaagtagccatccactaatgattcttgcctgaaccaatttttactatgctgattgccaaat

SEQ ID NO: 397832 - DNA, 120 bp, Artificial Sequence
  ENSG00000145979_48 (sequence is synthesized)
ggtgatctaactccttcattctttctgcatgtattagttggcattcttctctaaggaagagttttcccttctccttctttatttatatcagtatgaaattaaagtgttatttgtttggct

SEQ ID NO: 397833 - DNA, 120 bp, Artificial Sequence
  ENSG00000145979_49 (sequence is synthesized)
cagaggcaagtaggtctttcgaagacatattgaaggcttggcgttagagcagagttctggcctttcatgtggtcatccctcagattataaatttgctttagaacaatacagtaatttgaa

SEQ ID NO: 397834 - DNA, 120 bp, Artificial Sequence
  ENSG00000145979_50 (sequence is synthesized)
gctcagtcctccagcagctaccgtaacagcacatgattctgcttattcttgaatatacaattagaaaaattaagggccctcagtgcgttagatgctgtgaagcagtcacacctcaaatgg

SEQ ID NO: 397835 - DNA, 120 bp, Artificial Sequence
  ENSG00000145979_51 (sequence is synthesized)
tctccatgagtttatataagcgtcagccccttttttccagaaatgtgacaaatcttcctccagtagaaatcttagtgttagtttcatcatgatatctttaaagaagctgaaagcagtcaa

SEQ ID NO: 397836 - DNA, 120 bp, Artificial Sequence
  ENSG00000145979_52 (sequence is synthesized)
agatttgactaagttcttccagtcagtttcagacatgtctgggtatttcggagtccaggtgccacccattaagactttgtgatgtagtagaacagtaactcttaaaataagttatggcac

SEQ ID NO: 397837 - DNA, 120 bp, Artificial Sequence
  ENSG00000145979_53 (sequence is synthesized)
tgaacagtgcaatacacagagaacattataagataatatgtaactaagtgtatgaagtagaataccaacttttaggagttacaggaatgatcagaattattattttagagtggttataga

SEQ ID NO: 397838 - DNA, 120 bp, Artificial Sequence
  ENSG00000145979_54 (sequence is synthesized)
tcagtaactggctccttacgcccttggagaagtttaaggagtctgtccccagaatcactggcaatgaaattgaatttatcccatttcatatacatcttttgttgtcccttagtaggctat

SEQ ID NO: 397839 - DNA, 120 bp, Artificial Sequence
  ENSG00000145979_55 (sequence is synthesized)
aattatattagcattatggcatattagcagaatataaaccattagtttaggattttctttttcttcctcagaaatgtcaggttcacaacatgagggaatatgattttggtagattcctag

SEQ ID NO: 397840 - DNA, 120 bp, Artificial Sequence
  ENSG00000145979_56 (sequence is synthesized)
tggagcagtaatttttagtaaactttcctttctccttctagtgctgattgtatctagaatagatttcaaatggcttctgtattttgttgttgttttggtgattatttcataaaagttgtt

SEQ ID NO: 397841 - DNA, 120 bp, Artificial Sequence
  ENSG00000145979_57 (sequence is synthesized)
gcaagtcagattttcctgttacattagattatttcagagaaataattacatgattttagagaaataataccttagaatgtttcagagaataattataataatgattattttagggaaatt

SEQ ID NO: 397842 - DNA, 120 bp, Artificial Sequence
  ENSG00000145979_58 (sequence is synthesized)
taataatttgatttgattttgaatctagaaatgaagtcactttagcaagtgagattttcctgttacattagattatttcagagaaatcatacagtgtatttttacattataagaaacact

SEQ ID NO: 397843 - DNA, 120 bp, Artificial Sequence
  ENSG00000145979_59 (sequence is synthesized)
tttccctgaaaaagtttggcctaaagttggcctgagggttagtttgcatcctgtctttgggaaatgatggtctgagaccatctcgtgaatgtgtccacttagaaccagagtctcatcctc

SEQ ID NO: 397844 - DNA, 120 bp, Artificial Sequence
  ENSG00000145979_60 (sequence is synthesized)
catgtgactatcagcaggcatgtcaggaaaaggaataggtgggatctgtcattttacaatgagtaatttttgtcagttcaaaaggggttctgtattttggaggattttgtaagccatttc

SEQ ID NO: 397845 - DNA, 120 bp, Artificial Sequence
  ENSG00000145979_61 (sequence is synthesized)
atttctgttactgtctctggtgtagtcccagttgggtttattaatatacagtattaacctagtatattgctgaaaaaggcaatggtaatgaaattaacttttccctcgctatgtatcttg

SEQ ID NO: 397846 - DNA, 120 bp, Artificial Sequence
  ENSG00000145979_62 (sequence is synthesized)
gaataccctttaccaggcaagaagtaggattaaagagacttatgcctgaatgattttcacagaatccaaaatctattcatttttaaaatagtattaacatttgaaaaatggcctggtaaa

SEQ ID NO: 397847 - DNA, 120 bp, Artificial Sequence
  ENSG00000145982_0 (sequence is synthesized)
gtcaaaatggcagcgcccagcgtgcgcgggtatctctgaagttggggtttaagattcttgcccgtgagagcgaacgagcctgccgtacttctgattttgaaacacctgggtctgggcttc

SEQ ID NO: 397848 - DNA, 120 bp, Artificial Sequence
  ENSG00000145982_1 (sequence is synthesized)
ccgggcgagcggtggaacctgtgagaagtttctacaatggtgggctcagctctcaggagaggtgcccatgcatatgtctacctggtgagtaaggccagtcacatctccagaggccatcag

SEQ ID NO: 397849 - DNA, 120 bp, Artificial Sequence
  ENSG00000145982_2 (sequence is synthesized)
caccaggcctggggatcgaggcctcctgcagcagagtgtgccacccaaagagctccaggcagtgtggtggagctgctgggcaaatcctaccctcaggacgaccacagcaacctcacccgg

SEQ ID NO: 397850 - DNA, 120 bp, Artificial Sequence
  ENSG00000145982_3 (sequence is synthesized)
aaggtcctcaccagagttggcaggaacctgcacaaccagcagcatcaccctctgtggctgatcaaggagagggtgaaggagcacttctacaagcagtatgtgggccgctttgggaccccg

SEQ ID NO: 397851 - DNA, 120 bp, Artificial Sequence
  ENSG00000145982_4 (sequence is synthesized)
ttgttctcggtctacgacaacctttctccagtggtcacgacctggcagaactttgacagcctgctcatcccagctgatcaccccagcaggaagaagggggacaactattacctgaatcgg

SEQ ID NO: 397852 - DNA, 120 bp, Artificial Sequence
  ENSG00000145982_5 (sequence is synthesized)
actcacatgctgagagcgcacacgtctgcacaccagtgggacttgctgcacgcgggactggatgccttcctggtggtgggtgatgtctacaggcgtgaccagatcgactcccagcactac

SEQ ID NO: 397853 - DNA, 120 bp, Artificial Sequence
  ENSG00000145982_6 (sequence is synthesized)
gctctgcgcataaacaagagacacacaccatggaggccgtgaagcttgtagagtttgatcttaagcaaacgcttaccaggctcatggcacatctttttggagatgagctggagataagat

SEQ ID NO: 397854 - DNA, 120 bp, Artificial Sequence
  ENSG00000145982_7 (sequence is synthesized)
gggtagactgctacttcccttttacacatccttcctttgagatggagatcaactttcatggagaatggctggaagttcttggctgcggggtgatggaacaacaactggtcaattcagctg

SEQ ID NO: 397855 - DNA, 120 bp, Artificial Sequence
  ENSG00000145982_8 (sequence is synthesized)
gtgctcaagaccgaatcggctgggcttttggcctaggattagaaaggctagccatgatcctctacgacatccctgatatccgtctcttctggtgtgaggacgagcgcttcctgaagcagt

SEQ ID NO: 397856 - DNA, 120 bp, Artificial Sequence
  ENSG00000145982_9 (sequence is synthesized)
tctgtgtatccaacattaatcagaaggtgaagtttcagcctcttagcaaatatccggctgtgatcaatgatatttcattctggttgccctctgagaattacgcagaaaatgatttctatg

SEQ ID NO: 397857 - DNA, 120 bp, Artificial Sequence
  ENSG00000145982_10 (sequence is synthesized)
acttagtccgaacaattggaggagacctggtggaaaaggttgatctcatagacaagtttgtacatccaaagacgcacaagaccagccactgctaccgcatcacgtaccgccacatggaac

SEQ ID NO: 397858 - DNA, 120 bp, Artificial Sequence
  ENSG00000145982_11 (sequence is synthesized)
ggactctgtcccagagagaggtcaggcacatccaccaggccttgcaggaggctgcagtccagctgttgggtgtggagggcaggttctgatgtcaccacttcactcaggctgcagccctct

SEQ ID NO: 397859 - DNA, 120 bp, Artificial Sequence
  ENSG00000145982_12 (sequence is synthesized)
tggggctccaggatttgctgaaagagaaaaagatatggtttgtgaactggggcatcaatcatcttttgataaatggatcagttttaggactttcagaaaataaaagatcgctcttgaaaa

SEQ ID NO: 397860 - DNA, 120 bp, Artificial Sequence
  ENSG00000145982_13 (sequence is synthesized)
acgcggcgggagggcggggaaataagaggactggccgcccgtgcatccagccaagctcctggcggacggatatcggaggcccaggcattcgagggacgtgcagttgcatcacggagagcc

SEQ ID NO: 397861 - DNA, 120 bp, Artificial Sequence
  ENSG00000145982_14 (sequence is synthesized)
tttgggaaccgtctggggtcttggcggagacatttgtgtttcgggggcagcgccccttcctacatccaggaggccgcgttgcccgggttaccgaaggccgccgcaccgacgccccgcccc

SEQ ID NO: 397862 - DNA, 120 bp, Artificial Sequence
  ENSG00000145982_15 (sequence is synthesized)
tccagaaatgagctgaagtcactcaaggaaggccttgggaactaaggtttggcccgatgggcagtgcactgtagacattcacatgcgctccagcactgaacactatgcgacctggcagga

SEQ ID NO: 397863 - DNA, 120 bp, Artificial Sequence
  ENSG00000145982_16 (sequence is synthesized)
agaggcgttagaggaattctgtggaaggtttgcagaggtcattgacccaggatgctgctggaaccccagcaggaggggaggtcccaggaatagcacatcgcttgtcctgcacaaagggaa

SEQ ID NO: 397864 - DNA, 120 bp, Artificial Sequence
  ENSG00000145982_17 (sequence is synthesized)
ccactgggagcccagactggaaaacaccatgcgcttcttactcctgctgcaaaggaagaggagagacctggagaaggctgcaacaagagcagttgagatgaccacgattaagaagacgtg

SEQ ID NO: 397865 - DNA, 120 bp, Artificial Sequence
  ENSG00000145982_18 (sequence is synthesized)
gctgcagaggtcagactccaaaaggactctcaaagggcaggtggcatctctacttaaccatgagggaacagaggctcagccagcatgttgagacaccagaattcaaaagcccagtatcct

SEQ ID NO: 397866 - DNA, 120 bp, Artificial Sequence
  ENSG00000145982_19 (sequence is synthesized)
gagcacaaccaatgcccctgggggaggcccacgggaccgttaggaaaataagacaggcacaggaaagagatgtccagcgtctgaagacaaagccacaatgaaagccaccattctggggtt

SEQ ID NO: 397867 - DNA, 120 bp, Artificial Sequence
  ENSG00000145982_20 (sequence is synthesized)
gggaaggtaaagaacttcaaaccagataaatgaagactgcagaagaaagaggaagaaatggaagttgctctctgacaggacaacatgaatttggcaaggggtggattaggccgagtgcta

SEQ ID NO: 397868 - DNA, 120 bp, Artificial Sequence
  ENSG00000145982_21 (sequence is synthesized)
tccacggtgatgaaacacagcagccggtagtcatgaaatatttatgaatggggagaggatgctgcattctgcagtgcagcacaggggaaaccgaagtttcaagaatactgtaatagcaaa

SEQ ID NO: 397869 - DNA, 120 bp, Artificial Sequence
  ENSG00000145982_22 (sequence is synthesized)
accctccattaattatcggaagcaagctgtaatgccagttcctatggcaacagggtccccaatggattttgtgcttttttttttttaagctgctcccatttactatggtacattgcattt

SEQ ID NO: 397870 - DNA, 120 bp, Artificial Sequence
  ENSG00000145982_23 (sequence is synthesized)
attttctatcggaggttttgtgcttgtcttctgcaaatgaattcatcctgtcctcacagtggctggtgtggagaccgacaggctggggcctggggaaggttaaagattatgcaactttga

SEQ ID NO: 397871 - DNA, 120 bp, Artificial Sequence
  ENSG00000145982_24 (sequence is synthesized)
gctaaatgctctgtaagcacattgatgactgctatgagcaccttcacttctgaggggaaaaggaggggagggcaggaaagaggtgtggaagggaataactagggtgcatggctaattaga

SEQ ID NO: 397872 - DNA, 120 bp, Artificial Sequence
  ENSG00000145982_25 (sequence is synthesized)
gggcatctatcccagcccccacacgcatggtctttggaatccaggcttgcaccagggaagagtccttgaacccagctgggctctccaacaacgtgcctgctgcagctgcagtggaagctg

SEQ ID NO: 397873 - DNA, 120 bp, Artificial Sequence
  ENSG00000145982_26 (sequence is synthesized)
ataattgctcagaaagctcagacacagagtcctctggggtaagggtgctggagagaacagtggcttggttcccagaggagcaggctgcccctcccagagaagcactccacctgtaggccc

SEQ ID NO: 397874 - DNA, 120 bp, Artificial Sequence
  ENSG00000145982_27 (sequence is synthesized)
aatctctctgcaccgccccccccccccacattgcttatcagctccccctcagtgtgaagtgggagtttaatctggtggccctttgaatgcgggtcttccaggggagatgttctgtgtttg

SEQ ID NO: 397875 - DNA, 120 bp, Artificial Sequence
  ENSG00000145982_28 (sequence is synthesized)
cctggccatgggctgctgttcacagaaacattctgtcccaggccacaggagcgcctcagagccaccctggggtgtgggcgaagcggtcaacagcggcttcctccatccttccccggatga

SEQ ID NO: 397876 - DNA, 120 bp, Artificial Sequence
  ENSG00000145982_29 (sequence is synthesized)
atgactgacaagttgatggcggagcaccccgccgctcactcaggaagaggctgcctccaggtggggagcttgtacgtttccctctcagggctgcagctgtggcttgggaggtgtcctgtc

SEQ ID NO: 397877 - DNA, 120 bp, Artificial Sequence
  ENSG00000145982_30 (sequence is synthesized)
tttttggtggcctcatgagggctgtgtgagtcctgataaatggcataggatggggagtccccttaatgggggacagtacaggtctcctgtccgtggggctattccaggttaaaaatagat

SEQ ID NO: 397878 - DNA, 120 bp, Artificial Sequence
  ENSG00000145982_31 (sequence is synthesized)
tctaccgctgcagaatgattatgctggctctactgtgctttctaagtcaccaaagggactcacaagcatgtgtgagtagaactgggaggatgccagaagagggatgaaataaaaattgtg

SEQ ID NO: 397879 - DNA, 120 bp, Artificial Sequence
  ENSG00000145982_32 (sequence is synthesized)
tacgtatatgtttctttttgtggaattctacctggagccataggagtacgacttaccactcaagagaaaggctgtgcccagagccaaggaggagctgtggagacgtttctcccaagtcat

SEQ ID NO: 397880 - DNA, 120 bp, Artificial Sequence
  ENSG00000145982_33 (sequence is synthesized)
ccgttctccctatttagacttcaaccttaggacggaccttcaggcatccaggccacctactgacctctctggcatgggtgggaaccgggagctcgttggtaagcaggaggattcaggact

SEQ ID NO: 397881 - DNA, 120 bp, Artificial Sequence
  ENSG00000145982_34 (sequence is synthesized)
atcgagcgaacaccacttcctccgtggcacgcaccgcgctgtgtctttgggctcatcatctcatcacctctgcacaggaagattatctcccccacttcgtgatgaggaaacggaggctcc

SEQ ID NO: 397882 - DNA, 120 bp, Artificial Sequence
  ENSG00000145982_35 (sequence is synthesized)
aaatggaaacacgaggttgctgattgaattctacgcatatctataggcatttcagaaagatctgtctggctcttttctgtaagaccattgcttaataaaaatgatggcttctaaatgtaa

SEQ ID NO: 397883 - DNA, 120 bp, Artificial Sequence
  ENSG00000145982_36 (sequence is synthesized)
gcgctgcctgagagagtttgcgggatttcaagggtgacttgatttcgcctgatcctggtcggcagggtggggtttcttggcattcctcaggccgggggatgcgacgtctgggtgtggagg

SEQ ID NO: 397884 - DNA, 120 bp, Artificial Sequence
  ENSG00000145990_0 (sequence is synthesized)
agagcctgagccggcctggggccgaggccgcccgagccgcgaggcgagcgaacatggcagcagaatgaggaggctggcgccgggtcgtggccgccgctgccgcgctgcagctcgggatcc

SEQ ID NO: 397885 - DNA, 120 bp, Artificial Sequence
  ENSG00000145990_1 (sequence is synthesized)
cagtccggcgcgctccgggccgcatccttagccggcctcctggcggccgcgggattatttcattcccaacggagagctaggaagaaaggagactcccccgcggagcggttccgtgctctg

SEQ ID NO: 397886 - DNA, 120 bp, Artificial Sequence
  ENSG00000145990_2 (sequence is synthesized)
gcagggtgtagacgtttgtctgtgcgattcgccggctgcgcaaacgacgcgggagagagccggtcccgggctgcggcggcgcggccgcggggatgagccggccatggagcggccttggcg

SEQ ID NO: 397887 - DNA, 120 bp, Artificial Sequence
  ENSG00000145990_3 (sequence is synthesized)
cgggagcgcagcctgagccggggctccagggggcttcgaagcctccggcgccctgggggggtccctgccgccgactccgggaaggacgcgagccccgcgtggcggacactgccgcagtca

SEQ ID NO: 397888 - DNA, 120 bp, Artificial Sequence
  ENSG00000145990_4 (sequence is synthesized)
ccccgcgtggcggacactgccgcagtcaccgttctgaggcgccccgagcttgctccgcctgcagctcggtgcgctctgggcacccgggcgccttgcccggtgcacggcggctggcgcacc

SEQ ID NO: 397889 - DNA, 120 bp, Artificial Sequence
  ENSG00000145990_5 (sequence is synthesized)
gcggctagattggctacaggagcggggtgcaggactggctagaggtgggtgtgtgcgcgcgttggactggagatccgagcagaagcagaaccaggcggctctgagcagccatgcttcccg

SEQ ID NO: 397890 - DNA, 120 bp, Artificial Sequence
  ENSG00000145990_6 (sequence is synthesized)
gggtgggcgtgttcggcaccagcctcacggcccgtgtcatcatcccgctgctgaaagacgagggcttcgcggtgaaggcgctgtggggccgcacgcaggaagaagcggaggagctggcca

SEQ ID NO: 397891 - DNA, 120 bp, Artificial Sequence
  ENSG00000145990_7 (sequence is synthesized)
aggagatgagtgtccccttctacactagccgcattgatgaggtgctgctgcatcaggacgtggacttggtgtgcattaacctgccgccgcccctcaccagacagatcgctgtcaaaaccc

SEQ ID NO: 397892 - DNA, 120 bp, Artificial Sequence
  ENSG00000145990_8 (sequence is synthesized)
taggcatcggcaagaacgtcatctgcgaccgcacggccacgccgctggacgctttccgcatgacctcggccgcccactactaccccaagctcatgagcatcatgggcaacgtgctgcgct

SEQ ID NO: 397893 - DNA, 120 bp, Artificial Sequence
  ENSG00000145990_9 (sequence is synthesized)
tcctgccggctttcgtgcgcatgaagcagctgatcgaggagggctacgtgggcgagccgctggtgtgtgaggtgcaggtgcacggcggcagcctgctgggcaagaagtacaactggagct

SEQ ID NO: 397894 - DNA, 120 bp, Artificial Sequence
  ENSG00000145990_10 (sequence is synthesized)
gcgacgacttgatgggcggcggcggcctgcactccgtgggcacctacatcatcgacctgctcaccttcctcaccggccaaaaggccgtcaaggtccacgggctgctcaagaccttcgtga

SEQ ID NO: 397895 - DNA, 120 bp, Artificial Sequence
  ENSG00000145990_11 (sequence is synthesized)
agcagactgaccacatcaagggcatccgacagatcaccagcgatgacttctgcaccttccagatggtgctggagggcggggtgtgctgcaccgtcaccctcaacttcaacgtgcccggcg

SEQ ID NO: 397896 - DNA, 120 bp, Artificial Sequence
  ENSG00000145990_12 (sequence is synthesized)
agttcaagcaggatgtcactgtggtgggctcagccgggcgcctgctggccgtgggcaccgacctgtacgggcagcgcaacagcgccccggagcaggagctgctggtgcaggacgccacgc

SEQ ID NO: 397897 - DNA, 120 bp, Artificial Sequence
  ENSG00000145990_13 (sequence is synthesized)
cggtgagcaactccctgcttccggagaaggccttcagcgacatcccctcgccctacctgcgcggcaccatcaagatgatgcaggcggtgcgccaggccttccaggaccaggacgaccggc

SEQ ID NO: 397898 - DNA, 120 bp, Artificial Sequence
  ENSG00000145990_14 (sequence is synthesized)
gcacgtgggatgggcggcccctcaccatggccgccaccttcgacgactgcctgtatgccttgtgcgtggtggacaccatcaagaggtccagccagacgggcgagtggcagaacattgcca

SEQ ID NO: 397899 - DNA, 120 bp, Artificial Sequence
  ENSG00000145990_15 (sequence is synthesized)
tcatgaccgaggagccggagctgagccccgcctacctgatcagcgaggccatgcgccgcagcaggatgtccctctactgttagcacagattgagaacctcggggacttgagccttctgca

SEQ ID NO: 397900 - DNA, 120 bp, Artificial Sequence
  ENSG00000145990_16 (sequence is synthesized)
ggggatgtccacagagagggaagggccgaggggagagggtgaccatggggaatgtggggatcagggaggtggagggacagtgtgaataaatggcatctaggaaggtaaactccaatcccg

SEQ ID NO: 397901 - DNA, 120 bp, Artificial Sequence
  ENSG00000145990_17 (sequence is synthesized)
gtgaccgaccccaaaccagactgttggtgggctgagctcctagcctggaagcattcaggagagcctgccattcctgggatgatccctgctgggtatttgcacgagagtggtttggtttag

SEQ ID NO: 397902 - DNA, 120 bp, Artificial Sequence
  ENSG00000145990_18 (sequence is synthesized)
ctgcctctgctgccctttactgtgacaagcaaggaggggttgcttccctccctacctcatccatcccacacaccttggccttctgcaagccaagtggttctgcaaggtcaaggcactagt

SEQ ID NO: 397903 - DNA, 120 bp, Artificial Sequence
  ENSG00000145990_19 (sequence is synthesized)
atcagatggcaagctcagtgcccgggatacccactgctggcaggagaaggcccattttcacagtccacagaagcgtgttaggctggggttgggggtgggatgggctggtgagaaagttca

SEQ ID NO: 397904 - DNA, 120 bp, Artificial Sequence
  ENSG00000145990_20 (sequence is synthesized)
aattccaggaagccactttttattggatataaggtatctaacggcaaaagtacttagtagcaaagtggccaccttttgattgattgggcttcctcataggaagcactgagggtgtgtctt

SEQ ID NO: 397905 - DNA, 120 bp, Artificial Sequence
  ENSG00000145990_21 (sequence is synthesized)
tgtacttggttcattgcccttcacctggtagagaaagagaggtcagaaatagcaagcaaaaagcaggactcccaggagccacaagaaaagagcacaggctgcaccaaagcaggggcagca

SEQ ID NO: 397906 - DNA, 120 bp, Artificial Sequence
  ENSG00000145990_22 (sequence is synthesized)
gagaataaaatatccctttgaacttgtcaacaattaaaaaactgcaaggagtcaccttataacactatttccagtaaaggtggaattgagtatcagagggattactgcggtgttaaggta

SEQ ID NO: 397907 - DNA, 120 bp, Artificial Sequence
  ENSG00000145990_23 (sequence is synthesized)
gccctgccacgtggctctccaggcagggccaagaagacagcacaaagtatgggtttggccataagctcatatgctgcccccaaagactggggagagctgtgtgcctcagtgttgcagtgt

SEQ ID NO: 397908 - DNA, 120 bp, Artificial Sequence
  ENSG00000145990_24 (sequence is synthesized)
gaattcctaaatagagggtaaagtgagcctagccaggaggtgtttggggctctatcgcgcatctctcctaccaagctgggcaagagcttttaggagattcatccagctttgtggatttag

SEQ ID NO: 397909 - DNA, 84 bp, Artificial Sequence
  ENSG00000145990_25 (sequence is synthesized)
tccttagctccagcatttgctttcaggattctgacacctgagaatttgggggtaggtactaaacgaaacaaaacaaaaggacaa

SEQ ID NO: 397910 - DNA, 120 bp, Artificial Sequence
  ENSG00000145990_26 (sequence is synthesized)
tttgggggtaggtactaaacgaaacaaaacaaaaggacaacaaggaacattatttctagtgtttctaaaatgggggtttagaaccccttaaggggccatacttaggcttgaaaaggctaa

SEQ ID NO: 397911 - DNA, 120 bp, Artificial Sequence
  ENSG00000145990_27 (sequence is synthesized)
tgttggaaaaaacatgttcttctaattggtctgctgtctgtcttgtccttgcacactctgcttacagagttttgttagagatgctgaactgcaggctgggagcaggcagtgccaaaaggg

SEQ ID NO: 397912 - DNA, 120 bp, Artificial Sequence
  ENSG00000145990_28 (sequence is synthesized)
cacacacacacacacacacacacacagatttttgaatggttgctaccgacaaatgtcgctgaaaccattctttaaaaattcagatctggtcttgaaagaaagagccaatcaagtgcattc

SEQ ID NO: 397913 - DNA, 120 bp, Artificial Sequence
  ENSG00000145990_29 (sequence is synthesized)
tgaaagaaagagccaatcaagtgcattcagagaacagggaattatcctttgttatctttgtttaattcttcaccccacgtaagacatttgtcaagtgtggacgtggaagccattcctcat

SEQ ID NO: 397914 - DNA, 120 bp, Artificial Sequence
  ENSG00000145990_30 (sequence is synthesized)
aagtctacgtagcttttgttcacaggctcactgaagtccaacaggtgtctttacatgcaactgaggtttagagttcttttcagatagctgccattggaactagaagggaatctaagagga

SEQ ID NO: 397915 - DNA, 120 bp, Artificial Sequence
  ENSG00000145990_31 (sequence is synthesized)
ctggagtccacctccagcctgtgtaggcaaaatctgagaatgaacagcccaatcagttgcatccttcattgtcctccctagggtcaatattctttgaagcccaggctactcataggtgca

SEQ ID NO: 397916 - DNA, 120 bp, Artificial Sequence
  ENSG00000145990_32 (sequence is synthesized)
agtgtggtgtgtccaaacacgaggggaatgctgggcattttctagaacagagaagtaagtactgccttcctggaaagagtcgccctgcttcccgaggctttgctacagcactgcagggtg

SEQ ID NO: 397917 - DNA, 120 bp, Artificial Sequence
  ENSG00000145990_33 (sequence is synthesized)
ggtaagctgaaattccatgcgtggtttgttgtggtccctgacctgttgctgacagacttcatggtcagcattccagctcttgcagctatcagttccaaaccagagatttgctggaatgga

SEQ ID NO: 397918 - DNA, 120 bp, Artificial Sequence
  ENSG00000145990_34 (sequence is synthesized)
tgcagctatcagttccaaaccagagatttgctggaatggaagtctcccaataatagtttgaacagaggcccatgtcatggactgctttggttcacattcttcttcttttttttttttttt

SEQ ID NO: 397919 - DNA, 120 bp, Artificial Sequence
  ENSG00000145990_35 (sequence is synthesized)
acctcttgatccacctgccttggccttgcaaagtgctggggttgcaggcgtgagccaccacacccagctgattctggttcttctaaattgctccctgggaaagtagtttttggggaaaca

SEQ ID NO: 397920 - DNA, 120 bp, Artificial Sequence
  ENSG00000145990_36 (sequence is synthesized)
aagtagtttttggggaaacattggaattattattattattattttctagctagcctgaagggctccgattaaggatgaagggaaagtaaacaaaatgattcaatgggtttcatttttcta

SEQ ID NO: 397921 - DNA, 120 bp, Artificial Sequence
  ENSG00000145990_37 (sequence is synthesized)
agtcattcataacctaaatagggatattcctggggtttcaattgtatgtttctgtactaaaccataatactcgcgaaatcttttcccaaaacttcgggttttggagagaggtccccacaa

SEQ ID NO: 397922 - DNA, 120 bp, Artificial Sequence
  ENSG00000145990_38 (sequence is synthesized)
aggcctctaagctctgtaatacatatttaatgtctaaaacaaaaaatctcatttgaagctggggtattagaaagaacatatattctttaaaagaggcatgaaaaaatattttagtgtgtg

SEQ ID NO: 397923 - DNA, 120 bp, Artificial Sequence
  ENSG00000145990_39 (sequence is synthesized)
tactcaaattttatctactgaaatgcatgtagtaggtaggtgaaggaacaagagaaagaaaagaactggatagttcattttctttaaatataaactgtagcaaatgggtttgagatactc

SEQ ID NO: 397924 - DNA, 120 bp, Artificial Sequence
  ENSG00000145990_40 (sequence is synthesized)
ctttagtgctccatttgcccttatcccaccacatgcaaagacttgatttggggtagctatatgaagctgaaatctctagccttcaacagtgttctgcagaaggactttgtttcagcccag

SEQ ID NO: 397925 - DNA, 120 bp, Artificial Sequence
  ENSG00000145990_41 (sequence is synthesized)
caccgttcatcatgcctttaggggtctgggtacccacagctgactttgacctaggactaaaacccagcaatcttttggctcctttctgctttgtttaatgtgtttcaagggcctcgatgc

SEQ ID NO: 397926 - DNA, 120 bp, Artificial Sequence
  ENSG00000145990_42 (sequence is synthesized)
aaggaggcagtgctttaagagtcttcccatttagttcctgcatgcctgtttcgttcccatcaatgtgcgaatggcctagattccaagttatgagggagggtgtgggtcagggttcttacc

SEQ ID NO: 397927 - DNA, 120 bp, Artificial Sequence
  ENSG00000145990_43 (sequence is synthesized)
tggtatttaaaaaatgtttgggagtgccctgggcctatttgaaaagtttgaatctgtgatcactgtcagctcctccaagacttctcctctcaacagacaattgcattgtagggcacccca

SEQ ID NO: 397928 - DNA, 120 bp, Artificial Sequence
  ENSG00000145990_44 (sequence is synthesized)
gaccccccttagcctacatggcagcaaataccactgtgccagttatatctggactctagggtagtcttggccaactccaagactggccaactccaagacttgtccactgtgtgcagagta

SEQ ID NO: 397929 - DNA, 120 bp, Artificial Sequence
  ENSG00000145990_45 (sequence is synthesized)
ttttaagtatgttatctcatacaatccataaaaacaaccctatagtgttgggtattgctatttcttttatacacatgagaaaatggaggcagtaagaggaagaggaacttgttcaaagtc

SEQ ID NO: 397930 - DNA, 120 bp, Artificial Sequence
  ENSG00000145990_46 (sequence is synthesized)
acacaactgttaggcagaaatgaggtcattcaaatccttaatcttctcctccagaccacactgcctcccaggaagagatgtgggcacctcctgttcttgccaggcaggaaaccgctcctt

SEQ ID NO: 397931 - DNA, 120 bp, Artificial Sequence
  ENSG00000145990_47 (sequence is synthesized)
atcaatgtctacggggtctgctctcacacccaggaaggactgtgacaagcatggactaacctgcggctccactcagcctgctgtcagcaccctcctgttcagcaggatgcaacatctgat

SEQ ID NO: 397932 - DNA, 120 bp, Artificial Sequence
  ENSG00000145990_48 (sequence is synthesized)
gttctgccaggaggctgtagagctgcacatagaagtagccagtgtttcttcccattccaaaatggaaatatcactcagccttttttaaaattgacttcctatgttcattttgattgtagg

SEQ ID NO: 397933 - DNA, 120 bp, Artificial Sequence
  ENSG00000145990_49 (sequence is synthesized)
tgatgcagcaagcctcagggctggggattttcaaaatcttgttggctgactattatagatggccttggaatttgctcttgggggtctgaatataacgtaggaaaatgtcctttctcaggg

SEQ ID NO: 397934 - DNA, 120 bp, Artificial Sequence
  ENSG00000145990_50 (sequence is synthesized)
agtggggctttaaagttcgtttgtttgtcactccaattttagctgtgcactgcacctttctttgcacccctactctcttcatcttgtctcatagccacagctattgaatttggcctgtga

SEQ ID NO: 397935 - DNA, 120 bp, Artificial Sequence
  ENSG00000145990_51 (sequence is synthesized)
tcataagttgggtttctgatctgatctcttgcattctggtgggtactgggggcagaatcagctttgttaatgattttctgggcagaaggtaaattcagctgcatctgaaggggcttcaca

SEQ ID NO: 397936 - DNA, 120 bp, Artificial Sequence
  ENSG00000145990_52 (sequence is synthesized)
gtccaatagccgtccttttgttttacataacagagagtgatggtcaaggccacccacatctttagtggtagagccaggacaaaaagtcaggttttctgcctcttaagtctcatgctgcct

SEQ ID NO: 397937 - DNA, 120 bp, Artificial Sequence
  ENSG00000145990_53 (sequence is synthesized)
cacatagcacctccagagctctagggaaaggaggctcagagagatgaagtgacttgtctgaagtcctgtggctagtggcagagaagttggaattagacctgcattggacctcaattcgct

SEQ ID NO: 397938 - DNA, 66 bp, Artificial Sequence
  ENSG00000145990_54 (sequence is synthesized)
gagaagttggaattagacctgcattggacctcaattcgctgagcagttgcagggaaatctggaaat

SEQ ID NO: 397939 - DNA, 120 bp, Artificial Sequence
  ENSG00000145990_55 (sequence is synthesized)
cccaaagtgctgggatgacaggcgtgatccaccgtgcccagccgggaaatccattttttaaaataaattcaattatgtcttgaatgtactcagaaaacgagctgtttaaaatgtcccatt

SEQ ID NO: 397940 - DNA, 120 bp, Artificial Sequence
  ENSG00000145990_56 (sequence is synthesized)
tgaatgtactcagaaaacgagctgtttaaaatgtcccattgtgactgtaatgtgaacaatgacctctaacttgtattttatttggcaaggatgggggatgtgcatcaaatcttcacctct

SEQ ID NO: 397941 - DNA, 120 bp, Artificial Sequence
  ENSG00000145990_57 (sequence is synthesized)
gggatttcctgaggcttggtctacttggctcaccctccacctgcatccccaccccactcctagatattaatacaaatctagccttgacaccgcctactgctccaccaccgcctacgtttt

SEQ ID NO: 397942 - DNA, 120 bp, Artificial Sequence
  ENSG00000145990_58 (sequence is synthesized)
tggccatcagagccttggagtttacagagcagaggccatgacattggggagcttgtttaaaaatcaatgatcagaaccccacattttagtttccttttggggagaaagaggagggccgtg

SEQ ID NO: 397943 - DNA, 120 bp, Artificial Sequence
  ENSG00000145990_59 (sequence is synthesized)
gaagaaaaggggtgtgcagctggagcgttattatgtctttctcagcggcaggcatgcccgcctctccaccttctccccgccaggcacaggagccagcagctggagcgtgctctgagtttc

SEQ ID NO: 397944 - DNA, 120 bp, Artificial Sequence
  ENSG00000145990_60 (sequence is synthesized)
aggggaccccccacccagactgactggggcttctgggacttctcataggaagagtcaagacctcctgcgcttctttaaaaggtgatgggctcagtgttcccagtggcatctggaggtgaa

SEQ ID NO: 397945 - DNA, 120 bp, Artificial Sequence
  ENSG00000145990_61 (sequence is synthesized)
gccggtactgtctcaggagtggaaggcaatggcccactggcctttttctcccccacgtcacagtccccatttgctggagcccttgagggggccaccgaaactgtggctctcattcagcct

SEQ ID NO: 397946 - DNA, 120 bp, Artificial Sequence
  ENSG00000145990_62 (sequence is synthesized)
cccaaagtgttgcactactgaatactcctttctgtttacaccagcagtgaatagagtcatgaaaagaacatattatatgcaatggcttgatgcttagtgtggcaatcaaaagcttgcctg

SEQ ID NO: 397947 - DNA, 120 bp, Artificial Sequence
  ENSG00000145990_63 (sequence is synthesized)
ggcagatgtaggcaggggctagacaatagtcatggagttgtcaccaggtcactgtctctctccttccccttccaggtctctactgtcccctgcagccaccacaagggctaagctgttgaa

SEQ ID NO: 397948 - DNA, 120 bp, Artificial Sequence
  ENSG00000145990_64 (sequence is synthesized)
tgagccccttggtttttccttataaacgcaatgacttacttgtgattcttggtctaatcccaggctaagaaacaaaacaaaagcttgtgatctgacccattcctttgctgccttccttct

SEQ ID NO: 397949 - DNA, 120 bp, Artificial Sequence
  ENSG00000145990_65 (sequence is synthesized)
ctttcaggcacctggacgtatttagtattctgccctgtgccttgcccaggggagggagaagtttctagcaaatgtgactttctgtctgctgcctggtgcttttatagtacttcatctgct

SEQ ID NO: 397950 - DNA, 120 bp, Artificial Sequence
  ENSG00000145990_66 (sequence is synthesized)
ttttattgttgttgttgtgttttttaaccaaaatggcatttgtttggctgtcattgtcgagtatatatttattgtgttttacaaacatgagtatatatgtatgtatatgtataaaaccaa

SEQ ID NO: 397951 - DNA, 120 bp, Artificial Sequence
  ENSG00000145990_67 (sequence is synthesized)
ccaaacttatatatataagaagtcaaggcatgtatactagatattttaaagagttatttatcaagggaaaaagatgtgtgttataaagtaaacagagtctatattttctatataatgtag

SEQ ID NO: 397952 - DNA, 120 bp, Artificial Sequence
  ENSG00000145990_68 (sequence is synthesized)
tcaaacatagcttataaattataggaggttttggttttcttttttattattaaaggaaaaaaagaagaaaaaaaaagacaatgaatgcaactgttcttagtgtttttaaggccaaactac

SEQ ID NO: 397953 - DNA, 120 bp, Artificial Sequence
  ENSG00000145990_69 (sequence is synthesized)
tgtggaagctgggaggcggccctccctgcgggcctccagcagccctgtgcctgccgctaggagctccagagctgatgcccgttgtgatctctgcgatgctcgatgctcggagccagcggt

SEQ ID NO: 397954 - DNA, 120 bp, Artificial Sequence
  ENSG00000145990_70 (sequence is synthesized)
cagcatcactcagccagctggcctgtgccgctctgacgtggcttccagctgttctccgcaatttgcattggtgggataaaggaatgaaaaggataaataaagatttaaaagaaaatacaa

SEQ ID NO: 397955 - DNA, 120 bp, Artificial Sequence
  ENSG00000145990_71 (sequence is synthesized)
accatgtaagaagtgcttttcacctccccccatgattccgaggcctccccagccacatggaactaaccaggacatcagaggaagaaaatcagcagacagaaaaatactggggaaaaaaaa

SEQ ID NO: 397956 - DNA, 120 bp, Artificial Sequence
  ENSG00000145990_72 (sequence is synthesized)
atgccacgtggttctgttcagctgagcttctgctccctccagcacccccacatgggacatttgtttaccccccacgatgctgctcttggagagtcccaggggacaggtttcaagccctta

SEQ ID NO: 397957 - DNA, 120 bp, Artificial Sequence
  ENSG00000145990_73 (sequence is synthesized)
gggatgcagcctgtctaacttaatatgcacagccgttcacatccagggcacagaggcagcctggctttccctggaggcccacggggaccacaatgctgcatttgtctgtggaactgagat

SEQ ID NO: 397958 - DNA, 120 bp, Artificial Sequence
  ENSG00000145990_74 (sequence is synthesized)
ttagctgcacattcttgcctgaatgcagcgggcctccagccacagcctgctggcatgggggattccaggagggatgtgcttcatgagccggcaattgcccttctttccagtccccagacc

SEQ ID NO: 397959 - DNA, 120 bp, Artificial Sequence
  ENSG00000145990_75 (sequence is synthesized)
cagtcaagattacagatagatgcgttcatcgcgcgcaggtgctggggaagccagtgggacatcactggctacattcaccaacaggattttccaactgcagtatttatcggtttttcaaac

SEQ ID NO: 397960 - DNA, 120 bp, Artificial Sequence
  ENSG00000145990_76 (sequence is synthesized)
catgtgctctgagagaactcatcatctatccagaacctactcatcacttttggaaagagaagagaaactagcattctatggagtacttaccatgtgccagatttggtgtgagacatagta

SEQ ID NO: 397961 - DNA, 120 bp, Artificial Sequence
  ENSG00000145990_77 (sequence is synthesized)
cgagtgttactcatttacgtctcatggccaacctccaatgtggacatttagcatctccatcttacaagtgagaaatttcactgtagagaggttaaatatcatgtgtcattgattctgtga

SEQ ID NO: 397962 - DNA, 120 bp, Artificial Sequence
  ENSG00000145990_78 (sequence is synthesized)
catgtattattttcacatttgaacatctgaaatatagatatgtctaaaagggcttttctttcttggtagtaagataactgtaggtctttgcagtagtgtcttagattatgtgaaatatgg

SEQ ID NO: 397963 - DNA, 120 bp, Artificial Sequence
  ENSG00000145990_79 (sequence is synthesized)
tattttggcaagtgtacatggctaagaacaagtggaatcagaattcaacttaagtttgcttgactccaaagcttatgtgttttccagtataatgtgctgcagtatcaatggtctgtatga

SEQ ID NO: 397964 - DNA, 120 bp, Artificial Sequence
  ENSG00000145990_80 (sequence is synthesized)
acaaaggccatatcatttttattgacaaagtatagaaacggggaaatggtgactgaactggaacttgcatcatctaattccataactgaggagacaatagcctggggactgcatgtatcc

SEQ ID NO: 397965 - DNA, 120 bp, Artificial Sequence
  ENSG00000145990_81 (sequence is synthesized)
cacaggatgttaaaaaattgagaaaatgttatttcatgatcttcacttctctgttgattataacttatttttgaagaggctaaaataaatggcaaactcttgtatggataagatataaaa

SEQ ID NO: 397966 - DNA, 120 bp, Artificial Sequence
  ENSG00000145990_82 (sequence is synthesized)
acttcataaagactctatgtggaggatagatgctaccgtggccgggctctcagccacgttcttctgcagtatgcagtagggaagggcacatttctcacatgccttcaccagattatagtt

SEQ ID NO: 397967 - DNA, 120 bp, Artificial Sequence
  ENSG00000145990_83 (sequence is synthesized)
gcctgaataaaaggccgcacacgtgtgtcgggttttcttgggtgcgatagaggacctgcccttcagcagcggtggcgccctgctagggtcgtttgtttctttctgctgtgagttagttta

SEQ ID NO: 397968 - DNA, 120 bp, Artificial Sequence
  ENSG00000145996_0 (sequence is synthesized)
aaataaacgtggcgggacgtatgtgtcatggcgctctccatctaaagtctgtgcagcttccggagagtggcgggttgattttctcactttggactggtttttacttcccgacttctggac

SEQ ID NO: 397969 - DNA, 120 bp, Artificial Sequence
  ENSG00000145996_1 (sequence is synthesized)
tcatctttcaagaggactttagactaattgcagataattaagagaatatgccttctgcatcctgtgatacactactggatgacatcgaagatatcgtgtctcaggaagattcaaaaccac

SEQ ID NO: 397970 - DNA, 120 bp, Artificial Sequence
  ENSG00000145996_2 (sequence is synthesized)
aagataggcattttgtaagaaaggatgttgtcccgaaggtacgaaggcgaaatacccaaaaatatttgcaagaggaagaaaacagtccaccaagtgacagcactattccaggcatacaga

SEQ ID NO: 397971 - DNA, 120 bp, Artificial Sequence
  ENSG00000145996_3 (sequence is synthesized)
aaatttggatacgaacatggggttgttctcataataattcagatggagaatatatggctggacagctagctgcttatggctataaaattacagaaaatgcatccgatgcagatttatggc

SEQ ID NO: 397972 - DNA, 120 bp, Artificial Sequence
  ENSG00000145996_4 (sequence is synthesized)
tcctgaacagttgcactgtaaaaaacccagctgaagaccactttagaaactcaattaaaaaagctcaagaggagaacaagaaaatcgtactggctggatgcgttcctcaagcccagcctc

SEQ ID NO: 397973 - DNA, 120 bp, Artificial Sequence
  ENSG00000145996_5 (sequence is synthesized)
gccaggactaccttaagggactgagtatcattggggttcagcagatagatcgtgtggtagaagttgtggaggagacaattaaaggtcactctgtgagactgctgggtcagaaaaaggata

SEQ ID NO: 397974 - DNA, 120 bp, Artificial Sequence
  ENSG00000145996_6 (sequence is synthesized)
atggaaggcggcttgggggagcacgattggatttgccgaagattaggaagaatccactgatagaaatcatttccatcaataccgggtgtctcaatgcttgtacctactgcaaaactaaac

SEQ ID NO: 397975 - DNA, 120 bp, Artificial Sequence
  ENSG00000145996_7 (sequence is synthesized)
acgccagaggaaatttggccagttatccaattgatgaactagtagatagagccaaacaatcttttcaagagggtgtttgtgagatatggttgaccagtgaagacacgggggcttatggca

SEQ ID NO: 397976 - DNA, 120 bp, Artificial Sequence
  ENSG00000145996_8 (sequence is synthesized)
gagatattggcaccaatctccccacactcctgtggaaactggttgaagtgattcctgagggagcaatgctgaggcttggcatgacaaatccgccctatattttagagcatctggaggaaa

SEQ ID NO: 397977 - DNA, 120 bp, Artificial Sequence
  ENSG00000145996_9 (sequence is synthesized)
tggcaaaaatccttaatcaccccagagtctacgcttttctgcacataccagtccagtctgcctccgacagcgtactcatggaaatgaaaagagaatactgtgtggctgacttcaaaagag

SEQ ID NO: 397978 - DNA, 120 bp, Artificial Sequence
  ENSG00000145996_10 (sequence is synthesized)
tagtggattttctgaaagagaaagttcctggaataactattgctacagatattatctgtggttttcctggagaaacagatcaggattttcaagaaacagtgaaacttgttgaagagtaca

SEQ ID NO: 397979 - DNA, 120 bp, Artificial Sequence
  ENSG00000145996_11 (sequence is synthesized)
aattcccaagcctgtttattaaccaattttacccaagaccaggaactcctgctgcaaaaatggaacaagttccagcacaagtgaaaaagcaaaggacaaaagatctttctcgggtgtttc

SEQ ID NO: 397980 - DNA, 120 bp, Artificial Sequence
  ENSG00000145996_12 (sequence is synthesized)
attcttacagtccatatgatcacaagattggtgaaagacaacaagtgttagtaacagaagaatcttttgattccaagttttatgttgcacacaatcaattctatgagcaggttttagtgc

SEQ ID NO: 397981 - DNA, 120 bp, Artificial Sequence
  ENSG00000145996_13 (sequence is synthesized)
gaagtggacatctatgaatcaggcaaacattttatgaaagggcagccagtatctgatgccaaagtgtacacgccctccatcagcaaaccgctagcaaagggagaagtctcgggtttgaca

SEQ ID NO: 397982 - DNA, 120 bp, Artificial Sequence
  ENSG00000145996_14 (sequence is synthesized)
aaggacttcagaaatgggcttgggaaccagctgagttcaggatcccacacctctgctgcatctcagtgtgactcagcgagttccagaatggtgctgcccatgccaaggctacatcaagac

SEQ ID NO: 397983 - DNA, 120 bp, Artificial Sequence
  ENSG00000145996_15 (sequence is synthesized)
tgtgcgctgaggatgtccgtgggcttggctctgctgggtcttctttttgctttttttgtcaaggtctataattagaatacaactaatggaaacatctataaagaagaatacatttctaat

SEQ ID NO: 397984 - DNA, 120 bp, Artificial Sequence
  ENSG00000145996_16 (sequence is synthesized)
taaaatcttcaatgaacaggaaagcgacatctccattctccaagggcaataatttgtactggtcatgctgcctccttctcagccactcttcttaatgaggctccccctgtctcacattga

SEQ ID NO: 397985 - DNA, 120 bp, Artificial Sequence
  ENSG00000145996_17 (sequence is synthesized)
gttgggcccattggttatttgacctaaaacctaatcaccgctaccatagcacatccttcaaattaaactgcttttggtttacttttagcaagaaatgcaagcggttgcatttttttctgt

SEQ ID NO: 397986 - DNA, 120 bp, Artificial Sequence
  ENSG00000145996_18 (sequence is synthesized)
ttgtttcaatctctaatctttaagtcagaacctaattgtacagtggctctggccatcttttcctcatgtggaagaattttctatctttaataaactttttctttgttttttttttccaga

SEQ ID NO: 397987 - DNA, 73 bp, Artificial Sequence
  ENSG00000145996_19 (sequence is synthesized)
ctatctttaataaactttttctttgttttttttttccagatggagtttcgctcttgtcccccaggctggagtg

SEQ ID NO: 397988 - DNA, 120 bp, Artificial Sequence
  ENSG00000145996_20 (sequence is synthesized)
gtgagccactgcgcccggcctctttaataaatatttttaagtgcatcttccccttcaggctttgtttggagtcccagtgctacaaacattgtatttttcacagcagatgtgttcctgaaa

SEQ ID NO: 397989 - DNA, 120 bp, Artificial Sequence
  ENSG00000145996_21 (sequence is synthesized)
ttcacagcagatgtgttcctgaaaagtgtatagaaacctgttctgggaacctgaatgcttttggaatgcacggggagagtctgccagctaaaggactcctggcaacattctgtgaaatat

SEQ ID NO: 397990 - DNA, 120 bp, Artificial Sequence
  ENSG00000145996_22 (sequence is synthesized)
ggactcctggcaacattctgtgaaatatgaaactggaaaactggatttgtcgaaaactaattgtgcccattttctcacatttttgatccattggggttttttttttgtttttgttttttt

SEQ ID NO: 397991 - DNA, 120 bp, Artificial Sequence
  ENSG00000145996_23 (sequence is synthesized)
actgcagccttgacctcctggactcaagcagtcctcctacctcagcctccctaatagccaggggctacaggcatataccaccatgcccaactaattttttaattttttgtagagatgagt

SEQ ID NO: 397992 - DNA, 120 bp, Artificial Sequence
  ENSG00000145996_24 (sequence is synthesized)
accaccatgcccaactaattttttaattttttgtagagatgagtgtcactatgttgcccaggcttgcctggaactcctagcctcaagcagtcttcttgcctcagcctcccaaagtgctgg

SEQ ID NO: 397993 - DNA, 120 bp, Artificial Sequence
  ENSG00000145996_25 (sequence is synthesized)
gcgtgagccactccacccagcccagattaaatgtttttatttctacctgccatcattggtctttactaagtgaagtgacttctttctttaacaataaatagaattggtatactaagcaaa

SEQ ID NO: 397994 - DNA, 120 bp, Artificial Sequence
  ENSG00000145996_26 (sequence is synthesized)
gtcatggcgctctccatctaaagtctgtgcagcttccggagagtggcgggttgattttctcactttggactggtttttacttcccgacttctggtggttggttactcgcactatgcagac

SEQ ID NO: 397995 - DNA, 120 bp, Artificial Sequence
  ENSG00000145996_27 (sequence is synthesized)
aaaaatcactttgtaatctaagaaggaattgagttaagaagatttgttcatcacaccacatttccatgttgttgaggaaaatagattggcagtggtgacaaggtcaaggatgtgttgttc

SEQ ID NO: 397996 - DNA, 120 bp, Artificial Sequence
  ENSG00000145996_28 (sequence is synthesized)
taatactcttcattactgtgttatgcaatagttgcatgatgatttttctgatctctacattctattttttttctttttaaaatggagcacagaagtacttagtttctgatgtttttccat

SEQ ID NO: 397997 - DNA, 120 bp, Artificial Sequence
  ENSG00000145996_29 (sequence is synthesized)
cttggcccagtaatttcctttttttttgttattttatgaagcacaaaactaaatatttttgaaccaagagactactgtgtggtattaattttgattttgtactaaattcatgttatttac

SEQ ID NO: 397998 - DNA, 120 bp, Artificial Sequence
  ENSG00000145996_30 (sequence is synthesized)
acaaatcaaatagtgtcaaccttaaaatttttttaagcaatatttttcttatgtttgagagttaacatgtatggttgattagaatcttcaccttctaaagggattaaggaaaaacctcgt

SEQ ID NO: 397999 - DNA, 120 bp, Artificial Sequence
  ENSG00000145996_31 (sequence is synthesized)
tcactgttgtgaattctaaaatgttttggttccaagtcctagtttttcttaccctggtattatgtccaaaatgaatgcccactaaaagttagtaactctcatggcaattaaagtattttg

SEQ ID NO: 398000 - DNA, 120 bp, Artificial Sequence
  ENSG00000145996_32 (sequence is synthesized)
ataatgtttataagttcttgttctcaattttgccactagtaaagatgtgggagaagttaatctttttttgttgtctttcttgtgaacttaaagatcatttttcatcctgttcaacctttg

SEQ ID NO: 398001 - DNA, 120 bp, Artificial Sequence
  ENSG00000145996_33 (sequence is synthesized)
gcctgaccttttcaggtcactaaatgtctggtttgcacttcttgtagcatgtgagaaataatacttcaaaattcaagtgtaattgtattaatttttgtgaataaactgctatggagtgct

SEQ ID NO: 398002 - DNA, 120 bp, Artificial Sequence
  ENSG00000145996_34 (sequence is synthesized)
tagaagatagagtccactttgtaggggatcccagaacagaaaaatgacattgagggacaatgaggaaacctggataattaggttttagtgccaaagaaccctgcgttcatggggaagatg

SEQ ID NO: 398003 - DNA, 80 bp, Artificial Sequence
  ENSG00000146005_0 (sequence is synthesized)
gccgtccgtccccctcgctcagcctctccacatcgcggctccggcacctgaagggacgcgggcgggcgcgggcagctccg

SEQ ID NO: 398004 - DNA, 120 bp, Artificial Sequence
  ENSG00000146005_1 (sequence is synthesized)
cgatggccccgccgtgagaggccggacccgcggcggggaccagcagcggtctagaggagtcccaggagcagccaggacaggcggaagcagtggctgccatggaggaggacaagctcttat

SEQ ID NO: 398005 - DNA, 120 bp, Artificial Sequence
  ENSG00000146005_2 (sequence is synthesized)
ctgcagtgcctgaggaaggcgatgccacccgtgaccccggtccagagcctgaagaggagccaggggtccggaatgggatggccagtgagggcctgaacagcagcctctgcagcccagggc

SEQ ID NO: 398006 - DNA, 120 bp, Artificial Sequence
  ENSG00000146005_3 (sequence is synthesized)
acgagcgaaggggcaccccagcggacactgaggaacccacgaaggacccagatgtggccttccatggcctcagccttggcctctctctcaccaatggcctagccctggggccagacttga

SEQ ID NO: 398007 - DNA, 120 bp, Artificial Sequence
  ENSG00000146005_4 (sequence is synthesized)
acattctggaagattcagcggagtccaggccctggagggctggcgtgctggcagagggggacaatgcttccaggagcctctacccagatgctgaggaccctcagctggggttggatggtc

SEQ ID NO: 398008 - DNA, 120 bp, Artificial Sequence
  ENSG00000146005_5 (sequence is synthesized)
ccggggagccagatgtgcgggatggcttcagcgccacgtttgagaagattctggagtcagagctgctgcggggcacccagtacagcagcctcgactccctagacgggctgagcctcacgg

SEQ ID NO: 398009 - DNA, 120 bp, Artificial Sequence
  ENSG00000146005_6 (sequence is synthesized)
atgagagcgacagctgcgtcagcttcgaggcccccctcacacccctcatccagcagcgggcccgtgacagccctgagccaggggctgggttgggcattggggacatggcgtttgaggggg

SEQ ID NO: 398010 - DNA, 120 bp, Artificial Sequence
  ENSG00000146005_7 (sequence is synthesized)
acatgggggcagctggtggtgatggggagctgggcagccccctgcggcgctccatctccagcagccgctctgagaatgtcctgagccgcctgtctctcatggccatgcccaatggattcc

SEQ ID NO: 398011 - DNA, 120 bp, Artificial Sequence
  ENSG00000146005_8 (sequence is synthesized)
atgaagatggccctcagggcccagggggggatgaggatgatgatgaggaggacacggacaagttgctgaactcagccagtgaccccagcctgaaggatggcctgtcagactcagactctg

SEQ ID NO: 398012 - DNA, 120 bp, Artificial Sequence
  ENSG00000146005_9 (sequence is synthesized)
agctcagcagctcggaggggttggagcctggtagtgcagaccctctggccaacgggtgccagggggtcagtgaagctgctcatcggctggcacgccgtctctaccacctcgagggcttcc

SEQ ID NO: 398013 - DNA, 120 bp, Artificial Sequence
  ENSG00000146005_10 (sequence is synthesized)
agcgctgtgatgtggcccggcagctgggcaagaacaacgagtttagcaggctggtggccggggagtacctcagtttcttcgacttctcgggcttgactctggacggagcactcagaacat

SEQ ID NO: 398014 - DNA, 120 bp, Artificial Sequence
  ENSG00000146005_11 (sequence is synthesized)
tcttgaaggccttcccgctgatgggggagacacaagagcgtgagcgggtcctcacacacttctcccgccggtactgccagtgcaaccctgatgacagcacttcggaagatgggatccaca

SEQ ID NO: 398015 - DNA, 120 bp, Artificial Sequence
  ENSG00000146005_12 (sequence is synthesized)
cgctcacctgtgccctgatgctgctcaacacggacctgcacggccacaacattggcaaaaagatgtcctgtcagcaattcattgccaacttggaccagctgaatgatggccaagactttg

SEQ ID NO: 398016 - DNA, 120 bp, Artificial Sequence
  ENSG00000146005_13 (sequence is synthesized)
ccaaagacctgctgaagaccctttacaactccatcaagaatgaaaagctggaatgggccattgatgaggatgagctgaggaaatccctgtctgagctggtggatgacaagttcgggacag

SEQ ID NO: 398017 - DNA, 120 bp, Artificial Sequence
  ENSG00000146005_14 (sequence is synthesized)
gcacgaagaaggtgacgcgaatcctggatggtggcaaccccttcctggatgtcccacaggcgctcagtgccaccacctacaagcacggcgtcctgacccggaagactcacgctgacatgg

SEQ ID NO: 398018 - DNA, 120 bp, Artificial Sequence
  ENSG00000146005_15 (sequence is synthesized)
atggcaagaggacgccccgtgggaggcgtggctggaagaaattctacgcagtgctcaaagggaccatcctgtacctgcagaaggatgagtacaggcctgacaaagctctatcggagggtg

SEQ ID NO: 398019 - DNA, 120 bp, Artificial Sequence
  ENSG00000146005_16 (sequence is synthesized)
acctgaagaacgccattcgcgtgcatcacgctctggccaccagggcctctgactacagcaagaagtccaacgtgctgaagcttaagacagccgactggagggtattcctcttccaggcac

SEQ ID NO: 398020 - DNA, 120 bp, Artificial Sequence
  ENSG00000146005_17 (sequence is synthesized)
cgagcaaggaagaaatgctgtcctggatcctcaggatcaacctggtggcagccatcttctctgccccggccttcccagccgctgtcagctccatgaagaagttctgtcggcccctgctgc

SEQ ID NO: 398021 - DNA, 120 bp, Artificial Sequence
  ENSG00000146005_18 (sequence is synthesized)
cacaggtgtcacccagtcgagaggggcatcaagtccaaggaggccgaggagtaccggttgaaggagcactatctcaccttcgagaaaagccgttatgagacctatatccacctcctggct

SEQ ID NO: 398022 - DNA, 120 bp, Artificial Sequence
  ENSG00000146005_19 (sequence is synthesized)
atgaaaatcaaagtgggctcagatgatctggagcggattgaggcccggctggccactctggaaggggatgacccttctctccggaagacacattcaagccctgccctcagccagggccat

SEQ ID NO: 398023 - DNA, 120 bp, Artificial Sequence
  ENSG00000146005_20 (sequence is synthesized)
gtgactggcagcaaaaccacaaaggatgccactgggcctgatacttagctgacatggatttgcagaccccagggtgggcagatgtctccagtggggtcagtgagcacaattccagccagg

SEQ ID NO: 398024 - DNA, 120 bp, Artificial Sequence
  ENSG00000146005_21 (sequence is synthesized)
ggccacttggaccaagctccagtcagttgatgggcagctagaggggtgcagaaagcctgtgggcccaggagatggagatgccgtttgtggcgttgatctccttgcgtccttgggcatctc

SEQ ID NO: 398025 - DNA, 120 bp, Artificial Sequence
  ENSG00000146005_22 (sequence is synthesized)
cgggcatcagaccctctccctggcccttgttttcctctccaccatggagcctcattttgtaggccagttgtgtgcatgctctagacaccacctcgctggagaagctggaagggctgttgt

SEQ ID NO: 398026 - DNA, 120 bp, Artificial Sequence
  ENSG00000146005_23 (sequence is synthesized)
cttcccaggtctttctcttctcatcaagctcctctcctcatcttttttgtgtgtgagggcaggtcttgactctaggtctcagctggaaccccaccctttctcctcctccttcctctgagt

SEQ ID NO: 398027 - DNA, 120 bp, Artificial Sequence
  ENSG00000146005_24 (sequence is synthesized)
tgaccagcagcaggtctgccgaccaccagcaccatcctctcctcccagcagcctccagaaccatgcccaggtctcctgcctcacatcacaataatctgggacccaggcttgtgccctttc

SEQ ID NO: 398028 - DNA, 120 bp, Artificial Sequence
  ENSG00000146005_25 (sequence is synthesized)
agtgtaaagctgactccatcacatgtgcatccacttcttttcatccattgagatcacactgcctcctttttatacagacacaaatatacatctataagaataatatatacataaggaacc

SEQ ID NO: 398029 - DNA, 120 bp, Artificial Sequence
  ENSG00000146005_26 (sequence is synthesized)
cctgaaagatggttttggaactggaatcagttagaggatgaaatcagataaaggaaaagcctattttggagcttcccctgttaggaaggatggctgcacctggccccctggcattcctga

SEQ ID NO: 398030 - DNA, 120 bp, Artificial Sequence
  ENSG00000146005_27 (sequence is synthesized)
cgctctaggagggaagggggaggcagtgctggcctcccttgccctgtttttccctcttccagctgacctgtgacttatactgctcttaccgatgatacttttggaaaaaatagagcgtgt

SEQ ID NO: 398031 - DNA, 120 bp, Artificial Sequence
  ENSG00000146005_28 (sequence is synthesized)
atgcaccgccccgtttgtcccatggatatcctggggtgtgagtcggatgggaccacggccctgtttatatttgggtctttatgttggtgctgccaggtctctgagctccagaggtggcct

SEQ ID NO: 398032 - DNA, 120 bp, Artificial Sequence
  ENSG00000146005_29 (sequence is synthesized)
cttggacagatctactgctataggaataaaagacactctgtctcgcaaatggctgcttgtcaacaagcccaaagatgcttgtcggaggacggttatggaagcccttaattcttggttgtg

SEQ ID NO: 398033 - DNA, 120 bp, Artificial Sequence
  ENSG00000146005_30 (sequence is synthesized)
ggaaaaggtggaatgacaagttattgattgtttttctgtcgctatttctttcatttgtctagtgaatcagaaaggcttagccaaggccacatctgggaagagtggagaaatttgccactt

SEQ ID NO: 398034 - DNA, 120 bp, Artificial Sequence
  ENSG00000146005_31 (sequence is synthesized)
gacgatcacggattagctagcacctttaagccctgcatttctccaactgacaagtgggtgggggtgatggcacattcagtgtggctatgaagagcgaatcctctctattgtttaaataga

SEQ ID NO: 398035 - DNA, 120 bp, Artificial Sequence
  ENSG00000146005_32 (sequence is synthesized)
ttactgtagtttggccaggaatttggcgtcagtggtaacacacttagttaataaaataagccaggcttgcaactaagtatctaactttacaggcccactcacatttgaggcaaggggcta

SEQ ID NO: 398036 - DNA, 120 bp, Artificial Sequence
  ENSG00000146005_33 (sequence is synthesized)
ttgagtatgtggagagatgtagtgatttaaattcagattatttaagttggatcagctgaagtgtgttttagacccaaaccatctggccccttcgttttgctcagaggaagtaaatgttca

SEQ ID NO: 398037 - DNA, 120 bp, Artificial Sequence
  ENSG00000146005_34 (sequence is synthesized)
cttaaatgaaattgaaaacgccatgtggcaccacaaaagagctctctgtactttccccatgctgcctcaaaagttctgtgagtttcggggtcagtgtcccacccttcacttcccgagggc

SEQ ID NO: 398038 - DNA, 120 bp, Artificial Sequence
  ENSG00000146005_35 (sequence is synthesized)
gggtgagtggagagcagagccaggagctctggcagctgtggacagatgtgcttcctgagcatgggttgtgcctcccatcagtaaaaaaatgtttagttcacttccttaattgtataatta

SEQ ID NO: 398039 - DNA, 120 bp, Artificial Sequence
  ENSG00000146006_0 (sequence is synthesized)
attcttgtgccgtttctcggaaaagcttttcagtaaatgcactcatgctgctccaggagctcttctctgcaacaagccacccatctgccatcaacaagttaagaccaagagaactaacgg

SEQ ID NO: 398040 - DNA, 120 bp, Artificial Sequence
  ENSG00000146006_1 (sequence is synthesized)
ctgcggaaaggagactgaagctttgattaaccagctgagcagttagaggtggagaaatttaataacttatattcaaaactgatttagggatcagagcaatcacagaaaatgaaaccaatg

SEQ ID NO: 398041 - DNA, 120 bp, Artificial Sequence
  ENSG00000146006_2 (sequence is synthesized)
ctttccagagggatatcctaaggaaaaaacaactcgtcctggtggattcaattttacttggaaagcctgggacacagaaaacaggaaactggtcaaaggctcctacatgttagagccttt

SEQ ID NO: 398042 - DNA, 120 bp, Artificial Sequence
  ENSG00000146006_3 (sequence is synthesized)
tacagactcactgcgttgagtctaacaaccgcgactgaatgcagcctccaatgtgctcagaagaatgggcttacatttcaagtggccattaggggcccctatgctggcagcaatatatgc

SEQ ID NO: 398043 - DNA, 120 bp, Artificial Sequence
  ENSG00000146006_4 (sequence is synthesized)
aatgagtatggttttaaaaatgctgcctgccctgggtatggcgtgtccacccaaatgccgctgcgagaagctgctcttctactgcgactctcagggcttccactcagtgccaaacgccac

SEQ ID NO: 398044 - DNA, 120 bp, Artificial Sequence
  ENSG00000146006_5 (sequence is synthesized)
agacaagggctctctgggcctgtccctgaggcacaatcacatcacagagctcgaaagagatcaatttgccagcttcagtcaacttacttggctccacttagatcacaatcaaatttcaac

SEQ ID NO: 398045 - DNA, 120 bp, Artificial Sequence
  ENSG00000146006_6 (sequence is synthesized)
agtaaaagaagatgcttttcaaggactatataaacttaaggaattaatcttaagttccaacaaaatattttacttgccaaacacaacttttacccaactgattaacctgcaaaatttgga

SEQ ID NO: 398046 - DNA, 120 bp, Artificial Sequence
  ENSG00000146006_7 (sequence is synthesized)
cctgtcttttaatcagctgtcatctctgcacccagagctcttctatggccttcggaagctgcagaccttgcatttacgttccaactccctgcggactatcccagtacgcctgttctggga

SEQ ID NO: 398047 - DNA, 120 bp, Artificial Sequence
  ENSG00000146006_8 (sequence is synthesized)
ctgtcgtagtctggagtttctggatttgagcacaaatcgtttgcgaagtttggctcgcaatggatttgcaggattaattaaactgagagagcttcacctagagcacaaccagctgacgaa

SEQ ID NO: 398048 - DNA, 120 bp, Artificial Sequence
  ENSG00000146006_9 (sequence is synthesized)
gattaattttgctcatttcctacggctaagcagtctgcacacgctcttcttacaatggaacaaaatcagcaacttgacatgtgggatggagtggacctggggcactttagaaaagctaga

SEQ ID NO: 398049 - DNA, 120 bp, Artificial Sequence
  ENSG00000146006_10 (sequence is synthesized)
cctgactggaaatgaaatcaaagccatcgacttgacagtgtttgaaacgatgcccaatcttaaaatactcctcatggataacaacaagttaaacagccttgattccaagatcttaaactc

SEQ ID NO: 398050 - DNA, 120 bp, Artificial Sequence
  ENSG00000146006_11 (sequence is synthesized)
cctgagatccctcacaaccgttggtctctctggcaatctgtgggaatgcagcgcccgaatatgtgctctggcctcctggctgggcagtttccaaggtcggtgggaacactccatcctatg

SEQ ID NO: 398051 - DNA, 120 bp, Artificial Sequence
  ENSG00000146006_12 (sequence is synthesized)
ccacagtcctgaccacacccaaggagaggatattctagatgcagtccatggatttcagctctgctggaatttgtcaaccactgtcactgtcatggctacaacttatagagatccaaccac

SEQ ID NO: 398052 - DNA, 120 bp, Artificial Sequence
  ENSG00000146006_13 (sequence is synthesized)
tgaatatacaaaaagaataagctcatcaagttaccatgtgggagacaaagaaatcccaactactgcaggcatagcagttactaccgaggaacactttcctgaaccagacaatgccatctt

SEQ ID NO: 398053 - DNA, 120 bp, Artificial Sequence
  ENSG00000146006_14 (sequence is synthesized)
cactcagcgggtaattacgggaacaatggctttattgttttctttcttttttattatttttatagtgttcatctccaggaagtgctgccctcccactttaagaagaattaggcagtgctc

SEQ ID NO: 398054 - DNA, 120 bp, Artificial Sequence
  ENSG00000146006_15 (sequence is synthesized)
aatggttcagaaccacaggcagctccgatcccaaacacgactccatatgtcaaacatgtcagaccaaggaccgtataatgaatatgaacccacccatgaaggacccttcatcatcattaa

SEQ ID NO: 398055 - DNA, 120 bp, Artificial Sequence
  ENSG00000146006_16 (sequence is synthesized)
tggttatggacagtgcaagtgtcagcagctgccatacaaagaatgtgaagtataatatctacccatcatcaaaaatcacatcagataagtaacctattttacatagtagaggctaaatac

SEQ ID NO: 398056 - DNA, 120 bp, Artificial Sequence
  ENSG00000146006_17 (sequence is synthesized)
atatctaatttttaccaatggtgacattaagcctaattttccaaactaagtggagacttagtttttgaagtgttgaagtatttttaattttttaaatgaaaccatattttaagtgttaaa

SEQ ID NO: 398057 - DNA, 120 bp, Artificial Sequence
  ENSG00000146006_18 (sequence is synthesized)
tgaatcaatgctcacattaatttgcactcctgttggaaagtctaaaatgcttacttcaaaataagaaatgtatgtaattatatacaatcgtgtgtaaacctttacactaaggtctccata

SEQ ID NO: 398058 - DNA, 120 bp, Artificial Sequence
  ENSG00000146006_19 (sequence is synthesized)
tactatttttttctactgaaaacaatttagaaagaagctattgggcagaaacagatatagatcaatacctgtttgatcactgctctccatcccatgtaccacaactatcttgctgcttaa

SEQ ID NO: 398059 - DNA, 120 bp, Artificial Sequence
  ENSG00000146006_20 (sequence is synthesized)
aaggagacttagtaaagttctcttgtatgataatttggtatttactcaaatcttcaatttcttgccagggtgggaagtagaatttcatgtatgctgaagactggtaaatattaaacattc

SEQ ID NO: 398060 - DNA, 120 bp, Artificial Sequence
  ENSG00000146006_21 (sequence is synthesized)
tccttccagagtttctgcctgggttagtagatattatcaaagtccatatcatgaattcagaaccctttaatgtaattctaataagctgagtgactctttaatatatttacacaatgaatc

SEQ ID NO: 398061 - DNA, 120 bp, Artificial Sequence
  ENSG00000146006_22 (sequence is synthesized)
caagtgactgtgaaaaggtctcattacaatgaaaccaatcctaaataattacaccaacttcttatacatttctcgtttgacttataatggacatgatttttgtggcatttagacaactgt

SEQ ID NO: 398062 - DNA, 120 bp, Artificial Sequence
  ENSG00000146006_23 (sequence is synthesized)
tttaaactagcattaaactgtcattgtactaattaatgtactaaatcctatgtttacattaatatgtgaaaaaagatttagaagatattttggagataaacaagacaaactgagtcaatt

SEQ ID NO: 398063 - DNA, 79 bp, Artificial Sequence
  ENSG00000146006_24 (sequence is synthesized)
gcgctctctctctcaactatcatgatcaaagatgccttgacaaaggggtttaaacctctttcttctgctttttcctgat

SEQ ID NO: 398064 - DNA, 120 bp, Artificial Sequence
  ENSG00000146006_25 (sequence is synthesized)
aaaaataattggctagcaacaggcttaacactgattcttattgtattacaaaggaaccatgaaaaaaaacactttccaactattatataatacatttcgatctttcaataaagatacgca

SEQ ID NO: 398065 - DNA, 120 bp, Artificial Sequence
  ENSG00000146006_26 (sequence is synthesized)
ttcacgctgtaagtgtagttcagtgtaggtgaagaaaacagcaccactgagatgaatctcatggcagaacaactcgacatgcctatgcagccacacagtggtaacttgaaggcagcacag

SEQ ID NO: 398066 - DNA, 120 bp, Artificial Sequence
  ENSG00000146006_27 (sequence is synthesized)
aggtgagggattaaaaggaaaggcagattttgaaatctgactctcaggttagctggagttacaaggcagccaacaatgattatacacaatctgcaccaaacagggaaaggacctgctgct

SEQ ID NO: 398067 - DNA, 120 bp, Artificial Sequence
  ENSG00000146006_28 (sequence is synthesized)
gaaaagggaagaggggtagatcctccaatgtaaatataaacatgccatagttaacaaatgataaggatgccacatttttcatgcagaaaagaaccacaggtattcagtttcttgtattat

SEQ ID NO: 398068 - DNA, 120 bp, Artificial Sequence
  ENSG00000146006_29 (sequence is synthesized)
gatttctaaagaaaacctattaaatatttggaatttagatgcaagctactcattcacacagaacttttccataaacattgttccacatattgaaaaaactgtaaaattatagcactaact

SEQ ID NO: 398069 - DNA, 120 bp, Artificial Sequence
  ENSG00000146006_30 (sequence is synthesized)
tgattttagaaaatgagcattttttacaactgccatttactgtatgtagaaaaaagacataaaaccttagagaaagccactaccatttttcaagttatcttttccccaacatcaacatca

SEQ ID NO: 398070 - DNA, 120 bp, Artificial Sequence
  ENSG00000146006_31 (sequence is synthesized)
acatgatatccttcattcagggcatattttttcttcccaggatcaaactgaaaacatgttaaggctatagtttagccagtaagatttaatcacaatttttcttctttaatactaagagat

SEQ ID NO: 398071 - DNA, 120 bp, Artificial Sequence
  ENSG00000146006_32 (sequence is synthesized)
gggtaccttagtacccttcacctaacatctctcggtaaaaagcagacaagatcacaaattacagtaaaaatgtgctcttttttaaggtgggcagattagtttgtcaaagtctcagcccag

SEQ ID NO: 398072 - DNA, 120 bp, Artificial Sequence
  ENSG00000146006_33 (sequence is synthesized)
ttcaattcagttgatctcgagtggtgagtattttgtctcttgttaaaccagaccctgggcttgtctgggcagagacagaagctgatttaacagcatagagcacagcgccctacttcccca

SEQ ID NO: 398073 - DNA, 120 bp, Artificial Sequence
  ENSG00000146006_34 (sequence is synthesized)
cagacaggctgaattagaagcccctattacaaataagagcaccacgagctaaaatttaccaacccatttatcaggatgaccattgccatttgtcaggtgacagacagcttggtcacaaca

SEQ ID NO: 398074 - DNA, 120 bp, Artificial Sequence
  ENSG00000146006_35 (sequence is synthesized)
caactgtgtcctgagcacacaagattccatcagccctgaaggacagcagaggagtattttccatcatttcaaaccacaaacaaaattaagatttaaactgtgggatgggtaagaaatccc

SEQ ID NO: 398075 - DNA, 120 bp, Artificial Sequence
  ENSG00000146006_36 (sequence is synthesized)
cttctttggctgggaatctccaccttaatccttaaaggaccataactggcaaaatccttagtgtacggacaaaagcaaattggaaaagccagccatttactaattcagaggaacagcata

SEQ ID NO: 398076 - DNA, 120 bp, Artificial Sequence
  ENSG00000146006_37 (sequence is synthesized)
gccaaggctagcgaggcatactttccagttgaaaaaaatcaaaattttttgccttccatttttctgggtaatgtcctttaagaaaagtgaatgacagtagtaccaaaaaggtattttcct

SEQ ID NO: 398077 - DNA, 120 bp, Artificial Sequence
  ENSG00000146006_38 (sequence is synthesized)
ttctcatttaaaagcaaaaacctccctttttaattgcctgtagaaggcaagattttctttcatttttgtccatttgtgtttcagaatcagcacaggtttgaagattagactgttagtcat

SEQ ID NO: 398078 - DNA, 120 bp, Artificial Sequence
  ENSG00000146006_39 (sequence is synthesized)
ctgtgctttctttaccaactggctagaacggaacagcatcacagcaacgctgcggatcttggttacacagtgtcagagcttttgttttttgatggggttttatcctcttcaccaccacta

SEQ ID NO: 398079 - DNA, 120 bp, Artificial Sequence
  ENSG00000146006_40 (sequence is synthesized)
cccactccattttttttctatttttaagattagaggaaaatgaccattaagaaccagaaaaataattaatctctctggaaaaaggaaagctaaagaagactatgataccatacccatcta

SEQ ID NO: 398080 - DNA, 120 bp, Artificial Sequence
  ENSG00000146006_41 (sequence is synthesized)
gaaaccaagaactagtttgaaatcgtttatattcatttctgtagcatgacagggatttcaatcacctttctgaaaagagtgggctgataaacttgtaaatccacacacaactctgagaat

SEQ ID NO: 398081 - DNA, 120 bp, Artificial Sequence
  ENSG00000146006_42 (sequence is synthesized)
acccactgccagcatcaaaaagcaaagatactaattttttaagccaaaaatctgtactaacacatgtaatttcttaatgtgcctaagttaatttctgtatcaattcaataaatggaattg

SEQ ID NO: 398082 - DNA, 120 bp, Artificial Sequence
  ENSG00000146006_43 (sequence is synthesized)
actgaacttcccaacgccactaattattaaaatccatctgcttattctaatgctagtcaccaagagctagactccatctttccaataaaaatgagccctatgtagcactaggtttgaatt

SEQ ID NO: 398083 - DNA, 120 bp, Artificial Sequence
  ENSG00000146006_44 (sequence is synthesized)
ctaaaattcaaaacaggcatttcattttcttaaggcacacttcctacacacagctatcaggggaaaaagctataaatgtcctgttctttttctgaagtgtggatatcaatataaaatttg

SEQ ID NO: 398084 - DNA, 120 bp, Artificial Sequence
  ENSG00000146006_45 (sequence is synthesized)
ttaaagaatatttttaacagctgacttacatgatcgttttcctaatacaggaatacagcgacagacctatctgaaaagtctgtttgggggcatacttttcatatcttattgactaaagcc

SEQ ID NO: 398085 - DNA, 120 bp, Artificial Sequence
  ENSG00000146006_46 (sequence is synthesized)
cttgagccaggaaaaaaaaaaaaaaagagagagagacagtaaggccatctatagataattaaatatttctctatctaacctggggcaaactcatagtacttgaataaggccaaaaacaaa

SEQ ID NO: 398086 - DNA, 120 bp, Artificial Sequence
  ENSG00000146006_47 (sequence is synthesized)
tagaaaattactgtttaagctttcattctgctattgcaaacatttggaaacctctgcaactctttcaactaacatttttgtccttagcggtttttttttttttttttaagtctgatatat

SEQ ID NO: 398087 - DNA, 120 bp, Artificial Sequence
  ENSG00000146006_48 (sequence is synthesized)
ggaatgtttggtgaaccttcctatcaacactgagactggaaactcaaagtacagtccaaatacattgtgttcaatcaccttcaagagccatttttctttttgggtgggaggtgggcagat

SEQ ID NO: 398088 - DNA, 120 bp, Artificial Sequence
  ENSG00000146006_49 (sequence is synthesized)
gggttgagggtgggaagaaaatactattatgcagggtgttttgggaggggggagggtaacataaagagcagtgtacaggcaagttttgttattaaaattgtgtatactgtaaaaagtgaa

SEQ ID NO: 398089 - DNA, 120 bp, Artificial Sequence
  ENSG00000146007_0 (sequence is synthesized)
acttcgctgtgaagatggcgtcgggcagcgggacaaaaaacttggactttcgccgaaagtgggacaaagatgaatatgagaaactcgccgagaagaggctcacggaagagagagaaaaga

SEQ ID NO: 398090 - DNA, 120 bp, Artificial Sequence
  ENSG00000146007_1 (sequence is synthesized)
aagatggaaaaccagtgcagcctgtcaagcgagagcttttacggcatagggactacaaggtggacttggaatccaagcttgggaagacaattgtcattaccaagacaacccctcaatctg

SEQ ID NO: 398091 - DNA, 120 bp, Artificial Sequence
  ENSG00000146007_2 (sequence is synthesized)
agatgggaggatattactgcaatgtctgtgactgtgtggtgaaggactccatcaactttctggatcacattaatggaaagaaacatcagagaaacctgggcatgtctatgcgtgtggaac

SEQ ID NO: 398092 - DNA, 120 bp, Artificial Sequence
  ENSG00000146007_3 (sequence is synthesized)
gttccaccctggatcaggtgaagaaacgttttgaggtcaacaagaagaagatggaagagaagcagaaggattatgattttgaggaaaggatgaaggagctcagagaagaggaggaaaagg

SEQ ID NO: 398093 - DNA, 120 bp, Artificial Sequence
  ENSG00000146007_4 (sequence is synthesized)
ccaaagcgtacaagaaagagaaacagaaggagaagaaaaggagggctgaggaggacttgacatttgaggaggacgatgagatggcagctgtgatgggcttctctggctttggttccacca

SEQ ID NO: 398094 - DNA, 120 bp, Artificial Sequence
  ENSG00000146007_5 (sequence is synthesized)
agaagagttactgaggctttctgtgcttggcctgactttggcctatgctggacctaactttgcgtgtgtgtgtgtgtagtagggggtcatttctttttgggtaatgggaaagttcttaag

SEQ ID NO: 398095 - DNA, 120 bp, Artificial Sequence
  ENSG00000146007_6 (sequence is synthesized)
agtgtatcactggagtcacaggaccctgcccacctgagttcccaataaagaaaaacctccccttctgaggctgctttcccaaaactccccctgcatctttatctcttcatctatcccacc

SEQ ID NO: 398096 - DNA, 120 bp, Artificial Sequence
  ENSG00000146007_7 (sequence is synthesized)
tcttgtctgaacatcccacctttatcctgtgttctgcctttgttttaattttaactcatgttcatcctgcaacagaagcattctctaggtcccagtttccagttgattgcatatccttga

SEQ ID NO: 398097 - DNA, 120 bp, Artificial Sequence
  ENSG00000146007_8 (sequence is synthesized)
tcagccctttttcccatcctgccctatggttctctagccacctgtgcatgcatgtgtatttctgcctggttctatggtgtgtggatgtgtgtgcatgaatctgtcatatagagggggtcc

SEQ ID NO: 398098 - DNA, 120 bp, Artificial Sequence
  ENSG00000146007_9 (sequence is synthesized)
gagctggaatcctagagcattgctgccctggggcctgatgttcttggcttcctcagagcatgtaacaggaaattaaatgggatgagtgtttggtgtggtttgtgtctgatgagtttttta

SEQ ID NO: 398099 - DNA, 120 bp, Artificial Sequence
  ENSG00000146007_10 (sequence is synthesized)
acattcaggtgtagattgtttcagcttctcatgtttcattttcctgaagatttatgtttttgtctaccttgtgagcaggcttttggaagaacctgtttgatgcaaaaaagaaaatgaaaa

SEQ ID NO: 398100 - DNA, 120 bp, Artificial Sequence
  ENSG00000146007_11 (sequence is synthesized)
acaaaacaaaaaatccccaaaaccttattatgggagcccgtcggtcttagaagctgtttgacatgtataataaatggcattgactgggcctgttttacatttggtgagaacattccataa

SEQ ID NO: 398101 - DNA, 120 bp, Artificial Sequence
  ENSG00000146007_12 (sequence is synthesized)
ccattcttcctgggtgcagaactgtagaagaccctgaggactcctgggctagtgtgagcagctattctgcatgggtgcagatggctggatgtgaaagagacatgctctagctgcagaggc

SEQ ID NO: 398102 - DNA, 120 bp, Artificial Sequence
  ENSG00000146013_0 (sequence is synthesized)
ggaccagcgctggaggcgcgtggtgtggacgcgcgcttcggagttggagggcggcgcccaggaccctggtgggagagtgtgtgcgtcgcgctggagggcgggaggcgggggcgggaggtg

SEQ ID NO: 398103 - DNA, 120 bp, Artificial Sequence
  ENSG00000146013_1 (sequence is synthesized)
ccggtcgagggagccccgctctcagagctccaggggaggagcgaggggagcgcggagcccggcgcctacagctcgccatggtgcgccccctgaacccgcgaccgctgccgcccgtagtcc

SEQ ID NO: 398104 - DNA, 120 bp, Artificial Sequence
  ENSG00000146013_2 (sequence is synthesized)
tgatgttgctgctgctgctgccgccgtcgccgctgcctctcgcagccggagacccccttcccacagaaagccgactcatgaacagctgtctccaggccaggaggaagtgccaggctgatc

SEQ ID NO: 398105 - DNA, 120 bp, Artificial Sequence
  ENSG00000146013_3 (sequence is synthesized)
ccacctgcagtgctgcctaccaccacctggattcctgcacctctagcataagcaccccactgccctcagaggagccttcggtccctgctgactgcctggaggcagcacagcaactcagga

SEQ ID NO: 398106 - DNA, 120 bp, Artificial Sequence
  ENSG00000146013_4 (sequence is synthesized)
acagctctctgataggctgcatgtgccaccggcgcatgaagaaccaggttgcctgcttggacatctattggaccgttcaccgtgcccgcagccttggtaactatgagctggatgtctccc

SEQ ID NO: 398107 - DNA, 120 bp, Artificial Sequence
  ENSG00000146013_5 (sequence is synthesized)
cctatgaagacacagtgaccagcaaaccctggaaaatgaatctcagcaaactgaacatgctcaaaccagactcagacctctgcctcaagtttgccatgctgtgtactctcaatgacaagt

SEQ ID NO: 398108 - DNA, 120 bp, Artificial Sequence
  ENSG00000146013_6 (sequence is synthesized)
gtgaccggctgcgcaaggcctacggggaggcgtgctccgggccccactgccagcgccacgtctgcctcaggcagctgctcactttcttcgagaaggccgccgagccccacgcgcagggcc

SEQ ID NO: 398109 - DNA, 120 bp, Artificial Sequence
  ENSG00000146013_7 (sequence is synthesized)
tgctactgtgcccatgtgcccccaacgaccggggctgcggggagcgccggcgcaacaccatcgcccccaactgcgcgctgccgcctgtggcccccaactgcctggagctgcggcgcctct

SEQ ID NO: 398110 - DNA, 120 bp, Artificial Sequence
  ENSG00000146013_8 (sequence is synthesized)
ctaggaacttgtgcaacagagcagtccagatgtctacgagcatacctggggctgattgggactgccatgacccccaactttgtcagcaatgtcaacaccagtgttgccttaagctgcacc

SEQ ID NO: 398111 - DNA, 120 bp, Artificial Sequence
  ENSG00000146013_9 (sequence is synthesized)
tgccgaggcagtggcaacctgcaggaggagtgtgaaatgctggaagggttcttctcccacaacccctgcctcacggaggccattgcagctaagatgcgttttcacagccaactcttctcc

SEQ ID NO: 398112 - DNA, 120 bp, Artificial Sequence
  ENSG00000146013_10 (sequence is synthesized)
caggactggccacaccctacctttgctgtgatggcacaccagaatgaaaaccctgctgtgaggccacagccctgggtgccctctcttttctcctgcacgcttcccttgattctgctcctg

SEQ ID NO: 398113 - DNA, 120 bp, Artificial Sequence
  ENSG00000146013_11 (sequence is synthesized)
agcctatggtagctggacttccccagggccctcttcccctccaccacacccaggtggacttgcagcccacaaggggtgaggaaaggacagcagcaggaaggaggtgcagtgcgcagatga

SEQ ID NO: 398114 - DNA, 120 bp, Artificial Sequence
  ENSG00000146013_12 (sequence is synthesized)
gggcacaggagaagctaagggttatgacctccagatccttactggtccagtcctcattccctccaccccatctccacttctgattcatgctgcccctccttggtggccacaatttagcca

SEQ ID NO: 398115 - DNA, 120 bp, Artificial Sequence
  ENSG00000146013_13 (sequence is synthesized)
tgtcatctggtggtgaccagctccaccaagcccctttctgagcccttcctcttgactaccaggatcaccagaatctaataagttagccattctctattgcattccagattagggttaggg

SEQ ID NO: 398116 - DNA, 120 bp, Artificial Sequence
  ENSG00000146013_14 (sequence is synthesized)
tagggaggactgggtgttctgaggcagcctagaaagtcattctcctttgtgaagaaggctcctgccccctcgtctcctcctctgagtggaggatggaaaactactgcctgcactgccctg

SEQ ID NO: 398117 - DNA, 120 bp, Artificial Sequence
  ENSG00000146013_15 (sequence is synthesized)
tccccggatcctgccgaacatctgggcatcaggagctggagcctgtgggccttgctttattcctattattgtcctaaagtctctctgggctcttggatcatgattaaacctttgacttaa

SEQ ID NO: 398118 - DNA, 120 bp, Artificial Sequence
  ENSG00000146021_0 (sequence is synthesized)
attctttgcagcctagacagaggaggcaggagccccaggggcgggctaatcgcctgggctggggatgcctgggcagatgcagaggaagctggaaaggtggcagtgcacctgggtcgctgg

SEQ ID NO: 398119 - DNA, 120 bp, Artificial Sequence
  ENSG00000146021_1 (sequence is synthesized)
agctgccgccgttcctaggagaccaaggagcagcaagcctgcgggggagggggagcaagtgggttgctgcttttagcagctgaaagggctgcagggagctctgggtaagacattttctgt

SEQ ID NO: 398120 - DNA, 120 bp, Artificial Sequence
  ENSG00000146021_2 (sequence is synthesized)
tgctgctgcttttgcggtagaagctgctgcgagtaagtcagaggaaggaggattgagaagggaggaggcttcacttgcagccatgctgaatcactgttgctgatcagatttcccactggt

SEQ ID NO: 398121 - DNA, 120 bp, Artificial Sequence
  ENSG00000146021_3 (sequence is synthesized)
ctgctgggagaatcaagaacagaactaggatccccgagtgcatacacagttcagcagctaccaccctggctgggcctcacacaatggagggtgaaagtgtcaagctgagctcccagactc

SEQ ID NO: 398122 - DNA, 120 bp, Artificial Sequence
  ENSG00000146021_4 (sequence is synthesized)
tgatacaggctggggatgatgagaagaaccagaggacgatcactgtcaaccctgcccacatggggaaagcattcaaggttatgaatgaactgcggagtaaacagctgttgtgtgacgtga

SEQ ID NO: 398123 - DNA, 120 bp, Artificial Sequence
  ENSG00000146021_5 (sequence is synthesized)
tgattgtggcagaagatgtcgagatagaagcccaccgtgtggtcctggcagcctgcagcccctacttctgtgcgatgttcacaggtgacatgtctgagagtaaagccaaaaagatagaaa

SEQ ID NO: 398124 - DNA, 120 bp, Artificial Sequence
  ENSG00000146021_6 (sequence is synthesized)
tcaaggacgtggatgggcagacgctgagtaagctgattgactacatctatactgctgaaatcgaggtgactgaagagaatgtccaggtgctgctcccggcagccagcttgctgcagctca

SEQ ID NO: 398125 - DNA, 120 bp, Artificial Sequence
  ENSG00000146021_7 (sequence is synthesized)
tggatgttcggcagaactgctgtgacttcctgcagtctcagttgcatcccaccaattgcctgggcatccgtgcatttgcagatgtacacacctgcactgaccttctgcagcaggccaatg

SEQ ID NO: 398126 - DNA, 120 bp, Artificial Sequence
  ENSG00000146021_8 (sequence is synthesized)
cctacgcagagcagcactttccagaggtgatgctaggagaagaatttcttagcctgagtctggaccaggtgtgcagcttgatatccagcgacaagctgaccgtttcttcagaagagaagg

SEQ ID NO: 398127 - DNA, 120 bp, Artificial Sequence
  ENSG00000146021_9 (sequence is synthesized)
tgtttgaagctgtgatctcatggatcaattatgagaaagaaacccgtttagagcacatggcaaagctgatggaacatgtccgacttcctctcttacctagggactacctagtccaaacgg

SEQ ID NO: 398128 - DNA, 120 bp, Artificial Sequence
  ENSG00000146021_10 (sequence is synthesized)
ttgaagaagaagctttgataaagaataacaacacctgtaaagacttcctcattgaggccatgaaataccatctcctccctctggatcagagactattgattaagaacccaaggaccaagc

SEQ ID NO: 398129 - DNA, 120 bp, Artificial Sequence
  ENSG00000146021_11 (sequence is synthesized)
ccaggactccagtcagccttcccaaggtcatgattgtggttggcggccaggcacccaaggcaatccgcagtgtggagtgctatgatttcgaggaggaccggtgggatcagattgctgagc

SEQ ID NO: 398130 - DNA, 120 bp, Artificial Sequence
  ENSG00000146021_12 (sequence is synthesized)
ttccttccagaagatgcagagcaggtgtggtgttcatggctggccacgtgtatgccgtgggagggtttaatggctcactgcgggtgcggacagtggatgtgtatgacggcgtgaaggacc

SEQ ID NO: 398131 - DNA, 120 bp, Artificial Sequence
  ENSG00000146021_13 (sequence is synthesized)
agtggacgtccattgccagcatgcaggagcgccggagcacactgggcgcagcggtgctcaatgacttgctctacgcagtgggaggctttgatggcagtactggcctagcatcggtggaag

SEQ ID NO: 398132 - DNA, 120 bp, Artificial Sequence
  ENSG00000146021_14 (sequence is synthesized)
cctacagctacaagaccaacgagtggttctttgtggccccgatgaacacgcggcggagcagtgtgggtgtgggcgttgtggaggggaagctatatgctgttgggggttatgatggagctt

SEQ ID NO: 398133 - DNA, 120 bp, Artificial Sequence
  ENSG00000146021_15 (sequence is synthesized)
cccgccagtgtctgagcactgtggagcagtacaacccagcgaccaatgaatggatatacgtggcggacatgagcacccgccgcagtggcgcaggggttggagtgcttagcggacagctgt

SEQ ID NO: 398134 - DNA, 120 bp, Artificial Sequence
  ENSG00000146021_16 (sequence is synthesized)
acgccacaggtgggcatgatgggcctttggtgaggaagagcgttgaggtttacgatcctggaacaaatacctggaagcaagtggcagacatgaacatgtgccggcgcaacgcaggggtct

SEQ ID NO: 398135 - DNA, 120 bp, Artificial Sequence
  ENSG00000146021_17 (sequence is synthesized)
gtgcagtaaatgggctcctgtatgtggttggaggggatgatggatcctgcaacttggcttcggtggagtactacaatcctgtcactgacaaatggacgctgcttccaacgaacatgagca

SEQ ID NO: 398136 - DNA, 120 bp, Artificial Sequence
  ENSG00000146021_18 (sequence is synthesized)
cggggcggagctatgcaggtgttgccgtgattcacaagtccttgtgacccaaactcctactgccaggaggtggaggaaggagcaggtgctgcctgtgactctgaacagcaggaccttggt

SEQ ID NO: 398137 - DNA, 120 bp, Artificial Sequence
  ENSG00000146021_19 (sequence is synthesized)
gactggattcaacttgcttgggagggtctgtgctgctgtgagaaccgctctcctctgacttggcagactggtgttgttcatcgcagtgtggacaccattacccacccccgttcccctgag

SEQ ID NO: 398138 - DNA, 120 bp, Artificial Sequence
  ENSG00000146021_20 (sequence is synthesized)
gtgctctggcctatgccctgagcaaggggggtcttgacatccccaggcagcacctttgggctttgttttggtgtttctacagggacaatacagaccctggagtgtgtgtgtgtgtgtgtg

SEQ ID NO: 398139 - DNA, 120 bp, Artificial Sequence
  ENSG00000146021_21 (sequence is synthesized)
tgtgtgtagaccatggtgtttctctatgtttctctaagttggggggtgagcgtgtgtgacagtctactggatttctttactactgatcctttcgctgtgttaaaaatcaagtcacagaga

SEQ ID NO: 398140 - DNA, 120 bp, Artificial Sequence
  ENSG00000146021_22 (sequence is synthesized)
cctctcttctggatttgtcccatggggaccctgagactactaaagctgctttcttctgaaggtccagttggacagtctgggaatgtccagaaataaccagtgagaggggcagttctctgg

SEQ ID NO: 398141 - DNA, 120 bp, Artificial Sequence
  ENSG00000146021_23 (sequence is synthesized)
ccacacccacttatgtactttaactactgtgactttgtctgcagaagagctggaaaattctcgaagctgcaccgtgtcctctgtgtgctagaataagggacaaatgggttccctgtgctt

SEQ ID NO: 398142 - DNA, 120 bp, Artificial Sequence
  ENSG00000146021_24 (sequence is synthesized)
ctcagctcactgtttttccttgagttctcctacaggaagcagatgagaactgcccagtcttcaggtttaggccattggtctttgatgtcatagattccaggcctgggaggtgttatgtct

SEQ ID NO: 398143 - DNA, 120 bp, Artificial Sequence
  ENSG00000146021_25 (sequence is synthesized)
cttcagctgggaaaactagctcttcagagaagcctcgggtaacactgaaaaacaaaacaaaacaaaacaaaaacaggaaaaaaacaaaaaaccaaagtggtaaggattcagttcctgcct

SEQ ID NO: 398144 - DNA, 120 bp, Artificial Sequence
  ENSG00000146021_26 (sequence is synthesized)
ataatggtctcagagagggtcctacttttaggttttcccaggacaggacagtccccatttatacttattatcccagtttaattattcacagcaccccattttactcagaagtgttctggt

SEQ ID NO: 398145 - DNA, 120 bp, Artificial Sequence
  ENSG00000146021_27 (sequence is synthesized)
ctggaggataaataagaggtcaccctcctccagacccaaagatagatttgtgcctgtgttggatggggtcgtgtgtgattcagatggacattggatggcttcaaaggaatataccactag

SEQ ID NO: 398146 - DNA, 120 bp, Artificial Sequence
  ENSG00000146021_28 (sequence is synthesized)
gtgtgcaccctctccccaacccccaagaaccccactactgctttccctgtgaggtaggagatatcagtgggccttggatttgaggcttcctaagatgtgcttgcattttaaaaagggagc

SEQ ID NO: 398147 - DNA, 120 bp, Artificial Sequence
  ENSG00000146021_29 (sequence is synthesized)
ttggtgagagctttgctaattcacaggtaaaaattattaacaatagaacttcaagcatcttgaggagcgggcatttgagggggcatggagtaatttgtatttaaaaaaccttaaagttgt

SEQ ID NO: 398148 - DNA, 120 bp, Artificial Sequence
  ENSG00000146021_30 (sequence is synthesized)
gctgttcctaaactagcaaattgctcatgctgaaatttctggcataagcaggggaagtcttgtgtctggagaatagtctcataccttgcagtctgggacaccctccctactttgagaatc

SEQ ID NO: 398149 - DNA, 120 bp, Artificial Sequence
  ENSG00000146021_31 (sequence is synthesized)
cacctacaggaagccaaggaactttataaatcctgatgttggacttctgatacgactgggctacttccaagcaggtgctgcaggagattggcatcccccagcccctgcagttagaaaccc

SEQ ID NO: 398150 - DNA, 120 bp, Artificial Sequence
  ENSG00000146021_32 (sequence is synthesized)
cgaagtcttcccagccagtgagccactttgtgtatttactgtatatttattgtgccctaaatgtgcaactctcctaaagacaaaacttctctttctgatgttaagcacatgttacttcaa

SEQ ID NO: 398151 - DNA, 120 bp, Artificial Sequence
  ENSG00000146021_33 (sequence is synthesized)
caagatgcttggagaacaacaaggtacccagaatttttagaagccttcagaagaggctaaaatatccagctttgggggacctggaagaaatgtctccaaaggaagcaaggcatgttttag

SEQ ID NO: 398152 - DNA, 120 bp, Artificial Sequence
  ENSG00000146021_34 (sequence is synthesized)
ttgagtgctctggtctcactatgaagtggggatgactgtggcttcataactctacctggctgtgggttggaagctgatggaatgagaaatgtcctttctccttctctgaggaaattttga

SEQ ID NO: 398153 - DNA, 120 bp, Artificial Sequence
  ENSG00000146021_35 (sequence is synthesized)
gacttgtttcggtgtgtctgtgtgatggggatgaggctggggttgggatctgatgtatgccattcacagaagctctcaatttcagatgataggtgaattccctgcccctcccccaccact

SEQ ID NO: 398154 - DNA, 120 bp, Artificial Sequence
  ENSG00000146021_36 (sequence is synthesized)
gagaagctagactttcatgcgggagaggctacttttatgtgtcgtcttccggggaagggtccctccactgaaagctagccagtcatgttttctgtttttggatttttgcaattggtttca

SEQ ID NO: 398155 - DNA, 120 bp, Artificial Sequence
  ENSG00000146021_37 (sequence is synthesized)
cctcatgtctccctccctacaaagcactgcctctactgggcgtgctgccaaggccatgtgcactccatcctcatgtatcctttttcacggggaccagaacactggtacgtcatcaccaaa

SEQ ID NO: 398156 - DNA, 120 bp, Artificial Sequence
  ENSG00000146021_38 (sequence is synthesized)
gccaatctgctctagctgcccacagatgccaccaaaacctgctatctcttcatcaccaggtacgattctctttccacagtggacacagcaggctattttctagtttgtgctggtcacgtg

SEQ ID NO: 398157 - DNA, 120 bp, Artificial Sequence
  ENSG00000146021_39 (sequence is synthesized)
gtagatgaagcctcttactgccccacttagggtggccacggctgcttgtgaatgcagctttgccagtggcatatctgtcatctgattgcggtggtgaaatggaattgaggcccaaggtta

SEQ ID NO: 398158 - DNA, 120 bp, Artificial Sequence
  ENSG00000146021_40 (sequence is synthesized)
gaagcagccgagacgccacttggatactgatttgaacaatgtagaagtcagattctgaattccaaagttatttctcataagtacccaatggcatctctccatctacaaagttgcagtatt

SEQ ID NO: 398159 - DNA, 120 bp, Artificial Sequence
  ENSG00000146021_41 (sequence is synthesized)
atgcaaataaaactgacctcattttctgctatgcaataagaatacttaattctagttcccgacaagccagttgcaatatcccctaagatgctttttgagctgtcttactttgatatctgt

SEQ ID NO: 398160 - DNA, 120 bp, Artificial Sequence
  ENSG00000146021_42 (sequence is synthesized)
tgtgtaatgtttgtatatttctgagccagatcctttcaaagattgcctttttataaaattgaagctatagcttttaggctaaaattttaacgtagatatttttataagatatttttttca

SEQ ID NO: 398161 - DNA, 120 bp, Artificial Sequence
  ENSG00000146021_43 (sequence is synthesized)
agagtttgaatcgctttttattgtccatgataatgaaatgttgtgttctttgcatcattcactctcaaacgtagttcatgcctgtagctctcttccttttgtttctcacccttcagaaac

SEQ ID NO: 398162 - DNA, 120 bp, Artificial Sequence
  ENSG00000146021_44 (sequence is synthesized)
atatttttcagtagctccaggtagatgagccttttttttttttttaaaaataccatattcaagggagtctgctgaattttaaaacgcagtcactggtgtttcttgaattgctagggactg

SEQ ID NO: 398163 - DNA, 120 bp, Artificial Sequence
  ENSG00000146021_45 (sequence is synthesized)
atgttatgttcgactcagcacttgcccgtctgtattgattgtgtctttttttttttttttggagtctgctttctgtgggggtgaggccgggctgtctcgtggtggctcccactgacgggc

SEQ ID NO: 398164 - DNA, 120 bp, Artificial Sequence
  ENSG00000146021_46 (sequence is synthesized)
actgagcctggtaccctgtggcatggagaagcctcagggaaaggcctgcccccccagcacatactcccatagtgtcctaggtccagccgaccattccttattctcttctatctccttgtt

SEQ ID NO: 398165 - DNA, 120 bp, Artificial Sequence
  ENSG00000146021_47 (sequence is synthesized)
gatctgaagcttccaatagcttgaggcctttgctgctggatgatgccctttttgggagcatcttgtctctaacctttaaaagaggggtcaatcctcatgatccctgtgtgttaagcatat

SEQ ID NO: 398166 - DNA, 120 bp, Artificial Sequence
  ENSG00000146021_48 (sequence is synthesized)
gctttgcaggtgctcacactacacttacaacttgcttcttgagctatgtctctactccaggctctgttttgtgtatttatctgccatttgcatcatggtttttaaaatttattattatta

SEQ ID NO: 398167 - DNA, 120 bp, Artificial Sequence
  ENSG00000146021_49 (sequence is synthesized)
ttattattgttgggacaggtgccatttaaattgcctccatgctccccatttgcacctagctggatcaagttgggaggctgagcaaactcatattccagttagttggagtttttaaaggct

SEQ ID NO: 398168 - DNA, 120 bp, Artificial Sequence
  ENSG00000146021_50 (sequence is synthesized)
ctgtttgcctggagaagcaaggaggttagaatgtaatttttttaagcgtttgcactatttagagtcctaagcccctcatgttcagctgtgctgtgtttctactgaccaagcaggagagcc

SEQ ID NO: 398169 - DNA, 120 bp, Artificial Sequence
  ENSG00000146021_51 (sequence is synthesized)
agcagcacttccagcatttgggaatggaagagatttcttctgtagtggataattacagcctcatagcccctgtgcagccttcgtcatgggactcagtgactcatggatatagcatcagcc

SEQ ID NO: 398170 - DNA, 120 bp, Artificial Sequence
  ENSG00000146021_52 (sequence is synthesized)
atggcaggaatgcacaggactgtggcatttgcagcatcaaatcaccctagtgccatgtttggttatgagattgtaaattattcgctcccccatcctcccctcccctcattttcagtggca

SEQ ID NO: 398171 - DNA, 120 bp, Artificial Sequence
  ENSG00000146021_53 (sequence is synthesized)
atagaggacccttgttgtacttcttgtttaatttgcatattatgtgtaaaatgctttcgttgaaagaaaactgaagacactgaatgtgtatgtctgtgtgggtgctctgtccctgtggtt

SEQ ID NO: 398172 - DNA, 120 bp, Artificial Sequence
  ENSG00000146021_54 (sequence is synthesized)
gtcatagccagtcagacttgatcactgacaccccgtacaacatattgcataggtaagatcctcgatctggtgttctctgcgtggctgttagggactgtatatcttgtaaaagaacacttg

SEQ ID NO: 398173 - DNA, 120 bp, Artificial Sequence
  ENSG00000146021_55 (sequence is synthesized)
tcacatgcttgatcagttacagcaatagctgaagaaacatttcctcaaatgtattattttaacaggaatcatgttctaatttcccatcctttaattttaataaaagctgaactgtgtgaa

SEQ ID NO: 398174 - DNA, 120 bp, Artificial Sequence
  ENSG00000146021_56 (sequence is synthesized)
ctcttgtgctctcctctagttttactgaactgccagtactttgaacacactttgtgctttttctcctccaggtctttgtgcatactgtttcctctgcctggaatactcttctttctcttt

SEQ ID NO: 398175 - DNA, 120 bp, Artificial Sequence
  ENSG00000146021_57 (sequence is synthesized)
acctgactcgtttctgctcttacttcaagtctcagattctaggaagctttccatcaacctgctatcactgggacgagttggccatcccctgtgcttctgtagctcctatgaaatcataat

SEQ ID NO: 398176 - DNA, 120 bp, Artificial Sequence
  ENSG00000146021_58 (sequence is synthesized)
agttgaaatgtgatgtttaaatgtttacttggcattctcctctactgaactctaagctttgtgagggtagtgatggtggctttgcctattgttttgtttcccttaaatctaaacgcagtg

SEQ ID NO: 398177 - DNA, 120 bp, Artificial Sequence
  ENSG00000146021_59 (sequence is synthesized)
cctggcacatagtagcctccagtaaatgcttgtttaatgaacaaacaaacctgtgaagtgagtgatagagtgcttagtccccttcagttttcaggatggagagatggagaataaggacct

SEQ ID NO: 398178 - DNA, 120 bp, Artificial Sequence
  ENSG00000146021_60 (sequence is synthesized)
cacacaaaatcacacagtacttggtggaagaagctgagctatgacctgccttccttcagaggaatgcactttgctttggaagatatgaagaaattcccagtacattgtctttcctattgg

SEQ ID NO: 398179 - DNA, 120 bp, Artificial Sequence
  ENSG00000146021_61 (sequence is synthesized)
ttacgtgtactacaacatctagttcatgttgcccaaatgtcctgaggtggttccaaataccaatcccacacttcttgaccattgtcctgtggacaataacttggaataaatgtgaaactg

SEQ ID NO: 398180 - DNA, 120 bp, Artificial Sequence
  ENSG00000146021_62 (sequence is synthesized)
agagactgttcttccagcatcacttgcttttgcccattccttatctcctctactgccctcagatgccttgagggctgtgagggtaccttagtcatctttgtatcacatgcagtacctgac

SEQ ID NO: 398181 - DNA, 120 bp, Artificial Sequence
  ENSG00000146021_63 (sequence is synthesized)
tcagtgccccaggaggtgccacggaaggactcagcagatgtcccccaagggattgagacacaaagttcagctctggccatgaacatcctcagtgacccagtgacccaggggcagaataaa

SEQ ID NO: 398182 - DNA, 120 bp, Artificial Sequence
  ENSG00000146021_64 (sequence is synthesized)
gctgtgggacctagcaagttactggacttctttgaattttggctttcctagctggaagtttgtattgaagtaagttcatggagaagtaaacaaatcaagtatacaactaaactttttacg

SEQ ID NO: 398183 - DNA, 120 bp, Artificial Sequence
  ENSG00000146021_65 (sequence is synthesized)
aagtaaaacacccacataactagcacccaggtcaagaaacaaaccccagaacccccttccagttactactccctaccctgggaagggcacctaccttcttggcttctcacaccttaggtg

SEQ ID NO: 398184 - DNA, 120 bp, Artificial Sequence
  ENSG00000146021_66 (sequence is synthesized)
agatttatatatttttaaggcccattggctttgcctaaaccttggtaaacagatactaaaaatctccagtaacattgcaaaattttgttctaattatcaggttcagcttcaaaacgtgta

SEQ ID NO: 398185 - DNA, 120 bp, Artificial Sequence
  ENSG00000146021_67 (sequence is synthesized)
aaatgcattgtgtactgagagtaagaggctgactctcgttagatccatttctatcagtgtgtttaaagccaaaaggaaagtaaaatacacatggctttcttctgacttgagttgtgtgat

SEQ ID NO: 398186 - DNA, 120 bp, Artificial Sequence
  ENSG00000146021_68 (sequence is synthesized)
tatggtcttttactcaagcttaaatgtttttatttttttgtcttccgagttcatgttgcccaaatgtcctgaggtggttccaaataccaatcccacacttcttgaccattgtcctgtgga

SEQ ID NO: 398187 - DNA, 120 bp, Artificial Sequence
  ENSG00000146021_69 (sequence is synthesized)
caataacttggaataaatgtgaaactgaagtctgagtgcccatcagagagtgtcccaatccaaccagtctataagaagatctggggtgacatgtctgagagtaaagccaaaaagatagaa

SEQ ID NO: 398188 - DNA, 120 bp, Artificial Sequence
  ENSG00000146021_70 (sequence is synthesized)
aaaacagaatttgggtcacatttgcattatatttcaaagttttgaggttgctagtcttatgaggaggcaggtagggtgtcattatatttgttttacagatgaggacactgaggtccaggg

SEQ ID NO: 398189 - DNA, 120 bp, Artificial Sequence
  ENSG00000146021_71 (sequence is synthesized)
agacaaaatggcactccccaagtcccctcactggtcagggctgtccaggactggatgccaggcctcctgatttctggttactgtagtcagcatgaggctgggatgctgtgctctgccttt

SEQ ID NO: 398190 - DNA, 120 bp, Artificial Sequence
  ENSG00000146021_72 (sequence is synthesized)
tcccagggtctggagctgagcgtatatcctgaacagggagtgtgcatttgccaggtgggctcttgattagaggaggggagaaattgagaccccaaaagctagctgcagatcctgcaacct

SEQ ID NO: 398191 - DNA, 120 bp, Artificial Sequence
  ENSG00000146021_73 (sequence is synthesized)
ttgcctgagtgcctggaacgcagctcgcttcctcagcagggtgtgggcaatgccaccagatggttaggggaaaaaagaggccatctctcagggaatgcgtgttcctgctgagcatggagg

SEQ ID NO: 398192 - DNA, 120 bp, Artificial Sequence
  ENSG00000146021_74 (sequence is synthesized)
aaaggaaggtgaggcagctttggaactcaacaaattttattaaacctgtcagttagagagagccattgttggtacaacagcaccatctgctgttagtttagagcaactgctaggagctac

SEQ ID NO: 398193 - DNA, 120 bp, Artificial Sequence
  ENSG00000146021_75 (sequence is synthesized)
tagcatacctgcataattgctgggagggattttattaatttatatttttgttattcaagcaatatctcttgagaacctactgctgtggagcacagggaagcagacgaggacaaggtaaaa

SEQ ID NO: 398194 - DNA, 120 bp, Artificial Sequence
  ENSG00000146021_76 (sequence is synthesized)
acagtcctcatccatatggagttatagtctacaagtctggttcttgggtctgaaacctgactgcacatcccagtcacctgaggaactttctgcacatcccagtcacctgaggaacttttt

SEQ ID NO: 398195 - DNA, 120 bp, Artificial Sequence
  ENSG00000146021_77 (sequence is synthesized)
ctgactcctgaccagtgtggaatctgtctttcaaaaagcttcccagtcgattgagatgcagcctgcccatggagtggagaagtctgtggtccatgtgaactactgatctagtacaactct

SEQ ID NO: 398196 - DNA, 120 bp, Artificial Sequence
  ENSG00000146021_78 (sequence is synthesized)
ttccctttacaaatagggaaactgaggcccagaaaggggaagggtcacccagtgagcaagtcagagagacaggtccagaacacaggtgtcctagctaccaggtcagttgcactttctaga

SEQ ID NO: 398197 - DNA, 120 bp, Artificial Sequence
  ENSG00000146021_79 (sequence is synthesized)
tactgtgctgtcttccttctttatggctttcatcttcttgttgtataaaaggattttaaaagattatactaaaacttgtaaacgaagcaattctagcactcagctcaggctgatcaacac

SEQ ID NO: 398198 - DNA, 120 bp, Artificial Sequence
  ENSG00000146021_80 (sequence is synthesized)
ggtgagtgatctgataatgccctctgcagtacaggaggagagaagtgggcagaaaggtcagcttctgcttacacgaccagcagggaggcctccctgatgataatttcagcacttttgctg

SEQ ID NO: 398199 - DNA, 120 bp, Artificial Sequence
  ENSG00000146021_81 (sequence is synthesized)
tgtggctagtttcaatttttaactctttttactcaactaatataaggatgagtaagtaatacagcattgtaggaaaactaggcaatatagataggcaaaaaaggaaaatgaatgtaattt

SEQ ID NO: 398200 - DNA, 120 bp, Artificial Sequence
  ENSG00000146021_82 (sequence is synthesized)
atttaccactcagaaataattattcttaatattttaatggatttatttcagtattttttgtctttttttctttgcttatgaacatcctctcccgtatgtatgtatgtatgtatgtatgta

SEQ ID NO: 398201 - DNA, 120 bp, Artificial Sequence
  ENSG00000146021_83 (sequence is synthesized)
gggattaaagactgggaagcatggctgtagggatacagagaatctgctggtgtttagggtccgtgaagggcagagtagtgggaaataaggctggaaagcaggctaggaagtttggactta

SEQ ID NO: 398202 - DNA, 120 bp, Artificial Sequence
  ENSG00000146021_84 (sequence is synthesized)
ctggcgggcagtggagagccatgaaaagatcttgagcatgggagtgatatgataggaaaaggcagatgagtctctgccagtgggatccaatatctgagaatgtcaccttctcttgcaggt

SEQ ID NO: 398203 - DNA, 120 bp, Artificial Sequence
  ENSG00000146021_85 (sequence is synthesized)
gtttagtgggtcttctgtatgtgctgagggaaccagcccactgggttaagtgttaggtgttgtaaagtttaagagcataggcttgaaaataggacacttaggtttcagtctctgctctgc

SEQ ID NO: 398204 - DNA, 120 bp, Artificial Sequence
  ENSG00000146021_86 (sequence is synthesized)
ttcaagcctcagtttttcttccatagaacagatattatagtagagcccagcagggttgttgtgaggactaaaggagtagagtatgcaagtcagctgcttcgtgtggagcctggggtaaca

SEQ ID NO: 398205 - DNA, 120 bp, Artificial Sequence
  ENSG00000146021_87 (sequence is synthesized)
aatgttccatgaaagttagctgtctttgttgaagaggactgaagcaagaagggtcatgtccacaatgtttctatgttccctttatgtcttagttttaggcaacttgaagccaaattcaag

SEQ ID NO: 398206 - DNA, 120 bp, Artificial Sequence
  ENSG00000146021_88 (sequence is synthesized)
actgtaaaaacggtgcctagaatacagagtacttccacttcctctgaaaaggaaagaaaaattaagaattatggggtttccttatggtgccatatgttttctcgtttaatccttataata

SEQ ID NO: 398207 - DNA, 120 bp, Artificial Sequence
  ENSG00000146021_89 (sequence is synthesized)
acccagaggggcaaagattgtaactcctttttttacacatgtaggccttgaggcttatggaggttgggatttatcggggtcactagccttagagaggctcaggattcaaatccatgtcat

SEQ ID NO: 398208 - DNA, 120 bp, Artificial Sequence
  ENSG00000146021_90 (sequence is synthesized)
tctggctctgcagtgcatagttcttccgctaagctagctgccaccattgatacgctcttttctgcatacccattacgtgacttattttatacagtaaatggcattagacacttttataag

SEQ ID NO: 398209 - DNA, 120 bp, Artificial Sequence
  ENSG00000146021_91 (sequence is synthesized)
cagagaataaaccttaaaatatatgaacaaaacaaaacatcgagacagcaggttagccctcagctgtctccaaggagtctctggaaggaagggaagatatgatgcaaggataaagaggag

SEQ ID NO: 398210 - DNA, 120 bp, Artificial Sequence
  ENSG00000146021_92 (sequence is synthesized)
gtttagcagcctagcagcccagcagcccagctcttgttactttccagccatataatactgggtacatgcttaacctttttaaacctcagttttcttaccgggaaaaaatggcacttgcct

SEQ ID NO: 398211 - DNA, 120 bp, Artificial Sequence
  ENSG00000146021_93 (sequence is synthesized)
ttataggattgtttggggataaacaataaaatgagataatccatgtaggcctataatacagtgttcagtgaatgttactgatcttactctgtagtctttgtgaccactgctgtgattctt

SEQ ID NO: 398212 - DNA, 120 bp, Artificial Sequence
  ENSG00000146038_0 (sequence is synthesized)
agaagctgtccaccttgattctgcccgtagcaggtgaacctggtgtggtgcgcgcactgcgggtcctgattggctgtgcacgccacggtgaaaaacttgagcgtctactccgagtcctgc

SEQ ID NO: 398213 - DNA, 120 bp, Artificial Sequence
  ENSG00000146038_1 (sequence is synthesized)
aagctcctagtgtctcctctgggtggacgcctaggcgcacggccgttacttctctttcacctgtggattcgtcagtttctcgttcgtttcaggaggcgatcccgcgccctgggtgcggtg

SEQ ID NO: 398214 - DNA, 120 bp, Artificial Sequence
  ENSG00000146038_2 (sequence is synthesized)
aggccgctgggacagcggaggtgcctcccgacgcgaagcagcgagctgaggcggcggccagcggggaagatgagcggcagcagcgccaggtccagccacctgtctcagcccgtcgtgaag

SEQ ID NO: 398215 - DNA, 120 bp, Artificial Sequence
  ENSG00000146038_3 (sequence is synthesized)
agcgtgcttgtgtaccgcaacggggaccccttctacgcggggcgccgcgtcgtcatccatgagaagaaggtgtccagcttcgaagtcttcctgaaggaggtgaccggcggcgttcaggca

SEQ ID NO: 398216 - DNA, 120 bp, Artificial Sequence
  ENSG00000146038_4 (sequence is synthesized)
ccctttggggccgtcaggaacatctacaccccgcggactggccaccgaatccggaagctagaccagatccagagcgggggcaattacgtggctggaggccaggaagccttcaagaaactc

SEQ ID NO: 398217 - DNA, 120 bp, Artificial Sequence
  ENSG00000146038_5 (sequence is synthesized)
aattacttggacataggagaaatcaagaaaagaccaatggaagttgttaatacagaggtaaaaccagtaatccatagcaggatcaacgtgtcagctcgctttagaaaaccgcttcaggag

SEQ ID NO: 398218 - DNA, 120 bp, Artificial Sequence
  ENSG00000146038_6 (sequence is synthesized)
ccgtgcactatcttcttgattgcaaatggagacctcataaacccagcttctcgcctccttatccccagaaaaaccttgaatcagtgggatcatgtactacaaatggtcacagaaaaaatc

SEQ ID NO: 398219 - DNA, 120 bp, Artificial Sequence
  ENSG00000146038_7 (sequence is synthesized)
actctgaggagcggggctgttcacaggctttatactttagaaggaaaacttgttgagagtggagcagagttggagaatgggcagttttatgtggctgttggcagagataagtttaagaaa

SEQ ID NO: 398220 - DNA, 120 bp, Artificial Sequence
  ENSG00000146038_8 (sequence is synthesized)
ctgccttacagtgagttactttttgacaagtcaacgatgagaaggccttttggtcagaaagcttcttcactacctcctattgtaggatccagaaagtctaaagggagtggaaatgatcgc

SEQ ID NO: 398221 - DNA, 120 bp, Artificial Sequence
  ENSG00000146038_9 (sequence is synthesized)
cactctaagtcaacagttggatccagtgacaactcatctcctcagcccctgaagaggaaagggaaaaaagaagacgtgaattcagaaaaactgacgaaattgaaacaaaatgtaaaatta

SEQ ID NO: 398222 - DNA, 120 bp, Artificial Sequence
  ENSG00000146038_10 (sequence is synthesized)
aagaattcacaagaaaccattccaaatagtgatgaaggcattttcaaagctggagcagagaggtctgaaacacggggggcagcagaagtccaagaagatgaagatactcaggttgaggtt

SEQ ID NO: 398223 - DNA, 120 bp, Artificial Sequence
  ENSG00000146038_11 (sequence is synthesized)
ccagtcgatcagaggccagcagaaatagtagacgaggaagaagatggagagaaggcaaacaaggatgcagaacagaaagaagacttttcaggaatgaatggtgaccttgaagaggaagga

SEQ ID NO: 398224 - DNA, 120 bp, Artificial Sequence
  ENSG00000146038_12 (sequence is synthesized)
ggtagggaggctacagatgcccctgagcaagtcgaggagattctggatcacagtgagcagcaggcacgccctgctcgtgtaaatggaggcaccgatgaggagaatggtgaggagctgcag

SEQ ID NO: 398225 - DNA, 120 bp, Artificial Sequence
  ENSG00000146038_13 (sequence is synthesized)
caggttaataatgagcttcaactggtcctagacaaggaaagaaagtctcaaggagctggcagtggacaagatgaggctgatgtagaccctcaaagaccaccaaggccagaagtaaaaatt

SEQ ID NO: 398226 - DNA, 120 bp, Artificial Sequence
  ENSG00000146038_14 (sequence is synthesized)
accagtccagaagaaaatgaaaacaaccaacaaaacaaggactatgctgccgtggcttagaacatttttaaaaagagagtatatggatcgcaagaaaaatgaagggttatcatacttgaa

SEQ ID NO: 398227 - DNA, 120 bp, Artificial Sequence
  ENSG00000146038_15 (sequence is synthesized)
agataagcacatagttattgctgaatataatgtgacactatggtcgaatactacctacgaattataacattagaagcctagtggaaagaccagataactttaaatggctactaaaggata

SEQ ID NO: 398228 - DNA, 120 bp, Artificial Sequence
  ENSG00000146038_16 (sequence is synthesized)
attacttacttttattgcatgtgttttaaaagtcatatagaaatattaaataagacggacagaggagaatttgcactggaagacaattgccacttgtaaaggatgaaaaataggatcact

SEQ ID NO: 398229 - DNA, 120 bp, Artificial Sequence
  ENSG00000146038_17 (sequence is synthesized)
cttattgtacgctttattataagtttagaaggcagtttattctaaataatttttctctaggaaggcgtagaattttaaagaactggtaataggaaagcatgtactattttcttaaagcaa

SEQ ID NO: 398230 - DNA, 120 bp, Artificial Sequence
  ENSG00000146038_18 (sequence is synthesized)
taaactcttgaatgaacagattgcgatttactttcagacataatttggagatggcagtagatcaaaatgtgtccatgacttgttaacatgcctttctttcttcctccttagccaaaatcc

SEQ ID NO: 398231 - DNA, 120 bp, Artificial Sequence
  ENSG00000146038_19 (sequence is synthesized)
tttggtgggaggaagcattggttcagagtgttagtgactagtatcgccatgccgtcacttaaatgctttcaggcttgcatgcttgtggctccaatggcgcacactcaggaaggaattgta

SEQ ID NO: 398232 - DNA, 120 bp, Artificial Sequence
  ENSG00000146038_20 (sequence is synthesized)
aaggagcacccagttatattataaagcctggatgtatggtttgcagataatggaaatcctgtggattttcactgatccagtctatctttaccaatagtatctctctcttctcccttatgt

SEQ ID NO: 398233 - DNA, 120 bp, Artificial Sequence
  ENSG00000146038_21 (sequence is synthesized)
tattagagaacctgatattggctattccaaagattaaattattttcaaatagttttcaacaaaaataaaagtgtattaggaagaaaaaagtagactatatgaagagtttgtgactgctca

SEQ ID NO: 398234 - DNA, 120 bp, Artificial Sequence
  ENSG00000146038_22 (sequence is synthesized)
atttaacttgttttttgccttatttctattaagactgttttactatgtttttgccctagggatatcagcaaatatttatttttcctagcatgatatagttagaatttcaagcagatttct

SEQ ID NO: 398235 - DNA, 120 bp, Artificial Sequence
  ENSG00000146038_23 (sequence is synthesized)
ttgtaattagaaggcatctgatagaaattgtaaaactttagaagttattataatgaaaccaattcctgaatcacaacttcatggactgactaaattgatttatagttgccttgtgaggta

SEQ ID NO: 398236 - DNA, 120 bp, Artificial Sequence
  ENSG00000146038_24 (sequence is synthesized)
gtgaggtatgtatggggaaaacataaaaacataattaaaacataatttcgtcctttttatgaattcttaagagatgttcttccataaatatagaaataatatatttttcttaaaggatat

SEQ ID NO: 398237 - DNA, 120 bp, Artificial Sequence
  ENSG00000146038_25 (sequence is synthesized)
ttatgtggaagttgtaagcttgaaattttaacttctagtgcttttctaaaattcacaattacaagtttaaaacattttttctcttccaggtttcatttggaataaagagttggcagttat

SEQ ID NO: 398238 - DNA, 120 bp, Artificial Sequence
  ENSG00000146038_26 (sequence is synthesized)
ataaagcacttaataatactatagaaaatagatgtgttttttcttaatatgattttggtattttccacagatcagaagtgtaaacagagagataatgtaacagtatttggaagagataat

SEQ ID NO: 398239 - DNA, 120 bp, Artificial Sequence
  ENSG00000146038_27 (sequence is synthesized)
gacacaaggatatagtgatctgggagcatgaattagaaacagggtactatgtttctggtgtaaaatctaaattgtgctttctactagcgttactttttcaaatgggatgatataaagcac

SEQ ID NO: 398240 - DNA, 120 bp, Artificial Sequence
  ENSG00000146038_28 (sequence is synthesized)
ctactagcgttactttttcaaatgggatgatataaagcactgtgggctataagcaacaatcttgggttggtaggcaaatagaccaattgatctttattattattattattattattatta

SEQ ID NO: 398241 - DNA, 65 bp, Artificial Sequence
  ENSG00000146038_29 (sequence is synthesized)
ttattttttgagatgaagtcttgctcttgtcgcccaggctgctgagcctcccgagtagctgggat

SEQ ID NO: 398242 - DNA, 120 bp, Artificial Sequence
  ENSG00000146038_30 (sequence is synthesized)
gtcccagttggtcttttaatattaaatttgtgcactattactgggtctggagttaatgatttcaaatagtttctaaaaataactgattaaatgtaagaaattataactaattatcaaggt

SEQ ID NO: 398243 - DNA, 120 bp, Artificial Sequence
  ENSG00000146038_31 (sequence is synthesized)
gattctcttttgtttcttcaatggagagtttctctttctcttttcctcctctaataaaaatatttctttttttcctgtccttttattcattatattatgaaacttaggttttaggaaaca

SEQ ID NO: 398244 - DNA, 120 bp, Artificial Sequence
  ENSG00000146038_32 (sequence is synthesized)
ccttaagcgtcattttaatgaagcacaacattgatattttacatgaataataacgtttggtattttaaatatacttcaagggggtaataagccacaataactgtaccaaaaaaacttaaa

SEQ ID NO: 398245 - DNA, 120 bp, Artificial Sequence
  ENSG00000146038_33 (sequence is synthesized)
aatggggacatattcatcccttgtgtgtgcatattttaccacttgttgacaagatacaattgtgacctactttgaggggatgaataacgacttatcactttaagacactttgcaaacatg

SEQ ID NO: 398246 - DNA, 120 bp, Artificial Sequence
  ENSG00000146038_34 (sequence is synthesized)
ttactaaaaaaaggtgcctagccaaggaaaaaaccattcacttggaattaaaattgtggatgtcacttcagagatgactttaacataaatgctgaaagttcattcacctcacaaatgtgg

SEQ ID NO: 398247 - DNA, 120 bp, Artificial Sequence
  ENSG00000146038_35 (sequence is synthesized)
cagttttctctgtggagaatggtggtctccgtggcagactggctctccaaattaaatgaaactcattgacagacctgggaccttttatgtgagtggacagacaagatcttggtttggctt

SEQ ID NO: 398248 - DNA, 120 bp, Artificial Sequence
  ENSG00000146038_36 (sequence is synthesized)
catgtactgttttctagagagagtgctacgaaaaacttatgatgcttttatgtgataaccaatataatgctttaatatgttaattctttgtgatgctatatacatagtttttatagtttt

SEQ ID NO: 398249 - DNA, 120 bp, Artificial Sequence
  ENSG00000146038_37 (sequence is synthesized)
atgaaaccactttgttaaacttatctggattttaagacacttgtaaacaaatggtttgttagtaaaattggggcattaagagttttacagagcaaataaagaagattttgacaaaagtca

SEQ ID NO: 398250 - DNA, 120 bp, Artificial Sequence
  ENSG00000146038_38 (sequence is synthesized)
gaccactgaatgttttctcaatgaaaatgtggaacaactgggggtggtgtggtggtcggaggagggggtgcacaaaaatactatcaactaaaaagggaatccaaatgtctattaaaaata

SEQ ID NO: 398251 - DNA, 120 bp, Artificial Sequence
  ENSG00000146038_39 (sequence is synthesized)
agaaaagaccaatggaagttgttaatacagagctacatgttctctgattgaaatccatgggaaggttccctgtcaagtgagaagattctgagcgttgttaaataaatctttaccaaagct

SEQ ID NO: 398252 - DNA, 120 bp, Artificial Sequence
  ENSG00000146039_0 (sequence is synthesized)
atttgaaaggaatgaggatcctgcactcttcctccctcagtaagtaaatgccagtccctaggaagagagaaccaaaatgtctaccggaccagatgtcaaggctacagtgggggacatttc

SEQ ID NO: 398253 - DNA, 120 bp, Artificial Sequence
  ENSG00000146039_1 (sequence is synthesized)
cagtgatggcaatttaaacgtggctcaagaggaatgctccaggaaaggtttttgttcagtccgacatgggctggccctcatcttgcagctctgtaatttttcaatttacacccaacaaat

SEQ ID NO: 398254 - DNA, 120 bp, Artificial Sequence
  ENSG00000146039_2 (sequence is synthesized)
gaacttgagcattgccatcccagctatggtgaacaacacagccccacctagccagcccaatgcttccacagaacggccctccactgactcccagggctactggaatgaaactctaaaaga

SEQ ID NO: 398255 - DNA, 120 bp, Artificial Sequence
  ENSG00000146039_3 (sequence is synthesized)
atttaaagcaatggcccctgcatatgactggagtcctgaaatccagggaatcatcctcagctccctcaactatggctcattcttggctccaatccccagtggctatgtggctggaatatt

SEQ ID NO: 398256 - DNA, 120 bp, Artificial Sequence
  ENSG00000146039_4 (sequence is synthesized)
tggagccaagtatgtggttggtgctggcttgtttatttcctcattcctgaccctcttcattccactggcagctaatgcgggagtggccttgctcattgtcctccggattgtacaaggcat

SEQ ID NO: 398257 - DNA, 120 bp, Artificial Sequence
  ENSG00000146039_5 (sequence is synthesized)
agcccaggttatggtattaactggtcagtattcaatttgggtcaaatgggctcccccactggaaaggagtcaactcaccaccattgctggatcagggtcaatgctggggtccttcattgt

SEQ ID NO: 398258 - DNA, 120 bp, Artificial Sequence
  ENSG00000146039_6 (sequence is synthesized)
tctacttgctggtggtctcctctgccagaccataggatggccttacgtcttctatatctttggaggaattggctgtgcttgttgtcctctctggtttcctctcatttatgatgatcctgt

SEQ ID NO: 398259 - DNA, 120 bp, Artificial Sequence
  ENSG00000146039_7 (sequence is synthesized)
gaatcatccctttatcagtgctggtgagaagagatacattgtgtgttcattggctcagcaggactgttcaccaggctggtctcttcccattagggctatgatcaaatccttaccactctg

SEQ ID NO: 398260 - DNA, 120 bp, Artificial Sequence
  ENSG00000146039_8 (sequence is synthesized)
ggccattttagtctcttatttctgtgaatactggcttttttataccattatggcgtacacaccaacgtacatcagctcggtacttcaagccaacctcagagatagtgggatcctgtctgc

SEQ ID NO: 398261 - DNA, 120 bp, Artificial Sequence
  ENSG00000146039_9 (sequence is synthesized)
cttgccgtttgttgttggatgtatctgcattatccttggaggtctactggcagactttcttctctccagaaaaatcctcagactcatcaccatcaggaaactcttcactgccattggggt

SEQ ID NO: 398262 - DNA, 120 bp, Artificial Sequence
  ENSG00000146039_10 (sequence is synthesized)
tctcttcccatccgtgatcctcgtgtccctgccctgggtcagatccagccacagcatgaccatgaccttcttggtgctgtcttctgccatcagcagcttctgtgaatcaggagcccttgt

SEQ ID NO: 398263 - DNA, 120 bp, Artificial Sequence
  ENSG00000146039_11 (sequence is synthesized)
taacttcttggatattgctcctcggtacactggctttctcaaaggactattgcaagtctttgcacacatagctggagccatctctcctactgctgctggatttttcatcagtcaggattc

SEQ ID NO: 398264 - DNA, 120 bp, Artificial Sequence
  ENSG00000146039_12 (sequence is synthesized)
agagtttggttggagaaatgtcttcttgctttcagctgctgttaacatatcgggcctggttttctacctcatctttggccgagcagatgtgcaggactgggctaaagagcagacattcac

SEQ ID NO: 398265 - DNA, 120 bp, Artificial Sequence
  ENSG00000146039_13 (sequence is synthesized)
ccacctctgagcaaaccgagagatgtgctagatcctggtgcttagttcatcattgttttccctcacagacatttctctttcatgcctgcttgactgataagccattagctagaccctgac

SEQ ID NO: 398266 - DNA, 120 bp, Artificial Sequence
  ENSG00000146039_14 (sequence is synthesized)
tttctgtgttctccactcttccactgttatcctagtaaaagcatcaggggctggggacaatttctttccaaagcaaaagaggaagccagaccttgggaccgagaactgagaatcacaagg

SEQ ID NO: 398267 - DNA, 120 bp, Artificial Sequence
  ENSG00000146039_15 (sequence is synthesized)
gagttgcgcccaacatgcagaacatgaatcctctgagctgtcctcaaaagaaagccccaaacaacagaaagcatagtgttttccattgttggtgaaaaatgtcaaggaggaaagaacaat

SEQ ID NO: 398268 - DNA, 120 bp, Artificial Sequence
  ENSG00000146039_16 (sequence is synthesized)
aatgattccatcatgataagaggaatgaacgtgtctgcaactaatgggagcaagatagtacactttaactctttcagacaacttgcattctgtggatgccagctttggaatcagagccgc

SEQ ID NO: 398269 - DNA, 120 bp, Artificial Sequence
  ENSG00000146039_17 (sequence is synthesized)
ctctggaatacctgtgcttccagagttagcttttggacagttaccttctttctggccatcttgacttctgccccacatctgctttttggctttgtgcagatctttaacatgttagtgaac

SEQ ID NO: 398270 - DNA, 120 bp, Artificial Sequence
  ENSG00000146039_18 (sequence is synthesized)
agacattgcccagtgtctcttctagcccctccaacagttcttcatgtagcactgcttttggacagtgacccatgatatctgccttcgtttgcccctctgactgttggaatcccacgcacc

SEQ ID NO: 398271 - DNA, 120 bp, Artificial Sequence
  ENSG00000146039_19 (sequence is synthesized)
attcagtaggattcaattcaatgtggaaccattcaacattcacctcattaacctaaaatgtctcccaaagatgtatgtaagacacacactgccctaacctcactccaaatgtctggagaa

SEQ ID NO: 398272 - DNA, 120 bp, Artificial Sequence
  ENSG00000146039_20 (sequence is synthesized)
atgtgtgtagtgcttttgttaaagcccctatatgggcagcatggaggatcataagatagcaaaaccatttcaacactaaatgaatattaatgtacacacaccttgtgtggatggcagaaa

SEQ ID NO: 398273 - DNA, 120 bp, Artificial Sequence
  ENSG00000146039_21 (sequence is synthesized)
tcaaatcatacacagtattaaggagttcagtgtctcgggagggcagataactttaatcaaagtatcacacaagtgaatatgtaataacaactgtagaaataatgagtggttacatgggtt

SEQ ID NO: 398274 - DNA, 120 bp, Artificial Sequence
  ENSG00000146039_22 (sequence is synthesized)
atgagagtggatgataagtgcactaatctgagtgtaaggaagggccacccctgcaaagtttcagctgagctgggatctgaaggataatagttaactgttgtgggagactgagaggagaat

SEQ ID NO: 398275 - DNA, 120 bp, Artificial Sequence
  ENSG00000146039_23 (sequence is synthesized)
attttaggaagaaagaacagcataagcaaaagtttcatggcaggagggagaaattagctatggccagagtatagagaataagggaagtatgatttgtgaggagactgtagaagaattaag

SEQ ID NO: 398276 - DNA, 120 bp, Artificial Sequence
  ENSG00000146039_24 (sequence is synthesized)
gtcaggagcacacaggatgatgtaggcccagtgaagtgcgttggtctttattttgaaatcagtaggaagtgtcctggttttcaaaggcactctgcatgagagattaggttggagtaggag

SEQ ID NO: 398277 - DNA, 120 bp, Artificial Sequence
  ENSG00000146039_25 (sequence is synthesized)
cttacagtgtagtccaggagagaacaatggcccctggcatgaggcaatagacatggtgagaggtgaatggattatttgatttaggtggattatttgatttagggaataaacctgacgggt

SEQ ID NO: 398278 - DNA, 120 bp, Artificial Sequence
  ENSG00000146039_26 (sequence is synthesized)
cctattactaagtgagagagtgaaagatgtccagagtaactcctgagttttggtttgctattatattaatggggatgcctctaacacagacagcaacacagatagcaattatatccaagt

SEQ ID NO: 398279 - DNA, 120 bp, Artificial Sequence
  ENSG00000146039_27 (sequence is synthesized)
gtagacaacaagaaggaaaatggacacatgactctggatttctcttgtgagacctgggctccatttacaaacgtataaatcatcttgatataggtagtgattacaatttttgcatggatg

SEQ ID NO: 398280 - DNA, 120 bp, Artificial Sequence
  ENSG00000146039_28 (sequence is synthesized)
agtcatccatgggtgaaagtggcataagaaaaggaagcttgggaataagccttaaagaattccagtatttaatggtcagctggaggatgattagcagaaagaaagaaagaaagaaagaaa

SEQ ID NO: 398281 - DNA, 120 bp, Artificial Sequence
  ENSG00000146039_29 (sequence is synthesized)
ctccaggaaagggatagtggatgaattcttcccgctgttgtcaaactaatgtatatggactcaaccacagggatatccccagagctcctatggaacactagcaaattttgtgtttttgtt

SEQ ID NO: 398282 - DNA, 120 bp, Artificial Sequence
  ENSG00000146039_30 (sequence is synthesized)
ctcggtagggacctcttttgcctcatcctttcagacactcaattcaagtctagcagccctaaatctactctgatgtgaaagtaaaatgtggcaggtacaacaggttgcaggaaatgtcag

SEQ ID NO: 398283 - DNA, 120 bp, Artificial Sequence
  ENSG00000146039_31 (sequence is synthesized)
ggtggaccattgtgaacttagtttttctgggcgtgaacaagaggagtcagtggccatgctcagagtcaactgagggagactcacacaaacctctctctgttgaggaatgcagcacttgcc

SEQ ID NO: 398284 - DNA, 120 bp, Artificial Sequence
  ENSG00000146039_32 (sequence is synthesized)
taaggcggaatcactgaaagaaatcttgagattctatagggtatgctcatgaaaatctttaatgaaggcaaaggacacaggactgcaggagaaatatctgtctctgatacagtaaaaaca

SEQ ID NO: 398285 - DNA, 120 bp, Artificial Sequence
  ENSG00000146039_33 (sequence is synthesized)
gttgactgagacttccaaacatagctcccagggtgctgtcccagtcaacaggacatccttcatcttcagataatgaaccaccaagaaatgtgagagatgcccttgtcacaggggagccga

SEQ ID NO: 398286 - DNA, 120 bp, Artificial Sequence
  ENSG00000146039_34 (sequence is synthesized)
ccttgtcacaggggagccgacgtctcatctggtgaggggtcttttatacccacggagggtataaaagttacaagatcagactcaacagcagaagccaaaacaacaacaacaacaacaaca

SEQ ID NO: 398287 - DNA, 120 bp, Artificial Sequence
  ENSG00000146039_35 (sequence is synthesized)
aaaaaccttacaaaccaggtgcagaccatcaatctgaccatcttgcataaacaatgttgacaagttaatagaggttacccccttgggagtaccagtccctagcacaggattatactaatc

SEQ ID NO: 398288 - DNA, 120 bp, Artificial Sequence
  ENSG00000146047_0 (sequence is synthesized)
gtttgtttacttggcgagacttggagctgaggtcatttggagctgtttaatactgaagagctgttgagcactggaaagtgctgtgtaaccctggaaaagaaccgtgtaacgctgcagaag

SEQ ID NO: 398289 - DNA, 120 bp, Artificial Sequence
  ENSG00000146047_1 (sequence is synthesized)
tgtgtggtagctatgccggaggtgtcatctaaaggtgctaccatttccaagaagggctttaagaaagctgtcgttaagacccagaaaaaggaaggcaaaaagcgcaagaggacccgtaag

SEQ ID NO: 398290 - DNA, 120 bp, Artificial Sequence
  ENSG00000146047_2 (sequence is synthesized)
caggtccatccggacactggcatctcttcgaaagctatgagcattatgaattccttcgtcactgatatctttgagcgtatagcgagcgaggcatcacgtttggctcactacagcaagcgc

SEQ ID NO: 398291 - DNA, 120 bp, Artificial Sequence
  ENSG00000146047_3 (sequence is synthesized)
tccaccatttcttccagagagattcagacagcagtgcgcttgctactgccgggagagctggctaaacatgctgtgtctgagggcaccaaggctgtcactaagtacaccagctccaagtaa

SEQ ID NO: 398292 - DNA, 120 bp, Artificial Sequence
  ENSG00000146049_0 (sequence is synthesized)
cattatgctaacagcataaacatgcagggggtgggagcagggtcacaaaagtgagtgttgtcaattctacttggaatgaaaggttgaaataatttaaacagtacgggaaatgcagagcaa

SEQ ID NO: 398293 - DNA, 120 bp, Artificial Sequence
  ENSG00000146049_1 (sequence is synthesized)
ttttctcctctggtgacaatatagtgtccaacacttggaagtgatttttaagaatgtttatttaaattaaaaggatggatttccaaggaaaaaaaataaggaaaaggaaagaaaaaactg

SEQ ID NO: 398294 - DNA, 120 bp, Artificial Sequence
  ENSG00000146049_2 (sequence is synthesized)
aacagaaaacgcaaaagtatcagtttggtcactaacctttgcaaggatacctttttattttctttaagattcctgttgtttatacacagattttaagtttactcctactgctgacccaag

SEQ ID NO: 398295 - DNA, 120 bp, Artificial Sequence
  ENSG00000146049_3 (sequence is synthesized)
tgaaattccttctccagtcacagtgtcaacctctaccccccaactgcaacgagagttttgaggggcatcaatcacaccgagaagtcacagcccctcaaccactgaggtgtgggggggtag

SEQ ID NO: 398296 - DNA, 120 bp, Artificial Sequence
  ENSG00000146049_4 (sequence is synthesized)
ggatctgcatttcttcatatcaaccccacactatagggcacctaaatgggtgggcggtgggggagaccgactcacttgagtttcttgaaggcttcctggcctccagccacgtaattgccc

SEQ ID NO: 398297 - DNA, 120 bp, Artificial Sequence
  ENSG00000146049_5 (sequence is synthesized)
acggccccaaagggtgcctgaacgccgccggtcacctccttcaggaagacttcgaagctggacaccttcttctcatggatgacgacgcggcgccccgcgtagaaggggtccccgttgcgg

SEQ ID NO: 398298 - DNA, 120 bp, Artificial Sequence
  ENSG00000146049_6 (sequence is synthesized)
tacacaagcacgctcttcacgacgggctgagacaggtggctggacctggcgctgctgccgctcatcttccccgctggccgccgcctcagctcgctgcttcgcgtcgggaggcacctccgc

SEQ ID NO: 398299 - DNA, 120 bp, Artificial Sequence
  ENSG00000146049_7 (sequence is synthesized)
tgtcccagcggcctcaccgcacccagggcgcgggatcgcctcctgaaacgaacgagaaactgacgaatccacaggtgaaagagaagtaacggccgtgcgcctaggcgtccacccagagga

SEQ ID NO: 398300 - DNA, 120 bp, Artificial Sequence
  ENSG00000146049_8 (sequence is synthesized)
gacactaggagcttgcaggactcggagtagacgctcaagtttttcaccgtggcgtgcacagccaatcaggacccgcagtgcgcgcaccacaccaggttcacctgctacgggcagaatcaa

SEQ ID NO: 398301 - DNA, 120 bp, Artificial Sequence
  ENSG00000146049_9 (sequence is synthesized)
ggtggacagcttctgagcaggagccggaaacgcgcggggccttcaaacaggcacgcctagtgagggcaggagagaggaggacgcacacacacacacacacacaaatatggtgaaacccaa

SEQ ID NO: 398302 - DNA, 120 bp, Artificial Sequence
  ENSG00000146049_10 (sequence is synthesized)
tttcttacatcatatctgtgctaccctttccaaacagcctaatttttcttttctctcttcttgcacctttacccctcaatctcctgcttgctcccaaattaaagcaattaagttcctgga

SEQ ID NO: 398303 - DNA, 120 bp, Artificial Sequence
  ENSG00000146054_0 (sequence is synthesized)
agtgggccctcggcgcccagctccgcgtcctgtgaggtccagtggccgcccaggcgcgaccagatctgggtgcgcggagagcgcgcatggcggctgtgggaccgcggaccggccccggaa

SEQ ID NO: 398304 - DNA, 120 bp, Artificial Sequence
  ENSG00000146054_1 (sequence is synthesized)
ccggcgccgaggctctagcgctggcggcagagctgcagggcgaggcgacgtgctccatctgcctagagctctttcgtgagccggtgtccgtcgagtgcggccacagcttctgccgcgcct

SEQ ID NO: 398305 - DNA, 120 bp, Artificial Sequence
  ENSG00000146054_2 (sequence is synthesized)
cgtcgagtgcggccacagcttctgccgcgcctgcatagggcgctgctgggagcgcccgggcgcggggtctgttggggccgccacccgcgcgccccccttcccactgccctgtccgcagtg

SEQ ID NO: 398306 - DNA, 120 bp, Artificial Sequence
  ENSG00000146054_3 (sequence is synthesized)
ccacgctcctgcggcgcttcagcctgcccgcggctgccccgggagagcacgggtctcaggcggccgcggcccgggcagcggctgcccgctgcgggcagcatggcgaacccttcaagctct

SEQ ID NO: 398307 - DNA, 120 bp, Artificial Sequence
  ENSG00000146054_4 (sequence is synthesized)
agcatggcgaacccttcaagctctactgccaggacgacggacgcgccatctgcgtggtgtgcgaccgcgcccgcgagcaccgcgagcacgccgtgctgccgctggacgaggcggtgcagg

SEQ ID NO: 398308 - DNA, 120 bp, Artificial Sequence
  ENSG00000146054_5 (sequence is synthesized)
aggccaaggagctcttggagtccaggctgagggtcttgaagaaggaactggaggactgtgaggtgttccggtccacggaaaagaaggagagcaaggagctgctgaaacagatggcagcgg

SEQ ID NO: 398309 - DNA, 120 bp, Artificial Sequence
  ENSG00000146054_6 (sequence is synthesized)
agcaggagaaggtgggggcagagttccaggcactgagggctttcctggtggagcaggagggtcggctgctaggccgcctggaggaactgtcccgggaggtggcacagaagcagaatgaga

SEQ ID NO: 398310 - DNA, 120 bp, Artificial Sequence
  ENSG00000146054_7 (sequence is synthesized)
acctggcccagctcggggttgagatcacccagctgtccaagctcagcagccagatccaggagacagctcaaaagcctgaccttgactttctccaggaattcaaaagcacgctgagcaggt

SEQ ID NO: 398311 - DNA, 120 bp, Artificial Sequence
  ENSG00000146054_8 (sequence is synthesized)
gtagcaatgtgcctggccccaagccaaccacagtctcttctgagatgaagaataaagtctggaatgtttctctcaagacctttgtcttaaaagggatgctgaagaagttcaaagaggacc

SEQ ID NO: 398312 - DNA, 120 bp, Artificial Sequence
  ENSG00000146054_9 (sequence is synthesized)
ttcggggagagctggagaaagaggagaaagtggagctcaccttggatcccgacacggccaacccgcgcctcatcctctctctggatcttaagggcgtgcgcctcggcgagcgggcccagg

SEQ ID NO: 398313 - DNA, 120 bp, Artificial Sequence
  ENSG00000146054_10 (sequence is synthesized)
acctgcccaaccacccctgccgcttcgacaccaacacccgcgtcctggcgtcctgcggcttctcctcgggccggcatcactgggaggtggaggtgggctctaaggacggctgggcctttg

SEQ ID NO: 398314 - DNA, 120 bp, Artificial Sequence
  ENSG00000146054_11 (sequence is synthesized)
agccccgagcggtcgcccctcagctgcgggcacctgtcgcgcgtgcgggtggccctggacctggaggtgggagccgtgtccttctacgctgtggaggacatgcgccacctctacaccttc

SEQ ID NO: 398315 - DNA, 120 bp, Artificial Sequence
  ENSG00000146054_12 (sequence is synthesized)
cgcgtcaacttccaggagcgcgtgttcccgcttttctctgtttgctccacgggcacctacttgcgaatctggccttgaggggcactgctggggagctcctgtctctgggctgccggtggg

SEQ ID NO: 398316 - DNA, 120 bp, Artificial Sequence
  ENSG00000146054_13 (sequence is synthesized)
aggggatgtcgcctccccagagatgcctggtccgtcttgggtctgccctccgtgctcctgacccctgctgcccaagagagcctgctacagacacaaccccgaggcaggagagtgactgtg

SEQ ID NO: 398317 - DNA, 120 bp, Artificial Sequence
  ENSG00000146054_14 (sequence is synthesized)
gccaaccgagcaggggaacaggggctttggactcctgagggtgttcccttcctgaggtcacatgtggatttggccagagccttcaggaggtggaggccggtgaggtcaggagcccagctc

SEQ ID NO: 398318 - DNA, 120 bp, Artificial Sequence
  ENSG00000146054_15 (sequence is synthesized)
tccagggggcttctgccctgactgggaagggtgcctggctccctaaaacaatgtcaaagccagtcctgctgttctctgttgccagggggcaggtctgggcctgggccaaccacgtttgtt

SEQ ID NO: 398319 - DNA, 120 bp, Artificial Sequence
  ENSG00000146054_16 (sequence is synthesized)
atcatggctgctgccttctggacagctgccagctctgccttgagaggttgtgggacctctggatccagctgacctgacaggtcatctactcagggaggagccctgtgctcccagctcaga

SEQ ID NO: 398320 - DNA, 120 bp, Artificial Sequence
  ENSG00000146054_17 (sequence is synthesized)
ggacagtctgggccagaactggaaggagacatctgtcccgtctttgagtgacaagcccgggacaacagccagtgggcatcacggctctccagcactccttagccggaggatacagagtga

SEQ ID NO: 398321 - DNA, 120 bp, Artificial Sequence
  ENSG00000146054_18 (sequence is synthesized)
tgggtgcatcctgaccaatgcgacaaccaacacgtgctctcacaaacccctgactcccgcactttccagtgccaaagtacaaacgctgcttggataaggagagcaaagcttctggaactt

SEQ ID NO: 398322 - DNA, 77 bp, Artificial Sequence
  ENSG00000146054_19 (sequence is synthesized)
aaacgctgcttggataaggagagcaaagcttctggaactttatttactctttctttttaattttcttttaagagact

SEQ ID NO: 398323 - DNA, 120 bp, Artificial Sequence
  ENSG00000146054_20 (sequence is synthesized)
tacaggtgtgagccgctgtacccgaactttttttgtttttgcttctggaactttgaaacacaaaacacaagttggcacttacaattttaaagatgcagccagctctaaacaacacacaga

SEQ ID NO: 398324 - DNA, 120 bp, Artificial Sequence
  ENSG00000146054_21 (sequence is synthesized)
gcacaaatatgctcctgacggactcaggaaaatgccaacagcagagcaccctggtgccaaggccttctcagcccatgccctggagggcattcccctggccagcctcagccccttgtctac

SEQ ID NO: 398325 - DNA, 120 bp, Artificial Sequence
  ENSG00000146054_22 (sequence is synthesized)
ttgttctccagcttctgggtagctgggcttctggaagggtggcagtgggctactccctgctcagcgctcccctgggaagggggtgaggagatgaaaatgaaactatgagctgtctttgga

SEQ ID NO: 398326 - DNA, 120 bp, Artificial Sequence
  ENSG00000146054_23 (sequence is synthesized)
tgcgcgacgtcccccacggacttggcgatgttcttcctgtctgttcggagcctctagcctggtctgcgtctccgcagctctctgcccgcgggaagtctccggcacagccacgcagccgct

SEQ ID NO: 398327 - DNA, 120 bp, Artificial Sequence
  ENSG00000146054_24 (sequence is synthesized)
gcccccactcttatctctttccccgaagcgggctctgctcaaagtccccacctcgtggaactgagtgagaggacctcgccaagatgtccagggagggggctcccgggttaagccgcgcac

SEQ ID NO: 398328 - DNA, 120 bp, Artificial Sequence
  ENSG00000146054_25 (sequence is synthesized)
ctagagccgtctgactgtgccaacgctgtcgattctgggggccctttctttgctattttctcgctgagcctcagcgagggtgtgtgcaggggtgagggcggggcggggaggctcgggcgg

SEQ ID NO: 398329 - DNA, 120 bp, Artificial Sequence
  ENSG00000146054_26 (sequence is synthesized)
cagtccccagtctctccttgctggcccatcctgctccaactctcccagccacggggcttcctggtgggggggcggagagtagaggagacgactaggggtagggctgccggagcttgtgtt

SEQ ID NO: 398330 - DNA, 120 bp, Artificial Sequence
  ENSG00000146054_27 (sequence is synthesized)
tcagtctggctggtccagcagatgcttttggggaagcaagatcccgagaccttcagagtcacctcgcagtgtaacctgtagcctgtagagatgacttctacccggcctccccctcagagc

SEQ ID NO: 398331 - DNA, 120 bp, Artificial Sequence
  ENSG00000146054_28 (sequence is synthesized)
gaaaagcagtgctaaaataattattgcaaaacaactggcttaaactggagctgtcccagcgaatcaggacgctcagtcactctgatattacgtaacataccagttagggcctgcggaagc

SEQ ID NO: 398332 - DNA, 120 bp, Artificial Sequence
  ENSG00000146054_29 (sequence is synthesized)
atcttgtaatggaacacattactatttctgcagagaaacatggatattcaataagtgggaatattaatacaataaagagcctcatggcatgttttgtcaacaaaacagtagtgaaaaaaa

SEQ ID NO: 398333 - DNA, 120 bp, Artificial Sequence
  ENSG00000146054_30 (sequence is synthesized)
ctgcagcctgcctggaagctgaaggaaaggtgggggcattgtaggacaccttgaacccaggtctcccaacttcacaggactcccttcctccgcccaggagttttaaggaagaggaacttc

SEQ ID NO: 398334 - DNA, 120 bp, Artificial Sequence
  ENSG00000146054_31 (sequence is synthesized)
ctggtgggacatattgagtgccaaacgtgtgttcacataaaaaatcaagagatcagggcatgagtctgcatctgaaaactcgagtaaaaaatccggtgtatgctgttaatggaaagaaca

SEQ ID NO: 398335 - DNA, 120 bp, Artificial Sequence
  ENSG00000146054_32 (sequence is synthesized)
gaatatgacacttgcatgccgcatattctcacttcgttccttgggggtgtgctgctacctctggtcactggcatcggacttttcttccttctttctactttcctacatctcccaagtttt

SEQ ID NO: 398336 - DNA, 120 bp, Artificial Sequence
  ENSG00000146054_33 (sequence is synthesized)
gtattttgagcatgtgttagcattataactgctaaacaggaaagatggcctttaaaaagaaagtgaagtgtaaaagtttgagggtgatgaaataaatgtgcttgaggaagaaaaagcaat

SEQ ID NO: 398337 - DNA, 120 bp, Artificial Sequence
  ENSG00000146054_34 (sequence is synthesized)
ctcagtttaatcctatggttgccccaggaggcactaatttatcccttctgcttttcaagtgaggaagctgcagcttggcgtagttctggggggagtatgaagctgccttggtttaggtga

SEQ ID NO: 398338 - DNA, 120 bp, Artificial Sequence
  ENSG00000146054_35 (sequence is synthesized)
tggagcacaggtccacagacatgtgtgggtgcatctgtggcaggggagaaaagagcatgtgtccagactacagcttgttcagagctgggacactgacaatagagcacgcactgcgtgcgt

SEQ ID NO: 398339 - DNA, 120 bp, Artificial Sequence
  ENSG00000146054_36 (sequence is synthesized)
aggtgggtgtgtctccgatcctccagcagtgacagggacgaagccttgccctgtgggatgactcaggccactggccaaatgttatgtctccatgttcaagtccctctccaacttctcctc

SEQ ID NO: 398340 - DNA, 120 bp, Artificial Sequence
  ENSG00000146054_37 (sequence is synthesized)
ggtgtgtgtggtgttggagtgtgtgctatggaaccgcagaatcgatttcagaaagataatagagtccatattatatagggtgtccacataattgttgtacaaaccagagctttttaaagt

SEQ ID NO: 398341 - DNA, 120 bp, Artificial Sequence
  ENSG00000146054_38 (sequence is synthesized)
gaagaataaagtctggaatgtttctctcaagacctttgtcttaaaagggatgctgaagaagttcaaagaggaccttcggggagagctggagaaagaggagaaaggtagggatggtgctgt

SEQ ID NO: 398342 - DNA, 120 bp, Artificial Sequence
  ENSG00000146054_39 (sequence is synthesized)
gatggcgagtatggactgtctgccacacagagatcctactccctgctcgtgaccatctcagggttttgcatatggtcggttccttcagcccacccacctcagcaaccctgttcctctgtc

SEQ ID NO: 398343 - DNA, 120 bp, Artificial Sequence
  ENSG00000146054_40 (sequence is synthesized)
ccctcccccacaccaccccctccccatcctgggagctctgacaccctcagatgttggcccaaatgctgcaggttggttaggagcaggaatgccctgtacctcgagatactcagactggga

SEQ ID NO: 398344 - DNA, 120 bp, Artificial Sequence
  ENSG00000146054_41 (sequence is synthesized)
aaggcttctcggccacctgggtgagcctctacccggtccccactccaagatggatggaaacctctcctgggaatggggtgtatacaggggaccaggaaagcaaggggaagctaaagactg

SEQ ID NO: 398345 - DNA, 120 bp, Artificial Sequence
  ENSG00000146054_42 (sequence is synthesized)
gaaggaatatcgtttttactcttgcaaagctctggaatgtgtggcatccaacacccagaggaggggaggggagggcacatattcctgatgctgatgtctgagctaagtcagagtgtgtct

SEQ ID NO: 398346 - DNA, 120 bp, Artificial Sequence
  ENSG00000146054_43 (sequence is synthesized)
gggtgccacctaaaacacctgagtgagaccaggccctcctctgctcagagccctgccacagcccctctgacttggtaaaggtcagagtccccatggaggtctcaagggcccacgggctct

SEQ ID NO: 398347 - DNA, 120 bp, Artificial Sequence
  ENSG00000146054_44 (sequence is synthesized)
agcctcactgcacaccccttctactccacgcagctacacatcctccctgctgttccttcagtgtaccaagcacacacccatcccggggcctttgcactgccaggctcccccaccccaggc

SEQ ID NO: 398348 - DNA, 120 bp, Artificial Sequence
  ENSG00000146054_45 (sequence is synthesized)
ccctacctggagcatgctttccccagccagtcctgtggcctgcttctttgccttctttatatctgtctgctcgatgccccttttcagtgagggtcttccctggccactctggttgaagtt

SEQ ID NO: 398349 - DNA, 120 bp, Artificial Sequence
  ENSG00000146054_46 (sequence is synthesized)
acagcctgctcttctggtccctctcatcttctgtttataatctatcctcaatcctctccctgtgggaaggaagctgcaggcaggcaggactactctgatactctgtggtacccccagggc

SEQ ID NO: 398350 - DNA, 120 bp, Artificial Sequence
  ENSG00000146054_47 (sequence is synthesized)
ctcaatcgtagtagtgctcacagtaagtgtacatattttaacttttttttttttttttggagacaaggtatcgctttgttgcccagggtggagtgcagtggaactgcagcctccaccccg

SEQ ID NO: 398351 - DNA, 120 bp, Artificial Sequence
  ENSG00000146054_48 (sequence is synthesized)
caagctcaagcgatcctctctcctgggcgtcctcgagtagctgggactacaggagcacactaccatgcctggctaaattttctatgttttgtggagacggatgtctcgctatattgccca

SEQ ID NO: 398352 - DNA, 88 bp, Artificial Sequence
  ENSG00000146054_49 (sequence is synthesized)
tctatgttttgtggagacggatgtctcgctatattgcccaggctggtctccaacacctgggctcaagctgtcttcccacctctgctct

SEQ ID NO: 398353 - DNA, 120 bp, Artificial Sequence
  ENSG00000146054_50 (sequence is synthesized)
tactcaaaagtagagagaagagtgtaaagaatgttacatacccatctctcaccgtccgcagtgatcaattagtggccacagttttcatagacactgctatccacttcctgtgggattatt

SEQ ID NO: 398354 - DNA, 120 bp, Artificial Sequence
  ENSG00000146054_51 (sequence is synthesized)
gttttcatagacactgctatccacttcctgtgggattattttgttttctgagacagggtcttactctggagtgagatcatggagtacagtggcctgatctctgctcactgcaacctctgc

SEQ ID NO: 398355 - DNA, 120 bp, Artificial Sequence
  ENSG00000146054_52 (sequence is synthesized)
gggctaatttttgtatttttagtagagaaaatacaaaacaagttttccgccatgttgcccaagctggtcccaaacttctgacctcatgtgacccattggccttggcctcccaaagtgctg

SEQ ID NO: 398356 - DNA, 120 bp, Artificial Sequence
  ENSG00000146054_53 (sequence is synthesized)
catgtgacccattggccttggcctcccaaagtgctggtatcgcagctgtgcaccatctcacccggcctccactgtattattgttattattatttttatttttgagacagagtcttgctct

SEQ ID NO: 398357 - DNA, 63 bp, Artificial Sequence
  ENSG00000146054_54 (sequence is synthesized)
accacgcccggctaatttattttttcccgacctcgtgatccacacaccttggcctcccaaagt

SEQ ID NO: 398358 - DNA, 120 bp, Artificial Sequence
  ENSG00000146054_55 (sequence is synthesized)
ttttaaagcatcagagacaacatatcattgccataaatacctcagtgtgttatctctaaagaaacagactttgtaaaacataaccacaaagcagtcctcacacctggacagattaatgat

SEQ ID NO: 398359 - DNA, 120 bp, Artificial Sequence
  ENSG00000146054_56 (sequence is synthesized)
tctttccaatgtctagcattcaaatatccccatctgttgaattggggttcaaaccaggcccacacattgcatttgtttgatttcagtaagtacttgttgagtggtcggggcggggggaag

SEQ ID NO: 398360 - DNA, 120 bp, Artificial Sequence
  ENSG00000146054_57 (sequence is synthesized)
caaaatctctgggaggcagagcgtgggggttggttgggccttggcgctgggtgctggggggattctagagggaaaggcaggcaggttgcaaagcaaggtcgggcgcggccctgcaaagac

SEQ ID NO: 398361 - DNA, 120 bp, Artificial Sequence
  ENSG00000146063_0 (sequence is synthesized)
gcttccggcatcggctgtggggagtaccggctgcagtcggctgtgccgggagggtaggatggcgtctggccgatgcggtgatagcaccgaaagcagacggccgccaggcgctccccctac

SEQ ID NO: 398362 - DNA, 120 bp, Artificial Sequence
  ENSG00000146063_1 (sequence is synthesized)
cccccgaagtttctccccagcggcgggggatgggggtaggcggttcctctgttctttctgcgttccccgcggcctcttaccacagagacgcgggcctccaccgtcctagccctcccgccc

SEQ ID NO: 398363 - DNA, 120 bp, Artificial Sequence
  ENSG00000146063_2 (sequence is synthesized)
tgttctctagtgcggactagagcgtctcctcgccatttcctgtcgccctggggccccgcggggaaaaagggggagtagcaggacagcggagggaagtcgcgagcttaggtggtgtgtaga

SEQ ID NO: 398364 - DNA, 120 bp, Artificial Sequence
  ENSG00000146063_3 (sequence is synthesized)
cgccggaagtgttgggaaggaggccggaagctaggggcggggccaggaagtgaggaggggcgggggtttatgaggagtccaagggagcattggggcagacttgtactcagagccacctga

SEQ ID NO: 398365 - DNA, 120 bp, Artificial Sequence
  ENSG00000146063_4 (sequence is synthesized)
gggacttggcggtggcgcccagcactgtcccctcccctcgtagagacacggttgtcgtttgggagtagggaacactgtgttggggtgggttgtcggcaggacatctctctggctgctctt

SEQ ID NO: 398366 - DNA, 120 bp, Artificial Sequence
  ENSG00000146063_5 (sequence is synthesized)
ggggcgaggtgtggaggggcagggctgggggtggagccgggtcgccagggcgtcggtagggaagacccccgcccctcgcccccccaccgaacctctacactggctggctggacactaaga

SEQ ID NO: 398367 - DNA, 120 bp, Artificial Sequence
  ENSG00000146063_6 (sequence is synthesized)
tggctgccgttgccatgacacccaaccctgtgcagacccttcaggaggaggcggtgtgcgccatctgcctcgattacttcacggaccccgtgtccatcggctgcgggcacaacttctgcc

SEQ ID NO: 398368 - DNA, 120 bp, Artificial Sequence
  ENSG00000146063_7 (sequence is synthesized)
gagtttgtgtaacccagttgtggggtggggaggatgaggaggacagagatgagttagatcgggaggaggaggaggaggacggagaggaggaggaagtggaggctgtgggggctggcgcgg

SEQ ID NO: 398369 - DNA, 120 bp, Artificial Sequence
  ENSG00000146063_8 (sequence is synthesized)
ggtgggacacccccatgcgggatgaagactacgagggtgacatggaggaggaggtcgaggaggaagaagagggtgtgttctggaccagtggcatgagcaggtccagctgggacaacatgg

SEQ ID NO: 398370 - DNA, 120 bp, Artificial Sequence
  ENSG00000146063_9 (sequence is synthesized)
actatgtgtgggaggaggaggacgaggaggaagacctggactactacttgggggacatggaggaggaggacctgaggggggaggatgaggaggacgaggaggaagtgctggaggaggttg

SEQ ID NO: 398371 - DNA, 120 bp, Artificial Sequence
  ENSG00000146063_10 (sequence is synthesized)
aggaagaggatctagaccccgtcaccccactgcccccgcctccagcccctcggaggtgcttcacatgccctcagtgccgaaagagctttcctcggcggagcttccgccccaacctgcagc

SEQ ID NO: 398372 - DNA, 120 bp, Artificial Sequence
  ENSG00000146063_11 (sequence is synthesized)
tggccaatatggtccaggtgattcggcagatgcacccaacccctggtcgagggagccgcgtgaccgatcagggcatctgtcccaaacaccaagaagccctgaagctcttctgcgaggtag

SEQ ID NO: 398373 - DNA, 120 bp, Artificial Sequence
  ENSG00000146063_12 (sequence is synthesized)
acgaagaggccatctgtgtggtgtgccgagaatccaggagccacaaacagcacagcgtggtgccattggaggaggtggtgcaggagtacaaggccaaactgcaggggcacgtggaaccac

SEQ ID NO: 398374 - DNA, 120 bp, Artificial Sequence
  ENSG00000146063_13 (sequence is synthesized)
tgaggaagcacctggaggcagtgcagaagatgaaagccaaggaggagaggcgagtgacagaactgaagagccagatgaagtcagagctggcagcggtggcctcggagtttgggcgactga

SEQ ID NO: 398375 - DNA, 120 bp, Artificial Sequence
  ENSG00000146063_14 (sequence is synthesized)
cacggtttctggctgaagagcaggcagggctggaacggcgtctcagagagatgcatgaagcccagctggggcgtgcgggagccgcggctagtcgccttgcagaacaggccgcccagctca

SEQ ID NO: 398376 - DNA, 120 bp, Artificial Sequence
  ENSG00000146063_15 (sequence is synthesized)
tccggctgctccaggacatcaaggagactttcaataggtgtgaagaggtacagctgcagcccccagaggtctggtcccctgacccgtgccaaccccatagccatgacttcctgacagatg

SEQ ID NO: 398377 - DNA, 120 bp, Artificial Sequence
  ENSG00000146063_16 (sequence is synthesized)
ccatcgtgaggaaaatgagccggatgttctgtcaggctgcgagagtggacctgacgctggaccctgacacggctcacccggccctgatgctgtcccctgaccgccggggggtccgcctgg

SEQ ID NO: 398378 - DNA, 120 bp, Artificial Sequence
  ENSG00000146063_17 (sequence is synthesized)
cagagcggcggcaggaggttgctgaccatcccaagcgcttctcggccgactgctgcgtactgggggcccagggcttccgctccggccggcactactgggaggtagaggtgggcgggcggc

SEQ ID NO: 398379 - DNA, 120 bp, Artificial Sequence
  ENSG00000146063_18 (sequence is synthesized)
ggggctgggcggtgggtgctgcccgtgaatcaacccatcataaggaaaaggtgggccctgggggttcctccgtgggcagcggggatgccagctcctcgcgccatcaccatcgccgccgcc

SEQ ID NO: 398380 - DNA, 120 bp, Artificial Sequence
  ENSG00000146063_19 (sequence is synthesized)
ggctccacctgccccagcagcccctgctccagcgggaagtgtggtgcgtgggcaccaacggcaaacgctatcaggcccagagctccacagaacagacgctgctgagccccagtgagaaac

SEQ ID NO: 398381 - DNA, 120 bp, Artificial Sequence
  ENSG00000146063_20 (sequence is synthesized)
caaggcgctttggtgtgtacctggactatgaagctgggcgcctgggcttctacaacgcagagactctagcccacgtgcacaccttctcggctgccttcctgggcgagcgtgtctttcctt

SEQ ID NO: 398382 - DNA, 120 bp, Artificial Sequence
  ENSG00000146063_21 (sequence is synthesized)
tcttccgggtgctctccaagggcacccgcatcaagctctgcccttgattatcctgccacccgcaggggcccctctgtcagcacttggggggtgggtggtggagggtggcccgtaagtttg

SEQ ID NO: 398383 - DNA, 120 bp, Artificial Sequence
  ENSG00000146063_22 (sequence is synthesized)
agggctcaaaggctcttcccactgcttgttactgtgttgcttcccactcccccttgaccccaggcccctgcttctccctctaggagcctaaagaaccctcctggcctccagctcagcctt

SEQ ID NO: 398384 - DNA, 120 bp, Artificial Sequence
  ENSG00000146063_23 (sequence is synthesized)
ctctcacctactatgtctgtccaacaggtctgcatgggtccctgataatgagaacagctgcctggtcttctctcccagtctgcctagcccagccctgggactggaatttgagtaggggat

SEQ ID NO: 398385 - DNA, 120 bp, Artificial Sequence
  ENSG00000146063_24 (sequence is synthesized)
gaggggaaattgtaatttcattccttaacttccttttccccacccctgctcttcaacctctttatcagttctgaggctggagggtttgggcaaggcaacatccccattccaattccattt

SEQ ID NO: 398386 - DNA, 120 bp, Artificial Sequence
  ENSG00000146063_25 (sequence is synthesized)
tctgatgcagattttagctgagggatttggaagccatttggggaggcaggctgggccaaagggtagagctgggtaataaatgtctattctcctggggaggagggattctaaactttcctt

SEQ ID NO: 398387 - DNA, 120 bp, Artificial Sequence
  ENSG00000146063_26 (sequence is synthesized)
ccgtcctcaatttctacctccatagaccggccagaatttagcttcacttgagagagatctggaatggtcgccatgattgaaaccacgcaccattacatcatcattacattaattacatca

SEQ ID NO: 398388 - DNA, 120 bp, Artificial Sequence
  ENSG00000146063_27 (sequence is synthesized)
acataaattatttcttcccccttcccttttccagcactcaaccaaggagcaaagctcatcccaccccacacccctcccaggtctgctcactgccaggctcctctcccctttgttcagtgg

SEQ ID NO: 398389 - DNA, 120 bp, Artificial Sequence
  ENSG00000146063_28 (sequence is synthesized)
agctggcttttctcccagcccctttccatgcctttcactccatttggcaagctctgagggggagcctggggacgggtttgggtccccaggaggagagccttgggtataatctatttttct

SEQ ID NO: 398390 - DNA, 120 bp, Artificial Sequence
  ENSG00000146063_29 (sequence is synthesized)
aggagcctcttgccttgtcacttgcagctttcgccctctgctttgatggctgaggtgaactcatgttctttgggaaaagggaaggcgtgctgtggaaataaaatgtttatttgcttctct

SEQ ID NO: 398391 - DNA, 120 bp, Artificial Sequence
  ENSG00000146063_30 (sequence is synthesized)
ggttccctgtccctgcttctcttcggtatccctctcctctccttccttccccaggacctgagtttccatctcctggaccctcctctccttcccctcagcttttgcttttccctctgggaa

SEQ ID NO: 398392 - DNA, 120 bp, Artificial Sequence
  ENSG00000146063_31 (sequence is synthesized)
ttcctgacagatgccatcgtgaggaaaatgagccggatgttctgtcaggctgcgagaggggaacagccgttccagccctggcgtatttgtcctccctccctcccaagtggacctgacgct

SEQ ID NO: 398393 - DNA, 120 bp, Artificial Sequence
  ENSG00000146063_32 (sequence is synthesized)
gggtccctgataatgagaacagctgcctggtcttctctcccagtctgcctagcccagccctgggactggaatttgaaccggccagaatttagcttcacttgagagagatctggaatggtc

SEQ ID NO: 398394 - DNA, 120 bp, Artificial Sequence
  ENSG00000146063_33 (sequence is synthesized)
agaggcgagtgacagaactgaaggtgggtgaatgttctcgacggggctgatgggcagtacagtcgaggcaaggaaggtagggcttcccactctcacagggagtgacttggtcccctgagg

SEQ ID NO: 398395 - DNA, 120 bp, Artificial Sequence
  ENSG00000146063_34 (sequence is synthesized)
aggggacagctaaggcctgggagaggggtagatgctttccctaggtgctgaggagagcggggccttagagaatcaggaggcatgttcattcctggttccaaaatggagtggaaactgagg

SEQ ID NO: 398396 - DNA, 120 bp, Artificial Sequence
  ENSG00000146063_35 (sequence is synthesized)
cctggattggagggcctaggtgcctggcccaaggctgcagaacaggctttctacccgacaccagagcctgaagggggcaaagcaaaacccacatagcagccatcagagaagctgccggcc

SEQ ID NO: 398397 - DNA, 120 bp, Artificial Sequence
  ENSG00000146063_36 (sequence is synthesized)
ccaggatccatgcaggcactgggcagagcagccctaagcatgaggcggacactgtcctgggacacttgctgtgtcctgagagggggccagtgtgtttaagctggggcaggatttagtgta

SEQ ID NO: 398398 - DNA, 120 bp, Artificial Sequence
  ENSG00000146063_37 (sequence is synthesized)
tgttagcactgcagagacctaatatttcctagtctagtgttttctcagcacaccccgacccccccgctttttttgttgtttttttccattattgctcgcccttctccaaggagtctttta

SEQ ID NO: 398399 - DNA, 120 bp, Artificial Sequence
  ENSG00000146063_38 (sequence is synthesized)
agatacattttccatccccacctcccgcctgttttcataaccccagcaggtcctgctgggatgggctggcactgtgagcttcatagaccaagccaggacctccccttctgtccctcttcc

SEQ ID NO: 398400 - DNA, 120 bp, Artificial Sequence
  ENSG00000146063_39 (sequence is synthesized)
ctcctcccttcccagccagtgcctgggccttgccactacccagggcccatgctcactgccacctgaacgttagggactctgctgctggcgactgctaggcactgaatggtaggatctgtc

SEQ ID NO: 398401 - DNA, 120 bp, Artificial Sequence
  ENSG00000146063_40 (sequence is synthesized)
tgggagtaggaagtcatcgtgcttctggccagctgcccaagttgatacttttgggctctcctgggtatagaggtaacaggagctgtgtgcccctggcatagagtgaagctgactgtggcg

SEQ ID NO: 398402 - DNA, 120 bp, Artificial Sequence
  ENSG00000146063_41 (sequence is synthesized)
gctgttccctcacgcgtctggtcagttgggaccctcctctggcctgctgctcacagcgtctgcagccgatggtagctgtgtgaaaagtgtgcctaccacccaggaagggccatccctggc

SEQ ID NO: 398403 - DNA, 120 bp, Artificial Sequence
  ENSG00000146063_42 (sequence is synthesized)
aaatagggtgggactgggcaggagttttttctgttacaggatattaagtccctacataatatccttgatttttgcctcttagcccacaaagcataaaaatacttactatctggaccttca

SEQ ID NO: 398404 - DNA, 120 bp, Artificial Sequence
  ENSG00000146063_43 (sequence is synthesized)
cagaaaaagtttttccgagttctgatctggggcttttgggtgactttcttaaggtcactgtgtttaatggcgtcgggaccctaacttcatgttttgattcctgaattcttttatttattc

SEQ ID NO: 398405 - DNA, 120 bp, Artificial Sequence
  ENSG00000146063_44 (sequence is synthesized)
atttcaaaaatttttaccaggtgcctactctgattggtactatgtcagggtccgaggaccctggcaaacaaagacattcctagtccctgtcagtgggagctcatggtacagtgggggaaa

SEQ ID NO: 398406 - DNA, 120 bp, Artificial Sequence
  ENSG00000146063_45 (sequence is synthesized)
ggatgttaacagttacgtcatttaaacacaacgtttcaatattatatgtgccacagagagatacagtgatatttgtggggatggtcccgatttagatctggagaggagggaaggcttgtc

SEQ ID NO: 398407 - DNA, 120 bp, Artificial Sequence
  ENSG00000146063_46 (sequence is synthesized)
ttggaatatttaaggttggacctgaaggatgagtcaacttaggtagagtcaggtggagaggagtgttccaggcagaggttagtgagtttgagaccactgtgctgggagcaagggggtggt

SEQ ID NO: 398408 - DNA, 120 bp, Artificial Sequence
  ENSG00000146063_47 (sequence is synthesized)
atctggtaaggctggtaggggatgagcctctttccgggactatcttggacctggggagtgtagggctcctttgccttgcattgagaagtagtagttgcaaaactggaggttatcttcgta

SEQ ID NO: 398409 - DNA, 120 bp, Artificial Sequence
  ENSG00000146063_48 (sequence is synthesized)
ctgtgttggctgtcaggcagtgcttaccaaacgcctgtccagagctgcctcttttctccctgggaggaacccacagtgattgaacctgaagaccaaaaacatgttttaaagctggaaaca

SEQ ID NO: 398410 - DNA, 120 bp, Artificial Sequence
  ENSG00000146063_49 (sequence is synthesized)
gagttaatgtcgaatgtggtatgtgtggcgattatacccagtgaaaagcatgaagattcggttgtaggagaggtttaaatgacagttgaggaaagtctttttgacagtgacatcctgaaa

SEQ ID NO: 398411 - DNA, 120 bp, Artificial Sequence
  ENSG00000146063_50 (sequence is synthesized)
aaggtgagcaagtcgtattgtggaaatgacagtatccctgggctcacagcaggatgaggcgagttaggtatggcgaggcatggggtggttgaaatggatgtgtgttcattgagggccgtg

SEQ ID NO: 398412 - DNA, 120 bp, Artificial Sequence
  ENSG00000146063_51 (sequence is synthesized)
agggtgctgcttctcccttcctgctcaggttcagtctctgactggagatcggggaacgctgtccctgtgcagctgacactctctttatctctttctccctctccctctttttgtttctct

SEQ ID NO: 398413 - DNA, 120 bp, Artificial Sequence
  ENSG00000146063_52 (sequence is synthesized)
gtagggaggtcacctccacgaccttcctttgcctttcccttcacagacctgagactgggtcctgagggaagttgggccccagggaaactgtggggcttgagatggagcaggatccaggca

SEQ ID NO: 398414 - DNA, 120 bp, Artificial Sequence
  ENSG00000146063_53 (sequence is synthesized)
gccactctgaggttgaggtttcaagccatgagcaggtagacctagtgcaggcaggcctggagggtggggtggggtggagtggcaggaagagccaggctgggggaagacctgtcaggtatc

SEQ ID NO: 398415 - DNA, 120 bp, Artificial Sequence
  ENSG00000146063_54 (sequence is synthesized)
ctaggaacaagagtgaggagcaagatgagcctgcaggaatctgaggctggcctctgggatggtgtggggagctggattcagggagaaagggggcccaatctgtggagttggctgctgaca

SEQ ID NO: 398416 - DNA, 120 bp, Artificial Sequence
  ENSG00000146063_55 (sequence is synthesized)
aggtgagagaagtacagagagaagatgggagtttagtggggggatggagaggaagtaaggggacctgggaaaaggaaacatctcttcacccaccaaagaacctcatggtattggtgagcc

SEQ ID NO: 398417 - DNA, 120 bp, Artificial Sequence
  ENSG00000146063_56 (sequence is synthesized)
aagtttgcttatctaagcacttactgccaccaaggtggattagaatgagaaggattctgtacacagagcagatgcagtgaagacgaccagggaaggatggcttcctcaaagcaaatagag

SEQ ID NO: 398418 - DNA, 120 bp, Artificial Sequence
  ENSG00000146063_57 (sequence is synthesized)
caaagccggtgatgccagatcaggtctctagggctttaccagaagtctcgttttctttcgggtgagtcttaagtctgtccttgacggagacacctagagatggaaagaactgggggcttc

SEQ ID NO: 398419 - DNA, 120 bp, Artificial Sequence
  ENSG00000146063_58 (sequence is synthesized)
aaaggacaagaaaaggctcagaagcaggaacacagagataactgctagtgtcagtgtcagacccaaatgctctgcacttgcctcccagtgggttccccacctaccacgatatggcttggt

SEQ ID NO: 398420 - DNA, 120 bp, Artificial Sequence
  ENSG00000146063_59 (sequence is synthesized)
tctgtcttcaaggactttggttggctctgtgtcattcttatgcactgactagaaagcaggagcttttcagtcagaagacctggctctgcaagttgcattgtcaaatcttgattaagtctg

SEQ ID NO: 398421 - DNA, 120 bp, Artificial Sequence
  ENSG00000146063_60 (sequence is synthesized)
tgagtgtctttggactttaatttgtccaggattgatagttaatattcactggacatttatatgtataccaggcactgtactaggcacttttcatggactgtctcgttaaaacccagacaa

SEQ ID NO: 398422 - DNA, 120 bp, Artificial Sequence
  ENSG00000146063_61 (sequence is synthesized)
cactgagtttgatatgttttccattcccattttatagattgggaaacaaagtcagagaggctttaagtaccatacagagggccacagagcttcagtaataattgacttagttatttactg

SEQ ID NO: 398423 - DNA, 120 bp, Artificial Sequence
  ENSG00000146063_62 (sequence is synthesized)
tcccttcccctggtgtatactaacaacgccaccaccatttggatgtctgttgtttgacttttctgatgtgactttcttggagtctgattctagtttgacaaataccttgcccctacttct

SEQ ID NO: 398424 - DNA, 120 bp, Artificial Sequence
  ENSG00000146063_63 (sequence is synthesized)
cattttgactcttctttggacataggtaaaggagatttgtttgcaaggcagccagcacaaatagcactacttagtgaaggcctggatgggtttgaagcagtgggaccaggaggaggaggg

SEQ ID NO: 398425 - DNA, 120 bp, Artificial Sequence
  ENSG00000146063_64 (sequence is synthesized)
ggtagcctctgtgtggtctgcacagagctttttttgttttataactcatgttttcagaccttctcctgattcctgctataacttcatttaggtattattttcgttaccccaattttagag

SEQ ID NO: 398426 - DNA, 120 bp, Artificial Sequence
  ENSG00000146063_65 (sequence is synthesized)
taatgtgtctagggtttctcagctctgagtggtacagctagacatacctacattacctcatcacaagtaacaatttcttttacagagtggccttttttttttttaattttttgagacgga

SEQ ID NO: 398427 - DNA, 68 bp, Artificial Sequence
  ENSG00000146063_66 (sequence is synthesized)
gatggggtttcaccgtgttggccaggctgttctgaaattcctgacctcaggtgatccgcctgacacaa

SEQ ID NO: 398428 - DNA, 120 bp, Artificial Sequence
  ENSG00000146063_67 (sequence is synthesized)
acagacatgagccactgtgcctggctacacaaagattgttaaacctgcctgattgttggaattactaggggaggttttcaaaaatacagtggatcctaccactagagtttctgaatcagt

SEQ ID NO: 398429 - DNA, 120 bp, Artificial Sequence
  ENSG00000146063_68 (sequence is synthesized)
gaatcagtgagtaggagaatatctttaaaaagcccagtctagcatggggatcactgcattggtaacattgcctagctgttagtccctgcatttttagcagagattgtgaggtcctgttgt

SEQ ID NO: 398430 - DNA, 120 bp, Artificial Sequence
  ENSG00000146063_69 (sequence is synthesized)
cctttccatctcctcagttcctagttaaccatacccatcatatcatgtgtggtcactttgtgaacaggaacccaggccaaactatccatgggcattccaccctttctctttcacctcccc

SEQ ID NO: 398431 - DNA, 120 bp, Artificial Sequence
  ENSG00000146063_70 (sequence is synthesized)
ctgtaggactgctccaaggagcttctgaaactggattttaatttgcattagccaaatttgttcaatgccagctgcctgaaatcccgtattaggtcctgaagtaggtgaggaattaaaaaa

SEQ ID NO: 398432 - DNA, 66 bp, Artificial Sequence
  ENSG00000146063_71 (sequence is synthesized)
atcccgtattaggtcctgaagtaggtgaggaattaaaaaaagtcataatctcttttcttttccccc

SEQ ID NO: 398433 - DNA, 120 bp, Artificial Sequence
  ENSG00000146063_72 (sequence is synthesized)
cgcccaacttggcctcccaaagtgctaggattgcaggcgtgaaccactgcgcctggccatactctcttttcttgatctgtttactgcgctctgcagtttgggaggccatatacacatatt

SEQ ID NO: 398434 - DNA, 120 bp, Artificial Sequence
  ENSG00000146063_73 (sequence is synthesized)
tttgggaggccatatacacatatttaatctgacattaagtgatgagtaaatgtaaatacatagttttattgtataggactaatttgagtgattccctttctgacttaataggctatttta

SEQ ID NO: 398435 - DNA, 86 bp, Artificial Sequence
  ENSG00000146063_74 (sequence is synthesized)
agccacaagtgggtcatttattcttttcagatatgtacatgcagtaaccagtagcttggcaaaatgttttgtaaaaattttttttg

SEQ ID NO: 398436 - DNA, 120 bp, Artificial Sequence
  ENSG00000146063_75 (sequence is synthesized)
accagtagcttggcaaaatgttttgtaaaaattttttttgttgaataggtaataacacacaaatgatatgtaaatatagttcctgaacagttacatgtttgttttgttttttttgagaca

SEQ ID NO: 398437 - DNA, 89 bp, Artificial Sequence
  ENSG00000146063_76 (sequence is synthesized)
gcatgatcatagctcactgcagccttgaccttctgggttcaggtgatcctgagtagtagctgggactggaggtgtgtgccatcgtggag

SEQ ID NO: 398438 - DNA, 120 bp, Artificial Sequence
  ENSG00000146063_77 (sequence is synthesized)
cagctaattttttttttttttttttcgtggagacagggtcttgctgtgttgctcaggctggtcttgaaccactggcctcaagcaatcttcccattttggcccctcaaagtgctgggatta

SEQ ID NO: 398439 - DNA, 76 bp, Artificial Sequence
  ENSG00000146063_78 (sequence is synthesized)
agcaatcttcccattttggcccctcaaagtgctgggattactgtgtctgcccgacagttaaatgttttgaaagttg

SEQ ID NO: 398440 - DNA, 70 bp, Artificial Sequence
  ENSG00000146063_79 (sequence is synthesized)
cagtgagccaagattgtgctactgcattccagcctgggcaacaccttaaatagaactctgtttgaatttg

SEQ ID NO: 398441 - DNA, 120 bp, Artificial Sequence
  ENSG00000146063_80 (sequence is synthesized)
aaaaaaaaaaaaaaaaggaaatatatcttaaatagaactctgtttgaatttgtgcttattaatttttgtttttgtcagcaatttagggtcccggcacggtggctcacacctgtagtccca

SEQ ID NO: 398442 - DNA, 65 bp, Artificial Sequence
  ENSG00000146063_81 (sequence is synthesized)
tgttgcagcgagccgagatggcactgctgcactccattctaggcgacagagcaagactctgtctc

SEQ ID NO: 398443 - DNA, 120 bp, Artificial Sequence
  ENSG00000146063_82 (sequence is synthesized)
aaaaaaaaaaaaacagtaaatggtaaatttaagcgttataaattctgaattaatggagaaattattgactagaaaagtagaaagttatatcagaaggccaaattttgtgtagttcatgct

SEQ ID NO: 398444 - DNA, 120 bp, Artificial Sequence
  ENSG00000146063_83 (sequence is synthesized)
attgtcacgagttgactataattccattattactgtaattttgtctacaaccacttatcctgtgcagcaactgctgtttgcactctggcttggtaaactctttagttcaggggtcattat

SEQ ID NO: 398445 - DNA, 120 bp, Artificial Sequence
  ENSG00000146063_84 (sequence is synthesized)
caggatgtcactggcagcttaaggtatagggaacaaatattagataacatttactgatcttctgctacatgccaggcactgcagtaagtgtgctatccatgaggtccattctcttcttat

SEQ ID NO: 398446 - DNA, 120 bp, Artificial Sequence
  ENSG00000146063_85 (sequence is synthesized)
ttgaagctgaggaaactgaaagcatggcttgcctgaggtcacttcacttccctctggtcctgactggagtcaggctggagctctcctaccctatattctctctcaaagaaaaggagacag

SEQ ID NO: 398447 - DNA, 120 bp, Artificial Sequence
  ENSG00000146063_86 (sequence is synthesized)
gctagtagaagacatagaaaaggtaagagcaaataggtagggcttattccactcattctgggctaacagccctttaaagaaaagtatttggctacaaattgtagaaacacagagctcgtg

SEQ ID NO: 398448 - DNA, 120 bp, Artificial Sequence
  ENSG00000146063_87 (sequence is synthesized)
tgcctattggctataacagttacaacctttggaagaggggtttcggtgtcctttgccatttagcaagtaattgagcaggagagaaagcagatgagcagaaagaagcaaagaagttgaaat

SEQ ID NO: 398449 - DNA, 120 bp, Artificial Sequence
  ENSG00000146063_88 (sequence is synthesized)
aagtagagtgtgggcagggactccgcagtgtcctggaggaggcacacctgtcattggtgccctgggaactcatgtattagatatttcttgggatcacagaggatgttgggggtggggagg

SEQ ID NO: 398450 - DNA, 120 bp, Artificial Sequence
  ENSG00000146063_89 (sequence is synthesized)
atcagggccattttcagggagctgttttaaaggaagaataccttgggccaagtggagaaaggcactcccagacagagggaacagcatggaattatactcaggaaatgacaagtaatttta

SEQ ID NO: 398451 - DNA, 120 bp, Artificial Sequence
  ENSG00000146063_90 (sequence is synthesized)
tgtggtcaaacgtgttaagagtctgtgtggaaggcgttgagtgtagaggtgaggctggaagtgtggggtcaatgttttggaagtggtggtgacccatggaaaggttttagcataggaaaa

SEQ ID NO: 398452 - DNA, 120 bp, Artificial Sequence
  ENSG00000146063_91 (sequence is synthesized)
aaatcatcagaaaagtatttagagagaagagttctggggaagatcgcctgtgaaggggaaggggaccaaaggtgagggcacccctggaaagactctggtgcggggctcaagccacttccc

SEQ ID NO: 398453 - DNA, 120 bp, Artificial Sequence
  ENSG00000146063_92 (sequence is synthesized)
ctctggtgcggggctcaagccacttcccctcagctgtgagcgtgggagctctctagtcttgaggctcctacctttagagaatacacacagggccggccgggcgcggtggctcacgcctat

SEQ ID NO: 398454 - DNA, 65 bp, Artificial Sequence
  ENSG00000146063_93 (sequence is synthesized)
acgaggtcaggagattgagaccatcctgggtagcatggcgaggtgaaaccaccagctactgggaa

SEQ ID NO: 398455 - DNA, 120 bp, Artificial Sequence
  ENSG00000146063_94 (sequence is synthesized)
aaaaaaaaaaaaaaaaatacacacagggcttctgcagacgtgcacagagggattggaggcttttgtcatcatctgaaagaagaaagtggaggaaggtataatactcacttgacacccatt

SEQ ID NO: 398456 - DNA, 120 bp, Artificial Sequence
  ENSG00000146063_95 (sequence is synthesized)
cattttcgggggtagggatcaggctttgacccatcttgctatagggaggattgcagaggtaggctctgaagggcaggtgcctctcccagcccccacttttctttttctgtttcctcaggc

SEQ ID NO: 398457 - DNA, 120 bp, Artificial Sequence
  ENSG00000146063_96 (sequence is synthesized)
tgaagacacacacggctgagacggccgggatagctctaggcaagcgcccttgtaggacaggcccggggacccctgccgcggccggctgagcggtgtccaggttctggagccggacttgtc

SEQ ID NO: 398458 - DNA, 120 bp, Artificial Sequence
  ENSG00000146063_97 (sequence is synthesized)
caccgcagccgagtccgcaggtcctgtaatggcctagcatagttcacccacgagggttcgtggtttttggcgcgtttgatctgacatactcagaggcctgaccacccccctaggaagcgc

SEQ ID NO: 398459 - DNA, 120 bp, Artificial Sequence
  ENSG00000146066_0 (sequence is synthesized)
ccctttcatgaccttcaccgggaggctgaggtcggagtcccgattttctcctgctgctgtggcccggacatggcgactcccggccctgtgattccggaggtcccctttgaaccatcgaag

SEQ ID NO: 398460 - DNA, 120 bp, Artificial Sequence
  ENSG00000146066_1 (sequence is synthesized)
cctccagtcattgaggggctgagccccactgtttacaggaatccagagagtttcaaggaaaagttcgttcgcaagacccgcgagaacccggtggtacccataggttgcctggccacggcg

SEQ ID NO: 398461 - DNA, 120 bp, Artificial Sequence
  ENSG00000146066_2 (sequence is synthesized)
cagctcatgatgcgcacccggatcgccgcccagggtttcacggtcgcagccatcttgctgggtctggctgtcactgctatgaagtctcgaccctaagcccagggtctggccttgaaagct

SEQ ID NO: 398462 - DNA, 120 bp, Artificial Sequence
  ENSG00000146066_3 (sequence is synthesized)
ccgcagaaatgattccaaaacccagggagcaaccactggccctaccgtgggacttactccctcctctcctttgagaggcccatgtgtcgctggggaggaagtgaccctttgtgtaactgt

SEQ ID NO: 398463 - DNA, 120 bp, Artificial Sequence
  ENSG00000146066_4 (sequence is synthesized)
aaccgaaagttttttcaaaaatcctagatgctgttgtttgaatgttacatacttctatttgtgccacatctcccctccactcccctgcttaataaactctaaaaatccacttgtatttaa

SEQ ID NO: 398464 - DNA, 80 bp, Artificial Sequence
  ENSG00000146067_0 (sequence is synthesized)
cggcggcggcggcgtgtggagcgagggagcggcgcgagcggcggcatgacgcggaggcggagcaggccgagcggcggtgc

SEQ ID NO: 398465 - DNA, 80 bp, Artificial Sequence
  ENSG00000146067_1 (sequence is synthesized)
gcgagggagcggcgcgagcggcggcatgacgcggaggcggagcaggccgagcggcggtgcgggcaggcgcgagcgggctc

SEQ ID NO: 398466 - DNA, 120 bp, Artificial Sequence
  ENSG00000146067_2 (sequence is synthesized)
ccggaggcgccggcggagcccgaccacgacggccccagggaggatgacgaacccaacctggtgcccggcccgcaggtcccccccgcctccagccagcctgtgcagacttgctgcctgctg

SEQ ID NO: 398467 - DNA, 120 bp, Artificial Sequence
  ENSG00000146067_3 (sequence is synthesized)
tgtcaccgggaacgcaaaggctgggaagaaggcccttctcaaaatggactggtgttgcagggtgagaagctgccccctgacttcatgccaaagctcgtcaagaatctcctaggcgagatg

SEQ ID NO: 398468 - DNA, 120 bp, Artificial Sequence
  ENSG00000146067_4 (sequence is synthesized)
cctctgtgggtctgccagagttgccgaaagagcatggaggaagatgaaaggcagacaggtcgagaacatgcagtggcgatctccttgtcacacacatcctgcaaatcacagtcttgtgga

SEQ ID NO: 398469 - DNA, 120 bp, Artificial Sequence
  ENSG00000146067_5 (sequence is synthesized)
gatgactctcattcgtcctcgtcttcctcctcatcatcctcatcctcgtcctcctcttcctgccctgggaactcgggagactgggatcctagctcgttcctgtcggcacataagctctcg

SEQ ID NO: 398470 - DNA, 120 bp, Artificial Sequence
  ENSG00000146067_6 (sequence is synthesized)
ggcctctggaattccccacattccagtggggccatgccaggcagctctcttgggagtcctcctaccatccccggtgaggctttccccgtctcggagcaccaccagcactcagacctcact

SEQ ID NO: 398471 - DNA, 120 bp, Artificial Sequence
  ENSG00000146067_7 (sequence is synthesized)
gctccccctaacagccccaccggccaccacccgcagccagcatctctaatcccgtctcaccccagctcctttggctccccaccccacccacacctgctgcccaccaccccggcagcacct

SEQ ID NO: 398472 - DNA, 120 bp, Artificial Sequence
  ENSG00000146067_8 (sequence is synthesized)
ttccctgcccaggcttcagagtgccctgttgctgctgccactgccccccacactccagggccatgtcagagctcccatctaccctccaccagcatgccgctcctgaagatgcccccacca

SEQ ID NO: 398473 - DNA, 120 bp, Artificial Sequence
  ENSG00000146067_9 (sequence is synthesized)
ttctcggggtgcagccacccctgcagcgggcactgtggtgggcactgcagtgggcctctcctcccacccccgagctctcagccactccctagcactcacagggatcccgggtgcaagggg

SEQ ID NO: 398474 - DNA, 120 bp, Artificial Sequence
  ENSG00000146067_10 (sequence is synthesized)
cacaagtttgcacacagtggcctggcttgccagctgccccagccctgcgaggcagatgaggggctgggtgaggaagaggatagcagctctgagcgaagctcctgcacctcatcctccacc

SEQ ID NO: 398475 - DNA, 120 bp, Artificial Sequence
  ENSG00000146067_11 (sequence is synthesized)
caccagagagatgggaagttctgtgactgctgctactgtgagttcttcggccacaatgcggaaaaggagaaggcccagttggcagcagaagctctaaagcaggcaaatcgtgtttctgga

SEQ ID NO: 398476 - DNA, 120 bp, Artificial Sequence
  ENSG00000146067_12 (sequence is synthesized)
tgcaggagatcaaaaacactgtcaaagactccatccgtgccagcttcagtgtgtgtgagctcagcatggacagcaatggcttctctaaggagggggctgctgagcctgagcctcagagtc

SEQ ID NO: 398477 - DNA, 120 bp, Artificial Sequence
  ENSG00000146067_13 (sequence is synthesized)
tacccccctcaaacctcagtggctcctcagagcagcagcctgacatcaaccttgacctgtcccctttgactttgggctcccctcagaaccacacgttacaagctccaggcgagccagccc

SEQ ID NO: 398478 - DNA, 120 bp, Artificial Sequence
  ENSG00000146067_14 (sequence is synthesized)
caccatgggcagaaatgagaggcccccacccaccatggacagaggtgagggggccccctcccggtatcgtccccgagaacgggctcgtgaggagactcaacaccgtgcccaacctatccc

SEQ ID NO: 398479 - DNA, 120 bp, Artificial Sequence
  ENSG00000146067_15 (sequence is synthesized)
gggtgatctgggtcaagacacccaagccgggctaccccagctccgaggagccaagctcaaaggaagttcccagttgcaagcaggagctgcctgagcctgtgtcctcaggtgggaagccac

SEQ ID NO: 398480 - DNA, 120 bp, Artificial Sequence
  ENSG00000146067_16 (sequence is synthesized)
agaagggcaagaggcagggcagtcaggccaagaagagcgaggcaagcccagccccccggcccccagccagcctagaggttcccagtgccaagggccaggtcgctggccccaagcagccag

SEQ ID NO: 398481 - DNA, 120 bp, Artificial Sequence
  ENSG00000146067_17 (sequence is synthesized)
gcagggtcctagagcttcccaaagtaggcagctgtgctgaggctggagaggggagccgggggagccggccaggaccaggttgggctggcagtcccaaaactgagaaggagaagggcagct

SEQ ID NO: 398482 - DNA, 120 bp, Artificial Sequence
  ENSG00000146067_18 (sequence is synthesized)
cctggcgaaactggccaggcgaggccaaggcacggcctcaggagcaggagtctgtgcagccctcaggcccagcaaggccacagagcttgccccagggcaagggccgcagccgccggagcc

SEQ ID NO: 398483 - DNA, 120 bp, Artificial Sequence
  ENSG00000146067_19 (sequence is synthesized)
gcaacaagcaggagaagccagcctcctccttggacgatgtgttcctgcccaaggacatggacggggtggagatggatgagactgaccgagaggtggagtactttaagaggttctgtttgg

SEQ ID NO: 398484 - DNA, 120 bp, Artificial Sequence
  ENSG00000146067_20 (sequence is synthesized)
attctgcaaagcagactcgtcagaaagttgctgtgaactggaccaacttcagcctcaagaaaaccactcctagcacagctcagtgaggccctgcccaggctgagctgcttcagggcgtcc

SEQ ID NO: 398485 - DNA, 120 bp, Artificial Sequence
  ENSG00000146067_21 (sequence is synthesized)
tgaggccctgactgccagctgaaggcgtataatttttccctccgtgtgccccacctacccgtccaagaccctctgtgctccccaccatcctggaccaaccaaaagctgaacggatgccac

SEQ ID NO: 398486 - DNA, 120 bp, Artificial Sequence
  ENSG00000146067_22 (sequence is synthesized)
actgtgctggggccccttgacctcagcagagccgcttcctggtgctacgcagcctccacactcagagcccgtggactgggctggcctaagggccagggctgatggtactgctggcccaac

SEQ ID NO: 398487 - DNA, 86 bp, Artificial Sequence
  ENSG00000146067_23 (sequence is synthesized)
actgctctctttgtgtttgcaattctttacttttgatactgtgaagatctttcgtgccgaaagataaagcaacatttggacacaga

SEQ ID NO: 398488 - DNA, 120 bp, Artificial Sequence
  ENSG00000146067_24 (sequence is synthesized)
gggcggggttggggatgggccatcctgccgcggctggggtagcagccttcccccgggtccggcgccgaagctttctcccccggggcgggaatggaggctggacccctctccccaaagccg

SEQ ID NO: 398489 - DNA, 120 bp, Artificial Sequence
  ENSG00000146067_25 (sequence is synthesized)
aggctcggtccgcgctcctgcgactaggctgaagctgctcccctctccccgccgcctccgggcgttccggccgtacacccacactgggactgggactgggactgggctgtgatcccgagg

SEQ ID NO: 398490 - DNA, 120 bp, Artificial Sequence
  ENSG00000146067_26 (sequence is synthesized)
ccgcagctccgctctcggcccgccacctcccccgggcccacctgctccctcagccacaggccatctcggggctctgggactggacgactgcagcctcttccctctgcccccgggaacggc

SEQ ID NO: 398491 - DNA, 120 bp, Artificial Sequence
  ENSG00000146067_27 (sequence is synthesized)
tccactccgtcccctgcagcgcctgcagccgcggccccctcagcagctgtgtctcctggcgcctcctcgccatacccagcagagcagttggagcagacagccaggctgcccggaggagtt

SEQ ID NO: 398492 - DNA, 120 bp, Artificial Sequence
  ENSG00000146067_28 (sequence is synthesized)
tttggtggggtttctgcactgaggtggaaacccagcagaacctgcccttcttccctcccctgctccgcaaggcagcccaccccgaccttgagatcccaggtttggagaatcctgctgaga

SEQ ID NO: 398493 - DNA, 120 bp, Artificial Sequence
  ENSG00000146067_29 (sequence is synthesized)
gcgaacagtaggaggattccccaaagcttccagcttgccacctggaagaaggtcactttcttttgagcaaaggagataacgggaggtaccctgccaaagttcactgagaggcgggggtga

SEQ ID NO: 398494 - DNA, 120 bp, Artificial Sequence
  ENSG00000146067_30 (sequence is synthesized)
catgggccacggttgctctgggagggttgtggcactcggggctgggtggctctccctaagcttgctctgacaaaagagttttgagttggtcttttggctgagcctgcccaggaaggcagg

SEQ ID NO: 398495 - DNA, 120 bp, Artificial Sequence
  ENSG00000146067_31 (sequence is synthesized)
ctcctgcaggagtcttggagggtcggatgcggcgccggatgaggatgaggcgtggcggaagatgcgtttggctctgcagacactgcatcgggcagcaggggactctgggaggctggtgca

SEQ ID NO: 398496 - DNA, 120 bp, Artificial Sequence
  ENSG00000146067_32 (sequence is synthesized)
gccagaaggcatggctcttgacagccttctagtagaatctctggaattgtgcatatgaagaaacagaaactcagagcaactaaacatttgcccaaatgactccaactgtaggtgtcagac

SEQ ID NO: 398497 - DNA, 120 bp, Artificial Sequence
  ENSG00000146067_33 (sequence is synthesized)
attctgatgagtatgtatacgtgtgtaatcccagagaagtgaacgcttgggagtgatgaaggcagagtggaagcaaaaaggctctcagtcccccaagtgtgacagccagccgagggacag

SEQ ID NO: 398498 - DNA, 120 bp, Artificial Sequence
  ENSG00000146067_34 (sequence is synthesized)
gccgtgagcacagacggcgccaggaaggaggctcagatcagagggcatgctggctctggccagggggaggaagcagtgcagaagtctcataagccacccgctgccccgacgagtcggaac

SEQ ID NO: 398499 - DNA, 120 bp, Artificial Sequence
  ENSG00000146067_35 (sequence is synthesized)
tataccgagatccgggagaagctccgctcgaggctgaccaggcggaaagaggagctgcccatgaaggggggcaccctgggcgggatccctggggagcccgccgtggaccaccgagatgtg

SEQ ID NO: 398500 - DNA, 120 bp, Artificial Sequence
  ENSG00000146067_36 (sequence is synthesized)
gatgagctgctggaattcatcaacagcacggagcccaaagtccccaacagcgccagggccgccaagcgggcccggcacaagctgaaaaagaaggaaaaggagaaggcccagttggcagca

SEQ ID NO: 398501 - DNA, 120 bp, Artificial Sequence
  ENSG00000146067_37 (sequence is synthesized)
aattgaggctcacaaagactcggtgactcgcccaaggtcatacagcttcccagtgacgaagcccgggctccaacttgtttttctggctccccagtcagtgtttgcccagctctgccctgt

SEQ ID NO: 398502 - DNA, 120 bp, Artificial Sequence
  ENSG00000146067_38 (sequence is synthesized)
tccctcctagtcccttcacccactgccgcctggattcagcctggctgagagggtgaagccatgtggccttggtggctaatggtagagagaacagttgtcttgcttctcatcacatacttg

SEQ ID NO: 398503 - DNA, 120 bp, Artificial Sequence
  ENSG00000146067_39 (sequence is synthesized)
ttgaaatctgtttcttcatcttaaaaaatgggaataagaacacctcgtttgcagagctgttacaaggactaaattttaattatgtctaaaaagtgcctaacccagtgcctggcacgtaat

SEQ ID NO: 398504 - DNA, 120 bp, Artificial Sequence
  ENSG00000146067_40 (sequence is synthesized)
aagtggcattactaatattgttactattattttgaaggagagcctttcccctcctgggaaaccctgtttctgtctgttggacaggtcccccccgcctccagccagcctgtgcagacttgc

SEQ ID NO: 398505 - DNA, 120 bp, Artificial Sequence
  ENSG00000146067_41 (sequence is synthesized)
attgtccccattttgcagattagtccactgaaactgaggctctgggtgaacaagctgtaaaaaccctaccctctgtgggtgtgactacccctgcccccaggacatgtacctgtctggctg

SEQ ID NO: 398506 - DNA, 120 bp, Artificial Sequence
  ENSG00000146067_42 (sequence is synthesized)
cagtttgccctcactcctgcagggtgggtaagcaggctaggattttaaggctttgcttccagcaagttagtggcaaagctgggccccaggctgatgggtcaggtatcacattgtgcctgg

SEQ ID NO: 398507 - DNA, 65 bp, Artificial Sequence
  ENSG00000146067_43 (sequence is synthesized)
tgagactgaccgagaggtggagtactttaagagtatttttggccaagcgcggtggctcatgcttc

SEQ ID NO: 398508 - DNA, 120 bp, Artificial Sequence
  ENSG00000146067_44 (sequence is synthesized)
gcagacactgcatcgggcagcaggggactctgggaggctggtgcagccagaaggcatggctcttgacagccttctagtagaatctctggaattgtgcatggcagaagaggaaagaaacta

SEQ ID NO: 398509 - DNA, 120 bp, Artificial Sequence
  ENSG00000146070_0 (sequence is synthesized)
acagcccgcgcgcagcccacccgcccgccgcctgccagagctgctcggcccgcagccagggggacagcggctggtcggaggctcgcagtgctgtcggcgagaagcagtcgggtttggagc

SEQ ID NO: 398510 - DNA, 120 bp, Artificial Sequence
  ENSG00000146070_1 (sequence is synthesized)
gcttgggtcgcgttggtgcgcggtggaacgcgcccagggaccccagttcccgcgagcagctccgcgccgcgcctgagagactaagctgaaactgctgctcagctcccaagatggtgccac

SEQ ID NO: 398511 - DNA, 120 bp, Artificial Sequence
  ENSG00000146070_2 (sequence is synthesized)
ccaaattgcatgtgcttttctgcctctgcggctgcctggctgtggtttatccttttgactggcaatacataaatcctgttgcccatatgaaatcatcagcatgggtcaacaaaatacaag

SEQ ID NO: 398512 - DNA, 120 bp, Artificial Sequence
  ENSG00000146070_3 (sequence is synthesized)
tactgatggctgctgcaagctttggccaaactaaaatcccccggggaaatgggccttattccgttggttgtacagacttaatgtttgatcacactaataagggcaccttcttgcgtttat

SEQ ID NO: 398513 - DNA, 120 bp, Artificial Sequence
  ENSG00000146070_4 (sequence is synthesized)
attatccatcccaagataatgatcgccttgacaccctttggatcccaaataaagaatatttttggggtcttagcaaatttcttggaacacactggcttatgggcaacattttgaggttac

SEQ ID NO: 398514 - DNA, 120 bp, Artificial Sequence
  ENSG00000146070_5 (sequence is synthesized)
tctttggttcaatgacaactcctgcaaactggaattcccctctgaggcctggtgaaaaatatccacttgttgttttttctcatggtcttggggcattcaggacactttattctgctattg

SEQ ID NO: 398515 - DNA, 120 bp, Artificial Sequence
  ENSG00000146070_6 (sequence is synthesized)
gcattgacctggcatctcatgggtttatagttgctgctgtagaacacagagatagatctgcatctgcaacttactatttcaaggaccaatctgctgcagaaataggggacaagtcttggc

SEQ ID NO: 398516 - DNA, 120 bp, Artificial Sequence
  ENSG00000146070_7 (sequence is synthesized)
aaagccagtgaagaatgcattagatttaaagtttgatatggaacaactgaaggactctattgatagggaaaaaatagcagtaattggacattcttttggtggagcaacggttattcagac

SEQ ID NO: 398517 - DNA, 120 bp, Artificial Sequence
  ENSG00000146070_8 (sequence is synthesized)
tcttagtgaagatcagagattcagatgtggtattgccctggatgcatggatgtttccactgggtgatgaagtatattccagaattcctcagcccctcttttttatcaactctgaatattt

SEQ ID NO: 398518 - DNA, 120 bp, Artificial Sequence
  ENSG00000146070_9 (sequence is synthesized)
ccaatatcctgctaatatcataaaaatgaaaaaatgctactcacctgataaagaaagaaagatgattacaatcaggggttcagtccaccagaattttgctgacttcacttttgcaactgg

SEQ ID NO: 398519 - DNA, 120 bp, Artificial Sequence
  ENSG00000146070_10 (sequence is synthesized)
caaaataattggacacatgctcaaattaaagggagacatagattcaaatgtagctattgatcttagcaacaaagcttcattagcattcttacaaaagcatttaggacttcataaagattt

SEQ ID NO: 398520 - DNA, 120 bp, Artificial Sequence
  ENSG00000146070_11 (sequence is synthesized)
tgatcagtgggactgcttgattgaaggagatgatgagaatcttattccagggaccaacattaacacaaccaatcaacacatcatgttacagaactcttcaggaatagagaaatacaatta

SEQ ID NO: 398521 - DNA, 83 bp, Artificial Sequence
  ENSG00000146070_12 (sequence is synthesized)
tcatgttacagaactcttcaggaatagagaaatacaattaggattaaaataggttttttaaaagtcttgtttcaaaactgtct

SEQ ID NO: 398522 - DNA, 120 bp, Artificial Sequence
  ENSG00000146070_13 (sequence is synthesized)
ttttaatgtattttcccaaaggactcatattttaaaatgtaggctatactgtaatcgtgattgaagcttggactaagaattttttccctttagatgtaaagaaagaatacagtatacaat

SEQ ID NO: 398523 - DNA, 120 bp, Artificial Sequence
  ENSG00000146070_14 (sequence is synthesized)
attcatatcagcctaaattttaattttaaagatgattccttttcagtgtcgaagttaaaaactgtttttacattactttgacagacaagtagattaaaacaggcaaaatcccagtgaaaa

SEQ ID NO: 398524 - DNA, 120 bp, Artificial Sequence
  ENSG00000146070_15 (sequence is synthesized)
ggaaaaccggcctgactggggggtgaattcagcagggagtaaatctgatcggcatcaggtctgcggaaaggagctggtgagcacgacaccacccaggcattgcctggctctctccgcggc

SEQ ID NO: 398525 - DNA, 120 bp, Artificial Sequence
  ENSG00000146072_0 (sequence is synthesized)
agtccctcgccgaccagtctgggcagcggaggagggtggttggcagtggctggaagcttcgctatgggaagtcgttcctttgctctctcgcgcccagtcctcctccctggttctcctcag

SEQ ID NO: 398526 - DNA, 120 bp, Artificial Sequence
  ENSG00000146072_1 (sequence is synthesized)
ccgctgtcggaggagagcacccggagacgcgggctgcagtcgcggcggcttctccccgcctgggcggccgcgccgctgggcaggtgctgagcgcccctagagcctcccttgccgcctccc

SEQ ID NO: 398527 - DNA, 120 bp, Artificial Sequence
  ENSG00000146072_2 (sequence is synthesized)
tcctctgcccggccgcagcagtgcacatggggtgttggaggtagatgggctcccggcccgggaggcggcggtggatgcggcgctgggcagaagcagccgccgattccagctgccccgcgc

SEQ ID NO: 398528 - DNA, 120 bp, Artificial Sequence
  ENSG00000146072_3 (sequence is synthesized)
gccccgggcgcccctgcgagtccccggttcagccatggggacctctccgagcagcagcaccgccctcgcctcctgcagccgcatcgcccgccgagccacagccacgatgatcgcgggctc

SEQ ID NO: 398529 - DNA, 120 bp, Artificial Sequence
  ENSG00000146072_4 (sequence is synthesized)
ccttctcctgcttggattccttagcaccaccacagctcagccagaacagaaggcctcgaatctcattggcacataccgccatgttgaccgtgccaccggccaggtgctaacctgtgacaa

SEQ ID NO: 398530 - DNA, 120 bp, Artificial Sequence
  ENSG00000146072_5 (sequence is synthesized)
gtgtccagcaggaacctatgtctctgagcattgtaccaacacaagcctgcgcgtctgcagcagttgccctgtggggacctttaccaggcatgagaatggcatagagaaatgccatgactg

SEQ ID NO: 398531 - DNA, 120 bp, Artificial Sequence
  ENSG00000146072_6 (sequence is synthesized)
tagtcagccatgcccatggccaatgattgagaaattaccttgtgctgccttgactgaccgagaatgcacttgcccacctggcatgttccagtctaacgctacctgtgccccccatacggt

SEQ ID NO: 398532 - DNA, 120 bp, Artificial Sequence
  ENSG00000146072_7 (sequence is synthesized)
gtgtcctgtgggttggggtgtgcggaagaaagggacagagactgaggatgtgcggtgtaagcagtgtgctcggggtaccttctcagatgtgccttctagtgtgatgaaatgcaaagcata

SEQ ID NO: 398533 - DNA, 120 bp, Artificial Sequence
  ENSG00000146072_8 (sequence is synthesized)
cacagactgtctgagtcagaacctggtggtgatcaagccggggaccaaggagacagacaacgtctgtggcacactcccgtccttctccagctccacctcaccttcccctggcacagccat

SEQ ID NO: 398534 - DNA, 120 bp, Artificial Sequence
  ENSG00000146072_9 (sequence is synthesized)
ctttccacgccctgagcacatggaaacccatgaagtcccttcctccacttatgttcccaaaggcatgaactcaacagaatccaactcttctgcctctgttagaccaaaggtactgagtag

SEQ ID NO: 398535 - DNA, 120 bp, Artificial Sequence
  ENSG00000146072_10 (sequence is synthesized)
catccaggaagggacagtccctgacaacacaagctcagcaagggggaaggaagacgtgaacaagaccctcccaaaccttcaggtagtcaaccaccagcaaggcccccaccacagacacat

SEQ ID NO: 398536 - DNA, 120 bp, Artificial Sequence
  ENSG00000146072_11 (sequence is synthesized)
cctgaagctgctgccgtccatggaggccactgggggcgagaagtccagcacgcccatcaagggccccaagaggggacatcctagacagaacctacacaagcattttgacatcaatgagca

SEQ ID NO: 398537 - DNA, 120 bp, Artificial Sequence
  ENSG00000146072_12 (sequence is synthesized)
tttgccctggatgattgtgcttttcctgctgctggtgcttgtggtgattgtggtgtgcagtatccggaaaagctcgaggactctgaaaaaggggccccggcaggatcccagtgccattgt

SEQ ID NO: 398538 - DNA, 120 bp, Artificial Sequence
  ENSG00000146072_13 (sequence is synthesized)
ggaaaaggcagggctgaagaaatccatgactccaacccagaaccgggagaaatggatctactactgcaatggccatggtatcgatatcctgaagcttgtagcagcccaagtgggaagcca

SEQ ID NO: 398539 - DNA, 120 bp, Artificial Sequence
  ENSG00000146072_14 (sequence is synthesized)
atccggggccccgaggccagcctcgcccagctaattagcgccctgcgccagcaccggagaaacgatgttgtggagaagattcgtgggctgatggaagacaccacccagctggaaactgac

SEQ ID NO: 398540 - DNA, 120 bp, Artificial Sequence
  ENSG00000146072_15 (sequence is synthesized)
aaactagctctcccgatgagccccagcccgcttagcccgagccccatccccagccccaacgcgaaacttgagaattccgctctcctgacggtggagccttccccacaggacaagaacaag

SEQ ID NO: 398541 - DNA, 120 bp, Artificial Sequence
  ENSG00000146072_16 (sequence is synthesized)
ggcttcttcgtggatgagtcggagccccttctccgctgtgactctacatccagcggctcctccgcgctgagcaggaacggttcctttattaccaaagaaaagaaggacacagtgttgcgg

SEQ ID NO: 398542 - DNA, 120 bp, Artificial Sequence
  ENSG00000146072_17 (sequence is synthesized)
caggtacgcctggacccctgtgacttgcagcctatctttgatgacatgctccactttctaaatcctgaggagctgcgggtgattgaagagattccccaggctgaggacaaactagaccgg

SEQ ID NO: 398543 - DNA, 120 bp, Artificial Sequence
  ENSG00000146072_18 (sequence is synthesized)
ctattcgaaattattggagtcaagagccaggaagccagccagaccctcctggactctgtttatagccatcttcctgacctgctgtagaacatagggatactgcattctggaaattactca

SEQ ID NO: 398544 - DNA, 120 bp, Artificial Sequence
  ENSG00000146072_19 (sequence is synthesized)
tagaacatagggatactgcattctggaaattactcaatttagtggcagggtggttttttaattttcttctgtttctgatttttgttgtttggggtgtgtgtgtgtgtttgtgtgtgtgtg

SEQ ID NO: 398545 - DNA, 120 bp, Artificial Sequence
  ENSG00000146072_20 (sequence is synthesized)
tggccagtgcttgagttctttctccttctctctctctcttttttttttaaataactcttctgggaagttggtttataagcctttgccaggtgtaactgttgtgaaatacccaccactaaa

SEQ ID NO: 398546 - DNA, 120 bp, Artificial Sequence
  ENSG00000146072_21 (sequence is synthesized)
gttttttaagttccatattttctccattttgccttcttatgtattttcaagattattctgtgcactttaaatttacttaacttaccataaatgcagtgtgacttttcccacacactggat

SEQ ID NO: 398547 - DNA, 120 bp, Artificial Sequence
  ENSG00000146072_22 (sequence is synthesized)
tgtgaggctcttaacttcttaaaagtataatggcatcttgtgaatcctataagcagtctttatgtctcttaacattcacacctactttttaaaaacaaatattattactatttttattat

SEQ ID NO: 398548 - DNA, 120 bp, Artificial Sequence
  ENSG00000146072_23 (sequence is synthesized)
tgtttgtcctttataaattttcttaaagattaagaaaatttaagaccccattgagttactgtaatgcaattcaactttgagttatcttttaaatatgtcttgtatagttcatattcatgg

SEQ ID NO: 398549 - DNA, 120 bp, Artificial Sequence
  ENSG00000146072_24 (sequence is synthesized)
ctgaaacttgaccacactattgctgattgtatggttttcacctggacaccgtgtagaatgcttgattacttgtactcttcttatgctaatatgctctgggctggagaaatgaaatcctca

SEQ ID NO: 398550 - DNA, 120 bp, Artificial Sequence
  ENSG00000146072_25 (sequence is synthesized)
agccatcaggatttgctatttaagtggcttgacaactgggccaccaaagaacttgaacttcaccttttaggatttgagctgttctggaacacattgctgcactttggaaagtcaaaatca

SEQ ID NO: 398551 - DNA, 120 bp, Artificial Sequence
  ENSG00000146072_26 (sequence is synthesized)
agtgccagtggcgccctttccatagagaatttgcccagctttgctttaaaagatgtcttgttttttatatacacataatcaataggtccaatctgctctcaaggccttggtcctggtggg

SEQ ID NO: 398552 - DNA, 120 bp, Artificial Sequence
  ENSG00000146072_27 (sequence is synthesized)
attccttcaccaattactttaattaaaaatggctgcaactgtaagaacccttgtctgatatatttgcaactatgctcccatttacaaatgtaccttctaatgctcagttgccaggttcca

SEQ ID NO: 398553 - DNA, 120 bp, Artificial Sequence
  ENSG00000146072_28 (sequence is synthesized)
atgcaaaggtggcgtggactccctttgtgtgggtggggtttgtgggtagtggtgaaggaccgatatcagaaaaatgccttcaagtgtactaatttattaataaacattaggtgtttgtta

SEQ ID NO: 398554 - DNA, 120 bp, Artificial Sequence
  ENSG00000146083_0 (sequence is synthesized)
gggcttgcagcgggctactgtttgccggagcctcccggcgcgcccccgcgagccccctcccgtctggcgcgcgaccccgccgcttcgaatgttgtgaatcaaatgtggggtttgttacat

SEQ ID NO: 398555 - DNA, 120 bp, Artificial Sequence
  ENSG00000146083_1 (sequence is synthesized)
tccgctgccgccgcggacagttcttaaagggccagccgccggctgccgcgcagacccagctgcgtcctgcgccgcctcccgctccctgagggcctgggccgagagagactgatcgcgcgt

SEQ ID NO: 398556 - DNA, 120 bp, Artificial Sequence
  ENSG00000146083_2 (sequence is synthesized)
gggcctcgcgaggcagacgccgtcgggcggacaacaaagagagaggccccggaaggagccgggctgcccccggacccgggggtggggaggggagcacattgttccgcagggcgggagctc

SEQ ID NO: 398557 - DNA, 120 bp, Artificial Sequence
  ENSG00000146083_3 (sequence is synthesized)
ttaaaggatccagacaggcaccccccccctcccccgccccctgcccagtttggccgtcctagatcgggaacaaaggagtcaacgtgtggccgggcggccaaagggttgtgagtcccggcc

SEQ ID NO: 398558 - DNA, 120 bp, Artificial Sequence
  ENSG00000146083_4 (sequence is synthesized)
cagcccctccacccccctgcccccccgatgcgaccatgggctctggcagtgactaggtggccaccctccgcccccgtgggccagcggcgattctctgcgggacctggcagcaccccgggc

SEQ ID NO: 398559 - DNA, 120 bp, Artificial Sequence
  ENSG00000146083_5 (sequence is synthesized)
cagctctggggaagccctggcctcgagggccccctggccagcccgcctgcccgggatgagcgcttaccctcccagcagccgccgtcccgacctccacacctccccgtagaggagcgccga

SEQ ID NO: 398560 - DNA, 120 bp, Artificial Sequence
  ENSG00000146083_6 (sequence is synthesized)
gcctcggctcctgccggcgggagcccccgaatgctgcacccagccacccagcagagcccgttcatggttgatctccacgagcaggtgcaccagggacctgtccctctgtcctacacggtc

SEQ ID NO: 398561 - DNA, 120 bp, Artificial Sequence
  ENSG00000146083_7 (sequence is synthesized)
accacagtgacgacccaaggcttccccttgcctacaggccagcacatccctggctgcagtgcccagcagctcccagcatgctccgtgatgttcagtgggcagcattaccccctctgctgc

SEQ ID NO: 398562 - DNA, 120 bp, Artificial Sequence
  ENSG00000146083_8 (sequence is synthesized)
ctcccgcccccgcttatccaggcgtgcaccatgcagcagctgcctgtgccctatcaggcctacccccacctcatctccagtgaccactacatcctgcaccccccaccaccggccccaccc

SEQ ID NO: 398563 - DNA, 120 bp, Artificial Sequence
  ENSG00000146083_9 (sequence is synthesized)
ccccagcccacccacatggcgcccctggggcagtttgtgtctctgcagacccagcaccctcggatgcccctccagcggctcgacaacgacgtggacctgcgtggggaccagccctccctg

SEQ ID NO: 398564 - DNA, 120 bp, Artificial Sequence
  ENSG00000146083_10 (sequence is synthesized)
ggcagcttcacctactccacctctgcgcctggcccagccctttccccgtcggtgcccctgcactacctgccccacgatccgctgcaccaggagctgtcctttggtgtgccatattctcac

SEQ ID NO: 398565 - DNA, 120 bp, Artificial Sequence
  ENSG00000146083_11 (sequence is synthesized)
atgatgccacggagactgagcacccagagataccgcctgcagcagccactgcccccgccgcccccacccccacccccaccaccctactaccccagcttcctgccctacttcctctcgatg

SEQ ID NO: 398566 - DNA, 120 bp, Artificial Sequence
  ENSG00000146083_12 (sequence is synthesized)
ctgccaatgtcaccaacagcaatggggcccaccatcagcctggacctggacgtggatgatgtggagatggagaactatgaggccctcctgaacctggccgagcggctgggagatgccaag

SEQ ID NO: 398567 - DNA, 120 bp, Artificial Sequence
  ENSG00000146083_13 (sequence is synthesized)
ccccggggtctcaccaaagcagacatagagcagctcccgtcgtaccgctttaacccggacagccatcagtcggagcagacgctgtgtgtggtctgcttcagtgacttcgaggcgcggcag

SEQ ID NO: 398568 - DNA, 120 bp, Artificial Sequence
  ENSG00000146083_14 (sequence is synthesized)
ctgctccgagtcctcccctgcaaccatgagttccacaccaagtgtgttgacaagtggttgaaggccaaccggacgtgtcccatctgccgggccgacgcctccgaggtgcccagggaggct

SEQ ID NO: 398569 - DNA, 120 bp, Artificial Sequence
  ENSG00000146083_15 (sequence is synthesized)
gagtgaggccacgcagccgcctgcccgggagaaccctgcctgaagctctggaaacttgtgggtggggcccagggaggatggggagggagtggcccaggcctgccccttcgctcctgcctg

SEQ ID NO: 398570 - DNA, 120 bp, Artificial Sequence
  ENSG00000146083_16 (sequence is synthesized)
catttccagagctggtgccagggtcagcccagcgaggagtccctgcaataagcccctgcatttgccaagctccaaagactccctccctagtctgcctgcctgcccgcccgccacggagct

SEQ ID NO: 398571 - DNA, 120 bp, Artificial Sequence
  ENSG00000146083_17 (sequence is synthesized)
ggtccctccttttcctgctggcactgagtgccaggggtccgctccctcagtggggccggtggagatccttggccccaggatgggcagacagagcaccatcctgggtcagaaggtctcatg

SEQ ID NO: 398572 - DNA, 120 bp, Artificial Sequence
  ENSG00000146083_18 (sequence is synthesized)
ctctgaaatggcgtgccctctgcccaggtggcactgccaggtgcgtagacagacggtgtcacgagccatttcctgagccccagggctgaatcccccctccttgaccccgaacagtgaact

SEQ ID NO: 398573 - DNA, 120 bp, Artificial Sequence
  ENSG00000146083_19 (sequence is synthesized)
caggcagctggctctgtgttggctgctgtgagggctgagtctggttccctaggggaccctcatcccaggaacaacattccagccccaccctcaggctggagggcgtcccagcctaatccc

SEQ ID NO: 398574 - DNA, 120 bp, Artificial Sequence
  ENSG00000146083_20 (sequence is synthesized)
gagctggggcacacgtatcctgaggggcttgggccatacggggagagggagccctgtgttcccggtggttgtccctcccagggatgcagccagacccgtgcccaatctcctctccctctg

SEQ ID NO: 398575 - DNA, 120 bp, Artificial Sequence
  ENSG00000146083_21 (sequence is synthesized)
ttgttttgcatgaacgtgaggagcagcagtttttgttcattcatttggcccaaaatcacgtgtaggatttggggatgtggatatttaagacaatttcttttttcttttggtttaataggg

SEQ ID NO: 398576 - DNA, 120 bp, Artificial Sequence
  ENSG00000146083_22 (sequence is synthesized)
gcgggtatagggaccaactgggaccgagtgcccagggggccgagcacggtcatgctggccggcctgcatgcatgcgtgtgccgggctgggctgggcggccggcggtcgtggggcagggtt

SEQ ID NO: 398577 - DNA, 120 bp, Artificial Sequence
  ENSG00000146083_23 (sequence is synthesized)
gggggtctgtgctcagctgataactgccatgcactgtactgcacacgtccctagagcctaccgggacccgacgcttttcagggcatttctccctccagccagggcccaactcccacctgc

SEQ ID NO: 398578 - DNA, 120 bp, Artificial Sequence
  ENSG00000146083_24 (sequence is synthesized)
ctgggcgaatctcctccaaggaagtcccaggaggatggggaccaggaaggctgtggacccccatctccagggggccttcccagcctgatccctgtcctccaagttctggaggaggccgct

SEQ ID NO: 398579 - DNA, 120 bp, Artificial Sequence
  ENSG00000146083_25 (sequence is synthesized)
gtagggtctggctgagcttcccacccactttccctggtcccaatcctttcttgtcctatacccagctggggttgctgccctgaacgaactgcgtgtggggccggcacatcctagcaggca

SEQ ID NO: 398580 - DNA, 120 bp, Artificial Sequence
  ENSG00000146083_26 (sequence is synthesized)
gcccctggcgcctgctgcctcagggatgctccaaccaccctcgttctcctcgcagtggccctggctcccacctcccgccccagcctgccgtggggcccgtcagcctggtcccacccccat

SEQ ID NO: 398581 - DNA, 120 bp, Artificial Sequence
  ENSG00000146083_27 (sequence is synthesized)
ggagaacccaaagtcttactgtatataactccaggtgacgtttctatatttatagcagtgttgaaaacccacgtgttttacacagaaccaccctctccaacccctcccttcccgacccca

SEQ ID NO: 398582 - DNA, 120 bp, Artificial Sequence
  ENSG00000146083_28 (sequence is synthesized)
acaaaacgttttcaaaccccttacagttcctggggcaggcggaaacaggctcacagattgtgtgtcggctgcagcagtgattccaacaagcagctattgggggggaaacacagcatttaa

SEQ ID NO: 398583 - DNA, 120 bp, Artificial Sequence
  ENSG00000146083_29 (sequence is synthesized)
aaagatcatcattaaaaaacaagatttatacaacaattacttaggatgtttgtgatctgccgaccttgctatagatgccatgttaccaatgatttcctgtggtgggggcttgccattgtt

SEQ ID NO: 398584 - DNA, 120 bp, Artificial Sequence
  ENSG00000146083_30 (sequence is synthesized)
tactctcttatttaccaacttctggcctaggcatgacagtgggcaccttcccccagccctggctgggcccagcgcctgtgttctgtgttagaaaggttttatatatatataaaattacat

SEQ ID NO: 398585 - DNA, 120 bp, Artificial Sequence
  ENSG00000146083_31 (sequence is synthesized)
atatatgtagaaatatatgtaattttgggggccctgttccttgcacattttacagttacctcatttttcccatgtatgtatttgagaaaatgctaatatatagagaaaaaaatggttctt

SEQ ID NO: 398586 - DNA, 120 bp, Artificial Sequence
  ENSG00000146083_32 (sequence is synthesized)
aaagcttaaatgtgtggttttttccattccatgggattcacattggtttgtagcatttaacataactagtatgttgtattatatatatgtgtatactgattgaaatttttaacagatttg

SEQ ID NO: 398587 - DNA, 120 bp, Artificial Sequence
  ENSG00000146083_33 (sequence is synthesized)
tactttttttaaaatgaaagttgctagttctgcttgaccaagtagtgcaatcattattttttttaatattgttgctgatttcagagggatattcactaataaatgtatgatgtataccaa

SEQ ID NO: 398588 - DNA, 120 bp, Artificial Sequence
  ENSG00000146083_34 (sequence is synthesized)
tcccttccccgctgcaacgttctgggctctgtttgcaaggagggagtcaggagagcggctctgtgtgccccactcctgaccttgaccctgggcccccacacttgtctctctctagctcga

SEQ ID NO: 398589 - DNA, 120 bp, Artificial Sequence
  ENSG00000146083_35 (sequence is synthesized)
ccaatgtcaccaacagcaatggggcccaccatcagcctggacctggacgtggatgatgtggagatggagaactatgaggtcccatggagccccatgctgggaggtggggtttgggagacc

SEQ ID NO: 398590 - DNA, 120 bp, Artificial Sequence
  ENSG00000146083_36 (sequence is synthesized)
cacaccaagtgtgttgacaagtggttgaaggtaacactgcccaggtctgctcctgggtattcctcatgcagtgacggggggatgggctggcctgggctgtttccctccttgtccttgtca

SEQ ID NO: 398591 - DNA, 120 bp, Artificial Sequence
  ENSG00000146083_37 (sequence is synthesized)
tcatctcggaagttctggctccagcggaccaagtccccccaggtggctgcacagatgtggtgggttggggctggtgagagcaacgcctgacgtgcatgttcccacaggccaaccggacgt

SEQ ID NO: 398592 - DNA, 120 bp, Artificial Sequence
  ENSG00000146083_38 (sequence is synthesized)
ggggtgacgtcatctccgggaaggtggccggcccagggttgttagagccagcataaccacttgggccgctctcgccccgtcagaggtcagacccattgcacttcagtatctcaggcggca

SEQ ID NO: 398593 - DNA, 120 bp, Artificial Sequence
  ENSG00000146083_39 (sequence is synthesized)
aggcagaaccccatcccctgtgcccctggccctgtgagccagtctgagaggcagaggcagcaaggcctagatttcacctagcttgcttcatttcacgttccagggaggcattattggccc

SEQ ID NO: 398594 - DNA, 120 bp, Artificial Sequence
  ENSG00000146083_40 (sequence is synthesized)
agacgttagctcgtttgcatgggtggtccgccattggtctgttgggcaatctgggccgtaccagctttttaaagacgccgtgtagtataaacaaggagaagtggggcggccgggccatga

SEQ ID NO: 398595 - DNA, 120 bp, Artificial Sequence
  ENSG00000146083_41 (sequence is synthesized)
gctgtgggaaggaaagatttccacccccattttatagctgtgccaactgaggcgctcagaagcaaagggatttccttgaccaaggtcactagggagtcttctctcctagtctggtggtcc

SEQ ID NO: 398596 - DNA, 120 bp, Artificial Sequence
  ENSG00000146083_42 (sequence is synthesized)
cctccaggcaccacacgttgggaagctctgcttgcgctgggcagagcctgcttgtttcgggtggggtgtggggaagtaggaaggggggcttctcttcctggctgagtctgctcatgcccc

SEQ ID NO: 398597 - DNA, 120 bp, Artificial Sequence
  ENSG00000146083_43 (sequence is synthesized)
cagggtctgactttgtttttatctgcaaaagggagtgtctcttcctgcaaacagatccctggggctcttagaccaaggtcaggggttgtgagtcccggcccagcccctccacccccctgc

SEQ ID NO: 398598 - DNA, 120 bp, Artificial Sequence
  ENSG00000146085_0 (sequence is synthesized)
agagtcgtccggctgacgctggcggtggcgcggtttgtgtgggcttggtgagggcggggaggcctggctgtgtggatgtctgacaggtgaggcgggggacgcagaagtgcagccgccctc

SEQ ID NO: 398599 - DNA, 120 bp, Artificial Sequence
  ENSG00000146085_1 (sequence is synthesized)
tcccacagcggagtccaaaacaggcctaccagtcagttcttatttctattgggtgtttccatgctccaccatgttaagagctaagaatcagctttttttactttcacctcattacctgag

SEQ ID NO: 398600 - DNA, 120 bp, Artificial Sequence
  ENSG00000146085_2 (sequence is synthesized)
gcaggtaaaagaatcatcaggctccaggctcatacagcaacgacttctacaccagcaacagccccttcacccagaatgggctgccctggctaaaaagcagctgaaaggcaaaaacccaga

SEQ ID NO: 398601 - DNA, 120 bp, Artificial Sequence
  ENSG00000146085_3 (sequence is synthesized)
agacctaatatggcacaccccggaagggatctctataaaacccttgtattccaagagagatactatggacttacctgaagaacttccaggagtgaagccattcacacgtggaccatatcc

SEQ ID NO: 398602 - DNA, 120 bp, Artificial Sequence
  ENSG00000146085_4 (sequence is synthesized)
taccatgtatacctttaggccctggaccatccgccagtatgctggttttagtactgtggaagaaagcaataagttctataaggacaacattaaggctggtcagcagggattatcagttgc

SEQ ID NO: 398603 - DNA, 120 bp, Artificial Sequence
  ENSG00000146085_5 (sequence is synthesized)
ctttgatctggcgacacatcgtggctatgattcagacaaccctcgagttcgtggtgatgttggaatggctggagttgctattgacactgtggaagataccaaaattctttttgatggaat

SEQ ID NO: 398604 - DNA, 120 bp, Artificial Sequence
  ENSG00000146085_6 (sequence is synthesized)
tcctttagaaaaaatgtcagtttccatgactatgaatggagcagttattccagttcttgcaaattttatagtaactggagaagaacaaggtgtacctaaagagaagcttactggtaccat

SEQ ID NO: 398605 - DNA, 120 bp, Artificial Sequence
  ENSG00000146085_7 (sequence is synthesized)
ccaaaatgatatactaaaggaatttatggttcgaaatacatacatttttcctccagaaccatccatgaaaattattgctgacatatttgaatatacagcaaagcacatgccaaaatttaa

SEQ ID NO: 398606 - DNA, 120 bp, Artificial Sequence
  ENSG00000146085_8 (sequence is synthesized)
ttcaatttcaattagtggataccatatgcaggaagcaggggctgatgccattctggagctggcctatactttagcagatggattggagtactctagaactggactccaggctggcctgac

SEQ ID NO: 398607 - DNA, 120 bp, Artificial Sequence
  ENSG00000146085_9 (sequence is synthesized)
aattgatgaatttgcaccaaggttgtctttcttctggggaattggaatgaatttctatatggaaatagcaaagatgagagctggtagaagactctgggctcacttaatagagaaaatgtt

SEQ ID NO: 398608 - DNA, 120 bp, Artificial Sequence
  ENSG00000146085_10 (sequence is synthesized)
tcagcctaaaaactcaaaatctcttcttctaagagcacactgtcagacatctggatggtcacttactgagcaggatccctacaataatattgtccgtactgcaatagaagcaatggcagc

SEQ ID NO: 398609 - DNA, 120 bp, Artificial Sequence
  ENSG00000146085_11 (sequence is synthesized)
agtatttggagggactcagtctttgcacacaaattcttttgatgaagctttgggtttgccaactgtgaaaagtgctcgaattgccaggaacacacaaatcatcattcaagaagaatctgg

SEQ ID NO: 398610 - DNA, 120 bp, Artificial Sequence
  ENSG00000146085_12 (sequence is synthesized)
gattcccaaagtggctgatccttggggaggttcttacatgatggaatgtctcacaaatgatgtttatgatgctgctttaaagctcattaatgaaattgaagaaatgggtggaatggccaa

SEQ ID NO: 398611 - DNA, 120 bp, Artificial Sequence
  ENSG00000146085_13 (sequence is synthesized)
agctgtagctgagggaatacctaaacttcgaattgaagaatgtgctgcccgaagacaagctagaatagattctggttctgaagtaattgttggagtaaataagtaccagttggaaaaaga

SEQ ID NO: 398612 - DNA, 120 bp, Artificial Sequence
  ENSG00000146085_14 (sequence is synthesized)
agacgctgtagaagttctggcaattgataatacttcagtgcgaaacaggcagattgaaaaacttaagaagatcaaatccagcagggatcaagctttggctgaacgttgtcttgctgcact

SEQ ID NO: 398613 - DNA, 120 bp, Artificial Sequence
  ENSG00000146085_15 (sequence is synthesized)
gccctgaaaaaggtatttggtgaacataaagcgaatgatcgaatggtgagtggagcatatcgccaggaatttggagaaagtaaagagataacatctgctatcaagagggttcataaattc

SEQ ID NO: 398614 - DNA, 120 bp, Artificial Sequence
  ENSG00000146085_16 (sequence is synthesized)
atggaacgtgaaggtcgcagacctcgtcttcttgtagcaaaaatgggacaagatggccatgacagaggagcaaaagttattgctacaggatttgctgatcttggttttgatgtggacata

SEQ ID NO: 398615 - DNA, 120 bp, Artificial Sequence
  ENSG00000146085_17 (sequence is synthesized)
ggccctcttttccagactcctcgtgaagtggcccagcaggctgtggatgcggatgtgcatgctgtgggcataagcaccctcgctgctggtcataaaaccctagttcctgaactcatcaaa

SEQ ID NO: 398616 - DNA, 120 bp, Artificial Sequence
  ENSG00000146085_18 (sequence is synthesized)
gaacttaactcccttggacggccagatattcttgtcatgtgtggaggggtgataccacctcaggattatgaatttctgtttgaagttggtgtttccaatgtatttggtcctgggactcga

SEQ ID NO: 398617 - DNA, 120 bp, Artificial Sequence
  ENSG00000146085_19 (sequence is synthesized)
attccaaaggctgccgttcaggtgcttgatgatattgagaagtgtttggaaaagaagcagcaatctgtataatatcctctttttgttttagcttttgtctaaaatattattttagttatg

SEQ ID NO: 398618 - DNA, 120 bp, Artificial Sequence
  ENSG00000146085_20 (sequence is synthesized)
atcaaagaagagagtaaagctatgtcttcaatttaatttcaatacctgatttgtactttccttgaaagctttactttaaaataccttacttataggcctggtgtcatgctataagtatgt

SEQ ID NO: 398619 - DNA, 120 bp, Artificial Sequence
  ENSG00000146085_21 (sequence is synthesized)
acatacagtttcacttcaaaaataaaaaaaaaatccctaaaaactctctatactctctataacaatactttatcaagaactctggacaatggtattatttttaaaaatcatggtgatgta

SEQ ID NO: 398620 - DNA, 120 bp, Artificial Sequence
  ENSG00000146085_22 (sequence is synthesized)
tttattagaatgtttcttataaatctgtttactttttatattaagaattaaactgtacctaaaaaaactctgactattcccatttgtcagtttagcattacattgtcttgagcaccagaa

SEQ ID NO: 398621 - DNA, 120 bp, Artificial Sequence
  ENSG00000146085_23 (sequence is synthesized)
aataaaatccatatattaataaaaacctatcttgaaaaactagtggagtgtatttacgtggcaaaagagattttgggaggagtcctcagccaaattctaccagaatcaccttaataaaag

SEQ ID NO: 398622 - DNA, 120 bp, Artificial Sequence
  ENSG00000146085_24 (sequence is synthesized)
aagtattaaaatcaagcacagcaggttggaatatggggaatttgacagtatatttcttcaagtctgagtttactttcttcctgatcatgaccatctgaccttgttatttctgggcttggc

SEQ ID NO: 398623 - DNA, 120 bp, Artificial Sequence
  ENSG00000146085_25 (sequence is synthesized)
tcaagaccaaggagagtggatgttgatgaacattcctttaaataaaagtgcttaggttgtagttatggctttgtctagaatggtgatgtcaactgtgagtgtaggtctgtgatatagaaa

SEQ ID NO: 398624 - DNA, 120 bp, Artificial Sequence
  ENSG00000146085_26 (sequence is synthesized)
gaattcaactttccagatctagaaagatgctaccttgcatagatttgctccttaaacataaattgcaaaaataaaaatatcacagagaacacctgtactttgcttactgaaagatttgct

SEQ ID NO: 398625 - DNA, 120 bp, Artificial Sequence
  ENSG00000146085_27 (sequence is synthesized)
cactaaagaaggaaagttgccatttacctgtttaacaaatctgcacatcctgcacatgttccccagaatgtaaaataaaaaaagtttaaataaaaaaggaaagttgtcctttattgttaa

SEQ ID NO: 398626 - DNA, 120 bp, Artificial Sequence
  ENSG00000146085_28 (sequence is synthesized)
aagttgtcctttattgttaacatgatccattacatgaatataacataaataattatcttttttaataaatttctattgtattagatcagagagcagtcttttggaaagtattatagatac

SEQ ID NO: 398627 - DNA, 120 bp, Artificial Sequence
  ENSG00000146085_29 (sequence is synthesized)
ctcattgtaatacaatgtatttaattttcagaatatgattatctgaatggtattgtcatgattattgttcccattttcagatgaacactgacttcaagtccaatgatatattcactatgc

SEQ ID NO: 398628 - DNA, 120 bp, Artificial Sequence
  ENSG00000146085_30 (sequence is synthesized)
cattttattgacttttccttgtaaagcaatgcacactaatttagtaagtatttggtttctgtgatgtgttcagttgcgtgctgggtgacatgtgaaataaactcatccttgaggaattta

SEQ ID NO: 398629 - DNA, 120 bp, Artificial Sequence
  ENSG00000146090_0 (sequence is synthesized)
cgccgaggctcgcaccgggagctgcccatgggccgggcccggagttccggcgcgccgggagccggcagacatgccacagacgctgagtgcctccgacatggtcaccccaggcagcctcag

SEQ ID NO: 398630 - DNA, 120 bp, Artificial Sequence
  ENSG00000146090_1 (sequence is synthesized)
cccaccccccaccgagcccacagatggcgaacaggctgggcagcccctcctggatggagcgccatcctcagcctccctggaaacactgatccagcacctggtgcccacagccgactacta

SEQ ID NO: 398631 - DNA, 120 bp, Artificial Sequence
  ENSG00000146090_2 (sequence is synthesized)
ccccgagaaagcctacatcttcaccttcctgctgagctctcgcctcttcatcgagccccgggagctcctggcccgggtctgccacctgtgcatcgagcagcagcagctggacaagccggt

SEQ ID NO: 398632 - DNA, 120 bp, Artificial Sequence
  ENSG00000146090_3 (sequence is synthesized)
gctggacaaggcccgggtccggaagttcggccccaaactgctgcagctgttggccgagtggaccgagaccttcccaagggacttccaggaagagtcgactatcgggcaccttaaggacgt

SEQ ID NO: 398633 - DNA, 120 bp, Artificial Sequence
  ENSG00000146090_4 (sequence is synthesized)
cgtgggccgcatcgccccctgtgacgaggcataccggaagaggatgcatcagctcctacaggctctgcaccagaagctggcggctctgcgccaggggccagaaggtctggtgggtgccga

SEQ ID NO: 398634 - DNA, 120 bp, Artificial Sequence
  ENSG00000146090_5 (sequence is synthesized)
caagcccatctcctacaggaccaagccaccagcctccatccacagggagctccttggtgtctgcagcgacccctacacactggcccagcagctgacccacgtggaactggagcggctgcg

SEQ ID NO: 398635 - DNA, 120 bp, Artificial Sequence
  ENSG00000146090_6 (sequence is synthesized)
gcacatcgggcctgaggagtttgtccaggcctttgtgaacaaggaccctctggccagcacaaagccctgcttcagtgacaagaccagcaacctggaggcttatgtgaaatggttcaacag

SEQ ID NO: 398636 - DNA, 120 bp, Artificial Sequence
  ENSG00000146090_7 (sequence is synthesized)
gctgtgctacctggtggcaactgagatctgcatgccagccaagaagaagcagagggcccaggtgattgagttcttcatcgacgtggcccgcgagtgcttcaacatcggcaacttcaactc

SEQ ID NO: 398637 - DNA, 120 bp, Artificial Sequence
  ENSG00000146090_8 (sequence is synthesized)
ccggcatgaacatgagccctgtctccaggctgaagaagacctgggccaaagtgaggacggccaagtttttcatcctcgagcaccagatggacccaacggggaatttctgcaactacagga

SEQ ID NO: 398638 - DNA, 120 bp, Artificial Sequence
  ENSG00000146090_9 (sequence is synthesized)
cagccctgcgcggggcggcccaccgctccctgacggcccacagcagccgagagaagattgtcattcctttcttcagcctgctcatcaaagacatctacttcctgaatgagggctgcgcca

SEQ ID NO: 398639 - DNA, 120 bp, Artificial Sequence
  ENSG00000146090_10 (sequence is synthesized)
accgccttcccaatggacacgtcaactttgagaaattcctggagctggccaagcaggtgggggagttcatcacctggaaacaagtggagtgtcccttcgagcaagacgccagcatcaccc

SEQ ID NO: 398640 - DNA, 120 bp, Artificial Sequence
  ENSG00000146090_11 (sequence is synthesized)
actacctgtacaccgcccccatcttcagtgaggatggtctttatttggcttcttacgaaagtgagagcccagagaaccaaacagaaaaagaaagatggaaagctctaagatcttctattt

SEQ ID NO: 398641 - DNA, 120 bp, Artificial Sequence
  ENSG00000146090_12 (sequence is synthesized)
tggggaagacatgaaagcgctgagctgagggacgaggaagagctggagcccgcagaagccgtccacagccctgcctcagtggcccagtgggcagaggccagggagtgcctcactattttg

SEQ ID NO: 398642 - DNA, 120 bp, Artificial Sequence
  ENSG00000146090_13 (sequence is synthesized)
caaatgccgaccctgtggcctgctgcccgccccccccccccccacagtggccatacgggcacaggagaccttttatgggactttggccctggcaggacccagggcctccagacgtgcggg

SEQ ID NO: 398643 - DNA, 120 bp, Artificial Sequence
  ENSG00000146090_14 (sequence is synthesized)
cggcacatgccttggggacatcctgccttcaggaccgtggggcctggtcagtctgtccatcctcggcaaggacacaacactgccccagagggtgggaccactgcaagctcgagaccttgc

SEQ ID NO: 398644 - DNA, 120 bp, Artificial Sequence
  ENSG00000146090_15 (sequence is synthesized)
ttggtgacatgtgccactttggccaccacccacagtctgtcaccacgtggcttgggaacttctggagccacagcaggcatcacggtgcgacgtgagatgcctgcgccagccccgagccca

SEQ ID NO: 398645 - DNA, 120 bp, Artificial Sequence
  ENSG00000146090_16 (sequence is synthesized)
ctggcagccactgccattccacccatggtccctcaccctgccctgccgacgagcttgtctctgcagccccaggtacccccttcctggatgctgctggccccaggagatagctttccggtg

SEQ ID NO: 398646 - DNA, 120 bp, Artificial Sequence
  ENSG00000146090_17 (sequence is synthesized)
acagctgtggaacgcgtcaacaggacaaactggacacatggagttacagtgtgtacacggcagtcccgccacccagcccccttgtaaactctagtcactataaacacacccgtacgccta

SEQ ID NO: 398647 - DNA, 120 bp, Artificial Sequence
  ENSG00000146090_18 (sequence is synthesized)
ggggggaagaatctagaagaggcctgcccctgagtggggcaagaggagtagacaagagatgggtcctgcaggagagttgagaggccatgagaagacggagaatgaaggctgtgctgtgag

SEQ ID NO: 398648 - DNA, 120 bp, Artificial Sequence
  ENSG00000146090_19 (sequence is synthesized)
gaaggggccctgacaatactcccaggaagtgaccactggactcaagctggcacaaagtggctgtggggggagcctgcccagccaggagccccgggaccagcagctcccactcaggtgcac

SEQ ID NO: 398649 - DNA, 120 bp, Artificial Sequence
  ENSG00000146090_20 (sequence is synthesized)
agcgcgaagactcaccagggaggatggagccgtcaaccgcagaaaggccagagcaagagatggccctgcccagaaatgtgtccgtcccccctcctctccccgtgggcgcagagcaggatc

SEQ ID NO: 398650 - DNA, 120 bp, Artificial Sequence
  ENSG00000146090_21 (sequence is synthesized)
gcacccccctcctcctccctggcacagagagggcacgaggccctgcctgccccgggcggccagacccgcaaggacgcgcagtgaggctcacgtgcccacccggcgcccctcacgagcgcg

SEQ ID NO: 398651 - DNA, 120 bp, Artificial Sequence
  ENSG00000146094_0 (sequence is synthesized)
aactcatgactcggggagccagactgcgatcagacgcgcgtgcccagctgaaccagctgtctctagacggagggacgggaagtggccagaaggggaagtgtgaggagttcccgtccagcc

SEQ ID NO: 398652 - DNA, 120 bp, Artificial Sequence
  ENSG00000146094_1 (sequence is synthesized)
tgtcatcagtctccccaggtcttgaagcggcggccctgctcctggccgtgaccatggaccctctggagacccctatcaaggatggcatcctctaccagcagcatgtcaagtttggcaaga

SEQ ID NO: 398653 - DNA, 120 bp, Artificial Sequence
  ENSG00000146094_2 (sequence is synthesized)
agtgctggcggaaggtgtgggctctgctgtatgcaggaggcccatcaggcgtggcacggctggagagctgggaggtccgggatggtggcctgggagcagcgggtgacaggtcggcagggc

SEQ ID NO: 398654 - DNA, 120 bp, Artificial Sequence
  ENSG00000146094_3 (sequence is synthesized)
ctggccggcgaggggagcgacgggtcatccgcctggctgactgtgtgtccgtgctgccggctgacggcgagagctgcccccgggacaccggtgccttcctgctcaccaccaccgagcgaa

SEQ ID NO: 398655 - DNA, 120 bp, Artificial Sequence
  ENSG00000146094_4 (sequence is synthesized)
gccatctactggctgctcagcaccgccaggcctggatgggccccatctgccagctggccttcccggggacaggggaggcctcctcaggatccacagatgcccagtctcccaagaggggcc

SEQ ID NO: 398656 - DNA, 120 bp, Artificial Sequence
  ENSG00000146094_5 (sequence is synthesized)
tggtccccatggaggaaaactccatctactcctcctggcaggaagtgggcgagtttcccgtggtggtgcagaggactgaggccgccacccgctgccagctgaaggggccggccctgctgg

SEQ ID NO: 398657 - DNA, 120 bp, Artificial Sequence
  ENSG00000146094_6 (sequence is synthesized)
tgctgggcccagacgccatccagctgagggaggccaagggcacccaggccctctacagctggccctaccacttcctgcgcaagttcggctccgacaagggcgtgttctcctttgaggccg

SEQ ID NO: 398658 - DNA, 120 bp, Artificial Sequence
  ENSG00000146094_7 (sequence is synthesized)
cctgtgcccctgacctgtgcagggctgtggccggggccatcgcccgccagcgggagcggctgccagagctgaccaggccccagccctgccccctgccacgggccacctctctgccctccc

SEQ ID NO: 398659 - DNA, 120 bp, Artificial Sequence
  ENSG00000146094_8 (sequence is synthesized)
cacccccggagagcttcgggagatgccaccaggacctgagccacccacgtccaggaaaatgcacctggccgagcccggaccccagagcctgccgctactgctaggcccggagcccaacga

SEQ ID NO: 398660 - DNA, 120 bp, Artificial Sequence
  ENSG00000146094_9 (sequence is synthesized)
tctggcgtccgggctctacgcttcagtgtgcaagcgtgccagtgggcccccaggcaatgagcacctctatgagaacctgtgtgtgctggaggccagccccacgctgcacggtggggaacc

SEQ ID NO: 398661 - DNA, 120 bp, Artificial Sequence
  ENSG00000146094_10 (sequence is synthesized)
tgagccgcacgagggccccggcagccgcagccccacaaccagtcccatctaccacaacggccaggacttgagctggcccggcccggccaacgacagtaccctggaggcccagtaccggcg

SEQ ID NO: 398662 - DNA, 120 bp, Artificial Sequence
  ENSG00000146094_11 (sequence is synthesized)
gctgctggagctggatcaggtggagggcacaggccgccctgaccctcaggcaggtttcaaggccaagctggtgaccctgctgagtcgtgagcggaggaagggcccagccccttgtgaccg

SEQ ID NO: 398663 - DNA, 120 bp, Artificial Sequence
  ENSG00000146094_12 (sequence is synthesized)
gccctgaacgcccagcagagtggtggccagaggggagaggtgctccccctgggacaggagggtgggctggtgggcaaacattgggcccatgcagacacacgcctgtgtccaccctggcct

SEQ ID NO: 398664 - DNA, 120 bp, Artificial Sequence
  ENSG00000146094_13 (sequence is synthesized)
gcaggaacaaggcaggccgcctgtggaggacctcagccctgccctgccctcctcatgaatagtgtgcagactcacagataataaagctcagagcagctcccggcaggggcactcacggca

SEQ ID NO: 398665 - DNA, 120 bp, Artificial Sequence
  ENSG00000146094_14 (sequence is synthesized)
atgtggactggatgcccagcgtgagtgtataccgtgagggcctttgagctctcggacagcgtggagtggtcaagggaggcctccaggaggaagaggtggccaaccgccccaggcagcaca

SEQ ID NO: 398666 - DNA, 120 bp, Artificial Sequence
  ENSG00000146094_15 (sequence is synthesized)
gtggtgagggggccctggaggggctggcctgggggagatgcaggccagaacacacaggtccctgagtgttgggctgaggagcctgggctgcaccccaggaaggggagagacagctgtctc

SEQ ID NO: 398667 - DNA, 120 bp, Artificial Sequence
  ENSG00000146094_16 (sequence is synthesized)
aactcatgactcggggagccagactgcgatcagacgcgcgtgcccagctgaaccaggtgcgtgagaaggctgccttcaggtggccgggggctccctccagctgtctctagacggagggac

SEQ ID NO: 398668 - DNA, 120 bp, Artificial Sequence
  ENSG00000146094_17 (sequence is synthesized)
ggaaccaatataatggcagtgtctggtggtctgcccggccactggatgctttacaaacatgacccagtagcagtcccagctcgagttctcatggccttttgagagacgacattgatgctt

SEQ ID NO: 398669 - DNA, 120 bp, Artificial Sequence
  ENSG00000146094_18 (sequence is synthesized)
gtggaggtcacagttaggaaagagcgggctgggatttgaacccagggctgaccaatcccaagcatagccaaggcctccttacctggctccctgagaaactggggagcagaggcccgctcc

SEQ ID NO: 398670 - DNA, 120 bp, Artificial Sequence
  ENSG00000146094_19 (sequence is synthesized)
agagaaccgatgacgtatcaggcataatccttgatgagagtttgctgcgtgcctactcagtgccaggcgctgggggacacagccgtgttcaggacagccttggtcctgttctccgggagc

SEQ ID NO: 398671 - DNA, 120 bp, Artificial Sequence
  ENSG00000146094_20 (sequence is synthesized)
tcctgctcctggcgccatcctaggagccagccacgcacgcaagcgtcatgcctccagggctctgactgcccagcccctcaccgcaactccacctcagctgcacacacccttggcacatcc

SEQ ID NO: 398672 - DNA, 120 bp, Artificial Sequence
  ENSG00000146094_21 (sequence is synthesized)
tgaacctcattttcatgacggacacacaatttttgctctctcctgtccaagcctcatcctctggccgccacctccttccagctcacttcctttagtgcggccagtaccgcccctgcctag

SEQ ID NO: 398673 - DNA, 120 bp, Artificial Sequence
  ENSG00000146094_22 (sequence is synthesized)
gcatgtcgacctgcagggacccttttctggctcttcgaggcctctgcccaccatcccctctttgttctccatagtcccttccccctgttctctctcgtttcatcttactggtctggcaaa

SEQ ID NO: 398674 - DNA, 120 bp, Artificial Sequence
  ENSG00000146094_23 (sequence is synthesized)
gtccccggccttgggcgagcccagacctcctcagtgcctgcacacagctgcccacagccagagaaatccatttaagcagactgcctgcatccttcttaacagtgcaaggcaggcactccc

SEQ ID NO: 398675 - DNA, 120 bp, Artificial Sequence
  ENSG00000146094_24 (sequence is synthesized)
tgccacaagagaccctgttccctagtagggcagcttttctcctccccagaacctcctgtctatccccacccaatgtctcctcacaggcatattggggaaacaggtcgggctctcccaccg

SEQ ID NO: 398676 - DNA, 120 bp, Artificial Sequence
  ENSG00000146094_25 (sequence is synthesized)
tatctgcaagtgtactggcatccatctgtcttcttcctacccctacagtagaaacagtgtctgtccccagctgtgctctgatcccggctcctttcacctcagagcttggaaaattgagct

SEQ ID NO: 398677 - DNA, 120 bp, Artificial Sequence
  ENSG00000146094_26 (sequence is synthesized)
gtccccactctctcctgcgcccattcatcctaccagcagcttttccagccacacgcaaacatgctctgtaatttcacattttaaaccttcccttgacctcacattcctcttcggccacct

SEQ ID NO: 398678 - DNA, 120 bp, Artificial Sequence
  ENSG00000146094_27 (sequence is synthesized)
ctgtttctctgttcctcttcacagcaaaaactgttcaaaagagttgttgattactttcatttccactttctcacccccattctcccctcaattaactctccttcatccccatgatgccat

SEQ ID NO: 398679 - DNA, 120 bp, Artificial Sequence
  ENSG00000146094_28 (sequence is synthesized)
tatgtggcttttattagagtcaccaaccttattctccaaaacaaaagcaacaaggactttgacttctcagcagcactcggctctggttcttgaaacacccccgttacttgctattcctcc

SEQ ID NO: 398680 - DNA, 120 bp, Artificial Sequence
  ENSG00000146094_29 (sequence is synthesized)
actcttcctgtcagggctgtgatgtttcagggacttctcctgaagccccttgggaggctgcttcttgcctcaggacccccacccactgcctgcctgtgccagccacctggagggagccct

SEQ ID NO: 398681 - DNA, 120 bp, Artificial Sequence
  ENSG00000146094_30 (sequence is synthesized)
ccattccgttgactgaggaggcagcagatgtcatagaactgccatttaggccacaagctctccctaagcctgctctgtgcccagctctgctgagctgtgaggacctagatgggccaggga

SEQ ID NO: 398682 - DNA, 120 bp, Artificial Sequence
  ENSG00000146094_31 (sequence is synthesized)
ggctgcctgggaagccgtcaggcgaggggagagaaagacgcacacgcagaaacgtggacggcagtcacaagaccgctagcagatgaggcaggatctcagcatctggtgagagctgtctct

SEQ ID NO: 398683 - DNA, 120 bp, Artificial Sequence
  ENSG00000146094_32 (sequence is synthesized)
cctaggctcagatgtagtgtagctcaaccctgctacacaaagaatctcctgaaagcctgtaaaaatgtccatgcatgttctgtgagtgatctaccaagaaaataaaaaattttaaaaatc

SEQ ID NO: 398684 - DNA, 120 bp, Artificial Sequence
  ENSG00000146094_33 (sequence is synthesized)
gcagcctctgcccctgcctcggacagcccaggcagacctgggagacttgggaagggagtcagggtggaggatcccacccaggtatggggagtggaatggagtgcgggtgtcagcctgaga

SEQ ID NO: 398685 - DNA, 120 bp, Artificial Sequence
  ENSG00000146094_34 (sequence is synthesized)
cgggagagatgggaaatacaggagtgggagagggtcgaaggctcaaacctcccagcagggaagagcttcacagcctctgacccatgaaatagtgccaccgagggccctaaatagggtgag

SEQ ID NO: 398686 - DNA, 120 bp, Artificial Sequence
  ENSG00000146094_35 (sequence is synthesized)
gggctgagctggaggaggcctcaagggtggagcccctccctgcagcggcactgtcctgggagcaaggaggcagggggtcacctctcctcggcagcagccccacacccccgcagctcagct

SEQ ID NO: 398687 - DNA, 120 bp, Artificial Sequence
  ENSG00000146094_36 (sequence is synthesized)
gcagctgctgcccaggcagataaaccgtcagtttcctttgctcgaagctatttgcatgtttccttccttaacagcttgaggcagaggcctccctcccaccccagctcttggcctgtggcc

SEQ ID NO: 398688 - DNA, 120 bp, Artificial Sequence
  ENSG00000146094_37 (sequence is synthesized)
caagtgcccctttttgggggtgagagggaaccaatataatggcagtgtctggtggtctgcccggccactggatgctttacaaacatgacccagtagcagtcccagctcgagttctcatgg

SEQ ID NO: 398689 - DNA, 120 bp, Artificial Sequence
  ENSG00000146109_0 (sequence is synthesized)
acggccgtcgtgccgctcgtgtcagtcaacatggaggcagaggaatcggagaaggccgcaacggagcaagagccgctggaagggacagaacagacactagatgcggaggaggagcaggag

SEQ ID NO: 398690 - DNA, 120 bp, Artificial Sequence
  ENSG00000146109_1 (sequence is synthesized)
gaatccgaagaagcggcctgtggcagcaagaaacgggtagtgccaggtattgtgtacctgggccatatcccgccgcgcttccggcccctgcacgtccgcaaccttctcagcgcctatggc

SEQ ID NO: 398691 - DNA, 120 bp, Artificial Sequence
  ENSG00000146109_2 (sequence is synthesized)
gaggtcggacgcgtcttctttcaggctgaggaccggttcgtgagacgcaagaagaaggcagcagcagctgccggaggaaaaaagcggtcctacaccaaggactacaccgagggatgggtg

SEQ ID NO: 398692 - DNA, 120 bp, Artificial Sequence
  ENSG00000146109_3 (sequence is synthesized)
gagttccgtgacaagcgcatagccaagcgcgtggcggccagtctacacaacacgcctatgggtgcccgcaggcgcagccccttccgttatgatctttggaacctcaagtacttgcaccgt

SEQ ID NO: 398693 - DNA, 120 bp, Artificial Sequence
  ENSG00000146109_4 (sequence is synthesized)
ttcacctggtcccacctcagcgagcacctcgcctttgagcgccaggtgcgcaggcagcgcttgagagcggaggttgctcaagccaagcgtgagaccgacttctatcttcaaagtgtggaa

SEQ ID NO: 398694 - DNA, 120 bp, Artificial Sequence
  ENSG00000146109_5 (sequence is synthesized)
cggggacaacgctttcttgcggccgatggggaccctgctcgcccagatggctcctggacatttgcccagcgtcctactgagcaggaactgagggcccgtaaagcagcacggccaggggga

SEQ ID NO: 398695 - DNA, 120 bp, Artificial Sequence
  ENSG00000146109_6 (sequence is synthesized)
cgtgaacgggctcgcctggcaactgcccaggacaaggcccgctccaacaaagggctcctggccaggatctttggagccccgccaccctcagagagcatggagggaccttcccttgtcagg

SEQ ID NO: 398696 - DNA, 120 bp, Artificial Sequence
  ENSG00000146109_7 (sequence is synthesized)
gactcctgagggcctgggtggccccttccatttcctggccctgctctgcttcctgtctacctcatactagaatgatcgtgactacccgggcagacattttactgtgtttctcagaccaag

SEQ ID NO: 398697 - DNA, 120 bp, Artificial Sequence
  ENSG00000146109_8 (sequence is synthesized)
tgtctactgatggcccaaacatggagttttgtgggcttccactgtccccactccgaactcctgtatgtgcctggctgagtcacctaattcatactgtcatactagcataattatgactat

SEQ ID NO: 398698 - DNA, 120 bp, Artificial Sequence
  ENSG00000146109_9 (sequence is synthesized)
tgcatatgcttgttttgtttgactcttggctgcctacgtctgtagggtcccctgaaaatcccacttcctgcccccagaaagggcctttatttccaactaggaggataatgcctagtccag

SEQ ID NO: 398699 - DNA, 120 bp, Artificial Sequence
  ENSG00000146109_10 (sequence is synthesized)
gcaatctttctctgtttagcagtcacaggtgagggtggtattagcatcttttttatgtagaaaaaattgagttaatggggtggactgggttgggaagaaatacatttcctaatgtattta

SEQ ID NO: 398700 - DNA, 120 bp, Artificial Sequence
  ENSG00000146109_11 (sequence is synthesized)
tagaaaataaaaatatttttatgtgcctttttatttttgttggtggggaggtcattggacaagttccaactttcatcttgtgttcccttcaccttcatatcctgatcttagagcccccct

SEQ ID NO: 398701 - DNA, 120 bp, Artificial Sequence
  ENSG00000146109_12 (sequence is synthesized)
tcttagcccagtttatcaatcagttatcttaagtcagcattttctaagccattgtttgaggaaacagtgacaataggtaataacacatcttagtattaagagttttacaggccactagta

SEQ ID NO: 398702 - DNA, 120 bp, Artificial Sequence
  ENSG00000146109_13 (sequence is synthesized)
taagataggcatcgtggtagatgcatataaagggtggaatgggagccatggcaggtcatagagtcctctcaatgggaacctgattgatgatcacagtcttcagtggtgagtcagtcctca

SEQ ID NO: 398703 - DNA, 120 bp, Artificial Sequence
  ENSG00000146109_14 (sequence is synthesized)
ccaagttttccagatcattcctacaaagtaaactgggagaataataagtctgaaagagtgtggagtgctcccacaattacaaagaatgcttcctgggtggagtgttgagttggaaccatt

SEQ ID NO: 398704 - DNA, 120 bp, Artificial Sequence
  ENSG00000146109_15 (sequence is synthesized)
gtaaaggtgggcaaagcctagtagagaaccagtgcacctcaggtgcacttacatatggtggggctgaggcaaagcagccctgtaggcttcaaagaatcagtgtaagccactaaaaggaac

SEQ ID NO: 398705 - DNA, 120 bp, Artificial Sequence
  ENSG00000146109_16 (sequence is synthesized)
tgaaaacctaggtgtcacaataaacagtctacacagtctcacgtagaccaaaattctgatcattttccaggctgttgcatgaagtgatagagtatgattataatttctgtttgcttgtgc

SEQ ID NO: 398706 - DNA, 120 bp, Artificial Sequence
  ENSG00000146109_17 (sequence is synthesized)
tgtttgtttttgtttttcatctgtcaatgtgatgatctgtgttttatagggtagagtggatttgtctactttggctgtaaaataccctaatcacattatgatcttgacaggtgcacttta

SEQ ID NO: 398707 - DNA, 120 bp, Artificial Sequence
  ENSG00000146109_18 (sequence is synthesized)
ctggggagaataaaaaggaccatacggtaaagctggtataacatttctcacaacccacatacctcttatacttggcacacaaactacgtttccatttagaaactttcgtcttgtttctgt

SEQ ID NO: 398708 - DNA, 120 bp, Artificial Sequence
  ENSG00000146109_19 (sequence is synthesized)
ttttaattcttgtgggtttgtttcatgtgaattgtttcctcagatcattgatgtcttaaagtgaaacagaaaaatccagaatcagaatttgacaggctggcatattcatttattcagaat

SEQ ID NO: 398709 - DNA, 120 bp, Artificial Sequence
  ENSG00000146109_20 (sequence is synthesized)
tccaagtgcccattgctacttctgctagataaagagataccaaggtgaagaagaaactttccctctagttgctaacagcttagaaagtacagtagacatactggggttttatttaagact

SEQ ID NO: 398710 - DNA, 120 bp, Artificial Sequence
  ENSG00000146109_21 (sequence is synthesized)
ttcttgaatgaagaaataaattgcattcccacggtggacagcgttagataacagtatgttcaagggctggtatttcagggtccatctccaaaacagttctgtacaaagagctcacacctg

SEQ ID NO: 398711 - DNA, 120 bp, Artificial Sequence
  ENSG00000146109_22 (sequence is synthesized)
cggccaggcaagctaagtaagtcacaggtggagtgaggaatgagaataaatgggtggaagaaaatatcctaggaactttcatcttgactttaagcccattgagtgtaggaaaataatttt

SEQ ID NO: 398712 - DNA, 120 bp, Artificial Sequence
  ENSG00000146109_23 (sequence is synthesized)
ttacatccacaattttgtttctatttaaacagcacttgtttttttatatgaagtaactcatttaatccacaactatataatattgttatccccccattaaaactgagctcagagagatga

SEQ ID NO: 398713 - DNA, 120 bp, Artificial Sequence
  ENSG00000146112_0 (sequence is synthesized)
gcgctgagacgcgcccggctgctgccgccgccctcctttcccctcttccctggtttcccttctcctctagacctgttcgctctccgcccctccttgcctccccaacaccccctcaggtcc

SEQ ID NO: 398714 - DNA, 120 bp, Artificial Sequence
  ENSG00000146112_1 (sequence is synthesized)
cgttgcctcctggtcctttcagggattcctggtccttccttcccacactagcctccctggggtatcgctgaggcagcctggcctgcacccaggttcccctcacccctgccacatttctct

SEQ ID NO: 398715 - DNA, 120 bp, Artificial Sequence
  ENSG00000146112_2 (sequence is synthesized)
cttctccctcacgccaactttccttttcgcccttctctctctttctcacatcctagagacggtctttaatacgcattaaccctgtgctgccacatctggctcctgccctcattgcctcca

SEQ ID NO: 398716 - DNA, 120 bp, Artificial Sequence
  ENSG00000146112_3 (sequence is synthesized)
atccggactcttcctctcacatcacccccaccacccccaacttgggctcacaacttctcttcactttttccatttccccagttctctgccttccgtctttccctctgtcctcatccttag

SEQ ID NO: 398717 - DNA, 120 bp, Artificial Sequence
  ENSG00000146112_4 (sequence is synthesized)
cccctctgccctgctttgtgtcccacctctccccctccacttcctctcctcccaccctcagtctcacccccgggctgtctcactctctggagcctctccttcctgttctctgtccccagt

SEQ ID NO: 398718 - DNA, 120 bp, Artificial Sequence
  ENSG00000146112_5 (sequence is synthesized)
gctccctaccctcacctcaagacgaccatggccaccatcccagactggaagctacagctgctagcccggcgccggcaggaggaggcgtccgttcgaggccgagagaaagcagaacgggag

SEQ ID NO: 398719 - DNA, 120 bp, Artificial Sequence
  ENSG00000146112_6 (sequence is synthesized)
cgcctgtcccagatgccagcctggaaacgagggctcctggagcgccgccgggccaagcttgggctgtcccctggggagcctagccctgtgctagggactgtagaggctggacctccagac

SEQ ID NO: 398720 - DNA, 120 bp, Artificial Sequence
  ENSG00000146112_7 (sequence is synthesized)
ccggatgagtctgcggtccttctggaggccatcgggccagtgcaccagaaccgattcatccggcaggagcggcagcagcagcagcagcaacaacaacggagtgaagagctgctagcagag

SEQ ID NO: 398721 - DNA, 120 bp, Artificial Sequence
  ENSG00000146112_8 (sequence is synthesized)
agaaagcctgggcctctggaggcccgggagcggagacccagccctggggagatgcgggatcagagccccaagggaagagagtcaagagaagagagactaagtccgagggagaccagagag

SEQ ID NO: 398722 - DNA, 120 bp, Artificial Sequence
  ENSG00000146112_9 (sequence is synthesized)
aggaggctggggatagggggagcccaagagttgagcctgaggcctctggaggctcgggactggaggcaaagcccaggagaggtgggagacaggagctcccgactgtcagaggcatggaaa

SEQ ID NO: 398723 - DNA, 120 bp, Artificial Sequence
  ENSG00000146112_10 (sequence is synthesized)
tggaggctgagtcctggagaaactccagagcggagtctgagactagcagagtctcgagagcaaagccccaggagaaaagaggtggaaagtagactgagcccaggggaatctgcctaccag

SEQ ID NO: 398724 - DNA, 120 bp, Artificial Sequence
  ENSG00000146112_11 (sequence is synthesized)
aagttgggcctgacagaggcccataaatggagacctgactccagagagtctcaggaacagagtttggtacaactggaggcaacagagtggaggctgaggtcaggagaagaaagacaagac

SEQ ID NO: 398725 - DNA, 120 bp, Artificial Sequence
  ENSG00000146112_12 (sequence is synthesized)
tactcggaagaatgtgggagaaaagaagagtggccagttccaggggtagctccaaaagagactgcagagctgtccgagaccctgacaagggaggcccaaggcaacagttccgcaggagtg

SEQ ID NO: 398726 - DNA, 120 bp, Artificial Sequence
  ENSG00000146112_13 (sequence is synthesized)
acatagaggctcaaactcagaaaccagaacctccagagtcagcagagaagcttctggaatctcccggtgtggaggctggagaaggggaggctgagaaggaggaggcgggggctcagggca

SEQ ID NO: 398727 - DNA, 120 bp, Artificial Sequence
  ENSG00000146112_14 (sequence is synthesized)
ggcctctgagagccctgcagaactgctgctctgtgccctcccccctcccaccagaggacgctgggactggaggcctgagacagcaggaagaggaagcagtggagctccagcccccaccac

SEQ ID NO: 398728 - DNA, 120 bp, Artificial Sequence
  ENSG00000146112_15 (sequence is synthesized)
cagcccctctgtctcccccacccccagccccaactgccccccaacctcctggggatcccctcatgagccgcctgttctatggggtgaaggcagggccaggggtgggggccccccgccgca

SEQ ID NO: 398729 - DNA, 120 bp, Artificial Sequence
  ENSG00000146112_16 (sequence is synthesized)
gtggacacaccttcaccgtcaacccccggcggtctgtgccccctgcgaccccagccaccccaacctctccagccacagttgatgctgcagtcccgggggctgggaagaagcggtacccaa

SEQ ID NO: 398730 - DNA, 120 bp, Artificial Sequence
  ENSG00000146112_17 (sequence is synthesized)
ctgccgaggagatcttggttctggggggctacctccgtctcagccgcagctgccttgccaaggggtcccccgaaagacaccacaaacagcttaagatctccttcagcgagacagccctgg

SEQ ID NO: 398731 - DNA, 120 bp, Artificial Sequence
  ENSG00000146112_18 (sequence is synthesized)
agaccacgtaccaatacccctccgagagttcggtactggaggagctgggcccggagcctgaggtccccagtgcccccaaccctccagcagcccaacccgacgacgaagaggatgaggaag

SEQ ID NO: 398732 - DNA, 120 bp, Artificial Sequence
  ENSG00000146112_19 (sequence is synthesized)
agctgctgctgctgcagccagagctccagggcgggctgcgcaccaaggccctgattgtggatgagtcctgccggcggtgaccatcttccaacatagggatatacctccctccttcttata

SEQ ID NO: 398733 - DNA, 120 bp, Artificial Sequence
  ENSG00000146112_20 (sequence is synthesized)
actgaagatcctggagcccggaagattcagggcagacagaccctgataatgagcctggcagggaagggcaaccaacatcttgtaacttgctttccccaccctgtttctgggggcagagcc

SEQ ID NO: 398734 - DNA, 120 bp, Artificial Sequence
  ENSG00000146112_21 (sequence is synthesized)
aattgcccaatttctaccctaatccaaagtccctggtgtgggtggggttaaacgtgctggtgcatcctaggtcatccaagagtgagcgccaagtcctgagaaggggcacagaactccctg

SEQ ID NO: 398735 - DNA, 120 bp, Artificial Sequence
  ENSG00000146112_22 (sequence is synthesized)
gagggtggagatggagcacctgccccccatggcagggtacactctccccacagccttcctccccaccatcccgtggggactctcgggatttaagcactcgtctctctgggaggcccagac

SEQ ID NO: 398736 - DNA, 120 bp, Artificial Sequence
  ENSG00000146112_23 (sequence is synthesized)
cccactccatttataggcacatctccttcatttcctaggtcactgcccctttgtttacagctcctgcctcctcccttgaccacagcctggtttacaaattccatcagctcccagccccac

SEQ ID NO: 398737 - DNA, 120 bp, Artificial Sequence
  ENSG00000146112_24 (sequence is synthesized)
ctgccaaagtcccaggtttacaagccacgcttacttgctgtgtctgcgtggaattctctcctctgtcccctccagtctcctcattggagtgacctgaaggtgtggcttcctccacttttt

SEQ ID NO: 398738 - DNA, 120 bp, Artificial Sequence
  ENSG00000146112_25 (sequence is synthesized)
ctcagtattactttgccttagttttccccaagagggaaggctggaactcttaactctgtaccccttgatagttatttaattctgtttctcctagtggttcacaattgaactgaattgaga

SEQ ID NO: 398739 - DNA, 120 bp, Artificial Sequence
  ENSG00000146112_26 (sequence is synthesized)
tggtgtcgggtggctaaggagacacctcacctctccttccccattgtgccgcctttatcaattgcctgttttgttttgtttgttttttaactttccataataaaatggagttctcttcaa

SEQ ID NO: 398740 - DNA, 120 bp, Artificial Sequence
  ENSG00000146112_27 (sequence is synthesized)
actttgccagagcggccgggtccccattcccattccttcaaatcccctttttcccggcagccgacctgtagacccaagggagacaggttgaagctagaaagagtcggggcagcagctctg

SEQ ID NO: 398741 - DNA, 120 bp, Artificial Sequence
  ENSG00000146112_28 (sequence is synthesized)
gtaggggagggagcatccaaaacctctggcttctgagcgcctctcctgccgcccatccacaaagccccccacagcctggcggctgccctcgaccccgcaaaacaaaggacttcagaggct

SEQ ID NO: 398742 - DNA, 120 bp, Artificial Sequence
  ENSG00000146112_29 (sequence is synthesized)
ggacctacagacccagatgagaaggcaaaagcgtagggaggagcggcaggagatgggaagggcgggccccgctcggagcagctgccgcttcctcccaaagtcccacgaggggcctgagtc

SEQ ID NO: 398743 - DNA, 120 bp, Artificial Sequence
  ENSG00000146112_30 (sequence is synthesized)
acgggccaccgccctgggtcggcgagctgggggaagggatctggacacctggcgtgtccgggcgggaagctggtgagggcccctggggacagagcggaggaccagtggttggggcgagaa

SEQ ID NO: 398744 - DNA, 120 bp, Artificial Sequence
  ENSG00000146112_31 (sequence is synthesized)
gagggcagtcccgcagcgagtcccacgcggggtgggagggatctaggccccgccctctcctcggctccgccctgcgcccccttccctctcctcattgtccttagacaaagcggtcgccgc

SEQ ID NO: 398745 - DNA, 120 bp, Artificial Sequence
  ENSG00000146112_32 (sequence is synthesized)
ccccgcccggccccctggtctctgtctccgtccctcctcctttgctgcctctttccctcctcctctccctccctcctcccctccctccagtctccggatctccctcggtccctctctcct

SEQ ID NO: 398746 - DNA, 120 bp, Artificial Sequence
  ENSG00000146112_33 (sequence is synthesized)
cctcttcctctctctggacgcccggctcctccgcaccccctcccccgggggtcccgcggcctgtgagttgactgaggggctcagacttggggagtgggtgtctcctcgcccctgtccttg

SEQ ID NO: 398747 - DNA, 120 bp, Artificial Sequence
  ENSG00000146112_34 (sequence is synthesized)
ctcccgtccctggcccggaccttggctgtctcctctttgtgccgagattgtcagtctgtgcggctacagcggggtggagacggccggctctgtcacggcttcatgagagcggggacgggg

SEQ ID NO: 398748 - DNA, 120 bp, Artificial Sequence
  ENSG00000146112_35 (sequence is synthesized)
cgcaggacttgcaggcgccggggagaagagacatggagccggcccttggcactctggggtcgcgtggggcagtcggtgggggaggcaggcggtggtgacaggacagggtgggggtggacg

SEQ ID NO: 398749 - DNA, 120 bp, Artificial Sequence
  ENSG00000146112_36 (sequence is synthesized)
ccagggttctgggaacgcgctggcagccctgacgcccgggttccgaaagtctcgggggtggctatttcccccgacccgcctcgggggcggagtgcggggcagaggggtgggggctgggga

SEQ ID NO: 398750 - DNA, 120 bp, Artificial Sequence
  ENSG00000146112_37 (sequence is synthesized)
cctcggtccctctctcctcctcttcctctctctggacgcccggctcctccgcaccccctcccccgggggtcccgcggcctccacagttgatgctgcagtcccgggggctgggaagaagcg

SEQ ID NO: 398751 - DNA, 120 bp, Artificial Sequence
  ENSG00000146122_0 (sequence is synthesized)
gggcgggggaaggagcatctcaggaaaggggtccccggactctggggctctcagcacctgcggtcgcaaaccaacctcatgccctgactttaccaggcgtcgggactctgacttaaccgg

SEQ ID NO: 398752 - DNA, 120 bp, Artificial Sequence
  ENSG00000146122_1 (sequence is synthesized)
ggaatgagggacttggtctggcggcagatcacaatgaggacctagggcatctgtctgctgacgccccctggcctgcagtgaccatggccccccgcaagaggagccaccatggcctgggct

SEQ ID NO: 398753 - DNA, 120 bp, Artificial Sequence
  ENSG00000146122_2 (sequence is synthesized)
tcctgtgctgcttcgggggcagtgacatccccgaaatcaacctccgggacaaccaccctctgcagttcatggagttctccagccccatcccgaacgcagaggagctcaacatccgctttg

SEQ ID NO: 398754 - DNA, 120 bp, Artificial Sequence
  ENSG00000146122_3 (sequence is synthesized)
cagagctggtggatgaattggatctcactgacaaaaaccgagaggctatgtttgcactgccccctgagaagaaatggcagatctactgcagcaagaagaaggagcaggaggaccccaaca

SEQ ID NO: 398755 - DNA, 120 bp, Artificial Sequence
  ENSG00000146122_4 (sequence is synthesized)
agctggcaaccagctggcctgactattacatcgaccgcatcaattccatggctgcgatgcagagtctgtacgcgtttgatgaggaggagacggagatgaggaaccaagtcgtggaagacc

SEQ ID NO: 398756 - DNA, 120 bp, Artificial Sequence
  ENSG00000146122_5 (sequence is synthesized)
tgaagacagccctccggacacagcctatgaggtttgtgacccgcttcattgagctggagggcttgacctgtctgctaaatttcctccggagcatggaccacgccacctgtgagagccgca

SEQ ID NO: 398757 - DNA, 120 bp, Artificial Sequence
  ENSG00000146122_6 (sequence is synthesized)
tccacacctcactcattggctgcatcaaagcattgatgaacaactcccaggggcgggcacatgtgctggcacagcctgaggccattagtaccatagcccagagcctacgcacagagaaca

SEQ ID NO: 398758 - DNA, 120 bp, Artificial Sequence
  ENSG00000146122_7 (sequence is synthesized)
gcaagaccaaggtggctgtgctggagatcctgggtgctgtgtgcctcgtgcctggtggccacaagaaggtgctgcaggccatgctgcactaccaggtgtatgcagcagagcgaacccgct

SEQ ID NO: 398759 - DNA, 120 bp, Artificial Sequence
  ENSG00000146122_8 (sequence is synthesized)
tccagaccctgctgaacgagctagaccgaagtctgggccggtaccgggatgaagtgaatctgaaaacagccatcatgtccttcatcaatgctgtcctcaatgctggagctggagaggata

SEQ ID NO: 398760 - DNA, 120 bp, Artificial Sequence
  ENSG00000146122_9 (sequence is synthesized)
atctggagttccgcctacatctacggtatgaattcctgatgctgggtatacagcctgtgattgacaagctccggcaacatgaaaatgccatcctggacaaacatttagacttcttcgaga

SEQ ID NO: 398761 - DNA, 120 bp, Artificial Sequence
  ENSG00000146122_10 (sequence is synthesized)
tggtgcggaatgaggatgacctggagctagccaggaggtttgacatggtccacatcgacaccaagagtgcttcccagatgtttgagttgatccacaagaagctgaagtacacggaggcct

SEQ ID NO: 398762 - DNA, 120 bp, Artificial Sequence
  ENSG00000146122_11 (sequence is synthesized)
acccctgcctgctctctgtgctgcaccactgcctgcagatgccctacaaacggaacggtggctacttccagcagtggcagctcctggaccgcatcctccagcagattgtcctccaggatg

SEQ ID NO: 398763 - DNA, 120 bp, Artificial Sequence
  ENSG00000146122_12 (sequence is synthesized)
agcggggtgtggaccctgacctggctcccttggagaacttcaatgtcaagaacatcgtcaacatgctcatcaacgagaatgaagtgaaacagtggcgagaccaggcagagaagttccgga

SEQ ID NO: 398764 - DNA, 120 bp, Artificial Sequence
  ENSG00000146122_13 (sequence is synthesized)
aagaacacatggagcttgtgagccgtctggagaggaaggagcgggaatgcgagacaaagacattggagaaggaagagatgatgcggacgctgaacaaaatgaaggacaagctggcccggg

SEQ ID NO: 398765 - DNA, 120 bp, Artificial Sequence
  ENSG00000146122_14 (sequence is synthesized)
agtcccaggagctgcgccaggctcggggacaagtggcagagctggtagcccagctcagtgaactctcaacaggccctgtatcttccccaccaccccctgggggcccactcaccttgtctt

SEQ ID NO: 398766 - DNA, 120 bp, Artificial Sequence
  ENSG00000146122_15 (sequence is synthesized)
cctcaatgacaaccaatgacctgcctccaccccctcctcctctgccctttgcctgttgtccccctcccccaccaccaccccttcctcccgggggacccccgactcccccaggtgccccac

SEQ ID NO: 398767 - DNA, 120 bp, Artificial Sequence
  ENSG00000146122_16 (sequence is synthesized)
cttgcctcggcatgggcctgcccctccctcaggacccctaccccagcagtgacgtcccactcaggaaaaagcgtgtcccccagccttctcacccactgaagtccttcaactgggtgaagc

SEQ ID NO: 398768 - DNA, 120 bp, Artificial Sequence
  ENSG00000146122_17 (sequence is synthesized)
tgaatgaggagcgtgtccctggcaccgtatggaatgagattgatgacatgcaggtatttcggatcctggacctagaggattttgaaaagatgttttcagcctaccagaggcaccagaaag

SEQ ID NO: 398769 - DNA, 120 bp, Artificial Sequence
  ENSG00000146122_18 (sequence is synthesized)
agctgggctccactgaagacatctacctggcttcccgcaaggtcaaagagctgtcggtcattgatggccggagggcccaaaactgcatcatccttctttccaagttgaagctttctaacg

SEQ ID NO: 398770 - DNA, 120 bp, Artificial Sequence
  ENSG00000146122_19 (sequence is synthesized)
aggagatccggcaggccatcttgaagatggatgagcaggaggaccttgctaaggacatgctggagcagctcctcaagttcatcccagagaagagtgacattgacctcctggaggagcaca

SEQ ID NO: 398771 - DNA, 120 bp, Artificial Sequence
  ENSG00000146122_20 (sequence is synthesized)
agcatgaaattgagcggatggcccgtgctgaccgcttcctctatgaaatgagcaggattgaccactaccagcagcgactgcaagccctcttcttcaagaagaaattccaggagcggctgg

SEQ ID NO: 398772 - DNA, 120 bp, Artificial Sequence
  ENSG00000146122_21 (sequence is synthesized)
ctgaggcaaagcccaaagtggaagccatcctgttggcctcccgggagctggtccgcagcaagcgtcttagacagatgctagaggtcatcctagccataggcaacttcatgaacaaagggc

SEQ ID NO: 398773 - DNA, 120 bp, Artificial Sequence
  ENSG00000146122_22 (sequence is synthesized)
agcgtgggggcgcctacgggttccgggtggccagcctcaacaagatcgctgacaccaagtccagcatcgacagaaacatctctctgctccattacctgatcatgatcctggagaagcatt

SEQ ID NO: 398774 - DNA, 120 bp, Artificial Sequence
  ENSG00000146122_23 (sequence is synthesized)
ttcctgatattctaaacatgccttcagagctgcaacatcttccagaagctgccaaagtcaacctagcagaactggagaaggaggtgggcaacctcaggaggggcctgagagcggtggagg

SEQ ID NO: 398775 - DNA, 120 bp, Artificial Sequence
  ENSG00000146122_24 (sequence is synthesized)
tgctggagtatcagaggcgccaggtacgggagcccagtgacaagtttgtccctgtcatgagcgacttcatcacggtgtccagcttcagcttctccgagctggaggaccagctaaatgagg

SEQ ID NO: 398776 - DNA, 120 bp, Artificial Sequence
  ENSG00000146122_25 (sequence is synthesized)
ccagggacaagttcgccaaggccttgatgcacttcggggagcatgacagcaagatgcagccagacgaattctttggcatctttgataccttcttgcaggccttctcagaggcccggcagg

SEQ ID NO: 398777 - DNA, 120 bp, Artificial Sequence
  ENSG00000146122_26 (sequence is synthesized)
ggccatgaggaggaggaaggaggaggaggagcggcgggcgcgcatggaagccatgctgaaggagcagagggaacgtgagcggtggcagcggcagcggaaggtcctggctgcaggcagctc

SEQ ID NO: 398778 - DNA, 120 bp, Artificial Sequence
  ENSG00000146122_27 (sequence is synthesized)
gctggaggagggaggagagttcgatgacctggtgtcggccctgcgctctggggaggtcttcgacaaggacttatgcaagctcaagcgcagccgcaagcgatcagggagccaggccctgga

SEQ ID NO: 398779 - DNA, 120 bp, Artificial Sequence
  ENSG00000146122_28 (sequence is synthesized)
agttacccgggagcgggcaataaaccggctaaattattgacctggggaactagccacacaggaggccgggagacagggactggtgagaatggggctgagtggaggaggtggtgatattta

SEQ ID NO: 398780 - DNA, 120 bp, Artificial Sequence
  ENSG00000146122_29 (sequence is synthesized)
aaccatttggtgcttggtttagagccttgggctgggtcctgggatggggggctgtgtgtggctggaccaggtgtctccccacgcttaccttaaggggctcctcttatctccccttcacat

SEQ ID NO: 398781 - DNA, 120 bp, Artificial Sequence
  ENSG00000146122_30 (sequence is synthesized)
gattccttctgtgccctggccccaggtattattctgaggctgccttggatggcctcaggccaggtaaccccaggctgaaggggccctgctccccatcccctaccatgggcacccatgtgc

SEQ ID NO: 398782 - DNA, 120 bp, Artificial Sequence
  ENSG00000146122_31 (sequence is synthesized)
tggcacagaacagttccagatctagactggagaggtccacagccttgtccagagttcctgtgtagcacggggagcaatgatggagggagcccctgagagggaatctggtgagggaatcca

SEQ ID NO: 398783 - DNA, 120 bp, Artificial Sequence
  ENSG00000146122_32 (sequence is synthesized)
gactcccttctctcaaggggaggctcaacagaacattgacctgggggcaaactttcctcttgaatgggaacagaggaggcattatatattctagttagatcagctctggtaggttccaga

SEQ ID NO: 398784 - DNA, 120 bp, Artificial Sequence
  ENSG00000146122_33 (sequence is synthesized)
gaacagtcaatgttggaaggatgatgcagggaccaaagccatcaggacagagtagcagtgtctgtttcccatgtcacaagtcctctggcctctccctgcatgtcttaagtatctttccct

SEQ ID NO: 398785 - DNA, 120 bp, Artificial Sequence
  ENSG00000146122_34 (sequence is synthesized)
tccttctctaccctcacctccatcctgtctactaatccacagtcctagaagactcaccttgggtttccacagctatggctcactaccaggtgcttgatgaatctggcgaggggctcaaga

SEQ ID NO: 398786 - DNA, 120 bp, Artificial Sequence
  ENSG00000146122_35 (sequence is synthesized)
cagacctcatgcatcaccacacctcatgccttttgggcatctcccatgtccccatctcctggacacctggccattgttgtgaagccagacagtgacctcaaatgttgccttggagtcccc

SEQ ID NO: 398787 - DNA, 120 bp, Artificial Sequence
  ENSG00000146122_36 (sequence is synthesized)
tacagcccctcagcagagggcagcacttgaatgcttagctccatcccatagttctctacttcatataaattgctcaggccctcccaccccttctctaacactagcttcaaggcagaagcc

SEQ ID NO: 398788 - DNA, 120 bp, Artificial Sequence
  ENSG00000146122_37 (sequence is synthesized)
acagcagcctctgtccagcctgcaggtggccacttggaaccatgtgtccactggcgttggggagttggttcctgagaggtctgagggccagagctgccctctacattaacatgctgtctc

SEQ ID NO: 398789 - DNA, 120 bp, Artificial Sequence
  ENSG00000146122_38 (sequence is synthesized)
taagggtggcccctcctctcaggcgttcagatggtgcgaacagcagagcaggcaagggaaactggggagatggggatggaggaggaaggctgatatcctctggggagcacatcacctgaa

SEQ ID NO: 398790 - DNA, 120 bp, Artificial Sequence
  ENSG00000146122_39 (sequence is synthesized)
ggtgccaaggaggaaggctgagaggggggccaccccatttctggtacccaatttggttcttcagcccaacttgcaaggggttccttctggtcctcccatccactgccaccttccattttg

SEQ ID NO: 398791 - DNA, 120 bp, Artificial Sequence
  ENSG00000146122_40 (sequence is synthesized)
tccatctcatgctggccttggtggatgggatggctgtatctagacaaaatttttctaaaactccatcaaggctcttattcaataccacgttccgagttggcctttcatcttctttgagac

SEQ ID NO: 398792 - DNA, 120 bp, Artificial Sequence
  ENSG00000146122_41 (sequence is synthesized)
tggccctgcctaacctctaccatcaatgagctcttggcccttctgcccttccctgtgtttctcactttccaacctaatccctggctcagggttattgccagtggagactggtgagctggg

SEQ ID NO: 398793 - DNA, 120 bp, Artificial Sequence
  ENSG00000146122_42 (sequence is synthesized)
cctactctcagctgcctatcttctgcctttcacttgcatccaactcctggggctgggaccgtagtagctgcgggggggaagaaacacagggtcggtgagcccagcatgtgcgttggtttg

SEQ ID NO: 398794 - DNA, 120 bp, Artificial Sequence
  ENSG00000146122_43 (sequence is synthesized)
agggggcgggcggtgtgtgtgtgttctggtgggagggatctgagcaagtgcaagcctggctgacacaggtgtgaagaggccatcctggaacccaggtgagggcaagatgaaggcttccag

SEQ ID NO: 398795 - DNA, 120 bp, Artificial Sequence
  ENSG00000146122_44 (sequence is synthesized)
gcagaacagctgcagagagtttggctatatgcatctgcagccccaagagctcccactgcaagacaagtgttggggaagatgggaggttgtgggtgaggcctctaaaggtcctctcccaaa

SEQ ID NO: 398796 - DNA, 120 bp, Artificial Sequence
  ENSG00000146122_45 (sequence is synthesized)
ctgaccaggctgatgtcaacctaaccccctcaggggcagggaacaggggagggctccacaagcgtgtctggcattcccacccaccatggaagactggatacgcacctggaaacaaaagga

SEQ ID NO: 398797 - DNA, 120 bp, Artificial Sequence
  ENSG00000146122_46 (sequence is synthesized)
ctatggaagctgttcaagatacatttgatcttcagaaaagcagaatttggttcaactgttgacagaggacacaaatacgttgttccagagctcagccttctcactctaaaagaaagatat

SEQ ID NO: 398798 - DNA, 120 bp, Artificial Sequence
  ENSG00000146122_47 (sequence is synthesized)
ttttctatttattttctacatctggccagtggctctggtgctagatgccactgtagccagatctccaacagtgccttggaccatggactcatactcaactgagtaagaaggggctggtgc

SEQ ID NO: 398799 - DNA, 120 bp, Artificial Sequence
  ENSG00000146122_48 (sequence is synthesized)
ccagtcggggtggctgagctggtccttaataggttgtttcttggtcttgctttcttcatgccctccccactgctcctgccacctttagataagtttctctagctaattttgtggccaatg

SEQ ID NO: 398800 - DNA, 120 bp, Artificial Sequence
  ENSG00000146122_49 (sequence is synthesized)
taaaattcgtcatcaacctaacaaacacaaccttctcagcagcatttctcccctgtgatggaaataaagtgtttagggcagtgggaggagaaaattctccaggtgaatggggaagggtct

SEQ ID NO: 398801 - DNA, 120 bp, Artificial Sequence
  ENSG00000146122_50 (sequence is synthesized)
gttccagcctctccctactcccatcccatttccaccaactggggaactgtgactatctatctcccccgacttctaccagggatgccttcacgccaaggctgttctcaccagctgcctcag

SEQ ID NO: 398802 - DNA, 120 bp, Artificial Sequence
  ENSG00000146122_51 (sequence is synthesized)
atgacaaatgaggctaatggacataatctacagtgtcctttttcacttgcaccttttttataagaatatattgtaatactaaaaaatattaaattcataccatccctacccagtctgcct

SEQ ID NO: 398803 - DNA, 120 bp, Artificial Sequence
  ENSG00000146122_52 (sequence is synthesized)
ctcgggtctcagcgatgccccctgtgtctcccacccctaggcctgcacagaggggactcagaggccgagataatttacttttgctttctttgccttttccagagcatagggggaaaccgt

SEQ ID NO: 398804 - DNA, 120 bp, Artificial Sequence
  ENSG00000146122_53 (sequence is synthesized)
aatttaggcggctgctaagaatagctcccccaatcctggaaagagcgtgtgcttatttttgaaagtgctccttgtctctcccccagccctgcctgaggctcacagtacaagtcagtcaaa

SEQ ID NO: 398805 - DNA, 120 bp, Artificial Sequence
  ENSG00000146122_54 (sequence is synthesized)
ttgttcagggcagcagtggtgtctggagacctggtttgagttcctaggttcatacctagcgtccttctgagcctcaagtttcttcgtctgtaaaaagagaagatgaaagtttgagataaa

SEQ ID NO: 398806 - DNA, 120 bp, Artificial Sequence
  ENSG00000146122_55 (sequence is synthesized)
acatctcagggttcatggcatggggtggctcttgctgccttggcatgctcatgcattcacctgatgtttattacatgccagccctgttctaggtgttggaggaacaacagtgaataaaat

SEQ ID NO: 398807 - DNA, 80 bp, Artificial Sequence
  ENSG00000146122_56 (sequence is synthesized)
gcctgacgtcagagcggggcgggcggacgggcgcgaggccgggcctggaggggcggcagccgcggcttcccggggatagc

SEQ ID NO: 398808 - DNA, 120 bp, Artificial Sequence
  ENSG00000146122_57 (sequence is synthesized)
atttaaaatgcaaataagacacaagtcttttgtgaagatgataggatttcactgctttagataaactacgaataaaccaagtggctactgtaggtgggacaaggtgcatggtggtacaca

SEQ ID NO: 398809 - DNA, 120 bp, Artificial Sequence
  ENSG00000146122_58 (sequence is synthesized)
tgaagattctttgcagcagaaactgggggaaaaggaaagtaatgtggtctgcatgcctgctcctggaaggtaacaggtgaagagtactgggacctggaaggcttgcataaaaacacatgc

SEQ ID NO: 398810 - DNA, 120 bp, Artificial Sequence
  ENSG00000146122_59 (sequence is synthesized)
taagagttatgagtttggctgggaaatggacttgtcttccttattagtcagtgggttcctggaagccggaatattggcctgcattatttttgtggctctgcatctccaacctcaacacct

SEQ ID NO: 398811 - DNA, 120 bp, Artificial Sequence
  ENSG00000146122_60 (sequence is synthesized)
ggctcatgataggggctcagtcaagaattactgaattgagtgcaattgctgagattgagattttaggtgctatacttgggccagtacctaatgtgggacactgggaccatccctgggagc

SEQ ID NO: 398812 - DNA, 120 bp, Artificial Sequence
  ENSG00000146122_61 (sequence is synthesized)
ttcagccatgctattctcttttctttccctgacctgcccagagaagtatcagtgagatgaacagtaaatatgaagtgtcttagcacagtgcctggcacagagtaagtccatagagacatg

SEQ ID NO: 398813 - DNA, 120 bp, Artificial Sequence
  ENSG00000146122_62 (sequence is synthesized)
aactgatgttacaaaccccatggtttattgccaaaaactgggtcctgactctgcagaagacggaaaagggataaaagcagtgtccataccataaatgagctaggcagggaatacatatga

SEQ ID NO: 398814 - DNA, 120 bp, Artificial Sequence
  ENSG00000146122_63 (sequence is synthesized)
gctgtaaacagctggagcacgatgataaagcagcactgaagcactgctcaaccatgtagaccaagccccaaaggctgagtggagaggaagtgaggcagcactgccactgaggtgagaggc

SEQ ID NO: 398815 - DNA, 120 bp, Artificial Sequence
  ENSG00000146122_64 (sequence is synthesized)
aagggaattttccaggcagaggtgaggtttggggcagcccagagtaaattggacagacctgattgggtggagagagcagatggggcattctaggtagtggaggcgacaggagtaaagatg

SEQ ID NO: 398816 - DNA, 120 bp, Artificial Sequence
  ENSG00000146122_65 (sequence is synthesized)
caaaggccacacctgttgggaactcagccctctcctcctgctctgtcctgcatttccacctagaccctgctgaacgagctagaccgaagtctgggccggtaccgggatgaagtgaatctg

SEQ ID NO: 398817 - DNA, 120 bp, Artificial Sequence
  ENSG00000146122_66 (sequence is synthesized)
ggggcagtgagcaaattcaagggcacttgcttttctctgcctcagtaaacacaactttctggagcttccagatcgagttcatttgtgactcctcctctatttagaaaggtgaactcatcc

SEQ ID NO: 398818 - DNA, 120 bp, Artificial Sequence
  ENSG00000146122_67 (sequence is synthesized)
caggatggaggaatgtcctccaccctctctgcaggttttcagcagaggaaaaggaagaacaggcagcaaagcctggggtgggagaactcaggggtttggtctgccctaactggggagtgg

SEQ ID NO: 398819 - DNA, 120 bp, Artificial Sequence
  ENSG00000146122_68 (sequence is synthesized)
tggtcgcactaggcagatgggaggagctgcctgatctccgcttcgtttggcttctccgtgagtgcatgtctgctagaagcagctcctgtctagtgccacttatgggtgcctgtctacaac

SEQ ID NO: 398820 - DNA, 120 bp, Artificial Sequence
  ENSG00000146122_69 (sequence is synthesized)
catgggtctcactgggatgaagtggacagtgtagatgctgagggatccctgtgtctgtcatgctatttctgggtccccaaatgtcttggctaatgttgtgcatgtttaattctctgttgg

SEQ ID NO: 398821 - DNA, 120 bp, Artificial Sequence
  ENSG00000146122_70 (sequence is synthesized)
ctgtggctgctgcctaggagctgataactaatccttctcagcaggtgagttactctcggggctctgaccactccaacttttaactgctgtcccgggctgctgctctgtactgggcctgac

SEQ ID NO: 398822 - DNA, 120 bp, Artificial Sequence
  ENSG00000146122_71 (sequence is synthesized)
agagaggacttgtccattccactttctaccttattccccattcatacagggtggtatgggagagggcccccaaagagaaagaagaaatgtagcagagggaggtaatcaaatagacccctg

SEQ ID NO: 398823 - DNA, 120 bp, Artificial Sequence
  ENSG00000146122_72 (sequence is synthesized)
gcagcagtggaggtcaatgtctcctggaatgaggagaaggcttctaggtctactgtcttacccaccaggccaaaggagagcctttcctgtaaggacacacagggtaggcacgacacaatt

SEQ ID NO: 398824 - DNA, 120 bp, Artificial Sequence
  ENSG00000146122_73 (sequence is synthesized)
cacaaagataaccatgcaaggcggcccctgaagttgtgcaagagggacctcccagaggaagaacagcacactagacagcctcctgtctacctcgccaggggcccaagagaaggagtgggg

SEQ ID NO: 398825 - DNA, 120 bp, Artificial Sequence
  ENSG00000146122_74 (sequence is synthesized)
cgggatcaatgatttctccagaatctgcctgctgggactcagaggagagagttctgcttcagtttccatacctctgaacttgtggatgctctctaccctgggcatcttgggctgtgcctg

SEQ ID NO: 398826 - DNA, 120 bp, Artificial Sequence
  ENSG00000146122_75 (sequence is synthesized)
aagtccctaggagtcagcaactgttccctaggggggtttgcaaccaggttctcagcataagcctgaggagggcctctgggttgggcagtgggaatgggagttgattctgttggagtcatg

SEQ ID NO: 398827 - DNA, 120 bp, Artificial Sequence
  ENSG00000146122_76 (sequence is synthesized)
ggaggttatgtcacattgcccaaagccacagagatcagtcataccctgacccactggcacagccccttccctcattgcccagagtggataatttctaaaaaaaatctctaaaaaaataaa

SEQ ID NO: 398828 - DNA, 120 bp, Artificial Sequence
  ENSG00000146122_77 (sequence is synthesized)
aaaaataggaaggggggcttctcggtgtccttccccaacccattggagcctatggaaaagtcccagataccgtctcttaaagttagctattatccaccctcctctctctcctgtcttttt

SEQ ID NO: 398829 - DNA, 120 bp, Artificial Sequence
  ENSG00000146122_78 (sequence is synthesized)
cttcccccttcccctcacaccaggagcattcctggattggtaggaggtggctcttgcggggcgggtaagaggaggattagggaacccacacctcaactgtccacttgacttgttggttgc

SEQ ID NO: 398830 - DNA, 120 bp, Artificial Sequence
  ENSG00000146122_79 (sequence is synthesized)
agaaggtggttgagttggatgcctgggggacaaagggggtggaggaacggagtggtggcagtctcgggcctctccctctctgctgtcccctgggaggggcaggcattgatctggaactgt

SEQ ID NO: 398831 - DNA, 120 bp, Artificial Sequence
  ENSG00000146122_80 (sequence is synthesized)
ctctcgggaacctgccttgagcagcagtttggggctctgcaggcaggaaactgcccagtcacgaggcccttgcccagcctggtcagcgtctggcagctgagttgctctaagcccacggag

SEQ ID NO: 398832 - DNA, 120 bp, Artificial Sequence
  ENSG00000146122_81 (sequence is synthesized)
ggcctcgcttggctcaggccatggagcagcatgatctcagcccctaagcatttcccgcggctgcagaacaaacagggcagtatctgcgctaacagcacagcttctgtacgggggggcctc

SEQ ID NO: 398833 - DNA, 120 bp, Artificial Sequence
  ENSG00000146122_82 (sequence is synthesized)
ctgcctgagcagggtcagagggcaccacctcccatactattcttagtgctgccccagccgcctctgagacatcctcctccctttcttctcacaagcccccaggcctcagtttcccccact

SEQ ID NO: 398834 - DNA, 120 bp, Artificial Sequence
  ENSG00000146122_83 (sequence is synthesized)
tgatggtggaaagagttctgaatccccagggttcctaatgggggtgcatgtggaggggatagggaagggctatgggggtgtgtggcttctccctctcccagacagcaagactgattggga

SEQ ID NO: 398835 - DNA, 120 bp, Artificial Sequence
  ENSG00000146122_84 (sequence is synthesized)
cagctgtgtgggagctgaggcgctgtcagaagactgagagcgattctgtgttctgagaatgaaggcagcaggaaattgccctcttagtggcttgccgataatcctgtcctcccgtggaga

SEQ ID NO: 398836 - DNA, 120 bp, Artificial Sequence
  ENSG00000146122_85 (sequence is synthesized)
tgctgtgcattttttaagcatgaggaggaggagaaggatcaggaaccctttgccctgtccctttggtctacattgaagacatctcttttactcccaaatgcccctatcagctctgatgga

SEQ ID NO: 398837 - DNA, 120 bp, Artificial Sequence
  ENSG00000146122_86 (sequence is synthesized)
ttatcaagagaacagagaccctcacgtctctattttgacactaaaatgctcattatcaagtttgtggactgaatcatactagtctaatctaagaaggctttgtagaggaggtgagggggg

SEQ ID NO: 398838 - DNA, 120 bp, Artificial Sequence
  ENSG00000146122_87 (sequence is synthesized)
aatactattaaatatattcccaagtcctgttagggaatgagggaaggcggaggtggtaccttttggagaagaaggtttgagggctgtcctggattgaggtggggttttgccttaggttga

SEQ ID NO: 398839 - DNA, 120 bp, Artificial Sequence
  ENSG00000146122_88 (sequence is synthesized)
ggaccacccgccccttgtttacagatctccactctgggtcctttctttggtggggggtaagggcagtcatgtggatgtacaaagtgggtttgctgtgccaggcagctcacggtcagaaca

SEQ ID NO: 398840 - DNA, 120 bp, Artificial Sequence
  ENSG00000146122_89 (sequence is synthesized)
cctaccctgggagagatgcttgacattgggcaatgctgacgttgacaaagtcatctacaaatggaatttgtgtttgcccagggttaatggagtcacagccaagacaaacactgagtagaa

SEQ ID NO: 398841 - DNA, 120 bp, Artificial Sequence
  ENSG00000146122_90 (sequence is synthesized)
ttcaaggacagggtccagttgaaggaaaggatggaaaaataagcaaagagcttgggccagcatctaggttttggtaaagatcaggacaatgtatacaaaggactaaagagtttgatggca

SEQ ID NO: 398842 - DNA, 120 bp, Artificial Sequence
  ENSG00000146122_91 (sequence is synthesized)
agacatagctattttggcatcttcctgggggaagctgcacacactggcctcatgtctggaccagcagtgagagatcctcatgagtattatccactaataatcaccaatcccagaaccaca

SEQ ID NO: 398843 - DNA, 120 bp, Artificial Sequence
  ENSG00000146122_92 (sequence is synthesized)
agcaggacctgctgcatcccaggactggggcttgctgggagacagacaaagaagcagagtctggactctctcgtgcctgctcccaggcatggagggtgggcatcatggaccatacctgga

SEQ ID NO: 398844 - DNA, 120 bp, Artificial Sequence
  ENSG00000146122_93 (sequence is synthesized)
gcagctttgctataagaaatcagtttggggggcagggatgtcctcttttggatctttagtctccactctgtcccaggctagggctcacacatctgtccatgttctcctcagcatatcctc

SEQ ID NO: 398845 - DNA, 120 bp, Artificial Sequence
  ENSG00000146122_94 (sequence is synthesized)
cctctcttcttgctcattaaaagatgctgttagcctcctgctatggccctccctagaaaggggtatgctgagctccagtggggcttaattggacttgatctcctcccttctgctttccca

SEQ ID NO: 398846 - DNA, 120 bp, Artificial Sequence
  ENSG00000146122_95 (sequence is synthesized)
gcggctgtgcattcttctctctgctgtctccatctccgtgtttcttcagcttgcctctgtctctacgtctctctcttgccccctttctattttagtctgtttcttttgctcctgaatttt

SEQ ID NO: 398847 - DNA, 120 bp, Artificial Sequence
  ENSG00000146122_96 (sequence is synthesized)
cccctccaccctcccagttttcagacttgagtcccaagtctaaaacttgttattctgccctcctacattgctttggtgtttggggaccagagcctggctattcccacgcctgaggcttag

SEQ ID NO: 398848 - DNA, 120 bp, Artificial Sequence
  ENSG00000146122_97 (sequence is synthesized)
gctccctccctcctgggaggagacaggaaggtctgggcggagtctgagccatgtatcctttgtgctcctgtgccccctcatagctcttctcttactcttcctgctgaagactttatccca

SEQ ID NO: 398849 - DNA, 120 bp, Artificial Sequence
  ENSG00000146122_98 (sequence is synthesized)
ttccgaggtctccacactgagccagactgaccttgtaacattggaggattcaaatatacaccatttcagagttgcaggaacctggaaaaccacacagtgtcgatgcagtctcattcttta

SEQ ID NO: 398850 - DNA, 120 bp, Artificial Sequence
  ENSG00000146122_99 (sequence is synthesized)
ttctacaaatgaggccaagaaggcctagagaggcaaaactcacccacagcccacccagtccgttatggcaactggctgcccattgctagaacctgagactgctggggaaaatagtgctag

SEQ ID NO: 398851 - DNA, 120 bp, Artificial Sequence
  ENSG00000146122_100 (sequence is synthesized)
aggctgaggacctgtgacaagaggcatgggctgcacacgctatgagccattgtctagtatactcaatgcatgcttattaagcacctgcagaatataacactctgtgtttatgcatctcat

SEQ ID NO: 398852 - DNA, 120 bp, Artificial Sequence
  ENSG00000146122_101 (sequence is synthesized)
tgtgagaaaagcaggtctttaaaaagctcaaatcatggaaagaaggaaggaaggaaagaaatttcaggcgtaattaatcatatctcatgattctccattttccaaattgatttactatgg

SEQ ID NO: 398853 - DNA, 120 bp, Artificial Sequence
  ENSG00000146122_102 (sequence is synthesized)
tcatgattctccattttccaaattgatttactatggagttcccttaagttggtctcttctacagctgctaaaacaaacaaacaaacaaacaaaaaaatggccaggcatggtggctcatgc

SEQ ID NO: 398854 - DNA, 120 bp, Artificial Sequence
  ENSG00000146143_0 (sequence is synthesized)
atatgaactctcccgccacccgggaacagtggctgccaccgtttgtgttttcccgagtttgaattcttgcaggtgaccaagatggagttttctggaagaaagtggaggaagctgaggttg

SEQ ID NO: 398855 - DNA, 120 bp, Artificial Sequence
  ENSG00000146143_1 (sequence is synthesized)
gcaggtgaccagaggaatgcttcctaccctcattgccttcagttttacttgcagccaccttctgaaaacatatctttaatagaatttgaaaacttggctattgatagagttaaattgtta

SEQ ID NO: 398856 - DNA, 120 bp, Artificial Sequence
  ENSG00000146143_2 (sequence is synthesized)
aaatcagttgaaaatcttggagtgagctatgtgaaaggaactgaacaataccagagtaagttggagagtgagcttcggaagctcaagttttcctacagagaaaacttagaagatgaatat

SEQ ID NO: 398857 - DNA, 120 bp, Artificial Sequence
  ENSG00000146143_3 (sequence is synthesized)
gaaccacgaagaagagatcatatttctcattttattttgcggcttgcttattgccagtctgaagaacttagacgctggttcattcaacaagaaatggatctccttcgatttagatttagt

SEQ ID NO: 398858 - DNA, 120 bp, Artificial Sequence
  ENSG00000146143_4 (sequence is synthesized)
attttacccaaggataaaattcaggatttcttaaaggatagccaattgcagtttgaggctataagtgatgaagagaagactcttcgagaacaggagattgttgcctcatcaccaagttta

SEQ ID NO: 398859 - DNA, 120 bp, Artificial Sequence
  ENSG00000146143_5 (sequence is synthesized)
agtggacttaagttggggttcgagtccatttataagatcccttttgctgatgctctggatttgtttcgaggaaggaaagtctatttggaagatggctttgcttacgtaccacttaaggac

SEQ ID NO: 398860 - DNA, 120 bp, Artificial Sequence
  ENSG00000146143_6 (sequence is synthesized)
attgtggcaatcatcctgaatgaatttagagccaaactgtccaaggctttggcattaacagccaggtccttgcctgctgtgcagtctgatgaaagacttcagcctctgctcaatcacctc

SEQ ID NO: 398861 - DNA, 120 bp, Artificial Sequence
  ENSG00000146143_7 (sequence is synthesized)
agtcattcctacactggccaagattacagtacccagggaaatgttgggaagatttctttagatcagattgatttgctttctaccaaatccttcccaccttgcatgcgtcagttacataaa

SEQ ID NO: 398862 - DNA, 120 bp, Artificial Sequence
  ENSG00000146143_8 (sequence is synthesized)
gccttgcgggaaaatcaccatcttcgtcatggaggccgaatgcagtatggcctatttctgaagggcattggtttaactttggaacaggcattgcagttctggaagcaagaatttatcaaa

SEQ ID NO: 398863 - DNA, 120 bp, Artificial Sequence
  ENSG00000146143_9 (sequence is synthesized)
tgataaaggttactcttacaacatccgtcacagctttggaaaggaaggcaagaggacagactatacacctttcagttgcctgaagattattctgtccaatccaccaagccaaggggatta

SEQ ID NO: 398864 - DNA, 120 bp, Artificial Sequence
  ENSG00000146143_10 (sequence is synthesized)
tcatgggtgcccattccgtcacagtgatccagagctgctgaagcaaaagttgcagtcatacaagatctctcctggagggataagccagattttggatttagtaaaggggacacattacca

SEQ ID NO: 398865 - DNA, 120 bp, Artificial Sequence
  ENSG00000146143_11 (sequence is synthesized)
ggtagcctgtcaaaaatactttgagatgatacacaatgtggatgattgtggcttttctttgaatcatcctaatcagttcttttgtgagagccaacgtattctaaatggtggtaaagacat

SEQ ID NO: 398866 - DNA, 120 bp, Artificial Sequence
  ENSG00000146143_12 (sequence is synthesized)
aaagaaggaacctatccaaccagaaactcctcaacccaaaccaagtgtccagaaaaccaaggatgcatcatctgctctggcctctttaaattcctctctggaaatggatatggaaggact

SEQ ID NO: 398867 - DNA, 120 bp, Artificial Sequence
  ENSG00000146143_13 (sequence is synthesized)
agaagattactttagtgaagattcttaggcagttttataaccctttttcctcaatagcctgtttcctgtttttaagattttgcctttgttgttgaaaaagggtttcactctgtcaccaag

SEQ ID NO: 398868 - DNA, 89 bp, Artificial Sequence
  ENSG00000146143_14 (sequence is synthesized)
tgcctttgttgttgaaaaagggtttcactctgtcaccaaggcttagtgcagtgacacaattacagctgattgcagccttgaccttccca

SEQ ID NO: 398869 - DNA, 120 bp, Artificial Sequence
  ENSG00000146143_15 (sequence is synthesized)
tttttttcaatttttttttgtagaggtggggggtctccctatgttgcccaggcagatctcagactcctgggctcaagcgatcctcacacctcagcgtcccagagtgctgggattacggtt

SEQ ID NO: 398870 - DNA, 120 bp, Artificial Sequence
  ENSG00000146143_16 (sequence is synthesized)
ctgtgcctggccttttttttttttttaacctttttgtttaacttctctcttcactgcatcccaatccatctacaggcatgcacacttattaggaaaggaggtttgaggtaacaacagaga

SEQ ID NO: 398871 - DNA, 120 bp, Artificial Sequence
  ENSG00000146143_17 (sequence is synthesized)
aacagagactttcactatattttgctttgacagaaggaaagaggaggagtttctattaaaatctgtcacttgagtgatgtcatttaagtcctattttaggagataaaaacagctttgggg

SEQ ID NO: 398872 - DNA, 120 bp, Artificial Sequence
  ENSG00000146143_18 (sequence is synthesized)
actggttaaagtcccccagaaactacaataaagaacaacttttgttttaactcttaatcactttgtaattttgactcaatccttttctggaccatttttgttaataaatatcaaagtgta

SEQ ID NO: 398873 - DNA, 120 bp, Artificial Sequence
  ENSG00000146143_19 (sequence is synthesized)
caaggaagaggaaaatgatgaatagtagaagctccgcctgtgaagataattttacctgcagctgaaataccatgacccagatattgaacacacagaataattaaacttttcgtctagaaa

SEQ ID NO: 398874 - DNA, 120 bp, Artificial Sequence
  ENSG00000146143_20 (sequence is synthesized)
ctatttggaagatggctttgcttacgtaccacttaaggacattgtggcaatcatcctgaatgaatttagagccaaactgtccaaggctttggcagctggagtgcagtggcgtgatctcgg

SEQ ID NO: 398875 - DNA, 120 bp, Artificial Sequence
  ENSG00000146143_21 (sequence is synthesized)
tacctcagccttctgagttgctgggactacagatgcacaccaccacacccagggctgctgtggtatcctgggggcccactccagtccctagtcaccttggattttccagtacctggaggt

SEQ ID NO: 398876 - DNA, 120 bp, Artificial Sequence
  ENSG00000146143_22 (sequence is synthesized)
atcaacagtgaagactgtgaaacagcaaagatggtagtctgctccttcctctgggagctctgtgccagcaagttaacagccaggtccttgcctgctgtgcagtctgatgaaagacttcag

SEQ ID NO: 398877 - DNA, 120 bp, Artificial Sequence
  ENSG00000146143_23 (sequence is synthesized)
catgaagagatgcatgctctttttgtaagcgctaattgttttaaaagttgaaaagaaaacctttggaaaactcaaaaatcttccttgaaataattttactcagagcattggcctctccct

SEQ ID NO: 398878 - DNA, 120 bp, Artificial Sequence
  ENSG00000146143_24 (sequence is synthesized)
aaaaaaaaatcactttttatagtttccacttcatacagattgtgcttgtcttttatttctgtacacatggtagcatagttattatctgtaaactttgtgaattcttccctgttgtttttg

SEQ ID NO: 398879 - DNA, 120 bp, Artificial Sequence
  ENSG00000146143_25 (sequence is synthesized)
ttcgtgaagtatagtttttttctataccttgttataaaatacaacgtgcttgacattgtatttggaaatttatttgtaggaatactttgaggtgtaatgtgaaggttcctccagagagga

SEQ ID NO: 398880 - DNA, 120 bp, Artificial Sequence
  ENSG00000146143_26 (sequence is synthesized)
tttgagtttgcttttgcgaggtgcctgggcatttgaatcaggtaccgccttaaaacaagttcaaggcttgggattccctgatatcctacatcatttgagcaggaaggtctctcgtcagat

SEQ ID NO: 398881 - DNA, 120 bp, Artificial Sequence
  ENSG00000146143_27 (sequence is synthesized)
atcccactttgtgtgggcctgactttgtatattaactttctgtgctgtaaagatgttttaaaaattttatcagtgttttgttttgttttgttttctctaggaggttgacccaaataatat

SEQ ID NO: 398882 - DNA, 120 bp, Artificial Sequence
  ENSG00000146143_28 (sequence is synthesized)
agcctgttttactgaaacagcaagttctactgcagtttgtttaactagatacatgttggacatttagtttttttctttattattataaataacactgtaataaagaaacgtttttatttg

SEQ ID NO: 398883 - DNA, 120 bp, Artificial Sequence
  ENSG00000146143_29 (sequence is synthesized)
gatttactgaacatggctgctgaaatgtataacattattgtgcattattgctaccgtgatatgcggatttatattgcaattgcctctggattcagaaaaacacccttcacagtgaggtga

SEQ ID NO: 398884 - DNA, 120 bp, Artificial Sequence
  ENSG00000146143_30 (sequence is synthesized)
atttcttaaaggatagccaattgcagtttgaggctgtaagtatatttttgtagttatttctaattgttctcaccattcatttttcccttctgtcttaagtgctggtactaatgtgtagtg

SEQ ID NO: 398885 - DNA, 120 bp, Artificial Sequence
  ENSG00000146143_31 (sequence is synthesized)
tgttctctttacattctccaagtacctgcctgaaacagtagctaatagctttggataacaatatatctttccttctctatgactagaagaaaaggactccttaataacaaagtctcacac

SEQ ID NO: 398886 - DNA, 120 bp, Artificial Sequence
  ENSG00000146143_32 (sequence is synthesized)
ttacttgctctgttaaatgtgtgctttattaaagcacaagaaggtttagtttataaaggttcatctttaaccaaaattttgtcggccaaaataaagctaataatgtgttaaactagacaa

SEQ ID NO: 398887 - DNA, 65 bp, Artificial Sequence
  ENSG00000146143_33 (sequence is synthesized)
ggacattgtggcaatcatcctgaatgaatttagagccaaactgtccaaggctttggcaatatgga

SEQ ID NO: 398888 - DNA, 120 bp, Artificial Sequence
  ENSG00000146143_34 (sequence is synthesized)
ggcatgcctgggccctctactctgttctgaataaaaagtctctggggatggaccctaggtgattcataggcacactgaaatctgagaaccaggtacaggaaataaaattatttgaaatgc

SEQ ID NO: 398889 - DNA, 120 bp, Artificial Sequence
  ENSG00000146143_35 (sequence is synthesized)
ttttattctgtgtttctctaggaaataagttaattcagttttcataatgatattcagattacatatgatgttgtactgttaatcccaaaattcctaggtttttatttgttactatccata

SEQ ID NO: 398890 - DNA, 120 bp, Artificial Sequence
  ENSG00000146143_36 (sequence is synthesized)
gttggtttttaagttttttttcttgatcctactaataccaatgctgagtgattaattttgtgagtaacctctgtgggtttcttcatggtcatgtcttttttccttagaaatagacttcgt

SEQ ID NO: 398891 - DNA, 120 bp, Artificial Sequence
  ENSG00000146143_37 (sequence is synthesized)
ataactcctagatttctgttctgaattagtatttggtatcagtagaagacaatatagaagaaaatcttaagtactaacactgtgatatgctagtgctgcaatgagtagctccatactggg

SEQ ID NO: 398892 - DNA, 120 bp, Artificial Sequence
  ENSG00000146143_38 (sequence is synthesized)
tgaatttggaggtagctgtgttgaacaaatgacatgatcagtgatttttaagtagtttgttggaagtgtgactcttaagtggtgatatcttaaaactatacacatttttatatgtaaaac

SEQ ID NO: 398893 - DNA, 120 bp, Artificial Sequence
  ENSG00000146143_39 (sequence is synthesized)
acatattttacagttgttgtctcttaatctgagtcagtttttaatactttttttgtacctaatgcagaagaagacttcaaaggtttgtgacatggctgttttaaactgtactgattatag

SEQ ID NO: 398894 - DNA, 120 bp, Artificial Sequence
  ENSG00000146143_40 (sequence is synthesized)
tgtaagcatatgccaagctttccttctcagttaaaaattgtagtattttctgatataaataaatttttattgactctctggggttacctaaatatgtataatttagctatgtcagcactt

SEQ ID NO: 398895 - DNA, 120 bp, Artificial Sequence
  ENSG00000146143_41 (sequence is synthesized)
gggaagactaaaatactaactctgtgtttattaaatgaaggaatttatgagaacacctagcataacaggtatttagtaactgttaatattctttctccattcctaatcctgttatttctt

SEQ ID NO: 398896 - DNA, 120 bp, Artificial Sequence
  ENSG00000146143_42 (sequence is synthesized)
tatcctcatgaaagttgatgcttttaaattttttctttacttgtctgtcactaccctagattatattctagttacagctaagaatagtgtctttcaccactgtggaagacactgatactt

SEQ ID NO: 398897 - DNA, 120 bp, Artificial Sequence
  ENSG00000146143_43 (sequence is synthesized)
gtctactgtttggccattgctcttttattattcttagttttattcacccatattctctctgttgacattttagaccacacttctttgtgtgaaatagacaaatattttccagcatattgg

SEQ ID NO: 398898 - DNA, 120 bp, Artificial Sequence
  ENSG00000146143_44 (sequence is synthesized)
atagttttagctgtcatctattaaatgctggtggtggaccccagtctccatgacaaccaaaaatatcaccgtgcatttcagaaaacttctggcatgttaatgctactattaatctgatca

SEQ ID NO: 398899 - DNA, 120 bp, Artificial Sequence
  ENSG00000146143_45 (sequence is synthesized)
tagtcatttccttcttaccaaatttttaatttatgcctgtgacaatgtcattgtggctaaaaagtatgagttctttgggggctcctgaaaaaagtttttcttgctaaaaaaaaaaaaaaa

SEQ ID NO: 398900 - DNA, 120 bp, Artificial Sequence
  ENSG00000146147_0 (sequence is synthesized)
acaacttggaatgtcctgcaatatctaacatgtaagcacgtcgaatcattttctagacagaatctgaacctctgtgtctctcagtctttctctctttctcattctctttcaatatggaac

SEQ ID NO: 398901 - DNA, 120 bp, Artificial Sequence
  ENSG00000146147_1 (sequence is synthesized)
ttgaaaagcgtgaaaaaagaagcttattaaacaagaatttagaggagaaactgacggtctctgctggtggttctgaagccaaacctctgatcttcacatttgtccccactgtcagaagac

SEQ ID NO: 398902 - DNA, 120 bp, Artificial Sequence
  ENSG00000146147_2 (sequence is synthesized)
taccaacccatactcagttggctgacacctctaaattccttgttaaaattccagaagaatcaagtgataagagtccagaaactgtaaataggtctaaatccaatgactacttgaccttga

SEQ ID NO: 398903 - DNA, 120 bp, Artificial Sequence
  ENSG00000146147_3 (sequence is synthesized)
atgctgggagccaacaagagagagaccaagcgaaattgacttgtccttcagaggtcagtggaacgattttacaagaaagggaattcgaagcaaacaaacttcaagggatgcagcaaagtg

SEQ ID NO: 398904 - DNA, 120 bp, Artificial Sequence
  ENSG00000146147_4 (sequence is synthesized)
acctcttcaaagctgaatatgtccttattgtggactccgaaggggaagatgaggctgcaagcagaaaagttgaacaaggccccccaggggggattggcaccgcagctgtccggcccaagt

SEQ ID NO: 398905 - DNA, 120 bp, Artificial Sequence
  ENSG00000146147_5 (sequence is synthesized)
ctctagctatctcgtccagtctggtctctgatgtagtgcgtcccaaaacacaggggactgatctcaagacctcatcacatcctgaaatgcttcatgggatggcccctcagcaaaagcatg

SEQ ID NO: 398906 - DNA, 120 bp, Artificial Sequence
  ENSG00000146147_6 (sequence is synthesized)
ggcagcaatacaagaccaagtcaagctacaaggcttttgcagcaatccctacaaacacattgcttttggaacagaaggcactagatgaaccagccaagactgaaagtgtctccaaggaca

SEQ ID NO: 398907 - DNA, 120 bp, Artificial Sequence
  ENSG00000146147_7 (sequence is synthesized)
cagtggagctctattttcctgcacagctcaggcagcaaactgaagagctctgtgctaccattgataaggtcttacaggattccttgtctatgcattcttctgattctccttcaaggtccc

SEQ ID NO: 398908 - DNA, 120 bp, Artificial Sequence
  ENSG00000146147_8 (sequence is synthesized)
caaagacattgttgggttctgacacagtcaaaactcctacaactcttccaagagcagctggtcgagaaaccaaatatgcaaatctctcctcaccatcttctacagtatctgagagtcagc

SEQ ID NO: 398909 - DNA, 120 bp, Artificial Sequence
  ENSG00000146147_9 (sequence is synthesized)
tgactaagcctggagtaattcgcccagtacctgtaaaatccagaatattactgaaaaaagaggaggaagtctatgaacccaaccctttcagtaaatacttggaagataacagcgacctct

SEQ ID NO: 398910 - DNA, 120 bp, Artificial Sequence
  ENSG00000146147_10 (sequence is synthesized)
tttctgaacaggatgtaacagtccctcccaagcctgtctcgctccatcctttatatcagactaaactctatcctcctgctaagtcactgctgcatccacagaccctctcacatgctgact

SEQ ID NO: 398911 - DNA, 120 bp, Artificial Sequence
  ENSG00000146147_11 (sequence is synthesized)
gtcttgccccaggacccttcagtcatctgtccttctccttgagtgatgaacaggagaattctcacaccctcctcagtcacaacgcatgcaacaagctgagtcatccaatggtggctattc

SEQ ID NO: 398912 - DNA, 120 bp, Artificial Sequence
  ENSG00000146147_12 (sequence is synthesized)
ctgaacatgaagctcttgattccaaagagcaatgaagttggagcagaggctgaaaacacaggctgctgaagttttttggaatgctggtgctaaccacttgctagatttaacttttttttt

SEQ ID NO: 398913 - DNA, 120 bp, Artificial Sequence
  ENSG00000146147_13 (sequence is synthesized)
tttttccagaatgagtgctccctttatgagctgcagtgcagcagaaccaaaaaaaaagtttgctgcaattatatagcatcacagtgctctgctaacagccagcatagaagagatttacct

SEQ ID NO: 398914 - DNA, 120 bp, Artificial Sequence
  ENSG00000146147_14 (sequence is synthesized)
acagctttttgcaccactgttctagcctttaatgccttctacttaatattaagctgaccgcaatactaacgtgcccctatatttggcagccaaataaagaagaatcgtgggtaaatagaa

SEQ ID NO: 398915 - DNA, 120 bp, Artificial Sequence
  ENSG00000146147_15 (sequence is synthesized)
agtcattggtttgctcgctcccttatgtgatgaatcaatgctttcagaacaggggcttctgagtgactgcgggaacaattacttccaaatgacctcgtgcatcttatcagggagcattca

SEQ ID NO: 398916 - DNA, 120 bp, Artificial Sequence
  ENSG00000146147_16 (sequence is synthesized)
taaaccacctgctttctcctttgtttctccaactaatccgaacacaccacccgacccagttaacctcgagggagcctctgtcctagaggagttccacactaggaggctggatgtcggtgg

SEQ ID NO: 398917 - DNA, 120 bp, Artificial Sequence
  ENSG00000146147_17 (sequence is synthesized)
ggccgtggtggaagaatcagctacgtattttcaaactaccgctcactctacacccttttctgcatcgaagggcacctcctcgacgttactgtttccccattccactcaactatcaggttc

SEQ ID NO: 398918 - DNA, 120 bp, Artificial Sequence
  ENSG00000146147_18 (sequence is synthesized)
taatttacccagttcaactgcagcagatccaaagcctggactgacctctgaagttctcaagaagacaactttaacctcgcatgtccttagtcacggagaaagtccgagaacctcttcttc

SEQ ID NO: 398919 - DNA, 120 bp, Artificial Sequence
  ENSG00000146147_19 (sequence is synthesized)
tccaccgtcctccagtgcttctctgaagtcgaattcggcctcgtacataccagtccgcattgtcacgcattcactctctccgagccccaaaccatttacctcctctttccacggctcttc

SEQ ID NO: 398920 - DNA, 120 bp, Artificial Sequence
  ENSG00000146147_20 (sequence is synthesized)
ttccaccatctgcagccaaatgtcatctagtggaaatctttcaaagtcaggggtaaaatccccggtgccttcccggcttgcccttctcactgccattctcaagtcaaacccttcccacca

SEQ ID NO: 398921 - DNA, 120 bp, Artificial Sequence
  ENSG00000146147_21 (sequence is synthesized)
aagacccttttcccctgcatcctgtcccaccttctctctcaactccccggcctcttccacgctcacacttgaccaaaaagaaaagcagaccccacccacgcctaaaaaatctctctcaag

SEQ ID NO: 398922 - DNA, 120 bp, Artificial Sequence
  ENSG00000146147_22 (sequence is synthesized)
ttgttccctgagagccgggtcaccagatcaaggggaactccaggtttctgaattgacccagcaatcttttcacctgcctgttttcaccaagtctactccgctttctcaggcgccctccct

SEQ ID NO: 398923 - DNA, 120 bp, Artificial Sequence
  ENSG00000146147_23 (sequence is synthesized)
gtacatccagttctgtgggtcttcctcctgttccaccaagctcttctctttcctctttgaagagtaaacaggatggtgacctcaggggtccagaaaaccccagaaacattcacacgtacc

SEQ ID NO: 398924 - DNA, 120 bp, Artificial Sequence
  ENSG00000146147_24 (sequence is synthesized)
cttctacattagcctcctctgcattatcttctctatctcctcctattaatcaaagagctacgttctcttcttcagagaaatgtttccatccttccccagctctttcaagcctgataaaca

SEQ ID NO: 398925 - DNA, 120 bp, Artificial Sequence
  ENSG00000146147_25 (sequence is synthesized)
gatctaaaagagcatcatcccaactatctggccaggagctgaatccttcagctcttccttcactccctgtctccagtgctgactttgcctctcttcccaacttgaggtcctcctctctcc

SEQ ID NO: 398926 - DNA, 120 bp, Artificial Sequence
  ENSG00000146147_26 (sequence is synthesized)
ctcatgccaatctgcccaccctggtgccccagctcagtccctcagctctgcacccacattgcggcagtggtaccttgccttcaagacttgggaaatctgaaagcaccacccccaaccaca

SEQ ID NO: 398927 - DNA, 120 bp, Artificial Sequence
  ENSG00000146147_27 (sequence is synthesized)
attgaggaaccctatccttgtggctagttactgtagcctttgactttcctacttcctgaaaaagagaaaaagacgatgatagaattcaatggcaagaacatgggctcttgtgatttttga

SEQ ID NO: 398928 - DNA, 120 bp, Artificial Sequence
  ENSG00000146147_28 (sequence is synthesized)
aaaaatcagtccttactgaacttcaattttatcctacaaaaatggggctactaatcaccatttctaatggaacccatactaataagtatttgtgatttttttaaaagtataatttcttta

SEQ ID NO: 398929 - DNA, 120 bp, Artificial Sequence
  ENSG00000146147_29 (sequence is synthesized)
aattttttccaagtgctttcatctttattgcagtataattgacaaaaattatacctatttaaggtgtaaaatgtgatgatttgatgtatgtgtacattgtataatgattaccacagttaa

SEQ ID NO: 398930 - DNA, 120 bp, Artificial Sequence
  ENSG00000146147_30 (sequence is synthesized)
attaatcaatgtaactattaatgtactagttactctgtgtgtgtatatgggagaagagatgaggacacataaaatctattctcagcaaatttcaagtaaaaagtaaaatattattaactg

SEQ ID NO: 398931 - DNA, 120 bp, Artificial Sequence
  ENSG00000146147_31 (sequence is synthesized)
tagtcaccatgctatacattagctctccagaacttattcctttgataactgaatgtttctaccctttaaacaccatttttccttttcacttaaatcccttattaagacaataatagattc

SEQ ID NO: 398932 - DNA, 120 bp, Artificial Sequence
  ENSG00000146147_32 (sequence is synthesized)
aaaacaacaaaacatccatttcaaccaaaagtccattccaacccctggcaaccatcattctactctttgcttctgtaattctgactattttagattccactaaagtgagatcacgcaata

SEQ ID NO: 398933 - DNA, 120 bp, Artificial Sequence
  ENSG00000146147_33 (sequence is synthesized)
tttgtccttttgtgactggctcatttcacttggcataatatatttggaattcattcatgttattggaaatggcaggatttctttcttttttaaggctgaataatatttcattgtttaaca

SEQ ID NO: 398934 - DNA, 120 bp, Artificial Sequence
  ENSG00000146147_34 (sequence is synthesized)
cgttttatttattcatttatccatcaacagacacttcggttgttgccatatctaattgttaagaatgatactgcaatggttgaatgaaatactcactatcaaagggctctaaagacttaa

SEQ ID NO: 398935 - DNA, 120 bp, Artificial Sequence
  ENSG00000146147_35 (sequence is synthesized)
atgtttcttgttatcatttcctttagaatcacttcaattttggaagaaagaggttgatttcctgctaaagggtcaactgaatatattgtcttctttctctcttccattatgagcaattgt

SEQ ID NO: 398936 - DNA, 120 bp, Artificial Sequence
  ENSG00000146147_36 (sequence is synthesized)
agaagcctattttctatgttacttttgacttcttcaattttaactgctcctccatcctaaacacctccacatgggaaataaaagaccagaatccaactatatgtatagaaaaacataaaa

SEQ ID NO: 398937 - DNA, 120 bp, Artificial Sequence
  ENSG00000146147_37 (sequence is synthesized)
ctcagcattgtagtcctctgctgctcactgtgattgattatggagtgtttttctttcttttcccttgagtgtacctccatcagatacttccatgctgatccatgccatctgttctgtgaa

SEQ ID NO: 398938 - DNA, 120 bp, Artificial Sequence
  ENSG00000146147_38 (sequence is synthesized)
acttgctgtcagacaaccatacactttaagcactaagttatccaaattctatcttaaaaattatgttgtgattattaaaaatctttttttatatagaggatttcaaatagctaagcatat

SEQ ID NO: 398939 - DNA, 120 bp, Artificial Sequence
  ENSG00000146147_39 (sequence is synthesized)
gctaaatttttcatacttcacaagttcaaattttcttggttcaaatcaggattcaaaatatatgtgttgctttaaatatgtctgtttgaaaaaatgcatatggattctccaaaatttggg

SEQ ID NO: 398940 - DNA, 120 bp, Artificial Sequence
  ENSG00000146147_40 (sequence is synthesized)
tttctaagcaagaagatatgccatataatcgaaaccaatttatattggctttatcttagtgaaatgtagataatcacaatctcttatttcatagtaacatgaggtttttgtgatgctgtc

SEQ ID NO: 398941 - DNA, 120 bp, Artificial Sequence
  ENSG00000146147_41 (sequence is synthesized)
tgtaaagtgttggtgtctttagataaaggggtcgctctttaagaaaatattactactgttcatgattttattagcaaggtgttgatttaaattaaaactgtagcaaaaatgctatggctc

SEQ ID NO: 398942 - DNA, 120 bp, Artificial Sequence
  ENSG00000146147_42 (sequence is synthesized)
tgattttaaactgctgtaagttctagacagcaaaggaaagctgaaaataaatgctgcatttaaaaataaatgttgctttaccaaagaggtgggaagatggaagacaggatggagtgaaag

SEQ ID NO: 398943 - DNA, 120 bp, Artificial Sequence
  ENSG00000146147_43 (sequence is synthesized)
gctccagtaattttacctatggtactctgagttcacaaaggtgtcttgtactcagacagaaaaccgcagcgtgaagaggggacagcatgagtgaagaggaagtgaattttcacccttcac

SEQ ID NO: 398944 - DNA, 120 bp, Artificial Sequence
  ENSG00000146147_44 (sequence is synthesized)
ttccaaaccacaggaaaggaagtgactttaaaatgccaggatggaacaaaagcatttcagatgtgcaggctttaataagaagagctcaaaatgccgtaaaatgccctttgatgttgcaat

SEQ ID NO: 398945 - DNA, 120 bp, Artificial Sequence
  ENSG00000146147_45 (sequence is synthesized)
ggaaacagtttttgaagttaaacagtatgatttgatggttgagtagaaagtaggctttttctagagcaccaaatgcatcagatatggctataacactaattttctgatgtgtctgtcagt

SEQ ID NO: 398946 - DNA, 120 bp, Artificial Sequence
  ENSG00000146147_46 (sequence is synthesized)
taagcagagctaaattaatatattcactgcatatttgtctgctaatttttctttaatgaacaaagatattacttgcttcataagttcctgtcttcttgaagttttgtagaatgatagtat

SEQ ID NO: 398947 - DNA, 120 bp, Artificial Sequence
  ENSG00000146147_47 (sequence is synthesized)
catctcaaaaataattaattcttttcaaaaatcaagctcctcagtaaagcctttttttgaaacattagttctatgtatactgaaattgaaagaggacaattctcaagtgactaaaaagcg

SEQ ID NO: 398948 - DNA, 120 bp, Artificial Sequence
  ENSG00000146147_48 (sequence is synthesized)
gtttaaagcattttatcagaaataactatgttacctatctcattgatagaaacatgtccaagactgttttatgatccctgtacatccctcaaaaactaaaacattaaaagattcatatat

SEQ ID NO: 398949 - DNA, 120 bp, Artificial Sequence
  ENSG00000146147_49 (sequence is synthesized)
tgcatgctaaagcaggatagagtgatgttcattttcaagaatcatttagaatagtgatctctaaagtattaggtaccaacctcaagataattcgctggggtggaagtagggcacaagtta

SEQ ID NO: 398950 - DNA, 120 bp, Artificial Sequence
  ENSG00000146147_50 (sequence is synthesized)
gacgtgatagagatgccattagtgtgttttgaagcaaatctcaaacaggggtcacaaactatggtctgtgggccaaacctggctcaccagtgtttttataaataaagtattattggaaca

SEQ ID NO: 398951 - DNA, 120 bp, Artificial Sequence
  ENSG00000146147_51 (sequence is synthesized)
ttgctcttggttttaatccttttggaatgtcttgagggtcaggagcgttgccattgatggctatgggagttgtcaggctgtggctctctttctcacagagaatgccagaggcactcggga

SEQ ID NO: 398952 - DNA, 120 bp, Artificial Sequence
  ENSG00000146147_52 (sequence is synthesized)
aggcatttgccagggctctgacagatgtaaagtaagccttatccatgttgtgttctcacctggacacctggaaggtgctcagtatagaaaagtcacgagctagatgagataccagcttga

SEQ ID NO: 398953 - DNA, 120 bp, Artificial Sequence
  ENSG00000146151_0 (sequence is synthesized)
cctctcggcgccgccgcagtgcgcagaacagctctggtcctcacagccagtgcaccggaggggcgcgctcccgagctggcgcagtttcccagcgcggtgcccgcccctcatcctcctcca

SEQ ID NO: 398954 - DNA, 120 bp, Artificial Sequence
  ENSG00000146151_1 (sequence is synthesized)
gtctccctcccctcgccgactgccgccccaggctccgccatggggaatgtgccatccgcggtgaagcactgcctcagctaccagcagcttctccgggagcatctctggatcggggattca

SEQ ID NO: 398955 - DNA, 120 bp, Artificial Sequence
  ENSG00000146151_2 (sequence is synthesized)
gtggcaggggcgctcgaccccgcgcaggaaacatcccagttatctggactccctgagtttgttaaaatagtagaagttgggcctagggatggattgcagaatgaaaaggttatagttcct

SEQ ID NO: 398956 - DNA, 120 bp, Artificial Sequence
  ENSG00000146151_3 (sequence is synthesized)
acagatataaaaattgaatttatcaatcgactttcccaaactggcttgtctgtaatagaagtgactagctttgtgtcttccagatgggtaccacagatggctgatcacactgaagtaatg

SEQ ID NO: 398957 - DNA, 120 bp, Artificial Sequence
  ENSG00000146151_4 (sequence is synthesized)
aaaggcattcatcaatatccaggagttcgctatcctgtccttactcctaatcttcagggttttcaccatgctgttgctgctggagctactgagatatcagtttttggagctgcatctgaa

SEQ ID NO: 398958 - DNA, 120 bp, Artificial Sequence
  ENSG00000146151_5 (sequence is synthesized)
tcctttagcaagaagaatattaactgttccattgaagaaagtatgggaaaatttgaggaggttgttaagtctgcaagacacatgaatattccagcacgagggtatgtgtcttgtgctctg

SEQ ID NO: 398959 - DNA, 120 bp, Artificial Sequence
  ENSG00000146151_6 (sequence is synthesized)
ggctgtccatatgaaggaagtattacaccgcaaaaagtgacagaagtgtctaagagattgtacggcatgggttgttatgagatctctctaggagacacaattggagtgggaactccagga

SEQ ID NO: 398960 - DNA, 120 bp, Artificial Sequence
  ENSG00000146151_7 (sequence is synthesized)
agtatgaaaagaatgttggaaagtgtgatgaaagaaatcccaccaggtgctcttgctgttcactgtcatgacacatacggacaagccttagcaaatatccttacggcccttcagatggga

SEQ ID NO: 398961 - DNA, 120 bp, Artificial Sequence
  ENSG00000146151_8 (sequence is synthesized)
attaatgtggtggactccgcagtatccggattaggtggctgcccttatgcaaaaggtgcttctgggaatgtagccactgaggatttgatatatatgcttaatggcctggggctcaataca

SEQ ID NO: 398962 - DNA, 120 bp, Artificial Sequence
  ENSG00000146151_9 (sequence is synthesized)
ggtgtgaatctatacaaagtgatggaagctggtgactttatttgcaaagctgtgaataaaaccacaaactctaaagtagcacaagcctccttcaatgcttgacttgaatggatttatgac

SEQ ID NO: 398963 - DNA, 120 bp, Artificial Sequence
  ENSG00000146151_10 (sequence is synthesized)
agtaatggacaagagtgggaaaaaagagatccttttcaaaaagattataactggatagattaagtcaacaaaatgcaatatcagtcatcaggtaaattgcaagctgaggataaataataa

SEQ ID NO: 398964 - DNA, 120 bp, Artificial Sequence
  ENSG00000146151_11 (sequence is synthesized)
aacttgtcataattttgaacttggaaaaaagtttcttttgctctcatagaaataactttttaatttagtagatgggaaaattgacttcgtatttccccaagtatcaaatactgtgttaat

SEQ ID NO: 398965 - DNA, 120 bp, Artificial Sequence
  ENSG00000146151_12 (sequence is synthesized)
acttaatcaagcaggcttaacactgtgtacatattgtcagtagtttatgagctcctgcatagtatgcagagtgtgtggcctcaatattatacattatgcctctggatctcaactactcat

SEQ ID NO: 398966 - DNA, 120 bp, Artificial Sequence
  ENSG00000146151_13 (sequence is synthesized)
ttgccaagtcagttatgttatggaccaaaagccaaatctccatctgaccctacataattttagcaatagaacttttatatttcaagtatggctaacatctgttaactatttcagtgactt

SEQ ID NO: 398967 - DNA, 120 bp, Artificial Sequence
  ENSG00000146151_14 (sequence is synthesized)
tatctggttccaagaggctgtggccaatggcaagatgccatatcctggaaacatattacgacctcccatgtttgttacatgcatccagtttaccacactttacctgtcatcagttatagt

SEQ ID NO: 398968 - DNA, 120 bp, Artificial Sequence
  ENSG00000146151_15 (sequence is synthesized)
aaaaaccagcatggtgttactcaactattgagaaattgtaagctatttttttttgtcctgatgtctaaattgcagtgataagaataggttgatacatgtatcataatctacctttataat

SEQ ID NO: 398969 - DNA, 120 bp, Artificial Sequence
  ENSG00000146151_16 (sequence is synthesized)
tttcagatcactttcaaattgcccaaggaaatattgtgatcctaagaatattaagataattttaggttaatgaaatacccattttccttttattcatggtgctttgcttacccacattat

SEQ ID NO: 398970 - DNA, 120 bp, Artificial Sequence
  ENSG00000146151_17 (sequence is synthesized)
tttttggtgtattttttagtggttattttagaagttgaagtggctgaaattttgtctattgtcttagaattgattgccagaaattgcaagatgtaatatatcaaagtcagggatgaggag

SEQ ID NO: 398971 - DNA, 120 bp, Artificial Sequence
  ENSG00000146151_18 (sequence is synthesized)
caggaggactattcaagataaacttctgtaacctatgcatattttatgggggcagtattattacaaatggatctgaaatgtcagttctagtatttagagagacttctctaataataccgg

SEQ ID NO: 398972 - DNA, 120 bp, Artificial Sequence
  ENSG00000146151_19 (sequence is synthesized)
ccgggtgatattatctttgagtaaatttgaatataaattgaaacataaaaatgagtattgtgaactttctaggaaatattcattaaaaccattgaaataaaaataaattcaagaaagtaa

SEQ ID NO: 398973 - DNA, 120 bp, Artificial Sequence
  ENSG00000146151_20 (sequence is synthesized)
ccccgcgcaggagaaggagtagaaacattgaaggatgtaatgatcccctcagggttaagcagcttctctgttgcaatgtctaagctatggtctccggtttaggattcagtgttcgggctc

SEQ ID NO: 398974 - DNA, 120 bp, Artificial Sequence
  ENSG00000146151_21 (sequence is synthesized)
gcacgagggtacttatgaaatcccacaaattctgttttgttaatgtttattgttaaagcttactcaaaaattatctagagattcttatatcatttataaaaatatacatagaatatcata

SEQ ID NO: 398975 - DNA, 120 bp, Artificial Sequence
  ENSG00000146151_22 (sequence is synthesized)
atcactatatagttacatctcattaacatcactgctgattattagtgagtatctagcttgtggaatgtgtcatgcagttgaaatcagaggaactagcatgcaaatctggcattattaact

SEQ ID NO: 398976 - DNA, 120 bp, Artificial Sequence
  ENSG00000146151_23 (sequence is synthesized)
attttattaacactctagcacccaaatgcagccctcttatctcagcctacatgtgctgataagttggtataaactcacaacagcttttggaaaagaatcacctaatgtggttttcaaatt

SEQ ID NO: 398977 - DNA, 120 bp, Artificial Sequence
  ENSG00000146151_24 (sequence is synthesized)
ttttttaaaacatgactttttcttcaaagagtattttatgtagaacttcaatagaatacagcagatataaaattgagctgctctgggaaatcattttatccattctttctccccctcaat

SEQ ID NO: 398978 - DNA, 120 bp, Artificial Sequence
  ENSG00000146151_25 (sequence is synthesized)
ggctgacttttctacttcctctgggtgatcccaaatcacctccatagtatcttgcagaacactgtttaaaaatacttgataaattgcttatagaagataaatataaactttcagttctct

SEQ ID NO: 398979 - DNA, 120 bp, Artificial Sequence
  ENSG00000146151_26 (sequence is synthesized)
actattttctattatatgtgatttctataaatttaggagtatcagagatatcaatccctttctcctcgccttgcctttttcttgtggaaacttatcagctgttcattctaagagatgttg

SEQ ID NO: 398980 - DNA, 120 bp, Artificial Sequence
  ENSG00000146151_27 (sequence is synthesized)
cacaaacctaattttctctctcaggagtttagaaatggtataccaaacatggttacttgtattgaaagattatgtgattttgtcactgagttcactattttggggttcctaggatggagc

SEQ ID NO: 398981 - DNA, 120 bp, Artificial Sequence
  ENSG00000146151_28 (sequence is synthesized)
cacatgcaaaccagtgacaggacagagtagtagaaagcagaaatggaaaaaggaggctcctagcggtgatgagaggtatgggggagggaggagagggaaaaatctgccttggtgcttgtc

SEQ ID NO: 398982 - DNA, 120 bp, Artificial Sequence
  ENSG00000146151_29 (sequence is synthesized)
tgcttccaggaccaatagttgcctcaagtattataaccaggcctatgggttgtgaaacctataatgcatttttgtgtgtgtttgtttcttaaggaagaatttgtttctaagacattagct

SEQ ID NO: 398983 - DNA, 120 bp, Artificial Sequence
  ENSG00000146151_30 (sequence is synthesized)
actttttctattaattttataaatatggagatatgatgaacacacatcgtaacaagttaaagtgcatagcgattggtaatagaaggttgaaagctggggatggatttgggtgcaggctgt

SEQ ID NO: 398984 - DNA, 120 bp, Artificial Sequence
  ENSG00000146151_31 (sequence is synthesized)
acttcccttagttgaggtgagcaaagttcatggtagcgggaaagattcaacagttaatgagaaagataagtgagtcaattgtgactgaaaatattagtgaaatgattggaatttcaatca

SEQ ID NO: 398985 - DNA, 120 bp, Artificial Sequence
  ENSG00000146151_32 (sequence is synthesized)
aggtgttttgggggaacaattagagttagactatacctagtaaaatattttgttagtttgttttctatttatatttttcctgtcctccatagtaagtctacatgagtttctaaaatttga

SEQ ID NO: 398986 - DNA, 120 bp, Artificial Sequence
  ENSG00000146151_33 (sequence is synthesized)
aattacttttgtaattaagatagatgcatatcatgtaaggactatatgagaaaaatttaaaatccaaggcaatgtacttccaaagacataaaataaaggatatttatttttcaggcaaaa

SEQ ID NO: 398987 - DNA, 120 bp, Artificial Sequence
  ENSG00000146151_34 (sequence is synthesized)
gttacaaaaccacaatcaaaaaggagagatatactattggtttctcaattcgaatataaataagttgtctcaattttctttaaaataaagagaaagatgaagaccctattctacttcaat

SEQ ID NO: 398988 - DNA, 120 bp, Artificial Sequence
  ENSG00000146151_35 (sequence is synthesized)
atgtgtttaaagtgtggagtataagctttaaagtaattctcattggaaagttaaaaagtatgtgactataagaagtaaattgcttatgtagcttgctcttcaaataggaagggttttttt

SEQ ID NO: 398989 - DNA, 120 bp, Artificial Sequence
  ENSG00000146151_36 (sequence is synthesized)
agtgttgaaagatggatgcaaatataagttgtaggaagtaaccttttattatcttagctttctgttgtaaaatggaatagttaatgtaactgggctaataaaaatcttaaaccctcttaa

SEQ ID NO: 398990 - DNA, 120 bp, Artificial Sequence
  ENSG00000146166_0 (sequence is synthesized)
gatattgtggtttctaacgctgaacttaaaaagtgttgagatgaataatgaagaggaccttctgcaggaggactcaacaagagatgaaggcaatgagactgaagccaacagcatgaacac

SEQ ID NO: 398991 - DNA, 120 bp, Artificial Sequence
  ENSG00000146166_1 (sequence is synthesized)
attaagaaggacaaggaagaaagtcactaaaccatatgtttgttcaactgaagtgggagaaacggatatgtccaattcaaatgattgcatgagggacagcagtcaaattttgaccccacc

SEQ ID NO: 398992 - DNA, 120 bp, Artificial Sequence
  ENSG00000146166_2 (sequence is synthesized)
tcaactctcttctagaatgaaacacattagacaagccatggccaaaaatcgcctccagtttgtacgatttgaagcaacagacctccacggcgtgtccaggtctaagactatccctgcaca

SEQ ID NO: 398993 - DNA, 120 bp, Artificial Sequence
  ENSG00000146166_3 (sequence is synthesized)
cttttttcaagagaaagtgagccatggtgtttgcatgccccgaggttatcttgaagtgataccaaatccaaaggacaatgaaatgaataacataagagccacatgttttaatagcgacat

SEQ ID NO: 398994 - DNA, 120 bp, Artificial Sequence
  ENSG00000146166_4 (sequence is synthesized)
agtcctaatgccagagttatcaacctttagagttttgccatgggctgacagaactgcaagagtgatatgtgataccttcactgtgactggtgagcctcttttgacttccccaaggtacat

SEQ ID NO: 398995 - DNA, 120 bp, Artificial Sequence
  ENSG00000146166_5 (sequence is synthesized)
tgcaaagaggcagctgagccatctgcaggcctctggcttttccctgctttctgctttcatctatgatttttgcatttttggtgtgcccgaaattttaaattcaaagattatatcttttcc

SEQ ID NO: 398996 - DNA, 120 bp, Artificial Sequence
  ENSG00000146166_6 (sequence is synthesized)
tgctttaacatttttaaataaccatgatcagcccttcatgcaggaacttgttgatggcttgtatcacactggagccaatgtcgagagtttttcctcctctaccaggcctggtcagatgga

SEQ ID NO: 398997 - DNA, 120 bp, Artificial Sequence
  ENSG00000146166_7 (sequence is synthesized)
aatctctttcctgcctgaatttggcattagctcagctgataatgcatttaccctcagaacaggtgtcaaagaagtggcaaggaaatataattacattgccagcttcttcattgagactgg

SEQ ID NO: 398998 - DNA, 120 bp, Artificial Sequence
  ENSG00000146166_8 (sequence is synthesized)
attttgtgattcagggattttgtctcatagtctctgggatgtcgataggaagaaaaacatgttctgcagcacttctggaactgagcagctcacgatcactgggaaaaaatggttggcagg

SEQ ID NO: 398999 - DNA, 120 bp, Artificial Sequence
  ENSG00000146166_9 (sequence is synthesized)
actcttgaagcactctgctgcgctcagctgcctgatggcgccttctgttagctgccgaaagcgttattccaaggacaggaaagacctgaagaagagtgtgcctacaacatggggatacaa

SEQ ID NO: 399000 - DNA, 120 bp, Artificial Sequence
  ENSG00000146166_10 (sequence is synthesized)
tgacaacagctgtatatttaatatcaaatgtcatggagagaaaggcacccggatagaaaataaactaggctcagcaacagcaaacccttacttggtgctggctgcaactgttgctgccgg

SEQ ID NO: 399001 - DNA, 120 bp, Artificial Sequence
  ENSG00000146166_11 (sequence is synthesized)
cttagatggacttcatagcagtaatgaggtcttggctggtccagatgagagcacagacttttaccaagtggaaccttctgagatccctttaaaactagaagatgcccttgtggcactgga

SEQ ID NO: 399002 - DNA, 120 bp, Artificial Sequence
  ENSG00000146166_12 (sequence is synthesized)
agaagatcaatgcctgagacaggctctaggagaaacctttattcgatattttgttgccatgaagaaatatgagttggagaatgaagaaatagctgcagagagaaataaattcttagagta

SEQ ID NO: 399003 - DNA, 120 bp, Artificial Sequence
  ENSG00000146166_13 (sequence is synthesized)
ttttatttagaatagagctcacaactactcctttagacatgtaattgttacttaaagctaatctaccaaaacaaaaagactgaacttttgtaattaacaacagcaacaataacaagatta

SEQ ID NO: 399004 - DNA, 120 bp, Artificial Sequence
  ENSG00000146166_14 (sequence is synthesized)
cgaatgcttttgacttttttttttgtccatggaatatttgacagatgaagtaggactgctgagaagattctgataacagaaacaaacaacaaagttgtggtgaagctataatatgcaaac

SEQ ID NO: 399005 - DNA, 120 bp, Artificial Sequence
  ENSG00000146166_15 (sequence is synthesized)
ttaccagatcttgtcagtcatttcctatgtgtatgttgacctggataagaatatccaattttgggtggcaataaatatattcgcacattaagaaaaaaaagacttaagcattagaaagca

SEQ ID NO: 399006 - DNA, 120 bp, Artificial Sequence
  ENSG00000146166_16 (sequence is synthesized)
aaaagaaaaaaaagaaaaggagaaaaaattttaatggtacacataggttatgatttccagggagacaaatatactaatatagtctcgctaatcaaataatattgtgaatccaggttgtat

SEQ ID NO: 399007 - DNA, 120 bp, Artificial Sequence
  ENSG00000146166_17 (sequence is synthesized)
tgaatccaggttgtatgcaccattatggtctttctaaacaagttaaataaacttttgccaaaatataatgacaggtaggcagttttcccctaagtctcttctcttttcacccttctccac

SEQ ID NO: 399008 - DNA, 120 bp, Artificial Sequence
  ENSG00000146166_18 (sequence is synthesized)
tagctcctgaaaagcttatgaacttcaaggttataatgtcctcaagaaacaaatccctaaggaatagaattggagctgagaacaacgaggtcagattttaaaagtagttaaagcctttct

SEQ ID NO: 399009 - DNA, 120 bp, Artificial Sequence
  ENSG00000146166_19 (sequence is synthesized)
tttaacaatgcctcatatagaagttcaatacacaaagtatagatagaaagatgtttgtgtgtgagggtaggtgggctctgtctactctgcttcattctttgaaactagatgttcctctga

SEQ ID NO: 399010 - DNA, 120 bp, Artificial Sequence
  ENSG00000146166_20 (sequence is synthesized)
aacctctagtgctctgtggagtgtgagaacaactgcctggctagccagggctatgtttggagtttaagtttgttattcaaattactgaatctgctgctcacagaggttggtacctcccca

SEQ ID NO: 399011 - DNA, 120 bp, Artificial Sequence
  ENSG00000146166_21 (sequence is synthesized)
gagaatattacctgttccaggcctttgtttgaatgagataatattgtaactatcacaaaagtttagctgcttttgggaagaagtccaaaatccacttactagcaaatgaaacattattct

SEQ ID NO: 399012 - DNA, 120 bp, Artificial Sequence
  ENSG00000146166_22 (sequence is synthesized)
actgcttaggatcaaacagcagattttatgttcaattaaaactgactgtagtctcaatttagatagcaattgcacaagcagaggattagaatttggctcagatcctcttattaaaattca

SEQ ID NO: 399013 - DNA, 120 bp, Artificial Sequence
  ENSG00000146166_23 (sequence is synthesized)
tattactcagtagcttaaatagtgaaagtcagtctatccttcactaattactcccttcttttttcctttgagcaggagaagtgtgtttggatacataagaagaaagttcccagcactttg

SEQ ID NO: 399014 - DNA, 88 bp, Artificial Sequence
  ENSG00000146166_24 (sequence is synthesized)
ggattgcttgaggccaggagtttgagtccagcctggaccacatagtgagacccctgtttctacaaaaaaaaaaaaaaaaatgcctcgt

SEQ ID NO: 399015 - DNA, 75 bp, Artificial Sequence
  ENSG00000146166_25 (sequence is synthesized)
aaaaaaaaaaaatgcctcaagggaggatcgcttgagcctgggagtttcaggctgcagtgagccataatcacacca

SEQ ID NO: 399016 - DNA, 120 bp, Artificial Sequence
  ENSG00000146166_26 (sequence is synthesized)
cttaaaaaaaagagaagaataaaattcatggatgcatatggggtagagagaaagatagtgtagggtagctgggggaaggaagggaacctgtcctgaaacctccagaatgaaatcccacac

SEQ ID NO: 399017 - DNA, 120 bp, Artificial Sequence
  ENSG00000146166_27 (sequence is synthesized)
attacatcatgggagggataaggaagactctcatgccaattttctagctgtctgctagaaaattcccctctgttcattttcccctctgttctcagtaataaaacctcaatatgttctttg

SEQ ID NO: 399018 - DNA, 120 bp, Artificial Sequence
  ENSG00000146166_28 (sequence is synthesized)
aaagcaatgaaaaatgaaatgatatttctgagccttcattaaggttggatgtggtcatgttattaggttcagtgcaaagaggtgaaagtagaagtgttgcatataagttctttaggacat

SEQ ID NO: 399019 - DNA, 120 bp, Artificial Sequence
  ENSG00000146166_29 (sequence is synthesized)
aggattacaggcatgagccaccatgccctaccacactttagaacatttttttaaatgacggatgctgtgtgctctgccctttctttctcttgctgccttcacccttcctgctgagtggcc

SEQ ID NO: 399020 - DNA, 120 bp, Artificial Sequence
  ENSG00000146166_30 (sequence is synthesized)
ttctcttgctgccttcacccttcctgctgagtggcctacagataatgtggctaggattatgtccttgggaagggaggtttgctccacagggtacagtaataaggtggaatctctgctttg

SEQ ID NO: 399021 - DNA, 120 bp, Artificial Sequence
  ENSG00000146166_31 (sequence is synthesized)
tagagcagtttgacttgcctacatccagatgtttacctgagagagaaccaaacttctatcttctttaagccacaatgattttgattctttgttagttgcaatgaaatttattttctcttt

SEQ ID NO: 399022 - DNA, 120 bp, Artificial Sequence
  ENSG00000146166_32 (sequence is synthesized)
tccatgtgtgtgttgtatgtgtgtttgtgtgtgagtgtgtgcatatgagtggggaatttgagggatttggggatgaaagaacaaaggtataagaaccagtgaaagacgacttcctcaata

SEQ ID NO: 399023 - DNA, 120 bp, Artificial Sequence
  ENSG00000146166_33 (sequence is synthesized)
ttcccacttctagagaggataatctgagttaatcaaagggatccacacatccaaaaaatgggattggctctaacccatccctataaagtggcatatccctttatagtccacgggccttaa

SEQ ID NO: 399024 - DNA, 120 bp, Artificial Sequence
  ENSG00000146166_34 (sequence is synthesized)
tgaaacatgtctaatgcattgacttcattttaccataatgagtaaagatgctgtaaaaagtctgataatcacagtgtttgaagccgttttttcccctttcgcattattagcataacttaa

SEQ ID NO: 399025 - DNA, 120 bp, Artificial Sequence
  ENSG00000146166_35 (sequence is synthesized)
aaacacagtactcaggatgccatgtgaaggaattatataactaggaatattatcttcagtattaagtgtacagtcgtgagtcaaagaaaatattcagccatagattacaaatcagttgat

SEQ ID NO: 399026 - DNA, 120 bp, Artificial Sequence
  ENSG00000146166_36 (sequence is synthesized)
aacgtaagttggtgtggcagtttccaccaagatttcagttaggtgtgtgctgatgtatattcttgttctttaaggcaacccaaaaagaggcattggccagcagagttcagggccaaagac

SEQ ID NO: 399027 - DNA, 120 bp, Artificial Sequence
  ENSG00000146166_37 (sequence is synthesized)
aaattggggtaggtacatgtaaaaatcagttatctatttttctatttctttcatctgttcataggctttctattgttgaaaggactttctgctgatgcttctaccttcttggtctgggtt

SEQ ID NO: 399028 - DNA, 120 bp, Artificial Sequence
  ENSG00000146166_38 (sequence is synthesized)
aagagggtcagacattcattcagcagcacttattgagcaccatttgtgtgctaagccttcagctgggagccatcatactaggggagaccaaaacaaagatgagcagacaatgaaagagtt

SEQ ID NO: 399029 - DNA, 120 bp, Artificial Sequence
  ENSG00000146166_39 (sequence is synthesized)
ttggatctgtgtatcttaagcagaacataaataattttttttgtagacctaatgctgaaaaaagctatttggaaagcttctttatggctcgaaaagggtgccttataaatagctttacaa

SEQ ID NO: 399030 - DNA, 120 bp, Artificial Sequence
  ENSG00000146166_40 (sequence is synthesized)
aaattgctttcttattttcatttactataattgttctaatcaaagcttaggggaaaaatgtgattactgaatttaaagttggtaattaaatgagtatacataagaaatgtaaattaaaag

SEQ ID NO: 399031 - DNA, 120 bp, Artificial Sequence
  ENSG00000146166_41 (sequence is synthesized)
cgataatattttaagactagaaattaaaacattagtattgtagtaacaagtttctattttcaaggacattctataatctaaaatttcattttacagtgtgtgaataacaacaacgcttga

SEQ ID NO: 399032 - DNA, 120 bp, Artificial Sequence
  ENSG00000146166_42 (sequence is synthesized)
aatgattatttgaaggcaatgaaagatcaaaaaactttaatctgaataaaaattgaaagcatacagtgaagtctgagcttatcagtaaaacagaacagtctattgacatatctccagtca

SEQ ID NO: 399033 - DNA, 120 bp, Artificial Sequence
  ENSG00000146166_43 (sequence is synthesized)
cctgtttgacaaaatacactcaccaatatgtttatgatataggtatgactggacaatacctttaaccttgggttttctatgacaggggtaagaatttgtgtctttaaacattacctatgt

SEQ ID NO: 399034 - DNA, 120 bp, Artificial Sequence
  ENSG00000146166_44 (sequence is synthesized)
gcacagtgccttccctgttaaagctcttctcatgctgcctataattaggggtttacatgatacttcctaattgctaattaggatgtgaattctcagaataaaaggtacagatcttactta

SEQ ID NO: 399035 - DNA, 120 bp, Artificial Sequence
  ENSG00000146166_45 (sequence is synthesized)
tctcatctgtcatatgatgacaaggactctcaggatgagacaacagtgataaaacctttgccccccagaacaacaaccaatgttcctggaggtgaatttaacccaaactctgaatgaaac

SEQ ID NO: 399036 - DNA, 120 bp, Artificial Sequence
  ENSG00000146166_46 (sequence is synthesized)
acattagacaagccatggccaaaaatcgcctccagtttgtacgatttgaagcaacagacctccacggcgtgtccaggtctaagactatccctgcacacttttttcaaatccaaaggacaa

SEQ ID NO: 399037 - DNA, 120 bp, Artificial Sequence
  ENSG00000146192_0 (sequence is synthesized)
actctgaagccaagagccgaccttctgagccctcaagaaagatcagaacagattcatgggtgatttagcctatctgtcccaggccagcgtggctgagtgtgctggctggaggcctctctc

SEQ ID NO: 399038 - DNA, 120 bp, Artificial Sequence
  ENSG00000146192_1 (sequence is synthesized)
tctgcttcgagggtagctgagatccaccccggaaaccggcaggatgaagggggcaagtgaggagaagctggcatctgtgtccaacctggtcactgtgtttgagaatagcaggaccccaga

SEQ ID NO: 399039 - DNA, 120 bp, Artificial Sequence
  ENSG00000146192_2 (sequence is synthesized)
agcagcacccagaggccagaggctagaggacgtgcatcaccgccctgagtgcaggcctcccgagtccccaggaccacgggagaagacgaatgtcggggaggccgtggggtctgagcccag

SEQ ID NO: 399040 - DNA, 120 bp, Artificial Sequence
  ENSG00000146192_3 (sequence is synthesized)
gacagtcagcaggaggtacctgaactccctgaagaacaagctgtccagcgaagcctggaggaaatcttgccagcctgtgaccctctcaggatcggggacgcaggagccagagaagaagat

SEQ ID NO: 399041 - DNA, 120 bp, Artificial Sequence
  ENSG00000146192_4 (sequence is synthesized)
cgtccaggagctgctggagacagagcaggcctatgtggcgcgcctccacctgctagaccaggtgtttttccaggagctgctgaagacagcccgcagcagcaaggccttcccagaggatgt

SEQ ID NO: 399042 - DNA, 120 bp, Artificial Sequence
  ENSG00000146192_5 (sequence is synthesized)
ggtcagggtcatcttctccaacatctcctccatctatcagttccattctcagttcttcctcccagagctgcagcggcgcctggacgactggacagctaacccccgcatcggtgacgtgat

SEQ ID NO: 399043 - DNA, 120 bp, Artificial Sequence
  ENSG00000146192_6 (sequence is synthesized)
ccagaagctggcccccttcctgaagatgtacagtgagtatgtcaagaactttgagcgagcggctgagctgctggccacctggaccgacaagtctccactcttccaggaggttctcactcg

SEQ ID NO: 399044 - DNA, 120 bp, Artificial Sequence
  ENSG00000146192_7 (sequence is synthesized)
catccagagcagcgaggcttcgggcagcctgaccctgcagcaccacatgctggaaccagtgcagagaattccacgttacgagctgctgctcaaggagtacatccagaagctgccagccca

SEQ ID NO: 399045 - DNA, 120 bp, Artificial Sequence
  ENSG00000146192_8 (sequence is synthesized)
ggccccagaccaggccgatgcccagaaagccctggacatgatcttctcagctgcccagcactccaatgcagccatcactgagatggagcggctgcaggacctgtgggaggtgtaccagcg

SEQ ID NO: 399046 - DNA, 120 bp, Artificial Sequence
  ENSG00000146192_9 (sequence is synthesized)
cctgggcctcgaggacgacatagtagacccctctaacaccctgctccgtgagggcccggtcctcaagatctccttccgccgcaacgaccccatggagcgctaccttttcttgttcaacaa

SEQ ID NO: 399047 - DNA, 120 bp, Artificial Sequence
  ENSG00000146192_10 (sequence is synthesized)
catgctgctctactgtgtgcccagggtgatccaggtgggcgcccagttccaggtgaggacccgcatcgatgtggccgggatgaaggtgcgggagctgatggatgctgagtttccccactc

SEQ ID NO: 399048 - DNA, 120 bp, Artificial Sequence
  ENSG00000146192_11 (sequence is synthesized)
cttcctggtgtccgggaagcagcgcaccctggagctgcaagcccggtcccaggaggaaatgatttcctggatgcaggccttccaagcagccattgaccaaatcgagaagcggaatgaaac

SEQ ID NO: 399049 - DNA, 120 bp, Artificial Sequence
  ENSG00000146192_12 (sequence is synthesized)
caggagcaggagctgcagtctgaggagctgggcctccgggcaccgcagtgggtccgggacaagatggtgaccatgtgcatgcgctgccaggagcccttcaacgctctgacgcgccgtcgc

SEQ ID NO: 399050 - DNA, 120 bp, Artificial Sequence
  ENSG00000146192_13 (sequence is synthesized)
caccactgccgggcctgcggctatgtggtgtgtgccaggtgctccgactaccgggccgaactgaaatacgacgacaacaggcccaaccgagtctgcctccactgctacgcattcctcact

SEQ ID NO: 399051 - DNA, 120 bp, Artificial Sequence
  ENSG00000146192_14 (sequence is synthesized)
ggaaatgtgctgcctgaggccaaggaggacaagaggcggggcatcctggagaaagggtcctcagccacgcctgaccagagcctgatgtgcagcttcctgcagctcatcggggacaagtgg

SEQ ID NO: 399052 - DNA, 120 bp, Artificial Sequence
  ENSG00000146192_15 (sequence is synthesized)
ggcaagagcggcccccggggctggtgtgtgatccctcgggatgaccccctcgtgctctatgtctatgctgcccctcaggacatgagggctcacacctccatccccctgctgggctaccag

SEQ ID NO: 399053 - DNA, 120 bp, Artificial Sequence
  ENSG00000146192_16 (sequence is synthesized)
gtgactgttgggccccagggggaccctcgggtcttccagctacagcagtcaggccagctctacaccttcaaggccgagacggaggagctgaagggccgctgggtgaaggccatggagcgg

SEQ ID NO: 399054 - DNA, 120 bp, Artificial Sequence
  ENSG00000146192_17 (sequence is synthesized)
gcggccagtggctggagccccagctggcccaacgatggggacctgtccgactgagccactgccagccgctctcctgcccacctctccccaccctgaacccagctcctgccacagactgac

SEQ ID NO: 399055 - DNA, 120 bp, Artificial Sequence
  ENSG00000146192_18 (sequence is synthesized)
cctgtggcctcagtgacccactgccccaagtggtgctttcagagaattgattcagccatctgcgcccaggccacgtgtcccgatctgggattagaaaatatgggtccattcctttctaga

SEQ ID NO: 399056 - DNA, 120 bp, Artificial Sequence
  ENSG00000146192_19 (sequence is synthesized)
aaggggacaaccaagtgtctcagtttgccttgcggggagggggctcctgggccatgggacttccagtgctaaaactgggaaagccccaggtaaccccggactggtggtcaccatagtatg

SEQ ID NO: 399057 - DNA, 120 bp, Artificial Sequence
  ENSG00000146192_20 (sequence is synthesized)
gtttttcatttgtatctcctggggagcttttaaagagtactggtgaaaaacacatagtaaattaattttaaaaatgtaaaaaacaatgcctgtactgaagtaccaccaccgatttaaatg

SEQ ID NO: 399058 - DNA, 84 bp, Artificial Sequence
  ENSG00000146192_21 (sequence is synthesized)
tcccaggctggagtgcacaaacatggctcactacagcctcgctctcccgggctccagtgatcctcccgcctcagcctcccaagt

SEQ ID NO: 399059 - DNA, 76 bp, Artificial Sequence
  ENSG00000146192_22 (sequence is synthesized)
aggtgtgtgccactgtgccaactcaggctggtctcaaactcccagcctcaagcgatgctcccacctccacctccca

SEQ ID NO: 399060 - DNA, 82 bp, Artificial Sequence
  ENSG00000146192_23 (sequence is synthesized)
gcatgcatattttttaagagtacccactggagtctaatatatagcctgggttacctgggatgaagaataaagagagcaaact

SEQ ID NO: 399061 - DNA, 120 bp, Artificial Sequence
  ENSG00000146192_24 (sequence is synthesized)
agcctgggttacctgggatgaagaataaagagagcaaactaccacaaccaatggttgagcccctgtcaagtgccagtcatgatagtagtaataataataataaacatctattggaccagg

SEQ ID NO: 399062 - DNA, 120 bp, Artificial Sequence
  ENSG00000146192_25 (sequence is synthesized)
gggctgaggtagaggtgtggggtgctggggtggggagctctccctgacctcccctccacacatgctttcctagccagagccagcagttccccaggtgggggtatggtgtgatcagaggtc

SEQ ID NO: 399063 - DNA, 120 bp, Artificial Sequence
  ENSG00000146192_26 (sequence is synthesized)
aaacacagttttaaggaacttattcaaggccacacagcttggaacagtctccatcttgtgaacctaatactcttctcaggtggggcctcagtttacccactggaggagacaacaatctca

SEQ ID NO: 399064 - DNA, 120 bp, Artificial Sequence
  ENSG00000146192_27 (sequence is synthesized)
acctagaaatagaggtctgagtgtgaactgtcctgcccttagactaaagcccagtctgatctcttctgtggcttgcagttttctcatctgcagagttcaagggttggcatgcagatactg

SEQ ID NO: 399065 - DNA, 120 bp, Artificial Sequence
  ENSG00000146192_28 (sequence is synthesized)
tgcacccaaattccctggagtcacatcccagcacgtctgcttactaactgtgtgtccttgggcaagtcacttgagtctctttgtgccagtttcctcatttgtaaaatggggatagtggtt

SEQ ID NO: 399066 - DNA, 120 bp, Artificial Sequence
  ENSG00000146192_29 (sequence is synthesized)
atttgtaaaatggggatagtggttatagtaatgcgtcctggttttcaatcgctgctgaacaaacctatcaaaaatgtagcggctggccgggtgcagtaactcacgcctgtaatcccagca

SEQ ID NO: 399067 - DNA, 120 bp, Artificial Sequence
  ENSG00000146192_30 (sequence is synthesized)
gtggaaagtttgctttgggggattcagggagcctggcctcacctggccctatctagagtcgagaggaggtctctaggctgagggcaatccctgtgcccctcctgcaggacagctaacccc

SEQ ID NO: 399068 - DNA, 120 bp, Artificial Sequence
  ENSG00000146192_31 (sequence is synthesized)
tctggcttgttttgggaagcagtgagagtcaccaaagccaaacacctaatggctaacgttcagtggcttccagtctctcagccctggggggctcccgccattcagacaccccatggctgg

SEQ ID NO: 399069 - DNA, 120 bp, Artificial Sequence
  ENSG00000146192_32 (sequence is synthesized)
gctgcacaggcagggctgctcctgggggctgtcatggcaggtcctgagggccctttgttgaacttcaaggacctcctgccccagccaccagccctagattctcagggaataaactccggc

SEQ ID NO: 399070 - DNA, 120 bp, Artificial Sequence
  ENSG00000146192_33 (sequence is synthesized)
gccgggcctgcggctatgtgagtactcctgccagcactcctgcctccacctgcgtcacccaggcctccacctgcatcacccaggcctccacctttcctacctaggcctccgcttgatcca

SEQ ID NO: 399071 - DNA, 120 bp, Artificial Sequence
  ENSG00000146192_34 (sequence is synthesized)
cctaggcctccacctgccccacctcggcctccatctgtgtcacctccacctgtccctccgaggcctccacctgtgtcacccaggcctctatctttcctacctaggcttccacttgatcca

SEQ ID NO: 399072 - DNA, 120 bp, Artificial Sequence
  ENSG00000146192_35 (sequence is synthesized)
cctaggcttccacttgatccacctaggcctccacctgccccaccttggcctctacctgtcccacctcggcctccacctgccccaccttggcttccaccagtgtcacccaggcctctacct

SEQ ID NO: 399073 - DNA, 120 bp, Artificial Sequence
  ENSG00000146192_36 (sequence is synthesized)
gtcccacttaggcctctacctgccctacctgggcctctacccacccagctcaggtgctgctgtccccatcttggccaaatctgctggcttcaaccaatgcagcccagtggtgttgggcac

SEQ ID NO: 399074 - DNA, 120 bp, Artificial Sequence
  ENSG00000146192_37 (sequence is synthesized)
tagctctgagccaggtgtgtgtattactacctcatctggccctcacagcacacctcaggaggctgctgtttcccattttttagatgggaaaatgagacccattgaggttaaattacttgc

SEQ ID NO: 399075 - DNA, 120 bp, Artificial Sequence
  ENSG00000146192_38 (sequence is synthesized)
tgaaggtacccctgaagctgatcctatgaatttacctgcattcttatcatcattttccacgaccctgagacccagagctaggaaatggtccccagttctagtggaggggcatctagcccc

SEQ ID NO: 399076 - DNA, 120 bp, Artificial Sequence
  ENSG00000146192_39 (sequence is synthesized)
gcaccccctcaggccttgccccaccacctcaccaggcccatgcccactatgcactcacccaccccgtcatcctctctttacccgcttcggctaactgtcctctcttctctgcaagccctc

SEQ ID NO: 399077 - DNA, 120 bp, Artificial Sequence
  ENSG00000146192_40 (sequence is synthesized)
agcaccctggcacctgatggattctgttgttaactctgcctactggttcaggcctcagtctccttaactccgccatggggatcgtgaaacctacctccagtgtggcagtgaggattccac

SEQ ID NO: 399078 - DNA, 120 bp, Artificial Sequence
  ENSG00000146192_41 (sequence is synthesized)
caaaaaacattctttcccttccctctcctctttttctttccccctcctccataactcaggcagggcatccagtgcgggtgagctaccagcttcttgaggagggtactgtgtccactacag

SEQ ID NO: 399079 - DNA, 120 bp, Artificial Sequence
  ENSG00000146192_42 (sequence is synthesized)
tttctcctcttatcaatccaggcccagttaccagaggtagatctcgctttgctttttaagcactcctgtacttgagctgttctctgttgacatcacaaccccctctgtttactctgcaaa

SEQ ID NO: 399080 - DNA, 120 bp, Artificial Sequence
  ENSG00000146192_43 (sequence is synthesized)
cagagaagccctttgcaacctcagtctttgatgacctccagaggacaggaggagtctagctggacaggttggggccagtcagggaggtgtccccaaaatgtgttcaactgcaatcaggac

SEQ ID NO: 399081 - DNA, 120 bp, Artificial Sequence
  ENSG00000146192_44 (sequence is synthesized)
agagtcagtttctaggacctgggaacacacctgccttcagatgtcagtgatgagttacatcccgaagccaggtagaaaggatgtggggattggctactgttcctggtgattcacttctgt

SEQ ID NO: 399082 - DNA, 120 bp, Artificial Sequence
  ENSG00000146192_45 (sequence is synthesized)
gaattgattcacacttgtgagtgaaagtagttctttaaaaattacttaaaatagtgaaatacaaagaggcacaaagaataacaacacctgtgtagctgccttccagcttaagatagaaaa

SEQ ID NO: 399083 - DNA, 120 bp, Artificial Sequence
  ENSG00000146192_46 (sequence is synthesized)
tattctgacaactaaattaaatgtatgatccttgcttggattctttctggggtaaaataaagctatcaaggttgctcttgggaccattgggagaaatttgatgatgcaacatatctagat

SEQ ID NO: 399084 - DNA, 120 bp, Artificial Sequence
  ENSG00000146192_47 (sequence is synthesized)
caaaagcaaaactccatctcaaaaaaataaaaataataatattgtatcaataaatttcctgagcgtgactgtgacaccgtggataggtagaaggatgcccttgttcttaggagaccacca

SEQ ID NO: 399085 - DNA, 120 bp, Artificial Sequence
  ENSG00000146192_48 (sequence is synthesized)
aggtagaaggatgcccttgttcttaggagaccaccagctacatatttaagggtgaggtgtcatgatgactgtaatttatcctcaaatggttcagaaaaaaataaaatacatacatataga

SEQ ID NO: 399086 - DNA, 120 bp, Artificial Sequence
  ENSG00000146192_49 (sequence is synthesized)
gagagacagagagcaaatgtggcacaaatgttaataattagtgaatctagtgggtggtatcattgtattatttgttcaatttgtctgtcggtaggaaatttttcaaaattaaacgttggt

SEQ ID NO: 399087 - DNA, 120 bp, Artificial Sequence
  ENSG00000146192_50 (sequence is synthesized)
agaggaaaaaatatttactaattatatttaaacattgaaatcgctcaataaaaaaaaaatgctcctgaggtagctgaagcccccgtgtggggctgtgccctgaccgtgggtttctcttgc

SEQ ID NO: 399088 - DNA, 120 bp, Artificial Sequence
  ENSG00000146192_51 (sequence is synthesized)
ctgtgcagatcttcgtgcctgctgagccagtgagtcatcctttcggtggttcgggtgccagtttctgtctcccctgcctgccagacgggaatccttgtgagggtggggcagggccaggcc

SEQ ID NO: 399089 - DNA, 120 bp, Artificial Sequence
  ENSG00000146192_52 (sequence is synthesized)
ttcttctccaggtccctgccaggccacactctgtgctgggcacacagaggagctccctgaaggctggtgccgcctgatgaactacactccctctgcccctttctcctgccctccatctcc

SEQ ID NO: 399090 - DNA, 120 bp, Artificial Sequence
  ENSG00000146192_53 (sequence is synthesized)
acgcccacatctgggctccccataaagccaagtcttcctcgcagtcacaccttgcggcacccagtgttcctctctgagtcttcccaggccccttttacccagcctcccggcatgatccat

SEQ ID NO: 399091 - DNA, 120 bp, Artificial Sequence
  ENSG00000146192_54 (sequence is synthesized)
gtcagcctttggggggtgtcttcgtggtgagctgagagtgggccccgctccacagagtacccatgtaaaaacaaccagcctatcatttttaggtgaaaacacacttgactccatgatggc

SEQ ID NO: 399092 - DNA, 120 bp, Artificial Sequence
  ENSG00000146192_55 (sequence is synthesized)
gcagaatacaaagtctgcctgaatcttaaagctaaactgtgggacttgaaagacacaccctgtgtgtggagggcctgtctgccaggtaacagtgtggctctcagggtcaggagaggacaa

SEQ ID NO: 399093 - DNA, 120 bp, Artificial Sequence
  ENSG00000146192_56 (sequence is synthesized)
aagctgggccctgcttgcctggtggggtctttgggagagtcaggtgagatggcggagaggacagcatttggaaaagtgaatcagatgccagtggcccgtctggggcaagccccttgggtt

SEQ ID NO: 399094 - DNA, 120 bp, Artificial Sequence
  ENSG00000146192_57 (sequence is synthesized)
cacagcagccctcactcggagggaacctggaggggagagaagttacggccctcgcggtgggggccgggtcttgaaccctcagcctaagagccccgagcccgagctcccccatgtgtcgca

SEQ ID NO: 399095 - DNA, 120 bp, Artificial Sequence
  ENSG00000146192_58 (sequence is synthesized)
gcctccaggcagttgggcctcaccagcatgggggagcatccccgctctgcctctattcctccctcgaagctttcttttcctcccccagtccctggttgctctcatgcccccacctgccca

SEQ ID NO: 399096 - DNA, 88 bp, Artificial Sequence
  ENSG00000146192_59 (sequence is synthesized)
atgccctgcctgcctgcctcaggccttgcagagtgctgcgagtacaggtgtaagccactgtggctggccaatcctggagaagttcgta

SEQ ID NO: 399097 - DNA, 120 bp, Artificial Sequence
  ENSG00000146192_60 (sequence is synthesized)
tgtaagccactgtggctggccaatcctggagaagttcgtacccctctgagcctccacttcctcacctctatgatgggctagtggctgcccccacctacagggttgtgagaattacatgga

SEQ ID NO: 399098 - DNA, 120 bp, Artificial Sequence
  ENSG00000146192_61 (sequence is synthesized)
atgagacatgcatcatgtcctgggtagtgcttggtaggtagccctcgttattgttacataatgaagcactgagcagttactgaacacctgctgtgggcccaacactgtgccgggccttgt

SEQ ID NO: 399099 - DNA, 120 bp, Artificial Sequence
  ENSG00000146192_62 (sequence is synthesized)
agccctgggtctcctcacctcaccccttctcagccttcccaccctgctcaccagagctgagtcaggagccctggctttgactccaggaagccttggccctttaacctcaatggctggggt

SEQ ID NO: 399100 - DNA, 120 bp, Artificial Sequence
  ENSG00000146192_63 (sequence is synthesized)
tggggtagaatcaggaggtcttgttagcagtactccccattctgcctgtggtgcccaggctggcccctgtatagcagagaacacaccagctggcccttgctggcctacacggtatcttca

SEQ ID NO: 399101 - DNA, 120 bp, Artificial Sequence
  ENSG00000146192_64 (sequence is synthesized)
tctgtcatctcaatgcccacaacctcacaacgatcttacctttcatagtttttcaggagccctaaggctagagggttattcatcaccgcagggagctctagtctgatgaagtccaagacc

SEQ ID NO: 399102 - DNA, 120 bp, Artificial Sequence
  ENSG00000146192_65 (sequence is synthesized)
tccacagtttgggcctgtttatggcattcatcagctgccagcctttggccaagtccctgcatctctaggctttgccttgctcatctgtaaagtggccagaacacaacctcccctgccttc

SEQ ID NO: 399103 - DNA, 120 bp, Artificial Sequence
  ENSG00000146192_66 (sequence is synthesized)
cccagcatgcagtggctcaggttgccttgagtgattccgggcatctcccaggctcagctgcttccataggcccctgcctactcgtccggccctcaggagcagcctgacccacctcccttc

SEQ ID NO: 399104 - DNA, 120 bp, Artificial Sequence
  ENSG00000146192_67 (sequence is synthesized)
ggagaccccagggcgctaggttcagcctcctaggcccaggcccttattgtgtggccatgcctccctggggctcggtctgtctgcacagtgaagggcttgggtgaatgagctctgagaggc

SEQ ID NO: 399105 - DNA, 120 bp, Artificial Sequence
  ENSG00000146192_68 (sequence is synthesized)
aagcggaatgaaaccttcaaggctgcggcccaggggcctgagggagacatccaggagcaggaggtaaatgaaggctttttcatcccttgctggagccaccaacccaaatagagcttgttc

SEQ ID NO: 399106 - DNA, 120 bp, Artificial Sequence
  ENSG00000146192_69 (sequence is synthesized)
cctctctgttctgcctataccagctcagagggagagggagtgtcatctgccaggagagactgaagggaccaggggaagccttcccagcgcatcccccgactcagggcctgagcattcccc

SEQ ID NO: 399107 - DNA, 120 bp, Artificial Sequence
  ENSG00000146192_70 (sequence is synthesized)
tttagcaaaacttcctttgagagcctgtctgcacagctgtcttggggaagtgtttcacgtctctgcagctccagctgcagggggcagtagggttttgggtttgaaagtatctgagaaata

SEQ ID NO: 399108 - DNA, 120 bp, Artificial Sequence
  ENSG00000146192_71 (sequence is synthesized)
caaagtctcagggaagatggaaggtgagtgaggtgggggctggggaggatatctgtggtttgagttcagatttgagctgaactctggcttgctgagtgactgctgagtcatttgacctct

SEQ ID NO: 399109 - DNA, 120 bp, Artificial Sequence
  ENSG00000146192_72 (sequence is synthesized)
ctgggcctcagtttcctcacttatacaataggaataatggtaactaacgtatcataaggtctcgatcaggtcagtcagcttgctgtagaagccccagggaagcccaacacaaagaatccc

SEQ ID NO: 399110 - DNA, 120 bp, Artificial Sequence
  ENSG00000146192_73 (sequence is synthesized)
actctaggtcaccactgctttgccctcagaggcagccagttcttctgtcctcttcctcgatggccttcaccagcccacccccaacccatgggggtttagggtgtgagctgtgcgtgcgtg

SEQ ID NO: 399111 - DNA, 120 bp, Artificial Sequence
  ENSG00000146192_74 (sequence is synthesized)
gctgttgccttcacgatggctatctggggcagtaggactgagaggggacagtggcccactgctctctcctccccccaggacatgagggctcacacctccatccccctgctgggctaccag

SEQ ID NO: 399112 - DNA, 120 bp, Artificial Sequence
  ENSG00000146197_0 (sequence is synthesized)
gcgagagaggaagaaagagaggcagaaagggcgtgtttctggcgctgcgtttcccctcccctttctcaggtccttcgctcgggctctgcgcgctctccggctgcagctctctcccggcga

SEQ ID NO: 399113 - DNA, 120 bp, Artificial Sequence
  ENSG00000146197_1 (sequence is synthesized)
agctgggaattgggtgggattacacggagcagccccgccgccgccgctggcagaggccggcttggagagggcgggggttcccctccgtcagtcgcccctggcgcccctcgcctcgtcgca

SEQ ID NO: 399114 - DNA, 120 bp, Artificial Sequence
  ENSG00000146197_2 (sequence is synthesized)
cgcctcgtcgcactctccgcctcgctctccccgacgtccggccaggaggagccggtagcatcgggagcctcgcgccgagggcgccgcggtccgcgccccgcgactgcagcccccggcctg

SEQ ID NO: 399115 - DNA, 120 bp, Artificial Sequence
  ENSG00000146197_3 (sequence is synthesized)
ctgcgagctgggatccggccggcttccgccctcccctggccgcgagaccggccccggcggctgggccgccagtagctccagccatgggctcggggcgcgtacccgggctctgcctgcttg

SEQ ID NO: 399116 - DNA, 120 bp, Artificial Sequence
  ENSG00000146197_4 (sequence is synthesized)
acccgggctctgcctgcttgtcctgctggtccacgcccgcgccgcccagtacagcaaagccgcgcaagatgtggatgagtgtgtggaggggactgacaactgccacatcgatgctatctg

SEQ ID NO: 399117 - DNA, 120 bp, Artificial Sequence
  ENSG00000146197_5 (sequence is synthesized)
ccagaacaccccgaggtcatacaagtgcatctgcaagtctggctacacaggggacggcaaacactgcaaagacgtggatgagtgcgagcgagaggataatgcaggttgtgtgcatgactg

SEQ ID NO: 399118 - DNA, 120 bp, Artificial Sequence
  ENSG00000146197_6 (sequence is synthesized)
tgtcaacatccctggcaattaccggtgtacctgctatgatggattccacctggcacatgacggacacaactgtctggatgtggacgagtgtgccgagggcaacggcggctgtcagcagag

SEQ ID NO: 399119 - DNA, 120 bp, Artificial Sequence
  ENSG00000146197_7 (sequence is synthesized)
ctgtgtcaacatgatgggcagctatgagtgccactgccgggaaggcttcttcctcagcgacaaccagcatacctgtatccagcggccagaagaaggaatgaattgcatgaacaagaacca

SEQ ID NO: 399120 - DNA, 120 bp, Artificial Sequence
  ENSG00000146197_8 (sequence is synthesized)
cggctgtgcccacatttgccgggagacacccaaggggggtattgcctgtgaatgccgtcctggctttgagcttaccaagaaccaacgggactgtaaattgacatgcaactatggtaacgg

SEQ ID NO: 399121 - DNA, 120 bp, Artificial Sequence
  ENSG00000146197_9 (sequence is synthesized)
cggctgccagcacacgtgtgatgacacagagcagggtccccggtgcggctgccatatcaagtttgtgctccataccgacgggaagacatgcatcgagacctgtgctgtcaacaacggggg

SEQ ID NO: 399122 - DNA, 120 bp, Artificial Sequence
  ENSG00000146197_10 (sequence is synthesized)
ctgtgacagtaagtgccatgatgcagcgactggtgtccactgcacctgccctgtgggcttcatgctgcagccagacaggaagacgtgcaaagatatagatgagtgccgcttaaacaacgg

SEQ ID NO: 399123 - DNA, 120 bp, Artificial Sequence
  ENSG00000146197_11 (sequence is synthesized)
gggctgtgaccatatttgccgcaacacagtgggcagcttcgaatgcagttgcaagaaaggctataagcttctcatcaatgagaggaactgccaggatatagacgagtgttcctttgatcg

SEQ ID NO: 399124 - DNA, 120 bp, Artificial Sequence
  ENSG00000146197_12 (sequence is synthesized)
aacctgtgaccacatatgtgtcaacacaccaggaagcttccagtgtctctgccatcgtggctacctgttgtatggtatcacccactgtggggatgtggatgaatgcagcatcaaccgggg

SEQ ID NO: 399125 - DNA, 120 bp, Artificial Sequence
  ENSG00000146197_13 (sequence is synthesized)
aggttgccgctttggctgcatcaacactcctggcagctaccagtgtacctgcccagcaggccagggtcggctgcactggaatggcaaagattgcacagagccactgaagtgtcagggcag

SEQ ID NO: 399126 - DNA, 120 bp, Artificial Sequence
  ENSG00000146197_14 (sequence is synthesized)
tcctggggcctcgaaagccatgctcagctgcaaccggtctggcaagaaggacacctgtgccctgacctgtccctccagggcccgatttttgccagagtctgagaatggcttcacggtgag

SEQ ID NO: 399127 - DNA, 120 bp, Artificial Sequence
  ENSG00000146197_15 (sequence is synthesized)
ctgtgggacccccagccccagggctgctccagcccgagctggccacaatgggaacagcaccaactccaaccactgccatgaggctgcagtgctgtccattaaacaacgggcctccttcaa

SEQ ID NO: 399128 - DNA, 120 bp, Artificial Sequence
  ENSG00000146197_16 (sequence is synthesized)
gatcaaggatgccaaatgccgtttgcacctgcgaaacaaaggcaaaacagaggaggctggcagaatcacagggccaggtggtgccccctgctctgaatgccaggtcaccttcatccacct

SEQ ID NO: 399129 - DNA, 120 bp, Artificial Sequence
  ENSG00000146197_17 (sequence is synthesized)
taagtgtgactcctctcggaagggcaagggccgacgggcccggacccctccaggcaaagaggtcacaaggctcaccctggaactggaggcagaggtcagagccgaagaaaccacagccag

SEQ ID NO: 399130 - DNA, 120 bp, Artificial Sequence
  ENSG00000146197_18 (sequence is synthesized)
ctgtgggctgccctgcctccgacagcgaatggaacggcggctgaaaggatccctgaagatgctcagaaagtccatcaaccaggaccgcttcctgctgcgcctggcaggccttgattatga

SEQ ID NO: 399131 - DNA, 120 bp, Artificial Sequence
  ENSG00000146197_19 (sequence is synthesized)
gctggcccacaagccgggcctggtagccggggagcgagcagagccgatggagtcctgtaggcccgggcagcaccgtgctgggaccaagtgtgtcagctgcccgcagggaacgtattacca

SEQ ID NO: 399132 - DNA, 120 bp, Artificial Sequence
  ENSG00000146197_20 (sequence is synthesized)
cggccagacggagcagtgtgtgccatgcccagcgggcaccttccaggagagagaagggcagctctcctgcgacctttgccctgggagtgatgcccacgggcctcttggagccaccaacgt

SEQ ID NO: 399133 - DNA, 120 bp, Artificial Sequence
  ENSG00000146197_21 (sequence is synthesized)
caccacgtgtgcaggtcagtgcccacctggccaacactctgtagatgggttcaagccctgtcagccatgcccacgtggcacctaccaacctgaagcaggacggaccctatgcttcccttg

SEQ ID NO: 399134 - DNA, 120 bp, Artificial Sequence
  ENSG00000146197_22 (sequence is synthesized)
tggtgggggcctcaccaccaagcatgaaggggccatttccttccaagactgtgacaccaaagtccagtgctccccagggcactactacaacaccagcatccaccgctgtattcgctgtgc

SEQ ID NO: 399135 - DNA, 120 bp, Artificial Sequence
  ENSG00000146197_23 (sequence is synthesized)
catgggctcctatcagcccgacttccgtcagaacttctgcagccgctgtccaggaaacacaagcacagactttgatggctctaccagtgtggcccaatgcaagaatcgtcagtgtggtgg

SEQ ID NO: 399136 - DNA, 120 bp, Artificial Sequence
  ENSG00000146197_24 (sequence is synthesized)
ggagctgggtgagttcactggctatattgagtcccccaactacccgggcaactacccagctggtgtggagtgcatctggaacatcaaccccccacccaagcgcaagatccttatcgtggt

SEQ ID NO: 399137 - DNA, 120 bp, Artificial Sequence
  ENSG00000146197_25 (sequence is synthesized)
accagagatcttcctgccatctgaggatgagtgtggggacgtcctcgtcatgagaaagaactcatccccatcctccattaccacttatgagacctgccagacctacgagcgtcccattgc

SEQ ID NO: 399138 - DNA, 120 bp, Artificial Sequence
  ENSG00000146197_26 (sequence is synthesized)
cttcactgcccgttccaggaagctctggatcaacttcaagacaagcgaggccaacagcgcccgtggcttccagattccctatgttacctatgatgaggactatgagcagctggtagaaga

SEQ ID NO: 399139 - DNA, 120 bp, Artificial Sequence
  ENSG00000146197_27 (sequence is synthesized)
cattgtgcgagatggccggctctatgcctctgaaaaccaccaggagattttaaaggacaagaagctcatcaaggccttctttgaggtgctagcccacccccagaactacttcaagtacac

SEQ ID NO: 399140 - DNA, 120 bp, Artificial Sequence
  ENSG00000146197_28 (sequence is synthesized)
agagaaacacaaggagatgctgccaaaatccttcatcaagctgctccgctccaaagtttccagcttcctgaggccctacaaatagtaaccctaggctcagagacccaattttttaagccc

SEQ ID NO: 399141 - DNA, 120 bp, Artificial Sequence
  ENSG00000146197_29 (sequence is synthesized)
ccagactccttagccctcagagccggcagccccctaccctcagacaaggaactctctcctctctttttggagggaaaaaaaaaatatcactacacaaaccaggcactctccctttctgtc

SEQ ID NO: 399142 - DNA, 120 bp, Artificial Sequence
  ENSG00000146197_30 (sequence is synthesized)
tttctagtttcctttccttgtctctctctgcctgcctctctactgttcccccttttctaacacactacctagaaaagccattcagtactggctctagtccccgtgagatgtaaagaaaca

SEQ ID NO: 399143 - DNA, 120 bp, Artificial Sequence
  ENSG00000146197_31 (sequence is synthesized)
gtacagccccttccactgcccattttaccagctcacattcccgaccccatcagcttggaagggtgctagaggcccatcaaggaagtgggtctggtgggaaacggggaggggaaagaaggg

SEQ ID NO: 399144 - DNA, 120 bp, Artificial Sequence
  ENSG00000146197_32 (sequence is synthesized)
gtgccttgctagtcaggggccaaaatgtcccctggctctgctccctagggtgattctaacagcccagggtcctgccaaagaagcctttgatttacaggcttaatgccagcaccagtcctc

SEQ ID NO: 399145 - DNA, 120 bp, Artificial Sequence
  ENSG00000146197_33 (sequence is synthesized)
tggggcacatggtttgagctctggacttcccacatggccagctttcttgtctatacagatcctctctttctttccctacgtctgcctggggtctactccataagggtttacaaatggccc

SEQ ID NO: 399146 - DNA, 120 bp, Artificial Sequence
  ENSG00000146197_34 (sequence is synthesized)
acaacactgagttagtggacaccggctaaatgaggaagagcagcaggcattgtcatggtgaatgccccgctgtagctccctgagagaaagactgtaactctgcaggacagaaacaaggtt

SEQ ID NO: 399147 - DNA, 120 bp, Artificial Sequence
  ENSG00000146197_35 (sequence is synthesized)
ttaaagcattgccaaaaaaaagaaaacagaaagaaaaaatgtatcatctaaaggactagacacagaacaattggaagtcaacttcaaacactaatcccttttcttgtcttccctggccca

SEQ ID NO: 399148 - DNA, 120 bp, Artificial Sequence
  ENSG00000146197_36 (sequence is synthesized)
gccacctcctcagccccatgtgatgctccctgggggagccctactccccttgctacatgttgtccttaaacatggttattgacctgaagccagcctaggccttgccctacagttgttttt

SEQ ID NO: 399149 - DNA, 120 bp, Artificial Sequence
  ENSG00000146197_37 (sequence is synthesized)
cccttgtagccccagctggcttgtgggcttcaccaaagaggaccccactctgaagccagcctggagccacctacctctggcctcaggctgtgggcagcaaaaggaatgtgtgtgcacttg

SEQ ID NO: 399150 - DNA, 120 bp, Artificial Sequence
  ENSG00000146197_38 (sequence is synthesized)
gcgagcctcctgcccaccctgtccacacctaataagtgcaatcattttgagtctttctatgttgtctagacggaggggtttttgttttctgggtttgttttttgtttttgtttcttcttc

SEQ ID NO: 399151 - DNA, 120 bp, Artificial Sequence
  ENSG00000146197_39 (sequence is synthesized)
ctctattagcaaaaccctatttatagctgcccaagagaaaagagtgtatgtttggagtggaagaaaatcggttttgaatctcatgaaccttgagtgctggagcatctgatctgtctctat

SEQ ID NO: 399152 - DNA, 120 bp, Artificial Sequence
  ENSG00000146197_40 (sequence is synthesized)
gccaccactggccacctagagcccttggctgtggtaatccagggtaattgcgcagaggcatctgatgtgtaggaaagtaattctggggatttgatggagcagaaaggagagagacctatg

SEQ ID NO: 399153 - DNA, 120 bp, Artificial Sequence
  ENSG00000146197_41 (sequence is synthesized)
tttgctaaaccaatcttgctatccctatgcctctccatggagtcagtgtggacctcatgattatagaggccaatggaactggtcagtgattctctaccccaagtagggaaaacctccatc

SEQ ID NO: 399154 - DNA, 120 bp, Artificial Sequence
  ENSG00000146197_42 (sequence is synthesized)
ttttccctgtcttcatcctgttatcccctggtgtacacatggaagaggaccaggacataccacctggggatgggctgactcagggtcccgaggccagagacaaagctgtgggagccaaga

SEQ ID NO: 399155 - DNA, 120 bp, Artificial Sequence
  ENSG00000146197_43 (sequence is synthesized)
ataagacagaaggcatcagatatttgcctggctctggtcacttccctttgaagttgacttcaagcttagcttcctcaactactgtttttcagaaggaagaaagaatcaaatggaagaaga

SEQ ID NO: 399156 - DNA, 120 bp, Artificial Sequence
  ENSG00000146197_44 (sequence is synthesized)
atcaagtccatgcccaagcccaaagcctgcacacattctgcccttaatccaagtgttgcctataaaattattttctgttttctcactctagttcccccaaagctgtagtcccaatcaatc

SEQ ID NO: 399157 - DNA, 120 bp, Artificial Sequence
  ENSG00000146197_45 (sequence is synthesized)
cttttttttttttttttctttttaactctcctggtaactcacagaacagctcaggttcatttctaggtgactgtcctaggctactgctcccccaggagactcaacactaaataaaggagt

SEQ ID NO: 399158 - DNA, 120 bp, Artificial Sequence
  ENSG00000146197_46 (sequence is synthesized)
cccccaggagactcaacactaaataaaggagtctgactccctgccctcccatcagtagcattcatcagccaaaacggccatagcagtaggtagccaatgacacagctagattccctgaca

SEQ ID NO: 399159 - DNA, 120 bp, Artificial Sequence
  ENSG00000146197_47 (sequence is synthesized)
accattagccaacatcatggtccttgtgggtagagtgtctggctacctttgtctttctgggtcaaggagggccactgtaaagatgcaaaatggctgcttccaaacaagggaaatggtcat

SEQ ID NO: 399160 - DNA, 120 bp, Artificial Sequence
  ENSG00000146197_48 (sequence is synthesized)
ttagtatgagtgtctctgtacttcccaggaagcaccatgaaaactgctttaatcaactctgactatcctaattctccaccagaagctaggataactttctttctttctttcttttttttt

SEQ ID NO: 399161 - DNA, 120 bp, Artificial Sequence
  ENSG00000146197_49 (sequence is synthesized)
ggcatgagccaccgcgcccagcctaggataactttctgattcctctctgccagccgttttgcgtctcttggaaagccaaacggtgaccatgcttcttaatttatgccttcagggtctggc

SEQ ID NO: 399162 - DNA, 120 bp, Artificial Sequence
  ENSG00000146197_50 (sequence is synthesized)
ttcttaatttatgccttcagggtctggcttctcctttctcccttcctttcctgtcacaccatgcatacatacatacaaatacacatccttcaaccatttattccatggcttatgagacct

SEQ ID NO: 399163 - DNA, 120 bp, Artificial Sequence
  ENSG00000146197_51 (sequence is synthesized)
gcaaatgagttccacagtacggaaggcatagaccactaggcttcttaattgatgtcaaggcagatcttggtgagcaggtaaaaacctgctattgtccaccaagtttaatttaggtcctcc

SEQ ID NO: 399164 - DNA, 120 bp, Artificial Sequence
  ENSG00000146197_52 (sequence is synthesized)
aagttggagggttaagaacccaggcaaagctgctgctgaatctatggaggaggctggccctgggacatcaaactaggggttaactggattgaatgaggagtcaacgctcagggacattct

SEQ ID NO: 399165 - DNA, 120 bp, Artificial Sequence
  ENSG00000146197_53 (sequence is synthesized)
aggtctttacaggtcagacagaagagaggtttttaccattggagggaaatggaaagatggtataaataggatcccttcatgaagcaacccagaggcctctctgcagcgtgtagggtgtgg

SEQ ID NO: 399166 - DNA, 120 bp, Artificial Sequence
  ENSG00000146197_54 (sequence is synthesized)
ggcgacagtattgtggggcttccattcatcttagtacaaaacctcacctgctctgagcctggaaatgggagggcttcacgcaccaagtaatgcacaccagaaaggcacttatatcctcag

SEQ ID NO: 399167 - DNA, 120 bp, Artificial Sequence
  ENSG00000146197_55 (sequence is synthesized)
caacatggcagttcctctttacttctctgcctccctctttctatattatcaggccatgcctattcctacaacctgagacaactcttggagtcagaagaaaactgaccagatcctggatct

SEQ ID NO: 399168 - DNA, 120 bp, Artificial Sequence
  ENSG00000146197_56 (sequence is synthesized)
gagctgcctgctccaggcctagaaatccccaaaggctggcactgagctgtgactgctttaacagcccccaagatttggtcagtttgaggtggtggagactcagatttgttgctgaaagtt

SEQ ID NO: 399169 - DNA, 120 bp, Artificial Sequence
  ENSG00000146197_57 (sequence is synthesized)
cagtaacacagtcctggtctttggccctagagaaactttttatatgagaagtgttctctatatacatgtttgaggtgactctggaatggattatgaggtcatatctcaaaatgtcagaaa

SEQ ID NO: 399170 - DNA, 120 bp, Artificial Sequence
  ENSG00000146197_58 (sequence is synthesized)
acgttatagagcactcgaacttttgtatttgctgcttaacctcaatattacagccacaaacaaggggtaccaagacaaagtataactgagcataagcagaaaatgttaaccctccaggtt

SEQ ID NO: 399171 - DNA, 120 bp, Artificial Sequence
  ENSG00000146197_59 (sequence is synthesized)
tctttcttaagcacaataaaagtgggagcgaacaacacaaggatatttttacatttgacccgtctcaaaagtagcacaccctatccttgtgccattatttgtacaaggaaatatatgatt

SEQ ID NO: 399172 - DNA, 120 bp, Artificial Sequence
  ENSG00000146197_60 (sequence is synthesized)
agaaggaatagaacccccagttgtcatcagcttttttagacaccacaggttgtagcagtttgaacaaactgaaaactttatacttctgtgtgagctgaactcaagtttcagaataatcat

SEQ ID NO: 399173 - DNA, 120 bp, Artificial Sequence
  ENSG00000146197_61 (sequence is synthesized)
cgccatgtgggaggctttttgttaaatgcagaagaaatttcaaaatattgtatttatatctgccttccactgctgccaatttagtaagcatctcctatacaatcgacaataaacagcaaa

SEQ ID NO: 399174 - DNA, 120 bp, Artificial Sequence
  ENSG00000146197_62 (sequence is synthesized)
tgatgcagttcatagagtattttgcacttggggaaaaatatgtatctgaattgtaaaaagaaatgtttggattttgtatgtcttttttattattattaaaatactaaatgaaactcctca

SEQ ID NO: 399175 - DNA, 120 bp, Artificial Sequence
  ENSG00000146205_0 (sequence is synthesized)
cgcggggggcgcgttccgagggctgagggcggacggtggcggagagcccggccgtgaccccctccccgcagtgctgcagttcggcttcgtcaccatcttcgtggccgcctgtccgctcgc

SEQ ID NO: 399176 - DNA, 120 bp, Artificial Sequence
  ENSG00000146205_1 (sequence is synthesized)
gccgctcttcgccctgctcaacaactgggtggagatccgcttggacgcgcgcaagttcgtctgcgagtaccggcgcccggtggccgagcgcgcccaggacatcggcatctggttccacat

SEQ ID NO: 399177 - DNA, 120 bp, Artificial Sequence
  ENSG00000146205_2 (sequence is synthesized)
cgcctactaccggtggacccgcgcccacgacctgcgcggcttcctcaacttcacgctggcgcgagccccgtcctccttcgccgccgcgcacaaccgcacgtgcaggtatcgggctttccg

SEQ ID NO: 399178 - DNA, 120 bp, Artificial Sequence
  ENSG00000146205_3 (sequence is synthesized)
ggatgacgatggacattattcccagacctactggaatcttcttgccatccgcctggccttcgtcattgtgtttgagcatgtggttttctccgttggccgcctcctggacctcctggtgcc

SEQ ID NO: 399179 - DNA, 120 bp, Artificial Sequence
  ENSG00000146205_4 (sequence is synthesized)
aaagatagatcctgctccaggagccgggaagccttgccctggccagctgtgctgggcacctcccctgcctgcttcctggcccacttgcaggcaaggtgagggcatgcgaatggctgccac

SEQ ID NO: 399180 - DNA, 120 bp, Artificial Sequence
  ENSG00000146205_5 (sequence is synthesized)
tgcctgggcggggctccaagggccacccctccccaccctctgtcccgcagtgaggacgggactctactgccgagaccaggctcacgctgagaggtgggccatgacctccgagacctcttc

SEQ ID NO: 399181 - DNA, 120 bp, Artificial Sequence
  ENSG00000146205_6 (sequence is synthesized)
cggaagccactgtgccaggagcaggatgctgcggcgacgggcccaggaagaggacagcaccgtcctgatcgatgtgagcccccctgaggcagagaagaggggctcttacgggagcacagc

SEQ ID NO: 399182 - DNA, 120 bp, Artificial Sequence
  ENSG00000146205_7 (sequence is synthesized)
tgccaagccccggatcgacttcgtcctcgtttgggaggaggacctgaagctagacaggcagcaggacagtgccgcccgggacagaacagacatgcacaggacctggcgggagacttttct

SEQ ID NO: 399183 - DNA, 120 bp, Artificial Sequence
  ENSG00000146205_8 (sequence is synthesized)
ggataatcttcgtgcggctgggctgtgtgtagaccaggtacgtggaggctgtcatgggcagggccctaggccctgcatccactcagtgacccatgaccttgccgcatgaggcctgagggc

SEQ ID NO: 399184 - DNA, 120 bp, Artificial Sequence
  ENSG00000146205_9 (sequence is synthesized)
atggtgtccagagtcccagagcagatcaggccccaaagtcctgctggaccccccagccaccgtgagctcctccgtgtggctagggagctgctgtccagaggcggaggtaaacattgatcc

SEQ ID NO: 399185 - DNA, 120 bp, Artificial Sequence
  ENSG00000146205_10 (sequence is synthesized)
ctcctgcacactcagctctctcatggaagtcggagccctcagggtcacctgaaaactctgacactacctttgccattcacctgtcccgtctccaacattaaagcttttgggtaggcgtgt

SEQ ID NO: 399186 - DNA, 120 bp, Artificial Sequence
  ENSG00000146205_11 (sequence is synthesized)
tgctggggccgactcccaaacggggctgtcgaggcccggttggctttcagaggcgtatccatgggagtaggtgtcatgtatcaaataggagattcaaagtcagctgttaccacggctaca

SEQ ID NO: 399187 - DNA, 120 bp, Artificial Sequence
  ENSG00000146205_12 (sequence is synthesized)
acatgcaccctcaggctctcacggagccctgggtgcctacagcaggacgtccaggacgggaacaccacagtgcactacgccctcctcagcgcctcctgggctgtgctctgctactacgcc

SEQ ID NO: 399188 - DNA, 120 bp, Artificial Sequence
  ENSG00000146205_13 (sequence is synthesized)
gaagacctgcgcctgaagctgcccttgcaggagttacccaaccaggcctccaactggtcggccggcctgctggcatggctgggcatccccaacgtcctgctggaggttgtgccagacgta

SEQ ID NO: 399189 - DNA, 120 bp, Artificial Sequence
  ENSG00000146205_14 (sequence is synthesized)
acgtggtgaggggtcggtgccgtcacttcctgctgtgtcatcttggtcaaatcagagctcttctctgcacctgcgttttccctgcctggcctcatccctgggttgtggtgtggacattgt

SEQ ID NO: 399190 - DNA, 120 bp, Artificial Sequence
  ENSG00000146205_15 (sequence is synthesized)
gggtgtctccacaggagccccagggccacgaaagctggggtggcctctgccccttctggggttccttttcctgcacagctgctttctgactccacccacagctgggagcaggtgccggag

SEQ ID NO: 399191 - DNA, 120 bp, Artificial Sequence
  ENSG00000146205_16 (sequence is synthesized)
ccccggcctgcctggccctgtgaaggccactctgggcgtttgggtgggcgtgagtgccttcctctgctcccagcatgtggttttctccgttggccgcctcctggacctcctggtgcctga

SEQ ID NO: 399192 - DNA, 120 bp, Artificial Sequence
  ENSG00000146205_17 (sequence is synthesized)
catcccagagtctgtggagatcaaagtgaagcgggagtactacctggctaagcaggcactggctgagaatgaggtgaactgtacagcccagtctcggccctccccccagccctctcccta

SEQ ID NO: 399193 - DNA, 120 bp, Artificial Sequence
  ENSG00000146205_18 (sequence is synthesized)
tccttgtcagtggctgctctacctccggacactgagtcacatccctcttcctcttgctgcccttttttggggacaggttctttttggaacgaacggaacaaaggatgagcagcccgaggg

SEQ ID NO: 399194 - DNA, 120 bp, Artificial Sequence
  ENSG00000146205_19 (sequence is synthesized)
ctcagaggcaagtctgggagcagccaggcccctgccccgtgcactccctgaggtcacagggccctgcccagccgcccactgtgcctcgtggccatggcctgctcctggccctagtctgac

SEQ ID NO: 399195 - DNA, 120 bp, Artificial Sequence
  ENSG00000146205_20 (sequence is synthesized)
ccactggacacccttcacggttcccaaggccagccagctgcagcagtgacgcctggaaggacatctggtggtccttaggggagtggcccctcctgagccctgcgagcagcgtccttttcc

SEQ ID NO: 399196 - DNA, 120 bp, Artificial Sequence
  ENSG00000146205_21 (sequence is synthesized)
tcttccctcaggcagcggctgtgtgaaccgctggctgctgttgtgcctcatctctgggcacattgcctgcttccccccagcgccggcttctctcctcagagcgcctgtcactccatcccc

SEQ ID NO: 399197 - DNA, 120 bp, Artificial Sequence
  ENSG00000146205_22 (sequence is synthesized)
ggcagggagggaccgtcagctcacaaggccctctttgtttcctgctcccagacataagcccaaggggcccctgcacccaagggaccctgtccctcggtggcctccccaggcccctggaca

SEQ ID NO: 399198 - DNA, 120 bp, Artificial Sequence
  ENSG00000146205_23 (sequence is synthesized)
cgacagttctcctcaggcaggtgggctttgtggtcctcgccgcccctggccacatcgccctctcctcttacacctggtgaccttcgaatgtttcagagcgcagggccgttctccctcgtg

SEQ ID NO: 399199 - DNA, 120 bp, Artificial Sequence
  ENSG00000146205_24 (sequence is synthesized)
tcctctggacccacccgccccttcctgccctgtttgcgcagggacatcacccacatgccccagctctcggaccctgcagctctgtgtcccaggccacagcaaaggtctgttgaacccctc

SEQ ID NO: 399200 - DNA, 120 bp, Artificial Sequence
  ENSG00000146205_25 (sequence is synthesized)
cctccattcccagttatctgggtcctctggattcttctgtttcttgaatcaggctctgctttccccctagccactacaggcagcctctgacagtgccgctttacttgcattctgcagcaa

SEQ ID NO: 399201 - DNA, 120 bp, Artificial Sequence
  ENSG00000146205_26 (sequence is synthesized)
ttacatgtgtccttttgatccttgcccaacttccctccctctcccagctcctggcccctggcccagggcccctcttgctgtttttacctctgttccttggggcctagtacccagcaagca

SEQ ID NO: 399202 - DNA, 120 bp, Artificial Sequence
  ENSG00000146205_27 (sequence is synthesized)
cccaaatgggggaggttttgggatgagaggaggaaacgtgtatacctgtaacatctggtggctcttcccccagaagtttgtgttcatacataattgttttccacgctggatcataatgtg

SEQ ID NO: 399203 - DNA, 120 bp, Artificial Sequence
  ENSG00000146205_28 (sequence is synthesized)
acgtgcagttctgccctgtgctggggagccacatgaagcttcccctggctaacttgctaccccgcagcaatcccagtgtggccgtctgcttgctaaaaaatggatctgtgctcatctgta

SEQ ID NO: 399204 - DNA, 60 bp, Artificial Sequence
  ENSG00000146205_29 (sequence is synthesized)
ttatacaaggtcaggagttcgggactagcctgtccaacatggtgaaaccctgtctttact

SEQ ID NO: 399205 - DNA, 120 bp, Artificial Sequence
  ENSG00000146205_30 (sequence is synthesized)
gggagtgacaaccaggacaccttcttcacaagcaccaagaggcaccaaattctgtttgagatcctggccaagaccccgtatggccacgagaagaaaaacctgcttgggatccaccagctg

SEQ ID NO: 399206 - DNA, 120 bp, Artificial Sequence
  ENSG00000146205_31 (sequence is synthesized)
ctggcagagggtgtcctcagtgccgccttccccctgcatgacggccccttcaagacgcccccagagggcccgcaggctccacgcctcaaccagcgccaagtccttttccagcactgggcg

SEQ ID NO: 399207 - DNA, 120 bp, Artificial Sequence
  ENSG00000146205_32 (sequence is synthesized)
cgctggggcaagtggaacaagtaccagcccctggaccacgtgcgcaggtacttcggggagaaggtggccctctacttcgcctggctcgggttttacacaggctggctcctgccagcggca

SEQ ID NO: 399208 - DNA, 120 bp, Artificial Sequence
  ENSG00000146205_33 (sequence is synthesized)
gtggtgggcacactggtgttcctggtgggctgcttcctggtgttctcagacatacccacgcaggaactgtgtggcagcaaggacagcttcgagatgtgcccactttgcctcgactgccct

SEQ ID NO: 399209 - DNA, 120 bp, Artificial Sequence
  ENSG00000146205_34 (sequence is synthesized)
ttctggctgctctccagcgcctgtgccctggcccaggccggccggctgttcgaccacggcggcaccgtgttcttcagcttgttcatggcactgtgggccgtgctgctgctggagtactgg

SEQ ID NO: 399210 - DNA, 120 bp, Artificial Sequence
  ENSG00000146205_35 (sequence is synthesized)
gccacgctggcctaccgctgggactgctctgactacgaggacactgaggagaggcctcggccccagtttgccgcctcagcccccatgacagccccgaaccccatcacgggtgaggacgag

SEQ ID NO: 399211 - DNA, 120 bp, Artificial Sequence
  ENSG00000146205_36 (sequence is synthesized)
ccctacttccctgagaggagccgcgcgcgccgcatgctggccggctctgtggtgatcgtggtgatggtggccgtggtggtcatgtgcctcgtgtctatcatcctgtaccgtgccatcatg

SEQ ID NO: 399212 - DNA, 120 bp, Artificial Sequence
  ENSG00000146205_37 (sequence is synthesized)
gccatcgtggtgtccaggtcgggcaacacccttctcgcagcctgggcctctcgcatcgccagcctcacggggtctgtagtgaacctcgtcttcatcctcatcctctccaagatctatgta

SEQ ID NO: 399213 - DNA, 120 bp, Artificial Sequence
  ENSG00000146205_38 (sequence is synthesized)
tccctggcccacgtcctgacacgatgggaaatgcaccgcacccagaccaagttcgaggacgccttcaccctcaaggtgttcatcttccagttcgtcaacttctactcctcacccgtctac

SEQ ID NO: 399214 - DNA, 120 bp, Artificial Sequence
  ENSG00000146205_39 (sequence is synthesized)
attgccttcttcaagggcaggtttgtgggatacccaggcaactaccacaccttgtttggagtccgcaatgaggagtgcgcggctggaggctgcctgatcgagctggcacaggagctcctg

SEQ ID NO: 399215 - DNA, 120 bp, Artificial Sequence
  ENSG00000146205_40 (sequence is synthesized)
gtcatcatggtgggcaagcaggtcatcaacaacatgcaggaggtcctcatcccgaagctaaagggctggtggcagaagttccggcttcgctccaagaagaggaaggcgggagcttctgca

SEQ ID NO: 399216 - DNA, 120 bp, Artificial Sequence
  ENSG00000146205_41 (sequence is synthesized)
ggggctagccaggggccctgggaggacgactatgagcttgtgccctgtgagggtctgtttgacgagtacctggaaatggtgctgcagttcggcttcgtcaccatcttcgtggccgcctgt

SEQ ID NO: 399217 - DNA, 120 bp, Artificial Sequence
  ENSG00000146205_42 (sequence is synthesized)
tcttccagttcgtcaacttctactcctcacccgtctacattgccttcttcaagggcaggtttgtgggatacccaggcaactaccacaccttgtttggagtccgcaatgaggaggtgagtg

SEQ ID NO: 399218 - DNA, 120 bp, Artificial Sequence
  ENSG00000146205_43 (sequence is synthesized)
ctgaggcccgggactgggggatgagctgtgtgcttcctctcacttccattcttccattcgagctttgatttgcagcaattcctcccaccaccggctatttccatcgcccagccagggcca

SEQ ID NO: 399219 - DNA, 120 bp, Artificial Sequence
  ENSG00000146205_44 (sequence is synthesized)
gccagctgtgcagctgaccactcagggctcccagcctctcttcaccacttattctgacccccgatatgccccattcagaaccacaccaaaacactccaggccgggcacagtggctcacgc

SEQ ID NO: 399220 - DNA, 120 bp, Artificial Sequence
  ENSG00000146215_0 (sequence is synthesized)
gagctatgagctggacctgtccgcgttgccagcaacctgttttcttcgctgagaaggtgagctccctgggcaagaactggcaccgcttctgcctgaaatgtgagcgctgccacagcatcc

SEQ ID NO: 399221 - DNA, 120 bp, Artificial Sequence
  ENSG00000146215_1 (sequence is synthesized)
tgtcccctggcgggcatgcagagcacaatgggaggccatactgccacaagccatgctatggggctctctttggacccaggggggtgaacattggtggtgtaggctcctacttgtacaatc

SEQ ID NO: 399222 - DNA, 120 bp, Artificial Sequence
  ENSG00000146215_2 (sequence is synthesized)
cccccactcccagccctggctgcaccactcctctcagccccagcagcttcagccctcccaggccaaggactggcctcccccaaggcaagaaaagccctccccatatgaagacattcactg

SEQ ID NO: 399223 - DNA, 120 bp, Artificial Sequence
  ENSG00000146215_3 (sequence is synthesized)
gggagacctcgctgtgccctggctgtggggagcccgtctattttgctgagaaggtgatgtcattaggcagaaattggcaccgaccgtgtctgaggtgccagcgttgccacaagaccctga

SEQ ID NO: 399224 - DNA, 120 bp, Artificial Sequence
  ENSG00000146215_4 (sequence is synthesized)
gctgggagtcatgctgagcatgatggagtcccctactgccacgtcccctgctacggctacctgtttggccccaaaggtgtgaacattggcgatgtgggctgctacatctatgacccagtg

SEQ ID NO: 399225 - DNA, 120 bp, Artificial Sequence
  ENSG00000146215_5 (sequence is synthesized)
aagataaaattcaaatgagacgctcacaaaaaaggtcaccctaactcaggcctcccatcatgcccctcatggtccaatggaagctacaaaaatctccagtcccatgggggttggggaagg

SEQ ID NO: 399226 - DNA, 120 bp, Artificial Sequence
  ENSG00000146215_6 (sequence is synthesized)
tgggatcttgggggcctgggcctaggctccatggtaggccagagagtctagactttctctgccaattttttccctttcccatttctatctggttagggaacagcccgttttgaagggtat

SEQ ID NO: 399227 - DNA, 120 bp, Artificial Sequence
  ENSG00000146215_7 (sequence is synthesized)
cctcctcctggccatcacaacccctttccccagcacattctggagcttcaaggtactcataaaacttgtgtttattgaatttcagcctctgtggcttcttcaataaaatgttggctccca

SEQ ID NO: 399228 - DNA, 120 bp, Artificial Sequence
  ENSG00000146215_8 (sequence is synthesized)
gctggacctgtccgcgttgccagcaacctgttttcttcggtgaggcccgggctgcggagggggagaagatggggcgaatgggagccgctggattccctgaggacgcggagggctagccac

SEQ ID NO: 399229 - DNA, 120 bp, Artificial Sequence
  ENSG00000146215_9 (sequence is synthesized)
agtgtagtcccagacacccttttcacctgcagcggctggtagtctccgcaccacccgctcccactcgggtcttctcccttcctctgagagctctgtggggagtgtgaaaccggagcggga

SEQ ID NO: 399230 - DNA, 120 bp, Artificial Sequence
  ENSG00000146215_10 (sequence is synthesized)
tggagctggcctcctggagacactcatctccaggaagcagggcaggccaacctaattccctagagggccgaagagggaaaggaggggccctatgcttggacaggctcctcgcagctcggt

SEQ ID NO: 399231 - DNA, 120 bp, Artificial Sequence
  ENSG00000146215_11 (sequence is synthesized)
aggcaagaaaagtaaggctgggctcagctcctcccagtcctcctcccgacccttccccaagctggagcggaggttgggccaggtggcagtctcctatccagccctctgcttcacattctc

SEQ ID NO: 399232 - DNA, 120 bp, Artificial Sequence
  ENSG00000146215_12 (sequence is synthesized)
gttaattgggcagatggcattatcccctctcctcgtgtgttacaggtgaggaaagtgagatccagacagggcaaatgactgtccatccacaaagctagtcagaggcaaagctggccagga

SEQ ID NO: 399233 - DNA, 120 bp, Artificial Sequence
  ENSG00000146215_13 (sequence is synthesized)
acttaggtctgtcccaggccagggccatggaaggaatgatctaaaggagaggagtcattgggataaggccagcctctcatattcttcaacttttctcctctggtccctgttctttccctc

SEQ ID NO: 399234 - DNA, 120 bp, Artificial Sequence
  ENSG00000146215_14 (sequence is synthesized)
cattccctgaagtaggcaatgacactgtgctccccaacacctgacacccgtgctgtggccagctcctatatcagctcaagtttcctgaggattgagttgctaacagggttgggatggtgg

SEQ ID NO: 399235 - DNA, 120 bp, Artificial Sequence
  ENSG00000146215_15 (sequence is synthesized)
gtccctaatacacatagggatggggcaggaggtggagtcagagggggctcagctctgggcctgtagaaggcagactcttgggcgcctgggtggggcactctggaatgagcatggcttttg

SEQ ID NO: 399236 - DNA, 120 bp, Artificial Sequence
  ENSG00000146215_16 (sequence is synthesized)
gagcccgtctattttgctgagaaggtgatgtcattaggcagaaattggcaccgaccgtgtctgaggtgccagcgttgccacaagaccctgactgctgggagtcatgctgaggtgtgaaca

SEQ ID NO: 399237 - DNA, 120 bp, Artificial Sequence
  ENSG00000146215_17 (sequence is synthesized)
tttggccccaaagccctctaggtcctgcctgtttcttgcctgcctcacccagtggcatcacgatgatggtaaaaccagccagggctgagccagtaagggtgcgggtgatggcaaacatta

SEQ ID NO: 399238 - DNA, 120 bp, Artificial Sequence
  ENSG00000146215_18 (sequence is synthesized)
gggcagccccatcccagacactgggatggcatgtacatgcctgaagtatggcatgtacatggtctgtgggtatgtgtggacaacttcccctgtggttaagcataccctggcccccccacc

SEQ ID NO: 399239 - DNA, 120 bp, Artificial Sequence
  ENSG00000146215_19 (sequence is synthesized)
aagttccctctaggcctgaaccctgcaccacagacccagggcctttggtgatagggctctctctctcaggtgtgaacattggcgatgtgggctgctacatctatgacccagtgaagataa

SEQ ID NO: 399240 - DNA, 80 bp, Artificial Sequence
  ENSG00000146216_0 (sequence is synthesized)
attgtgggcagctccccgctctgccgctgccgccgccgtcgcccaaggaggatcggggccgggccgggccgggatgatcc

SEQ ID NO: 399241 - DNA, 80 bp, Artificial Sequence
  ENSG00000146216_1 (sequence is synthesized)
gggatgcgccgccccgagctgctgcctccgccgccgccgcagccgcagccgcagcgggcacagagcaggtagatggcccc

SEQ ID NO: 399242 - DNA, 120 bp, Artificial Sequence
  ENSG00000146216_2 (sequence is synthesized)
ctcagggcaggcccggcggacacccctccctctggctggcggatgcagtgcctagcggccgcccttaaggacgaaaccaacatgagtgggggaggggagcaggccgacatcctgccggcc

SEQ ID NO: 399243 - DNA, 120 bp, Artificial Sequence
  ENSG00000146216_3 (sequence is synthesized)
aactacgtggtcaaggatcgctggaaggtgctgaaaaagatcgggggcgggggctttggtgagatctacgaggccatggacctgctgaccagggagaatgtggccctcaaggtggagtca

SEQ ID NO: 399244 - DNA, 120 bp, Artificial Sequence
  ENSG00000146216_4 (sequence is synthesized)
gcccagcagcccaagcaggtcctcaagatggaggtggccgtgctcaagaagttgcaagggaaggaccatgtgtgcaggttcattggctgtggcaggaacgagaagtttaactatgtagtg

SEQ ID NO: 399245 - DNA, 120 bp, Artificial Sequence
  ENSG00000146216_5 (sequence is synthesized)
atgcagctccagggccggaacctggccgacctgcgccgtagccagccgcgaggcaccttcacgctgagcaccacattgcggctgggcaagcagatcttggagtccatcgaggccatccac

SEQ ID NO: 399246 - DNA, 120 bp, Artificial Sequence
  ENSG00000146216_6 (sequence is synthesized)
tctgtgggcttcctgcaccgtgacatcaagccttcaaactttgccatgggcaggctgccctccacctacaggaagtgctatatgctggacttcgggctggcccggcagtacaccaacacc

SEQ ID NO: 399247 - DNA, 120 bp, Artificial Sequence
  ENSG00000146216_7 (sequence is synthesized)
acgggggatgtgcggccccctcggaatgtggccgggtttcgaggaacggttcgctatgcctcagtcaatgcccacaagaaccgggagatgggccgccacgacgacctgtggtccctcttc

SEQ ID NO: 399248 - DNA, 120 bp, Artificial Sequence
  ENSG00000146216_8 (sequence is synthesized)
tacatgctggtggagtttgcagtgggccagctgccctggaggaagatcaaggacaaggaacaggtagggatgatcaaggagaagtatgagcaccggatgctgctgaagcacatgccgtca

SEQ ID NO: 399249 - DNA, 120 bp, Artificial Sequence
  ENSG00000146216_9 (sequence is synthesized)
gagttccacctcttcctggaccacattgccagcctcgactacttcaccaagcccgactaccagttgatcatgtcagtgtttgagaacagcatgaaggagaggggcattgccgagaatgag

SEQ ID NO: 399250 - DNA, 120 bp, Artificial Sequence
  ENSG00000146216_10 (sequence is synthesized)
gcctttgactgggagaaggcaggcaccgatgccctcctgtccacgagcacctctaccccgccccagcagaacacccggcagacggcagccatgtttggggtggtcaatgtgacgccagtg

SEQ ID NO: 399251 - DNA, 120 bp, Artificial Sequence
  ENSG00000146216_11 (sequence is synthesized)
cctggggacctgctccgggagaacaccgaggatgtgctacagggagagcacctgagtgaccaggagaatgcacccccaattctgcccgggaggccctctgaggggctgggccccagtccc

SEQ ID NO: 399252 - DNA, 120 bp, Artificial Sequence
  ENSG00000146216_12 (sequence is synthesized)
caccttgtcccccaccccgggggtcctgaggctgaagtctgggaggagacagatgtcaaccggaacaaactccggatcaacatcggcaaaagcccctgtgtggaggaggaacagagccga

SEQ ID NO: 399253 - DNA, 120 bp, Artificial Sequence
  ENSG00000146216_13 (sequence is synthesized)
ggcatgggggtccccagctccccagtgcgtgcccccccagactcccccacaaccccagtccgttctctgcgctaccggagggtgaacagccctgagtcagaaaggctgtccacggcggac

SEQ ID NO: 399254 - DNA, 120 bp, Artificial Sequence
  ENSG00000146216_14 (sequence is synthesized)
gggcgagtggagctacctgagaggaggtcacggatggatctgcctggctcgccctcgcgccaggcctgctcctctcagccagcccagatgctgtcagtggacacaggccacgctgaccga

SEQ ID NO: 399255 - DNA, 120 bp, Artificial Sequence
  ENSG00000146216_15 (sequence is synthesized)
caggccagtggccgcatggacgtgtcagcctctgtggagcaggaggccctgagcaacgccttccgctcggtgccgctggctgaggaggaggatttcgacagcaaagagtgggtcatcatc

SEQ ID NO: 399256 - DNA, 120 bp, Artificial Sequence
  ENSG00000146216_16 (sequence is synthesized)
gacaaggagacggagctcaaggacttccctccaggggctgagcccagcacatcgggcaccacggatgaggagcccgaggagctgcggccactgcccgaggagggcgaagagcggcggcgg

SEQ ID NO: 399257 - DNA, 120 bp, Artificial Sequence
  ENSG00000146216_17 (sequence is synthesized)
ctgggggcagagcccaccgtccggccccggggacgcagcatgcaggcgctggcggaggaggacctgcagcatttgccgccccagcccctgccaccccagctgagccagggcgatggccgt

SEQ ID NO: 399258 - DNA, 120 bp, Artificial Sequence
  ENSG00000146216_18 (sequence is synthesized)
tccgagacgtcacagccccccacgcctggcagcccttcccactcacccctgcactcgggaccccgccctcgacggagagagtcggaccccacaggcccacagagacaggtgttctccgtg

SEQ ID NO: 399259 - DNA, 120 bp, Artificial Sequence
  ENSG00000146216_19 (sequence is synthesized)
gcgcccccatttgaggtgaatggcctcccacgagctgtgcctctgagtctgccctaccaggacttcaaaagagacctctccgattaccgagaacgggcgcggttgctcaacagggtccgg

SEQ ID NO: 399260 - DNA, 120 bp, Artificial Sequence
  ENSG00000146216_20 (sequence is synthesized)
agggtgggcttctcgcacatgctgctcaccaccccccaggtcccactggctcctgttcagcctcaggctaatgggaaggaggaagaggaggaggaggaggaagatgaggaagaggaagaa

SEQ ID NO: 399261 - DNA, 89 bp, Artificial Sequence
  ENSG00000146216_21 (sequence is synthesized)
ggaagaggaggaggaggaggaagatgaggaagaggaagaagaggatgaggaagaagaagaggaggaagaggaagaggaggaggaactgc

SEQ ID NO: 399262 - DNA, 120 bp, Artificial Sequence
  ENSG00000146216_22 (sequence is synthesized)
ggctccagcagtgaggggagtgagaggagcactgaccggagccaggagggtgccccgtccacgctgctggcagacgatcagaaggagtccaggggccgggcctccatggccgatggggac

SEQ ID NO: 399263 - DNA, 120 bp, Artificial Sequence
  ENSG00000146216_23 (sequence is synthesized)
ctggagcctgaggagggctccaaaacgctggtgcttgtctctcctggcgacatgaagaagtcgcccgtcactgccgaactggcccccgaccccgacctgggcaccctggctgccctcact

SEQ ID NO: 399264 - DNA, 120 bp, Artificial Sequence
  ENSG00000146216_24 (sequence is synthesized)
cctcagcatgagcggccccagcccacgggcagccagctggacgtatctgagccaggcaccctgtcctctgtcctcaagtctgagcccaagcccccggggcctggggcagggctgggggcc

SEQ ID NO: 399265 - DNA, 120 bp, Artificial Sequence
  ENSG00000146216_25 (sequence is synthesized)
gggacagtgaccacaggggtcgggggcgtggcagtcacctcctcacccttcaccaaagttgagaggacctttgtgcacattgcggagaaaacccacctcaacgtcatgtcttccggtgga

SEQ ID NO: 399266 - DNA, 120 bp, Artificial Sequence
  ENSG00000146216_26 (sequence is synthesized)
caagccttgcggtctgaggagttcagcgctgggggcgagctgggtctggagctggcctctgatgggggcgctgtggaggagggggcccgagcgcccctggagaacggcctcgccctgtca

SEQ ID NO: 399267 - DNA, 120 bp, Artificial Sequence
  ENSG00000146216_27 (sequence is synthesized)
gggctgaatggggctgagatagagggctctgccctgtctggggccccccgggaaaccccctcagagatggccacaaactcactgcccaatggcccggcccttgcagacgggccagccccg

SEQ ID NO: 399268 - DNA, 120 bp, Artificial Sequence
  ENSG00000146216_28 (sequence is synthesized)
gtgtccccgctggagccaagccctgagaaagtggccaccatctcccccagacgccatgctatgccaggctctcgccccaggagccgtatccctgtcctgctctctgaggaggacacgggc

SEQ ID NO: 399269 - DNA, 120 bp, Artificial Sequence
  ENSG00000146216_29 (sequence is synthesized)
tcggccgcagcaggacctggcgcggctggtgatggagaagaggcagggccgcctgctgttgcggctggcctcaggggcctcgtcctcctccagtgaggagcagcgccgtgcctctgagac

SEQ ID NO: 399270 - DNA, 120 bp, Artificial Sequence
  ENSG00000146216_30 (sequence is synthesized)
cctctcaggcacgggctctgaggaggacacgcccgcctctgagccggcagcggccttgcccaggaagagcgggagggcagccgccaccaggagccggattccccgccccattggcctccg

SEQ ID NO: 399271 - DNA, 120 bp, Artificial Sequence
  ENSG00000146216_31 (sequence is synthesized)
catgcccatgcctgttgcagcccagcagcccgccagcagatcccatggcgcggccccagcattggacacagccatcaccagcaggctccagctgcagacgcccccagggtcggccactgc

SEQ ID NO: 399272 - DNA, 120 bp, Artificial Sequence
  ENSG00000146216_32 (sequence is synthesized)
cagctgcagacgcccccagggtcggccactgctgctgacctccgccccaaacaacctcctggccgcggcctgggcccagggcgagcccaagccggagccaggcccccagcgccgcgcagc

SEQ ID NO: 399273 - DNA, 80 bp, Artificial Sequence
  ENSG00000146216_33 (sequence is synthesized)
caatgccagcgcgtccccccggagccagtccctgtcccgcagagagagcccctccccctcgcaccaggcccggcccgggg

SEQ ID NO: 399274 - DNA, 120 bp, Artificial Sequence
  ENSG00000146216_34 (sequence is synthesized)
tgatggcaccccctcccccgggggctccaagaaaggacccagagggaaactccaggctcagcgcgcaacaaccaaaggccgggcaggaggcgcggagggccgggctggggccagataatg

SEQ ID NO: 399275 - DNA, 120 bp, Artificial Sequence
  ENSG00000146216_35 (sequence is synthesized)
ccgctgctctccgcggtcccccaccctcaccccggccccccacccgcagccggccacactggagcagctcccagcacagccttacgcgcccgacgcgcgccacccgcggccccagctttc

SEQ ID NO: 399276 - DNA, 120 bp, Artificial Sequence
  ENSG00000146216_36 (sequence is synthesized)
cgaggacgcgcgcgagcacacgcggcgccccgccaggccttagggcccgtgggggacgcggccccgcgccgcggggagggtctgcctccccttcctcgccctgtgtcctctcatcctccc

SEQ ID NO: 399277 - DNA, 120 bp, Artificial Sequence
  ENSG00000146216_37 (sequence is synthesized)
gtcctctcatcctcccgccgcccgtcaggccggccagcctcacatcagtctctccgccccggggaaggctcagccacttttcatcgaggactccacttctggggacgcctggttcgttcg

SEQ ID NO: 399278 - DNA, 120 bp, Artificial Sequence
  ENSG00000146216_38 (sequence is synthesized)
cccaccaggcctaggctacgctccatgctcccccagcaatctctgcctacacctcctgcggcgccttgccctcctccgacccctttccagccaaagtccccccaccccttcagagaagca

SEQ ID NO: 399279 - DNA, 120 bp, Artificial Sequence
  ENSG00000146216_39 (sequence is synthesized)
gcctcaaattccagaagtggaggctccagcctccccgcgagggtccagccccacagtcttctgggagccattgtggccagggacggcctctggactgccaggctgggttggggacccagg

SEQ ID NO: 399280 - DNA, 120 bp, Artificial Sequence
  ENSG00000146216_40 (sequence is synthesized)
gaacatcggtctactcaggtgtgagggggcaggtctgacctgccccaaagttggctccatcctggacaactcggtgagaggcagtgggcaagtgatcttggagatgggtgggcaggtgat

SEQ ID NO: 399281 - DNA, 120 bp, Artificial Sequence
  ENSG00000146216_41 (sequence is synthesized)
tctgtgggcaggggatgtgctcccctgcacctctggggtgcagaaacctcttgcctccagatttgggtggagcctctgtgggaaccataggaagtgtgtgggctgccttcctgggcaagt

SEQ ID NO: 399282 - DNA, 120 bp, Artificial Sequence
  ENSG00000146216_42 (sequence is synthesized)
atttcccagtgggaagttggagggggctttaacaaagttttactccctcccctgttcccctgatctagtgctcaggacccttcaccatcaggaattccttcctgtcatctaacctcagtc

SEQ ID NO: 399283 - DNA, 120 bp, Artificial Sequence
  ENSG00000146216_43 (sequence is synthesized)
ctgcctactgcagttccagccaacctgctctttcctgagttcaaagcaggtggagactggctggttaccatctttgcactggcccttcggagattcggggactcagttctggtggggtca

SEQ ID NO: 399284 - DNA, 120 bp, Artificial Sequence
  ENSG00000146216_44 (sequence is synthesized)
ccctccctgtcctcccgcctgtgggagggagggagggctggctcaggcatcgtctcccgcaatgggcagagagagcagagacaggtggaccaacagacagctggcccctggaggcagaaa

SEQ ID NO: 399285 - DNA, 120 bp, Artificial Sequence
  ENSG00000146216_45 (sequence is synthesized)
ggcccttctaacttccagattgtatgcttgagtgatgggtccccagcccaagcccactcttccctcagctcacccttcagcctgttccttcttgccctgaccccagcccgtgcagctgct

SEQ ID NO: 399286 - DNA, 120 bp, Artificial Sequence
  ENSG00000146216_46 (sequence is synthesized)
ctactccaggaatggatgtggggactcttcctgggttctggctcctgcatagctcaccccacctcatcatgagcctcaactgcctacatctggggcaagcagcacaccggctgcagatgg

SEQ ID NO: 399287 - DNA, 120 bp, Artificial Sequence
  ENSG00000146216_47 (sequence is synthesized)
gacagccagccctgcctatctggacaggcccctgcagcctctgtcccctggcctagcctctctgtccttccctgagtcacagagagcaagccaagacatccagggaaagaggaagaaagg

SEQ ID NO: 399288 - DNA, 120 bp, Artificial Sequence
  ENSG00000146216_48 (sequence is synthesized)
ccttagtgtgccccagcagtctggctgcgtccagccaccatcacccggaaggatgcccacaaggcagctgaccctgaaagcagcctccccctcatggagagtcagcagcttgggcagcca

SEQ ID NO: 399289 - DNA, 120 bp, Artificial Sequence
  ENSG00000146216_49 (sequence is synthesized)
cttccaggccagggtggtggcttctctgcagaccagctgaggggaggactcctgggtggacagcctttgacgtccaccccacgctgatgcagaagctcccagaacactcaggaaacttct

SEQ ID NO: 399290 - DNA, 120 bp, Artificial Sequence
  ENSG00000146216_50 (sequence is synthesized)
ccggacagagccctccttgtcaacttgaggccctcccaaggccctctactgccctctgggtccagcagagggagtggaggaagggccactgcctcccacctagagcttctccgaatgaca

SEQ ID NO: 399291 - DNA, 120 bp, Artificial Sequence
  ENSG00000146216_51 (sequence is synthesized)
atcagctcgtgccaggtggggaccaggatatgactcctggtgcccaggccctgggcctgctccttgccaccaaccgaaccgtgaatgtagggcccccagcctcacctctgccccaggacc

SEQ ID NO: 399292 - DNA, 120 bp, Artificial Sequence
  ENSG00000146216_52 (sequence is synthesized)
aacaacaccctggtttggagctgggaggaagaagggggcctgagagagccccaggtccattctacccccagcttcactcagcactggagctggcagagacgcaaaacccagtctgccctt

SEQ ID NO: 399293 - DNA, 120 bp, Artificial Sequence
  ENSG00000146216_53 (sequence is synthesized)
gggattccaaacctccctagggctcccaactgacctcaggcctctgagtcactgaatgtcaccaggagaggtgggggagggaaagtgggccagtggggagggggtcacctaggggactgc

SEQ ID NO: 399294 - DNA, 120 bp, Artificial Sequence
  ENSG00000146216_54 (sequence is synthesized)
ctctgtgcctctccccaggaagcatccagggcagaggaagccacatctcccggtgcccccaaccccagctgcagcctcctccccctgagcattcattctctccaccaggcctccaggtcc

SEQ ID NO: 399295 - DNA, 120 bp, Artificial Sequence
  ENSG00000146216_55 (sequence is synthesized)
tgagcccttcctctgtaaaagtgtcacaccacctccctcagcacttccccatcacaacaacctatgtcactgactcagatgcagggtctgctcaccccaacacatgccttccctccccag

SEQ ID NO: 399296 - DNA, 120 bp, Artificial Sequence
  ENSG00000146216_56 (sequence is synthesized)
ccacaccgtgcacgaagggggcacaggagaggagaggggctgtgccccaggctccccatttcccagctcctcacagaggcctggtttgctcagtcttctgaactccagggaccagccctg

SEQ ID NO: 399297 - DNA, 120 bp, Artificial Sequence
  ENSG00000146216_57 (sequence is synthesized)
gtgggcatggggtggggagcagggagttgcccttcccctccctcgggaagccacctaagaatgtttacatgccaaacagaatgtaacacccctccccaagcccttcccagtcactgcatg

SEQ ID NO: 399298 - DNA, 120 bp, Artificial Sequence
  ENSG00000146216_58 (sequence is synthesized)
gcctctgcccatcctgcacctgtccaccccaccccaacaccctggaagccactgtcaatgattagatcgggtctcggaagggaagtagccatcacaccattaaaaagcctgtggaccttt

SEQ ID NO: 399299 - DNA, 120 bp, Artificial Sequence
  ENSG00000146216_59 (sequence is synthesized)
aataaaaggaacgagggtctggcgaagacaggagtgttcctctgaaacctcggggcccctggcaccggagcttagtttctggcggattggaggcagaatgacatttgcactgaagtgctg

SEQ ID NO: 399300 - DNA, 120 bp, Artificial Sequence
  ENSG00000146216_60 (sequence is synthesized)
cccctgcgacgactggcgtcctccgtgttctcctcctccacgctggagacggagcattaccctcaccccggcggcggcggctcctcgggctcctccggttccctcattcagcgcagccgc

SEQ ID NO: 399301 - DNA, 120 bp, Artificial Sequence
  ENSG00000146216_61 (sequence is synthesized)
tcggctgagagcagccctgtgcgggcgccccaccggcgccacgcgcccctcgctgctggcaaccacagactcatgccctcggtgctccgcatctcgcggtcccagctgcagcaggtgtgg

SEQ ID NO: 399302 - DNA, 120 bp, Artificial Sequence
  ENSG00000146216_62 (sequence is synthesized)
gcccggttcacccacaagacctaggctgggccccccccctcctggagggggcaggtgggggggggtggggagcaggcagaggaccatggttccttcccaggacgcaataatcacacactc

SEQ ID NO: 399303 - DNA, 120 bp, Artificial Sequence
  ENSG00000146216_63 (sequence is synthesized)
ctgtaatactcccaccccaagcagagtctccgtcccacctccccatcagctccctttgtaggtgccagccaaatggtgcagggaggggtggggctggtggtacagtttccaggacagggc

SEQ ID NO: 399304 - DNA, 120 bp, Artificial Sequence
  ENSG00000146216_64 (sequence is synthesized)
aggggcgctcagctggagccactgatgggtccagagtccagtggaaagagaggtgtcagggagatgaggcctgcagggccagaggcactctggtatgggctttgttctgtttaatttgtg

SEQ ID NO: 399305 - DNA, 120 bp, Artificial Sequence
  ENSG00000146216_65 (sequence is synthesized)
tctggtatgggctttgttctgtttaatttgtgatctcttggcatggctgggtctgatccaccccgaggggctggcgggaggccaagaccctccttgcatggtgtgtgtgtgtgtgtgtgt

SEQ ID NO: 399306 - DNA, 120 bp, Artificial Sequence
  ENSG00000146216_66 (sequence is synthesized)
atggatggaggccaggacagccaggtttggaatgtggtggggagtgtttcaatgctcagtgatcgggggaggagccctgtgacctagcgagactttctcaggccatcatcattgaggaca

SEQ ID NO: 399307 - DNA, 120 bp, Artificial Sequence
  ENSG00000146216_67 (sequence is synthesized)
gagttctctcctcacacatcttaccccaggaaggctcagtccatggtaggctgcccctcccccaagacacctgtgccatcactccctggtaggattgggtgtctgtcctcggctcctcag

SEQ ID NO: 399308 - DNA, 120 bp, Artificial Sequence
  ENSG00000146216_68 (sequence is synthesized)
gaactgaggatggatgagaggggcctgggatccacctcccaaggcaggctggaactgagcaacgaggagacccagcttagaagcagtggcagctaaggtggttgttaaggatgacgtgag

SEQ ID NO: 399309 - DNA, 120 bp, Artificial Sequence
  ENSG00000146216_69 (sequence is synthesized)
aaaccatgtgcttgtcagcaaaaccagtgtctcaggacaaatcccaggcgggagcagccccacctctgcccttctcagaaggtgactccttcctgtaggtgctcggtcagccccaagggc

SEQ ID NO: 399310 - DNA, 120 bp, Artificial Sequence
  ENSG00000146216_70 (sequence is synthesized)
ggtggtgaagacacagcagaagagaggcaggttggatagggatctggacacttgggagtggggaagtgtcaggatgccagcttgcgcctgcctcttctgcccatttctcagcccccaacc

SEQ ID NO: 399311 - DNA, 120 bp, Artificial Sequence
  ENSG00000146216_71 (sequence is synthesized)
ttcactgcagggagcccaagtttccctttattcatcctgcccatgtcagccagcacctctgttcccctggggaatgcggtagtagtgaagtgggtactagaaagggccgtgcctgtatgg

SEQ ID NO: 399312 - DNA, 120 bp, Artificial Sequence
  ENSG00000146216_72 (sequence is synthesized)
ggaggggaggaggcccaaagatttgcaaaatgtttatttcagtgagactgtgtctgtatgtttgcttgtgtgcatgcgcgtacacttgtgcataagagtgtgcttacgaatgagcgtttg

SEQ ID NO: 399313 - DNA, 120 bp, Artificial Sequence
  ENSG00000146216_73 (sequence is synthesized)
tgcatgtggaagggctgccatggatgaatgctcaggctgtgcactgtgtaattccaggaagtgccatttacatagacctcaatgtgactggcacgtgcgcaagttgcacagtgctgtatg

SEQ ID NO: 399314 - DNA, 120 bp, Artificial Sequence
  ENSG00000146216_74 (sequence is synthesized)
agtgtgtgtatgcacatgtgtgttagggagccagaaagatgtctatgcagtcattggtagtttcctatgtagctactctcatcccagcttcactcttctacccctctctccctgtaacct

SEQ ID NO: 399315 - DNA, 120 bp, Artificial Sequence
  ENSG00000146216_75 (sequence is synthesized)
ctgcttggcccatcaattccccagatgtctctggttagagtagaggcctcagggccctggcccctgcctgggggtgccataagtgtggtgggcagtgccctggagccaaactgtccacac

SEQ ID NO: 399316 - DNA, 120 bp, Artificial Sequence
  ENSG00000146216_76 (sequence is synthesized)
agagggccaccattgtggtatggctcatccacaccattcacataagccactccatagtcacacactcctttccccaaaatctttctttgtaagtctatttatttatttatttatttattt

SEQ ID NO: 399317 - DNA, 120 bp, Artificial Sequence
  ENSG00000146216_77 (sequence is synthesized)
atttatttttgaggatgtctgggccaagagcaccttctccatctggcaacaaaagccagatttgggttctaatacttgtgccccacccccacccccatctcagctgctcacttttgaatc

SEQ ID NO: 399318 - DNA, 120 bp, Artificial Sequence
  ENSG00000146216_78 (sequence is synthesized)
tccccaaacccaagcctctgttgccctctgggctgttttggatggctttgcaccctgctcaggcagtaggcaggagagggtcaaggtggaccctttgagaagggacagaaaacaaaaagc

SEQ ID NO: 399319 - DNA, 120 bp, Artificial Sequence
  ENSG00000146216_79 (sequence is synthesized)
acaaaggtgagggggtgaggctgaacagtggccccactcccctcctgctggcactgcctcccccagccacctcctcttgccctcttcccatccaccccaggtagtggcaggaggtgaagt

SEQ ID NO: 399320 - DNA, 120 bp, Artificial Sequence
  ENSG00000146216_80 (sequence is synthesized)
gaagggaacctgcccaccatctgctccataagtcagcagcagtgtgggcaagggcccccccacccaatctggggttggatgaaaccaagcactctgtgatccagcattcccttctagagg

SEQ ID NO: 399321 - DNA, 120 bp, Artificial Sequence
  ENSG00000146216_81 (sequence is synthesized)
gttccactactcaaccctgagcacagctccatctcagtgaccagaaccctgaggtactctaagatcccaaagtgccttgtgaaatattgaagatgatggcactggcttcagcctcatttc

SEQ ID NO: 399322 - DNA, 120 bp, Artificial Sequence
  ENSG00000146216_82 (sequence is synthesized)
agcattacatacatattactgtttccaacgcctttggaagtgggagatccagcattgagaaggcggctgagttttcaaacacacaccccccacctcagaactgacacctgtgggagaggg

SEQ ID NO: 399323 - DNA, 120 bp, Artificial Sequence
  ENSG00000146216_83 (sequence is synthesized)
tgtgtcctttaaagcaaggccatggttcaaagcatgttgtcctttagggggacatccttttgtatatcctccatggtggaggggagagtgttttgtaagccataaagctctgagctaaca

SEQ ID NO: 399324 - DNA, 120 bp, Artificial Sequence
  ENSG00000146221_0 (sequence is synthesized)
gggactctgcgtgaggcgagcgccggggctcccggagcggatccctacctgtttcaaggacctgccagtctgagaagcttcttgtcataaggccatccaggggccacgcacccctacctt

SEQ ID NO: 399325 - DNA, 120 bp, Artificial Sequence
  ENSG00000146221_1 (sequence is synthesized)
gccagcctccagcatgcaggataccgtaacgacatcagcattgttggaccccagccactcctcagtctccacccaggacaattcctccactggaggacacacttcaagcacaagcccaca

SEQ ID NO: 399326 - DNA, 120 bp, Artificial Sequence
  ENSG00000146221_2 (sequence is synthesized)
gctctcaaagccttcaatcacaccagtccctgcaaagtccaggaacccacatcccagggccaatatccgtcggatgcgccggatcattgctgaggatcctgagtggtcactggccatcgt

SEQ ID NO: 399327 - DNA, 120 bp, Artificial Sequence
  ENSG00000146221_3 (sequence is synthesized)
gcccctcctcacagagctctgcattcagcacattatcaggaacttccagaaaaaccctatcctgaagcagatgctcccggaacaccagcagaaggtcctgaaccacctgtcccctgacct

SEQ ID NO: 399328 - DNA, 120 bp, Artificial Sequence
  ENSG00000146221_4 (sequence is synthesized)
accactggctgtgaccgccaacctgatagacagtgagaactactggctccgctgctgcatgcatcgctggcccgtgtgccacgtggcccaccatggcggcagctggaaacgcatgttctt

SEQ ID NO: 399329 - DNA, 120 bp, Artificial Sequence
  ENSG00000146221_5 (sequence is synthesized)
cgagcggcacctggagaacctgctaaagcactttatcccaggcaccacagaccctgcggtgatcctcgacctgctgccgctctgccggaattacgtgcgcagggtccacgtcgatcagtt

SEQ ID NO: 399330 - DNA, 120 bp, Artificial Sequence
  ENSG00000146221_6 (sequence is synthesized)
ccttccgccggtgcagctcccggcccagctccggccgggcgaccagtccgactcaggcagcgagggagagatggaggagcccaccgttgaccactaccaactgggcgatctggtagctgg

SEQ ID NO: 399331 - DNA, 120 bp, Artificial Sequence
  ENSG00000146221_7 (sequence is synthesized)
cctgagccacctggaggagctggacctggtgtacgatgtcaaggactgcggcatgaatttcgagtggaatctcttcctcttcacctaccgtgactgcctctccttggcagccgccatcaa

SEQ ID NO: 399332 - DNA, 120 bp, Artificial Sequence
  ENSG00000146221_8 (sequence is synthesized)
ggcatgccacaccctcaagatcttcaagctgacccgaagcaaggtggatgatgacaaggcacgcatcataattcgaagccttctggaccacccagtcctcgaggagctggacttgtcaca

SEQ ID NO: 399333 - DNA, 120 bp, Artificial Sequence
  ENSG00000146221_9 (sequence is synthesized)
aaacctcattggagaccgtggtgcacgaggtgctgccaagctgctgagccacagccgcctgcgtgtgctcaacctggctaacaaccaggtgcgtgcacccggtgcccagtccctggctca

SEQ ID NO: 399334 - DNA, 120 bp, Artificial Sequence
  ENSG00000146221_10 (sequence is synthesized)
cgctctggcacacaacaccaacctcatttccctcaacctacgtctcaactgcatcgaggatgagggtggccaggctcttgcccatgccttgcagaccaacaagtgcctcaccacgctgca

SEQ ID NO: 399335 - DNA, 120 bp, Artificial Sequence
  ENSG00000146221_11 (sequence is synthesized)
cctcggtggcaatgagctgtctgagcccaccgccacactcctgtcacaggtgctcgccatcaacaccacactcaccagcatcaacctgtcctgcaaccacatcgggctggacggtgggaa

SEQ ID NO: 399336 - DNA, 120 bp, Artificial Sequence
  ENSG00000146221_12 (sequence is synthesized)
tcattggccaggccctctacgcaaaccgagaagcagcccgccagcgggccctgaatcccagccacttcatgtcaaccataactgccaatggccctgagaactctgtgggataaaatgacc

SEQ ID NO: 399337 - DNA, 120 bp, Artificial Sequence
  ENSG00000146221_13 (sequence is synthesized)
tgacttggatcatggccccagccccatccctcatttcatacccctgccatgcctgctgcagagtatcacactggttcagagggagcggggagggggactgtgaataaccttggagtgatc

SEQ ID NO: 399338 - DNA, 120 bp, Artificial Sequence
  ENSG00000146221_14 (sequence is synthesized)
aagggttgtatggatggagacatgaggcagggaagggagcctggcatgggggaagaaagggtatgcagtagggacccagcctttgtgcccagggaaaggatattactggacacccacaaa

SEQ ID NO: 399339 - DNA, 120 bp, Artificial Sequence
  ENSG00000146221_15 (sequence is synthesized)
tgaccaacttctttcaggaacagggaagtcagagaggtgtctgagggactgtgcctgccagattctcccgttggggctgcctgcctccctgactccccaccattttcttctctaccaaac

SEQ ID NO: 399340 - DNA, 89 bp, Artificial Sequence
  ENSG00000146221_16 (sequence is synthesized)
gctacagcagggctatgcctggctctctctgccaccctcatccctgtagatgcatttccctgttgcttgactctgctttaagtgatcca

SEQ ID NO: 399341 - DNA, 120 bp, Artificial Sequence
  ENSG00000146221_17 (sequence is synthesized)
atgcatttccctgttgcttgactctgctttaagtgatccagttctacaggccacgccatcccctagttccccaactcccaacctgggaaggggacaatgagctgacaccaggggctcaga

SEQ ID NO: 399342 - DNA, 120 bp, Artificial Sequence
  ENSG00000146221_18 (sequence is synthesized)
cccagtggactcctctggggaggcaactgtagatgacaacttccagggaaggatgacacaatccctgccacccaccccagagagcttccctgggagggagggaaagaagtgccacactgg

SEQ ID NO: 399343 - DNA, 120 bp, Artificial Sequence
  ENSG00000146221_19 (sequence is synthesized)
gacaggaagtcagtgagtcatccacgactttattatccaccagtttgatttgtacaatctttgcgcttaaatccacgacaaaaaggccacagtgtgatgcacccaattgacagagacctg

SEQ ID NO: 399344 - DNA, 120 bp, Artificial Sequence
  ENSG00000146221_20 (sequence is synthesized)
tcttctccccagccaggcccagcccaccccacaagcccttgtccccaggacacatggagccttccaggtgccctacatgagtcccccatcactctgtagctgtccaccctggggccacac

SEQ ID NO: 399345 - DNA, 120 bp, Artificial Sequence
  ENSG00000146221_21 (sequence is synthesized)
ctacaggaatcacatcagcccccagggccacaagagacctagctgactgattcaggctgagcgccattgcccatcctccttgggctgattcattggcccagagcctccagaactgtgtcc

SEQ ID NO: 399346 - DNA, 120 bp, Artificial Sequence
  ENSG00000146221_22 (sequence is synthesized)
ccaaagggcaggtcatgggctacaaccccagtccaggagtgcctgctctccagggactccttccgctaagcaggcgctgagcagagcaccaaagggggcttgggagtgactgcatgtgtg

SEQ ID NO: 399347 - DNA, 120 bp, Artificial Sequence
  ENSG00000146221_23 (sequence is synthesized)
tgcctgtctaggcaacctagagtctgtctgtgcctgacaccctctgacagttccggagtgcaaacgtgtaggtgtgagggtgtgtgtgtgtgtgtgtgtgtgtatagccacagctgctag

SEQ ID NO: 399348 - DNA, 120 bp, Artificial Sequence
  ENSG00000146221_24 (sequence is synthesized)
cagaagttctaattagagaaacaagaacattcagtgtaaagtttaattttagagattaattaattttctggttttcattttccctggcaatcagtaaagctaccaagaaaatagaccaaa

SEQ ID NO: 399349 - DNA, 120 bp, Artificial Sequence
  ENSG00000146223_0 (sequence is synthesized)
gtgatgaaactgtaacttacaagaaaagggctgggttttgaaaataacacaggctctaaaaaccctaagaagcggtgcaacttttggcaggaatcggggttagcgggacctcaagggctc

SEQ ID NO: 399350 - DNA, 120 bp, Artificial Sequence
  ENSG00000146223_1 (sequence is synthesized)
actgcggctaagtgaacgctgactggtcctccagcgtgagctagaacagacgtctctatggtcaagtaaacagagcgtgtgctgtcttccccatgtggtggggttgcgcatgatcagtag

SEQ ID NO: 399351 - DNA, 72 bp, Artificial Sequence
  ENSG00000146223_2 (sequence is synthesized)
gccctcaaagccacccaggcaaagcaggcacttttggcaaagaaggagcagaagaaaggaaaagggctcagg

SEQ ID NO: 399352 - DNA, 120 bp, Artificial Sequence
  ENSG00000146223_3 (sequence is synthesized)
tttggcaaagaaggagcagaagaaaggaaaagggctcaggtttaagcgactggaatcattcctacatgattcctggcggcagaaacgtgacaaggtgcgtctcagacgactagaagtgaa

SEQ ID NO: 399353 - DNA, 120 bp, Artificial Sequence
  ENSG00000146223_4 (sequence is synthesized)
acctcatgccttggaattgccagataaacattccttggcctttgttgtacgcatcgaaaggattgacggcgtgagtttactggtgcagagaaccattgcaagacttcgcctaaagaaaat

SEQ ID NO: 399354 - DNA, 80 bp, Artificial Sequence
  ENSG00000146223_5 (sequence is synthesized)
ttccaaatctgaagtctgtccgagaactcattttgaaacgtggacaagccaaggtcaagaataagaccatccctctgaca

SEQ ID NO: 399355 - DNA, 120 bp, Artificial Sequence
  ENSG00000146223_6 (sequence is synthesized)
tggacaagccaaggtcaagaataagaccatccctctgacagacaatacagtgattgaggagcacctggggaagtttggcgtcatttgcttggaagacctcattcatgaaattgccttccc

SEQ ID NO: 399356 - DNA, 120 bp, Artificial Sequence
  ENSG00000146223_7 (sequence is synthesized)
aagacctcattcatgaaattgccttcccagggaagcatttccaggagatctcatggttcttgtgccctttccacctctcagtggcccgtcatgctaccaaaaatagagtgggcttcctca

SEQ ID NO: 399357 - DNA, 120 bp, Artificial Sequence
  ENSG00000146223_8 (sequence is synthesized)
tgaacgcatcaatcagctcatccgtcagctgaactagacccaggtgccaaactgcggtaaattttttatcagtgaagtggaagcatgtgttttgttttggaaatttttatcaagtatctt

SEQ ID NO: 399358 - DNA, 78 bp, Artificial Sequence
  ENSG00000146223_9 (sequence is synthesized)
agtatcttcagagaagattatttcctgctttatcttcagaaactggaaagggtcaaagaaaagacagtagctggccgg

SEQ ID NO: 399359 - DNA, 68 bp, Artificial Sequence
  ENSG00000146223_10 (sequence is synthesized)
gaaactctgtctcaaaaaaaaagaaaagacagtagcatatgttcatgtcaagcacctctcatcacagt

SEQ ID NO: 399360 - DNA, 120 bp, Artificial Sequence
  ENSG00000146223_11 (sequence is synthesized)
acagtagcatatgttcatgtcaagcacctctcatcacagtcgagttccaaggaaaaattccagtgttttctgcattgggtgctgtgtcatctgaaatcggcacattccatggaggaagga

SEQ ID NO: 399361 - DNA, 120 bp, Artificial Sequence
  ENSG00000146223_12 (sequence is synthesized)
gtcctgctttgttgcatgtatcctagggtttaatgttggtaaatgagtcactctagcatttgtagaaggctccctgagactcctgcagcagtcgaccaagcccaaggacataattgaatc

SEQ ID NO: 399362 - DNA, 120 bp, Artificial Sequence
  ENSG00000146223_13 (sequence is synthesized)
tggagagtcctggggccttgttttgaaaaagacttgaaatacacataggaagaaaggcataaaaataaatgttcacttgtctctgctgtgagtatgtgttccaacttttcagtgatggct

SEQ ID NO: 399363 - DNA, 120 bp, Artificial Sequence
  ENSG00000146223_14 (sequence is synthesized)
tatcgtaacctgaaactggcttagtactttttcctaaaagctcaggatttgagaatgaggaccccttcgccaggaaaacatgtatacactcaaaattttgcttgcagttctagggtgttt

SEQ ID NO: 399364 - DNA, 120 bp, Artificial Sequence
  ENSG00000146223_15 (sequence is synthesized)
ctcaaaattttgcttgcagttctagggtgtttagacccttctcagatacctgtgcatcttatgggttttgtttttctctttgagacagtctcaccctgttgcccaggctggagcgcagtg

SEQ ID NO: 399365 - DNA, 78 bp, Artificial Sequence
  ENSG00000146223_16 (sequence is synthesized)
tccacctcctgggttcaagtgattctgcctcagccccttgatcagctgggattacatgcatgtagacagagtttcacc

SEQ ID NO: 399366 - DNA, 72 bp, Artificial Sequence
  ENSG00000146223_17 (sequence is synthesized)
agctcttgtgtaccttatgtgaggaagtcctgctcaatcaggatcggtcacgcaggccctgatcttgctact

SEQ ID NO: 399367 - DNA, 120 bp, Artificial Sequence
  ENSG00000146223_18 (sequence is synthesized)
ctcaatcaggatcggtcacgcaggccctgatcttgctactctggttccatgtcctatggaagaccaaagtttaccaagatagatttttcccttcatagtggcagatagtgttaacccctg

SEQ ID NO: 399368 - DNA, 120 bp, Artificial Sequence
  ENSG00000146223_19 (sequence is synthesized)
caccatctgtaactcagaaatccccaccatttcttcccctgggcttcagaatagaattgcctggtttctctgatgatcagcatggttccttaaaacccaaatcagcaaggaatgaacaat

SEQ ID NO: 399369 - DNA, 120 bp, Artificial Sequence
  ENSG00000146223_20 (sequence is synthesized)
tttgtttggcatggatgaaattagcactgtttggctcgttaggccccaggcaggcaggcaccttaattttttccttgcatattctagtcttcagaagcattgccttttgtcctactggta

SEQ ID NO: 399370 - DNA, 120 bp, Artificial Sequence
  ENSG00000146223_21 (sequence is synthesized)
gtgacatagaccaataacagggcatctggggattttaatcctgaaaacagtgagtctgatactgcttgtgtttttcatcagtgtccaccccaagtgggtcttcctgctattctcttcact

SEQ ID NO: 399371 - DNA, 120 bp, Artificial Sequence
  ENSG00000146223_22 (sequence is synthesized)
tagttgcccctcacttgccatctgagcaattggcaaggatgtgccaggcctaggttaaacttggaaacatgcttgaccattctattccctggtcctttaagatcagtttggctgcaattt

SEQ ID NO: 399372 - DNA, 120 bp, Artificial Sequence
  ENSG00000146223_23 (sequence is synthesized)
gatcagtttggctgcaattttggctccttggaccctcaagcatagctggtaaatcaagttagagatgtaactgccttaaaacatgccagcttaggctgggcacggtggctcacacctgta

SEQ ID NO: 399373 - DNA, 120 bp, Artificial Sequence
  ENSG00000146223_24 (sequence is synthesized)
aaaaaaaaaaaaaaagtgccagcgtatgaggtaattagattggttctctccagaggtaacctgccaagaagagatgctatagatgttactcctatactgtaaaacattgtgaaatcagat

SEQ ID NO: 399374 - DNA, 120 bp, Artificial Sequence
  ENSG00000146223_25 (sequence is synthesized)
tactttaaaatgatgtattacaaagttatgcaaaaaagcagttgtgactatggaagcccaaggcttatatcccagctctgtcttacactaaatatgggtacagtgtttccactctgtcca

SEQ ID NO: 399375 - DNA, 120 bp, Artificial Sequence
  ENSG00000146223_26 (sequence is synthesized)
taaaatgggagctaatattctccaacctgtgtgcctgacatgatggttaaagggattaaacaaaacaatagtttgtaatttattctgtcagagcaaactgctggtaaataaaagggacta

SEQ ID NO: 399376 - DNA, 120 bp, Artificial Sequence
  ENSG00000146223_27 (sequence is synthesized)
agttgacgaaaaataaattttaaaaaacctaataaaacaagtttgtaatttataattgtatacaaataaaagatgttacaaaaattgcgcacttatatgtatgtaccatgacataactaa

SEQ ID NO: 399377 - DNA, 120 bp, Artificial Sequence
  ENSG00000146223_28 (sequence is synthesized)
ctgaaaactgcccttgggctgacttttgataggccatgccttgccactttacaagttctttttgcatttactagtatttaagagtaaccttgagattgggaggaatagaggaggctggta

SEQ ID NO: 399378 - DNA, 120 bp, Artificial Sequence
  ENSG00000146223_29 (sequence is synthesized)
caaatagatggagacctgctgggatcagtgaatgcctgattaggacatggggctatgcatagcctaagagttataggcttaaagatgtcgagtaactaaaaactgtattgctggccgggc

SEQ ID NO: 399379 - DNA, 120 bp, Artificial Sequence
  ENSG00000146223_30 (sequence is synthesized)
ccatctcggaaaaaaaaaaaaaaaaactattgctgcagtcattcagatggaaatgaggaaagaataatattaataactgatttcaaaaaggacttgaagatgtgaatcatctattttgct

SEQ ID NO: 399380 - DNA, 120 bp, Artificial Sequence
  ENSG00000146223_31 (sequence is synthesized)
agtgattgaggagcacctgggggaagtttggcgtcatttgcttggaagacctcattcatgaaattgccttcccagggaagcatttccaggagatctcatggttcttgtgccctttccacc

SEQ ID NO: 399381 - DNA, 120 bp, Artificial Sequence
  ENSG00000146223_32 (sequence is synthesized)
agctgcaccactagaaagatggcggagcaagaagaatgttgctttgcttcgcattgtggaacacggggaaataagctatatcagttgtcacttatgaattactgttctaaaagtaaaaat

SEQ ID NO: 399382 - DNA, 120 bp, Artificial Sequence
  ENSG00000146223_33 (sequence is synthesized)
agtgttgcttaagctttagacccctttctagggagataatatgccccaagccactcaggcaaattgtgctaggatgtcagggttgagcacaatttagtctgcaatatttggaagacctta

SEQ ID NO: 399383 - DNA, 120 bp, Artificial Sequence
  ENSG00000146223_34 (sequence is synthesized)
aagaaggaggtaatggtggggaaccaagagaaagtaattagaatttttatttggtgagttttatcccgcatgtgttggactacatttggtattgacgagctccccccaacggtttgacag

SEQ ID NO: 399384 - DNA, 120 bp, Artificial Sequence
  ENSG00000146223_35 (sequence is synthesized)
accaggtatagttgtctctcagtgtccttaaggggttggttccaggactcccacagatgcctaaatctcagactgctgaagtcccttatataaaatggttgtagtaggccgggcgcggtg

SEQ ID NO: 399385 - DNA, 120 bp, Artificial Sequence
  ENSG00000146223_36 (sequence is synthesized)
ctgggcgacagagcgagacactctctcaaaaaataaataaataaataaataactggttgtagtatttgcatataatctatactccttccgcctatgtagtttaaatcctctctggattgc

SEQ ID NO: 399386 - DNA, 120 bp, Artificial Sequence
  ENSG00000146223_37 (sequence is synthesized)
cgcctatgtagtttaaatcctctctggattgcttaatagctttatttatttatttatttattttgaggcaagagtctcactcttgcctagagtggagtgcagtggcacaatctcgactca

SEQ ID NO: 399387 - DNA, 77 bp, Artificial Sequence
  ENSG00000146223_38 (sequence is synthesized)
tcgactcactgcaacctctgcctactgggctcaagcaattctcgtgcctcagccaaccaagtagctaaacttaattt

SEQ ID NO: 399388 - DNA, 72 bp, Artificial Sequence
  ENSG00000146223_39 (sequence is synthesized)
caggctggtgtccaactcattgatgtcagccaccccacccggccaccggctgatttttgtatttttagtaga

SEQ ID NO: 399389 - DNA, 89 bp, Artificial Sequence
  ENSG00000146223_40 (sequence is synthesized)
acccggccattttgacatgttggccatgctggtctcaaactcccggcctcaagtgatcacccaccggccttccaaagtgctgggattac

SEQ ID NO: 399390 - DNA, 120 bp, Artificial Sequence
  ENSG00000146223_41 (sequence is synthesized)
ttacaggcctgagccaccctgcctggcctggattactgatagctaatacagtgtacataatgtattttaaaaatttgtattactttttacggttatttttcattttttcccctgaatttt

SEQ ID NO: 399391 - DNA, 73 bp, Artificial Sequence
  ENSG00000146223_42 (sequence is synthesized)
tactttttacggttatttttcattttttcccctgaatttttttttttttttttttttaagagtgaggtcagct

SEQ ID NO: 399392 - DNA, 64 bp, Artificial Sequence
  ENSG00000146223_43 (sequence is synthesized)
tgggaggctgaggcaggtggatctcctgaagtcaggagtttgagaccaagctggccaacaaggt

SEQ ID NO: 399393 - DNA, 120 bp, Artificial Sequence
  ENSG00000146223_44 (sequence is synthesized)
gagcgagaccccatctcagaaaaaaaaaagaacaaggagtgaggtcttgtgttacccaggctagagtgcagtggcaggatcatagctcattgcagccttgaattcctgggttcaagagaa

SEQ ID NO: 399394 - DNA, 120 bp, Artificial Sequence
  ENSG00000146223_45 (sequence is synthesized)
aaaaaaaagagtagtattcctcaaacattgaaacccaacaaaaacttggattttatttccaactcttgcaccatcttgagtagagggtcacctaaggccagagtcgtagcccctaaggta

SEQ ID NO: 399395 - DNA, 120 bp, Artificial Sequence
  ENSG00000146223_46 (sequence is synthesized)
agctaggacatggtttctgttttgtttttgttggcaatattttccctggtgaacatttacatccataaatttaaatttctaattatgtaagtggggtcacttcagttctttatcaggagt

SEQ ID NO: 399396 - DNA, 120 bp, Artificial Sequence
  ENSG00000146223_47 (sequence is synthesized)
atttccaagcatttcagctggaatgtgattgcagaacacttgctcgttgggagaagtgagtgtgtgggagaacctctccaacctctcagccaggctgcaggactggtatgtagtgtgcca

SEQ ID NO: 399397 - DNA, 120 bp, Artificial Sequence
  ENSG00000146223_48 (sequence is synthesized)
tttgaagctttgatgtgagattcaggttgtattcttcttggggccccaagagtctgccagagtggccagcttagtatatgctggatacatgttaaataaaggaatctgtgcttttgtgtt

SEQ ID NO: 399398 - DNA, 120 bp, Artificial Sequence
  ENSG00000146232_0 (sequence is synthesized)
aatgaatgaatgaatgaatgagtgaatgaatcaacgaaggagtgagtcaaggcccgggaaccacagactccaagcctacgcagagcccgggaagggggattccggaggggcggggcctct

SEQ ID NO: 399399 - DNA, 120 bp, Artificial Sequence
  ENSG00000146232_1 (sequence is synthesized)
ggaagcgcccgccgggggcggggagggggcggggccatccgcgtgaggcgaccctgttggtccggaggggcggggcgaggaggaggacccgcttgggcggttcggctgcccacagtaacc

SEQ ID NO: 399400 - DNA, 120 bp, Artificial Sequence
  ENSG00000146232_2 (sequence is synthesized)
cagtaaccgctgggtggacctggccagcgctccgaaccttgtcctcgctgcgcgccggcccctcggagccccacagcccgggaaggaggccgccgcgggccgggcgcccgctctgccaag

SEQ ID NO: 399401 - DNA, 120 bp, Artificial Sequence
  ENSG00000146232_3 (sequence is synthesized)
caacccggaaaggcggcgcggcggagcctggagccggatcctgctcagaccgggccccggccggccagagccgcgggcatgtcggaggcgcggaaggggccggacgaggcggaggagagc

SEQ ID NO: 399402 - DNA, 120 bp, Artificial Sequence
  ENSG00000146232_4 (sequence is synthesized)
gagccagtacgactctggcattgagtctctgcgctctctgcgctccctacccgagtccacctcggctccagcctccgggccctcggacggcagcccccagccctgcacccatcctccggg

SEQ ID NO: 399403 - DNA, 120 bp, Artificial Sequence
  ENSG00000146232_5 (sequence is synthesized)
acccgtcaaggaaccacaggagaaggaagacgcggatggggagcgggctgattccacctatggctcctcctcgctcacctacaccctgtccttgctggggggccccgaggctgaggaccc

SEQ ID NO: 399404 - DNA, 120 bp, Artificial Sequence
  ENSG00000146232_6 (sequence is synthesized)
ggccccacgcctgccactcccccacgtgggggcgctgagccctcagcagctggaagcactcacttacatctccgaggacggagacacgctggtccacctggcagtgattcatgaggcccc

SEQ ID NO: 399405 - DNA, 120 bp, Artificial Sequence
  ENSG00000146232_7 (sequence is synthesized)
agcggtgctgctctgttgcctggctttgctgccccaggaggtcctggacattcaaaataacctttaccagacagcactccatctggctgtacatctggaccaaccgggcgcagttcgggc

SEQ ID NO: 399406 - DNA, 120 bp, Artificial Sequence
  ENSG00000146232_8 (sequence is synthesized)
actggtgctgaagggggccagccgggcactacaggaccggcatggtgacacagcccttcatgtggcctgccagcgccagcacttggcctgtgcccgctgcctgctggaagggcggccaga

SEQ ID NO: 399407 - DNA, 120 bp, Artificial Sequence
  ENSG00000146232_9 (sequence is synthesized)
gccaggcagaggaacatctcactctctggacctccagctgcaaaactggcaaggtctggcttgtctccacattgccacccttcagaagaaccaaccactcatggaattgctgcttcggaa

SEQ ID NO: 399408 - DNA, 120 bp, Artificial Sequence
  ENSG00000146232_10 (sequence is synthesized)
gaaacccaagagcggggcctggtacagttcctgctccaggctggtgcccaggtagatgcccgcatgctgaacgggtgcacacccctgcacctggcagctggccggggtctcatgggcatc

SEQ ID NO: 399409 - DNA, 120 bp, Artificial Sequence
  ENSG00000146232_11 (sequence is synthesized)
tcatccactctgtgcaaggcgggtgctgactccctgctgcggaatgtggaggatgagacgccccaggacctgactgaggaatcccttgtccttttgccctttgatgacctgaagatctca

SEQ ID NO: 399410 - DNA, 120 bp, Artificial Sequence
  ENSG00000146232_12 (sequence is synthesized)
gggaaactgctgctgtgtaccgactgaagccaggcagggtctgggatcctcagggctccacctctccatctggaagccggagccataactgctgcagtttgggcccaggctatgtgctct

SEQ ID NO: 399411 - DNA, 120 bp, Artificial Sequence
  ENSG00000146232_13 (sequence is synthesized)
tctggtgccctagggactgctgtggccagagcctggggccagccagtacagtcctgagccgaggaggagggactgcaagtggaagagagccagtctggaaggaagagctttccaggtgga

SEQ ID NO: 399412 - DNA, 120 bp, Artificial Sequence
  ENSG00000146232_14 (sequence is synthesized)
cagggcttcttggaagacccccaaagccccaggtatcctgggtgaagcctgtttgcctctcttgaaaatggcaggtgctcttgttttacccatgttgggtcagcctgaaactgccaacca

SEQ ID NO: 399413 - DNA, 120 bp, Artificial Sequence
  ENSG00000146232_15 (sequence is synthesized)
gtaggaagcatggactctcctgagtgagaagagactgaaataggagcaagcagaaccctgagaggtgtcccatcttattgctgttgaggaccctgaaacaccgttgtttaaagacttcac

SEQ ID NO: 399414 - DNA, 120 bp, Artificial Sequence
  ENSG00000146232_16 (sequence is synthesized)
acagaaggctctgaactgagccactggggaagggaagtttcagtaacatgacactaaaatggcagagacgttaaaaaaagtttttcccttctagagctgttttgcgcgcatgcatgtctg

SEQ ID NO: 399415 - DNA, 120 bp, Artificial Sequence
  ENSG00000146232_17 (sequence is synthesized)
tgtgcattggggctttttagacaggcctgccctgtgactttgtggtagaggcagagagaaggaaattgtcccctgagcacggtagggccttgctgggtggggtcagaggccagtagttcc

SEQ ID NO: 399416 - DNA, 120 bp, Artificial Sequence
  ENSG00000146232_18 (sequence is synthesized)
aggcctttctctgtgtccagcacagacccttgtccttgctgtggaaatgatgagggatggagggacaagaggaagaatgagaggacacacgccctggagccctcaccactgccctggggg

SEQ ID NO: 399417 - DNA, 120 bp, Artificial Sequence
  ENSG00000146232_19 (sequence is synthesized)
ttgccatctggaggagcctggggataagggtaacccagggaggctgggcacgagggagctgactccacgtttttccccccgttcctcaccttcgagggccctgctaggtcacccctatgc

SEQ ID NO: 399418 - DNA, 120 bp, Artificial Sequence
  ENSG00000146232_20 (sequence is synthesized)
tggcatgaagagcatggggcaataaaccagcacagtctctgaccacttggagcgtctcatccagtgagagagacagccgttaaaagcataaacatccaaataaagatgcctttccaagtt

SEQ ID NO: 399419 - DNA, 120 bp, Artificial Sequence
  ENSG00000146233_0 (sequence is synthesized)
gcattttttccgcgctggctgagattcaaagagaagtggaggtgggagggagcgacaatggaaaaatcacctgaaaactgggacagaggaaggaagctacagttacgaaggagagctgca

SEQ ID NO: 399420 - DNA, 120 bp, Artificial Sequence
  ENSG00000146233_1 (sequence is synthesized)
aaagttgcagcagaaaggttgggagtcccgacaggttccgtagcccacagaaaagaagcaagggacggcaggactgtttcacacttttctgcttctggaaggtgctggacaaaaacatgg

SEQ ID NO: 399421 - DNA, 120 bp, Artificial Sequence
  ENSG00000146233_2 (sequence is synthesized)
aactaatttccccaacagtgattataatcctgggttgccttgctctgttcttactccttcagcggaagaatttgcgtagacccccgtgcatcaagggctggattccttggattggagttg

SEQ ID NO: 399422 - DNA, 120 bp, Artificial Sequence
  ENSG00000146233_3 (sequence is synthesized)
gatttgagtttgggaaagcccctctagaatttatagagaaagcaagaatcaagtatggaccaatatttacagtctttgctatgggaaaccgaatgacctttgttactgaagaagaaggaa

SEQ ID NO: 399423 - DNA, 120 bp, Artificial Sequence
  ENSG00000146233_4 (sequence is synthesized)
ttaatgtgtttctaaaatccaaaaaagtagattttgaactagcagtgcaaaatatcgtttatcgtacagcatcaattccaaagaatgtctttttagcactgcatgaaaaactctatatta

SEQ ID NO: 399424 - DNA, 120 bp, Artificial Sequence
  ENSG00000146233_5 (sequence is synthesized)
tgttgaaagggaaaatggggactgtcaatctccatcagtttactgggcaactgactgaagaattacatgaacaactggagaatttaggcactcatgggacaatggacctgaacaacttag

SEQ ID NO: 399425 - DNA, 120 bp, Artificial Sequence
  ENSG00000146233_6 (sequence is synthesized)
taagacatctcctttatccagtcacagtgaatatgctctttaataaaagtttgttttccacaaacaagaaaaaaatcaaggagttccatcagtattttcaagtttatgatgaagattttg

SEQ ID NO: 399426 - DNA, 120 bp, Artificial Sequence
  ENSG00000146233_7 (sequence is synthesized)
agtatgggtcccagttgccagagtgtcttctaagaaactggtcaaaatccaaaaagtggttcctggaactgtttgagaaaaacattccagatataaaagcatgtaaatctgcaaaagata

SEQ ID NO: 399427 - DNA, 120 bp, Artificial Sequence
  ENSG00000146233_8 (sequence is synthesized)
attccatgacattattgcaagctacgctggatattgtagagacggaaacaagtaaggaaaactcacccaattatgggctcttactgctttgggcttctctgtctaatgctgttcctgttg

SEQ ID NO: 399428 - DNA, 120 bp, Artificial Sequence
  ENSG00000146233_9 (sequence is synthesized)
cattttggacacttgcatacgtcctttctcatcctgatatccacaaggccattatggaaggcatatcttctgtgtttggcaaagcaggcaaagataagattaaagtgtctgaggatgacc

SEQ ID NO: 399429 - DNA, 120 bp, Artificial Sequence
  ENSG00000146233_10 (sequence is synthesized)
ttggaaaccattcgtttaaaagctcctggtgtcattactagaaaagtggtgaagcctgtggaaattttgaattacatcattccttctggtgacttgttgatgttgtctccattttggctg

SEQ ID NO: 399430 - DNA, 120 bp, Artificial Sequence
  ENSG00000146233_11 (sequence is synthesized)
catagaaatccaaagtattttcctgagcctgaattgttcaaacctgaacgttggaaaaaggcaaatttagagaagcactctttcttggactgcttcatggcatttggaagcgggaagttc

SEQ ID NO: 399431 - DNA, 120 bp, Artificial Sequence
  ENSG00000146233_12 (sequence is synthesized)
cagtgtcctgcaaggtggtttgctctgttagaggttcagatgtgtattattttaatactttataaatatgactgtagtcttctggacccattacccaaacagagttatctccatttggtg

SEQ ID NO: 399432 - DNA, 120 bp, Artificial Sequence
  ENSG00000146233_13 (sequence is synthesized)
ggtgtcccccagccggaagggcaatgccgaattgaatataaacaaagaatatgacatctgttgggcctcacaaggaccagggccttctggaggagtggcactaccccacctggcagcacc

SEQ ID NO: 399433 - DNA, 120 bp, Artificial Sequence
  ENSG00000146233_14 (sequence is synthesized)
tagacctgagctctacaaaaacacactgcttcactttgttttaggacttagttcaagaacacattcaaatggtgcatgtgtttggtatcttcaacagtagaccaagaatctaacatcact

SEQ ID NO: 399434 - DNA, 120 bp, Artificial Sequence
  ENSG00000146233_15 (sequence is synthesized)
ctcagtaatatagagaccggaatacatggtttataggaaatgatcaaatgatccaaaaaaactccacattttttaagaagttggaatttgatttcatgcataactgtattaaaacattaa

SEQ ID NO: 399435 - DNA, 120 bp, Artificial Sequence
  ENSG00000146233_16 (sequence is synthesized)
atagaaataatgtcatttgaatgaaaatcttatcacattaaattcactgtgaaggcagcatacttaaatttttattttgaaaagtctaaaaggcttagatttttaaaatttaataattat

SEQ ID NO: 399436 - DNA, 120 bp, Artificial Sequence
  ENSG00000146233_17 (sequence is synthesized)
ttctacaaattttctatttttcttgaggtgattctcaactagcaattggaactcctaggctctattaacataattctttattgtaaacgtatctaatgctaaaagtaataaaatggtagt

SEQ ID NO: 399437 - DNA, 120 bp, Artificial Sequence
  ENSG00000146233_18 (sequence is synthesized)
tttctgagacctgtgaggacaggaatggtgtcttacattcatttctacactttattatgctcaggattgcaccttctttacagagtatattcaataaatgtatgttgattgatgtattga

SEQ ID NO: 399438 - DNA, 120 bp, Artificial Sequence
  ENSG00000146233_19 (sequence is synthesized)
tttatattttaattaacctggaagcattgttttgactcaaagtgtttgcaattatagtttggcagataccatatttttgctaatgcatagaaacacaaatataacggtatgccaagacaa

SEQ ID NO: 399439 - DNA, 120 bp, Artificial Sequence
  ENSG00000146233_20 (sequence is synthesized)
tggactgcttcatggcatttggaagcgggaagttccagtgtcctgcaagaaaaggtttttgaacatctcatctgtgccaggccctcttctaagcttcagagagcactgaggaagaccaac

SEQ ID NO: 399440 - DNA, 120 bp, Artificial Sequence
  ENSG00000146233_21 (sequence is synthesized)
aatatgtcacatttcttcattggggatgattctgtaggggaaatgtcagtacctgtttatgacaaaatctcactcaataaatgtagaaatccattaaatttttatatttaaaaaattgta

SEQ ID NO: 399441 - DNA, 120 bp, Artificial Sequence
  ENSG00000146233_22 (sequence is synthesized)
tagagaagcactctttcttggactgcttcatggcatttggaagcgggaagttccagtgtcctgcaagaaaaacaaacaggaaagagcagcatgaaccaccagacttcttcagaaattgta

SEQ ID NO: 399442 - DNA, 120 bp, Artificial Sequence
  ENSG00000146233_23 (sequence is synthesized)
gcttgcaaagtgaagagtctcattatagcagacagtctcacattaaactatacgatttaaatggaggaataagacggagggttttcagtgtggaggaaaacttctttgagtgagcacctc

SEQ ID NO: 399443 - DNA, 120 bp, Artificial Sequence
  ENSG00000146233_24 (sequence is synthesized)
cttgctatacctgtcccctggaacacacaccaaaaccaacaagcttgattttccttggttctaattcctgcaagaggatgcctgatttgctgtgtcattgtgcaaattgatatggcttaa

SEQ ID NO: 399444 - DNA, 120 bp, Artificial Sequence
  ENSG00000146233_25 (sequence is synthesized)
actccagtgtaaaacaacagccctgatctttggcaagattaatctgcttataaaggcatgcttggataagaagagagtgtaataagaggaaggctgcaatacttgagaagttaaaatgaa

SEQ ID NO: 399445 - DNA, 120 bp, Artificial Sequence
  ENSG00000146242_0 (sequence is synthesized)
gttaatttccaccaggaggaggcgcgcagcccagctcccctagtctctcttcttaaatccccctacctacggctgccgaggttggccgcgcgtcgggaatctccccgacagtcctggccc

SEQ ID NO: 399446 - DNA, 120 bp, Artificial Sequence
  ENSG00000146242_1 (sequence is synthesized)
tcccccgccccccgggttggtttttcccagctgcggaggttgggaggttgggccaggggctggggtgcgaagagagtcggcgcccgcaacgcggagccgggaagtcgtcgctactctggt

SEQ ID NO: 399447 - DNA, 120 bp, Artificial Sequence
  ENSG00000146242_2 (sequence is synthesized)
ggaactcagagttggttctggaggcggcggacgcggaggtccctcagaggatccagcgaggggcgccaacaagaggcgaagaggtggcaccagggcggcggcaggaagaggagcgggagc

SEQ ID NO: 399448 - DNA, 120 bp, Artificial Sequence
  ENSG00000146242_3 (sequence is synthesized)
aggagcgcggagcggagcgtcccgacccgccgtgcgtactttctggagggaaggggcgggggaatcggcccctgagggaagcgcccggtggcgagggggttagccaagttccggctgcgg

SEQ ID NO: 399449 - DNA, 120 bp, Artificial Sequence
  ENSG00000146242_4 (sequence is synthesized)
cgccactccctcggttccacgagaggaaagttttttttttccagacgcttccgccggctcgcgccctccgggcccagcctcccgagccttcggagcgggcgccgtcccagcccagctccg

SEQ ID NO: 399450 - DNA, 120 bp, Artificial Sequence
  ENSG00000146242_5 (sequence is synthesized)
gggaaacgcgagccgcgatgcctggggggtgctcccggggccccgccgccggggacgggcgtctgcggctggcgcgactagcgctggtactcctgggctgggtctcctcgtcttctccca

SEQ ID NO: 399451 - DNA, 120 bp, Artificial Sequence
  ENSG00000146242_6 (sequence is synthesized)
cctcctcggcatcctccttctcctcctcggcgccgttcctggcttccgccgtgtccgcccagcccccgctgccggaccagtgccccgcgctgtgcgagtgctccgaggcagcgcgcacag

SEQ ID NO: 399452 - DNA, 120 bp, Artificial Sequence
  ENSG00000146242_7 (sequence is synthesized)
tcaagtgcgttaaccgcaatctgaccgaggtgcccacggacctgcccgcctacgtgcgcaacctcttccttaccggcaaccagctggccgtgctccctgccggcgccttcgcccgccggc

SEQ ID NO: 399453 - DNA, 120 bp, Artificial Sequence
  ENSG00000146242_8 (sequence is synthesized)
cgccgctggcggagctggccgcgctcaacctcagcggcagccgcctggacgaggtgcgcgcgggcgccttcgagcatctgcccagcctgcgccagctcgacctcagccacaacccactgg

SEQ ID NO: 399454 - DNA, 120 bp, Artificial Sequence
  ENSG00000146242_9 (sequence is synthesized)
ccgacctcagtcccttcgctttctcgggcagcaatgccagcgtctcggcccccagtccccttgtggaactgatcctgaaccacatcgtgccccctgaagatgagcggcagaaccggagct

SEQ ID NO: 399455 - DNA, 120 bp, Artificial Sequence
  ENSG00000146242_10 (sequence is synthesized)
tcgagggcatggtggtggcggccctgctggcgggccgtgcactgcaggggctccgccgcttggagctggccagcaaccacttcctttacctgccgcgggatgtgctggcccaactgccca

SEQ ID NO: 399456 - DNA, 120 bp, Artificial Sequence
  ENSG00000146242_11 (sequence is synthesized)
gcctcaggcacctggacttaagtaataattcgctggtgagcctgacctacgtgtccttccgcaacctgacacatctagaaagcctccacctggaggacaatgccctcaaggtccttcaca

SEQ ID NO: 399457 - DNA, 120 bp, Artificial Sequence
  ENSG00000146242_12 (sequence is synthesized)
atggcaccctggctgagttgcaaggtctaccccacattagggttttcctggacaacaatccctgggtctgcgactgccacatggcagacatggtgacctggctcaaggaaacagaggtag

SEQ ID NO: 399458 - DNA, 120 bp, Artificial Sequence
  ENSG00000146242_13 (sequence is synthesized)
tgcagggcaaagaccggctcacctgtgcatatccggaaaaaatgaggaatcgggtcctcttggaactcaacagtgctgacctggactgtgacccgattcttcccccatccctgcaaacct

SEQ ID NO: 399459 - DNA, 120 bp, Artificial Sequence
  ENSG00000146242_14 (sequence is synthesized)
cttatgtcttcctgggtattgttttagccctgataggcgctattttcctcctggttttgtatttgaaccgcaaggggataaaaaagtggatgcataacatcagagatgcctgcagggatc

SEQ ID NO: 399460 - DNA, 120 bp, Artificial Sequence
  ENSG00000146242_15 (sequence is synthesized)
acatggaagggtatcattacagatatgaaatcaatgcggaccccagattaacgaacctcagttctaactcggatgtctgagaaatattagaggacagaccaaggacaactctgcatgaga

SEQ ID NO: 399461 - DNA, 120 bp, Artificial Sequence
  ENSG00000146242_16 (sequence is synthesized)
tgtagacttaagctttatccctactaggcttgctccactttcatcctccactatagatacaacggactttgactaaaagcagtgaaggggatttgcttccttgttatgtaaagtttctcg

SEQ ID NO: 399462 - DNA, 120 bp, Artificial Sequence
  ENSG00000146242_17 (sequence is synthesized)
gtgtgttctgttaatgtaagacgatgaacagttgtgtatagtgttttaccctcttctttttcttggaactcctcaacacgtatggagggatttttcaggtttcagcatgaacatgggctt

SEQ ID NO: 399463 - DNA, 120 bp, Artificial Sequence
  ENSG00000146242_18 (sequence is synthesized)
cttgctgtctgtctctctctcagtacagttcaaggtgtagcaagtgtacccacacagatagcattcaacaaaagctgcctcaactttttcgagaaaaatactttattcataaatatcagt

SEQ ID NO: 399464 - DNA, 120 bp, Artificial Sequence
  ENSG00000146242_19 (sequence is synthesized)
tttattctcatgtacctaagttgtggagaaaataattgcatcctataaactgcctgcagacgttagcaggctcttcaaaataactccatggtgcacaggagcacctgcatccaagagcat

SEQ ID NO: 399465 - DNA, 120 bp, Artificial Sequence
  ENSG00000146242_20 (sequence is synthesized)
gcttacattttactgttctgcatattacaaaaaataacttgcaacttcataacttctttgacaaagtaaattacttttttgattgcagtttatatgaaaatgtactgatttttttttaat

SEQ ID NO: 399466 - DNA, 120 bp, Artificial Sequence
  ENSG00000146242_21 (sequence is synthesized)
aaactgcatcgagatccaaccgactgaattgttaaaaaaaaaaaaaataaagattcttaaaagaattacagtgtgtgcaagtttgctttgaaaaaaggatgaagggcaggagtattcaat

SEQ ID NO: 399467 - DNA, 120 bp, Artificial Sequence
  ENSG00000146242_22 (sequence is synthesized)
ggtcttggttccgatgataattattacttaacatagctgagaatcaaactgtagcaatgtctaatataaatagacttgggagatcgttttgaaatggtggatccttttagtatttaaatg

SEQ ID NO: 399468 - DNA, 120 bp, Artificial Sequence
  ENSG00000146242_23 (sequence is synthesized)
gagagtttgagtattcatgtgactgtatggtcccaaagttaatgctatttatgaaacagttttgtaagaacataatgaagttggtaaaagctaagcgttctgcacaataaacagttccca

SEQ ID NO: 399469 - DNA, 120 bp, Artificial Sequence
  ENSG00000146242_24 (sequence is synthesized)
gtttggggctttttcaaggctaatgaagttattgttggtctagaaaaatagtatttacttaataaaactctgtttgaaattgttctgtggatttttagagcagaatttgaaacaaatgta

SEQ ID NO: 399470 - DNA, 80 bp, Artificial Sequence
  ENSG00000146242_25 (sequence is synthesized)
ctgtggatttttagagcagaatttgaaacaaatgtaatgcaaataaatataaagataaagtgtcttaaagacaatattct

SEQ ID NO: 399471 - DNA, 120 bp, Artificial Sequence
  ENSG00000146242_26 (sequence is synthesized)
aggatattttcaaaaaaacatttaaagtggaacataaatgttctttagtttatcagagacccagctaatatgtttaaaaagttgacttgacatggttgaatatgaacttgaggaaataac

SEQ ID NO: 399472 - DNA, 120 bp, Artificial Sequence
  ENSG00000146242_27 (sequence is synthesized)
gataaatgtctacatctgtaaacacgtgtctcaagtatttataggttcttatcttcagttcagtgtttaagaatttgaggatattttgattttagctaagctgttcataatgtaagtata

SEQ ID NO: 399473 - DNA, 120 bp, Artificial Sequence
  ENSG00000146242_28 (sequence is synthesized)
tacacctttgtgaagaataaatcacatttaggtgtaaatacaggcaatcattaattgatacatccataatatacaaggcttttattattttttcagtttattatctgtcatttaatctga

SEQ ID NO: 399474 - DNA, 120 bp, Artificial Sequence
  ENSG00000146242_29 (sequence is synthesized)
aaagtaaattccattaatcagtcttcaggctcttttatcaagtgatttaaatgtagccattattgcttaactgaaagtattaggtaaacttgcatcagtaagtcttagggcttgcttttc

SEQ ID NO: 399475 - DNA, 120 bp, Artificial Sequence
  ENSG00000146242_30 (sequence is synthesized)
ctttgaactggttatgtccttcagtgctttatgtttgaaataaaatctacattttcatatttttataaataaaataggatcagatagtattttaggttctagaaatctttgctgattcct

SEQ ID NO: 399476 - DNA, 120 bp, Artificial Sequence
  ENSG00000146242_31 (sequence is synthesized)
tctttgaattaaattcagaaattttcaaagtagggctaaaaataagtaaatcttcctttttataggttagaatatatagtcagaatacaaagctgtaattccttaaattccatcaggctt

SEQ ID NO: 399477 - DNA, 120 bp, Artificial Sequence
  ENSG00000146242_32 (sequence is synthesized)
gttttgtgaaatatagtatttattatttaagggttatatttcagatcctataattacctcagaaaaagctaaatatttggcacttaaaattccatcaaacagtttaagtgttcatcagaa

SEQ ID NO: 399478 - DNA, 120 bp, Artificial Sequence
  ENSG00000146242_33 (sequence is synthesized)
attcctaaactgtctggttgccattatttggtaagaacaatgagatactaatctgtcaaaaatagtgaccactatcttagtaaactgttgatggacttagtaagtcttctgatattgtag

SEQ ID NO: 399479 - DNA, 120 bp, Artificial Sequence
  ENSG00000146242_34 (sequence is synthesized)
gaaacaaattataatattgatagagcctctattgagaagaattgtttcttcatcacatgataatctaacagtttaaagtggagctttatctaagaaccagggaagcagtagattcattag

SEQ ID NO: 399480 - DNA, 120 bp, Artificial Sequence
  ENSG00000146242_35 (sequence is synthesized)
tctagcttttctcatcaactctttgaagcaatgatgaatctgataaagtgaagccaagttttccctgttaggtagatggcttctttgaagttataatttattgcttctttttcatccccc

SEQ ID NO: 399481 - DNA, 120 bp, Artificial Sequence
  ENSG00000146242_36 (sequence is synthesized)
tacttattctcttgtttggactttccaattgctactgctttgttttccatcacatcactccttcctgttctccaaaatatggaaataaaaaagtcaattaaaagaacaccttattcttaa

SEQ ID NO: 399482 - DNA, 120 bp, Artificial Sequence
  ENSG00000146242_37 (sequence is synthesized)
gataaaaaattgttattatttgacaactaattaatgttttgcagccctaatattcttaagtctataagcttataaaacattctaagttccttggaagatagaggctatataaattcaata

SEQ ID NO: 399483 - DNA, 120 bp, Artificial Sequence
  ENSG00000146242_38 (sequence is synthesized)
agtataagggaatatgggaaaaataaaagtatcactttatttaaaaataagacaagtctgtttgttttaaatactgttcttactattaatgcattgttgactctagaaacctgcaagtat

SEQ ID NO: 399484 - DNA, 120 bp, Artificial Sequence
  ENSG00000146242_39 (sequence is synthesized)
ccatttttaaaattttattttagttggtaatactctttattactgaacgtaaaattttcaacataaaacacccttcatttatcctttacaagtttcatttgaagaaagttagaaaaaata

SEQ ID NO: 399485 - DNA, 120 bp, Artificial Sequence
  ENSG00000146242_40 (sequence is synthesized)
cttagaaattcaaggacttgatatatcccttaatttagaaagctattcaactatcccataaatttctatttaaagtagcaaaaattttaggataatacagctatttggccctgaattata

SEQ ID NO: 399486 - DNA, 120 bp, Artificial Sequence
  ENSG00000146242_41 (sequence is synthesized)
actgccccctttgattgtaaccattcagtttgcagcattcgtttttgtaatagcagtttggctgctatgggtgtgattcaatggtaacctacaaggcaaatttgtacaggagctgacaga

SEQ ID NO: 399487 - DNA, 120 bp, Artificial Sequence
  ENSG00000146242_42 (sequence is synthesized)
tttttctaacaaaataaggagactttgaagcacattgaataggagtttttaaatgaataggattttttaaaggaaaaagagtaggagcttgggggggaaggctggttgaaataaatgagc

SEQ ID NO: 399488 - DNA, 120 bp, Artificial Sequence
  ENSG00000146242_43 (sequence is synthesized)
aaatcacaaataataaatcctttagaaataccttgattggcagtaagtgtggattatgctcatctcagtatttaattagaaataacttacctttgtcttttgtctttttaattaaagtgg

SEQ ID NO: 399489 - DNA, 120 bp, Artificial Sequence
  ENSG00000146242_44 (sequence is synthesized)
ctgtaaaaaagaaggtccagatgaactgagattgtttgcttaggaattctgttttactcttttccttttacctgatgttctaaaacagggcttaccttgttgaggaccttagaggctttg

SEQ ID NO: 399490 - DNA, 120 bp, Artificial Sequence
  ENSG00000146242_45 (sequence is synthesized)
caattctagattgtgattctttcatatcattttagtttttctcccaagactacactaaaggagacatcacgagatttgcaaggttaaaaacaattctgcacgtgcttcctcctgctccca

SEQ ID NO: 399491 - DNA, 120 bp, Artificial Sequence
  ENSG00000146242_46 (sequence is synthesized)
aatccggtcatccacctttcagagcagcaccgtaaagtgaagacagacatttattagatgaaattctggtttcacttttacacttgtgcaagcatttttaacagtaaaggagaggaaagg

SEQ ID NO: 399492 - DNA, 120 bp, Artificial Sequence
  ENSG00000146242_47 (sequence is synthesized)
gaggaatttatatttctagataatatatgaaaattaccttgatattgtatttttaagatctttcaccaatactgcagtgctgcactagaaataattagtttaagaaaatacattcaacat

SEQ ID NO: 399493 - DNA, 120 bp, Artificial Sequence
  ENSG00000146242_48 (sequence is synthesized)
tgtccaggtgatcctgtcaccttttagatgacgaaaaacatcttgaggatgttttgtacagttattttcccattgttactcttagagacttttgtttcaaaaaggcaggctcattttatt

SEQ ID NO: 399494 - DNA, 120 bp, Artificial Sequence
  ENSG00000146242_49 (sequence is synthesized)
ttgttttatcttagaacattttagcagctctttgtcatgggttaaaaaaatctagaattaaaaaaatgtttaatatatgatttatataattttgacaagaatacaaattcttagtcgttc

SEQ ID NO: 399495 - DNA, 120 bp, Artificial Sequence
  ENSG00000146242_50 (sequence is synthesized)
aaaattggaagcgctcttagaagtgtcaagctcagctttccattccacaaatgaagtaactggtaactgtgacttattatgttatacagtgacagttattatgttatacagtgtcagtta

SEQ ID NO: 399496 - DNA, 120 bp, Artificial Sequence
  ENSG00000146242_51 (sequence is synthesized)
tacagtgacaaccaggacaaaatcctagggttctagattccccttctggtgctctttttaccagatgatggcattactaattgcctaccttgaggcctttgaaatcaccatgtctgataa

SEQ ID NO: 399497 - DNA, 120 bp, Artificial Sequence
  ENSG00000146242_52 (sequence is synthesized)
aaacatgcaattgctttggtgaatttgtttgttttattgttgttgctttgagtgaatgcttcagtttgctctagattttactttgttaaaaattaccatgttttaacccccgaaaacatt

SEQ ID NO: 399498 - DNA, 120 bp, Artificial Sequence
  ENSG00000146242_53 (sequence is synthesized)
taatgtttttgaaatgattttttcataacaatcttatgagtctattatataataggaagtattttggaaatttaatggtgatatttctttggaaaagaaaaataaaaactctggaatgca

SEQ ID NO: 399499 - DNA, 120 bp, Artificial Sequence
  ENSG00000146242_54 (sequence is synthesized)
tttctctctctctctctcttaaagttggcgcgctctcttcacaagttccatcactacccaagaagtgagggggcgggggggacaggcgggaaggcattaattacacctaaatctgaagtt

SEQ ID NO: 399500 - DNA, 120 bp, Artificial Sequence
  ENSG00000146242_55 (sequence is synthesized)
tgcggcctcaagtaccactttgatggggagagcttctgaagcttccatacaacctgccgtgcctttgctgctgccgcagtagattttcagctcatttctttctgctgctgcttcgcgctg

SEQ ID NO: 399501 - DNA, 120 bp, Artificial Sequence
  ENSG00000146242_56 (sequence is synthesized)
acccggaggccgaccttccgccgaggcggtgcaggaaggaacgggagagggagaagtttggtagggaaggaattggggattaagcggtccctcagaggatccagcgaggggcgccaacaa

SEQ ID NO: 399502 - DNA, 120 bp, Artificial Sequence
  ENSG00000146243_0 (sequence is synthesized)
actatggaaacccagctgccatcgctatgtctctgcaaaagacccctccgacccgagtgttcgtggaactggttccctgggctgaccggagccgggagaacaacctggcctcagggagag

SEQ ID NO: 399503 - DNA, 120 bp, Artificial Sequence
  ENSG00000146243_1 (sequence is synthesized)
agacgctaccgggcttacgccaccccctctcctcaacacaagcccaaactgctacccgcgaggtgcaagtaagcggcacctcagaagtgtctgcgggccctgaccgggcgcaggtggtgg

SEQ ID NO: 399504 - DNA, 120 bp, Artificial Sequence
  ENSG00000146243_2 (sequence is synthesized)
tgcgagtgagcagcaccaaggaggcggcagccgaggccaaaaagagcgtttgtcgccgtctagattacatcacgcagagcctccagcagcagggcgtgcaggcagaaaatataactgtga

SEQ ID NO: 399505 - DNA, 120 bp, Artificial Sequence
  ENSG00000146243_3 (sequence is synthesized)
caaaggattttaggagagtggaaaatgcttatcacatggaagcagaggtctgcattacatttactgaatttggaaaaatgcaaaatatttgtaactttcttgttgaaaagctagatagct

SEQ ID NO: 399506 - DNA, 120 bp, Artificial Sequence
  ENSG00000146243_4 (sequence is synthesized)
ctgttgtcatcagcccaccccagttctatcatactccaggttctgttgagaatcttcgacggcaagcctgtcttgttgctgttgagaatgcgtggcgcaaagctcaagaagtctgtaacc

SEQ ID NO: 399507 - DNA, 120 bp, Artificial Sequence
  ENSG00000146243_5 (sequence is synthesized)
ttgttggccaaaccttaggaaaacctttactaatcaaagaagaagaaacaaaagaatgggaaggccaaatagatgatcaccagtcatccagactctcaagttcattaactgtacaacaaa

SEQ ID NO: 399508 - DNA, 120 bp, Artificial Sequence
  ENSG00000146243_6 (sequence is synthesized)
aaatcaaaagtgcaacaatacatgctgcttcaaaagtatttataacttttgaggtaaagggaaaagagaagagaaaaaagcacctttgaaattccaaacaaattatattgtacttgtatc

SEQ ID NO: 399509 - DNA, 80 bp, Artificial Sequence
  ENSG00000146243_7 (sequence is synthesized)
atatggtataggagataagctatttctttccaaaatctataaatctttgaatatagtcccacagaatacttatgttcact

SEQ ID NO: 399510 - DNA, 120 bp, Artificial Sequence
  ENSG00000146243_8 (sequence is synthesized)
ctttgaatatagtcccacagaatacttatgttcactttctatttttaaaagactactctgaaaaacactcttggataataaatgtattatgtgcatacttatatactgacagttcataca

SEQ ID NO: 399511 - DNA, 120 bp, Artificial Sequence
  ENSG00000146243_9 (sequence is synthesized)
agcacatgtgtaatatttctattataaggacagatattgacccttgcatttcataatttttaaagatatttaagctaaaattttctcagccacatttttatataaaaccaaattttatgt

SEQ ID NO: 399512 - DNA, 120 bp, Artificial Sequence
  ENSG00000146243_10 (sequence is synthesized)
aaaaactaggcttcaataagttagctaaattttttaaattgtaagacaaaatttttatggaaaagaattcctatatcccatcaaacctaataattttccacaactaaaaatgagtataaa

SEQ ID NO: 399513 - DNA, 120 bp, Artificial Sequence
  ENSG00000146243_11 (sequence is synthesized)
tacataattttaagtgcatcctgtcaggtctgatatttaattttactttagttagaagctaagtagttaccctgttacttcttcatggatgctaacagaagacttgagattcccagacag

SEQ ID NO: 399514 - DNA, 120 bp, Artificial Sequence
  ENSG00000146243_12 (sequence is synthesized)
aaacaaaggactattactcatggcacaacaaggagcatgagcatcagcacattctcattgcttccccttgtcccaggtcccatgggggcaaaatgatatggccatatgcaatatggctac

SEQ ID NO: 399515 - DNA, 120 bp, Artificial Sequence
  ENSG00000146243_13 (sequence is synthesized)
atatacagcaggcttttgttgtaggtaaagaatactgagcttggagggttcactgctttttatccatgaacagaagcaaacctgctctttgcctcatcccttatagatgctcactcaaaa

SEQ ID NO: 399516 - DNA, 120 bp, Artificial Sequence
  ENSG00000146243_14 (sequence is synthesized)
ctcaatactgagaaatggcccaggtaaagaacagccaaggtctttcatgcttgccacacccagcaatatgtttaggaaggtgaagtctactgagggctatctcacatctaacagtttctt

SEQ ID NO: 399517 - DNA, 120 bp, Artificial Sequence
  ENSG00000146243_15 (sequence is synthesized)
tactaggaccagagaccattttggtaagatgcagataacaaccccaaccttaacaacttcacaacatgaatagaaatagtgataaataattcatagctttttacaaaagaataatgaggt

SEQ ID NO: 399518 - DNA, 120 bp, Artificial Sequence
  ENSG00000146243_16 (sequence is synthesized)
ataataggaaaatgttttgatgccaaaaataaaagagttaatgtttggatcggactccaacagggctccttagagtgatacaaatacaaagcaaacgatatgtgtaatttaaaatttcct

SEQ ID NO: 399519 - DNA, 120 bp, Artificial Sequence
  ENSG00000146243_17 (sequence is synthesized)
tacaaagcaaacgatatgtgtaatttaaaatttcctagtgcacatgtttttttatttttctttttcgagatggagtctttctctgtcgcccaagctggagtgcagtggtacgatctcagc

SEQ ID NO: 399520 - DNA, 120 bp, Artificial Sequence
  ENSG00000146243_18 (sequence is synthesized)
tgggattacaggcgtgagccactgcatctggccctgtacgcacatttttaaaaataaaactttaaaaaagaaacagttgaaactaattttaataacattttatttaaccaaatatatcaa

SEQ ID NO: 399521 - DNA, 120 bp, Artificial Sequence
  ENSG00000146243_19 (sequence is synthesized)
taaccaaatatatcaaaaatattatttcagcatgtaatcagtattttttaaattgagatatttgttttatcttcaaaattcagtgtatatttttacataatagcacatctcaattcacat

SEQ ID NO: 399522 - DNA, 120 bp, Artificial Sequence
  ENSG00000146243_20 (sequence is synthesized)
attcacatgctaaattttcatcagaaatattttatctgtatttaaatttcctaaaatgtacagttgaaaaaaagagattcacatacccaggttgttctagcatgcctaaaaaatcttgta

SEQ ID NO: 399523 - DNA, 120 bp, Artificial Sequence
  ENSG00000146243_21 (sequence is synthesized)
actggatcaagtatcagtttttaaattagttaaaattaaataaaatttaaaatttagttcctcagtcacactagccatatttcaagtacttgaaggccacaaatggcttgagactacctt

SEQ ID NO: 399524 - DNA, 120 bp, Artificial Sequence
  ENSG00000146243_22 (sequence is synthesized)
gctgaacagaccaaggtcaaacactgagataataatgattcttaaggccatttgaaagttaacagcaagtatgtattactgctatctacagtaagaattacattttatctacaggcaatc

SEQ ID NO: 399525 - DNA, 120 bp, Artificial Sequence
  ENSG00000146243_23 (sequence is synthesized)
gagtttttccattgataaatctggatgtttatataccaacagtactttcttacaacatattccagtatatagtgtccagcttcacccactttttaaagtggccctgaaacaattttattc

SEQ ID NO: 399526 - DNA, 120 bp, Artificial Sequence
  ENSG00000146243_24 (sequence is synthesized)
atcttattggagtgttgctgtaggggaagagtagaagctaagaagagtttgagttcaacaccattatatccaaatcctgaccttactactggaatgtaagctccttgaaagtggagatct

SEQ ID NO: 399527 - DNA, 120 bp, Artificial Sequence
  ENSG00000146243_25 (sequence is synthesized)
tgtctgtcttgttcacagttgtgttcccagccccagaggtagtctcagggccaatatcaagtatgctctcaaatatttgctgggaaaatttactagctggataaaaggcaagttacttta

SEQ ID NO: 399528 - DNA, 120 bp, Artificial Sequence
  ENSG00000146243_26 (sequence is synthesized)
atctctttaatcttcctttgtccttacaaatgaaagagactaatagtacttaaccttgcagtgttattataaggattaaagttgataaatatatgatcatgagaacaattgctagcacat

SEQ ID NO: 399529 - DNA, 120 bp, Artificial Sequence
  ENSG00000146243_27 (sequence is synthesized)
aacggtcactctgaaaatagtagctgatatatcagctgcattgtttgattattgttggctcaattaaaagttggcttttccaaatcctccattaggaagaatttttaaatagccatattg

SEQ ID NO: 399530 - DNA, 120 bp, Artificial Sequence
  ENSG00000146243_28 (sequence is synthesized)
aaaataaagttgtcagaaaaccaatgtaacatatgttgaatttttattaccaaaaagaagttactatccagttgtacagaaaagtagaatgaggttgtgcatcaagaaaaaaattgttcg

SEQ ID NO: 399531 - DNA, 120 bp, Artificial Sequence
  ENSG00000146243_29 (sequence is synthesized)
ttctcaacaaaaatttaatcacatgggtagtttttttttttttagctatgggttcatgctgtatttggttgcatcatatttgataaagaagcttccaacttagcatgaaatacctaaaga

SEQ ID NO: 399532 - DNA, 120 bp, Artificial Sequence
  ENSG00000146243_30 (sequence is synthesized)
caattttttttttaagttagtaggcactttttagaatttccaggaacttttaaagatgttgtctccaaaaaaaacaaaaaaatcctgtaaagtatacaatcctacatttttctatagaag

SEQ ID NO: 399533 - DNA, 120 bp, Artificial Sequence
  ENSG00000146243_31 (sequence is synthesized)
agcttagggaagaaatcattcaaagattggaaagacttatgtgtagtattctgtatactaaagggtatcaaatttagttgtcagttgatagcaatttaatttcttgatacatggcataca

SEQ ID NO: 399534 - DNA, 120 bp, Artificial Sequence
  ENSG00000146243_32 (sequence is synthesized)
ctggaatcttatgatgaattatttaggggacctgtgccacaaagtctactagaataaacctatcctaaacttaatcctgttagaatttccttcttttgaactctgtttaaaaaaaaaaaa

SEQ ID NO: 399535 - DNA, 120 bp, Artificial Sequence
  ENSG00000146243_33 (sequence is synthesized)
atctttccagaaagtaggaagttataatttctattttctgaaagacaaacaaaaattctaaataggatatttgaaacagacccactgtatcctaaatggaagtgctattaaaaggaaatg

SEQ ID NO: 399536 - DNA, 120 bp, Artificial Sequence
  ENSG00000146243_34 (sequence is synthesized)
aggaaatgctattaaaataagatttcatatattactgataattcataatgaattttaggattccattcaattacatactaaaaattacattttttatagtggcaatgtacttttatcagt

SEQ ID NO: 399537 - DNA, 120 bp, Artificial Sequence
  ENSG00000146243_35 (sequence is synthesized)
ttgacggtcaatttgagttcagtgtaaacaaataggacttagaaaaataatttgtaactcaagatgctgtacctcatcctataattgttgttttgtaatattccttctcaggaatatggg

SEQ ID NO: 399538 - DNA, 120 bp, Artificial Sequence
  ENSG00000146243_36 (sequence is synthesized)
ctaaggatatctcaactctgtcagatttgttgataagaatttaatagtaaggagttcttatagcctataaaaagcatgaattatgagatcaaatgtgggagttactatatgattatctgc

SEQ ID NO: 399539 - DNA, 120 bp, Artificial Sequence
  ENSG00000146243_37 (sequence is synthesized)
attacaaaatgaaagcaaatgctttatttattccaacaaaaaaagacctatataaattagtttaagctaacatttagacatttactattacatatatggtatttgcaaccaaatcactga

SEQ ID NO: 399540 - DNA, 120 bp, Artificial Sequence
  ENSG00000146243_38 (sequence is synthesized)
gtttgttgttgtcgttgtttgaggctgttgctctgtcacccaggatggagtgcaagtagctcaatcatagcttactgcagcctaaaaactcctgggctgaagaaatcctctcacctcagc

SEQ ID NO: 399541 - DNA, 120 bp, Artificial Sequence
  ENSG00000146243_39 (sequence is synthesized)
ctcctgggctgaagaaatcctctcacctcagccttttaagtagctgaaacattaggtgcacaccaccaggcctggctaattttttattagtgataaggtcttgctatgttgcccaggctg

SEQ ID NO: 399542 - DNA, 120 bp, Artificial Sequence
  ENSG00000146243_40 (sequence is synthesized)
tcagcttcccagagtgctggactacaggcttgagccactgcacccagccccaaatagcttctactcataacctagtgtggcctaaatttatttaaaatgcccgggtaggccaggcacgtt

SEQ ID NO: 399543 - DNA, 74 bp, Artificial Sequence
  ENSG00000146243_41 (sequence is synthesized)
attgaaaccctgtctcttctaaaaatacagaagttactcaggcgtggtggcgtgtgactgtaatctcagctacc

SEQ ID NO: 399544 - DNA, 120 bp, Artificial Sequence
  ENSG00000146243_42 (sequence is synthesized)
tcttctaaaaatacagaagttactcaggcgtggtggcgtgtgactgtaatctcagctaccggggaggctgaagcagaagaaacgctcgaacctgggaggcagagcttacagtgagccgag

SEQ ID NO: 399545 - DNA, 76 bp, Artificial Sequence
  ENSG00000146243_43 (sequence is synthesized)
gcccagtatcttacaagactgtagttcacagtgggtaattcaaatcagacactgctcttcaagagaggtaatatta

SEQ ID NO: 399546 - DNA, 120 bp, Artificial Sequence
  ENSG00000146243_44 (sequence is synthesized)
aattcaaatcagacactgctcttcaagagaggtaatattaatagaaatctttcaagaaggattgttttctactattaaaacaataaaactcttataaacctgtttatcagaaggatattt

SEQ ID NO: 399547 - DNA, 120 bp, Artificial Sequence
  ENSG00000146243_45 (sequence is synthesized)
ctgtttcagcaactcctggaatccttcttcaacatcccaaccaacaattactcccagatagccatgtcacctgtgaattatcatgaatcccacatcaaatgaacaaatactgcctctgga

SEQ ID NO: 399548 - DNA, 120 bp, Artificial Sequence
  ENSG00000146243_46 (sequence is synthesized)
cgcaactcctggaatccttcttcaacatcccaaccaacaattactcccagatagccatgtcacctgtgaattatcatgaatcccacatcaaatgaacaaatactgcctctggactctgaa

SEQ ID NO: 399549 - DNA, 120 bp, Artificial Sequence
  ENSG00000146243_47 (sequence is synthesized)
taattattcctagtgccatgactaaaactggattgaccaggactggaaagagtattcaaagctttggaatgtttcacagaattctctagtactaaaacatacaaacaaaatttaaaaatt

SEQ ID NO: 399550 - DNA, 120 bp, Artificial Sequence
  ENSG00000146243_48 (sequence is synthesized)
aaggatgcttaaagctttcttaggaaagctactttctaataggaaaaaggcgtatccaactagaaactcttaatagtttcagcccttttagaagctgtcccatcatttcaaaatttcgaa

SEQ ID NO: 399551 - DNA, 120 bp, Artificial Sequence
  ENSG00000146243_49 (sequence is synthesized)
ggcaagtcttggcaaattgctagctagtgtgggtactgtgatttaaattcaggtagtttagatcagagttgccatttttaagcattagtctataatgacctaaacctcaatttaattctt

SEQ ID NO: 399552 - DNA, 120 bp, Artificial Sequence
  ENSG00000146243_50 (sequence is synthesized)
cttattaaaaacttttttttaaaataggaaattaataaagaaggcaaaaacaacagtgtctgctaggaattactaaaactcagtatattgcatttggcaaagtaaaagcttaaattaaga

SEQ ID NO: 399553 - DNA, 120 bp, Artificial Sequence
  ENSG00000146243_51 (sequence is synthesized)
aaatcatcatatacatttcaatttagaaagtgagtcttacttgttttccctggtattgcagatgcattagcttttgtaataaaagtctttgcagctgaagaagtagatggttgctcagtg

SEQ ID NO: 399554 - DNA, 120 bp, Artificial Sequence
  ENSG00000146243_52 (sequence is synthesized)
acaactggatctacaaccactcggttgcttctggttcgaaccacagaactagattctgttttaccgtttatctgagcagcattgtgtcttggcggtattgatcgtgtaggtgtagagaat

SEQ ID NO: 399555 - DNA, 120 bp, Artificial Sequence
  ENSG00000146243_53 (sequence is synthesized)
gcagaggtagagctttctgattttagctggggttttaagatcctttttttcctttcagggctgtaaataaaatagtattgtcagtcactcttatagctctatgtgaacgaataaaacagt

SEQ ID NO: 399556 - DNA, 120 bp, Artificial Sequence
  ENSG00000146243_54 (sequence is synthesized)
ttataatatttttggattcaatatttgtactattatgaaatatgttaaaatatgagatttatagtggatttcatatgattgtgagcctttgaaagtgaatatttagtgaaggatcgctgt

SEQ ID NO: 399557 - DNA, 120 bp, Artificial Sequence
  ENSG00000146243_55 (sequence is synthesized)
atgcatatctaagttctagtgcaagagaggactaggagtaaatgctgaagggagtgtttaacccctttaacccattgcagtatgagcaagactactgtaagattcctttaacacagtgca

SEQ ID NO: 399558 - DNA, 120 bp, Artificial Sequence
  ENSG00000146243_56 (sequence is synthesized)
accaaaagacagacaccttttctcctttttgcttcacaacagaccacctcagccaccatgacacccagtaggaggtattccacaggaacagcagacgagaacttaccttacatcatgaca

SEQ ID NO: 399559 - DNA, 120 bp, Artificial Sequence
  ENSG00000146243_57 (sequence is synthesized)
catcaaggcatatagttcttgcaatggactaaatgtttgtttccccccaaaatttatagttgaaacctaatcccaagtatgatggtattcggaggaggcttttaggaggtgattgggaca

SEQ ID NO: 399560 - DNA, 120 bp, Artificial Sequence
  ENSG00000146243_58 (sequence is synthesized)
tgaggatagggctgtttatagatgagaactccaaggaccagagtgattattggcaggttgcttgcacacggtcacagccaggaagtggcagaattttaactttagggtccatgctcttaa

SEQ ID NO: 399561 - DNA, 120 bp, Artificial Sequence
  ENSG00000146243_59 (sequence is synthesized)
ccactacaggatgttgcttctttattctcttgacagtggataattgagattttaggtagggaagatgtcactgatgctattgataccactacttgtatcctttggcacttcacatttgtg

SEQ ID NO: 399562 - DNA, 120 bp, Artificial Sequence
  ENSG00000146243_60 (sequence is synthesized)
tggctgccggaatccactctctgcaaatggggccagagtgtaatgccagggaattaaagtcctctcccccagccccagcagccttcatctgaaggctaatgtagaactagaatgactgag

SEQ ID NO: 399563 - DNA, 120 bp, Artificial Sequence
  ENSG00000146243_61 (sequence is synthesized)
aacttttgagcaactcctggaatccttcttcaacatcccaaccaacaattactcccagatagccatgtcacctgtgaattatcatgaatcccacatcaaatgaacaaatactgcctctgg

SEQ ID NO: 399564 - DNA, 120 bp, Artificial Sequence
  ENSG00000146247_0 (sequence is synthesized)
agtcgctgcctgagagttgttgtttcctcctcctcctcctccgcctccgccgccgttgcttgaatggtggagccgaagctcggctcgtgaacacacactgacagctatagggcaggcggc

SEQ ID NO: 399565 - DNA, 120 bp, Artificial Sequence
  ENSG00000146247_1 (sequence is synthesized)
ggcaccgtccccgcttcccctcggcggcggggtgtcccgtcggcggccctgaagtgacccataaacatgtcttgtgagaggaaaggcctctcggagctgcgatcggagctctacttcctc

SEQ ID NO: 399566 - DNA, 120 bp, Artificial Sequence
  ENSG00000146247_2 (sequence is synthesized)
atcgcccggttcctggaagatggaccctgtcagcaggcggctcaggtgctgatccgcgaggtggccgagaaggagctgctgccccggcgcaccgactggaccgggaaggagcatcccagg

SEQ ID NO: 399567 - DNA, 120 bp, Artificial Sequence
  ENSG00000146247_3 (sequence is synthesized)
acctaccagaatctggtgaagtattacagacacttagcacctgatcacttgctgcaaatatgtcatcgactaggacctcttcttgaacaagaaattcctcaaagtgttcctggagtacaa

SEQ ID NO: 399568 - DNA, 120 bp, Artificial Sequence
  ENSG00000146247_4 (sequence is synthesized)
actttattaggagctggaagacagtctttactacgcacaaataaaagctgcaagcatgttgtgtggaaaggatctgctctggctgcgttgcactgtggaagaccacctgagtcaccagtt

SEQ ID NO: 399569 - DNA, 120 bp, Artificial Sequence
  ENSG00000146247_5 (sequence is synthesized)
aactatggtagcccacccagcattgcggatactctgttttcaaggaagctgaatgggaaatacagacttgagcgacttgttccaactgcagtgtatcagcacatgaaaatgcataaacga

SEQ ID NO: 399570 - DNA, 120 bp, Artificial Sequence
  ENSG00000146247_6 (sequence is synthesized)
attcttggacacttgtcatctgtgtactgtgtaacttttgatcgaactggcagacggatatttactggttctgatgactgtcttgtgaaaatatgggcaacagatgatgggaggttgtta

SEQ ID NO: 399571 - DNA, 120 bp, Artificial Sequence
  ENSG00000146247_7 (sequence is synthesized)
gctaccttaagaggacatgctgctgaaatatcagacatggctgtaaactatgagaataccatgatagcagctggaagttgtgataaaatgatccgagtctggtgtcttcgaacctgtgca

SEQ ID NO: 399572 - DNA, 120 bp, Artificial Sequence
  ENSG00000146247_8 (sequence is synthesized)
cctttggctgttcttcagggccatagtgcatctattacatcactacagttctcaccattgtgcagtggctcaaagagatatctatcttctactggggcagatggcactatttgtttttgg

SEQ ID NO: 399573 - DNA, 120 bp, Artificial Sequence
  ENSG00000146247_9 (sequence is synthesized)
ctctgggatgctggaacccttaaaataaacccaagacctgcaaaatttacagagcgccctcggcctggagttcaaatgatctgttcttcttttagtgctggtggaatgtttctggcgacg

SEQ ID NO: 399574 - DNA, 120 bp, Artificial Sequence
  ENSG00000146247_10 (sequence is synthesized)
ggaagcacagatcatattattcgggtttatttttttggatcaggtcagccagagaaaatatcagaattggagtttcatactgacaaagttgacagtatccagttttccaacactagtaac

SEQ ID NO: 399575 - DNA, 120 bp, Artificial Sequence
  ENSG00000146247_11 (sequence is synthesized)
aggtttgtaagtggcagtcgtgatgggacagcacgtatttggcaatttaaacgaagagagtggaagagcattttgttggatatggctactcgtccagcaggccaaaaccttcaaggaata

SEQ ID NO: 399576 - DNA, 120 bp, Artificial Sequence
  ENSG00000146247_12 (sequence is synthesized)
gaagataaaatcacaaaaatgaaggttactatggtagcttgggatcgacatgacaatacagttataactgcagttaataacatgactctgaaagtttggaattcttacactggtcaacta

SEQ ID NO: 399577 - DNA, 120 bp, Artificial Sequence
  ENSG00000146247_13 (sequence is synthesized)
attcatgtcctgatgggtcatgaagatgaggtatttgttcttgaaccacacccgttcgatcctagagttctcttttctgctggtcatgatggaaacgtgatagtgtgggatctggcaaga

SEQ ID NO: 399578 - DNA, 120 bp, Artificial Sequence
  ENSG00000146247_14 (sequence is synthesized)
ggagtcaaaatacgatcttatttcaatatgattgaaggccaaggacatggcgcagtatttgactgcaaatgctctcctgatggtcagcattttgcatgcacagactctcatggacatctt

SEQ ID NO: 399579 - DNA, 120 bp, Artificial Sequence
  ENSG00000146247_15 (sequence is synthesized)
ttaatttttggctttgggtccagtagcaaatatgacaagatagcagatcagatgttctttcatagtgattatcggccacttattcgtgatgccaacaattttgtattagatgaacagact

SEQ ID NO: 399580 - DNA, 120 bp, Artificial Sequence
  ENSG00000146247_16 (sequence is synthesized)
cagcaagcacctcatcttatgcctcccccttttttggttgatgttgatggtaaccctcatccatcaagatatcaaagattagttcctggccgtgaaaattgcagggaggagcaactcatc

SEQ ID NO: 399581 - DNA, 120 bp, Artificial Sequence
  ENSG00000146247_17 (sequence is synthesized)
cctcagatgggagtaacttcctcaggactgaatcaagttttaagtcagcaagcaaaccaggagatcagcccactggacagcatgattcaaagactacaacaggagcaagacctgagacgt

SEQ ID NO: 399582 - DNA, 120 bp, Artificial Sequence
  ENSG00000146247_18 (sequence is synthesized)
tctggtgaagcagttatcagtaataccagccgtttaagtagaggctccataagttctacctcagaggttcattcaccaccaaacgtaggactaagacgtagtggacaaattgaaggtgta

SEQ ID NO: 399583 - DNA, 120 bp, Artificial Sequence
  ENSG00000146247_19 (sequence is synthesized)
cggcaaatgcacagcaacgcaccaagaagtgaaatagccacagagcgggatctggtagcttggagtcgaagggtggtagtacccgagctatcagctggtgtagccagtaggcaagaagaa

SEQ ID NO: 399584 - DNA, 120 bp, Artificial Sequence
  ENSG00000146247_20 (sequence is synthesized)
tggagaactgcaaagggagaagaagaaataaagacttacaggtcagaagagaaaagaaaacacttaactgttccaaaagagaataaaatacccactgtctcaaagaatcatgctcatgag

SEQ ID NO: 399585 - DNA, 120 bp, Artificial Sequence
  ENSG00000146247_21 (sequence is synthesized)
catttcctggatcttggagaatccaaaaagcaacagacaaatcaacacaattatcgtacaagatctgcattggaagagactcctagaccctcagaagagatagaaaatggcagtagttct

SEQ ID NO: 399586 - DNA, 120 bp, Artificial Sequence
  ENSG00000146247_22 (sequence is synthesized)
tcagatgaaggcgaagtagttgctgtcagtggtggaacatccgaagaagaagagagagcatggcacagtgatggcagttctagtgactactccagtgattactctgactggacagcagat

SEQ ID NO: 399587 - DNA, 120 bp, Artificial Sequence
  ENSG00000146247_23 (sequence is synthesized)
gcaggaattaatctgcagccaccaaagaaagttcctaagaataaaaccaagaaagcagaaagcagttcagatgaagaagaagaatctgaaaaacagaagcaaaaacagattaaaaaggaa

SEQ ID NO: 399588 - DNA, 120 bp, Artificial Sequence
  ENSG00000146247_24 (sequence is synthesized)
aagaaaaaagtaaatgaagaaaaagatggaccaatatcaccaaagaaaaagaagcccaaagaaagaaaacaaaagagattggctgtgggagaactaactgaaaatggtttgacattagaa

SEQ ID NO: 399589 - DNA, 120 bp, Artificial Sequence
  ENSG00000146247_25 (sequence is synthesized)
gaatggttgccatcaacatggattacagataccattccccgaagatgtccatttgtgccacagatgggtgatgaggtttattatttccgacaaggacatgaagcctatgtcgaaatggcc

SEQ ID NO: 399590 - DNA, 120 bp, Artificial Sequence
  ENSG00000146247_26 (sequence is synthesized)
cggaaaaataaaatatatagtatcaatcccaaaaaacaaccatggcataaaatggagctacgggaacaagaacttatgaaaatagttggcataaagtatgaagtgggattacctaccctt

SEQ ID NO: 399591 - DNA, 120 bp, Artificial Sequence
  ENSG00000146247_27 (sequence is synthesized)
tgctgccttaaacttgcttttctagatcctgatactggtaaactgactggcggatcatttaccatgaaataccatgatatgcctgacgttatagatttcctagtcttgagacaacaattt

SEQ ID NO: 399592 - DNA, 120 bp, Artificial Sequence
  ENSG00000146247_28 (sequence is synthesized)
gatgatgcaaaatacaggcgatggaatataggtgaccgcttcaggtctgtcatagatgatgcctggtggtttggaacaatcgaaagccaggaacctcttcaacttgagtaccctgatagt

SEQ ID NO: 399593 - DNA, 120 bp, Artificial Sequence
  ENSG00000146247_29 (sequence is synthesized)
ctgtttcaatgctacaatgtttgctgggacaatggagatacagaaaagatgagtccttgggatatggagcttatacctaataatgctgtatttcctgaagaactaggtaccagtgttcct

SEQ ID NO: 399594 - DNA, 120 bp, Artificial Sequence
  ENSG00000146247_30 (sequence is synthesized)
ttaactgatggtgagtgcagatcactaatctataaacctcttgatggagaatggggtaccaatcccagggatgaagaatgtgaaagaattgtggcaggaataaaccagttgatgacacta

SEQ ID NO: 399595 - DNA, 120 bp, Artificial Sequence
  ENSG00000146247_31 (sequence is synthesized)
gatattgcctcagcatttgtggcccccgtggatctgcaagcctatcccatgtattgcacagtagtggcatatccaacggatctaagtacaattaaacaaagactggaaaacaggttttac

SEQ ID NO: 399596 - DNA, 120 bp, Artificial Sequence
  ENSG00000146247_32 (sequence is synthesized)
aggcgggtttcttccctaatgtgggaagttcgatatatagagcataatacacgaacatttaatgagcctggaagccctattgtgaaatctgctaaattcgtgactgatcttcttctacat

SEQ ID NO: 399597 - DNA, 120 bp, Artificial Sequence
  ENSG00000146247_33 (sequence is synthesized)
tttataaaggatcagacttgttataacataattccactttataattcaatgaagaagaaagttttgtctgattctgaggatgaagagaaagatgctgatgtgccaggaacttctactcga

SEQ ID NO: 399598 - DNA, 120 bp, Artificial Sequence
  ENSG00000146247_34 (sequence is synthesized)
aaaaggaaggaccatcagcctagaagaagattacgtaatagagcccagtcttacgatattcaagcatggaagaaacagtgtgaagaattgttaaatctcatatttcaatgtgaagattca

SEQ ID NO: 399599 - DNA, 120 bp, Artificial Sequence
  ENSG00000146247_35 (sequence is synthesized)
gagcctttccgtcagccggtagatctccttgaatatccagactacagagacatcattgacactccaatggattttgctaccgttagagaaactttagaggctgggaattatgagtcacca

SEQ ID NO: 399600 - DNA, 120 bp, Artificial Sequence
  ENSG00000146247_36 (sequence is synthesized)
atggagttatgtaaagatgtcagacttattttcagtaattccaaagcatatacaccaagcaaaagatcaaggatttacagcatgagtttgcgcctgtctgctttctttgaagaacacatt

SEQ ID NO: 399601 - DNA, 120 bp, Artificial Sequence
  ENSG00000146247_37 (sequence is synthesized)
agttcagttttatcagattataaatctgctcttcgttttcataaaagaaataccataaccaaaaggaggaagaaaagaaacagaagcagctctgtttccagtagtgctgcatcaagccct

SEQ ID NO: 399602 - DNA, 120 bp, Artificial Sequence
  ENSG00000146247_38 (sequence is synthesized)
gaaaggaaaaaaaggatcttaaaaccccagctaaaatcagaaagctctacctctgcattctctacacctacacgatcaataccgccaagacacaatgctgctcagataaacggtaaaaca

SEQ ID NO: 399603 - DNA, 120 bp, Artificial Sequence
  ENSG00000146247_39 (sequence is synthesized)
gaatctagttctgtggttcgaaccagaagcaaccgagtggttgtagatccagttgtcactgagcaaccatctacttcttcagctgcaaagacttttattacaaaagctaatgcatctgca

SEQ ID NO: 399604 - DNA, 120 bp, Artificial Sequence
  ENSG00000146247_40 (sequence is synthesized)
ataccagggaaaacaatactagagaattctgtgaaacattccaaagctttgaatactctttccagtcctggtcaatccagttttagtcatggcactaggaataattctgcaaaagaaaac

SEQ ID NO: 399605 - DNA, 120 bp, Artificial Sequence
  ENSG00000146247_41 (sequence is synthesized)
atggaaaaggaaaagccagtcaaacgtaaaatgaagtcatctgtactcccaaaggcgtccactctttcaaagtcatcagctgtcattgagcaaggagattgtaagaacaacgctcttgta

SEQ ID NO: 399606 - DNA, 120 bp, Artificial Sequence
  ENSG00000146247_42 (sequence is synthesized)
ccaggaaccattcaagtaaatggccatggaggacagccatcaaaacttgtgaagaggggacctggaaggaaacctaaagtagaagttaataccaatagtggtgaaattatacacaagaaa

SEQ ID NO: 399607 - DNA, 120 bp, Artificial Sequence
  ENSG00000146247_43 (sequence is synthesized)
aggggtagaaagcccaaaaagctacagtatgcaaagccagaagatttagagcaaaataatgtgcatcccatcagagatgaagtacttccttcttcaacatgcaattttctttctgaaact

SEQ ID NO: 399608 - DNA, 120 bp, Artificial Sequence
  ENSG00000146247_44 (sequence is synthesized)
aataatgtaaaggaagatttgttacagaaaaagaatcgtggaggtaggaagcccaaaaggaagatgaagacacaaaaattagatgcagatctcctagtccctgcaagtgtcaaagtgtta

SEQ ID NO: 399609 - DNA, 120 bp, Artificial Sequence
  ENSG00000146247_45 (sequence is synthesized)
aggagaagtaaccgaaaaaagatagatgatcctatagatgaggaagaagagtttgaagaactcaaaggctctgaaccccacatgagaactagaaatcaaggtcgaaggacagctttctat

SEQ ID NO: 399610 - DNA, 120 bp, Artificial Sequence
  ENSG00000146247_46 (sequence is synthesized)
aatgaggatgactctgaagaggagcaaaggcagctgttgttcgaagacacctctttaacttttggaacttctagtagaggacgagtccgaaagttgactgaaaaagcaaaagctaattta

SEQ ID NO: 399611 - DNA, 120 bp, Artificial Sequence
  ENSG00000146247_47 (sequence is synthesized)
attggttggtaacttgtaccaaaatattttacttcaaaatctataaagcaggtacagttaaggaataagtagaactaaggcttctgcttccttgctgctgtggtggagtagggaatgtta

SEQ ID NO: 399612 - DNA, 84 bp, Artificial Sequence
  ENSG00000146247_48 (sequence is synthesized)
cttctgcttccttgctgctgtggtggagtagggaatgttatgatttgatgagacacttcacttctttaaatgaatatatatata

SEQ ID NO: 399613 - DNA, 120 bp, Artificial Sequence
  ENSG00000146247_49 (sequence is synthesized)
actgtttgaaacgaaagaaattgatctataatgaattcctgatttatttatagaaaagacaattctgctacactctttaggagcataatattcctagtgatagagcatttcatgttaaaa

SEQ ID NO: 399614 - DNA, 120 bp, Artificial Sequence
  ENSG00000146247_50 (sequence is synthesized)
tgaattatttttgaccaagtgaggtacatttctattgatacaagtcatgcccctaaaagatagatgttatacagagtagcagtgaattaagaaatgtttcctctaaaagataaatataaa

SEQ ID NO: 399615 - DNA, 120 bp, Artificial Sequence
  ENSG00000146247_51 (sequence is synthesized)
atttccaccatttgataccctaaacagtttaattttaattatagaatgttcatctacaaagtatctagaggaggcttttgctttattccatttctgccaaacaagagaaaatgtactgat

SEQ ID NO: 399616 - DNA, 120 bp, Artificial Sequence
  ENSG00000146247_52 (sequence is synthesized)
gaagggaaacatatccacattggaaaacatttgactgtctaatttttcagaccttgattcttatatcactcaatctctgtttattgtgccaaagactgagaatcagtgcagtggaaagcc

SEQ ID NO: 399617 - DNA, 120 bp, Artificial Sequence
  ENSG00000146247_53 (sequence is synthesized)
tgtttttgacgtcaggacagcatacacttttcaatattggaaaggctatatattctaaagagcaagttattaaagagttatgctgagatatatctttttttggtactaatagaaaataat

SEQ ID NO: 399618 - DNA, 120 bp, Artificial Sequence
  ENSG00000146247_54 (sequence is synthesized)
gcactggtgggtcctttgacagagatgttctagaggaaatgtttaagtggttaaaggattcaaggaaaatacaggaaaaaaggtatgggatttgatgtttacttgttgatctggattaat

SEQ ID NO: 399619 - DNA, 120 bp, Artificial Sequence
  ENSG00000146247_55 (sequence is synthesized)
gtcatttctaaactttagacatatctaatagcctaaaatgacttacaaagaaacgtgtctgtgtgtgtatgtgtatatattgataaatgggtataattaaatatatatacaaacacatac

SEQ ID NO: 399620 - DNA, 120 bp, Artificial Sequence
  ENSG00000146247_56 (sequence is synthesized)
ttatatactattacccaggtataaattcttttttcaggattttttagatagcagtagaataaaaataattttaaaatgtcatactttatagtttaattttaagggggaaattggttattt

SEQ ID NO: 399621 - DNA, 120 bp, Artificial Sequence
  ENSG00000146247_57 (sequence is synthesized)
tcaattattaaaggttaaaataggccaaatcactttttatgcaatcatgttttatacagtggtctcattgcacattgtgttttttctgcactttttacggtatccttatcatgctggtat

SEQ ID NO: 399622 - DNA, 120 bp, Artificial Sequence
  ENSG00000146247_58 (sequence is synthesized)
gtcaatatacaccctaaagaaaaactccatttaatgattgtgccttgtattctattattttttgcatcattagtaaaattaagttgtctattgtaaatgataactatatgacttaggaga

SEQ ID NO: 399623 - DNA, 120 bp, Artificial Sequence
  ENSG00000146247_59 (sequence is synthesized)
atgtattgctatatgtactgctatggaaaaggaaagcagttatttatttgtttatggtacagttagttattttataccttaaaaaccaacatacttaccatttctattgtttaaaaatta

SEQ ID NO: 399624 - DNA, 120 bp, Artificial Sequence
  ENSG00000146247_60 (sequence is synthesized)
ctgtccatttttttaaaaatttaaagaatgtagtattttctgaggactggtatggtacaaaaatgtaatcaaaattttcagatactacatttttaaaaagtgaggatggggaaaatatgt

SEQ ID NO: 399625 - DNA, 120 bp, Artificial Sequence
  ENSG00000146247_61 (sequence is synthesized)
atcagcatgaccctgatgtagaaaaataaagtctgcaattgaaccttggcaaaatacattacataattatttctgataaggataaatattagctgtcatttaactgtcgtgaagaatgaa

SEQ ID NO: 399626 - DNA, 120 bp, Artificial Sequence
  ENSG00000146247_62 (sequence is synthesized)
aaagtgatacatttgggctttttagatcatttgtaactaaatttgtacagaaattctcctgtgaaattaagtaaaccattttccagatcttgactgcattgctgagattttgcagttgaa

SEQ ID NO: 399627 - DNA, 120 bp, Artificial Sequence
  ENSG00000146247_63 (sequence is synthesized)
aatttcaaatttttcaggttttttgtatatttatttttttctaacaaatatatttaactataaaattaaaattcagtagttaaactcttcataatgcagaaatggatggcttgattgtat

SEQ ID NO: 399628 - DNA, 120 bp, Artificial Sequence
  ENSG00000146247_64 (sequence is synthesized)
gtatagaaaaatgagtctttcagttacaccattcttgaaaataatagtgtatgtttgaaatttgtcattaattagttgcttttgaaggcaatctatttgaaatatgtaatttcctgatgt

SEQ ID NO: 399629 - DNA, 120 bp, Artificial Sequence
  ENSG00000146247_65 (sequence is synthesized)
tatctgcattgtgttaagaaaaaaataataggctataaaatcaatttttgtaaaaaaaatgtacagttttaagttgtgtacagaaaaaggaagagcgtacacagtcttagagtggaatat

SEQ ID NO: 399630 - DNA, 120 bp, Artificial Sequence
  ENSG00000146247_66 (sequence is synthesized)
acctctagtacagtgtatgtgttaattccaactcaagcaaagaaatgagtatttaccatctttcctataacatgtaaatgtattattcctgttctacagacactgtatatttatgacctt

SEQ ID NO: 399631 - DNA, 120 bp, Artificial Sequence
  ENSG00000146247_67 (sequence is synthesized)
atttggacattattagacactggtttcttagtaaagcacagtaacttggatcagattctttgtaaccgaaacacttaaacatgtattagtaataccaatatatttagattttatattttt

SEQ ID NO: 399632 - DNA, 120 bp, Artificial Sequence
  ENSG00000146247_68 (sequence is synthesized)
ataatttagcttctatgcattacagaagttgaattaagaaatttaagtcatcaccatatttttgttttctttaccacttgggaaaataatcctctttgaggcagtaacactatgtatgta

SEQ ID NO: 399633 - DNA, 120 bp, Artificial Sequence
  ENSG00000146247_69 (sequence is synthesized)
ctgttaataggccagaaagaaatattggcagttgtcttaggtaagcaataaaaacatctccaatttactgaaagttcagaaatataactcttacatgcatggaaagtgtaaaccaattta

SEQ ID NO: 399634 - DNA, 120 bp, Artificial Sequence
  ENSG00000146247_70 (sequence is synthesized)
ggtatttctaagtacccaaccctagtattctctccctcaactccaacattctcaagtcccagatgaaaagtttcagtggagcattagtttaaatatttagtctaatcagagactcacagc

SEQ ID NO: 399635 - DNA, 120 bp, Artificial Sequence
  ENSG00000146247_71 (sequence is synthesized)
cctgggcaatagatacatagctttttaaaattttatcctttgtgacctgctatagtggcattggactattttctgcatgtattataaactaaagattggccttatttcaattgtttttat

SEQ ID NO: 399636 - DNA, 120 bp, Artificial Sequence
  ENSG00000146247_72 (sequence is synthesized)
tgcacaacttcactacaaatttaaagactgctggcattattataaaactgtcttcctccaatccaagtaaataagtatgtggaatatttgtgagctggattaggtaacatctgagacttg

SEQ ID NO: 399637 - DNA, 120 bp, Artificial Sequence
  ENSG00000146247_73 (sequence is synthesized)
ggattgactaaatttagttatcacttggaaatgaattacataagatacagtaatcagagaaaatatctttatgcagcatgtatgttaacatctagaactgtccctcatctgcagtgcagt

SEQ ID NO: 399638 - DNA, 120 bp, Artificial Sequence
  ENSG00000146247_74 (sequence is synthesized)
agaggaatcagacattttaagaaatgtattcaaatatttttatcttatatgttagcagcatttacatgttttcagatatgatttgtaatataaattaatttctccagttaacaatgttta

SEQ ID NO: 399639 - DNA, 120 bp, Artificial Sequence
  ENSG00000146247_75 (sequence is synthesized)
cttcaattctgacattccattttatacatatatacctactgtatatctctctcaaatgtcagctagaagcaactttttcagttttctatctaatgaaaacggatatattctgaatgtttt

SEQ ID NO: 399640 - DNA, 120 bp, Artificial Sequence
  ENSG00000146247_76 (sequence is synthesized)
tgttacctgaaatttatttttgagtaggttgaaaggaccaagatacttgagtgattaaaggactgtaagtgttctgcttatatgcaggagttacatgattttaaaagtcataatagggga

SEQ ID NO: 399641 - DNA, 120 bp, Artificial Sequence
  ENSG00000146247_77 (sequence is synthesized)
agtagttttatcatctgattactcctattaacctaaaaagtatttctaacataacagattgagcagtggttttgttacacttaggcaagaatttattttcccattaaaatttgaaaaata

SEQ ID NO: 399642 - DNA, 120 bp, Artificial Sequence
  ENSG00000146247_78 (sequence is synthesized)
cacttttctttgcttctacccttgcagtttcccttagttcccctaatttccaagtgatctgaactaaaattaatattacatttactaagaaactatttttgttaattatactgagcaaag

SEQ ID NO: 399643 - DNA, 120 bp, Artificial Sequence
  ENSG00000146247_79 (sequence is synthesized)
tttgctccaaatgaaaagtcattacgaactatgtatagtacccaagaaaaggtcaaattgagtcagaagactgtaagtaccacttttggcgctccagagataaaccttgtacacactgca

SEQ ID NO: 399644 - DNA, 120 bp, Artificial Sequence
  ENSG00000146247_80 (sequence is synthesized)
gtagaacagtgagtagaaaatatgagctataaatagatattatttttagttttgatagctctgtgttgaaatacttttttaatgcagataaaaattatcaggaaattaaccttatggcac

SEQ ID NO: 399645 - DNA, 120 bp, Artificial Sequence
  ENSG00000146247_81 (sequence is synthesized)
agaccaaatacttagtgcatggctgagtttctacaattcaaggagccaagaaaataggttcaagatggaatatagtacatgcatataaggcagatgcacacatgctggttactttaagat

SEQ ID NO: 399646 - DNA, 120 bp, Artificial Sequence
  ENSG00000146247_82 (sequence is synthesized)
tgtgtgtgttgattagtcacaatgatagactataacatgagacaatacaaagttacatttttggaccatattaaaactgcaagaagacaggggtcttactgaagatcttttagaaaactt

SEQ ID NO: 399647 - DNA, 120 bp, Artificial Sequence
  ENSG00000146247_83 (sequence is synthesized)
aaatcctgtcacaggatatttagacatgtgtagaatgtagctcaatttttaaaaagtaactgacctagagggtgaaagttgaaactgacacattttcaaattaagattatgcttattttg

SEQ ID NO: 399648 - DNA, 120 bp, Artificial Sequence
  ENSG00000146247_84 (sequence is synthesized)
tacagaaaacaatgtttaaacacaagcagatctgttgtatgtaataagtaacacagagttttaaaacaaattaattatttagctttattgaagtttgtttttttccttccgaacctggag

SEQ ID NO: 399649 - DNA, 120 bp, Artificial Sequence
  ENSG00000146247_85 (sequence is synthesized)
tatcatattataaacagcagtttcacaccagaatagcagtgccctttctttttgtacatactgattggacctttctttactgttacgtggacactttctatgttagttttgatgcataat

SEQ ID NO: 399650 - DNA, 120 bp, Artificial Sequence
  ENSG00000146247_86 (sequence is synthesized)
tctttgaatccttttatacaaactagaatgtatgtgtaagaatacctgtccctgcaatgtagtaactacaaacttatttttaaataaatagaaaacttgtttttctaagctattttgtag

SEQ ID NO: 399651 - DNA, 120 bp, Artificial Sequence
  ENSG00000146247_87 (sequence is synthesized)
agcctcatgatttattatttgctttttaaagttttttggcatcacataaagcacttagtacataatctcaacaagctgcttaccaaagtggtcatatggcagataccattatgtaaatgc

SEQ ID NO: 399652 - DNA, 120 bp, Artificial Sequence
  ENSG00000146247_88 (sequence is synthesized)
tggttcattagagtttccagtgccctgtgtgttttgcaaagtgtgaaaactgtcagttaaaagatatttgggtgccgaaatgtaatttaattccaaaacaactgaaggtcaaaaacttat

SEQ ID NO: 399653 - DNA, 120 bp, Artificial Sequence
  ENSG00000146247_89 (sequence is synthesized)
atgcctttttatgtgtacatttaataaaacaattttattgatttcttaccgtaagttactgtgatgagtgataaatacttcactattcagatactttcgtaagagatacatttcagtgga

SEQ ID NO: 399654 - DNA, 120 bp, Artificial Sequence
  ENSG00000146247_90 (sequence is synthesized)
acactttgcataaatattttctcaaaaatgtgcaatttctgggaaaaaaggaatgatggaaagaaggttattgcagttttcctagaaattttgtcagattggcatgcatttttattgact

SEQ ID NO: 399655 - DNA, 120 bp, Artificial Sequence
  ENSG00000146247_91 (sequence is synthesized)
aagaatcccaattttagcatgaagaccattagatatgaatacataaggccataacatttcaaattaagcacatggagtgatttgtaattttgtgttaatttctccctaagatgttttgtt

SEQ ID NO: 399656 - DNA, 120 bp, Artificial Sequence
  ENSG00000146247_92 (sequence is synthesized)
aaaatgattttgtatataataaatttctaagttgaggaaggaaggtaaaaaaaattcctgataaccttttctttatgaagtctgctaataacaatacctagtatatacttagaagaacca

SEQ ID NO: 399657 - DNA, 120 bp, Artificial Sequence
  ENSG00000146247_93 (sequence is synthesized)
gccaagaaaaattacctttcagcaaccactctttacttatttctcttttgtaataataccaattttatgacccaggattccccagtatttaacggaagtaagattaaagaccaaagcaca

SEQ ID NO: 399658 - DNA, 120 bp, Artificial Sequence
  ENSG00000146247_94 (sequence is synthesized)
aaacctctgttccttgcaatatagtacttcgtgtttgtaatcaatgtgtggtaaatttaacacatttaccacttactgattagtctttgggaaaagaatggtggaagtcattcaatgaaa

SEQ ID NO: 399659 - DNA, 120 bp, Artificial Sequence
  ENSG00000146247_95 (sequence is synthesized)
tacctttctacctaattggttagacatactggcagcacagtgtaatgaactggcctggagttgggaaatgggaatttgaccttcattcctgacaggaagtagaggaaccccagcaaagtc

SEQ ID NO: 399660 - DNA, 120 bp, Artificial Sequence
  ENSG00000146247_96 (sequence is synthesized)
gtatctcagagcttcattttcctcatctgtaaagttttaaaggttgattaaattatctgtgaggtctaattctgttcaaatagccagtggtgataatctcatttgtatactgtcctctgt

SEQ ID NO: 399661 - DNA, 120 bp, Artificial Sequence
  ENSG00000146247_97 (sequence is synthesized)
attcatggctcaactttggcttttatatttagtccctaaatagaatacatcatttaatgtgtagcttccagacaagctgtgtcttgcggccatgacctgattgttgttaagtgtgaggtt

SEQ ID NO: 399662 - DNA, 120 bp, Artificial Sequence
  ENSG00000146247_98 (sequence is synthesized)
ttctgaacccttagcagaaggacttttaatgtttttacaacacactattgtattgctataaattgtgaattgctttaaaagtacatgtttactaataaaaagaagtacaggcacacttta

SEQ ID NO: 399663 - DNA, 120 bp, Artificial Sequence
  ENSG00000146247_99 (sequence is synthesized)
cttttcatatgtaattatgatagttttaataattaatggcactacagttcctcttaaaatagaaaacatactgtttgtaaagaagaaacatttaagagtagccaaaatagctcagctggg

SEQ ID NO: 399664 - DNA, 120 bp, Artificial Sequence
  ENSG00000146247_100 (sequence is synthesized)
agagcattagactgaagatctaaaggtctctggtttgatcctgggtttcagaagaaacagttcattggctaataataagaatgaaatcataaaaatcgtattaccattgtgttttaaggt

SEQ ID NO: 399665 - DNA, 120 bp, Artificial Sequence
  ENSG00000146247_101 (sequence is synthesized)
tttaaaaaaagattattttctcaatctaactgttagacaataataatagtaaaaatttatttaacatgtaatgttttacctacattaactcttctaacccaaataacaatcttacaggtg

SEQ ID NO: 399666 - DNA, 120 bp, Artificial Sequence
  ENSG00000146247_102 (sequence is synthesized)
tacaggtggaagagataattatctggaattttgaattgaggaaactgtggcctatagtggttaacatgtataaggttgcacggtaaatgagtgtctgccatctgatttgagaatttttca

SEQ ID NO: 399667 - DNA, 120 bp, Artificial Sequence
  ENSG00000146247_103 (sequence is synthesized)
tcctaacagtatattgcccctgtcaagtatattaacaagtatttaaatagtccagcaggagactgaatttaactttcatgattcttcttcaaagtcaagtttacttcctcattgatccca

SEQ ID NO: 399668 - DNA, 120 bp, Artificial Sequence
  ENSG00000146247_104 (sequence is synthesized)
taacaagagtgataagcactatttattaaggcagaagtactttcccttccttatcttaaggattttatgcaatcatataatgaattgagcctcctaagttgaaggcagagaaatgaattc

SEQ ID NO: 399669 - DNA, 120 bp, Artificial Sequence
  ENSG00000146247_105 (sequence is synthesized)
tatattttgtacaaagactgctgtgattccatgtcattatttgtattgaatttttttttcctggttgagaagtagtaacagcattttaaaagcttacttagctgttatcagctttcattt

SEQ ID NO: 399670 - DNA, 120 bp, Artificial Sequence
  ENSG00000146247_106 (sequence is synthesized)
ttacataatgaaaaattcaggattattcagttttttttttttttttaataaacatccctgcttcattctcattaatggacataatctttgagctcctttttgattaatgtgttttaactg

SEQ ID NO: 399671 - DNA, 120 bp, Artificial Sequence
  ENSG00000146247_107 (sequence is synthesized)
aggaatgcaggtcatttcagtataagaaaacaccaaacataattaataaggtaaagtttgtgccctttctctaccttattctctaagaaatctattgctttccaatggtttgggggctat

SEQ ID NO: 399672 - DNA, 120 bp, Artificial Sequence
  ENSG00000146247_108 (sequence is synthesized)
tattgctatgcttttgttttccttattgaaattagtaattaagcattatcctctgaagactcttatgtctgtaattttttataagtgttataactatgtgtatgtgtatctgttttttca

SEQ ID NO: 399673 - DNA, 120 bp, Artificial Sequence
  ENSG00000146247_109 (sequence is synthesized)
aagagaatcagtagaactacatgagatagtatattcatatttcagtgaaataatttagatgaaaattgttaatacatttgaaagtctgtgaaatgtatttctttcaaacggctactttga

SEQ ID NO: 399674 - DNA, 120 bp, Artificial Sequence
  ENSG00000146247_110 (sequence is synthesized)
aatgtctttgaagtcagattcatgaaatacttaaagcatttgtattgtatatttctaaaaataaatccatggcatttttttagatgtgtatagtttgtttaaaaatactttttttagcag

SEQ ID NO: 399675 - DNA, 120 bp, Artificial Sequence
  ENSG00000146247_111 (sequence is synthesized)
atagtcttcaagatattaagtattccttgaaattttgattattatactttttaattgagttatttggcaaaatttcaagcaattgatacatacaaagtaatgtgatggatccttttaata

SEQ ID NO: 399676 - DNA, 120 bp, Artificial Sequence
  ENSG00000146247_112 (sequence is synthesized)
cagtttcataggatagataaatctgtaagaaagtataatataaggaaaactgtgacaagtagtaagagaattgtataaaagtttagataagaataggattacttttagctgtgatgatgg

SEQ ID NO: 399677 - DNA, 120 bp, Artificial Sequence
  ENSG00000146247_113 (sequence is synthesized)
atactgatagattctggaaatgttagatgaaaagaaagccattccagggataaggagcagcgtgaggtaggaagttttaattaagggtaatataaattggagaagtcacagtagagatac

SEQ ID NO: 399678 - DNA, 120 bp, Artificial Sequence
  ENSG00000146247_114 (sequence is synthesized)
agtgctataaatctgagttggggccacatcgtgggtggctttgaatatgaatctaaaatataagctctgagagcaaggggctgttgaaagtatattaacatgagaataacatgttttaca

SEQ ID NO: 399679 - DNA, 120 bp, Artificial Sequence
  ENSG00000146247_115 (sequence is synthesized)
ctatgccttaaaaatgttaatttgactgcagtgtctaatttaattgacagagaagagacaaaaagcataaatagcagattgactgctacagttgaccaactaagagttgatgagggctta

SEQ ID NO: 399680 - DNA, 120 bp, Artificial Sequence
  ENSG00000146247_116 (sequence is synthesized)
atttatgaaagtgagaaagggacagatgcccagacatacttgaggatagagttcacagcccttgaccactaattgggtttataaggaggaggaaagggaaagaataatgaaaaaccaaga

SEQ ID NO: 399681 - DNA, 120 bp, Artificial Sequence
  ENSG00000146247_117 (sequence is synthesized)
ttcccattactgtaagaatgatatgttgttaaagaaaaatagaaaaaggaacaaggatatctggggagtcactattaagtttagacgtggaattttaggtgttggtagaatgctcaggag

SEQ ID NO: 399682 - DNA, 120 bp, Artificial Sequence
  ENSG00000146247_118 (sequence is synthesized)
aagggttaggacaaattgcaggaattttggaattcatttacacagataaaccacaagtatgtgaagcaaaaggtacagtgtcaagatgcgttaagaacaaaattttaggaaatacattta

SEQ ID NO: 399683 - DNA, 120 bp, Artificial Sequence
  ENSG00000146247_119 (sequence is synthesized)
aaaataaaagaaagagttggaagacaagaaatgtattagctgtttgaagactgaggaatggaagaagcacagcagatacctaagcaaagactgggagatgagacttgggtttggtgtaat

SEQ ID NO: 399684 - DNA, 120 bp, Artificial Sequence
  ENSG00000146247_120 (sequence is synthesized)
gatatagtgaggccacactgaaagctctacatagagtggaggggtcagggttaaatgtgtgtgcataaattattggagtaagccaatggagaagaaagcaagccttcagcttcaactttt

SEQ ID NO: 399685 - DNA, 120 bp, Artificial Sequence
  ENSG00000146250_0 (sequence is synthesized)
gcagtctcagtggcgagctctgggtgctgtggcccggccttggcggggcggcctccggctcaggctggctgagaggctcccagctgcagcgtccccgcccgcctcctcgggagctctgat

SEQ ID NO: 399686 - DNA, 120 bp, Artificial Sequence
  ENSG00000146250_1 (sequence is synthesized)
ctcagctgacagtgccctcggggaccaaacaagcctggcaggacaaaattagaagatcaaaatggaaaatatgctgctttggttgatatttttcacccctgggtggaccctcattgatgg

SEQ ID NO: 399687 - DNA, 120 bp, Artificial Sequence
  ENSG00000146250_2 (sequence is synthesized)
atctgaaatggaatgggattttatgtggcacttgagaaaggtaccccggattgtcagtgaaaggactttccatctcaccagccccgcatttgaggcagatgctaagatgatggtaaatac

SEQ ID NO: 399688 - DNA, 120 bp, Artificial Sequence
  ENSG00000146250_3 (sequence is synthesized)
agtgtgtggcatcgaatgccagaaagaactcccaactcccagcctttctgaattggaggattatctttcctatgagactgtctttgagaatggcacccgaaccttaaccagggtgaaagt

SEQ ID NO: 399689 - DNA, 120 bp, Artificial Sequence
  ENSG00000146250_4 (sequence is synthesized)
tcaagatttggttcttgagccgactcaaaatatcaccacaaagggagtatctgttaggagaaagagacaggtgtatggcaccgacagcaggttcagcatcttggacaaaaggttcttaac

SEQ ID NO: 399690 - DNA, 120 bp, Artificial Sequence
  ENSG00000146250_5 (sequence is synthesized)
caatttccctttcagcacagctgtgaagctttccacgggctgtagtggcattctcatttcccctcagcatgttctaactgctgcccactgtgttcatgatggaaaggactatgtcaaagg

SEQ ID NO: 399691 - DNA, 120 bp, Artificial Sequence
  ENSG00000146250_6 (sequence is synthesized)
gagtaaaaagctaagggtagggttgttgaagatgaggaataaaagtggaggcaagaaacgtcgaggttctaagaggagcaggagagaagctagtggtggtgaccaaagagagggtaccag

SEQ ID NO: 399692 - DNA, 120 bp, Artificial Sequence
  ENSG00000146250_7 (sequence is synthesized)
agagcatctgcgggagagagcgaagggtgggagaagaagaaaaaaatctggccggggtcagaggattgccgaagggaggccttcctttcagtggacccgggtcaagaatacccacattcc

SEQ ID NO: 399693 - DNA, 120 bp, Artificial Sequence
  ENSG00000146250_8 (sequence is synthesized)
gaagggctgggcacgaggaggcatgggggacgctaccttggactatgactatgctcttctggagctgaagcgtgctcacaaaaagaaatacatggaacttggaatcagcccaacgatcaa

SEQ ID NO: 399694 - DNA, 120 bp, Artificial Sequence
  ENSG00000146250_9 (sequence is synthesized)
gaaaatgcctggtggaatgatccacttctcaggatttgataacgatagggctgatcagttggtctatcggttttgcagtgtgtccgacgaatccaatgatctcctttaccaatactgcga

SEQ ID NO: 399695 - DNA, 120 bp, Artificial Sequence
  ENSG00000146250_10 (sequence is synthesized)
aagatccagacaaaaagaattggaagcgcaaaatcattgcggtctactcagggcaccagtgggtggatgtccacggggttcagaaggactacaacgttgctgttcgcatcactcccctaa

SEQ ID NO: 399696 - DNA, 120 bp, Artificial Sequence
  ENSG00000146250_11 (sequence is synthesized)
aatacgcccagatttgcctctggattcacgggaacgatgccaattgtgcttacggctaacagagacctgaaacagggcggtgtatcatctaaatcacagagaaaaccagctctgcttacc

SEQ ID NO: 399697 - DNA, 120 bp, Artificial Sequence
  ENSG00000146250_12 (sequence is synthesized)
gtagtgagatcacttcataggttatgcctggacttgaactctgtcaatagcatttcaacatttttcaaaatcaggagattttcgtccatttaaaaaatgtataggtgcagatattgaaac

SEQ ID NO: 399698 - DNA, 120 bp, Artificial Sequence
  ENSG00000146250_13 (sequence is synthesized)
taggtgggcacttcaatgccaagtatatactcttctttacatggtgatgagtttcatttgtagaaaaattttgttgccttcttaaaaattagacacactttaaaccttcaaacaggtatt

SEQ ID NO: 399699 - DNA, 120 bp, Artificial Sequence
  ENSG00000146250_14 (sequence is synthesized)
ataaataacatgtgactccttaatggacttattctcagggtcctactctaagaagaatctaataggatgctggttgtgtattaaatgtgaaattgcatagataaaggtagatggtaaagc

SEQ ID NO: 399700 - DNA, 120 bp, Artificial Sequence
  ENSG00000146250_15 (sequence is synthesized)
aattagtatcagaatagagacagaaagttacaacacagtttgtactactctgagatggatccattcagctcatgccctcaatgtttatattgtgttatctgttgggtctgggacatttag

SEQ ID NO: 399701 - DNA, 120 bp, Artificial Sequence
  ENSG00000146250_16 (sequence is synthesized)
tttagtttttttgaagaattacaaatcagaagaaaaagcaagcattataaacaaaactaataactgttttactgctttaagaaataacaattacaatgtgtattatttaaaaatgggaga

SEQ ID NO: 399702 - DNA, 120 bp, Artificial Sequence
  ENSG00000146250_17 (sequence is synthesized)
aatagtttgttctatgaaataaacctagtttagaaatagggaagctgagacattttaagatctcaagtttttatttaactaatactcaaaatatggacttttcatgtatgcatagggaag

SEQ ID NO: 399703 - DNA, 120 bp, Artificial Sequence
  ENSG00000146250_18 (sequence is synthesized)
acacttcacaaattatgaatgatcatgtgttgaaagccacattattttatgctatacattctatgtatgaggtgctacatttttaggacaaagaattctgtaatctttttcaagaaagag

SEQ ID NO: 399704 - DNA, 120 bp, Artificial Sequence
  ENSG00000146250_19 (sequence is synthesized)
tctttttctccttgacaaaatccagcttttgtatgaggactatagggtgaattctctgattagtaattttagatatgtcctttcctaaaaatgaataaaatttatgaatatgacttaaaa

SEQ ID NO: 399705 - DNA, 120 bp, Artificial Sequence
  ENSG00000146263_0 (sequence is synthesized)
gtttgcggtttagaccccaaagattcctgttggtggtctgggtcacaggaggcaggtttcgggagctggaaatgtgagcgggtacgacaggcaccgcgggtaaccgacgccccgggtcct

SEQ ID NO: 399706 - DNA, 120 bp, Artificial Sequence
  ENSG00000146263_1 (sequence is synthesized)
tgctgcagccgggtacgcgggataccggcaccccgccttctccgcccgagtgctgccaggcgtgggcctggaatctcttcacaccttctctttggagcccttaatgatacgacgaacccc

SEQ ID NO: 399707 - DNA, 120 bp, Artificial Sequence
  ENSG00000146263_2 (sequence is synthesized)
aagtgtttcagaacatgaagtaaacaatggagaactgttctgctgcatcgacgttcctgactgacagcttagagctggagctggggacggaatggtgcaaacctccttacttttcttgtg

SEQ ID NO: 399708 - DNA, 120 bp, Artificial Sequence
  ENSG00000146263_3 (sequence is synthesized)
ctgttgacaacagaggaggaggaaaacatttttctggagaatcctacctctgcagcggagcccttaagcgattgattttgaatcttgaccctttaccaactaattttgaagaagatacct

SEQ ID NO: 399709 - DNA, 120 bp, Artificial Sequence
  ENSG00000146263_4 (sequence is synthesized)
tggaaatatttggcattcagtgggttactgaaacagcattagtgaattcatctagagaactctttcatttattcaggcaacaactgtacaacttggaaaccttgttacagtccagttgtg

SEQ ID NO: 399710 - DNA, 120 bp, Artificial Sequence
  ENSG00000146263_5 (sequence is synthesized)
attttgggaaggtatcaactctacactgcaaagcagacaatattaggcagcagtgtgtactatttctccattatgttaaagttttcatcttcaggtatctgaaagtacagaatgctgaga

SEQ ID NO: 399711 - DNA, 120 bp, Artificial Sequence
  ENSG00000146263_6 (sequence is synthesized)
gtcatgttcctgtccatccttatgaggctttggaggctcagcttccctcagtgttgattgatgagcttcatggattactcttgtatattggacacctatctgaacttcccagtgttaata

SEQ ID NO: 399712 - DNA, 120 bp, Artificial Sequence
  ENSG00000146263_7 (sequence is synthesized)
taggagcatttgtaaatcaaaaccagattaagctttttccaccgtcatggcatttattacatctccacttggatatacattggctggtgctagaaattctttacatgctgggtgaaaaat

SEQ ID NO: 399713 - DNA, 120 bp, Artificial Sequence
  ENSG00000146263_8 (sequence is synthesized)
tgaaacaagttgtatatggtcatcagtttatgaatctggcaagtgacaatttaaccaacatcagcctatttgaagaacattgtgaaactctcctttgtgatttaataagcctgtcactca

SEQ ID NO: 399714 - DNA, 120 bp, Artificial Sequence
  ENSG00000146263_9 (sequence is synthesized)
acaggtacgacaaggttaggtcttctgaatcattaatgagtgaccagtgtccatgtttatgcattaaagaattatgggttctacttattcatcttctagaccacagaagtaaatggtttg

SEQ ID NO: 399715 - DNA, 120 bp, Artificial Sequence
  ENSG00000146263_10 (sequence is synthesized)
tctcggaatcattttggaactggttgaataaactacttaaaacactgcttgaaaaatcaagtgaccgaagaagatcctctatgcctgtaatccagtccagggatccattaggttttagtt

SEQ ID NO: 399716 - DNA, 120 bp, Artificial Sequence
  ENSG00000146263_11 (sequence is synthesized)
ggtggattattactcatgtagcatcattttacaagtttgatcgccatggagtaccagatgaaatgagaaaagtggaatcaaattggaactttgtagaagaactgctgaaaaagtccatca

SEQ ID NO: 399717 - DNA, 120 bp, Artificial Sequence
  ENSG00000146263_12 (sequence is synthesized)
gtgttcagggtgtcattctagaagaacaattacgaatgtatcttcactgttgtttgacactttgtgatttctgggagccaaacattgcaattgttaccattttatgggaatattatagta

SEQ ID NO: 399718 - DNA, 120 bp, Artificial Sequence
  ENSG00000146263_13 (sequence is synthesized)
agaacctgaatagttccttcagtatttcttggcttccttttaaaggccttgctaataccatgaagtcacccttgtctatgcttgaaatggtgaagacttgctgttgcgataaacaagatc

SEQ ID NO: 399719 - DNA, 120 bp, Artificial Sequence
  ENSG00000146263_14 (sequence is synthesized)
aggaactatataaatccagcagtagttatactatttttctttgtattctggcaaaagttgttaaaaaagcaatgaagagcaatggccctcatccttggaaacaagtcaaaggaagaatat

SEQ ID NO: 399720 - DNA, 120 bp, Artificial Sequence
  ENSG00000146263_15 (sequence is synthesized)
attcaaaattccatcaaaaaagaatggaagaactaactgaagttggtctacagaacttttttagcctttttctactgttagcagctgttgcagaggtagaagatgttgcaagtcatgttt

SEQ ID NO: 399721 - DNA, 120 bp, Artificial Sequence
  ENSG00000146263_16 (sequence is synthesized)
tagacctcctgaatttcctcaagcctgcttttgtaacgtctcagagagccctcatttggaagggtcacatggccttcctcttgatgtatgcccagaaaaatctggacattggtgttttgg

SEQ ID NO: 399722 - DNA, 120 bp, Artificial Sequence
  ENSG00000146263_17 (sequence is synthesized)
ctgagaaattttcatgtgctttccgggagaaagcaaaggaattcttggtgtctaagaatgaggaaatggtacagagacagactatctggacccttctttccatatacattgatggtgttc

SEQ ID NO: 399723 - DNA, 120 bp, Artificial Sequence
  ENSG00000146263_18 (sequence is synthesized)
aagaagtgtttgagaccagctattgcttgtatccttcccatgaaaaactgcttaatgatggatttagtatgcttctgcgagcatgtcgagaatctgaacttaggacagtattgagcttcc

SEQ ID NO: 399724 - DNA, 120 bp, Artificial Sequence
  ENSG00000146263_19 (sequence is synthesized)
tacaagctgttctggccagaatcaggagtatgcatcaacaattgtgtcaggaacttcaaagggacaatgtggacctatttgtacagtcttcattatcggctaaagagcgccaccttgctg

SEQ ID NO: 399725 - DNA, 120 bp, Artificial Sequence
  ENSG00000146263_20 (sequence is synthesized)
cagttgccagtgcactgtggagacatttcttttcatttttgaagagtcagagaatgtcacaggtagtgcctttctcacaacttgcggatgcagctgcagactttactttgctagcaatgg

SEQ ID NO: 399726 - DNA, 120 bp, Artificial Sequence
  ENSG00000146263_21 (sequence is synthesized)
acatgccaagcacagctccatcagattttcagcctcagccagttatatcaattattcaactttttggttgggatgatatcatctgccctcaagttgtagcaagatatttaagtcatgtcc

SEQ ID NO: 399727 - DNA, 120 bp, Artificial Sequence
  ENSG00000146263_22 (sequence is synthesized)
tacaaaatagcacattatgtgaagcactttctcattcaggctatgtatcttttcaagccttaaccgtaagatcatggattcgttgtgttttgcaaatgtatattaaaaacctctctgggc

SEQ ID NO: 399728 - DNA, 120 bp, Artificial Sequence
  ENSG00000146263_23 (sequence is synthesized)
ctgatgatttgctcatagataaaaatctggaagaggcagttgaaaaagagtacatgaaacagttggtcaaactgacaagattactatttaatctctcagaagtaaagagtattttctcaa

SEQ ID NO: 399729 - DNA, 120 bp, Artificial Sequence
  ENSG00000146263_24 (sequence is synthesized)
aggcccaagttgaatatttatccatctcagaagaccctaaaaaagcacttgttcgattctttgaggctgttggtgtaacttacgggaacgtccagacactttctgataaatctgccatgg

SEQ ID NO: 399730 - DNA, 120 bp, Artificial Sequence
  ENSG00000146263_25 (sequence is synthesized)
tcacaaagtccttggaataccttggtgaagtattaaaatatattaagccttatttgggaaaaaaagttttcagtgcagggctgcagctgacttatggaatgatgggaattcttgtgaaat

SEQ ID NO: 399731 - DNA, 120 bp, Artificial Sequence
  ENSG00000146263_26 (sequence is synthesized)
catgggcacaaatctttgccacttctaaagcccaaaaattactattccggatcatagattgtttactgctgccacatgcagtattacagcaagagaaggaactgcctgcacctatgttgt

SEQ ID NO: 399732 - DNA, 120 bp, Artificial Sequence
  ENSG00000146263_27 (sequence is synthesized)
cagcaattcagaaaagtcttcctttgtatctccagggcatgtgtatcgtgtgttgtcaatctcaaaatccgaatgcctatttgaatcaattgctagggaatgttattgagcagtatattg

SEQ ID NO: 399733 - DNA, 120 bp, Artificial Sequence
  ENSG00000146263_28 (sequence is synthesized)
ggcgatttcttccagcttcaccatatgtttcagatcttggacaacatcctgttttgctggcattgagaaacacagccactattccaccaatatcatctctaaagaaatgcattgtgcaag

SEQ ID NO: 399734 - DNA, 120 bp, Artificial Sequence
  ENSG00000146263_29 (sequence is synthesized)
tcataaggaaatcctaccttgagtataaggggtcctcacctcctcctcgcttagcatccattctggccttcatcctccaactcttcaaggaaactaacacagacatttatgaagttgaac

SEQ ID NO: 399735 - DNA, 120 bp, Artificial Sequence
  ENSG00000146263_30 (sequence is synthesized)
tactcctccctggcattttaaaatgcttggtgttagtcagtgaaccacaagttaaaaggctggccacagagaacctgcaatacatggtaaaagcctgccaagtggggtcagaagaagaac

SEQ ID NO: 399736 - DNA, 120 bp, Artificial Sequence
  ENSG00000146263_31 (sequence is synthesized)
cttcctcccagctgacttctgtgtttaggcagtttatccaggattatggtatgaggtactattaccaggtttacagcattttagaaacagtagcaacattggaccagcaggttgtcatcc

SEQ ID NO: 399737 - DNA, 120 bp, Artificial Sequence
  ENSG00000146263_32 (sequence is synthesized)
acttgatttctacccttactcagtctctgaaggattcagagcagaaatggggccttggcaggaatatagcacaaagggaagcctatagcaaacttttgtctcaccttggacagatgggac

SEQ ID NO: 399738 - DNA, 120 bp, Artificial Sequence
  ENSG00000146263_33 (sequence is synthesized)
aagatgagatgcagagactggaaaatgataatacttaatatattttgtgattcatcctgtctattaattatcagtatctaaagccacattgttccactctaattcctacttttaattaat

SEQ ID NO: 399739 - DNA, 120 bp, Artificial Sequence
  ENSG00000146263_34 (sequence is synthesized)
tgtataatgttctgtttaaaataatttctaggattttttttccttttatatctgtaagtaaaaaatgtataaataaggaactgaaggttaattagcaactgtgtaataggatccttggaa

SEQ ID NO: 399740 - DNA, 120 bp, Artificial Sequence
  ENSG00000146263_35 (sequence is synthesized)
ctttttacaaaactgcattctaccttgatgaaattttagttaaactaaattaaagaaacattttctgagagtgttttctgtgtgtgagtattaagcagatacttcatccatagacttttt

SEQ ID NO: 399741 - DNA, 120 bp, Artificial Sequence
  ENSG00000146263_36 (sequence is synthesized)
gtagtatgacttcctgcctccctgccttgtgactgatttgtcatgtttattttttatttttacaataatagttatgttttaaaatgatactttttcaaagtacctggctaccctatactg

SEQ ID NO: 399742 - DNA, 120 bp, Artificial Sequence
  ENSG00000146263_37 (sequence is synthesized)
tgtttttggtgggggaaaggtgttgggaaatgtgactgtgtatttgtttttcttttttatatgtgtgaggcaagttaacaaagaaaacccttacaaagcacacttaactgtgttaggaat

SEQ ID NO: 399743 - DNA, 120 bp, Artificial Sequence
  ENSG00000146263_38 (sequence is synthesized)
gagactgaatctggctaaaggattatacagctgatatccaaaaagaagtgtaaacatgccaacagggtttatatttaggttccaagagttgccaaattttttttttattcatcctttctt

SEQ ID NO: 399744 - DNA, 120 bp, Artificial Sequence
  ENSG00000146263_39 (sequence is synthesized)
ttggagttgtcattaaaaaaaaaatcatatcaggaggaggaaataaaggagactttaagaggagagtaaataaaaatattctagaaaagtaacaatagtagtggtctgagaagtcagctg

SEQ ID NO: 399745 - DNA, 120 bp, Artificial Sequence
  ENSG00000146263_40 (sequence is synthesized)
atccatcttcttgctctttagccagagcttcttataacttagcattttatccaagaaacctgtttagtttcctttaacaacattgtttctcaacttttgaactcttaactcatccagatt

SEQ ID NO: 399746 - DNA, 120 bp, Artificial Sequence
  ENSG00000146263_41 (sequence is synthesized)
gttttaccagttggagcttgtccttgactccttttcctattgagcattatttggttgaaagagctccagtcctagttttgggaacccacctgggtctcaaactcagctttgctttatgat

SEQ ID NO: 399747 - DNA, 120 bp, Artificial Sequence
  ENSG00000146263_42 (sequence is synthesized)
cttgagctagttacgtaacctttctcagtctagtttcttcatggagaagaaaagaagaatccctttactatttgacagtgttgttgtgagaatcaatgggataatgtacgtgaaaatatt

SEQ ID NO: 399748 - DNA, 120 bp, Artificial Sequence
  ENSG00000146263_43 (sequence is synthesized)
tggtggcccaaattctgttgggaaatgtacagacacgattagtttattactcgtgcacaattaaggcaaagaacacctctcaattttatctttctctaatgatatgtcccagatgaatga

SEQ ID NO: 399749 - DNA, 120 bp, Artificial Sequence
  ENSG00000146263_44 (sequence is synthesized)
tcccactttccaatgttttcttacatcatgttttctaactttgaagtactttgtttccttcttgggattatagtctttatcatggttctactcttccttcaagaaaacatttcaaccctt

SEQ ID NO: 399750 - DNA, 120 bp, Artificial Sequence
  ENSG00000146263_45 (sequence is synthesized)
ctctggctcaaggagtatctttaaaaatgaaatactttgcaatcagtattctgtagttaatagcgttctcttaattataatctgtgaaatccaaaggagtgtctgttattttcataacat

SEQ ID NO: 399751 - DNA, 120 bp, Artificial Sequence
  ENSG00000146263_46 (sequence is synthesized)
ataaatggtccttctctcaaatcagcttcatcaaagggaataaatgaaagcttaaggctgtttaatagacttcataacactgaatttcttttcatcatgatagtgacttactaaacaaat

SEQ ID NO: 399752 - DNA, 120 bp, Artificial Sequence
  ENSG00000146263_47 (sequence is synthesized)
aaataatgtatggcttggaaagttccagcagtcactaaggagttttatctatttaaggtgatgcctttaaagaggttatttatgtgtatatgtgtttttgtgtgtgtgtgtgtgtgtgtg

SEQ ID NO: 399753 - DNA, 120 bp, Artificial Sequence
  ENSG00000146263_48 (sequence is synthesized)
tgtgtgtgtgtgtgtgggttttttttttccaaaggagattgataaagatacctttgagaatcttgctccttagagtatgaaaacgtttaaaggataggaaaagctgctactgaatcatgc

SEQ ID NO: 399754 - DNA, 120 bp, Artificial Sequence
  ENSG00000146263_49 (sequence is synthesized)
tttaggacatatatctatagatactaagaataactaaaatttgtacttaagaatggtaacaacaaagtgtgtaacaatatgtgtgtgtattatatgttttgtatttatgtataagtaact

SEQ ID NO: 399755 - DNA, 120 bp, Artificial Sequence
  ENSG00000146263_50 (sequence is synthesized)
ttttttaaagcttttttttaaattgaaaaaagaagaaaatttatggctcagttccttttttttaaaatcttcactgatccttcacttattactacaatcttgccctctttcattcccaga

SEQ ID NO: 399756 - DNA, 120 bp, Artificial Sequence
  ENSG00000146263_51 (sequence is synthesized)
cttggagtcccttatacctgcttctttaatagccactttccctaaataccctgtaatttctgaggctgctgcttctaccagtgtaatacaagccattgtcttttggtcaaatctgagttt

SEQ ID NO: 399757 - DNA, 120 bp, Artificial Sequence
  ENSG00000146263_52 (sequence is synthesized)
gttctcctttctcatgttctttgtcctctctgtgacaattgtattttcttttatcttcccatcatttccacaatggtactgctccttcctacatatacagttgacccttgagcaacacaa

SEQ ID NO: 399758 - DNA, 120 bp, Artificial Sequence
  ENSG00000146263_53 (sequence is synthesized)
gtttgaactgtgcaggtccacttatatgtggatctaaaatacagtatttgtgggatgcaaaatctgagtatatggaggaccaactttttgtagaggcaggttcctcagggttaactgcag

SEQ ID NO: 399759 - DNA, 120 bp, Artificial Sequence
  ENSG00000146263_54 (sequence is synthesized)
gacttgagtaagtgcagattatggtatgcacaggggatcctggaaccagtccccagaccaaaaatgaccactgtatcttgagagcaccttcatggtcttctttcctgtccccagtcgtaa

SEQ ID NO: 399760 - DNA, 120 bp, Artificial Sequence
  ENSG00000146263_55 (sequence is synthesized)
ttcatggtcttctttcctgtccccagtcgtaagatacgacccttcatctgctttgtctcaacattctgttagtggtgaactgataactccagcttttctctctctttttttttttttttt

SEQ ID NO: 399761 - DNA, 120 bp, Artificial Sequence
  ENSG00000146263_56 (sequence is synthesized)
gggattacaggcgtgatgagccacctagtgctaattcatctctaaacctctgtagttggagtctcctgaaatctcagactacctcctgctttcattttctacccagggaatacactattg

SEQ ID NO: 399762 - DNA, 120 bp, Artificial Sequence
  ENSG00000146263_57 (sequence is synthesized)
tcctaagttatttagccttgaaatgtcagaggcattttaggttcttcatgtttctcccactttcagttgattaccattacaggatcttaggcttctttttatctttttgcagtgccttgc

SEQ ID NO: 399763 - DNA, 120 bp, Artificial Sequence
  ENSG00000146263_58 (sequence is synthesized)
atccactggttgtttgttttttctgttgggcactacttatttccttacctctggtttcttctcctacagcttatgttctgaaatgtgtattcctaaaatactgttttcctcttgttactt

SEQ ID NO: 399764 - DNA, 120 bp, Artificial Sequence
  ENSG00000146263_59 (sequence is synthesized)
ttctgctcgaggacttccagtaacttaccattgtttataaggtgatgttcaaacccttcagtctggagactttctgccacctatctgactgtacctttatcttcaagcttatctctttcc

SEQ ID NO: 399765 - DNA, 120 bp, Artificial Sequence
  ENSG00000146263_60 (sequence is synthesized)
aaacaagaggctcatttagcagctttctctgattgccatgttcatcctacactcagcctcattcagtttacagcatggaaactgtataggacctctttcctatagaaattgaagacactt

SEQ ID NO: 399766 - DNA, 120 bp, Artificial Sequence
  ENSG00000146263_61 (sequence is synthesized)
aaataggaagaaaattaaaatatacatttggatacatgagtattccagtcaaataatatctataaaataccagatagagtataaaagacaactgaaggacaacagagtgatgaaaggact

SEQ ID NO: 399767 - DNA, 120 bp, Artificial Sequence
  ENSG00000146263_62 (sequence is synthesized)
ttattaggcatttggatttggttatgatttaaatttcaatttaattagaacgtttccatggcaaggaaggaagcatggaggactgtggaaaagtcattcagtattgagttcatttgcatt

SEQ ID NO: 399768 - DNA, 120 bp, Artificial Sequence
  ENSG00000146263_63 (sequence is synthesized)
agaggaatttcatagtttaaaacttgtatatctttacctatccttcgtatgttttcttcttaagcatatttgactttttctacctcagcatctgtataagaaaatatttgtgagtcagat

SEQ ID NO: 399769 - DNA, 120 bp, Artificial Sequence
  ENSG00000146263_64 (sequence is synthesized)
gtttgtgggttttccttacctattattattttcttccatgctttacaacacattttttaaactaccttgttcttaaataattacacggacctgcttctgtgtactttcacagaatctttg

SEQ ID NO: 399770 - DNA, 120 bp, Artificial Sequence
  ENSG00000146263_65 (sequence is synthesized)
acagttaaaaattgtatgttatataaaaatttgacaagcttctacagttaggaaaagcctttagaaatctgccttccccaaaccgtatgttatcatagcactcatgtctccccatgtcta

SEQ ID NO: 399771 - DNA, 120 bp, Artificial Sequence
  ENSG00000146263_66 (sequence is synthesized)
aaaggtaaatagatacagaaacctcaccaaaagttgaatcatctgtactaaaccactgcttttttatccagactttttatataaatcttttattttccaaaaaactgatcttttacctac

SEQ ID NO: 399772 - DNA, 120 bp, Artificial Sequence
  ENSG00000146263_67 (sequence is synthesized)
ccctcttagagttaaaaatattgcctgtcaggcaagagtatagtatgccaatataaataatatgctttatttggttagaaacagttggtttgggaagctagcaacatagcatattcttta

SEQ ID NO: 399773 - DNA, 120 bp, Artificial Sequence
  ENSG00000146263_68 (sequence is synthesized)
caaatttaataaggtgtattttgatactgtgataacctgcattgtaaattaccaaatggttggaattgaccagtttatacttattaaaatttttgatgtgccaatggctatccaattcat

SEQ ID NO: 399774 - DNA, 120 bp, Artificial Sequence
  ENSG00000146263_69 (sequence is synthesized)
tggctatccaattcattgcatttgtgaattgtgcttttagaaaaattgtggacattttagttttatatacatatttatgagttatttgtgcatatgataaaattatatataataataaaa

SEQ ID NO: 399775 - DNA, 120 bp, Artificial Sequence
  ENSG00000146263_70 (sequence is synthesized)
ctgatggtatagtttccagtctcagtccaaaggtctgcaaaccaggaaagccaatggtgtaatttccagtctgagtccaagtctgaaggcaggaaaagaacagtgtttcagtatgaagca

SEQ ID NO: 399776 - DNA, 120 bp, Artificial Sequence
  ENSG00000146263_71 (sequence is synthesized)
cagggagtcttctctaccctcggaggactttttgttgtattcaggccactaattgattggatggcacccacccatattagagagggccatctctttactcagcctaccaattaaaatgta

SEQ ID NO: 399777 - DNA, 120 bp, Artificial Sequence
  ENSG00000146263_72 (sequence is synthesized)
ttttaaacatgctgttcatcacatttttaaacatattgtatggaagccctgtaaagttttgtaatatgttatcatttttgtaagagtttatggagaattataataaataatattttggaa

SEQ ID NO: 399778 - DNA, 120 bp, Artificial Sequence
  ENSG00000146263_73 (sequence is synthesized)
tttttaaaaactttcttatattgtcaattaatatgtaattatttggacaaattagaaaataagtgagcagaaacaagaaaagtcagactacaatcacagagataaattatttatgtataa

SEQ ID NO: 399779 - DNA, 120 bp, Artificial Sequence
  ENSG00000146263_74 (sequence is synthesized)
tgtttctgtaaacatcttgaaaaattataaagtttatgttttaattgtttaattaaaaaaaattacttgtagaagatttggtatgtagtcctggccctgctactgaacaattgtgtgacc

SEQ ID NO: 399780 - DNA, 120 bp, Artificial Sequence
  ENSG00000146263_75 (sequence is synthesized)
ctgagcaaattacttaaacctttctagctttgtcttccgttaacaaaaaatcatgggattggattgtcacaaagattccttctagttttaaaatctattatgattggcaaagaaatttct

SEQ ID NO: 399781 - DNA, 120 bp, Artificial Sequence
  ENSG00000146263_76 (sequence is synthesized)
cgaggaatgaattacttatttttgtgaataatttaataaaagtacttcagaatagcacttctttagtgaagctttttgctaagataacttattaaacaaccatgaagtttgcttcaaata

SEQ ID NO: 399782 - DNA, 120 bp, Artificial Sequence
  ENSG00000146263_77 (sequence is synthesized)
caaagagattttaactagtatattaatttctcattagaaacattttttacagtgttacttaaaaaccctatgaataaaatcagctaacagatgtttactttgaagccctatttttataca

SEQ ID NO: 399783 - DNA, 120 bp, Artificial Sequence
  ENSG00000146263_78 (sequence is synthesized)
atttctaccatattcagaaattaatagtattgtattattgtatcagcctatcagctccataaaataagcatctagaatcatgaagccaacttgtctatattttcaaaattgccatttttt

SEQ ID NO: 399784 - DNA, 120 bp, Artificial Sequence
  ENSG00000146263_79 (sequence is synthesized)
tttcaaaattgccattttttatggcagtggttaccaaacctggctgatcattagacttgtgagttttaaaaaatccaggtatctagtccagctgcagtggctcatgcctataatcccagc

SEQ ID NO: 399785 - DNA, 90 bp, Artificial Sequence
  ENSG00000146263_80 (sequence is synthesized)
aatggaaattagcagggcatggtgacgcacacctgtagtcccaggtacttgggagacggagacaggagaattgcttgaacccggagacgg

SEQ ID NO: 399786 - DNA, 83 bp, Artificial Sequence
  ENSG00000146263_81 (sequence is synthesized)
agcagggcatggtgacgcacacctgtagtcccaggtacttgggagacggagacaggagaattgcttgaacccggagacggagt

SEQ ID NO: 399787 - DNA, 120 bp, Artificial Sequence
  ENSG00000146263_82 (sequence is synthesized)
cctttccggagcgcgggcgcgcggtggcgggaatttcgcctgtttgcggtttagaccccaaagattcctgttggtggtctgggtcacaggaggcaggtttcgggagctggaaatgtgagc

SEQ ID NO: 399788 - DNA, 120 bp, Artificial Sequence
  ENSG00000146263_83 (sequence is synthesized)
gatttttaaattatcagctttttctccccacaaggagtattcattcaagaaggagagaaattagtcagaattacagctctggaacctgactgcctgagttgaaattcttgccccccatcc

SEQ ID NO: 399789 - DNA, 120 bp, Artificial Sequence
  ENSG00000146263_84 (sequence is synthesized)
tccttttattaattgtgtgcttttgggcaaatgacacctcagcctccacatctgtgtaattcttacaacttaccagaatcattggatgaattaaataaattcatatacatgaagttatta

SEQ ID NO: 399790 - DNA, 120 bp, Artificial Sequence
  ENSG00000146263_85 (sequence is synthesized)
aaacatagtagtcattgaatcagtagctattctcttgatttatgacagtataagtgtctgaaaattttaaagcaaatgaaataatctttattttctgaaatttttatcatatattacagt

SEQ ID NO: 399791 - DNA, 120 bp, Artificial Sequence
  ENSG00000146263_86 (sequence is synthesized)
aagattcaagatcagcttataaaaaaaactttcaagaccacatcattatgtgtattctgacttttgaggcctttttggaatgtgattaagattgttttgactgtgccctttttttcctac

SEQ ID NO: 399792 - DNA, 120 bp, Artificial Sequence
  ENSG00000146263_87 (sequence is synthesized)
ctgtgataatcattccctctgaagtttggtttttaaaactttatattgttaccgtgcctagcttatagataagtaatagattctgcctatgaaaatgggagcttatatgaataacaaatt

SEQ ID NO: 399793 - DNA, 120 bp, Artificial Sequence
  ENSG00000146263_88 (sequence is synthesized)
atggtaattcacagtgagattccctgaagtctcaacccctttcattatatttgactttaccgttttgaataatatttactctttatgaatatatctttgttaaaatataaaaacggctaa

SEQ ID NO: 399794 - DNA, 120 bp, Artificial Sequence
  ENSG00000146263_89 (sequence is synthesized)
aatcccaacactttgggtggctgaggcaggaggattgtttgaatccaggatttgagaccagcttgggcaacatagcgagaccccatttctacaaaaaattaaaaagttagtccagtgtgg

SEQ ID NO: 399795 - DNA, 120 bp, Artificial Sequence
  ENSG00000146263_90 (sequence is synthesized)
aaaaagttagtccagtgtggtggcacataccttgtagtcccagctactcaggtggtcgaggtggggggatcccttgaactcaggaggttgaggctgtggtgagacatgattgcaccactg

SEQ ID NO: 399796 - DNA, 120 bp, Artificial Sequence
  ENSG00000146263_91 (sequence is synthesized)
cctggatgacagagcaagaccctatctcaagaaataaaataagtagaattaaatgtttacatatttctgtgaaatgaagcagaaacaagtttttcatcagagatcaatatatgtaataat

SEQ ID NO: 399797 - DNA, 120 bp, Artificial Sequence
  ENSG00000146263_92 (sequence is synthesized)
gtaataataaaagcaaagttctaactgaatttacaagttaatatatctaatcgatagaaaacaaataggtaattgcttttaattacgtcatttaataaaaagattcatgagtagattgtt

SEQ ID NO: 399798 - DNA, 120 bp, Artificial Sequence
  ENSG00000146263_93 (sequence is synthesized)
gagggagggatattttccttactagtttctgtaaattggactggtttttattttctggttatccatcaaatatgtaagaaataaaaatgaataatttatatagcagcagaaataaaaatt

SEQ ID NO: 399799 - DNA, 120 bp, Artificial Sequence
  ENSG00000146263_94 (sequence is synthesized)
tgtgcactggggtcctcaaactaggttttgcctttcataggctttttaattaggcagacttgaaaagataggttatttgaagctcagaagactaaatttttaaagcaggggaactttaca

SEQ ID NO: 399800 - DNA, 120 bp, Artificial Sequence
  ENSG00000146263_95 (sequence is synthesized)
gtcttcaaaaaataaaaaatcacacactaaaatactgttcttttctgaaacaaaaaagcataataaaataaaaagcatctttcaagactttatatatttgttataacagtcttgtatatg

SEQ ID NO: 399801 - DNA, 120 bp, Artificial Sequence
  ENSG00000146263_96 (sequence is synthesized)
aaatgtcttgttttaattggtacttccagttgagcttcttttattttttaagaactctctaggtatatattagttgttcagaattatgtattgcaaatattttcttttatttactttttc

SEQ ID NO: 399802 - DNA, 120 bp, Artificial Sequence
  ENSG00000146263_97 (sequence is synthesized)
atcaagtaagctgactttctaggtcgatttgaattttttagatagttatatttttccgttttttgttttatctatgctgttaaaatattttgattgttgcttttatttctttaattcatg

SEQ ID NO: 399803 - DNA, 120 bp, Artificial Sequence
  ENSG00000146263_98 (sequence is synthesized)
ttatttttaaacatgcagtgaggtgagaagtctaactttagtttcttgcaaagttaaaaatcttattttttattgaatgacccatacttttcccatcgatttcagatgccacataaattt

SEQ ID NO: 399804 - DNA, 120 bp, Artificial Sequence
  ENSG00000146263_99 (sequence is synthesized)
atttctgtcttgtctgttcttgctgtttgttatctatttctgtcccaatattgttttgtcagtgtagcattttattttgtttgtatacctaataaggcaggtctactcttcatcattctt

SEQ ID NO: 399805 - DNA, 120 bp, Artificial Sequence
  ENSG00000146263_100 (sequence is synthesized)
gtcattgtatttatttttatagtgatgctaaatgctgacaggaggaaggttattgataacccagtataacacaatacttgaaagtgctgggttttgactcaggtagaattgagtttgaat

SEQ ID NO: 399806 - DNA, 120 bp, Artificial Sequence
  ENSG00000146263_101 (sequence is synthesized)
actaatacatgaattgagaggtaaattttttcacctcttttaacttctgtttcttaatgagatgacaataatgtctacatgacagtctaaagttcttttgttaaaatattttataggagt

SEQ ID NO: 399807 - DNA, 120 bp, Artificial Sequence
  ENSG00000146263_102 (sequence is synthesized)
tcctgggtactcatacattaaaaaaaatttcctagctaaattctaaaacaaaattatgaaaatacgtgttaaaaaattcttttactgccttgcagctgtagtagaatcagaggttggttg

SEQ ID NO: 399808 - DNA, 120 bp, Artificial Sequence
  ENSG00000146263_103 (sequence is synthesized)
gaaggtacctttactatacaagtctattcagcagccccaaggtgggtttgtcttaaaccaacagatgaaaatatttcctgctttcaaagatcttcagtgaaagaatcctctaatgaacaa

SEQ ID NO: 399809 - DNA, 120 bp, Artificial Sequence
  ENSG00000146263_104 (sequence is synthesized)
gacagaggttttccctgagcttttgaatagtggtaggttaattggttctttatccttgtgtttatggaggagtattgtgacatgctatgaaatacctagtaaaatattaatgaattctca

SEQ ID NO: 399810 - DNA, 120 bp, Artificial Sequence
  ENSG00000146263_105 (sequence is synthesized)
acgacaaggtaatgctttaagagtttgtatttttgagacttaaagacagtattcagtccttaatgcatgtcgtttaatctgtaagaatttaaactaaaatgctttatatgttctaatttt

SEQ ID NO: 399811 - DNA, 120 bp, Artificial Sequence
  ENSG00000146263_106 (sequence is synthesized)
ctaattttatatttagttgctattatctgggagctgaaagggaaaacaatttttatttaaacatctaaaagaggctggaattggtattttagagcttttctttttttctttttttttttt

SEQ ID NO: 399812 - DNA, 120 bp, Artificial Sequence
  ENSG00000146263_107 (sequence is synthesized)
aaaaatagccttttctattttgacaaaaataaataaataaaaatgatgtttaccgaaatcactggaagcctaatttctatccaaatagtagaggccagctctttaataatgtattgtatt

SEQ ID NO: 399813 - DNA, 120 bp, Artificial Sequence
  ENSG00000146263_108 (sequence is synthesized)
actgttgtgtaataataaaataaatgcttacttaaagttactttacacattttaagagaggattttcttgcttgttttcataaaaggtctcgaatctgggtaaaattatgtgtttttatt

SEQ ID NO: 399814 - DNA, 120 bp, Artificial Sequence
  ENSG00000146263_109 (sequence is synthesized)
aaattatgtttatcatagagtgtttaatggagacagtgatttaaaggtgctacagaacatgtttatttttaagtagtataaatgtttgtagagtattatctgttattttagattacaagc

SEQ ID NO: 399815 - DNA, 120 bp, Artificial Sequence
  ENSG00000146263_110 (sequence is synthesized)
gtaaagactgtttttgggaaatcaagattgagggaaaaggagttttataatttttcaaaatttagatttttttatgcattatcaatatttttacaatttagtgtgtatgtgtattagtgg

SEQ ID NO: 399816 - DNA, 120 bp, Artificial Sequence
  ENSG00000146263_111 (sequence is synthesized)
atttatttttgttaattgacaaaattatacatatttatcatatacatcatgttttgatatgtgtatacagtgtagaatggctaaatatagctaattagcatatgtattatctcacattct

SEQ ID NO: 399817 - DNA, 120 bp, Artificial Sequence
  ENSG00000146263_112 (sequence is synthesized)
atatagctaattagcatatgtattatctcacattcttattttttgtgtgagaacacttaaaatctatgcttctagtgattttcaagaatacaatatagtacattgtttttaactgtagtc

SEQ ID NO: 399818 - DNA, 120 bp, Artificial Sequence
  ENSG00000146263_113 (sequence is synthesized)
atcatgttgagcttattcccttatctaactgaaattttatatgctttgatcaacatctaccccgcctccctcctaatcctcctcacagcccttggtaaggatcatcttactctgcttcta

SEQ ID NO: 399819 - DNA, 88 bp, Artificial Sequence
  ENSG00000146263_114 (sequence is synthesized)
cctcacagcccttggtaaggatcatcttactctgcttctatgagttcagcttttttagattctacatataagtgagattatgtgttac

SEQ ID NO: 399820 - DNA, 120 bp, Artificial Sequence
  ENSG00000146263_115 (sequence is synthesized)
agcatttccatcttctcaaggctgaatagtagggtcatacactgtgtaacaaagttttagtcagtgacagaccacatatacaaggtagctataccacatagcctaggtgtgcagtagtag

SEQ ID NO: 399821 - DNA, 120 bp, Artificial Sequence
  ENSG00000146263_116 (sequence is synthesized)
gctgaaaaagtttaagtacaataaatcatgttagcctaaagacgtgcttctcagaacatgtcctgctgttaagtgacacatgactgtattccattgtgtatataaaccacattttcttta

SEQ ID NO: 399822 - DNA, 120 bp, Artificial Sequence
  ENSG00000146263_117 (sequence is synthesized)
tgcattcatctgttgatggacaatttggttgattccatgtcttggctcttataaataatgctgcagtgaacatgggaatgcagatatctcttaaacatactaatttcattttctttgcaa

SEQ ID NO: 399823 - DNA, 120 bp, Artificial Sequence
  ENSG00000146263_118 (sequence is synthesized)
atatacctagtaggattgctggatcatgtggtagttctatatttaattttgtgaggaatttgcatactgtattacatgatggctgtaccaatttacattctcaccaaactgtgcaagggt

SEQ ID NO: 399824 - DNA, 120 bp, Artificial Sequence
  ENSG00000146263_119 (sequence is synthesized)
tttcttgtcaccacttcctctctggcgcttattatcttttgtctttttggtaatagccattataacaggtttgaggtgatatcttatcaagttttaatttgcatttccataatgagtagt

SEQ ID NO: 399825 - DNA, 120 bp, Artificial Sequence
  ENSG00000146263_120 (sequence is synthesized)
aagttttaatttgcatttccataatgagtagtgacgttgagcatttttcatgtactgcttgcccatttgtatgtcttcttttaagaaatgtcagctaggcgcggtggctcacgcctgtaa

SEQ ID NO: 399826 - DNA, 120 bp, Artificial Sequence
  ENSG00000146263_121 (sequence is synthesized)
ctaattatccaaaacataatgtgttactacttgtttatagtatttcaattattgtatttttggcagtagttttgttacactgtgatgttttattgaaaaataaaagtgccagtgaaaaag

SEQ ID NO: 399827 - DNA, 120 bp, Artificial Sequence
  ENSG00000146263_122 (sequence is synthesized)
cagcctggcaacagagagagactctgcctcaaaaaaaaaaaaagaaaaaagaaaacgtctgtttatattttttgccaattttgtaattgggttgttttcttgctattgagttgtttgcgt

SEQ ID NO: 399828 - DNA, 120 bp, Artificial Sequence
  ENSG00000146263_123 (sequence is synthesized)
tccttatatatttaaaatactaaccccttatcagatgtatggtttgcaaatattttcttccattctcgagattttcccttcattccgttgattttttttcctttgctttgcagatatttc

SEQ ID NO: 399829 - DNA, 120 bp, Artificial Sequence
  ENSG00000146263_124 (sequence is synthesized)
ctttttattttgatataatcccatttgtcagttttcattttcatggcttgtgctttttggggtcatatccaagaaatcatttaccagaccattgtcatatagcttttcccctatgttttc

SEQ ID NO: 399830 - DNA, 120 bp, Artificial Sequence
  ENSG00000146263_125 (sequence is synthesized)
ttctagttttatagtttcaggtcttacatttaagtctttaatttattttgagttgatttttctgtatggtgtgaaacaagggcctaaattcattctgtatgtggatatccagttgtccca

SEQ ID NO: 399831 - DNA, 120 bp, Artificial Sequence
  ENSG00000146263_126 (sequence is synthesized)
acctgtttattgaagaagctgtcctttccccgtgtcatgctcttttcatcattgtcaaaaatcaattgttctgttttgttctgtgtctgtttgtgtgctagcagcacactgttttgatta

SEQ ID NO: 399832 - DNA, 120 bp, Artificial Sequence
  ENSG00000146263_127 (sequence is synthesized)
ctgtagctttgtagtatattttgaagtcaggtagtgtcatgcctcgagctttgttcttttttgctaaagattgctgggtctattcaggaccttttgtgatttcctaccaattttaggatt

SEQ ID NO: 399833 - DNA, 120 bp, Artificial Sequence
  ENSG00000146263_128 (sequence is synthesized)
tgatttcctaccaattttaggattgttttttctatttctgtaaaaaagtgtcattaaatattttggtagggatttcattgaatctgtaggtcactttgggtagtatggacattttaacaa

SEQ ID NO: 399834 - DNA, 120 bp, Artificial Sequence
  ENSG00000146263_129 (sequence is synthesized)
agatattttttctacttacttgtgttgtattcagtttctttcatcagtgttttttatttttcagtgtataggccttttactctttggttaaatttatccctaagtatttttatttttgta

SEQ ID NO: 399835 - DNA, 120 bp, Artificial Sequence
  ENSG00000146263_130 (sequence is synthesized)
ggtatatactatatatgggattgttttattgatttcttttttggatagtttgttgttattgtatagaaatgctatggtattttgtatgttgatttttgtatcctgcaactttactgcatt

SEQ ID NO: 399836 - DNA, 120 bp, Artificial Sequence
  ENSG00000146263_131 (sequence is synthesized)
tatttattcaaataatttttggtgatgtctttagaggtttctatatataaaagatcatgttatctacaaacagcaacaattttaacatttctttctgtttagatgccttttctttctttt

SEQ ID NO: 399837 - DNA, 120 bp, Artificial Sequence
  ENSG00000146263_132 (sequence is synthesized)
gcataattgctgtggctaggatttctagtaacatcctaatactttttttttaactttgtattaggttagaaaagtgtacataacttacgtaaaatattgcatacattattaatttaagaa

SEQ ID NO: 399838 - DNA, 120 bp, Artificial Sequence
  ENSG00000146263_133 (sequence is synthesized)
gcctagctatatttgcaaatatagtgtacattctgtgcattatctagggctgctgaggatttttttattaaaaaaaggtagataatttagaaattactgaatctttataaatccctaata

SEQ ID NO: 399839 - DNA, 120 bp, Artificial Sequence
  ENSG00000146263_134 (sequence is synthesized)
agggcaaaataagcaaactagccctgaggtgtaatctagcccattacctatttttgtaaatatagttttactgggatataaccaggtccatttctcttaccaggtatctgcggctgttgt

SEQ ID NO: 399840 - DNA, 120 bp, Artificial Sequence
  ENSG00000146263_135 (sequence is synthesized)
actgaaatggcagagttcagtagttgtgacagagactgtattgacaacagactcttaaatatgtcctatctggccctttatagaaaaagtttgctggctgggcgaggtggctcatgcctg

SEQ ID NO: 399841 - DNA, 120 bp, Artificial Sequence
  ENSG00000146263_136 (sequence is synthesized)
agcgagactccatctcacaaaaagaaaaaaaaaagagaaagtttgctgaccacggcactagatgattaaaatttttttttaagttgaaatcaaattaatctgtgctttttgttttaaaat

SEQ ID NO: 399842 - DNA, 120 bp, Artificial Sequence
  ENSG00000146263_137 (sequence is synthesized)
ggaaatttgtcttaaaagttaaatgaaattgcacattttcaataaataattttgtctaattgagaataaattcttagtcatctaaatcattcttttaaaagtatttgaaagatatatggc

SEQ ID NO: 399843 - DNA, 120 bp, Artificial Sequence
  ENSG00000146263_138 (sequence is synthesized)
atttaaaattctgctgctgtcttataaataacacattttggttattttctataggttaggtcttctgaatcattaatgagtgaccagtgtccatgtttatgcattaaagaattatgggtt

SEQ ID NO: 399844 - DNA, 120 bp, Artificial Sequence
  ENSG00000146263_139 (sequence is synthesized)
ctacttattcatcttctagaccacagaagtaaatggtttgtctcggaacccttatgtgggtttacagactgagttcatgttacctagattttattaaaaatttcaaaccattgagcccag

SEQ ID NO: 399845 - DNA, 120 bp, Artificial Sequence
  ENSG00000146263_140 (sequence is synthesized)
cactgcactccagcctggatgacaaagcaagaccctctcttgaaaaaagaaaaaaaaatttcaaggcattgaattctgggtagccaagaaaaatggatggatgcctaaacccacatctcc

SEQ ID NO: 399846 - DNA, 120 bp, Artificial Sequence
  ENSG00000146263_141 (sequence is synthesized)
aaaaatggatggatgcctaaacccacatctccctacataaccttccaacaaaatatagaacagcaaaatcaaatatatctactgttgactcttgaacaatgtgggagttagggatgctga

SEQ ID NO: 399847 - DNA, 120 bp, Artificial Sequence
  ENSG00000146263_142 (sequence is synthesized)
ccgtccccccaacatgcagtcagaaaactgcatgtaacttttgacttccccaaaaaaccattggtggcctactattgactgcaatccttacccataacataaagaaacaattaacatgta

SEQ ID NO: 399848 - DNA, 120 bp, Artificial Sequence
  ENSG00000146263_143 (sequence is synthesized)
ttttgtatgttgtatgtattatatacatgataaactagagaaaataaatgttaagaaaaccataagagaatatatatttacttctcattaagtggaagtaggtcaccatgaaggtcttca

SEQ ID NO: 399849 - DNA, 120 bp, Artificial Sequence
  ENSG00000146263_144 (sequence is synthesized)
tcctcatcttcatgttgagtaggctaaggaggaggaggaagaagaggaggggttggtcttgctgtcttcggggtggtagagatggaagaaaatccatgtataagcgcacccatgcatttc

SEQ ID NO: 399850 - DNA, 120 bp, Artificial Sequence
  ENSG00000146263_145 (sequence is synthesized)
aaacccgtgttgttcaaacgtcagctgtatacaaaaacatacgtattatataactgcaaatgggagtgcttagtactgtcagttttaaaaacagaaaacctctaaagctcttaccacgag

SEQ ID NO: 399851 - DNA, 120 bp, Artificial Sequence
  ENSG00000146263_146 (sequence is synthesized)
cctttctagcaaggcagggcagtctgagaaaaactactctgagaagagaactaacagtggttataaaactgctttaaaatcattgccagaatgtgaagatactgaaaaagttttcttgta

SEQ ID NO: 399852 - DNA, 120 bp, Artificial Sequence
  ENSG00000146263_147 (sequence is synthesized)
gatcggagaactgataagaaagaaacataaaagtgtccacatgacatggagtttctgtagaaggcaaaaatgaatcatggtacccattggtgattgggtggtgaagggcaccagaagaga

SEQ ID NO: 399853 - DNA, 120 bp, Artificial Sequence
  ENSG00000146263_148 (sequence is synthesized)
aagcagaaaatttagggtcttaaaacaccaccaccaaaaaaagaataaatcaaaggactcataccctctcccaccaccaaaaaaaaagaagaaagaaaaggaaaggaaattcagtaaaga

SEQ ID NO: 399854 - DNA, 120 bp, Artificial Sequence
  ENSG00000146263_149 (sequence is synthesized)
aatgggactttggtgcattgtcaaaagaaggtaaccctgaattaagaatcttttaagctaatcctaatctacaaaatgaatggaatgaaactagaccattataaacttactagaagaaaa

SEQ ID NO: 399855 - DNA, 120 bp, Artificial Sequence
  ENSG00000146263_150 (sequence is synthesized)
cagatttgataacactttagttgatggtaccctctcccccagaaacaaccataaaacagaagaaactgacaacactgtagattgaattagtttgtctgttcagactacatctgggagtat

SEQ ID NO: 399856 - DNA, 120 bp, Artificial Sequence
  ENSG00000146263_151 (sequence is synthesized)
agaaaaacaccttgaataagatactcaaatgttaaaaacaaatggacagaaaaccggggatggatggaaagaatacattcaatgcaggaaagaaataggaagaggaaaattatatccgta

SEQ ID NO: 399857 - DNA, 120 bp, Artificial Sequence
  ENSG00000146263_152 (sequence is synthesized)
ttgactaaattacaacatgactgagggagaatagacttaaatgaaaatttaataaggggcatagaagaaaggttgaaaacaactaagggaataaaaatgagataaatatgaagagagtga

SEQ ID NO: 399858 - DNA, 120 bp, Artificial Sequence
  ENSG00000146263_153 (sequence is synthesized)
gaaaatggttgagatggaaggtaggcaaggaggaaataactgtacatataaatgcaatccctagagaagaaaacagtgtgatatagctaatattaaaaactataatcaaaggaaacttcc

SEQ ID NO: 399859 - DNA, 120 bp, Artificial Sequence
  ENSG00000146263_154 (sequence is synthesized)
cagaaataaaagatctaaatctacgtattgaaagggtctgctggataatttgaaagattaaccccaagcaatccacccgaagacaagtcttactaaaactgtttcactttaaacataaag

SEQ ID NO: 399860 - DNA, 120 bp, Artificial Sequence
  ENSG00000146263_155 (sequence is synthesized)
gaaaaaatctccaagtcctctaggcacaaagaccaaacaacttataagagcaaaataattttattggcactagacttgcaaagtcaacttaaaacaaggcctcaatgcagcatttaaaat

SEQ ID NO: 399861 - DNA, 120 bp, Artificial Sequence
  ENSG00000146263_156 (sequence is synthesized)
gactcaatgaaaaagtgtgagccaaggattttgtaactttgaccctagcaatcccacttccaggaatttactctaaatgtgtaccctccaaaattaaaatgcatatgcatacgtttattt

SEQ ID NO: 399862 - DNA, 120 bp, Artificial Sequence
  ENSG00000146263_157 (sequence is synthesized)
attgcagtattgtttttataatagtatagtagaaactaaattcttatatataaaagagtagttgaacaaaccatggtatatctgtactctgaagtattattctgtattagtgtgtgttct

SEQ ID NO: 399863 - DNA, 120 bp, Artificial Sequence
  ENSG00000146263_158 (sequence is synthesized)
ccagagaaacagccaataggatatatagatatatatatatatataagatttattataatgaattggctcgcagagttatggaggccaagaagtcccgaatctgaggttggcaagctgaag

SEQ ID NO: 399864 - DNA, 120 bp, Artificial Sequence
  ENSG00000146263_159 (sequence is synthesized)
tagttgtacaatagaatgaggaagatatctgaactgatacggagtgagttgcagaatgtattgttaaatgatagaaataaagttcaaaactataggatgatgttaccttttgtataagaa

SEQ ID NO: 399865 - DNA, 120 bp, Artificial Sequence
  ENSG00000146263_160 (sequence is synthesized)
attaggaaaaaggcaatgtgtgtgtgtgtatatatatgtgttcaattgtgcacaaataaatactggaaagacaaactattgagattggtgggtaaaaataaagatgggtgggtgaaaatg

SEQ ID NO: 399866 - DNA, 120 bp, Artificial Sequence
  ENSG00000146263_161 (sequence is synthesized)
gagtggaagggtttgatgtaattatttgggtagttctgactttagaatcgtgttaatgttccacatgccctaaaattaaatcaatctgtatgaaaggtgcactcaatggaatataacaga

SEQ ID NO: 399867 - DNA, 120 bp, Artificial Sequence
  ENSG00000146263_162 (sequence is synthesized)
aacaactgaacttaaatgtattttaaatgaataacactctttgaggggattggcaatgttaacccaggtaacttaagaatgtactattttgacactatactataaggctaaagacaatca

SEQ ID NO: 399868 - DNA, 120 bp, Artificial Sequence
  ENSG00000146263_163 (sequence is synthesized)
taaagaattgtaaatacttaggagatttgttttttacattgttatgtgaggattagcaattttaaatctattatatttgtattcttggactggacaaattaataaatacattgtgggtaa

SEQ ID NO: 399869 - DNA, 120 bp, Artificial Sequence
  ENSG00000146263_164 (sequence is synthesized)
ggagcgcgggcgcgcggtggcgggaatttcgcctgtttgcggtttagaccccaaagattcctgttggtggtctgggtcacaggaggcaggtttcgggagctggaaatgtgagcgggaatc

SEQ ID NO: 399870 - DNA, 120 bp, Artificial Sequence
  ENSG00000146263_165 (sequence is synthesized)
acttgggattagagtcttaattagttataatgttactaggtaatccattatatgcatttgattaaaagtgatagaaacaaacatcttcaagttgtacgttggtaggtaatagtttcaaca

SEQ ID NO: 399871 - DNA, 120 bp, Artificial Sequence
  ENSG00000146263_166 (sequence is synthesized)
tataaaacttttgtgttctttgagcccagcggttcacaagcactggtttttttggtttgttttgttttttaaatgagaactgaccacagtatagtagaaccagataactaatgttctcat

SEQ ID NO: 399872 - DNA, 120 bp, Artificial Sequence
  ENSG00000146263_167 (sequence is synthesized)
ttgggaactatgctgttttcatttctgataaaataaactttggtcacattagtccattgttttctctgtctcttttgagagttttgcttgttcaatgagtatacttttaaattgtctttc

SEQ ID NO: 399873 - DNA, 120 bp, Artificial Sequence
  ENSG00000146263_168 (sequence is synthesized)
ttttttctacttcctttgcctatattagctcttttcttagccttctttgtgcagtacaccaccatctaccacttgctcagattatttgttgagacctctcagggaagagaatactaggta

SEQ ID NO: 399874 - DNA, 120 bp, Artificial Sequence
  ENSG00000146263_169 (sequence is synthesized)
gggacttctcaagaatcacttaatgaaattcctgtttgagtcccacagtgagtaattcttataagggtatggtgatatggtttggatatttcatttgtcatatactgttttaaatgccag

SEQ ID NO: 399875 - DNA, 120 bp, Artificial Sequence
  ENSG00000146263_170 (sequence is synthesized)
cttctttattaaatctacaagaatcacatggcttaaacagtttttttttattttgttctatttgacagtttgtttttgaatcttaagcaattttatggaagacataatactcagaacttt

SEQ ID NO: 399876 - DNA, 120 bp, Artificial Sequence
  ENSG00000146263_171 (sequence is synthesized)
atggctaaaagaagtcattggagtttattcaataacaagtctattagacacatactatatgtcaagcactatagtggggatagtagtagacaatacaaagataattaaacagatttttac

SEQ ID NO: 399877 - DNA, 120 bp, Artificial Sequence
  ENSG00000146263_172 (sequence is synthesized)
ttttaagagtttgtcagcttttaagtatttataaacatttaactctcatgagcattactcatttctgtcctgaataagccagttatagaagttgcaaaacttaaggccaggtgtggtggc

SEQ ID NO: 399878 - DNA, 80 bp, Artificial Sequence
  ENSG00000146267_0 (sequence is synthesized)
ggccttctccaggcgccgacacaaagagcggggcggagaggcagctgcggggggagccggcggccgctgctgccgcccag

SEQ ID NO: 399879 - DNA, 80 bp, Artificial Sequence
  ENSG00000146267_1 (sequence is synthesized)
agtgcccttcctcctcctcctcctctgccgccgcctcctcagtcgccgccgcctcctcagtcgccgccgcccgcgccgcc

SEQ ID NO: 399880 - DNA, 120 bp, Artificial Sequence
  ENSG00000146267_2 (sequence is synthesized)
cggccccttcccatgcgggcggcgcgggccctgggaggggcgcccggagccagccgcgcagcatgcactggggggttggctttgcttcgtccaggccgtgcgtggtggatctgagctgga

SEQ ID NO: 399881 - DNA, 120 bp, Artificial Sequence
  ENSG00000146267_3 (sequence is synthesized)
accagagcatctccttcttcggctggtgggccgggtccgaggagcccttctccttttatggggacatcatcgctttccctttgcaggattacggtgggatcatggcagggctgggctccg

SEQ ID NO: 399882 - DNA, 120 bp, Artificial Sequence
  ENSG00000146267_4 (sequence is synthesized)
atccctggtggaagaaaaccctttacttgaccgggggagctttgctggccgcagctgcgtatctgctccacgaactcctggtcattaggaaacagcaagagattgactctaaagatgcta

SEQ ID NO: 399883 - DNA, 120 bp, Artificial Sequence
  ENSG00000146267_5 (sequence is synthesized)
ttattttgcatcagtttgcaagacctaacaatggtgttccaagtttatctcctttctgtttaaagatggaaacttatttaaggatggctgacttaccgtatcagaactattttggtggaa

SEQ ID NO: 399884 - DNA, 120 bp, Artificial Sequence
  ENSG00000146267_6 (sequence is synthesized)
aactctctgctcaagggaaaatgccttggattgaatataatcatgaaaaagtttctggcacagaattcataattgactttctggaagagaagcttggagtgaatttaaacaaaaaccttg

SEQ ID NO: 399885 - DNA, 120 bp, Artificial Sequence
  ENSG00000146267_7 (sequence is synthesized)
gccctcatgaaagagccatctccagagcggtgaccaagatggtggaggagcacttctactggacattagcttattgccagtgggtggacaatctcaatgagacccggaagatgctctctc

SEQ ID NO: 399886 - DNA, 120 bp, Artificial Sequence
  ENSG00000146267_8 (sequence is synthesized)
ttagtggtggtggtcccttcagcaacctgctgaggtgggttgtgtgccacataacgaaaggaattgtgaaacgcgagatgcacggccacggcattggccgcttctccgaggaagagattt

SEQ ID NO: 399887 - DNA, 120 bp, Artificial Sequence
  ENSG00000146267_9 (sequence is synthesized)
acatgctgatggagaaggacatgcggtctttagcagggcttttgggtgataagaagtacatcatggggcccaagctttccactcttgacgccactgtctttggacacttggcacaggcaa

SEQ ID NO: 399888 - DNA, 120 bp, Artificial Sequence
  ENSG00000146267_10 (sequence is synthesized)
tgtggaccttaccagggacaagacccgaacggctgatcaaaggtgagctgatcaaccttgccatgtactgtgagaggataaggaggaaattttggccagagtggcaccacgatgatgaca

SEQ ID NO: 399889 - DNA, 120 bp, Artificial Sequence
  ENSG00000146267_11 (sequence is synthesized)
ataccatctatgagtctgaggagagcagcgaaggcagcaaaacccacaccccgctgctggattttagcttttactcaaggacagagacctttgaagatgagggagcagaaaacagttttt

SEQ ID NO: 399890 - DNA, 120 bp, Artificial Sequence
  ENSG00000146267_12 (sequence is synthesized)
ccagaaccccagacacagattttactggacactcactctttgattcggatgtggacatggatgactatacagaccacgaacagtgcaagtgacgtccagcctcactgaccctcttccttg

SEQ ID NO: 399891 - DNA, 120 bp, Artificial Sequence
  ENSG00000146267_13 (sequence is synthesized)
ggacctgccactccctgggtcggtccattttcccaggtagcaatccatccgagctgggaggagatcttcgtgcttggcagagttttcacatgctaactggactatagcagccttatttct

SEQ ID NO: 399892 - DNA, 120 bp, Artificial Sequence
  ENSG00000146267_14 (sequence is synthesized)
tttttgtacaaacaaaacacagaaccattcagatgactccattgaaaacaaacaggcaaaaaataatgtcagcatggttcctgaaatccatttttgttttcattagaaaactattaataa

SEQ ID NO: 399893 - DNA, 120 bp, Artificial Sequence
  ENSG00000146267_15 (sequence is synthesized)
tattgtgtggtagagcaggtgtaagagctggttgtcagctgatagtttttatgatgatcctcttcaaccctgaggtcttaattgtgagatggattcttgaacctccttcctccaccagga

SEQ ID NO: 399894 - DNA, 120 bp, Artificial Sequence
  ENSG00000146267_16 (sequence is synthesized)
tttgaagtaatgagagatatcatcagaaaaatgttttacggtggctgcttgtactttatgtgtgtatattgtatgttgagacataagtcaaataaaatccacagatattaaacgaacacc

SEQ ID NO: 399895 - DNA, 120 bp, Artificial Sequence
  ENSG00000146267_17 (sequence is synthesized)
tactatgtgcaaagcactgtgctaggtgctaatcagtatacattttattctaagccctgccagtgactagctgtgtgattttgagcaaatctcttattaactattgggtgcctcatttct

SEQ ID NO: 399896 - DNA, 120 bp, Artificial Sequence
  ENSG00000146267_18 (sequence is synthesized)
cccacctgtaaagtggggatgacaatactctccacctacctacctcacaggggtgttgtggggattcatgtggtaacattcgtacggcgctttaaacctcttagaagtggtgcgacataa

SEQ ID NO: 399897 - DNA, 120 bp, Artificial Sequence
  ENSG00000146267_19 (sequence is synthesized)
acacagcattttattctttattgcacttcatgcatgtgaagatttgagggcaaaggaattccatatccaggcaaccaccaccacagtcacctgcaaaagctgagcagatgaaatacacac

SEQ ID NO: 399898 - DNA, 120 bp, Artificial Sequence
  ENSG00000146267_20 (sequence is synthesized)
aaaggtacacttaggactttgtcatgattcctttctgtaatcttggctgaatcaaaatcttttgttcaaagaacattggaaatgtttttacaaattatcgacagctacaaacagtcttca

SEQ ID NO: 399899 - DNA, 120 bp, Artificial Sequence
  ENSG00000146267_21 (sequence is synthesized)
attctaccatgtatttgcagaaaagtggttctttcattgcctgaactcaccctggcatgttctgtgttgactccagagtgttacgttgcctatgtttgatttatttgagaagaataaatc

SEQ ID NO: 399900 - DNA, 120 bp, Artificial Sequence
  ENSG00000146267_22 (sequence is synthesized)
tcaggtatatggcaggtttcatagagttgaagggaaagtatttcattgatttttataagcagaagcctgccaacttgtaatgtctttttgaaaacaaaccttgcaaagatgtattgaaaa

SEQ ID NO: 399901 - DNA, 120 bp, Artificial Sequence
  ENSG00000146267_23 (sequence is synthesized)
gatgaagtagcaagaggatacttgtatcaaagcactctgtgcagtgttagactatatgcagttttattaatgcaacttttctggtgttttcagccactgcccagtgagaggagagcaatg

SEQ ID NO: 399902 - DNA, 120 bp, Artificial Sequence
  ENSG00000146267_24 (sequence is synthesized)
ctgagaacaagtcttaatgtttttgctgtctcatccccgttctctctctctttccctatagtattcgatgaactgttggcttacccatatttgtgaaggcaccctatttctaaagatgaa

SEQ ID NO: 399903 - DNA, 120 bp, Artificial Sequence
  ENSG00000146267_25 (sequence is synthesized)
gttgttgttgttgttgttgttttgacttaggacattttccagggaaatatggggcagagatcctgggtgatggctgtgagatttgggctaggagagccaagatttacaattgcaaacaaa

SEQ ID NO: 399904 - DNA, 120 bp, Artificial Sequence
  ENSG00000146267_26 (sequence is synthesized)
actgctttgcttctgaccaacataaggattgctcattatggggttaaagaggcacttcttaaaatacagcaacttctgagaaatccatgcactttacttgaaaaaaaaaaaacctctttt

SEQ ID NO: 399905 - DNA, 120 bp, Artificial Sequence
  ENSG00000146267_27 (sequence is synthesized)
tgaatatagcatttgcaaaacaatcttaaaagactgctgtagattcacaaagaggtaaagggaggagagtttttcagactgcttaccacttaagcaattgtgtagggcatatgtaactgg

SEQ ID NO: 399906 - DNA, 120 bp, Artificial Sequence
  ENSG00000146267_28 (sequence is synthesized)
gaatacgtgctgagataccctaagttagaaattcttattccatgggaaacttagttgttaatatcttattaaaaccattcttatttaaagggactgtttgatgcctaataagaatgtggt

SEQ ID NO: 399907 - DNA, 120 bp, Artificial Sequence
  ENSG00000146267_29 (sequence is synthesized)
ggagaagatatgaatggataagcctgtttgaggctgcagcatcatttgggaggactgtttgcctcccctctctctagcaagtgtgttttaaggccaactggtggcatttctgtgtgacta

SEQ ID NO: 399908 - DNA, 120 bp, Artificial Sequence
  ENSG00000146267_30 (sequence is synthesized)
gggagactcctggactgaaaatatgaatataatgaacaggtggactgcagacctgtctccacaaagcatgggttgtccttttcccaccacattttagtagaaaagaaatgtatttgaatt

SEQ ID NO: 399909 - DNA, 120 bp, Artificial Sequence
  ENSG00000146267_31 (sequence is synthesized)
tttttctatgaacaatctatcttactgtacagtaccaagtgtgatgtattttctctcaaaggatgattaagttatgagaatgtagattaatatatgtttttaattttatattacttggaa

SEQ ID NO: 399910 - DNA, 120 bp, Artificial Sequence
  ENSG00000146267_32 (sequence is synthesized)
tacaagtatgtggagaaccaactttgaaaatgaagttgtaaaataagtcattccatccaggtacctcttacaggggcatgaatggacattgctatctggagtcttgggcaattgcctgac

SEQ ID NO: 399911 - DNA, 120 bp, Artificial Sequence
  ENSG00000146267_33 (sequence is synthesized)
agcatataactgggcatcaacattttgtaggtgttaatttgatttagagccctagaatatgcccctgctttactttcccaaggcgggttatgcaaacaaaataaccaagacaaagtcacc

SEQ ID NO: 399912 - DNA, 120 bp, Artificial Sequence
  ENSG00000146267_34 (sequence is synthesized)
atagtgtgagtctttatccggaaggatttaattttatgtgcttcattcttaagctacccagatttgaaatgttctccaatttcatgaacaggtgctaattataggaaaaaactataagaa

SEQ ID NO: 399913 - DNA, 120 bp, Artificial Sequence
  ENSG00000146267_35 (sequence is synthesized)
gttaagggacattttggtcatctggcttcttgttcaagttctgtgtttcctttttgctggaaggtaacttgaagtatgtgatctttaatgttaacagatgcttttggttggacaacagac

SEQ ID NO: 399914 - DNA, 120 bp, Artificial Sequence
  ENSG00000146267_36 (sequence is synthesized)
ccataggctattcgttctttttttcctgtcattgtaaaagtaaatcaagctcttgcatccacctctctttgcccatctgtacccccactcaacaagattaatgagcagaatcattgagct

SEQ ID NO: 399915 - DNA, 120 bp, Artificial Sequence
  ENSG00000146267_37 (sequence is synthesized)
ttactctccatcagaacagatataaggacaatctatatttatgcaatgatgaactatattgtcagcatttaccaatttgttgttgttacataatgaattgtagaaagtgacactaccaag

SEQ ID NO: 399916 - DNA, 120 bp, Artificial Sequence
  ENSG00000146267_38 (sequence is synthesized)
gctgtgggctacccaggagactaatcacggacctggaacaacttggacttgaatcagactgcagtctactcctcaagtgagccctgcccatgtatactgtggtgttagggtatatttttg

SEQ ID NO: 399917 - DNA, 120 bp, Artificial Sequence
  ENSG00000146267_39 (sequence is synthesized)
tgaaatagctaaggttcaaggaacagacatactaaggattttggccttgtgggtcttgcttagatttgtttgagagataatgtagagtcatagaaatgtatagctgtgctaaaaattagc

SEQ ID NO: 399918 - DNA, 120 bp, Artificial Sequence
  ENSG00000146267_40 (sequence is synthesized)
tgtagaaagcaccttattggctcagtgtcacatacatacttatttgaagggcaggaccaaaaactgaggtcaatatggttctttccattacaccacgttgcccttgatggtttctttcta

SEQ ID NO: 399919 - DNA, 120 bp, Artificial Sequence
  ENSG00000146267_41 (sequence is synthesized)
ttataccaccttgcccttgatggttctttccattataccactgtggctttgttgtcttataaaatgcatgttacctgagaagtcaccctgtgttcagacaaccagcacatctccagccat

SEQ ID NO: 399920 - DNA, 120 bp, Artificial Sequence
  ENSG00000146267_42 (sequence is synthesized)
tccctggttggaatcctacttcgcttttgtccatgtcctgtcagcctggtcaagaccaatacaagagacctctcatcagtgcagggtattgctagactctgaagaatagcaagatggatt

SEQ ID NO: 399921 - DNA, 120 bp, Artificial Sequence
  ENSG00000146267_43 (sequence is synthesized)
cccaaatcaccaagactcctcatacttccttatgtatcttttaaagaacccatgtccattccctcacttgctgaatatttacagagcacctaccctgtgcctggccctgggatctacact

SEQ ID NO: 399922 - DNA, 120 bp, Artificial Sequence
  ENSG00000146267_44 (sequence is synthesized)
ggttgtagagtggcaaatagaacagcatagaactctgatttcagggcatcctcttttgcctagacttctctagcctcttttacgtacttggccatttccctgttccattccatccactac

SEQ ID NO: 399923 - DNA, 120 bp, Artificial Sequence
  ENSG00000146267_45 (sequence is synthesized)
aaatggattaatctttctaaaaagctctttggccctgatggggtgtggcattgcctcagggtgaggggctactccttagggtctggtgttttcacctttgttcaccttgtctccatagct

SEQ ID NO: 399924 - DNA, 120 bp, Artificial Sequence
  ENSG00000146267_46 (sequence is synthesized)
cctccatgggagccatccagtgcagccaggttgatccatttgccattgcctaaaaaagcctcatgtggcccacctctgtgcctctgctcatgccagtccttctcctgaaatgttctattc

SEQ ID NO: 399925 - DNA, 120 bp, Artificial Sequence
  ENSG00000146267_47 (sequence is synthesized)
tctgctccactggcccaagtcatgcccatctctcaaggtctgacttcgtcagcttcacatgaaggcttcccagctgattataatctcttcctttgaaaatgaagcactcatcacttcctt

SEQ ID NO: 399926 - DNA, 120 bp, Artificial Sequence
  ENSG00000146267_48 (sequence is synthesized)
gttgcatgggaaagatgctcagagagtgagtcacataccattaaatagtgaattttcactttttgtttgtcaggaactccactgataatccaacgaaagttctataccctattcccagaa

SEQ ID NO: 399927 - DNA, 120 bp, Artificial Sequence
  ENSG00000146267_49 (sequence is synthesized)
aaacacatatatgcaaatacataaaatgttacatataaattcaggaaatttagagacctcctgaaattatccatggtttcctcagggggttaatggaccccagttaaagagtcttgttcc

SEQ ID NO: 399928 - DNA, 120 bp, Artificial Sequence
  ENSG00000146267_50 (sequence is synthesized)
caagagtctttaaatgttatcattgtgtttgttcttgtttttaacacagccagagagaagaaaaattagtacaggctatgcaagcaaaagtaatctctattatccatgttcagtatgtct

SEQ ID NO: 399929 - DNA, 120 bp, Artificial Sequence
  ENSG00000146267_51 (sequence is synthesized)
tgagtgacagaaaagaagaaagaagtgctcttaggttatttgagaaaattttgttttagaggtttggaattttgaaagtcataggattttgttgttgtccttgtcatttatcttttaacc

SEQ ID NO: 399930 - DNA, 120 bp, Artificial Sequence
  ENSG00000146267_52 (sequence is synthesized)
acccccaaaattgatttatcaaaatgagttcagggccaagtgcgcttcctttcagccctgaaacccaccgcttctgcatggatagggcaaccagcctgggctgaaggtgggagagaagag

SEQ ID NO: 399931 - DNA, 120 bp, Artificial Sequence
  ENSG00000146267_53 (sequence is synthesized)
gctggatttttcttccttaaagaagaaaggtctgcacaatcaggttttcctgtattcatttattcattcattcatagaacaattgttgagtgtattttcaataaaaggttggtggctttt

SEQ ID NO: 399932 - DNA, 120 bp, Artificial Sequence
  ENSG00000146267_54 (sequence is synthesized)
gttgatagggaacaactcaggttattcttctttctttcttttagggttttttttttttttaaacagagtatgttattttattgttcctgactatgacccaggatcctttgttctccttta

SEQ ID NO: 399933 - DNA, 120 bp, Artificial Sequence
  ENSG00000146267_55 (sequence is synthesized)
tatgcagtgctatttaagtcaaactagaactgataaaagtacactcaatgacgaatacttcccaggctaaatgctgggctctgggaacccatctttaacaggtccagggatcaattgcat

SEQ ID NO: 399934 - DNA, 120 bp, Artificial Sequence
  ENSG00000146267_56 (sequence is synthesized)
gtgattgtgaagtgcttgacctttattcagttgcttccagtggtctggatataacttgggaagttcaaaaggattcccttgttgggtgaggagggacgggcctcttacctgtaagactct

SEQ ID NO: 399935 - DNA, 120 bp, Artificial Sequence
  ENSG00000146267_57 (sequence is synthesized)
tgctactgtcaggcgtggatgcgaacatctgtggcatgttttcctcatctgaattccttacccagaaactcagatttttggtccctgactttcaagaatatcttaaggatatttaagttt

SEQ ID NO: 399936 - DNA, 120 bp, Artificial Sequence
  ENSG00000146267_58 (sequence is synthesized)
ccttaatctttgagatgagactgctggaaccagcaacgttagccttgccagttagagatgattacagagggcactgaagcatagatttaaaaaaaaggggttcagctgttttggagctga

SEQ ID NO: 399937 - DNA, 120 bp, Artificial Sequence
  ENSG00000146267_59 (sequence is synthesized)
cagggtgacctcctcaaccattctgctttcgccgaagcaaggaacttgtccccagacctagaccctctaaaactcctgctattggctggaccatgacaaactaggatgctcaaatttcat

SEQ ID NO: 399938 - DNA, 120 bp, Artificial Sequence
  ENSG00000146267_60 (sequence is synthesized)
aaggatgattgccttaaattgtaaaattggtagacaaataaaggggaccattgcaataataaaacgaataacctacagatatggtctagcagcaccaaactgaccatttcagtaggaaaa

SEQ ID NO: 399939 - DNA, 120 bp, Artificial Sequence
  ENSG00000146267_61 (sequence is synthesized)
caagtaatctggagtaaaagatggatacggtactttggtgttctgtacacaataattttagcaaagaatttaatggccatcatgcatttttgaaacaatccactaaccataaagcaatat

SEQ ID NO: 399940 - DNA, 120 bp, Artificial Sequence
  ENSG00000146267_62 (sequence is synthesized)
atgtgtatcataatcagttaactttataaaaagttgtgctactaaatgtgactaattcacctcccaccccccattggcatgcatttatttttatttatttgtttttatttgtggctctgg

SEQ ID NO: 399941 - DNA, 120 bp, Artificial Sequence
  ENSG00000146267_63 (sequence is synthesized)
aatagagtaactttcacttattagtaatgcttaagcttttttccttatttaataccttttttgtttttagttaccccatggcttctaaaaaaataagatccaacttctgaattgccatgt

SEQ ID NO: 399942 - DNA, 120 bp, Artificial Sequence
  ENSG00000146267_64 (sequence is synthesized)
tagttaatggtggctaaacagatagcaaagggaatataatataattgttcattgagggctaaaaaagaggaatgctctgaatatttactgtcttcctcctctttaaaaaataatcaatga

SEQ ID NO: 399943 - DNA, 120 bp, Artificial Sequence
  ENSG00000146267_65 (sequence is synthesized)
ctttcctcttccattgttcagaatcagaaatgttctttcgtatttgcttctcttctacaagagattatatttggcttattaaaatataaaccatgtccaaatgattgtatttttatcttt

SEQ ID NO: 399944 - DNA, 120 bp, Artificial Sequence
  ENSG00000146267_66 (sequence is synthesized)
aacaaattatgcctgggatttgttttttacagaaataaggctaaaggcttctgcttcagtaggggtgacatgtttactcctgtaaaatgattttaatgttactcctgtcaaaatgatttt

SEQ ID NO: 399945 - DNA, 120 bp, Artificial Sequence
  ENSG00000146267_67 (sequence is synthesized)
attgcaagtaataagtcttgtgggatcagaacaagcttattgtaaacacatgtttttttcccagtgatctacatcatgccaaatgtctgacaactcaaatgttgatgacagcgatggttt

SEQ ID NO: 399946 - DNA, 120 bp, Artificial Sequence
  ENSG00000146267_68 (sequence is synthesized)
ttccatggtgaagtttggaaaactgagggtctgagtccctcatttggtggtattagaatttaactgagtaggaggagagaagaaaacagtaacaaatgtcaaaatttcaagcaaccatgt

SEQ ID NO: 399947 - DNA, 120 bp, Artificial Sequence
  ENSG00000146267_69 (sequence is synthesized)
ggtatggctgtggtagagatgtatcaggcaattgaaagttttctaggtggtgccatcttgctaaaataataaaaagtacaggtttataaatcaaaaacaagtgcaatctatgtagggaag

SEQ ID NO: 399948 - DNA, 120 bp, Artificial Sequence
  ENSG00000146267_70 (sequence is synthesized)
gattgtctatggatatacaagtggccagtgcaggaagtgaagtaacatttatctttatcttaatttctatgctcatgtcccccattccccttctgaagccaggcctgggaccttagatag

SEQ ID NO: 399949 - DNA, 120 bp, Artificial Sequence
  ENSG00000146267_71 (sequence is synthesized)
cagcttagagggtctggccctgatacatttactcctttaattttggaatttccttctagtctctcaagagtgtttgtggcatatatttttcattttataaatataaaattgtacaaagta

SEQ ID NO: 399950 - DNA, 120 bp, Artificial Sequence
  ENSG00000146267_72 (sequence is synthesized)
atgtacattttgttttagagaagtcttttaaatgtttgcagacagcccagatcgtccatccctatttaggcagtggtctccaaacgtttatgtttattcaccctattagtaaaactttct

SEQ ID NO: 399951 - DNA, 120 bp, Artificial Sequence
  ENSG00000146267_73 (sequence is synthesized)
gagcatgcccctccatgtatttatttatgatatatatgtatatatgtatacactgctatatatgtatatactgttttactgatgtaaacattaaaaaccatagcaaacatagacatttta

SEQ ID NO: 399952 - DNA, 120 bp, Artificial Sequence
  ENSG00000146267_74 (sequence is synthesized)
aaagtatattttctggtcctcaatggagtttagagaatgggacaaggagtctttaggcgtagcacccagatgcctgtaattgattagagaatgtgtatataccatttgtggcaaagcaga

SEQ ID NO: 399953 - DNA, 120 bp, Artificial Sequence
  ENSG00000146267_75 (sequence is synthesized)
tataaaacaggcatggacgcatgattttaggtcaaggtatttaattatttttacttaaaataggcatttttggttgggaaagagaaggatgaacaatttgatgtcacctttaagactgat

SEQ ID NO: 399954 - DNA, 120 bp, Artificial Sequence
  ENSG00000146267_76 (sequence is synthesized)
gtttttaattctgcttttgggaccacttgatctagaatgccttgaaaattccagaaagatttaacaacacactgaggtaagcaaaacaagaaaagaaagtaggggtgaggtgatacccag

SEQ ID NO: 399955 - DNA, 120 bp, Artificial Sequence
  ENSG00000146267_77 (sequence is synthesized)
ataatgcaaatgcaggatgtattgtctgtgaatttcagcatcaatctgaaaaacatgttttgataatgcctgataattcatcatctcactgattacatgtctttttttctatttgtttat

SEQ ID NO: 399956 - DNA, 120 bp, Artificial Sequence
  ENSG00000146267_78 (sequence is synthesized)
aatcttgtgtcttcaaatgtgtggaagatgtgcagacttatttttaggtatctgagataggaagggccaatgttggcataatttgaacccacatttcggggctaatgggcggacaccacc

SEQ ID NO: 399957 - DNA, 120 bp, Artificial Sequence
  ENSG00000146267_79 (sequence is synthesized)
tggaaacacttacctgcaccctctgttttgcaatcacaatgattagcatcttgctgaatgatgaccccaatgtgaagatggcatttcagtgtttatttctggatctatgagttactttag

SEQ ID NO: 399958 - DNA, 120 bp, Artificial Sequence
  ENSG00000146267_80 (sequence is synthesized)
cagagttattagtagtttataaagccatatttaaacttgtacacttgattgtaagatagatttgaattgtgcactatgttgactactgtatataaatgtggaaattctgtatatttggtc

SEQ ID NO: 399959 - DNA, 120 bp, Artificial Sequence
  ENSG00000146267_81 (sequence is synthesized)
ttaatgctatatgtatttgatgtgtaaatgataactaatggatatgaaatagttttctgtgaatgtctttcttccaatttacttctcttttgcaaatttgaatgtttaaacttcaggctc

SEQ ID NO: 399960 - DNA, 120 bp, Artificial Sequence
  ENSG00000146267_82 (sequence is synthesized)
atggggaaaatctgaaatgtttgcatctaatatactgttaagtggtggtctcttagatgactgggagagtattttagttgtaaggctcttgtataattaaaacagaggtaatgaattttt

SEQ ID NO: 399961 - DNA, 120 bp, Artificial Sequence
  ENSG00000146267_83 (sequence is synthesized)
taggcatataactttgatagaatttcaagtgagtggcttttaagaagaaaaacagatctctggaatatgctgtcccatcctctcctgcttttatttcatgcccagtgtgcctcagagtgt

SEQ ID NO: 399962 - DNA, 120 bp, Artificial Sequence
  ENSG00000146267_84 (sequence is synthesized)
tacgaagtgtgagaaccactggtagagagaagacaaggaggagagggagagctgggagcacatgttgagacctttactatggctaggccttataatagaccaatttccccttgtataaat

SEQ ID NO: 399963 - DNA, 120 bp, Artificial Sequence
  ENSG00000146267_85 (sequence is synthesized)
catacctcttcaataaagtaattattgttcccaaattacagatgaagaaagacgtttgggatgataaactggcatatggtaatatggccatgatatgctcaagtctttagggtcagagat

SEQ ID NO: 399964 - DNA, 120 bp, Artificial Sequence
  ENSG00000146267_86 (sequence is synthesized)
tcacagcaagattttggaaattcaaatcttactatgaagtgattcacacatgtgtatggtaatgaaccttaaaggatagctgggcctataggcatgtcaagatctatagagacatgcagg

SEQ ID NO: 399965 - DNA, 120 bp, Artificial Sequence
  ENSG00000146267_87 (sequence is synthesized)
atgtttcaaattctatcttaaaatttgaccaaatctttggtcaaataataatactgttactcaaatattagctttttaccatttagagcaaattacaatcaggtaacattcaaaattcta

SEQ ID NO: 399966 - DNA, 120 bp, Artificial Sequence
  ENSG00000146267_88 (sequence is synthesized)
accctcccttcccaacatgggaatatctattaagtaggaaatgagagaaccccctaatttcccatttcagtgataatactgattgagtatctcttatctgaagtgcttgggaccagaagt

SEQ ID NO: 399967 - DNA, 120 bp, Artificial Sequence
  ENSG00000146267_89 (sequence is synthesized)
gttttggatctgggtttttctcagattttgaaatatttgcattataccagttgagtatcccaaaatcaaaactggaaatctgaaatgatccaatgtccgtttcctttgagtgtcatgtta

SEQ ID NO: 399968 - DNA, 120 bp, Artificial Sequence
  ENSG00000146267_90 (sequence is synthesized)
gtgctcaaaaagttttggattttggagcgtttcagattttggatttttggatttgggatgctcgacctgtagtttggttttcatctttttagactccatttctcttgacctataaatcct

SEQ ID NO: 399969 - DNA, 120 bp, Artificial Sequence
  ENSG00000146267_91 (sequence is synthesized)
atcagccctgtttattaacatagaccctagtcagaaatactttgaaatagatctacatctacttcaacgtcagttggttccacacccttctagaacttgtgtggggtcctggacttcccg

SEQ ID NO: 399970 - DNA, 120 bp, Artificial Sequence
  ENSG00000146267_92 (sequence is synthesized)
tctgtcctgttagggaagctttgctgtcctagctttcaggactcatcagagggaagagggtcatttacctttccaatgtgctgtgatctcagagtcgttaaaatacatgttttgctgcca

SEQ ID NO: 399971 - DNA, 120 bp, Artificial Sequence
  ENSG00000146267_93 (sequence is synthesized)
ggtagtgcaatactattaattcccaggccatgctgtcagctcatcagtagagagttgagtggaggtgaagggcatgaggactaacgaggttaatatgaattcaacaggtgagctgatcaa

SEQ ID NO: 399972 - DNA, 120 bp, Artificial Sequence
  ENSG00000146276_0 (sequence is synthesized)
tgagtaaacatccttctaataatgaacagaccaataatgtcttaagagagaaaaagaacaatcttttcctttttgctgtttctggagagagctgtttgaatttggaaacccatgttggct

SEQ ID NO: 399973 - DNA, 120 bp, Artificial Sequence
  ENSG00000146276_1 (sequence is synthesized)
gtcccaaatatgagatttggcatctttcttttgtggtggggatgggttttggccactgaaagcagaatgcactggcccggaagagaagtccacgagatgtctaagaaaggcaggccccaa

SEQ ID NO: 399974 - DNA, 120 bp, Artificial Sequence
  ENSG00000146276_2 (sequence is synthesized)
agacaaagacgagaagtacatgaagatgcccacaagcaagtcagcccaattctgagacgaagtcctgacatcaccaaatcgcctctgacaaagtcagaacagcttctgaggatagatgac

SEQ ID NO: 399975 - DNA, 120 bp, Artificial Sequence
  ENSG00000146276_3 (sequence is synthesized)
catgatttcagcatgaggcctggctttggaggccctgccattcctgttggtgtggatgtgcaggtggagagtttggatagcatctcagaggttgacatggactttacgatgaccctctac

SEQ ID NO: 399976 - DNA, 120 bp, Artificial Sequence
  ENSG00000146276_4 (sequence is synthesized)
ctgaggcactactggaaggacgagaggctgtcttttccaagcaccaacaacctcagcatgacgtttgacggccggctggtcaagaagatctgggtccctgacatgtttttcgtgcactcc

SEQ ID NO: 399977 - DNA, 120 bp, Artificial Sequence
  ENSG00000146276_5 (sequence is synthesized)
aaacgctccttcatccacgacaccaccacagacaacgtcatgttgcgggtccagcctgatgggaaagtgctctatagtctcagggttacagtaactgcaatgtgcaacatggacttcagc

SEQ ID NO: 399978 - DNA, 120 bp, Artificial Sequence
  ENSG00000146276_6 (sequence is synthesized)
cgatttcccttggacacacaaacgtgctctcttgaaattgaaagctatgcctatacagaagatgacctcatgctgtactggaaaaagggcaatgactccttaaagacagatgaacggatc

SEQ ID NO: 399979 - DNA, 120 bp, Artificial Sequence
  ENSG00000146276_7 (sequence is synthesized)
tcactctcccagttcctcattcaggaattccacaccaccaccaaactggctttctacagcagcacaggctggtacaaccgtctctacattaatttcacgttgcgtcgccacatcttcttc

SEQ ID NO: 399980 - DNA, 120 bp, Artificial Sequence
  ENSG00000146276_8 (sequence is synthesized)
ttcttgctccaaacttatttccccgctaccctgatggtcatgctgtcctgggtgtccttctggatcgaccgcagagccgtgcctgccagagtccccttaggtatcacaacggtgctgacc

SEQ ID NO: 399981 - DNA, 120 bp, Artificial Sequence
  ENSG00000146276_9 (sequence is synthesized)
atgtccaccatcatcacgggcgtgaatgcctccatgccgcgcgtctcctacatcaaggccgtggacatctacctctgggtcagctttgtgttcgtgttcctctcggtgctggagtatgcg

SEQ ID NO: 399982 - DNA, 120 bp, Artificial Sequence
  ENSG00000146276_10 (sequence is synthesized)
gccgtcaactacctgaccactgtgcaggagaggaaggaacagaagctgcgggagaagcttccctgcaccagcggattacctccgccccgcactgcgatgctggacggcaactacagtgat

SEQ ID NO: 399983 - DNA, 120 bp, Artificial Sequence
  ENSG00000146276_11 (sequence is synthesized)
atggtgcagctgaccctggcctcagagaggagctccccacagaggaaaagtcagagaagcagctatgtgagcatgagaatcgacacccacgccattgataaatactccaggatcatcttt

SEQ ID NO: 399984 - DNA, 120 bp, Artificial Sequence
  ENSG00000146276_12 (sequence is synthesized)
ccagcagcatacattttattcaatttaatatactggtctattttctcctagatgcttgtaattctacaaatttcacatttccatggcatgcactacagaaataactgtataatgaaaaag

SEQ ID NO: 399985 - DNA, 120 bp, Artificial Sequence
  ENSG00000146276_13 (sequence is synthesized)
tatttaaggatatggttaaaaaaaaatcccaggacccacccatgttttcactatcccttctgcagctttccaaagctacattgacgagacacttactggtttaatttgcacttattaacc

SEQ ID NO: 399986 - DNA, 120 bp, Artificial Sequence
  ENSG00000146276_14 (sequence is synthesized)
atctattgaatacacagcattatattaggtgctgcaggaaatacgacactgtagcgactgatgttagttgttacccagatcccctggaaaagcacactaccagtgttgtgggcacattta

SEQ ID NO: 399987 - DNA, 120 bp, Artificial Sequence
  ENSG00000146276_15 (sequence is synthesized)
gttccacccgttagacccttgatgctattcacatgaataatttattttcctcaagtgtcattacattgttcaggctacgtgaacttggaagcacctacaggccatttgcatgaaattcac

SEQ ID NO: 399988 - DNA, 120 bp, Artificial Sequence
  ENSG00000146276_16 (sequence is synthesized)
atgcacctaaatcctcactttgacagaaactcatgcttcagtttataacctattacctattttgtatgcgactccacctccgcatgtttattttaataaaaggcaatgataacattcaca

SEQ ID NO: 399989 - DNA, 120 bp, Artificial Sequence
  ENSG00000146276_17 (sequence is synthesized)
ttatttttctttatatgctgtggttcacaggctttaccccttcacaagaaaagctctttagattggcgcaattgcttctgattttggtgaaattttccctggtagggaaactttgaagat

SEQ ID NO: 399990 - DNA, 120 bp, Artificial Sequence
  ENSG00000146276_18 (sequence is synthesized)
aagagtacacacatgcattttgtctgttgtgtcatagaggtaactaggctagaaaatttgtgtttaaatgttccctattttatataatcaccacttcatgtttcttcttcttggagcatg

SEQ ID NO: 399991 - DNA, 120 bp, Artificial Sequence
  ENSG00000146276_19 (sequence is synthesized)
tccttgttcaaagagaagtgctttctcagtgatgtgatatcttcactgaggaacttgggtagagaatgatttcttctgcataaacacttcaaggaaatacataatttgggactacttgta

SEQ ID NO: 399992 - DNA, 120 bp, Artificial Sequence
  ENSG00000146276_20 (sequence is synthesized)
actcattagaatgagaaatactcacatggtttcttaagagaaaaagaacatcggaaagcaaaataaatgggaagatatcactggacatctgcatttatactcgaaataccagcattttct

SEQ ID NO: 399993 - DNA, 120 bp, Artificial Sequence
  ENSG00000146276_21 (sequence is synthesized)
atggaccagaaaactgccatcacctagaccacacagcccagataccaggcagacggatggcccaatggcaactgatgtcagggcatggggtaaaggagagggttctaatctggtgtatca

SEQ ID NO: 399994 - DNA, 120 bp, Artificial Sequence
  ENSG00000146276_22 (sequence is synthesized)
cttaaaaacagttatttatattatatatctgctatatagatcaacctccaccaaacttacccaaacagcatttgttttatttgaaactcactttaataaagtgaattatatacacaataa

SEQ ID NO: 399995 - DNA, 120 bp, Artificial Sequence
  ENSG00000146276_23 (sequence is synthesized)
tcccagcgtgagcgacgcagaagacggatatttttgatctgcacttggttgaatctacagatgtaaaacccacggatgcagagggctgactgtggctagaaaatgtgctgcagggagcac

SEQ ID NO: 399996 - DNA, 120 bp, Artificial Sequence
  ENSG00000146276_24 (sequence is synthesized)
gctgactgtggctagaaaatgtgctgcagggagcacgtggaaacagctgatgagcacctgcagcccctgtttgggagcagctggggtgtgctgcctgccgttcacccatcagtcaaatcg

SEQ ID NO: 399997 - DNA, 120 bp, Artificial Sequence
  ENSG00000146276_25 (sequence is synthesized)
taataatggccgtaagcttaaaatagatccagggaggagctcattaacgtgaacatagaaagcagttccgcacctctggccttactcctcttggaaattgctttggtccatttttacttc

SEQ ID NO: 399998 - DNA, 120 bp, Artificial Sequence
  ENSG00000146276_26 (sequence is synthesized)
cttttattcgacgcaccagaaaataagacttttaccaacatttttactgcatttgacgatgaactaatttagaccggctaaaataattgttccactgggacacaggaattcaacctcagt

SEQ ID NO: 399999 - DNA, 120 bp, Artificial Sequence
  ENSG00000146276_27 (sequence is synthesized)
ccactgaaagcagaatgcactggcccggaagagaagtccacgagatgtctaagaaaggcagatgaaatagtcagcaaggtgaagtgtaacttatcagatgctcggccattagctgaatga

SEQ ID NO: 400000 - DNA, 120 bp, Artificial Sequence
  ENSG00000146276_28 (sequence is synthesized)
acagactaagaactagaacaagcagacatcaagaagaagtcttgtaggttggaatttgtcatttgatccaaaataaaagtgggtgttcaacaaatgtacaccctatgttcagttcaaaaa

SEQ ID NO: 400001 - DNA, 120 bp, Artificial Sequence
  ENSG00000146278_0 (sequence is synthesized)
gttgctgcgccgccaccgcccgagtcatgttccgcgatcttctcaggctctcctagcagcatccatcgccgccaccctatcttcactggcttcattcaccttctccttctctcttcgttg

SEQ ID NO: 400002 - DNA, 120 bp, Artificial Sequence
  ENSG00000146278_1 (sequence is synthesized)
ctgagcgacaagcttcctagcgctatgactgtcgtctccgtcccgcagcgggagccgctcgtcctgggtggccgccttgcgccgcttggcttttcctcccgaggttactttggggccctc

SEQ ID NO: 400003 - DNA, 120 bp, Artificial Sequence
  ENSG00000146278_2 (sequence is synthesized)
ccgatggtgaccacggctccgcctcctttaccccggatcccggacccccgggcactgcccccgaccctcttcctccctcatttcctagggggagatggcccgtgtctgaccccccagcct

SEQ ID NO: 400004 - DNA, 120 bp, Artificial Sequence
  ENSG00000146278_3 (sequence is synthesized)
cgcgctccagcagctctgcccaaccgcagcctcgccgtggcgggaggcactcctcgggcagcgccgaagaagcggcgaaagaagaaggtgcgggccagccccgcagggcagctgcccagc

SEQ ID NO: 400005 - DNA, 120 bp, Artificial Sequence
  ENSG00000146278_4 (sequence is synthesized)
aaggtgcgggccagccccgcagggcagctgcccagccgcttccaccagtaccagcagcaccggccgagtctggagggcggccggagccccgcgaccggcccgagcggagcgcaggaggtc

SEQ ID NO: 400006 - DNA, 120 bp, Artificial Sequence
  ENSG00000146278_5 (sequence is synthesized)
gccgcagccggcacggagggagccagccccgaccttgccccgctgcggcccgcggctcccggccaaacccccctcaggaaagaggttttaaaatcaaagatgggaaaatcggagaaaatt

SEQ ID NO: 400007 - DNA, 120 bp, Artificial Sequence
  ENSG00000146278_6 (sequence is synthesized)
gcccttccccatggccagcttgttcatggtatacacttgtatgagcaaccaaagataaacagacagaaaagcaaatataacttgccactaaccaagatcacctctgcaaaaagaaatgaa

SEQ ID NO: 400008 - DNA, 120 bp, Artificial Sequence
  ENSG00000146278_7 (sequence is synthesized)
aacaacttttggcaggattctgtttcatctgacagaattcagaagcaggaaaaaaagccttttaaaaataccgagaacattaaaaattcgcatttgaagaaatcagcatttctaactgaa

SEQ ID NO: 400009 - DNA, 120 bp, Artificial Sequence
  ENSG00000146278_8 (sequence is synthesized)
ctagtgttcttccaaagcctcctagtcactggatgggaagcactgttgaaaattccaaccaaaacagggagctgatggcagtacacttaaaaacgctcctcaaagttcaaacttagattt

SEQ ID NO: 400010 - DNA, 120 bp, Artificial Sequence
  ENSG00000146278_9 (sequence is synthesized)
cagatttcagtatgtgtgtaaaacataatttttcccatatccctggactcttgagaaaattggtacagaaatggaaatttgccttgttgcaacatacaattgcaaaagatgagtttaaaa

SEQ ID NO: 400011 - DNA, 120 bp, Artificial Sequence
  ENSG00000146278_10 (sequence is synthesized)
acatacaaacagcttgtattatattttatattttgtaaatactgtataccatgtattatgtgtatattgttcatacttgagaggtatattatagttttgttatgaaagtatgtattttgc

SEQ ID NO: 400012 - DNA, 120 bp, Artificial Sequence
  ENSG00000146278_11 (sequence is synthesized)
ttgccctgcccacattgcaggtgttttgtatatatacaatggataaattttaagtgtgtgctaaggcacatggaagaccgattttatttgcacaaggtactgagatttttttcaagaaac

SEQ ID NO: 400013 - DNA, 120 bp, Artificial Sequence
  ENSG00000146278_12 (sequence is synthesized)
agctgtcaaatctcaaggtgaagatctaaatgtgaacagtttactaatgcactactgaagtttaaatctgtggcacaatcaatgtaagcatggggtttgtttctctaaattgatttgtaa

SEQ ID NO: 400014 - DNA, 120 bp, Artificial Sequence
  ENSG00000146278_13 (sequence is synthesized)
tctgaaattactgaacaactcctattcccatttttgctaaactcaatttctggttttggtatatatccattccagcttaatgcctctaattttaatgccaacaaaattggttgtaatcaa

SEQ ID NO: 400015 - DNA, 120 bp, Artificial Sequence
  ENSG00000146278_14 (sequence is synthesized)
attttaaaataataataatttggcccccccttttaaaatagtcttgactctttgtgtgtgactgtttctcatgtttgaatgtgtgactaggagatgattttgtgtggttggatttttttg

SEQ ID NO: 400016 - DNA, 120 bp, Artificial Sequence
  ENSG00000146278_15 (sequence is synthesized)
acttctactttactggctgagtgtgagccgccatgcctggccataatctacattttcttaccaggagcagcattgaggtttttgagcatagtacttgactactctagaggctgagacggg

SEQ ID NO: 400017 - DNA, 120 bp, Artificial Sequence
  ENSG00000146278_16 (sequence is synthesized)
agcatctcttgagcctgagaagtggagattgcaattgagctaggatcaggccactgcactccagcctgggtaacagacgctgtctcaaaaaaaaggccaagagaaagtaagggagacaga

SEQ ID NO: 400018 - DNA, 120 bp, Artificial Sequence
  ENSG00000146278_17 (sequence is synthesized)
ggcgaggccgggtgggggcagctggggaaggactgggcccggctttcggcctcccggctatcgggagccccagtcctagtcggtgaaacgcggagacggcctctaacgtcccgccgtagg

SEQ ID NO: 400019 - DNA, 120 bp, Artificial Sequence
  ENSG00000146278_18 (sequence is synthesized)
gggtggagtgggctccgagcggctgggtttcgtttggttggagttgtgccaaaatgtgaggtgcccggtgtgggacgcgcagtccagttggggctctgcccgcctcgggcctgacctact

SEQ ID NO: 400020 - DNA, 120 bp, Artificial Sequence
  ENSG00000146278_19 (sequence is synthesized)
tagtggttccaagttaagagttggcaggagccgcacaaaactgattttattacttttgccactgtggtacttcgtgttagtgtgtccagagtaagttttcagaagagttagcaattgaat

SEQ ID NO: 400021 - DNA, 120 bp, Artificial Sequence
  ENSG00000146278_20 (sequence is synthesized)
tgacttagcccgtctgattgcagtgctattgcattaggataaaatggatagaagtttaaataggattaagtctacgaaatgatttcaaagtcttgtcagaataacgttttatggacttaa

SEQ ID NO: 400022 - DNA, 120 bp, Artificial Sequence
  ENSG00000146278_21 (sequence is synthesized)
gttcaatgacttaatcttcgtaataatgaaatgaaaaagttcccgttatttagtgaagaatgttgcattgaattagagatttgcggtttatctgtgcccttgggaaaaaatttgcccacc

SEQ ID NO: 400023 - DNA, 120 bp, Artificial Sequence
  ENSG00000146278_22 (sequence is synthesized)
tgtctcccttttaaaattccacgacttttgaaatatccgtgattacctaaaagcttttgtgcttgtttcctggcctgttttctagaacaggtactaactagggagctctggcagtgaacc

SEQ ID NO: 400024 - DNA, 120 bp, Artificial Sequence
  ENSG00000146278_23 (sequence is synthesized)
ttattgacgtggaaagttgtggtcctctttcgtgtcgtgtcttgcttactaccgcgttacaagtgttggtagtgcagtgatctagtggattaccttacgcttttccatcctttcaagact

SEQ ID NO: 400025 - DNA, 120 bp, Artificial Sequence
  ENSG00000146281_0 (sequence is synthesized)
ctggaggcctctgggcgcgtgcgcgggcggtcgctacctgcggccgagccagggagcgagagggcgcagagggcagcgggcttgggcagcatgaggcccggaggggagcggcccgtggaa

SEQ ID NO: 400026 - DNA, 120 bp, Artificial Sequence
  ENSG00000146281_1 (sequence is synthesized)
gggggcgcgtgcaatggccgctccgagctggagctactgaagctgcgctcggcggagtgcatcgacgaggcggccgagcggctgggggccctgagccgcgcgatctggagccagcccgag

SEQ ID NO: 400027 - DNA, 120 bp, Artificial Sequence
  ENSG00000146281_2 (sequence is synthesized)
ctggcctacgaggagcaccatgcccaccgcgtgctgacgcacttcttcgagcgggagccgcccgcggcctcctgggcagtgcagccgcactaccagctgcccacggccttccgcgccgag

SEQ ID NO: 400028 - DNA, 120 bp, Artificial Sequence
  ENSG00000146281_3 (sequence is synthesized)
tgggagccgccggaggcccgggcaccgagcgccacgccacgcccgctgcacctgggcttcctctgcgagtacgacgcgctgcccggcatcggccacgcctgcggccacaacctcatcgct

SEQ ID NO: 400029 - DNA, 120 bp, Artificial Sequence
  ENSG00000146281_4 (sequence is synthesized)
gaggtcggggcggcggccgcgctgggcgtgaggggggccttagagggcctccccaggccgcctccgcccgtgaaggtagttgtcctgggaacccctgcagaagaagatggtggtggcaaa

SEQ ID NO: 400030 - DNA, 120 bp, Artificial Sequence
  ENSG00000146281_5 (sequence is synthesized)
attgatttaattgaagcaggggcttttacaaatcttgatgttgtttttatggcccacccatcacaagagaatgctgcttatctaccagatatggctgaacatgatgtgactgtgaaatac

SEQ ID NO: 400031 - DNA, 120 bp, Artificial Sequence
  ENSG00000146281_6 (sequence is synthesized)
tatggaaaagcatctcattctgcttcttatccctgggaaggattaaatgcattagatgctgctgtgctggcctataacaatctgtctgtgttcagacagcaaatgaaaccaacctggaga

SEQ ID NO: 400032 - DNA, 120 bp, Artificial Sequence
  ENSG00000146281_7 (sequence is synthesized)
gttcatggtataataaaaaatggtggtgtaaaacccaatatcattccctcttattctgaattaatctattacttccgtgcaccctcaatgaaagaacttcaagttttgaccaaaaaggca

SEQ ID NO: 400033 - DNA, 120 bp, Artificial Sequence
  ENSG00000146281_8 (sequence is synthesized)
gaagattgcttcagagctgcagctttggcttcagggtgcacagtggaaattaaaggtggagcacatgattattacaatgttcttcccaataagagcctatggaaagcctatatggaaaat

SEQ ID NO: 400034 - DNA, 120 bp, Artificial Sequence
  ENSG00000146281_9 (sequence is synthesized)
ggaagaaagctaggaatagagttcatttcagaagatacaatgttgaatggcccttcaggatctacggattttggaaatgttagttttgtggttcctggaattcatccatattttcacatt

SEQ ID NO: 400035 - DNA, 120 bp, Artificial Sequence
  ENSG00000146281_10 (sequence is synthesized)
ggatctaatgccttgaatcatactgaacagtacactgaagctgctgggtcacaggaagctcagttctacactctgcggacggccaaagctctggcaatgacggcactggatgttattttt

SEQ ID NO: 400036 - DNA, 120 bp, Artificial Sequence
  ENSG00000146281_11 (sequence is synthesized)
aaaccagagttactggaaggaatcagagaggactttaaactgaaacttcaagaagaacagtttgtaaatgcagtagaataaaagacttaggggccacttataaatcaagaagacgtgatg

SEQ ID NO: 400037 - DNA, 120 bp, Artificial Sequence
  ENSG00000146281_12 (sequence is synthesized)
atttttttcttttaatctcttttaatgaaggcatgcttgttttttaatcttaaaggagtaaaattctttttacctgataagtgaggacagggtgtggagaaaacatattaattacctcat

SEQ ID NO: 400038 - DNA, 120 bp, Artificial Sequence
  ENSG00000146281_13 (sequence is synthesized)
atctaaagtgaaaatttttgcaaatccgtacttgataggattatgatattacaggagctggtatgtgatgccattctttctttttttttaccccgcaaccactcaccttcacagtagtga

SEQ ID NO: 400039 - DNA, 120 bp, Artificial Sequence
  ENSG00000146281_14 (sequence is synthesized)
taccatttcttaacctggaggatacatggcatcatttttataaaatatgttagtaaacctttttgtaagccttaaatgttatgtgtatttttaaaagcttaagagatttcaaaccttata

SEQ ID NO: 400040 - DNA, 120 bp, Artificial Sequence
  ENSG00000146281_15 (sequence is synthesized)
ttcagaattgacacccatgagagtgttttgtggtatagggtggtaaacttgttctctaatcgtatattaattcctctaccagattgtatatttgaagccagtgtctttcctttttttgtt

SEQ ID NO: 400041 - DNA, 73 bp, Artificial Sequence
  ENSG00000146281_16 (sequence is synthesized)
agattgtatatttgaagccagtgtctttcctttttttgttttaagatagagcctcgctctgttgcccaggctg

SEQ ID NO: 400042 - DNA, 120 bp, Artificial Sequence
  ENSG00000146281_17 (sequence is synthesized)
aggcatgagccaccgcacccggcctgccagtgtctttttaatacacatgtgtgttggtatttttaaattgttacagtatctagcatattgcttactctgaatattcagtactttttgaat

SEQ ID NO: 400043 - DNA, 120 bp, Artificial Sequence
  ENSG00000146281_18 (sequence is synthesized)
caaatattgcttccttgcttggaatcatcagagtttaaagtagcttcgtggatggaccatgatcctaagatgagttttaattttgtgtttacagtcatctcttgtacaacgtggagaaga

SEQ ID NO: 400044 - DNA, 120 bp, Artificial Sequence
  ENSG00000146281_19 (sequence is synthesized)
aaagatatacttactactttgcttcaggtacacataagaaaacctcttttttaaaaaaatttttatttttttacataatagagacaggggctcgctgtagcttccaggctggcctcaaac

SEQ ID NO: 400045 - DNA, 90 bp, Artificial Sequence
  ENSG00000146281_20 (sequence is synthesized)
tcaggtatgagacaccacacctgcccatttttgtttggttttttaatgggcaggttcttgctctcccaggctggagtgcagtggtgtaat

SEQ ID NO: 400046 - DNA, 120 bp, Artificial Sequence
  ENSG00000146281_21 (sequence is synthesized)
cagtggtgtaatcacagctcactgcagtctcgaactcctggactcaagcagtcctcccacctcagcctcctaaagcactgggattacaggcttgaggcactgcacctggccctgaccatt

SEQ ID NO: 400047 - DNA, 120 bp, Artificial Sequence
  ENSG00000146281_22 (sequence is synthesized)
tgaccattttttaaaaaggttaggcttagtgcaaagtttaaaattatatgattcttaaaatactgaattagtttctaaactaaactagaggtataggtggacctgcttgaggtatctttg

SEQ ID NO: 400048 - DNA, 120 bp, Artificial Sequence
  ENSG00000146281_23 (sequence is synthesized)
tttttatggaacatttttattacatgcctttataatttttcattgttcacaccctgtactgaaacctttttctcaaataccaactcttggctatgttaaatttgtagactttaaaagatg

SEQ ID NO: 400049 - DNA, 120 bp, Artificial Sequence
  ENSG00000146281_24 (sequence is synthesized)
ttatctaaattaatggtttaaatatacaaattgaaaatattttctttttagtggcaattttaaaagcaggccttaatatgggacctgcttttaaagtaaaatatgtggtactatgaatta

SEQ ID NO: 400050 - DNA, 120 bp, Artificial Sequence
  ENSG00000146281_25 (sequence is synthesized)
ctaaattgctatataccatgtaatagtgagtatagctaatatttagtatgccttttaaaaattttggactgcttttcggttttaacaaattctccacatgtgaactactcaagaaatttt

SEQ ID NO: 400051 - DNA, 120 bp, Artificial Sequence
  ENSG00000146281_26 (sequence is synthesized)
ccctttttaattgcctctatagcactcataagagctagggcattaggataaactagaatattttatgtttatgaatacttgtataaacttaaaagtgttttgatttcccacaatttccca

SEQ ID NO: 400052 - DNA, 120 bp, Artificial Sequence
  ENSG00000146281_27 (sequence is synthesized)
aaggaatgtttatttattaagagttgtgttgataatttaactgttacaatttcagcagttgaattcagtgaacactggttgaggagtgcctatttctaagcactgggtgtaagaagaaaa

SEQ ID NO: 400053 - DNA, 120 bp, Artificial Sequence
  ENSG00000146281_28 (sequence is synthesized)
gacacttgcaaaggaagagctaagattaacataatttctttggtttttctattgcttgttattattatgtaaaaactgggtggcagttcacaaggaagattgttgtaacagaagagtgac

SEQ ID NO: 400054 - DNA, 120 bp, Artificial Sequence
  ENSG00000146281_29 (sequence is synthesized)
aaccaatagttttttgatcattaaatcaaattttgtaaacagtggcaggagcgtggacttaaaacaaggcttgcttatttggttttgtcaaagttttacgaaaatatatgatatatattt

SEQ ID NO: 400055 - DNA, 120 bp, Artificial Sequence
  ENSG00000146281_30 (sequence is synthesized)
atactaaaactatataatccttagatttaggaaagcaatcagttaatgtctttagcacactaaagcagtattaaacacaggtacaagttggaaattgtagaaaactgaaagaaaacaaga

SEQ ID NO: 400056 - DNA, 120 bp, Artificial Sequence
  ENSG00000146281_31 (sequence is synthesized)
caaaatgtctatggtagggaataaaagagtttaagatattatgtaaaattatgtgtattttcttctcttttacataaattgtttgtgaaaagtgtgctcaacttttttacaagagtgata

SEQ ID NO: 400057 - DNA, 120 bp, Artificial Sequence
  ENSG00000146281_32 (sequence is synthesized)
acttttttacaagagtgatattaacttggatttatttttcaatataatttggagaccctttgttatccaaataaaattgatgagtttctgtgcctgtaaaaaaaaaaaaaaaaaaaagaa

SEQ ID NO: 400058 - DNA, 120 bp, Artificial Sequence
  ENSG00000146281_33 (sequence is synthesized)
gccccagaaagcttgtggtgggtggtaagttctcacgagatttatttatctgagcaacattgggactgagggaacatctgaaagctaccatcttgaaaatttttgaggaagtgtttctga

SEQ ID NO: 400059 - DNA, 120 bp, Artificial Sequence
  ENSG00000146281_34 (sequence is synthesized)
aatatttaaaaatacttaagtcagtcattttgaacaaaagaaattgatacaataagtttttttttttaaggatgattgtctaattttgtaatatgttgttttttaaaaacctgtctgatg

SEQ ID NO: 400060 - DNA, 120 bp, Artificial Sequence
  ENSG00000146281_35 (sequence is synthesized)
gtgttttatacatttctaactttttacctgagttatctctttagtcttttggaaaataccctacacaatactaacctttaaaactatcaaatttttgttataagataaatgttatctttg

SEQ ID NO: 400061 - DNA, 120 bp, Artificial Sequence
  ENSG00000146281_36 (sequence is synthesized)
tactagatagcaaccctttataaggttgtaaggtataataaactgcttatttttttacatacttcatatcaagcattttgcagtccaattatatagttgaggatggtgtattttgatatg

SEQ ID NO: 400062 - DNA, 120 bp, Artificial Sequence
  ENSG00000146281_37 (sequence is synthesized)
tatgaagttaatattttcaagtaagcaatcagtctactaccatcagattataagcttttttgtaataataggtacataaaatgtgtatgaaaaatctacaataaacatgtttatctgata

SEQ ID NO: 400063 - DNA, 120 bp, Artificial Sequence
  ENSG00000146282_0 (sequence is synthesized)
ggactgcggcgcacttccgtagaggtggacatggcgtgcggctttcgccgcgctattgcttgccagctttccagagtgttgaatcttccaccagaaaacttgatcacatcaatatctgca

SEQ ID NO: 400064 - DNA, 120 bp, Artificial Sequence
  ENSG00000146282_1 (sequence is synthesized)
gttccaatttcccaaaaagaagaagtagctgattttcagctttctgtggattctttattggaaaaagacaatgaccattcaagaccagatattcaagttcaagccaagagactagcagag

SEQ ID NO: 400065 - DNA, 120 bp, Artificial Sequence
  ENSG00000146282_2 (sequence is synthesized)
aagctaagatgtgatacagtggtgagtgaaatcagtactggtcaaaggactgtaaatttcaaaataaacagagagctcttaacaaagacagtgctacaacaagtaattgaagatggctca

SEQ ID NO: 400066 - DNA, 120 bp, Artificial Sequence
  ENSG00000146282_3 (sequence is synthesized)
aaatatggattaaaaagtgaacttttctctggacttccccagaagaagattgtggttgaattcagttcacctaatgttgccaaaaaatttcatgttggacatttgcgttctaccatcata

SEQ ID NO: 400067 - DNA, 120 bp, Artificial Sequence
  ENSG00000146282_4 (sequence is synthesized)
ggaaattttatagcaaatctcaaagaagctttaggacatcaagtaataagaataaattaccttggcgattggggcatgcagtttggtcttctgggaactggcttccagctgtttggctat

SEQ ID NO: 400068 - DNA, 120 bp, Artificial Sequence
  ENSG00000146282_5 (sequence is synthesized)
gaggaaaaactgcagtccaatcctctacagcatctctttgaagtttatgtacaagttaataaagaagcagcagatgataaaagtgtagcaaaagcagcacaggagttcttccaacgattg

SEQ ID NO: 400069 - DNA, 120 bp, Artificial Sequence
  ENSG00000146282_6 (sequence is synthesized)
gaactgggcgatgtgcaagcactttcactgtggcaaaaatttcgggacttgagcattgaagagtacattcgggtttacaagcgtctgggagtatattttgatgaatattcaggagaatca

SEQ ID NO: 400070 - DNA, 120 bp, Artificial Sequence
  ENSG00000146282_7 (sequence is synthesized)
ttttatcgtgaaaaatctcaagaggtcttaaagttgctggagagtaaaggactcctactgaaaacaataaaaggaacggctgtagtagatctctctgggaatggcgacccctcctcaatt

SEQ ID NO: 400071 - DNA, 120 bp, Artificial Sequence
  ENSG00000146282_8 (sequence is synthesized)
tgtactgtaatgcgaagtgatgggacttctctctatgcaaccagagatcttgcagctgctatagatcgaatggacaagtataattttgatacaatgatatatgtgacagataaaggacaa

SEQ ID NO: 400072 - DNA, 120 bp, Artificial Sequence
  ENSG00000146282_9 (sequence is synthesized)
gagtagtacagggaatgaagactcgaagaggagatgtcactttcctggaagatgttttaaatgagattcaattaaggatgctacagaacatggcttcaattaagacaactaaagaactca

SEQ ID NO: 400073 - DNA, 120 bp, Artificial Sequence
  ENSG00000146282_10 (sequence is synthesized)
agaacccacaagagactgcagagagggtcgggctcgcagcactcattattcaggacttcaaaggtttactcttatctgactacaagttcagctgggatcgtgttttccagagtcgcgggg

SEQ ID NO: 400074 - DNA, 120 bp, Artificial Sequence
  ENSG00000146282_11 (sequence is synthesized)
acacaggagtcttcctacagtacacacacgcccgcctccacagtttggaagagacttttggatgtgggtacctgaatgacttcaacactgcttgtttacaagagccacagtctgtttcaa

SEQ ID NO: 400075 - DNA, 120 bp, Artificial Sequence
  ENSG00000146282_12 (sequence is synthesized)
ttcttcagcatcttctcaggttcgacgaggtgctttataaatcatctcaggactttcaacccaggcatatcgtcagttaccttctaactttaagtcatcttgcagctgtggcacacaaaa

SEQ ID NO: 400076 - DNA, 120 bp, Artificial Sequence
  ENSG00000146282_13 (sequence is synthesized)
cactacaaataaaagatagtcctcctgaagtggctggggccagacttcatcttttcaaagctgtccgttctgtcctagccaatggaatgaaacttcttggaataacacctgtatgtagga

SEQ ID NO: 400077 - DNA, 120 bp, Artificial Sequence
  ENSG00000146282_14 (sequence is synthesized)
atgtaggatgtaatttccattaaaatggcttttaaaatgtcaagtgaattctagttatctattctgagatgccttgctgttcagaataaatttaaattttttttttttttttttgagatg

SEQ ID NO: 400078 - DNA, 90 bp, Artificial Sequence
  ENSG00000146282_15 (sequence is synthesized)
gtttctctatgttggtcaggctggtcttgcactcccgacctcaggttatctgtgaggcatgaaccaccacgcccagccaaagttaaacta

SEQ ID NO: 400079 - DNA, 120 bp, Artificial Sequence
  ENSG00000146282_16 (sequence is synthesized)
ttagaggcatgaaccaccacgcccagccaaagttaaactattattctgtgtcagaatctgtattaaatgtgacttgtcaagttattcagtctttatccttaaataaatgagttatctgaa

SEQ ID NO: 400080 - DNA, 120 bp, Artificial Sequence
  ENSG00000146282_17 (sequence is synthesized)
gttcgacgaggtgctttataaatcatctcaggactttcaacccaggcatatcgtcagttaccttctaactttaagatggtgtctcgctctgttgtccaggctggagcgtgatctcggctc

SEQ ID NO: 400081 - DNA, 120 bp, Artificial Sequence
  ENSG00000146282_18 (sequence is synthesized)
agtatcttttgaataaataaatttggatttctttccctttaatgtaggcaggggaaatgtcattatcaaaggtaaaatagcctaaattaggcaagtaattactcattctgaatctgttct

SEQ ID NO: 400082 - DNA, 120 bp, Artificial Sequence
  ENSG00000146282_19 (sequence is synthesized)
ctgtgcttacttaggctaggtcctgtgattctaagaccagaggccctgttttctgggcttttccaatatcttctattcacatctgactagagtagaccttcttttaggaaaaaaaaaaaa

SEQ ID NO: 400083 - DNA, 72 bp, Artificial Sequence
  ENSG00000146282_20 (sequence is synthesized)
ctttccagagtgttgaatcttccaccagaaaacttgatcacatcaatatctgcagttccaatttcccaaaaa

SEQ ID NO: 400084 - DNA, 120 bp, Artificial Sequence
  ENSG00000146285_0 (sequence is synthesized)
gcattagtctaatgagatgtttgcagctggagcgcagggctgctggagactaactgtgagctactaacacgggtggaagatagcttttgcaatactcggtttgcatgtgctgaaagtcat

SEQ ID NO: 400085 - DNA, 120 bp, Artificial Sequence
  ENSG00000146285_1 (sequence is synthesized)
ctgtcttctgagtcaacactcccgacctggtaaacaacctgctcagggctctggtgaacaagctgtagcacctcttctgcctgtgagcgatttgtcacctcattctgtaagactggcacc

SEQ ID NO: 400086 - DNA, 120 bp, Artificial Sequence
  ENSG00000146285_2 (sequence is synthesized)
agcagaaatgcagtctcaaaggatcccggggagaaagcgaggccgaccctcacttcactccacgcctatgaagatggcagttcataacctttattctgcttcagctggctctttaccagc

SEQ ID NO: 400087 - DNA, 120 bp, Artificial Sequence
  ENSG00000146285_3 (sequence is synthesized)
agtgaagatcccaaagaaaagagggcggaaacccgggtacaagatcaagtctcgggttctcatgactcccttagccctctcacctccgcggagtaccccagagcccgacctcagctccat

SEQ ID NO: 400088 - DNA, 120 bp, Artificial Sequence
  ENSG00000146285_4 (sequence is synthesized)
ccctcaggacgcagccacggtccccagcttggcggccccacaggctctcacagtctgcctctacatcaacaagcaggccaatgcggggccctatctggagaggaagaaggtgcagcagct

SEQ ID NO: 400089 - DNA, 120 bp, Artificial Sequence
  ENSG00000146285_5 (sequence is synthesized)
cccggagcattttgggcccgagcggccatcggcggtgctgcagcaggccgtccaagcctgcatcgactgcgcccaccagcagaagctggtcttctccctggtcaagcagggctatggtgg

SEQ ID NO: 400090 - DNA, 120 bp, Artificial Sequence
  ENSG00000146285_6 (sequence is synthesized)
tgagatggtgtcagtctcggcttcctttgatggcaaacagcacctgcggagcctgcctgtggtgaacagcatcggctatgtcctccgcttcctcgccaagctgtgccgaagcctcctgtg

SEQ ID NO: 400091 - DNA, 120 bp, Artificial Sequence
  ENSG00000146285_7 (sequence is synthesized)
cgatgacctcttcagccaccagcccttccccaggggctgcagtgcctctgagaaagtccaggagaaagaggaagggaggatggaatcagtcaagacagtcaccaccgaagagtacctggt

SEQ ID NO: 400092 - DNA, 120 bp, Artificial Sequence
  ENSG00000146285_8 (sequence is synthesized)
gaaccctgtgggcatgaaccgctacagcgtggacacctccgcctccacctttaaccacaggggctccttgcacccctcctcctcgctgtactgcaagaggcagaactctggagacagcca

SEQ ID NO: 400093 - DNA, 120 bp, Artificial Sequence
  ENSG00000146285_9 (sequence is synthesized)
ccttgggggtggtcctgctgccaccgctggtggtccccgcactagccccatgtcttctggtggcccctcggcacctgggctgaggcctccagcctccagccccaagagaaacacgacctc

SEQ ID NO: 400094 - DNA, 120 bp, Artificial Sequence
  ENSG00000146285_10 (sequence is synthesized)
tcttgaaggaaacagatgtgcctcaagcccttctcaggatgcgcaggatgccaggcggccacggagcaggaacccctccgcctggactgtggaggacgtggtgtggtttgtgaaggacgc

SEQ ID NO: 400095 - DNA, 120 bp, Artificial Sequence
  ENSG00000146285_11 (sequence is synthesized)
cgacccacaggctctggggcctcacgtggagctcttcagaaagcacgagattgatggcaacgctctgctgttgctgaagagtgacatggtcatgaagtacctgggcctgaagctgggacc

SEQ ID NO: 400096 - DNA, 120 bp, Artificial Sequence
  ENSG00000146285_12 (sequence is synthesized)
tgcactgaaactctgctaccacattgacaaactgaagcaagccaagttctgacttttttaaaaagacagaagcgaaacccaaaacaacagatcccaagattatcttctgccttaccaata

SEQ ID NO: 400097 - DNA, 120 bp, Artificial Sequence
  ENSG00000146285_13 (sequence is synthesized)
tcccgccaacatcacaaactagactctcctcttaaaattaacagccacagagacgtggtctttttataaaacttgtgaatctttgccttttgaagaatttaacatggaccttttcgagag

SEQ ID NO: 400098 - DNA, 120 bp, Artificial Sequence
  ENSG00000146285_14 (sequence is synthesized)
gctcctctgtgttcataatttgccaaaaaattacaaaagcctgtgatttttaacatccctgttatgctggtttctcttaaagtgggtcctatttgcataacgagagagtggggaactgaa

SEQ ID NO: 400099 - DNA, 120 bp, Artificial Sequence
  ENSG00000146285_15 (sequence is synthesized)
tgcttatgcccaaggagagttctggagggttcaaaggatgaaagaaggacctttgtccctgcggtctctgcagggacaaccccctcagcaccatctgcctctaactctgacctggggacc

SEQ ID NO: 400100 - DNA, 120 bp, Artificial Sequence
  ENSG00000146285_16 (sequence is synthesized)
tatccatgtgagccttgtttgcctcagctctggaagctgacttctgaagatgactgcctcaccttgcactgtctggaaaacttgaattattttacgccgtgaaagaaaaaggaaaaaaaa

SEQ ID NO: 400101 - DNA, 120 bp, Artificial Sequence
  ENSG00000146285_17 (sequence is synthesized)
aaaaatcttttctgttcctagaaaatctgaagtactgtgtttctccgctagagggcagactgctaatgaaatttcaggaccctcactgactgcagtagcaggattgttcagtactgagtg

SEQ ID NO: 400102 - DNA, 120 bp, Artificial Sequence
  ENSG00000146285_18 (sequence is synthesized)
cagctagaggggtctagttcgtatccaatcattattgactgactgactgatactcaactagcaaaggcaagaatttggaagcacgctctacccagatgggactttggagttccttccctt

SEQ ID NO: 400103 - DNA, 120 bp, Artificial Sequence
  ENSG00000146285_19 (sequence is synthesized)
ccagagtccttattgaggtgttgaagtgttggcatgccgaagaatcttagtgacatttagccatgggtgtttctttaaaaaaggaaaagaaaatgtctcaacgaagctttgaaatgggag

SEQ ID NO: 400104 - DNA, 120 bp, Artificial Sequence
  ENSG00000146285_20 (sequence is synthesized)
agtgttgatttctagttacattgctgggttatgtagttgtatctgtggctaatttttctagtcctcaacaaatacacagacatgctattatggggtttaattcaatttacaaataggttt

SEQ ID NO: 400105 - DNA, 120 bp, Artificial Sequence
  ENSG00000146285_21 (sequence is synthesized)
tccttcctcacagtggagtaatagaaaaaattgattttctgctcctttgcagctgtgtccagagacggacaatgaatccacaatttattaggcagaggcacaacttctccaccattcgtt

SEQ ID NO: 400106 - DNA, 120 bp, Artificial Sequence
  ENSG00000146285_22 (sequence is synthesized)
ttatccttctcttttctctgtttccctccacctctcttcttcttctttcacactgagcagaaaacatatcttcaaaatgaattcgcctttgccatgtgcatattctcttccttaaaagga

SEQ ID NO: 400107 - DNA, 120 bp, Artificial Sequence
  ENSG00000146285_23 (sequence is synthesized)
catcaacagtgttggagatgaggagatgaacattagattttggaatttctgggagggagagggttagggatgactcagggcctcccttcgcccaaaggtgaatcagaaaaggcacccctt

SEQ ID NO: 400108 - DNA, 120 bp, Artificial Sequence
  ENSG00000146285_24 (sequence is synthesized)
tctctgggatacaacctgagcaggggtctcagctggcaagtggagcagggtgggggctcaacctcctcaccgcttgatcagctgccgttgtacagagcatgacctgtataaccttgaggg

SEQ ID NO: 400109 - DNA, 120 bp, Artificial Sequence
  ENSG00000146285_25 (sequence is synthesized)
cagccctgggtagatctgcagagtgaccctctatatagttagaatccagatgaaggccataagaaatagtccatgccatgccgttaggcccactttcatgtgcagtacttgagaaagcac

SEQ ID NO: 400110 - DNA, 120 bp, Artificial Sequence
  ENSG00000146285_26 (sequence is synthesized)
atcgtagcctccttttcagacacacaaatggcggctggactgagagcatggcagagaaggggaggaggagaatgtactaaacttgctcactgaattgagcttgagttattagattgtaga

SEQ ID NO: 400111 - DNA, 120 bp, Artificial Sequence
  ENSG00000146285_27 (sequence is synthesized)
aattgagcttgagttattagattgtagaagagcttgatgtctggtgattttgttacaggaagggggtcccgatccagaccccaagagagggctcttggatctcatgcaagaaagaattca

SEQ ID NO: 400112 - DNA, 120 bp, Artificial Sequence
  ENSG00000146285_28 (sequence is synthesized)
aagtttattaagaaagtaaaggaaggaaagaatggctaccccatagtcaaagcagctctgagggctgctggttgcccatttttatgtttatttcttgatatgctaaacaaggggtggatt

SEQ ID NO: 400113 - DNA, 77 bp, Artificial Sequence
  ENSG00000146285_29 (sequence is synthesized)
ctcccccttttagacgtcatggcactggtggtagtatagcagcgaggacaaccagaggtcactctcgttgccatctt

SEQ ID NO: 400114 - DNA, 85 bp, Artificial Sequence
  ENSG00000146285_30 (sequence is synthesized)
cgttgccatcttggttttggtgggttttagccaacttctttactgcaacctgttttatcagaaggtctttatgacctacagaatg

SEQ ID NO: 400115 - DNA, 80 bp, Artificial Sequence
  ENSG00000146285_31 (sequence is synthesized)
ttacccagctccggttcagcacctgagaaaagtaccttgaatcaggccttggggcagagtcttcaagattttaaggtgat

SEQ ID NO: 400116 - DNA, 120 bp, Artificial Sequence
  ENSG00000146285_32 (sequence is synthesized)
atcaggccttggggcagagtcttcaagattttaaggtgatagggcctgtctcttaagaatttattaatcgtaagtgctcactgctggtttagagttagatacatttccctcaaaacagcc

SEQ ID NO: 400117 - DNA, 120 bp, Artificial Sequence
  ENSG00000146285_33 (sequence is synthesized)
atgggcaggttatgtactcagaactgccagggtgaaaacaatgagatccagaaaaatcccacaacaatccaggtttttcactcctcttttttttctcaatcttccgatacttgtggtacc

SEQ ID NO: 400118 - DNA, 120 bp, Artificial Sequence
  ENSG00000146285_34 (sequence is synthesized)
tcttccatcaacagatacctcatgtagtgacttccagtatcaagttttcaaaacttcctacccaccctcatcagtgcctccttcactacagagtcacaaacattggtgctctcaaataaa

SEQ ID NO: 400119 - DNA, 120 bp, Artificial Sequence
  ENSG00000146285_35 (sequence is synthesized)
aatcagccccaaacaatgtcaaagagatcccttgagtagttttcaggcgagagatatgttctcatttcaagtcttggagaaaactggatccatgttcacgtggaacttctctcgcggagg

SEQ ID NO: 400120 - DNA, 120 bp, Artificial Sequence
  ENSG00000146285_36 (sequence is synthesized)
tgctatctcattttgcattaaactttaagcaggacagattgctgaagccatgatatttaaggtttgactttttaaaaatctcattactcttaaaataaatgctgccacatcagagaataa

SEQ ID NO: 400121 - DNA, 120 bp, Artificial Sequence
  ENSG00000146285_37 (sequence is synthesized)
aaccctcttctgttccaagcactgtgtgagaccctgccttggataagtcaaatgcatgagcttaggaaagtagagtaactgctacaaataataaaaaacagatacatctgcagtcaagac

SEQ ID NO: 400122 - DNA, 120 bp, Artificial Sequence
  ENSG00000146285_38 (sequence is synthesized)
aggtgtggccagggtctgtccttcatctgctgggctcctagggtctttatgagcctgtgagctaaaagcctctctcagggctcagggagaggatgattccatgcccgggtaagaagactg

SEQ ID NO: 400123 - DNA, 120 bp, Artificial Sequence
  ENSG00000146285_39 (sequence is synthesized)
gatttctgatcctcatcttgactcttctccttctcccacttcccacttccaactcaccggtttttgcttttttttctccacttcaaaatatatccagaatcctttcgctccacttcaaaa

SEQ ID NO: 400124 - DNA, 120 bp, Artificial Sequence
  ENSG00000146285_40 (sequence is synthesized)
tatacccggagtccaaccacctttcaccacccacagcaacctccctggttctttaaaaatctaagtcagatcatgcccctcctctgccctaaaccctcctccaatgtctcccatgtcact

SEQ ID NO: 400125 - DNA, 120 bp, Artificial Sequence
  ENSG00000146285_41 (sequence is synthesized)
ccaagtaaaagcccaagtccttacaaaatcccacaggccctgtgtgacctggccctggctacctctttaatttcttggttacttctctcttgttccccactctgttctagcagagatgac

SEQ ID NO: 400126 - DNA, 120 bp, Artificial Sequence
  ENSG00000146285_42 (sequence is synthesized)
ctcatggatgtcctttaggttctactcaaatgccactctatccaggaatccttttctgacttcttgtctaatatatagcccttgtcaccctccattcttttatttatttatttatttatt

SEQ ID NO: 400127 - DNA, 84 bp, Artificial Sequence
  ENSG00000146285_43 (sequence is synthesized)
ggctagatcttccgggctcaagcgatcttccgacctcagccccacaagtggctgggactgcaggaacttgccgccaagcctggc

SEQ ID NO: 400128 - DNA, 120 bp, Artificial Sequence
  ENSG00000146285_44 (sequence is synthesized)
atcttccgacctcagccccacaagtggctgggactgcaggaacttgccgccaagcctggctaattttttacaattttttgtagagatgaatgcctcactatgttacccaggctggtctca

SEQ ID NO: 400129 - DNA, 120 bp, Artificial Sequence
  ENSG00000146285_45 (sequence is synthesized)
gggattacaggcatgagccatcacaccccgcctctctgtacttccttactctgctccattccttcttcatagcacttaccaccatgcagggcagtggggaaacatcatggcttcaacccc

SEQ ID NO: 400130 - DNA, 120 bp, Artificial Sequence
  ENSG00000146285_46 (sequence is synthesized)
aacatcatggcttcaaccccatctcagggcatgtcttgttactcaagatccttcagagtcagagaaatccctttttccatggtcacggcactcctccagttttatcccctgatgtgatgt

SEQ ID NO: 400131 - DNA, 120 bp, Artificial Sequence
  ENSG00000146285_47 (sequence is synthesized)
gatagaaagggtacttcacctctgtggtcccaaagaacccataaccctagtctaatcatgagaaaaaaagacaaatccaaacggagggacattttaccctgagcagtactcttcaaagct

SEQ ID NO: 400132 - DNA, 120 bp, Artificial Sequence
  ENSG00000146285_48 (sequence is synthesized)
attagagtgatgaaaaacaaggcaagactgagaaacagtcacagaccaaggagacgaaggagacgtgacaactaaatgtaatgtggtgtcctgggtgggatccccaccagaaacaggaca

SEQ ID NO: 400133 - DNA, 120 bp, Artificial Sequence
  ENSG00000146285_49 (sequence is synthesized)
ttgtgaacaaacaggtgaaatccaaatatagtctgcttagcaacaaaacaaaaatgaacaaacgaaaaatcctcaccacggccgattgacttgcggttttctccagtgcccggctctaag

SEQ ID NO: 400134 - DNA, 120 bp, Artificial Sequence
  ENSG00000146285_50 (sequence is synthesized)
tctggggaagggggagtgtggctgtttaaacgtgggactgctgggagatcagaaatttccacaagtcctttcatggatcttgaggttctcaaaaacagccaaactcaacctttgataagc

SEQ ID NO: 400135 - DNA, 120 bp, Artificial Sequence
  ENSG00000146285_51 (sequence is synthesized)
aaagaaaatcgtgtattagggcaggctaggccacaggatacgtagactccaaaatgtacacaggctcaaataccatagaaatttttgttcgagagccaaaggtgaatgttcctgattcat

SEQ ID NO: 400136 - DNA, 120 bp, Artificial Sequence
  ENSG00000146285_52 (sequence is synthesized)
ggatgcatctcaatatagggacataggctccatctattttgtggctctgccaccctctacagccttcatgccccatgcattagggaatagaaagggaaagaaggtgtggagaagacacag

SEQ ID NO: 400137 - DNA, 120 bp, Artificial Sequence
  ENSG00000146285_53 (sequence is synthesized)
gtgcttccctgcaatctgaaagtgatgctcatcacttccactcacatctcattggcaaaagctggtcattttgccacacttaaccataagggactctggaagctgtaggttagctctgcc

SEQ ID NO: 400138 - DNA, 120 bp, Artificial Sequence
  ENSG00000146285_54 (sequence is synthesized)
caggagaaaggagaaccagaccttggtaaagaattgtctcttgcataggaagtgtcaccttcaggatacaaatacatgagcagaggcagagttaggcaaaattcccccaatgctggttgt

SEQ ID NO: 400139 - DNA, 120 bp, Artificial Sequence
  ENSG00000146285_55 (sequence is synthesized)
aatgccacttctgtctcatccactaaagaaagcttgttggaatgcagtctacaaaagcgctataagggctaaaggattatagtaatagcttgaaggcccttctgattgatgttttaaaaa

SEQ ID NO: 400140 - DNA, 120 bp, Artificial Sequence
  ENSG00000146285_56 (sequence is synthesized)
atcattttcaagcttcagtattttgatagtgcctaaaggccatagagtatagtggataatcactgggactagagccagacagcctgggctgagatgctggatctgctgcttcctgcctac

SEQ ID NO: 400141 - DNA, 120 bp, Artificial Sequence
  ENSG00000146285_57 (sequence is synthesized)
cttttgcaagtcttaacttacctgtgcttcagtttcctcacctataaaattgtgataataataatggcagcacctgcctcataggattgttgggaggattaaatgagttcatacatgcat

SEQ ID NO: 400142 - DNA, 120 bp, Artificial Sequence
  ENSG00000146285_58 (sequence is synthesized)
ttagtacaagacctaggaggtaacaagagctcaataaatgttagtagttacagcatagatctttttaacacatcccttaacagatcacagcccatcagctccacagctgagaactgctga

SEQ ID NO: 400143 - DNA, 120 bp, Artificial Sequence
  ENSG00000146285_59 (sequence is synthesized)
agaaagaaggccccaggccaaggagtctgggagtcttcatcttgccaccctgtagcccctcagtgggcaggctctgtcttctgtggcaagtcacatttctcccctgagcctaggatcctt

SEQ ID NO: 400144 - DNA, 120 bp, Artificial Sequence
  ENSG00000146285_60 (sequence is synthesized)
ccaccagtgaccccagcaagccgcacacgtgagctattttgtatgattcaagaccctccacacattctcttccaagagcctcatccaacccagatgagcgtggccctgaccagcttcccc

SEQ ID NO: 400145 - DNA, 120 bp, Artificial Sequence
  ENSG00000146285_61 (sequence is synthesized)
tggccaaggatggagaggtgagaaggggccccttgccggagaggcgttctgaggggtagagcgcagattctccctccacagcagctcttaccaaatgtagagatgccctgcaggccactt

SEQ ID NO: 400146 - DNA, 120 bp, Artificial Sequence
  ENSG00000146285_62 (sequence is synthesized)
tccaacactgtcacacagggccatgagccaggcagattaagtgagcagagccctattttccaaaggagagcaacattgttccatttgattcctaagaacaagagaaagggacaagatctt

SEQ ID NO: 400147 - DNA, 120 bp, Artificial Sequence
  ENSG00000146285_63 (sequence is synthesized)
tcacgaaccaacactgtaaagtaaaccaggggcagccttgatttcataggtttgtccccagtgttagcttaatatctggcatgtggtaggtgttcaataaacatgcatcatgtctgtgcc

SEQ ID NO: 400148 - DNA, 120 bp, Artificial Sequence
  ENSG00000146285_64 (sequence is synthesized)
ataacctttattctgcttcagctggctctttaccagcagtgaagatcccaaagaaaagagggcggaaacccgggtacaagaaacctaaggcaacaacaaagacaaatgccctgccagaga

SEQ ID NO: 400149 - DNA, 120 bp, Artificial Sequence
  ENSG00000146285_65 (sequence is synthesized)
tcacctataaaattgtgataataataatgggcagccttgatttcataggtttgtccccagtgttagcttaatatctggcatgtggtaggtgttcaataaacatgcatcatgtctgtgccc

SEQ ID NO: 400150 - DNA, 120 bp, Artificial Sequence
  ENSG00000146285_66 (sequence is synthesized)
atctgaactgcagagacaaccttagagagaaaatccatactggccagagaccaagttaatggaaaatttaattgaagcaaatgaaatgctcagcctcataggtagtatggccctgtgccc

SEQ ID NO: 400151 - DNA, 120 bp, Artificial Sequence
  ENSG00000146285_67 (sequence is synthesized)
tttgaaccagaaaggctgggccaggaggccacagagggccctaagggaaaactcccttatctgcaagaacaaggggcgggactgagtttgagaaaagaaaatctgcaaacctccacagga

SEQ ID NO: 400152 - DNA, 120 bp, Artificial Sequence
  ENSG00000146285_68 (sequence is synthesized)
gcctcagtgaaaggctgcatgcaggggaggaaaccttcaggttttggtcaccaggaagtccgttagagattcacagcagaaggcccctctgcatcccacagcaccaagcacgtgctggaa

SEQ ID NO: 400153 - DNA, 120 bp, Artificial Sequence
  ENSG00000146285_69 (sequence is synthesized)
acactcatccttatgtccctcttgagtttaaatgtctttctctcatcctcttctcctcagccccattccccttttctcagggtggtgatcacaggacaccatgctgattgaattgactca

SEQ ID NO: 400154 - DNA, 120 bp, Artificial Sequence
  ENSG00000146285_70 (sequence is synthesized)
taatcccagagtcccactttttaaaaaggagatatttactctctctcccactcacgttggtgcaatctcagccctatgtcttaaatgcaggatttccagcagtaagagggaggcatgatt

SEQ ID NO: 400155 - DNA, 120 bp, Artificial Sequence
  ENSG00000146285_71 (sequence is synthesized)
tggttggagagaacttctatcactcactcaacaacagtctgccctgttcagtccaactggtgacccagggccagggaatccagggctcttcagagggcttcagcatagctcctgtccccc

SEQ ID NO: 400156 - DNA, 120 bp, Artificial Sequence
  ENSG00000146285_72 (sequence is synthesized)
agcccctcacacctccttccagttgagccctaggatgtcctcctgtccttcactttcatccccataccggccctttgttctcctgtgtatgagtctgttctgctaataaagacatacccg

SEQ ID NO: 400157 - DNA, 120 bp, Artificial Sequence
  ENSG00000146285_73 (sequence is synthesized)
gagaaagaggaagggaggatggaatcaggaggatgacagccttccttcctaaaagctgatgtccccatctgaaagctggttttcctcccagtcagctgggaggtttggaagtaatgaccc

SEQ ID NO: 400158 - DNA, 120 bp, Artificial Sequence
  ENSG00000146285_74 (sequence is synthesized)
tcccgacctggtaaacaacctgctcagggctctggtgaacaagctgtagaaacctaaggcaacaacaaagacaaatgccctgccagagaacagcttggataggttgcgacaggcagagaa

SEQ ID NO: 400159 - DNA, 120 bp, Artificial Sequence
  ENSG00000146350_0 (sequence is synthesized)
atggcccatttctccagcgaggaccaggcgatgctgcaggcgatgctgaggcggttgttccagagcgtgaaggagaaaatcacgggtgccccttccctggagtgtgccgaagagattctt

SEQ ID NO: 400160 - DNA, 120 bp, Artificial Sequence
  ENSG00000146350_1 (sequence is synthesized)
ttacatctggaggaaactgatgaaaattttcacaactatgaatttgtgaaatacctcaggcagcatataggcaacactttgggttctatgattgaagaagaaatggaaaaatgcacatct

SEQ ID NO: 400161 - DNA, 120 bp, Artificial Sequence
  ENSG00000146350_2 (sequence is synthesized)
gatcggaatcagggtgaagaatgcggctatgatacagttgtacagcaggtcactaaaagaactcaagaatctaaagagtacaaagaaatgatgcattacctgaagaacattatgatagct

SEQ ID NO: 400162 - DNA, 120 bp, Artificial Sequence
  ENSG00000146350_3 (sequence is synthesized)
gtggtcgagtctatgattaacaagtttgaagaagatgagacacgaaatcaagaaaggcagaaaaaaatccaaaaggagaaaagccatagttaccgcacagacaattgctctgatagtgat

SEQ ID NO: 400163 - DNA, 120 bp, Artificial Sequence
  ENSG00000146350_4 (sequence is synthesized)
tcatcattgaatcagagttacaaattttgtcaaggaaaattacaattgattttagaccagttggatcctgggcaacctaaagaggtgagatatgaagccttgcaaacattatgttcagct

SEQ ID NO: 400164 - DNA, 120 bp, Artificial Sequence
  ENSG00000146350_5 (sequence is synthesized)
cctccatctgatgtcctcaactgtgaaaattggactactctctgcgaaaaactgaccgtgtctctttcagatcctgatcctgtgtttagtgaccggattttaaaattctgtgcacagaca

SEQ ID NO: 400165 - DNA, 120 bp, Artificial Sequence
  ENSG00000146350_6 (sequence is synthesized)
tttttgctttctccattacatatgaccaaggaaatttatacaagcttagctaagtatttggagtcatactttctttctagggaaaatcatattcctactctttcagctggtgtagatata

SEQ ID NO: 400166 - DNA, 120 bp, Artificial Sequence
  ENSG00000146350_7 (sequence is synthesized)
actaatcctaatatgactcgcttacttaaaaaggttcgtcttctaaatgaatatcagaaagaagctccatctttctggattcgtcatccagagaagtatatggaagaaattgtggagagt

SEQ ID NO: 400167 - DNA, 120 bp, Artificial Sequence
  ENSG00000146350_8 (sequence is synthesized)
actttgtccttgttaacagttaaacataatcaaagccatgttgtctcacaaaagattttggatccgatctacttttttgcattagttgataccaaggctgtgtggttcaaaaagtggatg

SEQ ID NO: 400168 - DNA, 120 bp, Artificial Sequence
  ENSG00000146350_9 (sequence is synthesized)
catgcacattatagcagaactacagtattaagacttcttgaaacgaaatataagtctctggtaactacagccattcaacagtgtgttcagtactttgaaatgtgtaagactaggaaagct

SEQ ID NO: 400169 - DNA, 120 bp, Artificial Sequence
  ENSG00000146350_10 (sequence is synthesized)
gatgaaactttgggacattcaaagcattgcagaaacaagcagaaaactttctactacttaggacaagaattacaatatatttatttcattcactcactgtgccttttaggaagattattg

SEQ ID NO: 400170 - DNA, 120 bp, Artificial Sequence
  ENSG00000146350_11 (sequence is synthesized)
atctataaacaaggcagaaaactatttcctattaagctgaagaataaaaaaggtttggtatccctcatagatctgcttgttctttttacccaacttatctattactcaccaagttgtcca

SEQ ID NO: 400171 - DNA, 120 bp, Artificial Sequence
  ENSG00000146350_12 (sequence is synthesized)
aagatgacatcagctgcccattcagagaattactctcctgcaagtatggtgactgaagttctgtggatactcagtgatcaaaaagaatgtgcagtggaatgcttatataacaacattgta

SEQ ID NO: 400172 - DNA, 120 bp, Artificial Sequence
  ENSG00000146350_13 (sequence is synthesized)
atagagacacttcttcagcctattcacaatttaatgaaaggaaatgaggcatctccaaattgctctgagacagctttaattcatatagctggtattttggcaagaattgcatctgtagaa

SEQ ID NO: 400173 - DNA, 120 bp, Artificial Sequence
  ENSG00000146350_14 (sequence is synthesized)
gaagggcttattttactcctttatggagcaaatatgaactcttctgaagaaagtcctacaggtgctcatataattgcccagttttcgaaaaaacttctcgatgaagatatttctatattt

SEQ ID NO: 400174 - DNA, 120 bp, Artificial Sequence
  ENSG00000146350_15 (sequence is synthesized)
tctggatcagaaatgttgcctgtggttaaaggagcttttatttctgtgtgtcgtcacatatatagtacatgtgaaggtttgcaggtgttaatcacttataatttgcatgaatctatagca

SEQ ID NO: 400175 - DNA, 120 bp, Artificial Sequence
  ENSG00000146350_16 (sequence is synthesized)
aaggcatggaaaaagacaagtttgctatcagaaagaattcctactccagtagagggttctgattctgtttcttcagtaagccaggaatcccaaaacattatggcttgggaagataatttg

SEQ ID NO: 400176 - DNA, 120 bp, Artificial Sequence
  ENSG00000146350_17 (sequence is synthesized)
ttagatgatttactacattttgctgccacccccaaaggattactacttcttcaaagaacaggtgctatcaatgaatgtgtgacatttatattcaatcgatatgcaaaaaaattacaggtc

SEQ ID NO: 400177 - DNA, 120 bp, Artificial Sequence
  ENSG00000146350_18 (sequence is synthesized)
ttatggtccaatctggaatatggaagagatgatgttagggtaacccatcccagaactactccagtggatcctattgaccgaagctgtcaaaagtcttttttagcactggtgaacttgtta

SEQ ID NO: 400178 - DNA, 120 bp, Artificial Sequence
  ENSG00000146350_19 (sequence is synthesized)
tcctatcctgctatttatgagcttgtaaggaatcaagatcttcctaataaaacagaatattctcttcgtgaagtcccaacatgtgttattgatattattgatagacttataattttgaat

SEQ ID NO: 400179 - DNA, 120 bp, Artificial Sequence
  ENSG00000146350_20 (sequence is synthesized)
tctgaagctaagattcgttctttattcaactatgaacaatcacatatctttggtctaaggttattaagtgtgatatgctgtgatctggacactcttctcctgttagaggctcagtatcag

SEQ ID NO: 400180 - DNA, 120 bp, Artificial Sequence
  ENSG00000146350_21 (sequence is synthesized)
gtatctgaaatgttactaaatgctcaagaagaaaatatcttggagatttctgagagccacagggactttataattgatggcttatcagtggagagaaatcatgttcttgttagaataaat

SEQ ID NO: 400181 - DNA, 120 bp, Artificial Sequence
  ENSG00000146350_22 (sequence is synthesized)
cttgttggtgggccattggaacggattttgcctccgaggttactcgaaaagagtgataatccatatccttggccaatgttttcatcatatccattgccaaactgctatctgtcagacatt

SEQ ID NO: 400182 - DNA, 120 bp, Artificial Sequence
  ENSG00000146350_23 (sequence is synthesized)
acaagaaatgctggtataaaacaagacaatgatcttgacaagcttttattatgcctcaaaatatctgataaacaaactgaatggatagaaaactgccaaagacaattttgcaaaatgatg

SEQ ID NO: 400183 - DNA, 120 bp, Artificial Sequence
  ENSG00000146350_24 (sequence is synthesized)
aaagccaaacctgatataatcagtggagaggccttaatagaattacttgaaaaatttgtgcttcatctcactgaaagcccatctgaatgctacttcccttcagtggagtatacagctact

SEQ ID NO: 400184 - DNA, 120 bp, Artificial Sequence
  ENSG00000146350_25 (sequence is synthesized)
gatgcaaatgtgaagaatgaaagtctttcatctgtgcagcagcttggcattaaaatgactgtcaggtatggcaaattcctcagtctcttaaaagatggtgcagaaaatgatcttacctgg

SEQ ID NO: 400185 - DNA, 120 bp, Artificial Sequence
  ENSG00000146350_26 (sequence is synthesized)
gttttaaagcattgtgagagattcctgaaacagcagcaaacttccataaaatcttctcttctctgcctgcaagggaattatgctggccatgactggtttgtatcttctctgttcatgata

SEQ ID NO: 400186 - DNA, 120 bp, Artificial Sequence
  ENSG00000146350_27 (sequence is synthesized)
atgttgggagacaaagaaaaaacattccaatttcttcatcaattctccaggcttctgacttctgcttttctttggttgccaaggctacatatttctagttaccttcctaatgacactgta

SEQ ID NO: 400187 - DNA, 120 bp, Artificial Sequence
  ENSG00000146350_28 (sequence is synthesized)
gaatctggcatccatccagtatatttttgcagcacccattatattgaaatgctactgaaggctgagttgcctcttgtgttttcagcttttcacatgtctggttttgcaccatcacagatt

SEQ ID NO: 400188 - DNA, 120 bp, Artificial Sequence
  ENSG00000146350_29 (sequence is synthesized)
tgcctgcaatggataacccagtgtttttggaattacttagattggatagaaatctgccattatattgctacttgtgttttccttggtcctgattatcaagtgtatatctgtatagctgta

SEQ ID NO: 400189 - DNA, 120 bp, Artificial Sequence
  ENSG00000146350_30 (sequence is synthesized)
ttcaaacatttacagcaagacattctacagcacactcagactcaagatctgcaagttttcctaaaagaagaagcactgcatgggtttcgagtgagtgattattttgaatacatggaaatt

SEQ ID NO: 400190 - DNA, 120 bp, Artificial Sequence
  ENSG00000146350_31 (sequence is synthesized)
ttggaacaaaactaccgaacagtgctgctgagagacatgcggaacattagactgcagagcacatagatcatgagacacacggtttaaatttaggttttatttatttttaaacacagcagg

SEQ ID NO: 400191 - DNA, 120 bp, Artificial Sequence
  ENSG00000146350_32 (sequence is synthesized)
ggggcttgatgtttttctgtgtctgtaacaacatttactttgtgaatatacatattgtaaatactgagaagtataacgatatatttaagtaggtatgagctcaatttgtgaattcatttt

SEQ ID NO: 400192 - DNA, 120 bp, Artificial Sequence
  ENSG00000146350_33 (sequence is synthesized)
tttgtgaattcatttttgtaaatttgttgttttgtaaggttattatagaatcagatctagcttacttttagttcttattcatgtttaagagttagtcctggccaggcgcggtggctcatg

SEQ ID NO: 400193 - DNA, 70 bp, Artificial Sequence
  ENSG00000146350_34 (sequence is synthesized)
tcgtctctgctaacaatactgaaattagctgggtgcagtgatgcgcctgtagtccctgctacttgggagg

SEQ ID NO: 400194 - DNA, 120 bp, Artificial Sequence
  ENSG00000146350_35 (sequence is synthesized)
gtcctcccatcagatcattcctgatgtctcttttgttgttagtcgggagagcctgaggtctgctggtactgaaggctagcaactaagagtaccagaggcgagacctcgcggacccctgct

SEQ ID NO: 400195 - DNA, 120 bp, Artificial Sequence
  ENSG00000146350_36 (sequence is synthesized)
ccaggaagaaattgaatccctgaatagatcaataataagttcaaaaattatggcagtaattaataccctaccaaccaaaaaaagtccagaaccagaccaattcacagccgaattctaccc

SEQ ID NO: 400196 - DNA, 120 bp, Artificial Sequence
  ENSG00000146350_37 (sequence is synthesized)
tgtaagacttcaatctgtttttaaaggagggtttgaaattttaagaacattatacttacattcactggggcataattttatttgtgaaggactttgtaataaattatactcatttttcta

SEQ ID NO: 400197 - DNA, 120 bp, Artificial Sequence
  ENSG00000146350_38 (sequence is synthesized)
cccaacttacatctcctttattcagatgatttaaatattgtttccagtgaatttggaaaggagaagtaatagtgtaaataatattttgactagctgcagaaagcccataagacaaggaaa

SEQ ID NO: 400198 - DNA, 120 bp, Artificial Sequence
  ENSG00000146350_39 (sequence is synthesized)
agacagtatttcttccattctttatgtctgtacatgtaaaggaaaatggataaaactacagctgcttcttttacatgtggaagaacaatgatactatttaccatggcaagtggtaggaaa

SEQ ID NO: 400199 - DNA, 120 bp, Artificial Sequence
  ENSG00000146350_40 (sequence is synthesized)
actgttgtccttggacataattgttttttaggagttgcttttgatacccatatcaatttataattctttgtttgaaatgaagtctttacatggttcattgaagagatagattggttattt

SEQ ID NO: 400200 - DNA, 120 bp, Artificial Sequence
  ENSG00000146350_41 (sequence is synthesized)
catactgataagcattctactcttatttgttatgcattttccttagtgatatattttacttgtactgaacttgaaaatataaaggagaatacatttctaaattattttaaatggctaaca

SEQ ID NO: 400201 - DNA, 120 bp, Artificial Sequence
  ENSG00000146350_42 (sequence is synthesized)
ctatgatttgtcttatttaaatagatgtctctgcaccggtaagattaatacaatatgtgaatgtctattttttatatcttaactcacaatgagtatatgaaagataatacacgaatatat

SEQ ID NO: 400202 - DNA, 120 bp, Artificial Sequence
  ENSG00000146350_43 (sequence is synthesized)
aactcacaatgagtatatgaaagataatacacgaatatattacattattcatttttagtcatgagtttatttcaataagtttttctaattgtagatactgttttttattctttccttgta

SEQ ID NO: 400203 - DNA, 120 bp, Artificial Sequence
  ENSG00000146350_44 (sequence is synthesized)
ttctttattcaactatgaacaatcacatatctttggtctaaggaaataagccactcactatgggcaatcttagcggatttgagcctcagcttctgaagccaggagacagaatcccagagt

SEQ ID NO: 400204 - DNA, 66 bp, Artificial Sequence
  ENSG00000146350_45 (sequence is synthesized)
ttaagtgtgatatgctgtgatctggacactcttctcctgttagaggctcagtatcaggtatctgaa

SEQ ID NO: 400205 - DNA, 120 bp, Artificial Sequence
  ENSG00000146350_46 (sequence is synthesized)
ttggcctgcaggaagaaattcattcattctaccctcatacgttaccatacattaaaagtggaacactgattacttaaagattagtatcaggaacgaaataaccattcttgtatatatttg

SEQ ID NO: 400206 - DNA, 120 bp, Artificial Sequence
  ENSG00000146350_47 (sequence is synthesized)
taattcagagttttatgtatgcattgcatgatgaaagtagtatttctagaccactttttgggtcaatggctctttttattctgagagccaagtaaaatagattgttttaaaactactatt

SEQ ID NO: 400207 - DNA, 120 bp, Artificial Sequence
  ENSG00000146350_48 (sequence is synthesized)
gttatgtatttaatatgttttccaatgctttttatgggaaaaagttatttgtaaaaagttttctgttaattcctttgaaaatgtaactgacagttcctaaaagaataaattcatcagtgt

SEQ ID NO: 400208 - DNA, 120 bp, Artificial Sequence
  ENSG00000146350_49 (sequence is synthesized)
tttcaaaattcacattaaaatatgtaaaaatattgctttcatcaattttcaattaaaatgtgattattatgcaaacttttctgcactttataactcagttttctgttgtctttagctact

SEQ ID NO: 400209 - DNA, 66 bp, Artificial Sequence
  ENSG00000146350_50 (sequence is synthesized)
gactttataattgatggcttatcagtggagagaaatcatgttcttgttagaataaatcttgttggt

SEQ ID NO: 400210 - DNA, 120 bp, Artificial Sequence
  ENSG00000146352_0 (sequence is synthesized)
gtcctctttcagcagcagcagccggagccgccgccgcagcccggtggggcaaccctgactcggaccgctcgggagagccccaggagaggccagcgccgcgcagcagccgccccgctgcgc

SEQ ID NO: 400211 - DNA, 120 bp, Artificial Sequence
  ENSG00000146352_1 (sequence is synthesized)
ccacctccccggctgctcccggagggctcacaaaggcggtggccgcccgagtggccttctccatccaggcgttcgcgtcctcctccccaccttctctcccgaaggcgaaaatggcagggc

SEQ ID NO: 400212 - DNA, 120 bp, Artificial Sequence
  ENSG00000146352_2 (sequence is synthesized)
caggcgagaacctgggacagcggtggccctagccctgcgatcctcacccctcctgctaggagaggctgcgggctgcccgcggacgatgtggccgcggctgctcccgagcgcatcttcggc

SEQ ID NO: 400213 - DNA, 120 bp, Artificial Sequence
  ENSG00000146352_3 (sequence is synthesized)
ccgggtccccgccgccacccctcttctctgctccttccatcccgcccagaggagttgatgccgctgtcgccgccgccgccgctgctgaagccgcggctgatggatgccagggagtgccgc

SEQ ID NO: 400214 - DNA, 120 bp, Artificial Sequence
  ENSG00000146352_4 (sequence is synthesized)
attgcttagcgaccccgcctctgggtttgctgatgatctctctccgccctggagctcagcgctgaagagctaccttattattaatcagaatttccatcgccacccctggcaggcgtatcc

SEQ ID NO: 400215 - DNA, 120 bp, Artificial Sequence
  ENSG00000146352_5 (sequence is synthesized)
ttcagcagggaccgcaggaacattcacagtgcaggggctgagatgtgcgtgggggttgtttttgttacatcttggaagagaagagaagaggacagtaccaagatcagaaacacccgtgct

SEQ ID NO: 400216 - DNA, 120 bp, Artificial Sequence
  ENSG00000146352_6 (sequence is synthesized)
aggtggaattaggggtgatttgttaggaaagagaaaggacaagaagaggagtgcggagcccttcaggggttcacatctctttaaaggaaaggaaagagggagccaaagtagggtgttgta

SEQ ID NO: 400217 - DNA, 120 bp, Artificial Sequence
  ENSG00000146352_7 (sequence is synthesized)
ttttagggggcagaggaagaagtttacaccccccggcccccccagctttgctgggggaaagcaggagcaacagggcacttgattggacaccaagattattaatttcctgtaggggagagg

SEQ ID NO: 400218 - DNA, 120 bp, Artificial Sequence
  ENSG00000146352_8 (sequence is synthesized)
aagcaggcagcaggaggtctgggggctggagtctggtggtggcaaggaccaggtttgctttgggacagtcaacaaggtcttctgagggaaagctcagagataggcagaacaatgactcat

SEQ ID NO: 400219 - DNA, 120 bp, Artificial Sequence
  ENSG00000146352_9 (sequence is synthesized)
ttgcaagccggtctctcccctgagaccctggagaaagctcgcctggagctcaatgaaaacccagacacgctgcaccaggacatccaggaggtgagggatatggtcatcaccaggccggac

SEQ ID NO: 400220 - DNA, 120 bp, Artificial Sequence
  ENSG00000146352_10 (sequence is synthesized)
attggctttctgcgcacggatgatgccttcatcttacgcttcttgcgggctaggaagtttcatcactttgaggccttccgcctcctggcgcagtactttgagtaccggcagcagaacctg

SEQ ID NO: 400221 - DNA, 120 bp, Artificial Sequence
  ENSG00000146352_11 (sequence is synthesized)
gacatgttcaaaagctttaaggccaccgaccctggcatcaagcaggcactgaaggatggcttccctgggggcctggccaatctggaccactatggcaggaagattctagtcctttttgct

SEQ ID NO: 400222 - DNA, 120 bp, Artificial Sequence
  ENSG00000146352_12 (sequence is synthesized)
gccaattgggatcagagcaggtacacactggtggatattttgcgtgccatcttactttctttagaagccatgattgaagatcctgagcttcaagtgaatgggtttgttttgatcatagac

SEQ ID NO: 400223 - DNA, 120 bp, Artificial Sequence
  ENSG00000146352_13 (sequence is synthesized)
tggagtaacttcactttcaagcaagcctctaaactcacaccaagtatgctgcgattagctattgaaggcctgcaggatagtttcccagcgcgatttggaggaattcattttgtcaatcaa

SEQ ID NO: 400224 - DNA, 120 bp, Artificial Sequence
  ENSG00000146352_14 (sequence is synthesized)
ccatggtatatccatgccctgtacaccgtgatccggcctttcctgaaggagaaaactcggaaaaggatatttttgcatggtaacaacctgaacagtctacaccaactaattcatcctgag

SEQ ID NO: 400225 - DNA, 120 bp, Artificial Sequence
  ENSG00000146352_15 (sequence is synthesized)
atcctgccctctgagtttggaggaatgctgcctccttatgacatggggacatgggcaagaacactgctagaccatgaatatgacgatgacagcgagtacaatgtagactcctacagcatg

SEQ ID NO: 400226 - DNA, 120 bp, Artificial Sequence
  ENSG00000146352_16 (sequence is synthesized)
cctgtgaaggaagtagagaaggaactctccccaaagtccatgaagagatctcaatcagtagtggatcctacagtactaaaacgcatggataaaaatgaggaagaaaacatgcaaccattg

SEQ ID NO: 400227 - DNA, 120 bp, Artificial Sequence
  ENSG00000146352_17 (sequence is synthesized)
ctttctctggactaataacttctctacatccccttcatggattagaaatggaaagtattggttttcagcaacagggacaacactgtagaggaattaccagctggaaaccgacttattcat

SEQ ID NO: 400228 - DNA, 120 bp, Artificial Sequence
  ENSG00000146352_18 (sequence is synthesized)
gttaatgtagcataatatataacaaggcatcaggctttccttggcctgaaccatgggggccctgggctggatttttaaaatgtcaataatttattctgtaagtgccaagttgtttgtaaa

SEQ ID NO: 400229 - DNA, 120 bp, Artificial Sequence
  ENSG00000146352_19 (sequence is synthesized)
tataatgtaatcttcatgtcaagtttgtaaatttcagtagtaactcagtttggaaaaaggttggctcaaaagtccatgccagtgttatgaactataacaaaaagcagaaaagacacagtc

SEQ ID NO: 400230 - DNA, 120 bp, Artificial Sequence
  ENSG00000146352_20 (sequence is synthesized)
aaagctaattaaatgtagccctctttcctatgaagccatatttcagctctcatagtgattgtttcattgtttttctctgaaactctgtcagtattcaaacatactcttaacgggcacaca

SEQ ID NO: 400231 - DNA, 120 bp, Artificial Sequence
  ENSG00000146352_21 (sequence is synthesized)
caactaagtgattccaggaaattttatgattaatgtatttcctgtctagtgattttcatttcagagaaatgtgtcttagtaactatcattggccttgcattttggaggcaaggaatggca

SEQ ID NO: 400232 - DNA, 120 bp, Artificial Sequence
  ENSG00000146352_22 (sequence is synthesized)
gatgagctggtaaactgaacacttgaactcttctatgttgtttaattcttggaatcttgtgaaaagatgtgtttcctcaattaagacgtagaaatgtaaaaaagagtggattctttttaa

SEQ ID NO: 400233 - DNA, 120 bp, Artificial Sequence
  ENSG00000146352_23 (sequence is synthesized)
attgctgtcttcacaatgtgccctttattcaagaccctattatatttcttcctaatgtactctaagtacatttcccctccaaaactctttgactaagagaatgagaactcatgtgaacag

SEQ ID NO: 400234 - DNA, 120 bp, Artificial Sequence
  ENSG00000146352_24 (sequence is synthesized)
tgttctgacagctaattttgaacataaaattttccacttacagatgaggggctaatttctaattgttgtgcactggttaaaaagtatatatatatatatattcacacatatatattttta

SEQ ID NO: 400235 - DNA, 120 bp, Artificial Sequence
  ENSG00000146352_25 (sequence is synthesized)
ctgagctctaataaatccttaatgtgacaggcttataaaataaatcatagatattcaatgatcttatggataattacatgagataactctggaaaactacttccactgaagttaatgaaa

SEQ ID NO: 400236 - DNA, 120 bp, Artificial Sequence
  ENSG00000146352_26 (sequence is synthesized)
aggagaaatagtgaaactgactttcagtgtacctatttaaaggaattccaagttaatttataatgcaatcttacatatgtgccatcttatttgaactatatttttccttcaaagaagcaa

SEQ ID NO: 400237 - DNA, 120 bp, Artificial Sequence
  ENSG00000146352_27 (sequence is synthesized)
taggtctcaacatagtgtaggtagcatcaggtgacagaaagccaattttattttcaaatttaagttaattatcttcgtgatcctatttatccacaatttctttcagaaaagactgaaaaa

SEQ ID NO: 400238 - DNA, 120 bp, Artificial Sequence
  ENSG00000146352_28 (sequence is synthesized)
acacattatattcaggagatataatgaaattattggaaggcatctatgacaacatgtaatcatttatacgtggatttagaaatttgcatatttaacattttatttcataaaatttataca

SEQ ID NO: 400239 - DNA, 120 bp, Artificial Sequence
  ENSG00000146352_29 (sequence is synthesized)
attacagcaaatcttaattttttaattttaaatttcaatgtgaaaaaatgatttttatcacccataataaattttgagattgagagtttaccattaaagtattcttttggaagaaaaata

SEQ ID NO: 400240 - DNA, 120 bp, Artificial Sequence
  ENSG00000146352_30 (sequence is synthesized)
tctcagaaactcttggaaaccaacaaaaataaaggcatgtgtcagccttcatattttttggccaaaagctcccaaaatttgttataattctgcagccaaaaattgtaaaagcaagctgaa

SEQ ID NO: 400241 - DNA, 120 bp, Artificial Sequence
  ENSG00000146352_31 (sequence is synthesized)
tacaccaatgtacagtgtatcaatggactgcctcatgtgtgtaaaaatacattaattaacacaaatgaaagataccttaataatgccaacctccagtcaagtgcagaagaataatgactg

SEQ ID NO: 400242 - DNA, 120 bp, Artificial Sequence
  ENSG00000146352_32 (sequence is synthesized)
tcaggcactctgctctccttgtgacttttacagagattggaatgcactggggacaacatgtctcagcagttcttacctttataagaattctaaccattgatattcttacattcttgccta

SEQ ID NO: 400243 - DNA, 120 bp, Artificial Sequence
  ENSG00000146352_33 (sequence is synthesized)
cctgacatacattttgtagccatgggctttttagactatataaatcttaggcagtataatccattggaataaaatagaaacattgtaagtgcagagggcagtcaacttttcattctcatg

SEQ ID NO: 400244 - DNA, 120 bp, Artificial Sequence
  ENSG00000146352_34 (sequence is synthesized)
agtttctcttgatgtgtaccatttattgccagttttcagaattctgccagtttcagatgtcaaccagcattggcagcttctttcccctatcgtaaagttagtgtcatatataaaaataac

SEQ ID NO: 400245 - DNA, 120 bp, Artificial Sequence
  ENSG00000146352_35 (sequence is synthesized)
tagaaaggcatattttatatgtatgcctatctaattataagtatcattcacactgtctcccagacccacatttggaaagtttgcattgcattactgctcatctttagatgagcaattgag

SEQ ID NO: 400246 - DNA, 120 bp, Artificial Sequence
  ENSG00000146352_36 (sequence is synthesized)
agttggctagattgtgtaaaatattttaaaatgaatgaacaaattacaatgatgatgccttttgaaattaccatatctagttcattctgtgaataaactcattttctagtaatgtttgtg

SEQ ID NO: 400247 - DNA, 120 bp, Artificial Sequence
  ENSG00000146352_37 (sequence is synthesized)
aaccttagtcaagggatattcattcaactttataaatttacccctcagcaccagctatctagcactgtttaggaatttttcccttcatgatattctgtgtcacatcctatgtctatgaat

SEQ ID NO: 400248 - DNA, 120 bp, Artificial Sequence
  ENSG00000146352_38 (sequence is synthesized)
cacatcctatgtctatgaataacctatacactatagttgtatgcctataagcactcctatactcttgtattttaattgcaatagtatacctccactctctctctctctctcatacacaca

SEQ ID NO: 400249 - DNA, 120 bp, Artificial Sequence
  ENSG00000146352_39 (sequence is synthesized)
cacactaacacactagactgtttgccctaatgaattttcctctgtacttcgagagctattttagttgtcttgtcacttgaaatttgcgggcttcaaagaattatcgcatttgacttggaa

SEQ ID NO: 400250 - DNA, 120 bp, Artificial Sequence
  ENSG00000146352_40 (sequence is synthesized)
tggtccagtagtccatttacttctttcaccctgcctgttccatcttctatttctgatattttttctttcttccagttatttcaggggcaggtgattccaaagctggtttaaaaataaata

SEQ ID NO: 400251 - DNA, 120 bp, Artificial Sequence
  ENSG00000146352_41 (sequence is synthesized)
acttctcttatgttgtcagtgatgtttgcctgcatttttgactactatttaagagggaagagattatcatgaaaatatactctaagaaatatgaagaagtgcctctttgaaaatggaata

SEQ ID NO: 400252 - DNA, 120 bp, Artificial Sequence
  ENSG00000146352_42 (sequence is synthesized)
aagcaacgttactggcatatggattttatttgtactctcttccaaaaagtaaatacgtaaatctatattatataggtgaaatatagatatcatttgaagaaggatatttaaggcctttat

SEQ ID NO: 400253 - DNA, 120 bp, Artificial Sequence
  ENSG00000146352_43 (sequence is synthesized)
ttgaacatactcatacagtattaagtctctgttgtgtaagttaaatacagtaactttagtacatgttaatgataaacgtggcactaggctaaaacgatatacgagtattaaacagagttt

SEQ ID NO: 400254 - DNA, 120 bp, Artificial Sequence
  ENSG00000146352_44 (sequence is synthesized)
tgcaagcaagtttttgaagtgggcatgcatgaattctttcatttcagtaatggtttgcataagtgtagacagagatatttcctaagttttttcatatagaatacttatttactttatagt

SEQ ID NO: 400255 - DNA, 120 bp, Artificial Sequence
  ENSG00000146352_45 (sequence is synthesized)
accaaaaattcatacattcataagcaggaaagccaaaaattcatacattaatacttagcttttttaatactgttaactaggtcatattgttaaacatgtgaagcgtctgtaatattcctg

SEQ ID NO: 400256 - DNA, 120 bp, Artificial Sequence
  ENSG00000146352_46 (sequence is synthesized)
aatatgtttatgactcttcacataaagaaaccttcagagccatggagtatgtcttcagggacagggatcatttgcttctacaatgtaaaggtttatggacatatctctggtcctttaaag

SEQ ID NO: 400257 - DNA, 120 bp, Artificial Sequence
  ENSG00000146352_47 (sequence is synthesized)
aagttacattaagaaagcttgctgagaggctgtacactcttctgttgttttatttaaaggtctgccttgtgtggttggtgaataatatctcagcttctttttttgtgtatatttattaat

SEQ ID NO: 400258 - DNA, 120 bp, Artificial Sequence
  ENSG00000146352_48 (sequence is synthesized)
gattacatgaaaagttgccatcagccatgaggacacttcaaaaattttcaacacactaaataaaatgagcagagctctagcatgatatttgaactttcagatatggtatatgtacatttt

SEQ ID NO: 400259 - DNA, 120 bp, Artificial Sequence
  ENSG00000146352_49 (sequence is synthesized)
ttacaacaataagctcataggcatatattccattgtagatctgctatataaatacatagcctgaaacatagtaatgcatttgaaatttgtgaggtcactgatcatacaagaagaggcaga

SEQ ID NO: 400260 - DNA, 120 bp, Artificial Sequence
  ENSG00000146352_50 (sequence is synthesized)
ttataaaccaacatattggaacaaaagaagattggttaaatatgcaaggtgtgtaattatcttcagtaatgaaaaggatttgttttcttgtttttgtctttggttttagttgaaaaaata

SEQ ID NO: 400261 - DNA, 120 bp, Artificial Sequence
  ENSG00000146352_51 (sequence is synthesized)
gcttcccatatgctactggaactatttgacattatttgctacatgaaaaaaggcaaataagtaaacatacaaaagaagcttggctttgtaacattattatattatgatctcaatggctta

SEQ ID NO: 400262 - DNA, 120 bp, Artificial Sequence
  ENSG00000146352_52 (sequence is synthesized)
gagaatataatcttttttaagaattaaagattttattttataaatatttggaggttaacataggacatgaaaatagtgctgtggattctgttatgtactaactatgggaatgaattctcc

SEQ ID NO: 400263 - DNA, 120 bp, Artificial Sequence
  ENSG00000146352_53 (sequence is synthesized)
agtaccataggaaaatatataagataacaactttgtggattgaaacactcaaattagcctttttttcaaggaagcaggtgtacaaatgatgctattgaaataaaaaaatgtagaaatcac

SEQ ID NO: 400264 - DNA, 120 bp, Artificial Sequence
  ENSG00000146352_54 (sequence is synthesized)
ttaattataggagttaaatataatcaatgcactcatggtaaataatggaaattgttaaaatttagaagagttttgtcattatttgacttagatttaagtctcagtgcaaatatgtctgtc

SEQ ID NO: 400265 - DNA, 120 bp, Artificial Sequence
  ENSG00000146352_55 (sequence is synthesized)
cttgatatagtgcatttattctgtaagacttattttacctggtgaacgagatggacttaggtgaaaataaattttaaccacagttttaagggtcacccaatcctcaactactttaaaaaa

SEQ ID NO: 400266 - DNA, 120 bp, Artificial Sequence
  ENSG00000146352_56 (sequence is synthesized)
ttgcaatgaattttaattcatttacttttaacagagatacaaagcactgtcttgtttctaatccaatttttcaatttttcagattttatatttgcttaaacaataaataaaactcagaaa

SEQ ID NO: 400267 - DNA, 120 bp, Artificial Sequence
  ENSG00000146352_57 (sequence is synthesized)
accaaatagtttttgttttcaaagctatccaggaaaaataaaagatgtctaacaggaaatcatacaagtccttgaagaatactgagtatattatttgctattttactcaaatgttattaa

SEQ ID NO: 400268 - DNA, 120 bp, Artificial Sequence
  ENSG00000146352_58 (sequence is synthesized)
tttttactactacaaactacttatttagtactacacggcatttactatttggccttttgaaggagttataaattccaaaacactataatataatttttggacaagtatacatttctgttt

SEQ ID NO: 400269 - DNA, 120 bp, Artificial Sequence
  ENSG00000146352_59 (sequence is synthesized)
aaaagaaatgtatgcttttattttgtatattttatattttaaatgtatacatttattttgcacattgttaatgttaaatttggtagtcctggatctgctgcatctataaaatggagattt

SEQ ID NO: 400270 - DNA, 120 bp, Artificial Sequence
  ENSG00000146352_60 (sequence is synthesized)
ctttaaaaaatcgtctaaaaattagcaatatttttattttgagagaaattgtgcttagctatttaagttaagattcctcaagtttgtgatatttgtatgtgtggggatcaaagaggaaaa

SEQ ID NO: 400271 - DNA, 120 bp, Artificial Sequence
  ENSG00000146352_61 (sequence is synthesized)
tatatagtaatttgtttcatcaaaatgacgtattcaatattctataacttctagtcaaactttcaaatgaaagtttgaaagaagtaaactaatgttttaattacatatagcaaaggaatg

SEQ ID NO: 400272 - DNA, 120 bp, Artificial Sequence
  ENSG00000146352_62 (sequence is synthesized)
atcagtaaataaaataactagggttttcacatttgcaatagaatgactggattaggcaagagattaaatttagaaatttgaattacagaaaagcattggtttaaataaatcctcaaaaaa

SEQ ID NO: 400273 - DNA, 120 bp, Artificial Sequence
  ENSG00000146352_63 (sequence is synthesized)
gtaatcccaggtcaaaatatgatgtgaaattaaaaaaaaaattcagcctgatttgagaaagaatgcttactcaataaatatgtatttgtgtcttctgtgagtttccctcatttatcctat

SEQ ID NO: 400274 - DNA, 120 bp, Artificial Sequence
  ENSG00000146352_64 (sequence is synthesized)
ctgtggatgaaaagtcatctaataaggtataagagactcaattacatttacctagaaccatctacaagtagacttcatgaatttctttggctcaaactcagaggattttctttacacagg

SEQ ID NO: 400275 - DNA, 120 bp, Artificial Sequence
  ENSG00000146352_65 (sequence is synthesized)
attcttgaggttatcaagaatcgttattgctgctccctcctaaaggcaggccaggagaagccacatttccagcagtagtatcctcagtgggaatgaaccagaaaacaaagaaaaagccag

SEQ ID NO: 400276 - DNA, 120 bp, Artificial Sequence
  ENSG00000146352_66 (sequence is synthesized)
agatattgtctccactctcgttacaaaaaagtgcgttccttcttcaggaggatcgagtagaaaatattttctactcgaagaggccatggggaagtgatggtcaaatctctgttgtgaagc

SEQ ID NO: 400277 - DNA, 120 bp, Artificial Sequence
  ENSG00000146352_67 (sequence is synthesized)
aagtttccacacagaaacatcatcaaaaacacgtacctctgagcatcacttctttctctaaaaataaaaataaatatgctgttttcctcccttttttctaattggcatcataaaagtata

SEQ ID NO: 400278 - DNA, 120 bp, Artificial Sequence
  ENSG00000146352_68 (sequence is synthesized)
agaagccacaaatgcattgttgccacttaagaaaaaaatcctatgttatacatatatgaacataattcacttagttgcatatgattgaaatatttgcatgctggtttataaattattacc

SEQ ID NO: 400279 - DNA, 120 bp, Artificial Sequence
  ENSG00000146352_69 (sequence is synthesized)
taaaagttttatgaaatataattattaagttttagtgctagaaaaattgttgttttttgtgttttgtattcatagggaagactagtaatatcccttactcctcattcatatagctaacaa

SEQ ID NO: 400280 - DNA, 120 bp, Artificial Sequence
  ENSG00000146352_70 (sequence is synthesized)
ttttaattggatggctaatggatatggcggatttaacatttacaaaaccaaactactttcactctgaccctgcttcccctttagccttctcatctcactatgtgtcgaccccaatcttcc

SEQ ID NO: 400281 - DNA, 120 bp, Artificial Sequence
  ENSG00000146352_71 (sequence is synthesized)
agtttctaggaataaaaattttggagtcatcctctctttccttcctctttttctttcaaaactacatcacatcagctagctcatgctgttgggtcttcaaaatatatccacactctaacc

SEQ ID NO: 400282 - DNA, 120 bp, Artificial Sequence
  ENSG00000146352_72 (sequence is synthesized)
acttctccaatcttcttcactgtattggaccaagtcttcaacattttccatctggaatattttaataatctaaaaactagtcttcttgcttccagagtcaattttcaacacattagcaag

SEQ ID NO: 400283 - DNA, 120 bp, Artificial Sequence
  ENSG00000146352_73 (sequence is synthesized)
agtgagtctcttaaaatgtaactcagaccattttgttctccaaaccctctgaaagagtaaaagccgatgtctttatatcagtgtatgagaagtcttgatatgaaggcagtaagcaccagt

SEQ ID NO: 400284 - DNA, 120 bp, Artificial Sequence
  ENSG00000146352_74 (sequence is synthesized)
acagcaacatagcatggtttctgattgggctggcatttttgctggtactatgaaaaaatagttgttaaatactttaatttcttgcttctgaagttctctaccccgttcttgccttttctt

SEQ ID NO: 400285 - DNA, 120 bp, Artificial Sequence
  ENSG00000146352_75 (sequence is synthesized)
agataatctcttaagaatctctcctttatttactgctgccaaactgtcatctttgctgttccaggaacttgctaagcatgcctctacctcaggactttcgcatttctgttccctttgcct

SEQ ID NO: 400286 - DNA, 120 bp, Artificial Sequence
  ENSG00000146352_76 (sequence is synthesized)
ctaatttcagatatccacgtggtttattccctcatcttcttcaggtatttgcttaaatgtcatcttctttgtgaggactctctttcctaattttagatgaaacagccctgtggttcttca

SEQ ID NO: 400287 - DNA, 120 bp, Artificial Sequence
  ENSG00000146352_77 (sequence is synthesized)
tattctcctttcctgctgtatttcctctccatagcatttatcacctgatacaccatacagattatttatttactttgcatttccccccaatagcaatgtgaactccacaagggcaggaat

SEQ ID NO: 400288 - DNA, 120 bp, Artificial Sequence
  ENSG00000146352_78 (sequence is synthesized)
ttttgtctgtttactactgcattactggtgccttgtacagtccctggaacttaacaaatccaaaatgatttcatgaggatcctaatttgtttcagcaagttatgtaacggccaatagtat

SEQ ID NO: 400289 - DNA, 120 bp, Artificial Sequence
  ENSG00000146352_79 (sequence is synthesized)
gaattgaaagagtttcttgttgtcttaatttaaaaaattttgttatttatcttcaaaggggaaattttaccctctcatgataatagaatcatgaatcaaaaatgatatcctcttctcccc

SEQ ID NO: 400290 - DNA, 120 bp, Artificial Sequence
  ENSG00000146352_80 (sequence is synthesized)
aattgtgatctctatccctgagcctaagttttacatcagtatttcagttttgtctttagaagttactcaacgatcactggaccctatatctatccacatggcttactcttggagagacta

SEQ ID NO: 400291 - DNA, 120 bp, Artificial Sequence
  ENSG00000146352_81 (sequence is synthesized)
caagatagctcaggggaaaagtcattttgagattaaaactacatggaattgttctttatggattatcatggttaatttcaatttttaaaaatatgcaggaagttaaaagactataattcc

SEQ ID NO: 400292 - DNA, 120 bp, Artificial Sequence
  ENSG00000146352_82 (sequence is synthesized)
agtattggaagccagtttaagagaatatgactatgtagttacttttaatggaaaggggaagaagaggaagaaaaaggaaagacattgtgttcgtatcttctctgcaacaattataaaatg

SEQ ID NO: 400293 - DNA, 120 bp, Artificial Sequence
  ENSG00000146352_83 (sequence is synthesized)
aatgaggaagtattttggtgtttctaaggtctttccatgatcttgaaatctatatattatagtcatttagtctgtgaaccattttaacaattgggtttcatgttacatatctttaaattt

SEQ ID NO: 400294 - DNA, 120 bp, Artificial Sequence
  ENSG00000146352_84 (sequence is synthesized)
ttatgttgaaaatttatagctgtgacacaagatgatagaaattgctcatgctcacatatattccaactggcttttcagcttgctcccttctcttttaatttcagctatcatttttagagc

SEQ ID NO: 400295 - DNA, 120 bp, Artificial Sequence
  ENSG00000146352_85 (sequence is synthesized)
cttacagtcacaattgttcttaactatcccaaatttttatttcctatttggactgacttctccataattttagtaactaaatgacctagatattggttcttgttgtgataggtttctgat

SEQ ID NO: 400296 - DNA, 120 bp, Artificial Sequence
  ENSG00000146352_86 (sequence is synthesized)
ttgtatcctttgcagtttaacttttaatccttaccaaacatatgttattccttttcttcagctacattgttgtgcctttcccaacactgtaataatttaagcctcctgttttataatctt

SEQ ID NO: 400297 - DNA, 120 bp, Artificial Sequence
  ENSG00000146352_87 (sequence is synthesized)
ctatcagaacatatattaagaagacactgaatttaaagaatcagcaggtgatgttgaagaagaaatataacctgaaatataagaatagatgtttgaaactgtttcagaagttaaccagtc

SEQ ID NO: 400298 - DNA, 120 bp, Artificial Sequence
  ENSG00000146352_88 (sequence is synthesized)
ttttagtggctttgtaatgggtaggggttttattcctctttgtgtgctatgtaggacattgttaaccaatatagattatgtttcttgtcagttacacaaggataggtaatcagggttaac

SEQ ID NO: 400299 - DNA, 120 bp, Artificial Sequence
  ENSG00000146352_89 (sequence is synthesized)
agttcggaaaacattctctagagaagagactaatgattcttgctcacaaacaaggcagaatttccttatgtttcttaatatttgatccttgatagtctgtacagtggaaaccatttccct

SEQ ID NO: 400300 - DNA, 120 bp, Artificial Sequence
  ENSG00000146352_90 (sequence is synthesized)
ctgtgatatccttttttgccaacctatatgaatgtgtttagcgtcacttcagatatagagttcaagctcaagtatacacagcacatgaaagatcctatagttcatgttctcttaggttga

SEQ ID NO: 400301 - DNA, 120 bp, Artificial Sequence
  ENSG00000146352_91 (sequence is synthesized)
attttcttttcataattttttatgattgaattctaagggtatgttccttggtaaattgtgttaattatgtccactttataatggatttaacaattttacaaagcagatcattgtttatta

SEQ ID NO: 400302 - DNA, 120 bp, Artificial Sequence
  ENSG00000146352_92 (sequence is synthesized)
tattctgaaaaccattatattaatattttatttctttttttgcagagaaactattgtcttttttgatttctgaggatgaatgaagtactgttaaataaaatgtcactaaatgaaacttca

SEQ ID NO: 400303 - DNA, 120 bp, Artificial Sequence
  ENSG00000146360_0 (sequence is synthesized)
atgaacgcgagcgccgcctcgctcaacgactcccaggtggtggtagtggcggccgaaggagcggcggcggcggccacagcagcaggggggccggacacgggcgaatggggaccccctgct

SEQ ID NO: 400304 - DNA, 120 bp, Artificial Sequence
  ENSG00000146360_1 (sequence is synthesized)
gcggcggctctaggagccggcggcggagctaatgggtctctggagctgtcctcgcagctgtcggctgggccaccgggactcctgctgccagcggtgaatccgtgggacgtgctcctgtgc

SEQ ID NO: 400305 - DNA, 120 bp, Artificial Sequence
  ENSG00000146360_2 (sequence is synthesized)
gtgtcggggacagtgatcgctggagaaaacgcgctggtggtggcgctcatcgcgtccactccggcgctgcgcacgcccatgttcgtgctggtaggcagcctggccaccgctgacctgttg

SEQ ID NO: 400306 - DNA, 120 bp, Artificial Sequence
  ENSG00000146360_3 (sequence is synthesized)
gcgggctgtggcctcatcttgcactttgtgttccagtacttggtgccctcggagactgtgagtctgctcacggtgggcttcctcgtggcctccttcgccgcctctgtcagcagcctgctg

SEQ ID NO: 400307 - DNA, 120 bp, Artificial Sequence
  ENSG00000146360_4 (sequence is synthesized)
gtggaccgctacctgtccctgtataacgcgctcacctattactcgcgccggaccctgttgggcgtgcacctcctgcttgccgccacttggaccgtgtccctaggcctggggctgctgccc

SEQ ID NO: 400308 - DNA, 120 bp, Artificial Sequence
  ENSG00000146360_5 (sequence is synthesized)
gtgctgggctggaactgcctggcagagcgcgccgcctgcagcgtggtgcgcccgctggcgcgcagccacgtggctctgctctccgccgccttcttcatggtcttcggcatcatgctgcac

SEQ ID NO: 400309 - DNA, 120 bp, Artificial Sequence
  ENSG00000146360_6 (sequence is synthesized)
ctgtacgtgcgcatctgccaggtggtctggcgccacgcgcaccagatcgcgctgcagcagcactgcctggcgccaccccatctcgctgccaccagaaagggtgtgggtacactggctgtg

SEQ ID NO: 400310 - DNA, 120 bp, Artificial Sequence
  ENSG00000146360_7 (sequence is synthesized)
gtgctgggcactttcggcgccagctggctgcccttcgccatctattgcgtggtgggcagccatgaggacccggcggtctacacttacgccaccctgctgcccgccacctacaactccatg

SEQ ID NO: 400311 - DNA, 120 bp, Artificial Sequence
  ENSG00000146360_8 (sequence is synthesized)
atcaatcccatcatctatgccttccgcaaccaggagatccagcgcgccctgtggctcctgctctgtggctgtttccagtccaaagtgccctttcgttccaggtctcccagcgaggtctga

SEQ ID NO: 400312 - DNA, 120 bp, Artificial Sequence
  ENSG00000146360_9 (sequence is synthesized)
aatctgcagcgcgcgccgctcgcagccgccttttctgccaccaactgtatctctcactcgcggagccggcacagcgacaggcgccccgcgcttgcctcctccccggcccggccgcctcct

SEQ ID NO: 400313 - DNA, 120 bp, Artificial Sequence
  ENSG00000146360_10 (sequence is synthesized)
gcaggcagctgctctgtttgcgcggggagctcagcccggcgccccgcctcggcgcccatgaccagcgacttccagaagtcctgacgccccagcaccgcggacagcgtctctgctgcccag

SEQ ID NO: 400314 - DNA, 120 bp, Artificial Sequence
  ENSG00000146360_11 (sequence is synthesized)
caacaagccagcctttggtaagctcggtgcctgctgacgaactctgagatcccaatggtgtgagtctgactttggaaagaaaaagggactaaagagaaatgtaacaaacttacaaggaca

SEQ ID NO: 400315 - DNA, 120 bp, Artificial Sequence
  ENSG00000146360_12 (sequence is synthesized)
aagaggcttgttggcactttacatatacagtgtatacatgtgtacatatatatacaaatatttgtatcttctggaggtgttcaggatgtggagcttcctattctgtgaaaaaccaagaaa

SEQ ID NO: 400316 - DNA, 120 bp, Artificial Sequence
  ENSG00000146360_13 (sequence is synthesized)
aagatatggttgtatactcaaattgtacatcacgtttgtcaaacgaagacattccaatactgcttaattatagcactttatttttagctgctgaactgccaaaacagtgttgccattttc

SEQ ID NO: 400317 - DNA, 120 bp, Artificial Sequence
  ENSG00000146360_14 (sequence is synthesized)
aagggcagggaaaagggagtaaaaggtgtatttttgtcgtatgtgatagaatattttgctgcacatgcatcaacaaattacaacatgttttgtacacgaataaacccattacaagaatgt

SEQ ID NO: 400318 - DNA, 80 bp, Artificial Sequence
  ENSG00000146373_0 (sequence is synthesized)
atgggcgaggagcagagcacggtgagcggcggcggcgggccccaggagtcgcagaccctggccagtggcactgcgggcca

SEQ ID NO: 400319 - DNA, 120 bp, Artificial Sequence
  ENSG00000146373_1 (sequence is synthesized)
gccgcctccgcggagccgagcggcggtggctgcggaagcgactggggctgcgcggacaccagcgccccagagcccgcgaggagcctggggcccccgggctggagtaagagccgagcaccg

SEQ ID NO: 400320 - DNA, 120 bp, Artificial Sequence
  ENSG00000146373_2 (sequence is synthesized)
agccgagcaccggcgcagcctgcgggactggcactcaccgggcctctcaatccccagaccttgccactgcagttggagctggaggaggaagaggaggaagctggggatcgaaaagaggga

SEQ ID NO: 400321 - DNA, 120 bp, Artificial Sequence
  ENSG00000146373_3 (sequence is synthesized)
ggggatgaacagcaggaggcgccccccggcgaagagctggagcccaggacccgcgtgggggccgccgacggactggtcctggacgtgctgggtcagcggcgcccgtccctcgccaagaga

SEQ ID NO: 400322 - DNA, 120 bp, Artificial Sequence
  ENSG00000146373_4 (sequence is synthesized)
caagtcttctgctccgtgtactgcgtggagagcgacctgcccgaggcccccgcctcggagcagctctcgccgcccgcgtcgccacctggggctccgccagtgttgaaccctcccagcacc

SEQ ID NO: 400323 - DNA, 120 bp, Artificial Sequence
  ENSG00000146373_5 (sequence is synthesized)
cgctcttccttccccagcccccgactgtccctcccaacggattccctctcccccgacggcggcagcatcgagctggagttctacctggcgcccgagccgttctccatgcccagcctgttg

SEQ ID NO: 400324 - DNA, 120 bp, Artificial Sequence
  ENSG00000146373_6 (sequence is synthesized)
ggagctccaccctactctggcctgggcggtgtaggggatccctatgtgcccctcatggtgctgatgtgccgggtgtgcctggaagacaagcccatcaagcccctgccttgctgcaagaag

SEQ ID NO: 400325 - DNA, 120 bp, Artificial Sequence
  ENSG00000146373_7 (sequence is synthesized)
gccgtgtgcgaggagtgcctcaaagtctacctgagcgcccaggtacaacttggccaagtagaaatcaaatgccccatcacagagtgttttgaattcttggaagaaacaactgttgtctat

SEQ ID NO: 400326 - DNA, 120 bp, Artificial Sequence
  ENSG00000146373_8 (sequence is synthesized)
aacttaacgcatgaagactccatcaagtataagtacttcttggaacttggccgtattgattccagcaccaagccatgtcctcagtgcaagcactttacaaccttcaagaaaaaaggacat

SEQ ID NO: 400327 - DNA, 120 bp, Artificial Sequence
  ENSG00000146373_9 (sequence is synthesized)
attcccaccccttccagatcagaaagcaaatacaaaatccagtgccctacctgccaattcgtctggtgttttaagtgccactctccttggcatgaaggtgttaactgcaaggagtacaaa

SEQ ID NO: 400328 - DNA, 120 bp, Artificial Sequence
  ENSG00000146373_10 (sequence is synthesized)
aaaggagacaaattgttgcgtcactgggccagcgaaattgagcatgggcagaggaatgcccagaagtgtccaaagtgcaagatccacatccagcgaactgaaggatgtgaccatatgacc

SEQ ID NO: 400329 - DNA, 120 bp, Artificial Sequence
  ENSG00000146373_11 (sequence is synthesized)
tgctcacaatgtaacactaatttttgttaccgatgtggtgagagataccgccagctccgattttttggagaccacacatcaaacctcagtatatttggatgcaaatatcgctacctccca

SEQ ID NO: 400330 - DNA, 120 bp, Artificial Sequence
  ENSG00000146373_12 (sequence is synthesized)
gagagacctcatttaaggagattagtgcgagggtcagtctgtgctggaaaattattcattgcacctctaattatggttttgggattggcactaggggccatagcggttgtaatcggttta

SEQ ID NO: 400331 - DNA, 120 bp, Artificial Sequence
  ENSG00000146373_13 (sequence is synthesized)
tttgtatttcctatctattgcctttgtaaaaaacagagaaaacgatcacggacaggtatgcactggtaacatgcagatgatttcatccagctaagctggttggagtaggagcgataccaa

SEQ ID NO: 400332 - DNA, 120 bp, Artificial Sequence
  ENSG00000146373_14 (sequence is synthesized)
agggtacacccatctgtgagtcacatcttgaaaaacactgagaggaaccttctaccatctcatctcccagtgattctccgtgggccacaatgcctctagctatggtgcactcccaacatg

SEQ ID NO: 400333 - DNA, 120 bp, Artificial Sequence
  ENSG00000146373_15 (sequence is synthesized)
gtatcctgtcctttccctaaacaaattgctgctgcttttaaaaaatggtcactttcataaactataaacatctatatcataactctgacctttgtggttcttggaagaagatattttaag

SEQ ID NO: 400334 - DNA, 120 bp, Artificial Sequence
  ENSG00000146373_16 (sequence is synthesized)
aaccagttatcctaagaattctgagcacgcctcttctgagaattgcttggactgtctttgaactctgcacctccttccaggccatcttgtgagacttggtgttaatagctgaagtcctat

SEQ ID NO: 400335 - DNA, 120 bp, Artificial Sequence
  ENSG00000146373_17 (sequence is synthesized)
ctgtaccaacaagcaaggccacttttcagaagataagagttcactgaatgcacctattataatctgtggccccagcagtataattcttttatctttcaaatgttataattgcaaaaaatc

SEQ ID NO: 400336 - DNA, 120 bp, Artificial Sequence
  ENSG00000146373_18 (sequence is synthesized)
tcaatgtccaaaagggaatgagtgaaactaaattaatgagaagaatattaagttactgaagtgtatatgcgtaggggcgtgaatgtgtgtgtatataaatatgtattaaaactaggccca

SEQ ID NO: 400337 - DNA, 120 bp, Artificial Sequence
  ENSG00000146373_19 (sequence is synthesized)
gtaaccttgtacttacccagttccatgccgctacactatttttccacattttcatagacctattgaaagatgatggctcctttgtggacataatttagcaatgtattaaattaaagtcaa

SEQ ID NO: 400338 - DNA, 120 bp, Artificial Sequence
  ENSG00000146373_20 (sequence is synthesized)
tgtagacaacaggccatttcgatactgaacttttctatttcttgctctttctttttgtcacacaaacacagaaatttgtgcaacgtcaccccaaggagtattaagctttgtaaactgaca

SEQ ID NO: 400339 - DNA, 120 bp, Artificial Sequence
  ENSG00000146373_21 (sequence is synthesized)
aaactggctgcttttaggaaattctcaagacacaaatattcagtctttttaaaattcttacattttggaaaacatgcttcactctatagatagatccttcacattgggattatttaatcc

SEQ ID NO: 400340 - DNA, 120 bp, Artificial Sequence
  ENSG00000146373_22 (sequence is synthesized)
caaaaacaagtttgctgtagacaactgcttaagcctttaaaaaattcctattctgctaattttttaaccaacttgtaattatagataattctgctttaggtcaaggtcttacatcattta

SEQ ID NO: 400341 - DNA, 120 bp, Artificial Sequence
  ENSG00000146373_23 (sequence is synthesized)
atatcctaaccttgttatctcttgcctcctcctctctgtttttatttgttttcaaggtttttcataaaaacaaatactagttttgaaggattttttcttacatttaactgctcaaacata

SEQ ID NO: 400342 - DNA, 120 bp, Artificial Sequence
  ENSG00000146373_24 (sequence is synthesized)
atatttttggggacaccttcttatggaggagtttgaaaactttttatgttcttgagtttgtccaatatcagctgcttttgggaaaggaaacaaaaaagtgaaggaaatattttcaggaag

SEQ ID NO: 400343 - DNA, 120 bp, Artificial Sequence
  ENSG00000146373_25 (sequence is synthesized)
tttttctcaacctacaaaagctttaaaaataagaaattgacaagtaactagactatgatatgcctttgctttcatcacaaaagttcatcagcaaacaggaaaaaaaaagacccctaaaaa

SEQ ID NO: 400344 - DNA, 120 bp, Artificial Sequence
  ENSG00000146373_26 (sequence is synthesized)
gcctaaagctttaaattgtctccaaattcttaaaattagtcatctgtcttagatgtacatttatttgtcagcaaccttgtctgatttgaaatagatgatatgataaaacatgcattaaca

SEQ ID NO: 400345 - DNA, 120 bp, Artificial Sequence
  ENSG00000146373_27 (sequence is synthesized)
tgagtagtttatttttgttgggctccagagtgtaagaatattttattttttgtttgacataaaaagtgaagttgacttgcgtgaataacaatccagcatgctttcattctttctgaataa

SEQ ID NO: 400346 - DNA, 120 bp, Artificial Sequence
  ENSG00000146373_28 (sequence is synthesized)
cacagaataactgtgctacagcttctggattagttgtctatttccagttagaggagtgtgtgacatttatggtttgggaatagcatatttctaaagcataatataatacaagaaatagtg

SEQ ID NO: 400347 - DNA, 120 bp, Artificial Sequence
  ENSG00000146373_29 (sequence is synthesized)
atgctctgttttcacaaatttatcttttcattcacccatccatccatttaacagatatttattgagtgcctatcttaggtgtaatagtatttaagactgaaagaaggagaatttctaacc

SEQ ID NO: 400348 - DNA, 120 bp, Artificial Sequence
  ENSG00000146373_30 (sequence is synthesized)
tgtcataagagtaaggtttcgtaaattcatctttcctgaacttaggcattagtttggcaatatgtgaatatgatgaactctaaacctagctgatctgtatatgtatgatgtatatatgtc

SEQ ID NO: 400349 - DNA, 120 bp, Artificial Sequence
  ENSG00000146373_31 (sequence is synthesized)
atatgtatgatatatatgaaatattcccataactgcatatgaacacatatgccatatacatatataccaacgggctgaataacatactcttttgtcttggataatctgttttctgggtta

SEQ ID NO: 400350 - DNA, 120 bp, Artificial Sequence
  ENSG00000146373_32 (sequence is synthesized)
tgtatctgttgtctttggcctactcagggatttttatttctttaaataacttatcttttggacatatttttatattatttggaaaactttccaatattcctgttacaaagtggtgtctgt

SEQ ID NO: 400351 - DNA, 120 bp, Artificial Sequence
  ENSG00000146373_33 (sequence is synthesized)
tttcagtgatggctatttcatcagtgcttgaaatagtgtgcactgtgttgcacaggtttttcatttttctattgagtagatatttttaaattaacatacacatttttctctttaaagggt

SEQ ID NO: 400352 - DNA, 120 bp, Artificial Sequence
  ENSG00000146373_34 (sequence is synthesized)
catatctattaggcctttccctgctggtaacttaaaatgattatttgtgaattttttactaagtttcatcaagatcttaaaaagagagaagaaaataaaaagtattatttatatgtcagt

SEQ ID NO: 400353 - DNA, 120 bp, Artificial Sequence
  ENSG00000146373_35 (sequence is synthesized)
gccaactttgaaggtaaaacagtagtagtaacttttgggagaaattctaaaaactactttaaaaagaagcgtgcacataaaataaatatctttctatccaaggcttgtcattttatatgc

SEQ ID NO: 400354 - DNA, 120 bp, Artificial Sequence
  ENSG00000146373_36 (sequence is synthesized)
ttttattgtaaatttaatatatactactttaaaaaattgaactatacagaatttataaaatacaactttctctacttaccccacctcttattttctaggggtaaccactgttaatggttt

SEQ ID NO: 400355 - DNA, 120 bp, Artificial Sequence
  ENSG00000146373_37 (sequence is synthesized)
ggtatgtgtccttccagacactttctacaaatatacaaataagtgtgtttgtgtatgtgtctgtgtgtgtattcattttatacaaatagaaaaatattcttactgtgctgtgactctttg

SEQ ID NO: 400356 - DNA, 120 bp, Artificial Sequence
  ENSG00000146373_38 (sequence is synthesized)
tcattttattatatattaatagatacctttccataagcgtttaaatagatttacctcattcttttataaattactgcataatccattgtaggagtatactttaacttattgaattagtcc

SEQ ID NO: 400357 - DNA, 120 bp, Artificial Sequence
  ENSG00000146373_39 (sequence is synthesized)
cctgttgaatggactacaagattattttcacttctctattacaaagaaagcaagagtgaagacccttttgcatatatttttgtcaccttgcatgaacatatccataaggttgtacatttg

SEQ ID NO: 400358 - DNA, 120 bp, Artificial Sequence
  ENSG00000146373_40 (sequence is synthesized)
ttttttacaagatctttgtaataaacattttaatgtaatttcaggagatgaggtcatagagataatatgagacccttttttggataaaaagaaagattgtacaggagtgcataattttta

SEQ ID NO: 400359 - DNA, 120 bp, Artificial Sequence
  ENSG00000146373_41 (sequence is synthesized)
aagaaaatcgtcttttgaagggtaatttcctttctgcctgattagccaaataaataccttgccaaaacttacaataggaaattttttttcaataaaaataaaatttgaggagatgtgtgt

SEQ ID NO: 400360 - DNA, 120 bp, Artificial Sequence
  ENSG00000146373_42 (sequence is synthesized)
cagataatgtgagagagatgaattgacttttggattgcctcattttaaaacttgagggatttaaatcaaatacccaagccaaattggtgatacttttcgcatttttagtaacactatcca

SEQ ID NO: 400361 - DNA, 120 bp, Artificial Sequence
  ENSG00000146373_43 (sequence is synthesized)
cttttgtgtatgttgcttgacagaggaacttaattatgccattgtgaaaagtaggaaagaatatgttggcaattataaatgcccacagcaattcccagaaaaatacattagattatgtac

SEQ ID NO: 400362 - DNA, 120 bp, Artificial Sequence
  ENSG00000146373_44 (sequence is synthesized)
gatttagtgatttggtgggataattataaatcgtggaataatttatatatgtggagtaagaagagaggggtcaaaccttttggtacaagcaacatcttgttgccaccaccttgattttct

SEQ ID NO: 400363 - DNA, 120 bp, Artificial Sequence
  ENSG00000146373_45 (sequence is synthesized)
cataggtgctattgtgtcctaagagtagaacagacaagaaaacaaagataattaaacacaagtcaggttacaacatgatatctttaattgtactttctctgctgtggtatcaagattcag

SEQ ID NO: 400364 - DNA, 120 bp, Artificial Sequence
  ENSG00000146373_46 (sequence is synthesized)
tggtgcttgtcagaaaataccttgttctgtgactctgactatctcttgagtcccaaggctccaattgagcctttatctttcaaccttaccacccaagtatatgaccaactgttctcctaa

SEQ ID NO: 400365 - DNA, 120 bp, Artificial Sequence
  ENSG00000146373_47 (sequence is synthesized)
cttcaacctcatttttctccatacctctgctattctaactattcctcttcactgaaggagaagaggagagacaggaggggcctaaaaactcactctggtatgtgggaaacattagaattc

SEQ ID NO: 400366 - DNA, 120 bp, Artificial Sequence
  ENSG00000146373_48 (sequence is synthesized)
cttcctgacctttgtcaaatgagggcacatctgccaagacatcagtccagcttctcccttgttaaatgaaattgtttttaacattacacttttatactggctgttacattagaattacaa

SEQ ID NO: 400367 - DNA, 120 bp, Artificial Sequence
  ENSG00000146373_49 (sequence is synthesized)
aaaagttagtggcctctataaccttaattggcatactttactacaaaaataagaaaatgtatgccaaaaaacgtttttagattttaattttataagcaacctgcacataagccttaatgt

SEQ ID NO: 400368 - DNA, 120 bp, Artificial Sequence
  ENSG00000146373_50 (sequence is synthesized)
gagtcttcacattggattatatttttattctcccatatttgtggctgaaatctctcccaactattgagagtgatctttcccatggtctgctttattgttttgtgttaatatctattataa

SEQ ID NO: 400369 - DNA, 120 bp, Artificial Sequence
  ENSG00000146373_51 (sequence is synthesized)
atatagccttaaaattttgtaatgcactttaaaatatttgtgccatttaaataatgacaaagcaatcaatgcatacatttcaatggagacagtatacaaagttaaagcaactgatacata

SEQ ID NO: 400370 - DNA, 120 bp, Artificial Sequence
  ENSG00000146373_52 (sequence is synthesized)
tatttcagtggagacagtaggataacagtgttagcaaatatgtgtcatctctttaaatttgggaggaatcagaagctaaagatttaaaacaaataaaacatacctgaagaaaagtagcaa

SEQ ID NO: 400371 - DNA, 120 bp, Artificial Sequence
  ENSG00000146373_53 (sequence is synthesized)
tttctgaaattgtagtaatcttggaatggttatcaaacctagcaaataatacttaataagtgttacctaatatacctaattggaatgtttgtttaaaatattaaattaatttatactgaa

SEQ ID NO: 400372 - DNA, 120 bp, Artificial Sequence
  ENSG00000146373_54 (sequence is synthesized)
agttttaactgcaatttcataattcatgaattctataaaagaaatctccctcactaaaaatatgatcaatcaaaactaccagttttgcacaccaatcccaagtttaagcatattttgtat

SEQ ID NO: 400373 - DNA, 120 bp, Artificial Sequence
  ENSG00000146373_55 (sequence is synthesized)
ttgcacaccaatcccaagtttaagcatattttgtatttaaagttataatttaattatgatactgtccccctaatatggaaaataagttacaaaattcttttttttttttttttttttttg

SEQ ID NO: 400374 - DNA, 120 bp, Artificial Sequence
  ENSG00000146373_56 (sequence is synthesized)
caaactcttgggctcaagcgatcctccctcctctgcctctggagtagctgggattacaagcacgtgcctactatgcctgtcttcaaaatcacattgttaatttttatagccacaattatt

SEQ ID NO: 400375 - DNA, 120 bp, Artificial Sequence
  ENSG00000146373_57 (sequence is synthesized)
aatttgataaaacaaataattttatagaagcattaaagtattatcagaacaaaatcagagttccaaaatttggggagtattttaagattgtgaaatgttaccttttggatgcaaaccaat

SEQ ID NO: 400376 - DNA, 120 bp, Artificial Sequence
  ENSG00000146373_58 (sequence is synthesized)
gatacaaatctttaagaaagaattacagtgggactcctttgaaactctgattttgaaaatagaacaaatacacatttcatagccaaactttgtgtgggacttctattgttactaattgta

SEQ ID NO: 400377 - DNA, 120 bp, Artificial Sequence
  ENSG00000146373_59 (sequence is synthesized)
aggctgtaactttggttgacttcatccaaatccaagaaacagagtcacagtagtgagactattctcattgcttctttggagcattagctgaagctttaccatatcacataccttacaaaa

SEQ ID NO: 400378 - DNA, 120 bp, Artificial Sequence
  ENSG00000146373_60 (sequence is synthesized)
tccctatacatattgccagttttaaaagaatgtaattatgcatgttacaaactatatatatctttttggctagagaagtgactattttagaataacagtatgaatgtaaaaggcaataat

SEQ ID NO: 400379 - DNA, 120 bp, Artificial Sequence
  ENSG00000146373_61 (sequence is synthesized)
tttttttaaatacacaaaacattgccattgcccttttttgtcacttccttttttcttctaaaaattttcatttggtgtatctaactttgtatcacttaaattattcagacttactaagat

SEQ ID NO: 400380 - DNA, 120 bp, Artificial Sequence
  ENSG00000146373_62 (sequence is synthesized)
aaaaaatactttttttcagttctgtgctatattctgtcactctattccattattaatactaaatgactttccttgtgaaatgatacccacatactacaacatcaagctcctttttctctt

SEQ ID NO: 400381 - DNA, 120 bp, Artificial Sequence
  ENSG00000146373_63 (sequence is synthesized)
aaatttcctaattatcttgatttttgcctctgcagtcttcttcccatcttggccaagtgtgggataaattctgtctcgcccgtaactcctttcactgtaatgaaatgaattcaacactga

SEQ ID NO: 400382 - DNA, 120 bp, Artificial Sequence
  ENSG00000146373_64 (sequence is synthesized)
acgcactccagaatttagctctggtagtgagcataatttaccttggcttattttatttgtaaatggaaatgtatcaggagtgcctggaacacttttccctcttgataggagttggagaac

SEQ ID NO: 400383 - DNA, 120 bp, Artificial Sequence
  ENSG00000146373_65 (sequence is synthesized)
actgcctagccctctgccaagaagtaagtcaagcaaatgaagataccagttggatcagagggcctaataatagtctaaaaccaagcttcagaaattgcttcgtgactgttgtaagatcaa

SEQ ID NO: 400384 - DNA, 120 bp, Artificial Sequence
  ENSG00000146373_66 (sequence is synthesized)
tattgtgtttgcgtattagttggacagaaagcatgtgtggacattcatccaacctgaccccaggtcattcattctccatccaaaaagggttataggtatggtttatggtctttgtttcag

SEQ ID NO: 400385 - DNA, 120 bp, Artificial Sequence
  ENSG00000146373_67 (sequence is synthesized)
caaaacgtcctacagcttggacttggggtggatttatatagtgtagcatttgtatataagattcaattatggattcatgctctgtgaacattgttagatttttaataatctaaagtaggt

SEQ ID NO: 400386 - DNA, 120 bp, Artificial Sequence
  ENSG00000146373_68 (sequence is synthesized)
cacattgaatgtaactgatattaaccctattctagagaaaacatttgtcatttgcaagtgtttgacttttttattgatatgatttagatatgccacactcaatatatttagtatagattc

SEQ ID NO: 400387 - DNA, 120 bp, Artificial Sequence
  ENSG00000146373_69 (sequence is synthesized)
agtacataacaggaaagaaaaagggagagacagacttgagtgttaaaggaccccagaaattgctgaaatgtccttttagattcttgtggctggcaagctatgctgtcattggttctctgc

SEQ ID NO: 400388 - DNA, 120 bp, Artificial Sequence
  ENSG00000146373_70 (sequence is synthesized)
gaatctgtgatgtgttcacttcgccatgccccagcttgggaaatattcttagtaatccaatcaaatccttaaaaacagcatttttgtgaatgtattacttcttcaatatccccatatatt

SEQ ID NO: 400389 - DNA, 120 bp, Artificial Sequence
  ENSG00000146373_71 (sequence is synthesized)
tccccatatatttgtattgtttcaagccactagtatctaaatttttgatataaatatctaaattctttcattttatagaaaattagcatgctttatgtttctttataatgaaaagtctag

SEQ ID NO: 400390 - DNA, 120 bp, Artificial Sequence
  ENSG00000146373_72 (sequence is synthesized)
aatttcattatcagctgacaagaaacccttctaagacccatttttttaagtgtcatatggcaactcctcaatagcttacttttattatttgatcattttcatcacaattgcaatcctcta

SEQ ID NO: 400391 - DNA, 120 bp, Artificial Sequence
  ENSG00000146373_73 (sequence is synthesized)
gagggtattttaaaaagtagaccaaccttatgtttcacgtgaaacatagaataataattagtttgtatatatataaaaccatttaccttgacaaggacaatctgttacagatttttaata

SEQ ID NO: 400392 - DNA, 120 bp, Artificial Sequence
  ENSG00000146373_74 (sequence is synthesized)
tgaaaattgacaattttgttgcttttagaagcaattaacatagtaattagtaaattctgagagatgacagaaatgattttctgtagaaggaacacaacagtgatgttaaaatgttaacaa

SEQ ID NO: 400393 - DNA, 120 bp, Artificial Sequence
  ENSG00000146373_75 (sequence is synthesized)
agaaccagttgttttgattctattttaaacaaaattgtaaggcaattttatgaaacaaacatttatatcaatgtatatctatttcaaaactgtgggacaattattcattcttttcccaaa

SEQ ID NO: 400394 - DNA, 120 bp, Artificial Sequence
  ENSG00000146373_76 (sequence is synthesized)
tagagtaaaatattaaagagaaaaaaattcgagtgtttatctgttattactgtatattcagaaattacagttctaaggaattattgtcatcctctaagtatcagaatgtattccatttta

SEQ ID NO: 400395 - DNA, 120 bp, Artificial Sequence
  ENSG00000146373_77 (sequence is synthesized)
attatattctccttaacaatagaaaattagaagaaatttcttgatcataagatgaatagtaatttgtaccagatcttgtccatcatttcattagattgcatatttttagttttctataaa

SEQ ID NO: 400396 - DNA, 120 bp, Artificial Sequence
  ENSG00000146373_78 (sequence is synthesized)
atttgcagccattttccaaataaagtaagttataatatttttcaagtttaaaatggaccgggttgaaaagagatttcattgattctttttaatgatattggaaaatatttatgcaatttt

SEQ ID NO: 400397 - DNA, 120 bp, Artificial Sequence
  ENSG00000146373_79 (sequence is synthesized)
attttttaaccttttctccatttcattagttatactattaactttgataatcacaaaactatgtggaagaaatcattctgattatattttatgaaagagaggggtagagtaaatttttta

SEQ ID NO: 400398 - DNA, 120 bp, Artificial Sequence
  ENSG00000146373_80 (sequence is synthesized)
attagacaatgttgatatgcagaaatctctcaaaagaaattgcaaaggaaaaattacgttgagatgaaatgttgagaaataaggagtatcttaaaaacctaatttcttacactttttaga

SEQ ID NO: 400399 - DNA, 120 bp, Artificial Sequence
  ENSG00000146373_81 (sequence is synthesized)
gcaatcaacttatttccaaattattatttcatgctgttgtttccatgaattgtgtttttagcatagtatatacttttctaccacgttagcatttacactctaattactgaaaataaagga

SEQ ID NO: 400400 - DNA, 120 bp, Artificial Sequence
  ENSG00000146373_82 (sequence is synthesized)
agaagttggtgaataaaagccagggaaactgggtttattctcattttccaatagcactaatgtataatccctttaaccttccatatggtgctttgtgtgatgagtatataacattcatat

SEQ ID NO: 400401 - DNA, 120 bp, Artificial Sequence
  ENSG00000146373_83 (sequence is synthesized)
acgttattagtgccttatttttttcacttgactttatttcttatctaaagagccatatattttttgtgagtgttctttggtccctctatttaaagtgctaaggagaaagcatatctttag

SEQ ID NO: 400402 - DNA, 120 bp, Artificial Sequence
  ENSG00000146373_84 (sequence is synthesized)
ggatgtatataggctgcgtttgctaccttaatctactgtattatctctaaaacaggttagccaatgtatttttcttaaattcattgttcatttttaagctaacctatacaaatggatatt

SEQ ID NO: 400403 - DNA, 120 bp, Artificial Sequence
  ENSG00000146373_85 (sequence is synthesized)
aaacaccagaaattaaagccattaaaattgaattgtactttaaaaccataaaaaatgctaattaagtttagaacaggagttgaaatgactctcagttttatctatagctccaattaggac

SEQ ID NO: 400404 - DNA, 120 bp, Artificial Sequence
  ENSG00000146373_86 (sequence is synthesized)
aaaattactttacaaaaagcattaaaaataaaagtaactgtatggtacttcaggaatttgaccagttccttacaacttattcttggcaatattttgtcagtaatatactttcatacagat

SEQ ID NO: 400405 - DNA, 120 bp, Artificial Sequence
  ENSG00000146373_87 (sequence is synthesized)
gctagagaaccatggtgtctgctatttacatgttatttgttcccagtgagctttatcaacatcaaccctgtttatataatatgttattttgctcttcttgatctgtgccttttgttttag

SEQ ID NO: 400406 - DNA, 120 bp, Artificial Sequence
  ENSG00000146373_88 (sequence is synthesized)
ctttatacaaaatgctaggtttgttatattctttatgtatcataatatataattcaacttttcctgatgaatgtatgctgaataattaaactaaaccatgtgcttagaaaagacaaagac

SEQ ID NO: 400407 - DNA, 120 bp, Artificial Sequence
  ENSG00000146373_89 (sequence is synthesized)
aggttgtatatgcagttatgtgtaaatatttgacaaagaaaaaaaaaggaaaagaatcttcctgccaacaggtaggtcctgctggacaggacctgaaaattaagagatttttttttttaa

SEQ ID NO: 400408 - DNA, 120 bp, Artificial Sequence
  ENSG00000146373_90 (sequence is synthesized)
gcagtgaaatttaaaaatctattacctcaagaattttcagtcgatatgtcaatgtactgttccttctcagtaagtacagtgtcacatgctgctggcggtaaaagcaacccaagtgtcaga

SEQ ID NO: 400409 - DNA, 120 bp, Artificial Sequence
  ENSG00000146373_91 (sequence is synthesized)
tcacacaaattttagggacaagtctttcaaaagacggacaccttgtgatattttggagtctaatttccgacttttcgtaatgtcccaatgaccttttgttgtggttgggcttttataaaa

SEQ ID NO: 400410 - DNA, 120 bp, Artificial Sequence
  ENSG00000146373_92 (sequence is synthesized)
aattattttcggttggttgttgtagaatggaagagtaatcttaattatgaaatcagattgcatggaagaatataaagacactcactcggatgaaaactataacggttttcaaactatttt

SEQ ID NO: 400411 - DNA, 120 bp, Artificial Sequence
  ENSG00000146373_93 (sequence is synthesized)
gatggtcattgtacgagctattgtatggattactgtggagtgctgtttaccacatgatgtgtgcaatacatcatgcaatgttatttagcaatgcgtaataaaagtttttaaaagagaaaa

SEQ ID NO: 400412 - DNA, 120 bp, Artificial Sequence
  ENSG00000146373_94 (sequence is synthesized)
tatattgtacaaaaagcacaagtcttccaatccaagaaggagaagacacttaattacatgttttgaggaagcgaaaggctgccactcaaacttaggtctagagattacagccaaactcag

SEQ ID NO: 400413 - DNA, 120 bp, Artificial Sequence
  ENSG00000146373_95 (sequence is synthesized)
agccaaactcagcctcatctacttgtaaggaaatcaagaggaatttggcttaggaaagctatgatttgatttgatttactgttaagtttttttttgtttgtttgtttgttttgagacgga

SEQ ID NO: 400414 - DNA, 62 bp, Artificial Sequence
  ENSG00000146373_96 (sequence is synthesized)
tacaacttggccaagtagaaatcaaatgccccatcacagagtgttttgaattcttggaagaa

SEQ ID NO: 400415 - DNA, 120 bp, Artificial Sequence
  ENSG00000146373_97 (sequence is synthesized)
atttagtatacagaggaggacacaaacatgagaagattaaggtagagagtgaaatatggtcaggacaaatgtgaatttagagcctgagtgatggtttagtggatttatgtcctcacttgt

SEQ ID NO: 400416 - DNA, 120 bp, Artificial Sequence
  ENSG00000146373_98 (sequence is synthesized)
cactaatgaaaaggaccttacaggttatataattaaagctctgttgacattggctcttgaaggcaaacttcataatgaggggaagagtcaagttttgtgtaacctgaagcatatacagtg

SEQ ID NO: 400417 - DNA, 120 bp, Artificial Sequence
  ENSG00000146373_99 (sequence is synthesized)
ggagcataaaagtccattgccagcacttgagtaaagataaagagtaggagaatcaaagctgttgtataattagttctcttctcatccacacccataaaccagttcaagaaagggatgaag

SEQ ID NO: 400418 - DNA, 120 bp, Artificial Sequence
  ENSG00000146373_100 (sequence is synthesized)
ttgccagcacttgagtaaagataaagagtaggagaatcaaagctgttgtataattagttctcttctcatccacacccataaaccagttcaagaaagggatgaaggtacaacttggccaag

SEQ ID NO: 400419 - DNA, 120 bp, Artificial Sequence
  ENSG00000146373_101 (sequence is synthesized)
cagatcagaaagcaaatacaaacaaaatggcaggatgaagtggtttcaaaggctgtttggagtcatctccatttaaggtaaggagagcactgacatggataccccagccaaccaatcgtg

SEQ ID NO: 400420 - DNA, 120 bp, Artificial Sequence
  ENSG00000146373_102 (sequence is synthesized)
ttaaccctgtaggtttccttctctttgtttcaagcttaattaggtagtaaaaatgttgtgtttaatacttttatgtgtgtgtagctggtggagagattttccttatcagctcaattcccc

SEQ ID NO: 400421 - DNA, 120 bp, Artificial Sequence
  ENSG00000146373_103 (sequence is synthesized)
atattgaactgaaatcaccaaattactttcctatgccaccagcaacgtgtccattgccagcacttgagtaaagataaagagtaggagaatcaaagctgttgtataattagttctcttctc

SEQ ID NO: 400422 - DNA, 120 bp, Artificial Sequence
  ENSG00000146373_104 (sequence is synthesized)
acacccataaaccagttcaagaaagggatgaaggtaaagtacatagatgaagaagccacatttatttgtgctgcaggagcccttgtaatctcttcaaaacacctcctgtgaagccctctc

SEQ ID NO: 400423 - DNA, 120 bp, Artificial Sequence
  ENSG00000146373_105 (sequence is synthesized)
acagacatagagcctggaagagtagattttttcactttccttgagtataagtgattttctttcagatggtgccatctctttctagaaagaatgtaagaaggcagaaaaaaaaaagaaaaa

SEQ ID NO: 400424 - DNA, 61 bp, Artificial Sequence
  ENSG00000146373_106 (sequence is synthesized)
gcccctgccttgctgcaagaaggccgtgtgcgaggagtgcctcaaagtctacctgagcgcc

SEQ ID NO: 400425 - DNA, 120 bp, Artificial Sequence
  ENSG00000146374_0 (sequence is synthesized)
actggagcgtctcctgctcgcgcacgccagaagcagctcggggtctctccgccgccccttggccatggccgctgtgccgacggcgcccgctcccctgcgctccaggggcccccgccgctg

SEQ ID NO: 400426 - DNA, 80 bp, Artificial Sequence
  ENSG00000146374_1 (sequence is synthesized)
gctgcagccgccgccgccgccgctcgcccgcccggatcccgcctgcggcagttgccgcacaacatgctacctgcggccgc

SEQ ID NO: 400427 - DNA, 120 bp, Artificial Sequence
  ENSG00000146374_2 (sequence is synthesized)
cccggcggctcctggaaccccggttcgcggcgatgccagccaccccagcgaagccgccgcagttcagtgcttggataatttgaaagtacaatagttggtttccctgtccacccgccccac

SEQ ID NO: 400428 - DNA, 120 bp, Artificial Sequence
  ENSG00000146374_3 (sequence is synthesized)
ttcgcttgccatcacagcacgcctatcggatgtgagaggagaagtcccgctgctcgggcactgtctatatacgcctaacacctacatatattttaaaaacattaaatataattaacaatc

SEQ ID NO: 400429 - DNA, 120 bp, Artificial Sequence
  ENSG00000146374_4 (sequence is synthesized)
aaaagaaagaggagaaaggaagggaagcattactgggttactatgcacttgcgactgatttcttggctttttatcattttgaactttatggaatacatcggcagccaaaacgcctcccgg

SEQ ID NO: 400430 - DNA, 120 bp, Artificial Sequence
  ENSG00000146374_5 (sequence is synthesized)
ggaaggcgccagcgaagaatgcatcctaacgttagtcaaggctgccaaggaggctgtgcaacatgctcagattacaatggatgtttgtcatgtaagcccagactattttttgctctggaa

SEQ ID NO: 400431 - DNA, 120 bp, Artificial Sequence
  ENSG00000146374_6 (sequence is synthesized)
agaattggcatgaagcagattggagtatgtctctcttcatgtccaagtggatattatggaactcgatatccagatataaataagtgtacaaaatgcaaagctgactgtgatacctgtttc

SEQ ID NO: 400432 - DNA, 120 bp, Artificial Sequence
  ENSG00000146374_7 (sequence is synthesized)
aacaaaaatttctgcacaaaatgtaaaagtggattttacttacaccttggaaagtgccttgacaattgcccagaagggttggaagccaacaaccatactatggagtgtgtcagtattgtg

SEQ ID NO: 400433 - DNA, 120 bp, Artificial Sequence
  ENSG00000146374_8 (sequence is synthesized)
cactgtgaggtcagtgaatggaatccttggagtccatgcacgaagaagggaaaaacatgtggcttcaaaagagggactgaaacacgggtccgagaaataatacagcatccttcagcaaag

SEQ ID NO: 400434 - DNA, 120 bp, Artificial Sequence
  ENSG00000146374_9 (sequence is synthesized)
ggtaacctgtgtcccccaacaaatgagacaagaaagtgtacagtgcaaaggaagaagtgtcagaagggagaacgaggaaaaaaaggaagggagaggaaaagaaaaaaacctaataaagga

SEQ ID NO: 400435 - DNA, 120 bp, Artificial Sequence
  ENSG00000146374_10 (sequence is synthesized)
gaaagtaaagaagcaatacctgacagcaaaagtctggaatccagcaaagaaatcccagagcaacgagaaaacaaacagcagcagaagaagcgaaaagtccaagataaacagaaatcggta

SEQ ID NO: 400436 - DNA, 120 bp, Artificial Sequence
  ENSG00000146374_11 (sequence is synthesized)
tcagtcagcactgtacactagagggttccatgagattattgtagactcatgatgctgctatctcaaccagatgcccaggacaggtgctctagccattaggaccacaaatggacatgtcag

SEQ ID NO: 400437 - DNA, 120 bp, Artificial Sequence
  ENSG00000146374_12 (sequence is synthesized)
ttattgctctgtctaaacaacattcccagtagttgctatattcttcatacaagcatagttaacaacaaagagccaaaagatcaaagaagggatactttcagatggttgtcttgtgtgctt

SEQ ID NO: 400438 - DNA, 120 bp, Artificial Sequence
  ENSG00000146374_13 (sequence is synthesized)
ctctgcatttttaaaagacaagacattcttgtacatattatcaataggctataagatgtaacaacgaaatgatgacatctggagaagaaacatcttttccttataaaaatgtgttttcaa

SEQ ID NO: 400439 - DNA, 120 bp, Artificial Sequence
  ENSG00000146374_14 (sequence is synthesized)
gctgttgttttaagaagcaaaagatagttctgcaaattcaaagatacagtatcccttcaaaacaaataggagttcagggaagagaaacatccttcaaaggacagtgttgttttgaccggg

SEQ ID NO: 400440 - DNA, 120 bp, Artificial Sequence
  ENSG00000146374_15 (sequence is synthesized)
agatctagagagtgctcagaattagggcctggcatttggaatcacaggatttatcatcacagaaacaactgttttaagattagttccatcactctcatcctgtatttttataagaaacac

SEQ ID NO: 400441 - DNA, 120 bp, Artificial Sequence
  ENSG00000146374_16 (sequence is synthesized)
aagagtgcataccagaattgaatataccatatgggattggagaaagacaaatgtggaagaaatcatagagctggagactacttttgtgctttacaaaactgtgaaggattgtggtcacct

SEQ ID NO: 400442 - DNA, 120 bp, Artificial Sequence
  ENSG00000146374_17 (sequence is synthesized)
ggaacaggtctccaatctatgttagcactatgtggctcagcctctgttaccccttggattatatatcaacctgtaaacatgtgcctgtaacttacttccaaaaacaaaatcatacttatt

SEQ ID NO: 400443 - DNA, 120 bp, Artificial Sequence
  ENSG00000146374_18 (sequence is synthesized)
agaagaaaattctgattttatagaaaaaaaatagagcaaggagaatataacatgtttgcaaagtcatgtgttttctttctcaatgagggaaaaacaattttattacctgcttaatggtcc

SEQ ID NO: 400444 - DNA, 120 bp, Artificial Sequence
  ENSG00000146374_19 (sequence is synthesized)
acctggaactaaaagggatactattttctaacaaggtatatctagtaggggagaaagccaccacaataaatatatttgttaatagtttttcaagttttgttcactctgttttattgtttg

SEQ ID NO: 400445 - DNA, 120 bp, Artificial Sequence
  ENSG00000146374_20 (sequence is synthesized)
cttactcttagagactcatgaattaagaaagagaattctgctaactcagagaacctggttcctatgtaattcagaatatattacatttctcagtaatatttgttttttgaatccaccttt

SEQ ID NO: 400446 - DNA, 120 bp, Artificial Sequence
  ENSG00000146374_21 (sequence is synthesized)
atctgagccaatggagatttacttatagcgtattaggagatatttattccattttcttattttaatcaacattctaattatagacacatgggcctccctagctgatttcactgctccccc

SEQ ID NO: 400447 - DNA, 120 bp, Artificial Sequence
  ENSG00000146374_22 (sequence is synthesized)
ttcattgcttagaaatgggcatcatttcttgtatgtcagatccccctgcatcttcaacatttagtcttttcttctccatattttctatctgtggatctctttaggggattgaagtcaccc

SEQ ID NO: 400448 - DNA, 120 bp, Artificial Sequence
  ENSG00000146374_23 (sequence is synthesized)
tagctgaaggcctcaccagtgtttcacagaggacacagcccaccccttgcaggaggaggtatctctgagtgtgcagcacagaatcgcatgacccaccttaaccttcctgttgtcatggaa

SEQ ID NO: 400449 - DNA, 120 bp, Artificial Sequence
  ENSG00000146374_24 (sequence is synthesized)
ggatgcacggctgctctgtccactgtgattcctagccctctcaagatcactgctttctgaagaatttgcaatgactctggcttctggctgcttatctctggacacccgttctccaccagt

SEQ ID NO: 400450 - DNA, 120 bp, Artificial Sequence
  ENSG00000146374_25 (sequence is synthesized)
tgtacagttcatgtaatctacttggcttaattgattttccacttctctcttcctcttctaagatataaacattttaaatgatttattcctgtttcttattctggtgtttctttccttgtc

SEQ ID NO: 400451 - DNA, 120 bp, Artificial Sequence
  ENSG00000146374_26 (sequence is synthesized)
cctatgagataagtgtctcaactcactaaatctattcccaatgtataaaataattctaattccattttcagctaaaacatatattaccaagaagaaacaaactttatcctacagaatgat

SEQ ID NO: 400452 - DNA, 120 bp, Artificial Sequence
  ENSG00000146374_27 (sequence is synthesized)
gttaggtagaaatatgtccccaggtttgagacctttcggatgatttcatataccatctttcttctgagtgttacccagtcaagtataagtagccaaattatttttgcacatctttctgtt

SEQ ID NO: 400453 - DNA, 120 bp, Artificial Sequence
  ENSG00000146374_28 (sequence is synthesized)
tctcatgtcttcatttattcaacaagcacttactgggaaggtctacacctgcataggcaatgctggaaaaagggttaagtaaaccaggacatgacaatggtggcaaatgactatcaggtc

SEQ ID NO: 400454 - DNA, 120 bp, Artificial Sequence
  ENSG00000146374_29 (sequence is synthesized)
ttcccatgtgtttgactcaaacttattaccctatggtccttctgacaatggcagaaggtctgaatccttgatgctaaacttatataaaagtagaattattacaaaggaaaaagaaataaa

SEQ ID NO: 400455 - DNA, 120 bp, Artificial Sequence
  ENSG00000146374_30 (sequence is synthesized)
aactaacattcattttcatatgttggatgaaatataaatgaagaaaaagataacatcaattttaactgtaattctccatccaccagtaacagatccttaagacaatagaatcatacagta

SEQ ID NO: 400456 - DNA, 120 bp, Artificial Sequence
  ENSG00000146374_31 (sequence is synthesized)
ttcaaaccagcagccttctcaaatttgagcaaaaactctatcaacctctggtaaagttcctacactagtcacagaaggtgttaactttctactctgattctgtctccataatggggtaaa

SEQ ID NO: 400457 - DNA, 120 bp, Artificial Sequence
  ENSG00000146374_32 (sequence is synthesized)
ctgttgatagtttaccccatcaacagatggtcggtaaattattgattcgaagaatcgagagagtgcagcaacataaatctgttaatgtctgatcaagctcctgccctgttctccgaattc

SEQ ID NO: 400458 - DNA, 120 bp, Artificial Sequence
  ENSG00000146374_33 (sequence is synthesized)
agcttcataattaagggaaggcctgttttctatcctcagatttaggttctagtagcagttgtgtaaccactagtgagtcacttaactcctctgggtccccatttctcatgtgcaacaaga

SEQ ID NO: 400459 - DNA, 120 bp, Artificial Sequence
  ENSG00000146374_34 (sequence is synthesized)
aagaggggaactggagatgatcactctagttccagacaagggaacatttcacactttgtttacttcagggtgatgtccctgagtcctcattagtgactgcgtcctttggaagttatccca

SEQ ID NO: 400460 - DNA, 120 bp, Artificial Sequence
  ENSG00000146374_35 (sequence is synthesized)
accctgcttttctcaaaagtgaaaatgtataggctctcagaggagacagatttaactctgcttctctaatgttattgaattaaaagctgttcacattagtggttattaaatattgaaata

SEQ ID NO: 400461 - DNA, 120 bp, Artificial Sequence
  ENSG00000146374_36 (sequence is synthesized)
acactgggaagaaaaagcatatataaatacagctaaaaacaagaatagatattcattctcacaaagggagacagcaaagaaaatggaaagtgcactggtgctagcgttagacagcttgtg

SEQ ID NO: 400462 - DNA, 120 bp, Artificial Sequence
  ENSG00000146374_37 (sequence is synthesized)
ttaatgtctcaattctgctactaactggttgcagcttgtgtgaccttgggcacattgtatgatctcgcagaatatcatcccaaatctgcaaaatggaattggcatcatctcttttgcaag

SEQ ID NO: 400463 - DNA, 120 bp, Artificial Sequence
  ENSG00000146374_38 (sequence is synthesized)
tcatctcttttgcaagattgttatgagaattaaaaggttcttcattcaatataataataaatattttgtatataaatgaatatcaattaaaagttatgactaattccacaagtcaaacat

SEQ ID NO: 400464 - DNA, 120 bp, Artificial Sequence
  ENSG00000146374_39 (sequence is synthesized)
tcaaacatataaattttatttcttgattcatgatatgtgatagtattcataaaaatgtacatgcatgataatttcaaggaataagtatatatgtgagaatcatggaaatgaaattaataa

SEQ ID NO: 400465 - DNA, 120 bp, Artificial Sequence
  ENSG00000146374_40 (sequence is synthesized)
cggccgcatccccgacacgcaccagcggagccaaagggcgcgcgaggcgatggggttcgcgtgtctgcgcgtttgcagagctgccggacgtcccccgcccgagggttgaagacagcaaaa

SEQ ID NO: 400466 - DNA, 120 bp, Artificial Sequence
  ENSG00000146376_0 (sequence is synthesized)
ctctgtgtcaggatcgcagaaagtatgtcccttctctcaccatgagctggctctccagttcccagggagtggtactaacagcctaccaccccagcggcaaggaccagaccgtcgggaaca

SEQ ID NO: 400467 - DNA, 120 bp, Artificial Sequence
  ENSG00000146376_1 (sequence is synthesized)
gccatgcaaaggcaggggaggaagccacctcgagtcgcagatatggccagtacactatgaaccaggaaagcaccaccatcaaagttatggagaagcctccatttgatcgatcaatttccc

SEQ ID NO: 400468 - DNA, 120 bp, Artificial Sequence
  ENSG00000146376_2 (sequence is synthesized)
aggattctttggatgaactatctatggaagactattggatagaactagaaaacatcaagaaatctagtgaaaacagccaagaagatcaagaggtggttgttgtcaaagagcctgatgagg

SEQ ID NO: 400469 - DNA, 120 bp, Artificial Sequence
  ENSG00000146376_3 (sequence is synthesized)
gagaattggaagaagagtggcttaaagaggccggtttatccaatctcttcggagagtctgctggagatccacaggaaagcattgtgtttttatcaacattgacgcggacccaggcagcag

SEQ ID NO: 400470 - DNA, 120 bp, Artificial Sequence
  ENSG00000146376_4 (sequence is synthesized)
cagttcagaagcgagtagagacggtctcccagaccttgaggaaaaaaaacaaacagtaccagattcctgacgtcagagacatatttgctcaacagagagaatcaaaagaaacagctccag

SEQ ID NO: 400471 - DNA, 120 bp, Artificial Sequence
  ENSG00000146376_5 (sequence is synthesized)
gtggcactgaatcgcagtcacttagaacaaatgaaaacaaataccaaggaagagatgacgaggcatctaaccttgttggtgaagagaagctgatcccacctgaggagacgcctgcccctg

SEQ ID NO: 400472 - DNA, 120 bp, Artificial Sequence
  ENSG00000146376_6 (sequence is synthesized)
aaacagacatcaacctggaggtatcatttgccgagcaagcactcaatcagaaagagagctccaaggagaaaatccagaagagcaaaggcgatgatgccacattacctagtttcagattgc

SEQ ID NO: 400473 - DNA, 120 bp, Artificial Sequence
  ENSG00000146376_7 (sequence is synthesized)
caaaagacaaaacgggtaccacaaggattggtgacctcgcaccccaggacatgaagaaagtttgccatttagccctaattgagctgactgccctctatgatgtattgggtattgagctga

SEQ ID NO: 400474 - DNA, 120 bp, Artificial Sequence
  ENSG00000146376_8 (sequence is synthesized)
aacaacaaaaagctgtgaaaatcaaaacaaaagattctggtcttttttgcgttccattgacagcgctattagaacaagatcagaggaaagtaccaggaatgcgaatacccttgatctttc

SEQ ID NO: 400475 - DNA, 120 bp, Artificial Sequence
  ENSG00000146376_9 (sequence is synthesized)
aaaaactgatttctcgaattgaagagagaggtttggaaacagaaggcctcttacggatccctggagctgccattagaatcaagaatctttgccaagaactagaagcaaagttttatgaag

SEQ ID NO: 400476 - DNA, 120 bp, Artificial Sequence
  ENSG00000146376_10 (sequence is synthesized)
ggacttttaattgggaaagtgtcaaacagcatgatgccgccagcctgctgaagctcttcattcgggagttgccccagccactgctcagtgtggagtatctcaaagcctttcaggctgtcc

SEQ ID NO: 400477 - DNA, 120 bp, Artificial Sequence
  ENSG00000146376_11 (sequence is synthesized)
agaatcttccaaccaagaagcagcaactacaggctttgaaccttcttgtcatcctcctacctgatgcaaacagggacacactgaaggcccttcttgaatttctccaaagagtaatagata

SEQ ID NO: 400478 - DNA, 120 bp, Artificial Sequence
  ENSG00000146376_12 (sequence is synthesized)
ataaagaaaaaaataaaatgacagtcatgaatgtagcaatggtcatggccccgaatctctttatgtgtcatgcattgggattgaagtccagtgaacagcgagaatttgtaatggcagctg

SEQ ID NO: 400479 - DNA, 120 bp, Artificial Sequence
  ENSG00000146376_13 (sequence is synthesized)
ggacagcaaataccatgcacttattgattaagtaccaaaaacttctgtggacaattcccaagtttattgtaaaccaagtgaggaagcaaaacacggaaaatcataaaaaggataaaagag

SEQ ID NO: 400480 - DNA, 120 bp, Artificial Sequence
  ENSG00000146376_14 (sequence is synthesized)
ccatgaagaaattgctgaagaaaatggcttatgaccgagaaaaatatgaaaagcaagataagagtacaaatgatgctgacgttcctcagggagtgattcgagtgcaagctccccatcttt

SEQ ID NO: 400481 - DNA, 120 bp, Artificial Sequence
  ENSG00000146376_15 (sequence is synthesized)
cgaaagtttccatggcaatacagctaactgaagaactaaaagccagtgatgtacttgccaggtttctcagccaagaaagtggggttgcccagactctcaagaaaggagaagtttttttgt

SEQ ID NO: 400482 - DNA, 120 bp, Artificial Sequence
  ENSG00000146376_16 (sequence is synthesized)
atgaaattggaggaaatattggggaacgctgccttgatgatgacacttacatgaaggatttatatcagcttaacccaaatgctgagtgggttataaagtcaaagccattgtagaagactt

SEQ ID NO: 400483 - DNA, 120 bp, Artificial Sequence
  ENSG00000146376_17 (sequence is synthesized)
aacaagctgcagataaccatgtggacttctgtcataattcttgctgagtcaagagtgtaaataaaagaaatggcaggactcatattattcagttgtacccaagtatttaaaaatgactct

SEQ ID NO: 400484 - DNA, 120 bp, Artificial Sequence
  ENSG00000146376_18 (sequence is synthesized)
gtaaagaggcttaattagtttgtgggcagttttcatatgctctgtgaaatgtgtccagatgtgacatagtttttttttttaatatgtggaaatgtcttctcttcccattcttttctccta

SEQ ID NO: 400485 - DNA, 120 bp, Artificial Sequence
  ENSG00000146376_19 (sequence is synthesized)
aaatcatatatactgtaatatatgctctctcacctctattacctcctcacatctaccctttcccagttaggtttgctttttgaccaaaaagataacaaataccaggtatggcaagttgtg

SEQ ID NO: 400486 - DNA, 120 bp, Artificial Sequence
  ENSG00000146376_20 (sequence is synthesized)
aagacagcacattaaaacatacctaatttcacagtattcctgtcacgacagaatgttagtattcatctctttgaatcatttgctcaaataataacattccaccttttcctgctgtatcac

SEQ ID NO: 400487 - DNA, 120 bp, Artificial Sequence
  ENSG00000146376_21 (sequence is synthesized)
aggaagtgatttgcattttttttcagttcatctgacttatgttcacagaaccgtatcagcgaccaagaaaataggactgtcagaagctgccagttattactgaaccattaaatacttata

SEQ ID NO: 400488 - DNA, 120 bp, Artificial Sequence
  ENSG00000146376_22 (sequence is synthesized)
tactaagaataaataaaatatacccatgtgaaataataattggattatggataacaagagagtgaaagccaaagcactttctgtctactgtactcttctaaatggaattttaaaagtcat

SEQ ID NO: 400489 - DNA, 120 bp, Artificial Sequence
  ENSG00000146376_23 (sequence is synthesized)
agctggctttacgtgttgtcattattagcattataaatatgcatgatagtataatccagtaatggttgaagaatgtattttacttaaagagggatttttttttttaagtcctgaataagt

SEQ ID NO: 400490 - DNA, 120 bp, Artificial Sequence
  ENSG00000146376_24 (sequence is synthesized)
ctactggaagaattattcttctgggtgaaaaagcttttgtttgtgttcttattttaaataatcggagtcaatttattaaaatgttcttgaaagtactattcccagggattttaatgcaca

SEQ ID NO: 400491 - DNA, 120 bp, Artificial Sequence
  ENSG00000146376_25 (sequence is synthesized)
aaccatattgtgacaagagatgagcctctgtactgtaaataagaaatgaagtagagaaatgttaaatattttatgagtttagaatatagtaaataaaaggtgatgtaaatgaatgctgca

SEQ ID NO: 400492 - DNA, 120 bp, Artificial Sequence
  ENSG00000146376_26 (sequence is synthesized)
caaacggtgttcatgatacttttagtagtactttaggaaaaactacacattctcagaagctcttgatgtctctaatgaagggggggaatgctgttaatgagaacagtcataaatttttag

SEQ ID NO: 400493 - DNA, 120 bp, Artificial Sequence
  ENSG00000146376_27 (sequence is synthesized)
catataattacaagaacagcctgtggatatgatcacttaaatgattttgtggtgattcgtgccattgcttttttatttaaaagaaaattttgtaattaaatgcctttttctaaattatct

SEQ ID NO: 400494 - DNA, 120 bp, Artificial Sequence
  ENSG00000146376_28 (sequence is synthesized)
tctcttggaatcattacttttaatcctatgtgtttatgagtatttttgctttttttttattaatattgagaaatggacttttttgttattaaaagtcacctctattttctattttctttg

SEQ ID NO: 400495 - DNA, 120 bp, Artificial Sequence
  ENSG00000146376_29 (sequence is synthesized)
taatttttaaagtaggaagatgtcagagatgtaaatatgttttcgtctttagtttttttccttttacaaatttttattcttcaggattttcaaaatacagtttagtctgtttctttgaca

SEQ ID NO: 400496 - DNA, 120 bp, Artificial Sequence
  ENSG00000146376_30 (sequence is synthesized)
atatgtattaatttcccaattagcaaaatggtacttattagtgggttgaaaacaattaataatataaaagaaaaattaagtgcttaaaacattttaggagtatacaacttcaaaaaaaaa

SEQ ID NO: 400497 - DNA, 120 bp, Artificial Sequence
  ENSG00000146376_31 (sequence is synthesized)
gatagcagtgaggataatgatttaagtaaaaggttgtctgaagcatatgccaactaaatttcgcaacgtttgctacctacctgaaaaggagggtcaggagggagacacaacatatttttg

SEQ ID NO: 400498 - DNA, 120 bp, Artificial Sequence
  ENSG00000146376_32 (sequence is synthesized)
atcatgaaaaagtatcttaattttaaaaaagtgaaaatgccattttattttgaatcccttttagaactcacgacccaagttcatcaatgttgaataatatcacgtttaaataacaaaaaa

SEQ ID NO: 400499 - DNA, 120 bp, Artificial Sequence
  ENSG00000146376_33 (sequence is synthesized)
atatggactttaaaaaatctcaaattttttagagacagggtcttgctctgttttccagattggagtacagcagtgcattcgcggctaactgcagcctcaagcactggggctcaagcaaac

SEQ ID NO: 400500 - DNA, 120 bp, Artificial Sequence
  ENSG00000146376_34 (sequence is synthesized)
acaggtgcatgccaccatgcctggctctaaagagaaaaaaaacttgataccatagagccttgaatataaatatcctgatgttaacctactgcttttgctgtgattttttttccttagtga

SEQ ID NO: 400501 - DNA, 120 bp, Artificial Sequence
  ENSG00000146376_35 (sequence is synthesized)
ctgcttttgctgtgattttttttccttagtgagttttaaatctcaggctagatttttatttgtttttctgtgtgtgtatgagacaaaataaaaataaatatatttgccttgagtttaaaa

SEQ ID NO: 400502 - DNA, 120 bp, Artificial Sequence
  ENSG00000146376_36 (sequence is synthesized)
gaggcctgctttccatcagggtagcaattccctggatttgagtaggagccgttccttttgcatggaacatggaccatctactttgctgctgacgttcctcagggagtgattcgagtgcaa

SEQ ID NO: 400503 - DNA, 120 bp, Artificial Sequence
  ENSG00000146376_37 (sequence is synthesized)
acacacacacacacacacacccctacacccctacccctacctctacctctcgtgcggagactctagtcgcctactgaatatataatctatagctgacgttcctcagggagtgattcgagt

SEQ ID NO: 400504 - DNA, 120 bp, Artificial Sequence
  ENSG00000146378_0 (sequence is synthesized)
tgacaaaattctatctgttcttgttttttgaaggaaaaattcaattgctctgaatatggaaatagatcttgcccagaaaatgaaagatctctgggtgtccgagtggctatgtattcattt

SEQ ID NO: 400505 - DNA, 120 bp, Artificial Sequence
  ENSG00000146378_1 (sequence is synthesized)
atggcaggatccatattcatcacaatatttggcaatcttgccatgataatttccatttcctacttcaagcagcttcacacaccaaccaacttcctcatcctctccatggccatcactgat

SEQ ID NO: 400506 - DNA, 120 bp, Artificial Sequence
  ENSG00000146378_2 (sequence is synthesized)
ttcctcctgggattcaccatcatgccatatagtatgatcagatcggtggagaactgctggtattttgggcttacattttgcaagatttattatagttttgacctgatgcttagcataaca

SEQ ID NO: 400507 - DNA, 120 bp, Artificial Sequence
  ENSG00000146378_3 (sequence is synthesized)
tccatttttcatctttgctcagtggccattgatagattttatgctatatgttacccattactttattccaccaaaataactattccagtcattaaaagattgctacttctatgttggtcg

SEQ ID NO: 400508 - DNA, 120 bp, Artificial Sequence
  ENSG00000146378_4 (sequence is synthesized)
tgcttgttccagttcctgcccagtgatgttcaacaagctatgggggaccaccttgtttatggcaggtttcttcactcctgggtctatgatggtggggatttatggcaaaatttttgcagt

SEQ ID NO: 400509 - DNA, 120 bp, Artificial Sequence
  ENSG00000146378_5 (sequence is synthesized)
atccagaaaacatgctcatgccatcaataacttgcgagaaaatcaaaataatcaagtgaagaaagacaaaaaagctgccaaaactttaggaatagtgataggagttttcttattatgttg

SEQ ID NO: 400510 - DNA, 120 bp, Artificial Sequence
  ENSG00000146378_6 (sequence is synthesized)
gtttccttgtttcttcacaattttattggatccctttttgaacttctctactcctgtagttttgtttgatgccttgacatggtttggctattttaactccacatgtaatccgttaatata

SEQ ID NO: 400511 - DNA, 120 bp, Artificial Sequence
  ENSG00000146378_7 (sequence is synthesized)
tggtttcttctatccctggtttcgcagagcactgaagtacattttgctaggtaaaattttcagctcatgtttccataatactattttgtgtatgcaaaaagaaagtgagtaggctttttc

SEQ ID NO: 400512 - DNA, 120 bp, Artificial Sequence
  ENSG00000146378_8 (sequence is synthesized)
tgcatgaataaattgaagcaaaaaactagaatttagaagaatgaagttgtttaagatgtgtgtttttgtgcatgtgtgtattattttagctaccatagaaagctgttggtttctaagacg

SEQ ID NO: 400513 - DNA, 120 bp, Artificial Sequence
  ENSG00000146383_0 (sequence is synthesized)
atgagcagcaattcatccctgctggtggctgtgcagctgtgctacgcgaacgtgaatgggtcctgtgtgaaaatccccttctcgccgggatcccgggtgattctgtacatagtgtttggc

SEQ ID NO: 400514 - DNA, 120 bp, Artificial Sequence
  ENSG00000146383_1 (sequence is synthesized)
tttggggctgtgctggctgtgtttggaaacctcctggtgatgatttcaatcctccatttcaagcagctgcactctccgaccaattttctcgttgcctctctggcctgcgctgatttcttg

SEQ ID NO: 400515 - DNA, 120 bp, Artificial Sequence
  ENSG00000146383_2 (sequence is synthesized)
gtgggtgtgactgtgatgcccttcagcatggtcaggacggtggagagctgctggtattttgggaggagtttttgtactttccacacctgctgtgatgtggcattttgttactcttctctc

SEQ ID NO: 400516 - DNA, 120 bp, Artificial Sequence
  ENSG00000146383_3 (sequence is synthesized)
tttcacttgtgcttcatctccatcgacaggtacattgcggttactgaccccctggtctatcctaccaagttcaccgtatctgtgtcaggaatttgcatcagcgtgtcctggatcctgccc

SEQ ID NO: 400517 - DNA, 120 bp, Artificial Sequence
  ENSG00000146383_4 (sequence is synthesized)
ataggaggttgtcagaccgttgtaaatcaaaactgggtgttgacagattttctatccttctttatacctacctttattatgataattctgtatggtaacatatttcttgtggctagacga

SEQ ID NO: 400518 - DNA, 120 bp, Artificial Sequence
  ENSG00000146383_5 (sequence is synthesized)
caggcgaaaaagatagaaaatactggtagcaagacagaatcatcctcagagagttacaaagccagagtggccaggagagagagaaaagcagctaaaaccctgggggtcacagtggtagca

SEQ ID NO: 400519 - DNA, 120 bp, Artificial Sequence
  ENSG00000146383_6 (sequence is synthesized)
tttatgatttcatggttaccatatagcattgattcattaattgatgcctttatgggctttataacccctgcctgtatttatgagatttgctgttggtgtgcttattataactcagccatg

SEQ ID NO: 400520 - DNA, 120 bp, Artificial Sequence
  ENSG00000146383_7 (sequence is synthesized)
aatcctttgatttatgctttattttacccatggtttaggaaagcaataaaagttattgtaactggtcaggttttaaagaacagttcagcaaccatgaatttgttttctgaacatatataa

SEQ ID NO: 400521 - DNA, 120 bp, Artificial Sequence
  ENSG00000146385_0 (sequence is synthesized)
atgaccagcaatttttcccaacctgttgtgcagctttgctatgaggatgtgaatggatcttgtattgaaactccctattctcctgggtcccgggtaattctgtacacggcgtttagcttt

SEQ ID NO: 400522 - DNA, 120 bp, Artificial Sequence
  ENSG00000146385_1 (sequence is synthesized)
gggtctttgctggctgtatttggaaatctcttagtaatgacttctgttcttcattttaagcagctgcactctccaaccaattttctcattgcctctctggcctgtgctgacttcttggta

SEQ ID NO: 400523 - DNA, 120 bp, Artificial Sequence
  ENSG00000146385_2 (sequence is synthesized)
ggtgtgactgtgatgcttttcagcatggtcaggacggtggagagctgctggtattttggagccaaattttgtactcttcacagttgctgtgatgtggcattttgttactcttctgtcctc

SEQ ID NO: 400524 - DNA, 120 bp, Artificial Sequence
  ENSG00000146385_3 (sequence is synthesized)
cacttgtgcttcatctgcatcgacaggtacattgtggttactgatcccctggtctatgctaccaagttcaccgtgtctgtgtcgggaatttgcatcagcgtgtcctggattctgcctctc

SEQ ID NO: 400525 - DNA, 120 bp, Artificial Sequence
  ENSG00000146385_4 (sequence is synthesized)
aactgcgtaggtggctgtcaaattattgtaagtcaaggctgggtgttgatagattttctgttattcttcatacctacccttgttatgataattctttacagtaagatttttcttatagct

SEQ ID NO: 400526 - DNA, 120 bp, Artificial Sequence
  ENSG00000146385_5 (sequence is synthesized)
aaacaacaagctataaaaattgaaactactagtagcaaagtagaatcatcctcagagagttataaaatcagagtggccaagagagagaggaaagcagctaaaaccctgggggtcacggta

SEQ ID NO: 400527 - DNA, 120 bp, Artificial Sequence
  ENSG00000146385_6 (sequence is synthesized)
ctagcatttgttatttcatggttaccgtatacagttgatatattaattgatgcctttatgggcttcctgacccctgcctatatctatgaaatttgctgttggagtgcttattataactca

SEQ ID NO: 400528 - DNA, 120 bp, Artificial Sequence
  ENSG00000146385_7 (sequence is synthesized)
gccatgaatcctttgatttatgctctattttatccttggtttaggaaagccataaaacttattttaagtggagatgttttaaaggctagttcatcaaccattagtttatttttagaataa

SEQ ID NO: 400529 - DNA, 120 bp, Artificial Sequence
  ENSG00000146386_0 (sequence is synthesized)
acagccgtctttctctttgcctcagccacttccttccttggcctcaccctccccagtgcactgaagaaggtaaccgggtccagacccacgcggcgccagttctccggcgggaaggaaaac

SEQ ID NO: 400530 - DNA, 120 bp, Artificial Sequence
  ENSG00000146386_1 (sequence is synthesized)
cgcgcagagaggcagcaatgaatgtggatcacgaggttaacctcttagtggaggaaattcatcgtttgggttcaaaaaatgctgatggaaagttaagcgtgaaatttggggtcctcttcc

SEQ ID NO: 400531 - DNA, 120 bp, Artificial Sequence
  ENSG00000146386_2 (sequence is synthesized)
gtgatgataaatgtgccaacctctttgaagcattggtaggaactcttaaagctgcaaaacgaaggaagattgtaacatatccaggagagctgcttctgcaaggtgttcatgatgatgttg

SEQ ID NO: 400532 - DNA, 120 bp, Artificial Sequence
  ENSG00000146386_3 (sequence is synthesized)
ctggtaaactggaatataaagtgaaagaacaaacatttgaacatacttaatgtatttttatagaactttgtaaacgaaaggagattcatgttttagaagtctgtccttttttatatcttg

SEQ ID NO: 400533 - DNA, 120 bp, Artificial Sequence
  ENSG00000146386_4 (sequence is synthesized)
aaagaaaatctatgtatgatgctataaaataaatcctattatttttctcaggaatctggttaggaattgcaggcaatgagattttttgcggggcagggatgggaatgtttgttcataaat

SEQ ID NO: 400534 - DNA, 120 bp, Artificial Sequence
  ENSG00000146386_5 (sequence is synthesized)
aattagacattttctatagatatttgacattctgcgaaagcaacaagcaaactgaagaccaactcctatgagaaatattatgatgtttatgtaataaagacatgtaactgtcttaaattt

SEQ ID NO: 400535 - DNA, 120 bp, Artificial Sequence
  ENSG00000146386_6 (sequence is synthesized)
agttctccggcgggaaggaaaaccgcgcagagaggcagcaatgaatgtggatcacgaggttaacctcttagtggaggaaattcatcgtttgggttcaaaaagtaagtatctgacagagat

SEQ ID NO: 400536 - DNA, 120 bp, Artificial Sequence
  ENSG00000146386_7 (sequence is synthesized)
gagctctgcccacagccccaggttataactgcccttagccaggaattgacatctggagacacggggcttttggggtattgtgattctgatgcagggaatagttgagatatttcattattt

SEQ ID NO: 400537 - DNA, 120 bp, Artificial Sequence
  ENSG00000146386_8 (sequence is synthesized)
ttcgatagaaagcaaattaccaagcttcttgtatttgactgcattgaaatttggtaattgaatcatgttcaaatttttacttgtcatactattaaaattcatgttttctgccttgttctg

SEQ ID NO: 400538 - DNA, 120 bp, Artificial Sequence
  ENSG00000146399_0 (sequence is synthesized)
atgatgcccttttgccacaatataattaatatttcctgtgtgaaaaacaactggtcaaatgatgtccgtgcttccctgtacagtttaatggtgctcataattctgaccacactcgttggc

SEQ ID NO: 400539 - DNA, 120 bp, Artificial Sequence
  ENSG00000146399_1 (sequence is synthesized)
aatctgatagttattgtttctatatcacacttcaaacaacttcataccccaacaaattggctcattcattccatggccactgtggactttcttctggggtgtctggtcatgccttacagt

SEQ ID NO: 400540 - DNA, 120 bp, Artificial Sequence
  ENSG00000146399_2 (sequence is synthesized)
atggtgagatctgctgagcactgttggtattttggagaagtcttctgtaaaattcacacaagcaccgacattatgctgagctcagcctccattttccatttgtctttcatctccattgac

SEQ ID NO: 400541 - DNA, 120 bp, Artificial Sequence
  ENSG00000146399_3 (sequence is synthesized)
cgctactatgctgtgtgtgatccactgagatataaagccaagatgaatatcttggttatttgtgtgatgatcttcattagttggagtgtccctgctgtttttgcatttggaatgatcttt

SEQ ID NO: 400542 - DNA, 120 bp, Artificial Sequence
  ENSG00000146399_4 (sequence is synthesized)
ggttgctctgtcttctttagcaaaatatctggggtactgacctttatgacttctttttatatacctggatctattatgttatgtgtctattacagaatatatcttatcgctaaagaacag

SEQ ID NO: 400543 - DNA, 120 bp, Artificial Sequence
  ENSG00000146399_5 (sequence is synthesized)
gcaagattaattagtgatgccaatcagaagctccaaattggattggaaatgaaaaatggaatttcacaaagcaaagaaaggaaagctgtgaagacattggggattgtgatgggagttttc

SEQ ID NO: 400544 - DNA, 120 bp, Artificial Sequence
  ENSG00000146399_6 (sequence is synthesized)
ctaatatgctggtgccctttctttatctgtacagtcatggacccttttcttcactacattattccacctactttgaatgatgtattgatttggtttggctacttgaactctacatttaat

SEQ ID NO: 400545 - DNA, 120 bp, Artificial Sequence
  ENSG00000146399_7 (sequence is synthesized)
ccaatggtttatgcatttttctatccttggtttagaaaagcactgaagatgatgctgtttggtaaaattttccaaaaagattcatccaggtgtaaattatttttggaattgagttcatag

SEQ ID NO: 400546 - DNA, 120 bp, Artificial Sequence
  ENSG00000146409_0 (sequence is synthesized)
agagtcctggaaggctttggggagctccgggccgggcggatcgctgcctgcagggagtcggggatgccaggttccagctgagcagcggccgcccgccagagtgccagtggctccttggag

SEQ ID NO: 400547 - DNA, 120 bp, Artificial Sequence
  ENSG00000146409_1 (sequence is synthesized)
gtcgagtccaaggacgtggcttgaagccgggagctggggcgccggagtccacgcaccggggatggaggcgctgggtgacctggagggaccacgcgcaccaggaggtgatgatcctgcagg

SEQ ID NO: 400548 - DNA, 120 bp, Artificial Sequence
  ENSG00000146409_2 (sequence is synthesized)
aagtgcaggagagacccccgggtggctttcgagagaacaggtttttgtactgatatcggcagcttcggtgaacttaggttccatgatgtgctattctatacttggaccgtttttccccaa

SEQ ID NO: 400549 - DNA, 120 bp, Artificial Sequence
  ENSG00000146409_3 (sequence is synthesized)
agaggctgaaaagaagggagccagcaatacaattatcggtatgatctttggatgttttgctttgttcgagttgctggcatccttggtatttggaaactatcttgtacatattggagcaaa

SEQ ID NO: 400550 - DNA, 120 bp, Artificial Sequence
  ENSG00000146409_4 (sequence is synthesized)
atttatgtttgtagcaggaatgtttgtctcaggaggagttacaattctctttggtgtattggaccgagttccagatgggccagtatttattgctatgtgttttctagtgagagtaatgga

SEQ ID NO: 400551 - DNA, 120 bp, Artificial Sequence
  ENSG00000146409_5 (sequence is synthesized)
tgcagttagctttgctgcagcaatgactgcatcttcttctatcctggcaaaggcttttccaaataacgtggctacggtattgggaagtcttgagactttttctggactggggctaatact

SEQ ID NO: 400552 - DNA, 120 bp, Artificial Sequence
  ENSG00000146409_6 (sequence is synthesized)
aggtcctcctgtaggtggctttttgtatcaatcctttggctatgaagtgccttttattgttctgggatgcgtcgttttgctgatggtaccactcaatatgtatattttacccaattacga

SEQ ID NO: 400553 - DNA, 120 bp, Artificial Sequence
  ENSG00000146409_7 (sequence is synthesized)
gtctgatccaggtgaacactcattctggaaactgatcgctttacccaaagttggccttatagccttcgtcatcaactcactcagctcgtgttttggcttcctcgatcctactctgtctct

SEQ ID NO: 400554 - DNA, 120 bp, Artificial Sequence
  ENSG00000146409_8 (sequence is synthesized)
ctttgttttggagaagttcaatttaccagctggatatgtgggactagtattcctgggtatggcactgtcctatgccatctcttcaccactatttggtctcctaagtgataaaaggccacc

SEQ ID NO: 400555 - DNA, 120 bp, Artificial Sequence
  ENSG00000146409_9 (sequence is synthesized)
tctaaggaaatggcttctggtgtttggcaacttaatcacagccgggtgctacatgctcttagggcctgtcccaatcttgcatattaaaagtcagctctggctgctggtgctgatattagt

SEQ ID NO: 400556 - DNA, 120 bp, Artificial Sequence
  ENSG00000146409_10 (sequence is synthesized)
ctcagttgtgcacatgaaaatgggtttgaagagggattaagtacattgggacttgtatcaggtctttttagtgcaatgtggtcaattggtgcttttatgggaccaacgctgggtggattt

SEQ ID NO: 400557 - DNA, 120 bp, Artificial Sequence
  ENSG00000146409_11 (sequence is synthesized)
ctgtatgagaaaattggttttgaatgggcagcagctatacaaggtctatgggctctgataagtggattagccatgggcttgttttatctactggagtattcaaggagaaaaaggtctaaa

SEQ ID NO: 400558 - DNA, 120 bp, Artificial Sequence
  ENSG00000146409_12 (sequence is synthesized)
tctcaaaacatcctcagcacagaggaggaacgaactactctcttgcctaatgaaacctagtccgatggatcctggattgatacaaggttgagaaatgaatgctcctggccttaaacatca

SEQ ID NO: 400559 - DNA, 120 bp, Artificial Sequence
  ENSG00000146409_13 (sequence is synthesized)
ccgtaggaagggtttttaaaattttacgcgcaaaactccgtggaccccgtgccagtgtcttggaagtgtcaacgtgtttttggatgatcctgtattgggctgtacttactgtgatactga

SEQ ID NO: 400560 - DNA, 120 bp, Artificial Sequence
  ENSG00000146409_14 (sequence is synthesized)
aaagctgtcctgctgaagcagctatatttgaaatattaagtatgaaaggagtaattaaaaacaagcaaaacaaaacaagacttagtttttaaatgaccaaacttgtccttaaagatgttg

SEQ ID NO: 400561 - DNA, 120 bp, Artificial Sequence
  ENSG00000146409_15 (sequence is synthesized)
ttattaactcgagttagttcttatttcctctgtttattttttattctaagtacactgattctgtgaatgtaccttttttattaacagggaaagaaatgaattaatttgatatgctctaaa

SEQ ID NO: 400562 - DNA, 120 bp, Artificial Sequence
  ENSG00000146409_16 (sequence is synthesized)
tacataaaggtgcttcaaaatatgtagaaacattactatgaaatcagtttttaaaagatatactttctctttgtcctgaggtttttcggtcttgttcaaaaggaagaattcttgcctgcc

SEQ ID NO: 400563 - DNA, 120 bp, Artificial Sequence
  ENSG00000146409_17 (sequence is synthesized)
atacagaaactctctagcactccctgaccttaagcttttctaaaaattctgtttgtgtgaaaagtacaagaataacaatacttacaacttccatttttgtaacctacgttcacttatgat

SEQ ID NO: 400564 - DNA, 120 bp, Artificial Sequence
  ENSG00000146409_18 (sequence is synthesized)
ctggatttataaacattacttggtataacgtttttcatttcctttaatgtctctgttttttggctctaccatctgttttgtttttgtttttatctatatcttggtagatgtatttcatcc

SEQ ID NO: 400565 - DNA, 120 bp, Artificial Sequence
  ENSG00000146409_19 (sequence is synthesized)
ctagagcaggtcagcctccttcccctaatgcgaatgcttgttttgttagggaagggcttcctccaacttcgtgtgaaattgtgatgttgaagtgaataaatgtctattgtgtaactctca

SEQ ID NO: 400566 - DNA, 78 bp, Artificial Sequence
  ENSG00000146409_20 (sequence is synthesized)
ctgtgaatccagtgggcagatactgttagactgtaacttcaggtggtccacacacgtcagcctcccaaagtgctggga

SEQ ID NO: 400567 - DNA, 120 bp, Artificial Sequence
  ENSG00000146409_21 (sequence is synthesized)
agcttcagtaaaaaatgtattggaccgagttccagatgggccagtatttattgctatgtgttttctagtgagagtaatggatgcagttagctttgctgcagcaatgactgcatcttcttc

SEQ ID NO: 400568 - DNA, 120 bp, Artificial Sequence
  ENSG00000146410_0 (sequence is synthesized)
agcagtcctgtcatgcggaagtagcagtccggtcctagggactagcaggtgggttggttgggcgcaggaggacgggggcgcgcttcccataacattaccctggctgagcgtgaggctcca

SEQ ID NO: 400569 - DNA, 120 bp, Artificial Sequence
  ENSG00000146410_1 (sequence is synthesized)
gggctgggcaccgggttgacctcttattcctcgctgagggcatcgttaccgcctgtggctgcaagccgaggcgcgcgggtggaaactgggtcgaggtctgggtagacgtctgagcgatct

SEQ ID NO: 400570 - DNA, 120 bp, Artificial Sequence
  ENSG00000146410_2 (sequence is synthesized)
gcacaaggagtggcgcagtctggaatttgattgaggattcctaacgccctccgcttgatgttctggtgattcccgggggctcggcttcggaggaaggcaccaagaaactgataatgttcc

SEQ ID NO: 400571 - DNA, 120 bp, Artificial Sequence
  ENSG00000146410_3 (sequence is synthesized)
tttgaattggcttctgtatttgcttcatcaatgtctctcatactgaatatcttaagagagatgctggaatattttggcgttcctgtagaacaggttttgctgatttgggaaaataaagac

SEQ ID NO: 400572 - DNA, 120 bp, Artificial Sequence
  ENSG00000146410_4 (sequence is synthesized)
tatggatcaactaggagtattgttcgtattattgggaaaatgcttccactggaaccttgtcgaagacctaattttgagttgatcccgctcttgaactctgtagactctgataattgtgga

SEQ ID NO: 400573 - DNA, 120 bp, Artificial Sequence
  ENSG00000146410_5 (sequence is synthesized)
tctatggttccatcttttgctgatattttgtatgtggcaaatgatgaagaagccagttatctcagatttcgaaatagtatatggaaaaatgaagaagagaaagtggaaatttttcatcct

SEQ ID NO: 400574 - DNA, 120 bp, Artificial Sequence
  ENSG00000146410_6 (sequence is synthesized)
ttgcgactagttcgggatccactgtcacctgctgtaagacagaaagaaactgtgaaaaatgacctgcctgtaaatgaagctgcaattagaaaaatagctgcccttgaaaatgagctgact

SEQ ID NO: 400575 - DNA, 120 bp, Artificial Sequence
  ENSG00000146410_7 (sequence is synthesized)
catcatcgcgggctgcccatctgagtgtggacccagatcagcttccaggttcagtgctttctcctcctcctcctccaccacttcctcctcagttttcatctctccagccaccgtgttttc

SEQ ID NO: 400576 - DNA, 120 bp, Artificial Sequence
  ENSG00000146410_8 (sequence is synthesized)
ctcccgtacaaccaggatctaataatatttgtgactcagataatccagcaactgaaatgagcaaacagaacccggctgctaataagaccaattatagtcatcattcaaaaagccagagaa

SEQ ID NO: 400577 - DNA, 120 bp, Artificial Sequence
  ENSG00000146410_9 (sequence is synthesized)
ataaagatattccaaacatgttggacgttctaaaggatatgaataaggttaagcttcgtgcaattgagcggtcacctggcggtagacccattcataagaggaaaagacagaattcacatt

SEQ ID NO: 400578 - DNA, 120 bp, Artificial Sequence
  ENSG00000146410_10 (sequence is synthesized)
gggatccagtttctttaatatctcatgcacttaaacagaaatttgcatttcaagaagatgattcttttgagaaagagaatagatcttgggaatcttccccattttctagtccagaaactt

SEQ ID NO: 400579 - DNA, 120 bp, Artificial Sequence
  ENSG00000146410_11 (sequence is synthesized)
caaggtttggacatcacatttcacagtcagaaggacagcgaactaaagaagaaatggtcaacacaaaagctgttgaccaaggtatcagcaacacaagccttctaaactcaaggatttaaa

SEQ ID NO: 400580 - DNA, 120 bp, Artificial Sequence
  ENSG00000146410_12 (sequence is synthesized)
ctcaacttaaggttgagctttaaacttccaaaacttcttcctggatgataaattattcttagaaactgatttggactgttaaaggctaaaagtagatgtatttaaagactcttcttgaca

SEQ ID NO: 400581 - DNA, 120 bp, Artificial Sequence
  ENSG00000146410_13 (sequence is synthesized)
cattttgcctacacttgctatgtaaatatgtatgcctgtcatttttgtttcctttgttcctttttacgtttatactctgttcttctgtacatagagcttaaaataaacattctttttgaa

SEQ ID NO: 400582 - DNA, 120 bp, Artificial Sequence
  ENSG00000146410_14 (sequence is synthesized)
aatattttggcgttcctgtagaacagttagaagtaacttcagcatatttgtcatcactctggaagaaacagacaggaagaaatttaagatccacatgagagaggattgagcaccgccttt

SEQ ID NO: 400583 - DNA, 120 bp, Artificial Sequence
  ENSG00000146410_15 (sequence is synthesized)
agctttgtgttcaagttctcttgaagtaattgtgcagaatgggctatataattgtttattgatgctgctaatgtttctggggtttttttgttgttaattttatatgctcattttcacttt

SEQ ID NO: 400584 - DNA, 120 bp, Artificial Sequence
  ENSG00000146410_16 (sequence is synthesized)
tttttagttggaacaaaggtgagtttgtaatagtatagctttgatgatttgagttagaagagggataagattattgagaacatatttacctgataggacaaatgccaacagaagatacaa

SEQ ID NO: 400585 - DNA, 120 bp, Artificial Sequence
  ENSG00000146410_17 (sequence is synthesized)
aggaagcaaaatatagacatgagcttcacagaattacatttattgcacagatacattaaaacttctattcaaggtaatttataaacaagttcaatatttaaagctcaataaatccagaat

SEQ ID NO: 400586 - DNA, 120 bp, Artificial Sequence
  ENSG00000146411_0 (sequence is synthesized)
ggtcacaaatcacattagctttgcccgaagtttttccccacactcttctttagcatgctattatggggaaagtgaccactcctgggagcgggggtggtcggggcggtttggtggcgggga

SEQ ID NO: 400587 - DNA, 120 bp, Artificial Sequence
  ENSG00000146411_1 (sequence is synthesized)
agcggctgtaacttctacgtgaccatggtacctgttgaaaacaccgagggccccagtctgctgaaccagaaggggacagccgtggagacggagggcagcggcagccggcatcctccctgg

SEQ ID NO: 400588 - DNA, 120 bp, Artificial Sequence
  ENSG00000146411_2 (sequence is synthesized)
gcgagaggctgcggcatgtttaccttcctgtcatctgtcactgctgctgtcagtggcctcctggtgggttatgaacttgggatcatctctggggctcttcttcagatcaaaaccttatta

SEQ ID NO: 400589 - DNA, 120 bp, Artificial Sequence
  ENSG00000146411_3 (sequence is synthesized)
gccctgagctgccatgagcaggaaatggttgtgagctccctcgtcattggagccctccttgcctcactcaccggaggggtcctgatagacagatatggaagaaggacagcaatcatcttg

SEQ ID NO: 400590 - DNA, 120 bp, Artificial Sequence
  ENSG00000146411_4 (sequence is synthesized)
tcatcctgcctgcttggactcggaagcttagtcttgatcctcagtttatcctacacggttcttatagtgggacgcattgccataggggtctccatctccctctcttccattgccacttgt

SEQ ID NO: 400591 - DNA, 120 bp, Artificial Sequence
  ENSG00000146411_5 (sequence is synthesized)
gtttacatcgcagagattgctcctcaacacagaagaggccttcttgtgtcactgaatgagctgatgattgtcatcggcattctttctgcctatatttcaaattacgcatttgccaatgtt

SEQ ID NO: 400592 - DNA, 120 bp, Artificial Sequence
  ENSG00000146411_6 (sequence is synthesized)
ttccatggctggaagtacatgtttggtcttgtgattcccttgggagttttgcaagcaattgcaatgtattttcttcctccaagccctcggtttctggtgatgaaaggacaagagggagct

SEQ ID NO: 400593 - DNA, 120 bp, Artificial Sequence
  ENSG00000146411_7 (sequence is synthesized)
gctagcaaggttcttggaaggttaagagcactctcagatacaactgaggaactcactgtgatcaaatcctccctgaaagatgaatatcagtacagtttttgggatctgtttcgttcaaaa

SEQ ID NO: 400594 - DNA, 120 bp, Artificial Sequence
  ENSG00000146411_8 (sequence is synthesized)
gacaacatgcggacccgaataatgataggactaacactagtattttttgtacaaatcactggccaaccaaacatattgttctatgcatcaactgttttgaagtcagttggatttcaaagc

SEQ ID NO: 400595 - DNA, 120 bp, Artificial Sequence
  ENSG00000146411_9 (sequence is synthesized)
aatgaggcagctagcctcgcctccactggggttggagtcgtcaaggtcattagcaccatccctgccactcttcttgtagaccatgtcggcagcaaaacattcctctgcattggctcctct

SEQ ID NO: 400596 - DNA, 120 bp, Artificial Sequence
  ENSG00000146411_10 (sequence is synthesized)
gtgatggcagcttcgttggtgaccatgggcatcgtaaatctcaacatccacatgaacttcacccatatctgcagaagccacaattctatcaaccagtccttggatgagtctgtgatttat

SEQ ID NO: 400597 - DNA, 120 bp, Artificial Sequence
  ENSG00000146411_11 (sequence is synthesized)
ggaccaggaaacctgtcaaccaacaacaatactctcagagaccacttcaaagggatttcttcccatagcagaagctcactcatgcccctgagaaatgatgtggataagagaggggagacg

SEQ ID NO: 400598 - DNA, 120 bp, Artificial Sequence
  ENSG00000146411_12 (sequence is synthesized)
acctcagcatccttgctaaatgctggattaagccacactgaataccagatagtcacagaccctggggacgtcccagcttttttgaaatggctgtccttagccagcttgcttgtttatgtt

SEQ ID NO: 400599 - DNA, 120 bp, Artificial Sequence
  ENSG00000146411_13 (sequence is synthesized)
gctgctttttcaattggtctaggaccaatgccctggctggtgctcagcgagatctttcctggtgggatcagaggacgagccatggctttaacttctagcatgaactggggcatcaatctc

SEQ ID NO: 400600 - DNA, 120 bp, Artificial Sequence
  ENSG00000146411_14 (sequence is synthesized)
ctcatctcgctgacatttttgactgtaactgatcttattggcctgccatgggtgtgctttatatatacaatcatgagtctagcatccctgctttttgttgttatgtttatacctgagaca

SEQ ID NO: 400601 - DNA, 120 bp, Artificial Sequence
  ENSG00000146411_15 (sequence is synthesized)
aagggatgctctttggaacaaatatcaatggagctagcaaaagtgaactatgtgaaaaacaacatttgttttatgagtcatcaccaagaagaattagtgccaaaacagcctcaaaaaaga

SEQ ID NO: 400602 - DNA, 120 bp, Artificial Sequence
  ENSG00000146411_16 (sequence is synthesized)
aaaccccaggagcagctcttggagtgtaacaagctgtgtggtaggggccaatccaggcagctttctccagagacctaatggcctcaacaccttctgaacgtggatagtgccagaacactt

SEQ ID NO: 400603 - DNA, 120 bp, Artificial Sequence
  ENSG00000146411_17 (sequence is synthesized)
aggagggtgtctttggaccaatgcatagttgcgactcctgtgctctcttttcagtgtcatggaactggttttgaagagacactctgaaatgataaagacagcctttaatccccctcctcc

SEQ ID NO: 400604 - DNA, 120 bp, Artificial Sequence
  ENSG00000146411_18 (sequence is synthesized)
ccagaaggaacctcaaaaggtagatgaggtacaaggtcctaagtgatctctttttctgagcaggatatcaggttaaaaaaaaaaagttactggctggtttaatactttctaccttcttca

SEQ ID NO: 400605 - DNA, 120 bp, Artificial Sequence
  ENSG00000146411_19 (sequence is synthesized)
cagagcagcctttgaatagactatgtcctagtgaagacatcaacctccgccttaagctatgtatgtatggaggccagtcgcagctttattatgcagacacacaagtggtctggacatgag

SEQ ID NO: 400606 - DNA, 120 bp, Artificial Sequence
  ENSG00000146411_20 (sequence is synthesized)
ggtacagtttctgcctaccaagacactacttgcactggatcttacgcaaaaaagaaccagaacacacagtgtggacaactgcccatatattctatctagattaggagagggtcctggcta

SEQ ID NO: 400607 - DNA, 120 bp, Artificial Sequence
  ENSG00000146411_21 (sequence is synthesized)
gctaggattttagtggtaattcctagttacattcaacaagtataaagattatagagcttattttatgaactataaactataatttaatgcaaaatatccttttatgaatttcatgttaat

SEQ ID NO: 400608 - DNA, 120 bp, Artificial Sequence
  ENSG00000146411_22 (sequence is synthesized)
tgaaatattaaaataattccacaatagttgagaaaaatgagcatttttttccatttttaaaaaatgcatagaaaagacaattttaaaatcctgggaccatatttatttagaagtagctgt

SEQ ID NO: 400609 - DNA, 120 bp, Artificial Sequence
  ENSG00000146411_23 (sequence is synthesized)
taagcaattaggttgaagttattaagtcaagcctagaaaagctgcctccttgtaaggctttcatgacaatgtatagtaatccacagtgtccaattcttcacactcctcaggaatatcact

SEQ ID NO: 400610 - DNA, 120 bp, Artificial Sequence
  ENSG00000146411_24 (sequence is synthesized)
acctcaggttacggtacacaggctataattgatgatgatgttcagataactgaagacacaataaatgacattcagacatcaggacaattccctcatgttcttttctatgatggccacctg

SEQ ID NO: 400611 - DNA, 120 bp, Artificial Sequence
  ENSG00000146411_25 (sequence is synthesized)
taccagcaacgtgggtttcacccacacaacgatgaactgttctcttacttctccagttgattttaaagacttgttaagaggtcttactaataaaatttgggtatgatagaaaatccacaa

SEQ ID NO: 400612 - DNA, 120 bp, Artificial Sequence
  ENSG00000146411_26 (sequence is synthesized)
tcaaatcttgaaccaaataacatattaaattactaatatttaagtgatggaagacacacaaaaaacttaaaagcacgaacaacctaacttgaaaaagaattttaaaatatgattaacctg

SEQ ID NO: 400613 - DNA, 120 bp, Artificial Sequence
  ENSG00000146411_27 (sequence is synthesized)
aagaaaagagaatcctaagagccaaagctcctttttatttagcttggaattttcctattggttcctaacaaactgtcccaatgtcatataaggaaacatgatctattacattcctttata

SEQ ID NO: 400614 - DNA, 120 bp, Artificial Sequence
  ENSG00000146411_28 (sequence is synthesized)
acaatgtggagagactataaacctatgtaagtagtaaaactatatcagagactcaggagactgactaaaaggcctggatctgcagtgtattatctgtataaaaattggcagggggaagct

SEQ ID NO: 400615 - DNA, 120 bp, Artificial Sequence
  ENSG00000146411_29 (sequence is synthesized)
aaaaggaaaggagattggagatctcaattctatcatggtgtatttcatacgcaaatcagagcatgcattgttttttgtttttggaaagagaagggaagtgtgttctgccccatgtttcct

SEQ ID NO: 400616 - DNA, 120 bp, Artificial Sequence
  ENSG00000146411_30 (sequence is synthesized)
tccgtgtttatagttcaaactctatatatacttcaggtattttttgtttagcccttcattataaatgggcaggaaattgtttatcaacctagccagtttattactagtgaccttgacttc

SEQ ID NO: 400617 - DNA, 120 bp, Artificial Sequence
  ENSG00000146411_31 (sequence is synthesized)
agtatcttgagcattcttttatatttttcttttattatcctgagtctgtaactaaacaattttgtcttcaaatttttatccaatatccattgcaccacaccaaatcaagcttcttgattt

SEQ ID NO: 400618 - DNA, 120 bp, Artificial Sequence
  ENSG00000146411_32 (sequence is synthesized)
tcaaaaataaaaagggggaaatacttacaacttgtacatatatattcacagtttttatttataaaaaaaatttacagtacttatggagagccagcagaagacatcagagcactcacttct

SEQ ID NO: 400619 - DNA, 120 bp, Artificial Sequence
  ENSG00000146411_33 (sequence is synthesized)
tcccatctttgttaaggttagcgaattacccatggacactgttaggtgaggctcattcggcagccctgaaaacaaacctggtcacactgtctttaccctctcccttcagataaagcactt

SEQ ID NO: 400620 - DNA, 120 bp, Artificial Sequence
  ENSG00000146411_34 (sequence is synthesized)
cgattatctattgatctgcccagttttcaagtcatgcgaatactaaaaaggttacatcatctggatctgtaccttggctatataagcatgttttccccctattctatgtttctttttttg

SEQ ID NO: 400621 - DNA, 120 bp, Artificial Sequence
  ENSG00000146411_35 (sequence is synthesized)
gtgaacattgaaaaacaggaggtgacttattactgttaattaaaactaaatgaaaaatgtcaagtctttaaaacagtgagcttgtaactctttcatgtaattttattctctatgaatttg

SEQ ID NO: 400622 - DNA, 120 bp, Artificial Sequence
  ENSG00000146411_36 (sequence is synthesized)
gctatcctactgaatcttaaaataaaggaaataaacactttttttttaaaaaaaaggaaaaatacaagtctaaaaatctcaatgaaatatttcacaagaaggaaaaatgtaagttagcct

SEQ ID NO: 400623 - DNA, 120 bp, Artificial Sequence
  ENSG00000146411_37 (sequence is synthesized)
ttgctttccactttggaataagcaggaggttagggaaggcattgagaagaaaaaagataaaaataatatgtgttgttcagtgcagtgcctaagctaggttttcaagattttataatacag

SEQ ID NO: 400624 - DNA, 120 bp, Artificial Sequence
  ENSG00000146411_38 (sequence is synthesized)
taaggaaaatgtactatatatggagattaggatgttgcaatttttccacaaaggtttaaaaacattttggaaatacaagtttttgtggaacattgtgttggaatattgtccccattaagt

SEQ ID NO: 400625 - DNA, 120 bp, Artificial Sequence
  ENSG00000146411_39 (sequence is synthesized)
ttctcctgagaagctaattggactctccactcagctttatttctaggtataatcactgttggttacactaaactcctaaacctaaatgacagggcacaactacagcttgatcctgtatta

SEQ ID NO: 400626 - DNA, 120 bp, Artificial Sequence
  ENSG00000146411_40 (sequence is synthesized)
ccacatcagggctcctgggtgagccagagacactgtttcataaatgcatatttattataactttaagagtagcaatctcatatactgaatagtcactctttaactccattaaataagata

SEQ ID NO: 400627 - DNA, 120 bp, Artificial Sequence
  ENSG00000146411_41 (sequence is synthesized)
cagcaaggggaaggacagtatcacacaaaatggctttcaaattcaagtggggctatttgataattacactgtggcacagaggcagcttatgggcacttcttgttaaaacatctccatgtt

SEQ ID NO: 400628 - DNA, 120 bp, Artificial Sequence
  ENSG00000146411_42 (sequence is synthesized)
accaacttctgacaagactcttagtataggcttgggcatcaacccaagattaaagtcaagaacctcaatcacttctctacaactacaggtgttgagtctttccagaaaaacaaaggtcca

SEQ ID NO: 400629 - DNA, 120 bp, Artificial Sequence
  ENSG00000146411_43 (sequence is synthesized)
aatgaggcaccattcatcacagcttctttctcatttccatctagtgggtaagaggtttctcttcttaaaactacaatttcttaacctttacaagttatttaacattttctatcatattaa

SEQ ID NO: 400630 - DNA, 120 bp, Artificial Sequence
  ENSG00000146411_44 (sequence is synthesized)
attagcaacataaaacattatcctttatctataaacttctagtctggttccctagagtttatatacacgtttttatttctaatctgcaagaaaaaaaattcctatttgttatttggtaac

SEQ ID NO: 400631 - DNA, 72 bp, Artificial Sequence
  ENSG00000146411_45 (sequence is synthesized)
aatctgcaagaaaaaaaattcctatttgttatttggtaacagagcattaaaagatactatacacatgtggtt

SEQ ID NO: 400632 - DNA, 120 bp, Artificial Sequence
  ENSG00000146414_0 (sequence is synthesized)
acgctacagcgcgcgcccggcagctaggcgctgtggtttctgggtctcccgggggacccctacacgttccggcaaaaagcgctcgtgcccacctcaagcccatgttcggtgggtggcgaa

SEQ ID NO: 400633 - DNA, 120 bp, Artificial Sequence
  ENSG00000146414_1 (sequence is synthesized)
tgcgtgcccgtgatctgctgggtctgtagaggagcgcaggcctggtgcaaacagactcaagaggctcggagaaccagcttgggtaggcgcttgggtgatggaaggtcaggggtcagaggt

SEQ ID NO: 400634 - DNA, 120 bp, Artificial Sequence
  ENSG00000146414_2 (sequence is synthesized)
cgggagggagggagggaggtggtctttggcctccgggaccagggagggaggacgctggttgtcctggagcccgggaagctcaagggctgagagggagccgctgcgcgagtcttccccacc

SEQ ID NO: 400635 - DNA, 120 bp, Artificial Sequence
  ENSG00000146414_3 (sequence is synthesized)
tcttcccgatcccggactagcgaacttcggaccaccacgtccctccggggataaagtggggtcgtgggaaaggaggctgtgcttctcctcatgcactggggcctgcggtgtttgtctcga

SEQ ID NO: 400636 - DNA, 120 bp, Artificial Sequence
  ENSG00000146414_4 (sequence is synthesized)
gcgtccaacacactaggatccgggagtccgtcgtcacgctccttggcctcgcggtcgcttgtttgctcggcctgctgggagcgatccggcgctgacagccccgctcagactccgggagcc

SEQ ID NO: 400637 - DNA, 120 bp, Artificial Sequence
  ENSG00000146414_5 (sequence is synthesized)
gcttgtgggtctttcggaagataactgaagttcacagttaccagccaagaaaacttgaaaatgagcagccgacggaaacgtgctcctccagtgagggtagatgaggaaaagaggcagcag

SEQ ID NO: 400638 - DNA, 120 bp, Artificial Sequence
  ENSG00000146414_6 (sequence is synthesized)
cttcattggaatatgcatgaggacagaaggaatgaacctatcatcataagtgatgatgacgagcagccctgcccaggttcagatacctcttctgctcattatatcattctaagtgatagt

SEQ ID NO: 400639 - DNA, 120 bp, Artificial Sequence
  ENSG00000146414_7 (sequence is synthesized)
ctaaaggaagaagtggctcacagagataagaagaggtgttcaaaagtggtgagcttctcaaaaccaattgaaaaagaagagactgttggtattttttcccctttgtctgtaaagttaaat

SEQ ID NO: 400640 - DNA, 120 bp, Artificial Sequence
  ENSG00000146414_8 (sequence is synthesized)
attgtgatttctccctatcattttgataattcctggaaagcatttctaggagaattaactcttcagcttcttcctgcacagagtttaattgaaaatttttccgaaaggagtattacattg

SEQ ID NO: 400641 - DNA, 120 bp, Artificial Sequence
  ENSG00000146414_9 (sequence is synthesized)
atgagttcagagtcaagcaatcagttcctgatttatgttcattcaaaaggtgaagatgtagagaaacaaaaaaaagaaccgatgagtatttgtgacaagggtattctggtggagtcatcc

SEQ ID NO: 400642 - DNA, 120 bp, Artificial Sequence
  ENSG00000146414_10 (sequence is synthesized)
ttcagtggtgaaatgttagaagatttggggtggctacaaaagaagagaagaataaaactctatcagaaaccagaaggaaatcacattatcaaggttggaatttatcttttggaagctggc

SEQ ID NO: 400643 - DNA, 120 bp, Artificial Sequence
  ENSG00000146414_11 (sequence is synthesized)
ctagcaaaactagacttcttgagtgatgcaaattcaagaatgaaaaagttcaatcagctcatgaagaaagtaatggaaaagttacacaattctattattccagatgtgttggaagaggat

SEQ ID NO: 400644 - DNA, 120 bp, Artificial Sequence
  ENSG00000146414_12 (sequence is synthesized)
gaagatgatccggagagtgagccagagggacaagacattgacgagctgtatcactttgtgaaacaaacacatcagcaagaaacgcagtccatccaagtggatgtccagcatcctgcattg

SEQ ID NO: 400645 - DNA, 120 bp, Artificial Sequence
  ENSG00000146414_13 (sequence is synthesized)
atccctgtgttgagaccctaccaaagagaggctgtcaattggatgctacaacaagagtgtttcagaagcagtcctgctactgaaagtgccctgcacttcttatggcgagagattgttaca

SEQ ID NO: 400646 - DNA, 120 bp, Artificial Sequence
  ENSG00000146414_14 (sequence is synthesized)
tctgagggtctgaaactctactataatccatatacaggctgcatcattcgtgagtacccaaattctgggccgcagttgcttggtggaattttagcagatgagatgggtcttggaaagaca

SEQ ID NO: 400647 - DNA, 120 bp, Artificial Sequence
  ENSG00000146414_15 (sequence is synthesized)
gtggaggttttggctctgattctgacacatactcgacaagatgtcaagcaagatgctctcactcttcccgagggaaaagtggtgaattattttattccgtcacattattttggaggaaaa

SEQ ID NO: 400648 - DNA, 120 bp, Artificial Sequence
  ENSG00000146414_16 (sequence is synthesized)
ctgaaaaagacagaaatccagaatatcgaatttgaaccaaaagaaaaagttcaatgccctcctacacgtgtgatgatactgacagctgtgaaagaaatgaatggaaaaaaaggagtgtcc

SEQ ID NO: 400649 - DNA, 120 bp, Artificial Sequence
  ENSG00000146414_17 (sequence is synthesized)
atcctttccatctataagtatgtcagttctatatatagatacgatgttcaacggaacaggagtcttttgaaacggatgctgaaatgtttaatttttgaaggtctcgtgaaacagatcaaa

SEQ ID NO: 400650 - DNA, 120 bp, Artificial Sequence
  ENSG00000146414_18 (sequence is synthesized)
ggccatggtttttctgggacttttacattgggaaagaattacaaggaagaggatatatgtgataaaacaaaaaagcaggcagtagggagtccaaggaaaattcagaaagaaactagaaaa

SEQ ID NO: 400651 - DNA, 120 bp, Artificial Sequence
  ENSG00000146414_19 (sequence is synthesized)
tcagggaacaaggacacagattctgaatacttgccatcagacacctctgatgatgatgatgatccttactattattattataagtccaggagaaatcgcagtaaattgaggaaaaagctt

SEQ ID NO: 400652 - DNA, 120 bp, Artificial Sequence
  ENSG00000146414_20 (sequence is synthesized)
gttccatccacaaaaaaaggaaaaagtcaaccatttatcaatcccgattcacaaggtcactgtccagctactagcgactctggaataactgatgttgctatgtctaaaagtacatgtatc

SEQ ID NO: 400653 - DNA, 120 bp, Artificial Sequence
  ENSG00000146414_21 (sequence is synthesized)
tctgaattcaaccaagaacatgaaacagaggactgtgctgaatctctaaatcatgctgatagtgatgtaccaccttctaataccatgagtccctttaacacctctgattaccgctttgag

SEQ ID NO: 400654 - DNA, 120 bp, Artificial Sequence
  ENSG00000146414_22 (sequence is synthesized)
tgtatatgtggtgaacttgatcagatagatcgtaagcctcgtgttcaatgcctgaagtgtcacctgtggcaacatgcaaagtgtgtgaattatgatgagaaaaatctgaagatcaagcct

SEQ ID NO: 400655 - DNA, 120 bp, Artificial Sequence
  ENSG00000146414_23 (sequence is synthesized)
ttttactgcccccactgccttgttgcaatggaaccagtgtcaacaagagcaactctgatcatctctccaagttccatctgtcaccagtgggtggatgagatcaacaggcatgtgaggtcg

SEQ ID NO: 400656 - DNA, 120 bp, Artificial Sequence
  ENSG00000146414_24 (sequence is synthesized)
tcatctcttcgagtcttggtatatcaaggagtgaagaaagatggctttttacaacctcattttttggcagaacaggatatagttatcattacctatgatgtactgcgttcagaattaaat

SEQ ID NO: 400657 - DNA, 120 bp, Artificial Sequence
  ENSG00000146414_25 (sequence is synthesized)
tatgtcgatatcccacatagcaatagtgaggatgggcgtcgcctacggaaccagaagcgctatatggctatcccgagccccctggtagctgtggagtggtggaggatctgccttgatgaa

SEQ ID NO: 400658 - DNA, 120 bp, Artificial Sequence
  ENSG00000146414_26 (sequence is synthesized)
gctcagatggttgagtgtcccacagtaaaagctgcagaaatggcccagcgtttgagtgggattaatcgatggtgtatcagtggcactccagtacagagaggattagaggatctttttggg

SEQ ID NO: 400659 - DNA, 120 bp, Artificial Sequence
  ENSG00000146414_27 (sequence is synthesized)
ttagtggtctttcttggtattgaaccttactgtgtcaaacactggtgggttcgacttctctatcggccttactgcaagaagaatcctcagcatctctacagctttattgccaagatactg

SEQ ID NO: 400660 - DNA, 120 bp, Artificial Sequence
  ENSG00000146414_28 (sequence is synthesized)
tggaggtctgcaaagaaagatgtgattgaccaaatccaaataccaccacaaaccgaagaaatacactggctccacttttctccagtggaaaggcatttctatcaccgtcagcatgaggtg

SEQ ID NO: 400661 - DNA, 120 bp, Artificial Sequence
  ENSG00000146414_29 (sequence is synthesized)
tgctgccaggatgtggtggtaaaactcaggaagatttctgactgggctctgaagctcagcagcctagacagaaggactgtcacctctatcctgtatccattgctgaggctcagacaggcc

SEQ ID NO: 400662 - DNA, 120 bp, Artificial Sequence
  ENSG00000146414_30 (sequence is synthesized)
tgctgtcacccacaggctgttcgtggagagttcttgccactccaaaaaagcaccatgacaatggaagagctgctgacatctttgcagaagaaatgtggaactgaatgtgaagaagcacat

SEQ ID NO: 400663 - DNA, 120 bp, Artificial Sequence
  ENSG00000146414_31 (sequence is synthesized)
attcatattattaaaggtgagtatgccttggcagcagaattgtacagagaagtgttgcgctcctcggaggaacacaaaggaaaactcaaaactgattcacttcaaagacttcatgctacc

SEQ ID NO: 400664 - DNA, 120 bp, Artificial Sequence
  ENSG00000146414_32 (sequence is synthesized)
cataacttgatggaattgttgatagccaggcacccagggataccacctaccttgcgtgatggccgacttgaggaagaggccaaacagctgcgagagcactacatgagcaagtgtaataca

SEQ ID NO: 400665 - DNA, 120 bp, Artificial Sequence
  ENSG00000146414_33 (sequence is synthesized)
gaagttgctgaagcccagcaagctttatatcctgtgcagcagaccatccatgagcttcaaagaaagattcattctaattctccttggtggctaaatgtgatccacagagcaatagaattt

SEQ ID NO: 400666 - DNA, 120 bp, Artificial Sequence
  ENSG00000146414_34 (sequence is synthesized)
actattgatgaggagctagttcagcgagtgcgaaatgaaataaccagcaactacaagcaacaaactggcaagctttctatgtcagagaagttccgtgattgcagaggtcttcagttctta

SEQ ID NO: 400667 - DNA, 120 bp, Artificial Sequence
  ENSG00000146414_35 (sequence is synthesized)
cttacaacacaaatggaagagctaaataaatgccagaagctagtaagagaggctgtaaaaaacctggagggacctccatctcgtaatgttattgagtctgcaacagtctgtcacctccga

SEQ ID NO: 400668 - DNA, 120 bp, Artificial Sequence
  ENSG00000146414_36 (sequence is synthesized)
ccagccagacttcctctcaactgctgtgtcttttgtaaagctgatgaattgttcacagagtatgaatcaaagctattttccaacacagtcaaaggccagactgcaatatttgaggagatg

SEQ ID NO: 400669 - DNA, 120 bp, Artificial Sequence
  ENSG00000146414_37 (sequence is synthesized)
atagaagatgaagaaggactggtggatgatcgagcacctaccaccacccggggtctctgggcaataagtgagacagagcgatctatgaaagcaatactatcatttgcaaaatcacatagg

SEQ ID NO: 400670 - DNA, 120 bp, Artificial Sequence
  ENSG00000146414_38 (sequence is synthesized)
tttgatgttgaatttgttgatgaaggaagcacttcaatggatctctttgaagcatggaagaaggaatataagttgcttcatgaatattggatggctctgaggaatcgtgtgtctgctgtt

SEQ ID NO: 400671 - DNA, 120 bp, Artificial Sequence
  ENSG00000146414_39 (sequence is synthesized)
gatgaacttgcaatggctacagaacgactaagagtgcgtgatcctagggagccaaagcctaatccgcctgttcttcatatcattgaaccacatgaggtagaacaaaaccgaataaaacta

SEQ ID NO: 400672 - DNA, 120 bp, Artificial Sequence
  ENSG00000146414_40 (sequence is synthesized)
ctaaatgataaagctgttgctacatcacagcttcagaaaaaacttgggcagcttctttacctaactaatttggagaagtctcaagataaaacatcgggaggtgttaatccagaaccttgc

SEQ ID NO: 400673 - DNA, 120 bp, Artificial Sequence
  ENSG00000146414_41 (sequence is synthesized)
ccaatctgtgctcgacagctaggaaaacagtgggcggtactgacctgtggtcactgtttctgtaatgaatgcatttctataattattgaacaatacagcgtgggatctcacagaagctcc

SEQ ID NO: 400674 - DNA, 120 bp, Artificial Sequence
  ENSG00000146414_42 (sequence is synthesized)
attaagtgtgcaatctgccgccagaccacatctcacaaagaaatctcgtatgtctttacctcagagaaagcaaaccaggaggaggacatccctgtgaagggcagccattctacaaaagtg

SEQ ID NO: 400675 - DNA, 120 bp, Artificial Sequence
  ENSG00000146414_43 (sequence is synthesized)
gaagctgtggtcagaactctgatgaaaatacagcttagagatccaggggccaaagcactcgttttctcaacgtggcaagatgtattagatattatttcaaaagctcttactgacaacaac

SEQ ID NO: 400676 - DNA, 120 bp, Artificial Sequence
  ENSG00000146414_44 (sequence is synthesized)
atggaatttgcacaaatcagtcgtgttaagacatttcaggagaacctttcagcatttaaacgtgatccccaaatcaatattttgctgctgcccctgcacacaggttctaatggattaact

SEQ ID NO: 400677 - DNA, 120 bp, Artificial Sequence
  ENSG00000146414_45 (sequence is synthesized)
atcattgaagcaactcatgttctcttggtggagcccatattgaaccctgcccatgagcttcaggccatagggagggtgcaccgaattggacagacaaaacctactattgtacacagattc

SEQ ID NO: 400678 - DNA, 120 bp, Artificial Sequence
  ENSG00000146414_46 (sequence is synthesized)
ttaattaaagcaacaatagaagaaagaatgcaggcaatgctgaaaactgctgagagaagtcacacgaactcatcagcaaagcattcagaggcctctgtcttgactgtggctgacctggca

SEQ ID NO: 400679 - DNA, 120 bp, Artificial Sequence
  ENSG00000146414_47 (sequence is synthesized)
gacctatttaccaaagaaactgaagagcttgaatgaactacacttgattcattccatggactttagtgtattaataaactttcatagctgtagagcaaagttacaagttttaaaaaccca

SEQ ID NO: 400680 - DNA, 120 bp, Artificial Sequence
  ENSG00000146414_48 (sequence is synthesized)
gtagataacagtaacactgttcctagttgaatgaatttgtttattgttctggttatacagtggcttagtacttattgagtccttttcaatatactgtttccaaaagatctataaagattc

SEQ ID NO: 400681 - DNA, 120 bp, Artificial Sequence
  ENSG00000146414_49 (sequence is synthesized)
ttaattttacactcctaataaaacatttattttttgtcccaaatagtatctatatctgatgatgcaagggaattaagagaggtaatgtgtacttttcttatgataagatcactcataaaa

SEQ ID NO: 400682 - DNA, 120 bp, Artificial Sequence
  ENSG00000146414_50 (sequence is synthesized)
cagttggaataagaaagtaaactagtctagttttatatgacctggtatattgaacaaacatagatctcagttttggaagggccttcagtatctttagcacatgattcaccaatatcttgt

SEQ ID NO: 400683 - DNA, 120 bp, Artificial Sequence
  ENSG00000146414_51 (sequence is synthesized)
tagtaatattttaagtagatggtgaattatattaacccattttttgagtaggcttataccataactttacacctagtaattttgcagtaatacaactccttacaataagttaatgttaga

SEQ ID NO: 400684 - DNA, 120 bp, Artificial Sequence
  ENSG00000146414_52 (sequence is synthesized)
cagttatttgtttcttctgcatcttgctactgaaaacaaaaacaatgaaaatattcatatttctattatgtgtaaagtggtgttagtgtaaacagttaactccaaatagattttttaatg

SEQ ID NO: 400685 - DNA, 120 bp, Artificial Sequence
  ENSG00000146414_53 (sequence is synthesized)
tattaatgattaccttaaaattatctgctttccctactcttaatttttcttattgttaaagtttttatatgttgtaagattgatgtatctgtaaatattgcagtttttatgattttgttt

SEQ ID NO: 400686 - DNA, 120 bp, Artificial Sequence
  ENSG00000146414_54 (sequence is synthesized)
tattataacatggaaatatggcagggttttttttttaatcattattatactgatgtcttggattctttttctttcccatgttcttgtgtaactagactttttagccagtgatatctgaat

SEQ ID NO: 400687 - DNA, 120 bp, Artificial Sequence
  ENSG00000146414_55 (sequence is synthesized)
tcatggtagagttgttatttcactccagttgttcctcccttaagcacgagtctttgaccttttgaacaagagaatgccatgttcacataagcaaatcgttgcaagtgataataacgaagt

SEQ ID NO: 400688 - DNA, 120 bp, Artificial Sequence
  ENSG00000146414_56 (sequence is synthesized)
gtttcttcttctgtgaggaattaatggactttgaaattgctgaataaggagtagcttgttacatcctagccatttgatgtaatacaaatgttcttatttggcttccttttctttgagcct

SEQ ID NO: 400689 - DNA, 120 bp, Artificial Sequence
  ENSG00000146414_57 (sequence is synthesized)
tcagagttttaaaggaccctctttgaccctcaggacttattagctcccagttagctgcctggaaaactcatagaaccattccctagatcccatttgtccgagaggctttggtgcttagtt

SEQ ID NO: 400690 - DNA, 120 bp, Artificial Sequence
  ENSG00000146414_58 (sequence is synthesized)
aaggtgcattttcttactctaggtttatagagtgatgtaattcaactgaagaaaacacacacatgcttttggtgcttattcttcagttaaaaggaggtatccattgattcttttatatga

SEQ ID NO: 400691 - DNA, 120 bp, Artificial Sequence
  ENSG00000146414_59 (sequence is synthesized)
aattaaatcaaactgttatttttatagctcttcacatattaaaaagagctttcatgtacatttacgtgtttaatttacccaacaatcttgtgaagttgatataattaatatctttactgt

SEQ ID NO: 400692 - DNA, 120 bp, Artificial Sequence
  ENSG00000146414_60 (sequence is synthesized)
tttaaaggtagagaactgaagttcagatatattgaaactttcttaggacatgtagcaagtaaacagtggagcccaggtcccctgactccatatcttacattcttttactaataacatgtc

SEQ ID NO: 400693 - DNA, 120 bp, Artificial Sequence
  ENSG00000146414_61 (sequence is synthesized)
atgctgagattcagaaggcccatgcttataatttaaaaatgagactatttcagtatttctttgtgtttgttttctactattcctttctgagctatgttttagagaaaacaatttgatatg

SEQ ID NO: 400694 - DNA, 120 bp, Artificial Sequence
  ENSG00000146414_62 (sequence is synthesized)
ttctgagctatgttttagagaaaacaatttgatatgcttcaattttgtaaaatcaaattacatatatataaaaaaacctatctgtattagacaaaaactgtttttatttatttctgtaag

SEQ ID NO: 400695 - DNA, 120 bp, Artificial Sequence
  ENSG00000146414_63 (sequence is synthesized)
gaggaacaggcgttattttgttttcatgacatcaccccattctcccacccctggtccctgacaactgccattctacagttgagagatttggtgatttgtgagttgttttttatttacttt

SEQ ID NO: 400696 - DNA, 120 bp, Artificial Sequence
  ENSG00000146414_64 (sequence is synthesized)
aaaaattttttgatttgttttttatcatctttttcaatttagagatgttttgcacaagtaaaaattatggggcttattcagtaatacatgtctgtaaggaataaacattaagaaacccaa

SEQ ID NO: 400697 - DNA, 120 bp, Artificial Sequence
  ENSG00000146414_65 (sequence is synthesized)
actttagtgactcctttcataattaatggtgcaaattgttgtaattagtatttggtgttatatgagtcagaacactacctatgtctctacaatagcttcagagatcacaaaagaatattg

SEQ ID NO: 400698 - DNA, 120 bp, Artificial Sequence
  ENSG00000146414_66 (sequence is synthesized)
tatctatagaaatttattatgcagatgatatagaaggcatgcactcgatagtagagaacaatgtaaatggactgtagttcaaagccttgaatagtaaaagtattaaaacatatctcggtg

SEQ ID NO: 400699 - DNA, 120 bp, Artificial Sequence
  ENSG00000146414_67 (sequence is synthesized)
aaactggcataatgcaatttatacacatgcattcattcatcaatacaaaaatatgttgtaatttgttatttgaaactgaagtgtgtttcgaaagctactaaatcagagtacatggtaata

SEQ ID NO: 400700 - DNA, 120 bp, Artificial Sequence
  ENSG00000146414_68 (sequence is synthesized)
aaggtagacttcaaatattaagtaattcaaaacacatgttctgagttatgatctgagtattatactggacactgatgaattggtgggtcattgattaaatataatttcattttattgcag

SEQ ID NO: 400701 - DNA, 120 bp, Artificial Sequence
  ENSG00000146414_69 (sequence is synthesized)
gaatcatattttgctagttggcagagaaccttctaggggcaagatatagtagtaaatatttggatagggcaagtgaggacaagatatagatttgaattcttctggaaactggtataacat

SEQ ID NO: 400702 - DNA, 120 bp, Artificial Sequence
  ENSG00000146414_70 (sequence is synthesized)
atacttaagtgaatcagtaaatctcagacaaaatgaaaagttagacattcattatagatatagcatggcgactaagaaggtagactttggaactggacagcccaattttgaatcgtgact

SEQ ID NO: 400703 - DNA, 120 bp, Artificial Sequence
  ENSG00000146414_71 (sequence is synthesized)
caactgttttctagatatgtgactttatttaagttattcacctttcctcgcatcatcagtaaaatgagaatgatgtcaacactactttatagtatagggctgtcttgaggattgtgtgaa

SEQ ID NO: 400704 - DNA, 120 bp, Artificial Sequence
  ENSG00000146414_72 (sequence is synthesized)
ttaatacatgtaaaatgctagagtagtttctgatctattaagcactttctaggtttttgctgctattaatattattaagatcattattactgttatgattaccaacacttattctgaaag

SEQ ID NO: 400705 - DNA, 120 bp, Artificial Sequence
  ENSG00000146414_73 (sequence is synthesized)
aagacagaaatccagaatatcgaatttgaaccaaaagaaaaagttcaatgccctccatatccttttacatttagctacacgtgtgatgatactgacagctgtgaaagaaatgaatggaaa

SEQ ID NO: 400706 - DNA, 120 bp, Artificial Sequence
  ENSG00000146414_74 (sequence is synthesized)
cttgacagtgaataggtagacgccactgttgtctgtagatacactgcctgaaagcctcagcttaaccatgtaatttttaattgtaggaggaacacagaacacttattcaaacatggttag

SEQ ID NO: 400707 - DNA, 120 bp, Artificial Sequence
  ENSG00000146414_75 (sequence is synthesized)
cgatagtcatgtacactgtgactaaaatgtaacatcttaaaattacagtttcctatcctctataatatttctatccaccacaagtagacagaggtctggttacattagagatttatttaa

SEQ ID NO: 400708 - DNA, 120 bp, Artificial Sequence
  ENSG00000146414_76 (sequence is synthesized)
agaaagagttttcctcattcttttacacatccctgaatgtaaggaaaaaaggatgtgtctaactaaacagaaggataaaataaattggctaatgaagacagctacaagaaagagggtaat

SEQ ID NO: 400709 - DNA, 120 bp, Artificial Sequence
  ENSG00000146414_77 (sequence is synthesized)
gtgctttttaaacagcatagattgatattccaggataaagccaaattttggctttattttcctaatttttttccatgcttcattcagaattttaagaaaattactataatgtgatatcca

SEQ ID NO: 400710 - DNA, 120 bp, Artificial Sequence
  ENSG00000146414_78 (sequence is synthesized)
gactggatctgtaattggatttactgcttttaaggggtatttaataaaaagccaagactattttgctctttcttttccttaaatatgcttttttaatattttttttctaaccaaacttga

SEQ ID NO: 400711 - DNA, 120 bp, Artificial Sequence
  ENSG00000146414_79 (sequence is synthesized)
acaaaggacacatcggtatctaaatttagtagcaaatgtgggctttaaggaatagagaatgagaattagagaatgatggggttgactcttaagcaagatgaagtattctttattaattcc

SEQ ID NO: 400712 - DNA, 120 bp, Artificial Sequence
  ENSG00000146414_80 (sequence is synthesized)
ttctgagtttttgatactcctcacttttaagtaatgtgttttttaagtagaatcagctacaagttgaaattcactaccagtagttaagcagttattagggtacccttctcccaagaaaac

SEQ ID NO: 400713 - DNA, 120 bp, Artificial Sequence
  ENSG00000146414_81 (sequence is synthesized)
tgtagctgcattaaagaacttttaattgctcttttttcactgttatttgagtaaaacctgaaaatatcagttatattgctctttagtctgttgggataaacagaattccacagttagaat

SEQ ID NO: 400714 - DNA, 120 bp, Artificial Sequence
  ENSG00000146414_82 (sequence is synthesized)
aagcattcatccattcattccacacatatatattggacacgtactagcacacaggcagtgtgctaggcctcatagacacagcatacacataaataaaacagatatggttactacttttgt

SEQ ID NO: 400715 - DNA, 120 bp, Artificial Sequence
  ENSG00000146414_83 (sequence is synthesized)
tactacttttgtggagattggtgaaggagtttgagttggggcaggaagcacagatgttaataaataatgtgttataattgtgataagcactacaaaagaacaaagctggaggcatcatgc

SEQ ID NO: 400716 - DNA, 78 bp, Artificial Sequence
  ENSG00000146414_84 (sequence is synthesized)
aatggagatctttgacagacccgacaaaaacaaacaatggggaaaggatcctattgggtaaatggggctggaaaaact

SEQ ID NO: 400717 - DNA, 67 bp, Artificial Sequence
  ENSG00000146414_85 (sequence is synthesized)
ctacaactgatctttgacagacccgacaaaaacaaacaatggggaaaggatcctattgggtaaatgg

SEQ ID NO: 400718 - DNA, 61 bp, Artificial Sequence
  ENSG00000146414_86 (sequence is synthesized)
gaaaacctaggcagtaccattcaggacgtaggcatgggggaatctaattaaagagcttctg

SEQ ID NO: 400719 - DNA, 90 bp, Artificial Sequence
  ENSG00000146414_87 (sequence is synthesized)
aattgcaacaaaagccaaaattgacaaagggaatctaattaaagagcttctgcagagcaaaagaaattatcgtcggtaaacaggcataac

SEQ ID NO: 400720 - DNA, 120 bp, Artificial Sequence
  ENSG00000146414_88 (sequence is synthesized)
tttgcaatcaacccatctgacagaggtctaatatccagaatttacaaggaatgtgaacatatttataagaaaaaaacaaccccatcaaaaattggacaaaggacatgaacagacacttct

SEQ ID NO: 400721 - DNA, 69 bp, Artificial Sequence
  ENSG00000146414_89 (sequence is synthesized)
acagacacttctcaaaagaagatatttacgtggccaacaaacatgaaaaaaagttcatcactgatcatc

SEQ ID NO: 400722 - DNA, 120 bp, Artificial Sequence
  ENSG00000146414_90 (sequence is synthesized)
cgattattaaaaagtcaacaaacaatagatgctggcaaggctgtgaagaaataggaacgtttttacactgttggtaggaatataaattagtgcaaccattgtggaagacagtatggcgat

SEQ ID NO: 400723 - DNA, 84 bp, Artificial Sequence
  ENSG00000146414_91 (sequence is synthesized)
tatacacacaaatgtttactgcagcactatttacaataacaaatatatggaaccaatccaaatgcccatcaatgatagactaga

SEQ ID NO: 400724 - DNA, 80 bp, Artificial Sequence
  ENSG00000146414_92 (sequence is synthesized)
gcagcactatttacaataacaaatatatggaaccaaagtacatatgcaccatgtaatactatgcatccataaaaaggaat

SEQ ID NO: 400725 - DNA, 89 bp, Artificial Sequence
  ENSG00000146414_93 (sequence is synthesized)
cactgagaacacatggacacaaagaagggaacaacacacacaccagggcttgttggggcaggggagtaaggagagggaactaagagggc

SEQ ID NO: 400726 - DNA, 120 bp, Artificial Sequence
  ENSG00000146414_94 (sequence is synthesized)
ttgttggggcaggggagtaaggagagggaactaagagggcagataaataggtgcagcaaactaccatggcacatggatacctgtgtaacaagcctgcatattctgtacatgtatcctgtt

SEQ ID NO: 400727 - DNA, 120 bp, Artificial Sequence
  ENSG00000146414_95 (sequence is synthesized)
tgttttgttttgttttgttttgttttttaaggagaaaaaggaaaaaaagtctctgagggaatgacagttaagcaggtatctaaaggatgaatgatgaattagtcagcctgaggagagaat

SEQ ID NO: 400728 - DNA, 120 bp, Artificial Sequence
  ENSG00000146414_96 (sequence is synthesized)
gaataggttggctcccagacagagaaaaagaaaaccagaagagagccagtgcatggaaaagcctaagacaaggactcaaatggatctgagtggctgaagtgtagaaagcaaggagaaagc

SEQ ID NO: 400729 - DNA, 120 bp, Artificial Sequence
  ENSG00000146414_97 (sequence is synthesized)
agttgaataagcctggagacctaactaggggaccagatgttgaagggccacctgaacatttgagaattttatttttatttaaggagaaagccattaaatattataagcagggatgtatca

SEQ ID NO: 400730 - DNA, 120 bp, Artificial Sequence
  ENSG00000146414_98 (sequence is synthesized)
tgatcaaatttggatttcaaaaagatctctcttgtgtggaaaacagatgatgaggaacagaatagagcagaagaaatttggagagagcagcttaggaggctacagcaggagtaatggtgg

SEQ ID NO: 400731 - DNA, 120 bp, Artificial Sequence
  ENSG00000146414_99 (sequence is synthesized)
ctttgatttggctgatggcggtagaaatggagagaagtgggtatattctagacatgtttagaataaagttagagaatgttggcagcattagtgaaggaaatttcatagatcacccctggt

SEQ ID NO: 400732 - DNA, 120 bp, Artificial Sequence
  ENSG00000146414_100 (sequence is synthesized)
ttctgatgtgaataagcaggtgggtaatggtatagctaatgatacaagatatttggaagaggaatacatttagacatatcatatttaaggtgcctaagacatccaagtagaactatccag

SEQ ID NO: 400733 - DNA, 120 bp, Artificial Sequence
  ENSG00000146414_101 (sequence is synthesized)
aaaagtgttgatatgtggagctggagatacaaaattcggagtcactaatagaaaagtttgcttcagattgagtcctatgaagtccataactttaaaagattgaatcaagttgggagggct

SEQ ID NO: 400734 - DNA, 120 bp, Artificial Sequence
  ENSG00000146414_102 (sequence is synthesized)
ggaaaatgagaaggagcaactagggacaggcaatccaggcaggtacgctggcaacaaagaccacagggaagctctgcttcggtgaggagacagtagtgctgaaggtggatcaactacaat

SEQ ID NO: 400735 - DNA, 120 bp, Artificial Sequence
  ENSG00000146414_103 (sequence is synthesized)
gtggactaatttgtctaatgaggtcactgatgactttagaaggagctcttttaatacaaatgtagaggcagaaagcagattgggagggattgcgggatgagcaggaagtcaacaagtaga

SEQ ID NO: 400736 - DNA, 120 bp, Artificial Sequence
  ENSG00000146414_104 (sequence is synthesized)
aaaaatgcccaactgtttcataaacttaactgtgagatagaatcagaattgtaaccagaacctatgaaaacagaaagacatcacttttttgttgttgttctgtttaagacaaaagattct

SEQ ID NO: 400737 - DNA, 120 bp, Artificial Sequence
  ENSG00000146414_105 (sequence is synthesized)
tgagcatgtttagtctccagtgaaaaaaggatagactgaagatataggagaaaggataatttgtaatacaagtttcttgaaaagaaggagaatgttgatgtatagaaagtagagtttcat

SEQ ID NO: 400738 - DNA, 120 bp, Artificial Sequence
  ENSG00000146414_106 (sequence is synthesized)
tgaagtcaaataacaggtataaattgggctattgagcacaaaagatataagcataggtgttcttatctgagaatgggagatcatagtcattccagagaggacaggcctgccagatgtgac

SEQ ID NO: 400739 - DNA, 120 bp, Artificial Sequence
  ENSG00000146414_107 (sequence is synthesized)
tgtagaagtaggtgactcaagtgaggtggagaagaaaagatgctagaagatgaaacagtgagacctgaattttggatgagctgtccaagcagacagtatgtaatatctagagttgaggta

SEQ ID NO: 400740 - DNA, 120 bp, Artificial Sequence
  ENSG00000146414_108 (sequence is synthesized)
tagagtaaattaggcaccaaagttctttagtgaatgtagggtagggttcaataaattatagcaaagggtagagttgggataactgggcttcagggggctcaaaaaatggaagttgttaca

SEQ ID NO: 400741 - DNA, 120 bp, Artificial Sequence
  ENSG00000146414_109 (sequence is synthesized)
caaatgagaactaatgctctgaaacctgcatttgtggaccagcactcaaatgcaacagtcaaatccttcactcaaaagggctgctgagagaccagtatgcttagaagatagccaggttct

SEQ ID NO: 400742 - DNA, 120 bp, Artificial Sequence
  ENSG00000146414_110 (sequence is synthesized)
aattaaagcagggaagtgaagagcagtatttctacaagaggtagaaaatatgaaacaatttgtttcataaaatacgggttccagggggcgccagtgaaaggtccaggagtgaaaggagaa

SEQ ID NO: 400743 - DNA, 120 bp, Artificial Sequence
  ENSG00000146414_111 (sequence is synthesized)
aaattagagggtaaacaagcaggaaggaagtgcaggacagtatgggaataacagaacaggcaaggatacgtgatgagagcatcatgacctaaggatcatctagtcctgttccctctctgt

SEQ ID NO: 400744 - DNA, 120 bp, Artificial Sequence
  ENSG00000146414_112 (sequence is synthesized)
gaatcccctgaatacattttacagtcagccctgtgtatctgtggatatagccaaccatagatcaaaaatacttggaaaaagaaaaattccatgaagttctaaagagcagaacttgaattt

SEQ ID NO: 400745 - DNA, 120 bp, Artificial Sequence
  ENSG00000146414_113 (sequence is synthesized)
ccatgaagttctaaagagcagaacttgaatttgcagcatgctgagtttacattgaatccacgcaaatgcaatgatgtgtagggattatatgaggtaatctagagatgatttaaagtatac

SEQ ID NO: 400746 - DNA, 120 bp, Artificial Sequence
  ENSG00000146414_114 (sequence is synthesized)
acatcattttatataagggccttgagcatcctgggattttggtatccacaggggttttggaagcagtcagtccctcacagatactgagggaggactatatttttaaagcaaataccaaag

SEQ ID NO: 400747 - DNA, 120 bp, Artificial Sequence
  ENSG00000146414_115 (sequence is synthesized)
agttattgaaggaagaagtaggtgacttatggtgcagccctgaggcatttgacagttattctttatcctgcctgcacttaggagctatgctgcttcccagtccctctctccctttcttcc

SEQ ID NO: 400748 - DNA, 120 bp, Artificial Sequence
  ENSG00000146414_116 (sequence is synthesized)
cactcctatagtttctcctttcctttccataaagatagtctttcttagcccttccttttttctcttctttctcttcctctggccacagcatctcaagggccacagatggcctttgtggct

SEQ ID NO: 400749 - DNA, 120 bp, Artificial Sequence
  ENSG00000146414_117 (sequence is synthesized)
aagaagaggtggctcacccttaggtgacagcatgcatcacagtacaaggaactggcataagaaagaactgctgtgtcaggttttgcgcagagaggttaaggaagtgattgctctagctac

SEQ ID NO: 400750 - DNA, 120 bp, Artificial Sequence
  ENSG00000146414_118 (sequence is synthesized)
tggtaaacagcacagcctctacgaaactgagtcattgagcccatcaaatccaaacacctgttcattttatggcagctttcctagacacccaggatagagattggcacagttacatgtgct

SEQ ID NO: 400751 - DNA, 120 bp, Artificial Sequence
  ENSG00000146414_119 (sequence is synthesized)
gtgctgttggagcagggatatcggtatataaatactgtttattgtgctctcacttctcgctgtctttcatgagtattgattaacacgtgaattaactgaagcatcttttaaaaaaaatta

SEQ ID NO: 400752 - DNA, 120 bp, Artificial Sequence
  ENSG00000146414_120 (sequence is synthesized)
agtttatagaatttactaaagataatttccctttttatcatagatgcacatgtaattacatttccttttcttaaacataagactattgtaccattgtgcgggcaaattttatccctcctc

SEQ ID NO: 400753 - DNA, 120 bp, Artificial Sequence
  ENSG00000146414_121 (sequence is synthesized)
gacgttgtcacactgcttcacgccatgtttaggttggctcttcactgctttttctgttaccatttgtgtctgccacatttgccttgtgcttcctgtctcttcttctgacttctgtcacat

SEQ ID NO: 400754 - DNA, 120 bp, Artificial Sequence
  ENSG00000146414_122 (sequence is synthesized)
ttctggcctgctgtctgtcacttcctccttgaaacatcagcttattgtattctgagacttcacccctctcttgtgactctttgaaacttccacataaatgatcatattgcctattttgga

SEQ ID NO: 400755 - DNA, 120 bp, Artificial Sequence
  ENSG00000146414_123 (sequence is synthesized)
ttagtatgtaaataaagatggctttgtgtaaataattaaggcattattttcaaattttagaaactactagttccaattatttctaaacctagtttttttctttatattactgttgattat

SEQ ID NO: 400756 - DNA, 120 bp, Artificial Sequence
  ENSG00000146414_124 (sequence is synthesized)
aacaagcaatactgacaagtaattttttatttaattgaaatgtttatattatctgaaatataaaatttatttctgaaatgattatttcactgtatttatgtcaagattctcagacatagc

SEQ ID NO: 400757 - DNA, 120 bp, Artificial Sequence
  ENSG00000146414_125 (sequence is synthesized)
gattctcagacatagcaaaccatatatcgtacagaatgcttaatcatatagcttttttgtggataaaagatatttggaaagcataaaactattatttattagtagtagacatttttaagt

SEQ ID NO: 400758 - DNA, 120 bp, Artificial Sequence
  ENSG00000146414_126 (sequence is synthesized)
agtatttcttggaaataagagattttacaatgtaaggaatgctgttgattgaccatagatataaaatgaatactgggatcacaaatgtcctgttcggtggatgcacttaagttgaagacc

SEQ ID NO: 400759 - DNA, 120 bp, Artificial Sequence
  ENSG00000146414_127 (sequence is synthesized)
atttcttccctagcaacagtgtgatggtattcctaaatgacctttggaacctactgggcatctcacaaagtaaacaaaattccccttgcaagttctgacaactgccaggcattttggatg

SEQ ID NO: 400760 - DNA, 120 bp, Artificial Sequence
  ENSG00000146414_128 (sequence is synthesized)
gtgaagtaggcctcctggcagaacatatggcccacatgtcttgttccctgtgtcttacatttggctaggttttatacaaagcattttgccagtggaaaccctgaccctatatactggtca

SEQ ID NO: 400761 - DNA, 120 bp, Artificial Sequence
  ENSG00000146414_129 (sequence is synthesized)
agagtcttagataataagaaatttctgtccgggagaaaatagatacagccactacatagatatagtgacagcaatacagtacccttcccacccaccacatgctacacaattgcttttttt

SEQ ID NO: 400762 - DNA, 120 bp, Artificial Sequence
  ENSG00000146414_130 (sequence is synthesized)
gtcaaacttttaagtatgtgaccatcaactggcctgctttttaaaataaatatttttgttcaggctctgtctccataaactttgactcattagacctgggatgtggtccagaaatctgca

SEQ ID NO: 400763 - DNA, 120 bp, Artificial Sequence
  ENSG00000146414_131 (sequence is synthesized)
tttttagcaagcatatctcttgataatagagatatcttatacagcctttttgtagagaaaaaaactctgtatctctacattccaactcacagagaagcctagccatactatgtgtagaat

SEQ ID NO: 400764 - DNA, 120 bp, Artificial Sequence
  ENSG00000146414_132 (sequence is synthesized)
tctacatgtggaattctattctgttttttttttatttgaatttttgttcatttaatttaaagatcatttgtgacatctgtctcacacttttaaaatataattaaaataaacatctgagtg

SEQ ID NO: 400765 - DNA, 120 bp, Artificial Sequence
  ENSG00000146414_133 (sequence is synthesized)
gtgcttagaaattcttttttccaatccagcaaatcttgcatctattggtttcagagcatggtatttcttatatatgtcttaccaagtacattcagttgagtggttttttggtttaacttc

SEQ ID NO: 400766 - DNA, 120 bp, Artificial Sequence
  ENSG00000146414_134 (sequence is synthesized)
tgataacagtttcagatttttgaattaagtataagctgtatgtaatgaatggttgcataaatctaacattattttagcacctagcccaaaacctagggcagaatagatgctcaataagta

SEQ ID NO: 400767 - DNA, 120 bp, Artificial Sequence
  ENSG00000146414_135 (sequence is synthesized)
taaatggaattggaattgaatttcagatttaagagcctatacagcctgtattttaattcatggaaagttctatgtgctgtgtaatgtctgtagaaaagcttctgcaaactagtaatgaag

SEQ ID NO: 400768 - DNA, 120 bp, Artificial Sequence
  ENSG00000146414_136 (sequence is synthesized)
ctctactgtaagtgtgtatttaatctccatttttaatttgacccatagaaaattgtctttatagaccaaaaatggtcaaagatgagcaatttcatatctattacatgcttagtgttcact

SEQ ID NO: 400769 - DNA, 120 bp, Artificial Sequence
  ENSG00000146414_137 (sequence is synthesized)
attttggggcatcttgtttctctccaggttgcgcattcatctgtttttgagtttaaaaccttgtatgtgcttaagaccaatagatattctcagtcactttttagacatttttgtcacctc

SEQ ID NO: 400770 - DNA, 120 bp, Artificial Sequence
  ENSG00000146414_138 (sequence is synthesized)
agttttatcagaactagaaaaatcttccttaaaaacaactgaaaccttttcttttgcagtgtttcttttgctaatgatgaactaatattaacaacttaccttctaataactttgtctttg

SEQ ID NO: 400771 - DNA, 120 bp, Artificial Sequence
  ENSG00000146414_139 (sequence is synthesized)
taactcaggtttaaaagcattactccaccaatctcttttattctccattaaaagatattatttcctttataattcatttttattccttatttgtttagtgccttaagtctgtttctgtac

SEQ ID NO: 400772 - DNA, 120 bp, Artificial Sequence
  ENSG00000146414_140 (sequence is synthesized)
agcttggagactgtaacttggaaaaatgtagatatattcattatatactatctcacttaaatgtgaattctgaagaagtttttctgagaaaataaattcgtcttgtttgagtgttccttc

SEQ ID NO: 400773 - DNA, 120 bp, Artificial Sequence
  ENSG00000146414_141 (sequence is synthesized)
tctgtctgctgtattctaccagggggacagaggaaagaagggcagagaaattctttcctggatttcatgaaatcactgaggccagagcaacagatcatttaacttttctttatcccgtgt

SEQ ID NO: 400774 - DNA, 120 bp, Artificial Sequence
  ENSG00000146414_142 (sequence is synthesized)
atgtattactgaaaaaaatggtacataatagaatttgagtttatttttatctgacttcaggtacatagggacacttcctgtttaaaagaactctgcattgaattgtgcctttcataaagc

SEQ ID NO: 400775 - DNA, 120 bp, Artificial Sequence
  ENSG00000146416_0 (sequence is synthesized)
ctccttgccgcccagccggtccaggcctctggcgaacatggcgcttgtcccctgccaggtgctgcggatggcaatcctgctgtcttactgctctatcctgtgtaactacaaggccatcga

SEQ ID NO: 400776 - DNA, 120 bp, Artificial Sequence
  ENSG00000146416_1 (sequence is synthesized)
aatgccctcacaccagacctacggagggagctggaaattcctgacgttcattgatctggttatccaggctgtcttttttggcatctgtgtgctgactgatctttccagtcttctgactcg

SEQ ID NO: 400777 - DNA, 120 bp, Artificial Sequence
  ENSG00000146416_2 (sequence is synthesized)
aggaagtgggaaccaggagcaagagaggcagctcaagaagctcatctctctccgggactggatgttagctgtgttggcctttcctgttggggtttttgttgtagcagtgttctggatcat

SEQ ID NO: 400778 - DNA, 120 bp, Artificial Sequence
  ENSG00000146416_3 (sequence is synthesized)
ttatgcctatgacagagagatgatatacccgaagctgctggataattttatcccagggtggctgaatcacggaatgcacacgacggttctgccctttatattaatcgagatgaggacatc

SEQ ID NO: 400779 - DNA, 120 bp, Artificial Sequence
  ENSG00000146416_4 (sequence is synthesized)
gcaccatcagtatcccagcaggagcagcggacttaccgccatatgtaccttctctgttggctatatattatgggtgtgctgggtgcatcatgtaactggcatgtgggtgtaccctttcct

SEQ ID NO: 400780 - DNA, 120 bp, Artificial Sequence
  ENSG00000146416_5 (sequence is synthesized)
ggaacacattggcccaggagccagaatcatcttctttgggtctacaaccatcttaatgaacttcctgtacctgctgggagaagttctgaacaactatatctgggatacacagaaaagtat

SEQ ID NO: 400781 - DNA, 120 bp, Artificial Sequence
  ENSG00000146416_6 (sequence is synthesized)
ggaagaagagaaagaaaagcctaaattggaatgagatccaagtctaaacgcaagagctagattgagccgccattgaagactccttcccctcgggcattggcagtgggggagaaaaggctt

SEQ ID NO: 400782 - DNA, 120 bp, Artificial Sequence
  ENSG00000146416_7 (sequence is synthesized)
caaaggaacttggtggcatcagcacccccctcccccaatgaggacaccttttatatataaatatgtataaacatagaatacagttgtttccaaaagaactcaccctcactgtgtgttaaa

SEQ ID NO: 400783 - DNA, 120 bp, Artificial Sequence
  ENSG00000146416_8 (sequence is synthesized)
ctccatctaatcaagaaagaataaaagtttattgcacttctttttgagaaatatgttaaagtcaaaggggcatatatagagtaaggcttttgtgtatttaatcctaaaggtggctgtaat

SEQ ID NO: 400784 - DNA, 120 bp, Artificial Sequence
  ENSG00000146416_9 (sequence is synthesized)
catgaacctaggccaccatggggacctgagagggaaggggacagatgtttctcattgcataatgtcacagttgcctcaaatgagcaccatttgtaataatgatgtcaatttcatgaaaag

SEQ ID NO: 400785 - DNA, 120 bp, Artificial Sequence
  ENSG00000146416_10 (sequence is synthesized)
cctgagtgtattgcatctcttgatttaatcatgtgaaacttttcctagatgcaaatgctgactaataaagacaaagccaccctgaacctgacgtctgcattgtgcatctcaaaatcctaa

SEQ ID NO: 400786 - DNA, 120 bp, Artificial Sequence
  ENSG00000146416_11 (sequence is synthesized)
cagcattagtatctccttttcatttttattacctgttgaaaatgggtttactgaacctggttctttcctataatttttggattttaaaaaatgtgaatctttttgataactccaaaacaa

SEQ ID NO: 400787 - DNA, 61 bp, Artificial Sequence
  ENSG00000146416_12 (sequence is synthesized)
aaatgtgaatctttttgataactccaaaacaaattttttttttctttttttggcaagctcc

SEQ ID NO: 400788 - DNA, 120 bp, Artificial Sequence
  ENSG00000146416_13 (sequence is synthesized)
gctgggattacagacatgaaccaccgcgcccagccacaaaattgtttttaaaaaaactattttacaaaatctttgaccgtaattatttttaagatgaaaaatatgttatataaattataa

SEQ ID NO: 400789 - DNA, 120 bp, Artificial Sequence
  ENSG00000146416_14 (sequence is synthesized)
gatgaaaaatatgttatataaattataaaatgttacttaacacaaatataagtattgattgcccaatgttgagagagatcaacaaatgatataaaaccattcactccaaaattataatta

SEQ ID NO: 400790 - DNA, 120 bp, Artificial Sequence
  ENSG00000146416_15 (sequence is synthesized)
cgcccactagccacagggcccgcttccccctggagatcagcgcgcacttcccgagccctcgtagcactcagaggtcgcatccacacctgggatgcctagggggcgcctcctggccgggtg

SEQ ID NO: 400791 - DNA, 120 bp, Artificial Sequence
  ENSG00000146416_16 (sequence is synthesized)
cactgctgccaagtcaacccatctgcaggagaacgctttggaaaaaacagactttaaaaagaaaagcaaactgctcttagcccctgatagcttctccacaggagagggaatatggacaga

SEQ ID NO: 400792 - DNA, 120 bp, Artificial Sequence
  ENSG00000146416_17 (sequence is synthesized)
gctgaggttcaagacacatgtgctgtttgagctgaatctgtgctgttttcttctttccgtggttacccaacaacgaaggcgtgttgtaccttcttgccttcaaacctgttcctcctcccg

SEQ ID NO: 400793 - DNA, 120 bp, Artificial Sequence
  ENSG00000146416_18 (sequence is synthesized)
tcagatgtccttactcctcaatttgaagttttccttcataggatttctgagaaggactttggaaaaagtgctccagatctctgccagttccttagccatgaaaaccaaacataaaagatc

SEQ ID NO: 400794 - DNA, 120 bp, Artificial Sequence
  ENSG00000146416_19 (sequence is synthesized)
atctggggacattcattcagagcacgttacccacattccaccaccactactctgacagcacaaaacatataccaggagctggggttatgtggtgggggagtccttcctattgtaagccct

SEQ ID NO: 400795 - DNA, 120 bp, Artificial Sequence
  ENSG00000146416_20 (sequence is synthesized)
aacattatgaccctctggggttaaattttataattttcatattgtggagtcccatattttgttctgctttccactagtccaggcttctgaggtcttctctgtgttcattgcttattaatt

SEQ ID NO: 400796 - DNA, 120 bp, Artificial Sequence
  ENSG00000146416_21 (sequence is synthesized)
acaaaatagggaagggccctaccctcagaaagcttgcaatttatgaaagaatactaacaaaacctgcaaagtggtattttaagttattttgtttcatttttgctattgaaacaaagaaac

SEQ ID NO: 400797 - DNA, 120 bp, Artificial Sequence
  ENSG00000146416_22 (sequence is synthesized)
tgagaatttggtatgattcaaaaaatgtttaggtacaagaaaaagaaaaaagcaagaagcacttgccagatttaactataattcctaaaaatgatgaacattttcatcttcaggaacatg

SEQ ID NO: 400798 - DNA, 120 bp, Artificial Sequence
  ENSG00000146416_23 (sequence is synthesized)
aaacatcatcgactattctctacagacaacaggcaaaggttcttactggtccagtacatacaagtccttcaggaagaaaaacatgattctaccaggattgggttgaatagagagagaatt

SEQ ID NO: 400799 - DNA, 120 bp, Artificial Sequence
  ENSG00000146416_24 (sequence is synthesized)
gcagtttaagattcatgagtatggaaataaacagctcttatggctaataaactctctatgaactttaaaaagaaaacaagaaaaaaaaaagcatggctttttaaaatccaaagtccttgc

SEQ ID NO: 400800 - DNA, 120 bp, Artificial Sequence
  ENSG00000146416_25 (sequence is synthesized)
cttaggaagagacaggactaaagtaaaaataaatgaagtctgtttgaaactcatgagttgcacacctcatgttgccagaagctggtttaaaaagcagtctagctgggatttccatgcaaa

SEQ ID NO: 400801 - DNA, 120 bp, Artificial Sequence
  ENSG00000146416_26 (sequence is synthesized)
ctcagcaagtcatgaatcaacttgaagccttgtctcccagaggccataggagctgggtgtgtcccagagatgctgtgtcctgattctgtggaaagggtggggaagagaggtcactgagga

SEQ ID NO: 400802 - DNA, 120 bp, Artificial Sequence
  ENSG00000146416_27 (sequence is synthesized)
tgtttctggagaaagttgtgcatggctttccttcttagctaggagggaatagggggtgtgtcaggagggtgaatgggagaagtgagggcagatgagtggatgtgtgagtagtgttagcaa

SEQ ID NO: 400803 - DNA, 120 bp, Artificial Sequence
  ENSG00000146416_28 (sequence is synthesized)
atcattagctggtttactgagctgtctttcatcatagattccaaattctgttggattctttcaactattgttaaccaataaattgtatgttgtggatagtcgatgaacttgaaataaaag

SEQ ID NO: 400804 - DNA, 120 bp, Artificial Sequence
  ENSG00000146416_29 (sequence is synthesized)
atttctttttccttccagtttgttgtagcagtgttctggatcatttatgcctatgacagagagatgatatacccgaagctgctggataattttatcccagggtggctgaatcacggaatg

SEQ ID NO: 400805 - DNA, 120 bp, Artificial Sequence
  ENSG00000146416_30 (sequence is synthesized)
ttttctccagttttattattctgtgaagacagtttggtgtaaatgatttaagagcatttcaaagcttaaagttttcttggcacgcttttcaaacgcccatctgactttgaagcaggctgc

SEQ ID NO: 400806 - DNA, 120 bp, Artificial Sequence
  ENSG00000146416_31 (sequence is synthesized)
ctctccacagaaagcttgctccagcaatgactaaaggattgacctggtgccatgcatgctgctctgcacaagaaggacatttggaaatgaccttgaagcgaagttttgccaagttgatga

SEQ ID NO: 400807 - DNA, 120 bp, Artificial Sequence
  ENSG00000146416_32 (sequence is synthesized)
ctccataaggaatgatacttgctcttgattttattagttgcattttgtaacaggttggaaaaattaggtaatggagaactttggcataccacttttgtttcttttaggtgatttttaaaa

SEQ ID NO: 400808 - DNA, 120 bp, Artificial Sequence
  ENSG00000146416_33 (sequence is synthesized)
aacatttgctgaaggagaggttgatgctcaaagggtacagtgataaatggagagacgggagtttaaaatgaaggataagccgcaaatgaggatgaagttaatggatagagaaaagatggg

SEQ ID NO: 400809 - DNA, 120 bp, Artificial Sequence
  ENSG00000146416_34 (sequence is synthesized)
aggaagaggtatctctctttactcgtaagctgcccatcgatatgatttagactctaggagaggggcgtttctttcctcagtaggcacactcatagagtaaactgttgccgctgtttaaac

SEQ ID NO: 400810 - DNA, 120 bp, Artificial Sequence
  ENSG00000146416_35 (sequence is synthesized)
atgttaattgatgttgacaccagttgttgctatacagttttccattttactgagcgatgtatttatgttgctgcataatgtcgcctgattgcacttctcatgctggtgaagttggctgac

SEQ ID NO: 400811 - DNA, 120 bp, Artificial Sequence
  ENSG00000146416_36 (sequence is synthesized)
atttcaggctctggataacatgaagctgtgctttaaccttatttggaagtcagggttagagtggcactggaaggtctccttcagcttcccttcctgtgacctgcctactataaccctggc

SEQ ID NO: 400812 - DNA, 120 bp, Artificial Sequence
  ENSG00000146416_37 (sequence is synthesized)
aaggctgagacagtccaagtttggggcagtcaaggtgggacagcagaagatttcagggtacaagtcatctattctcttatgccagctctcagatttgtatataaaatctgattctacact

SEQ ID NO: 400813 - DNA, 120 bp, Artificial Sequence
  ENSG00000146416_38 (sequence is synthesized)
tcttttaacaaataataaataaataaataggaccatccaacccctctagagctctctaaggagactgtagaagacttgtggccactctcattttaaagattctaataatctccacaaagt

SEQ ID NO: 400814 - DNA, 120 bp, Artificial Sequence
  ENSG00000146416_39 (sequence is synthesized)
aatcctgggaaacatacatctgtaagaccagggaaacatactggcaatagcaacttcccagaacattcctttttacactgcctgggatttttcaataagaaatttggcatttctgtaaat

SEQ ID NO: 400815 - DNA, 120 bp, Artificial Sequence
  ENSG00000146416_40 (sequence is synthesized)
ttcttaaaagctcaagccttccagactcatcattttgtagttaaaaaagtaagccatgcaactgagataaaagtcaaagttatagattataactgtttgcacaactgttcacatttttaa

SEQ ID NO: 400816 - DNA, 120 bp, Artificial Sequence
  ENSG00000146416_41 (sequence is synthesized)
ctttttttattttttggagactttttaagagtctcactgtgtcatccaggctggaatacacagtggcactatcatggctcaccacacccttaaactgcagggctcaagcaatcctcctgc

SEQ ID NO: 400817 - DNA, 120 bp, Artificial Sequence
  ENSG00000146416_42 (sequence is synthesized)
ctcagccccccaagtagctgggaccacagatgtggaccaccacccctggctacttttttaaaaatttttttgtagagacaatgggctcactatgtttcccaagctagagacaatggcctc

SEQ ID NO: 400818 - DNA, 120 bp, Artificial Sequence
  ENSG00000146416_43 (sequence is synthesized)
gcctcaagcgatcctcctgcctcagccttcctgaagtcctaggattacatgcatgagctaccacacccagcccctgctcacattttatatagtaacttattttaagaatagtaaagtatt

SEQ ID NO: 400819 - DNA, 120 bp, Artificial Sequence
  ENSG00000146416_44 (sequence is synthesized)
atagtaacttattttaagaatagtaaagtatttgcaaaatagttttttaatacagtaatttattatatattgaaatcaagcttgatgatatttcattaggttttgctgagtgtcatatgc

SEQ ID NO: 400820 - DNA, 120 bp, Artificial Sequence
  ENSG00000146416_45 (sequence is synthesized)
taagttatttgcttatgaatttttctccaattgcctgtatttggtaagtttgcatggaaagttctgacaggaaactcagaaatatttcattgttttaccctactatcttttttgatgtgt

SEQ ID NO: 400821 - DNA, 120 bp, Artificial Sequence
  ENSG00000146416_46 (sequence is synthesized)
cttaaagttgatttgctttaaattgcagtatcatcctttttttctgtacctaaatgtttttaactgaagaacacaatttccctcaaaaccctcatccctaatttagagccctcttatatt

SEQ ID NO: 400822 - DNA, 120 bp, Artificial Sequence
  ENSG00000146416_47 (sequence is synthesized)
aatatgagtcattttaaatgtatttcctgaaacacttctcaacttcgtaaataaaaaagagatatatcttagtccattcaggctactataacaaaatagcacaattgggtggcttataaa

SEQ ID NO: 400823 - DNA, 120 bp, Artificial Sequence
  ENSG00000146416_48 (sequence is synthesized)
caacataaatttatttatcatagttctagagcctgggaagtccaagagctgggtgccagcatggttgggttctgatgaggatcctcttccagattacagacttccagcttcttgctgtgt

SEQ ID NO: 400824 - DNA, 120 bp, Artificial Sequence
  ENSG00000146416_49 (sequence is synthesized)
cctcacatggtggaaggaacaagtaatctctctggagcctcttttaaaagcccaccaatcccattcattgaggattccaccccagtgacctaatcacttcccaaagggccatctcctaat

SEQ ID NO: 400825 - DNA, 120 bp, Artificial Sequence
  ENSG00000146416_50 (sequence is synthesized)
gctataaccttagaggttagggtttcaacatatgaattttgaggggacagaaacattcagcccatagcaggatgagaaaaagaaaggaaagtacaacaaagaacatcaaccataaggaac

SEQ ID NO: 400826 - DNA, 120 bp, Artificial Sequence
  ENSG00000146416_51 (sequence is synthesized)
accatgacttctgatatttaatatcatggatcacagattgtaggagtcgagaaacagaataaaaagacaaggcccaggcccagtgagcttttgatgcttgaggctcctcatgcccttgct

SEQ ID NO: 400827 - DNA, 120 bp, Artificial Sequence
  ENSG00000146416_52 (sequence is synthesized)
ctcccactgacctcagtgctcagcactggctttcttctcctggtgatattttccatttatcttttggtgtaaacattttagagatgagagaagtagggagcttatcattatttagtctga

SEQ ID NO: 400828 - DNA, 120 bp, Artificial Sequence
  ENSG00000146416_53 (sequence is synthesized)
tcagacaatatcttcacttttaagttatgttcagaatttcattgtcctgttctttttaagaatcatatgagattatttttgtgtatgtgaataaactatgaagcattttcttacaaaaaa

SEQ ID NO: 400829 - DNA, 120 bp, Artificial Sequence
  ENSG00000146416_54 (sequence is synthesized)
atatgaaaattaagtttatgtacctaggaccatctagttagttccacaaagacagatgttttgtgccaagtaagtatcatcctcatttacaagaggggtcacaaactgctggcctccccc

SEQ ID NO: 400830 - DNA, 120 bp, Artificial Sequence
  ENSG00000146416_55 (sequence is synthesized)
actgctggcctcccccaacttctacctatcaagttctgttaggcctacatcgtggaatttttgtttttgaatcagtattttaaaattgggtgattttggctgggcgcagtggctcatgcc

SEQ ID NO: 400831 - DNA, 120 bp, Artificial Sequence
  ENSG00000146416_56 (sequence is synthesized)
cagcttggttgaagtttggcactcgacactctgctcaattgaagacatatgcacaaaatcacttaccacattttttaacctgtttttcacactgggtaggcctgtaatatttgcataaaa

SEQ ID NO: 400832 - DNA, 120 bp, Artificial Sequence
  ENSG00000146416_57 (sequence is synthesized)
ccagacctacggagggagctggaaattcctgacgttcattgatctgtgattgcgtgtgaaggcctggctgcccccgcagcggcaccttctgaaccactcaccgttacctggtagctgggt

SEQ ID NO: 400833 - DNA, 120 bp, Artificial Sequence
  ENSG00000146416_58 (sequence is synthesized)
gcttctaagaggtgacacgggaagaatcttcaacaaaagcatcggacctgatcctgaatggcctgagacccattcgccctcaaggtgcttttcagagcacccaccgtgggatgaacttgt

SEQ ID NO: 400834 - DNA, 120 bp, Artificial Sequence
  ENSG00000146416_59 (sequence is synthesized)
tgcaactgaaggaaactgggtattgtctagtgatttggaacttcacctgaaagaaccaaatccttctcataagggagagaaagcacctaataaagttgtcttctttgcatctgttttttt

SEQ ID NO: 400835 - DNA, 120 bp, Artificial Sequence
  ENSG00000146425_0 (sequence is synthesized)
actcagggagccggaggggacgcgccggaggaaagatggaagactaccaggctgcggaggagactgcttttgttgttgatgaagtgagcaacattgtaaaagaggctatagaaagcgcaa

SEQ ID NO: 400836 - DNA, 120 bp, Artificial Sequence
  ENSG00000146425_1 (sequence is synthesized)
ttggtggtaacgcttatcaacacagcaaagtgaaccagtggaccacaaatgtagtagaacaaactttaagccaactcaccaagctgggaaaaccatttaaatacatcgtgacctgtgtaa

SEQ ID NO: 400837 - DNA, 120 bp, Artificial Sequence
  ENSG00000146425_2 (sequence is synthesized)
ttatgcagaagaatggagctggattacacacagcaagttcctgcttctgggacagctctactgacgggagctgcactgtgcgatgggagaataagaccatgtactgcatcgtcagtgcct

SEQ ID NO: 400838 - DNA, 120 bp, Artificial Sequence
  ENSG00000146425_3 (sequence is synthesized)
tatttgacctgcagtccagcctatggcctttctccttttgtctctagttcatcctctaaccaccagccatgaattcagtgaactcttttctcattctctttgttttgtggcactttcaca

SEQ ID NO: 400839 - DNA, 120 bp, Artificial Sequence
  ENSG00000146425_4 (sequence is synthesized)
atgtagaggaaaaaaccaaatgaccgcactgtgatgtgaatggcaccgaagtcagatgagtatccctgtaggtcacctgcagcctgcgttgccacttgtcttaactctgaatatttcatt

SEQ ID NO: 400840 - DNA, 120 bp, Artificial Sequence
  ENSG00000146425_5 (sequence is synthesized)
tcaaaggtgctaaaatctgaaatctgctagtgtgaaacttgctctactctctgaaatgattcaaatacactaattttccatactttatacttttgttagaataaattattcaaatctaaa

SEQ ID NO: 400841 - DNA, 120 bp, Artificial Sequence
  ENSG00000146425_6 (sequence is synthesized)
cttttatatttgcgggatggttttttaacactgatcagaggggcatccagtaccagaaacaacagctaacgtggctcaactcaaggaaggctcctggtgggagtcggtcgtgtgtgtagt

SEQ ID NO: 400842 - DNA, 120 bp, Artificial Sequence
  ENSG00000146425_7 (sequence is synthesized)
tgaagcgggatcttacaggaggtcccatcagatgcttttagaacaagtgaagcatagaggaagtgtggacagcccccagctgacagtggctcaacttagaatttttcaactttgatggat

SEQ ID NO: 400843 - DNA, 120 bp, Artificial Sequence
  ENSG00000146425_8 (sequence is synthesized)
ttaccagggtattaagtgcatttgcaacttacattttcatatattgttgatttatgatgggtttatgggatgttgtaagtcaaggagcacctataatttgtcaatatagtgagacaaggc

SEQ ID NO: 400844 - DNA, 120 bp, Artificial Sequence
  ENSG00000146425_9 (sequence is synthesized)
aatctgtccctataatttttatcgagaacatcaaccacgtggagctacatacattgtacgtttgctaaaagtggacagaatgacatttgtgttacccagtagacttctctaacaaaaatt

SEQ ID NO: 400845 - DNA, 120 bp, Artificial Sequence
  ENSG00000146425_10 (sequence is synthesized)
ttttcgtactgtaaccatatgggaggtgatacagtgcctttcctttgtgattaaggtcacggtagtcacttggaaggatcctttaagcttccagaaatgacttaatctctaagatattgc

SEQ ID NO: 400846 - DNA, 120 bp, Artificial Sequence
  ENSG00000146425_11 (sequence is synthesized)
aaattgttcttcactcagtgagttggttttgtttccaagtccgacttctgagtacagcaagtgaggtggcttcgggcagtcagctcctgaaccccctaaaaagaaagggcagggcctgca

SEQ ID NO: 400847 - DNA, 120 bp, Artificial Sequence
  ENSG00000146425_12 (sequence is synthesized)
gtggacagcagccagacagggaggaagactcactgccaagtcagggttctctgccttgattccctcaggatgcacgttgactgagggccccaggggttgccctctcgaaggcgtgtccag

SEQ ID NO: 400848 - DNA, 120 bp, Artificial Sequence
  ENSG00000146425_13 (sequence is synthesized)
agctacgtacctttcctgggactcagcagtaactttaaacgcttgtgctcatgtgaagagcacattggcaggcaagtgcctgactaatgttattttcaggatgaccttttacccattcag

SEQ ID NO: 400849 - DNA, 120 bp, Artificial Sequence
  ENSG00000146425_14 (sequence is synthesized)
atctaccatgtgtaaaaggaaaactatactcctggcactagattcctgcaggcagcccacctcctgagtcatccagacactgacagagaacagccatgctggcagctggtggttagtcct

SEQ ID NO: 400850 - DNA, 120 bp, Artificial Sequence
  ENSG00000146425_15 (sequence is synthesized)
ggagtcggagggcagcactgggaaagaaaaataattacctggagataatgtaatcatcgtacattttacaagtaatggtgctttaaaaaaatctcctcaaggtcaaactgatcctcctaa

SEQ ID NO: 400851 - DNA, 120 bp, Artificial Sequence
  ENSG00000146425_16 (sequence is synthesized)
tcagtttacatcatggaagagagaattacatcttaaatggattacttcagcagcttcagttaatttatacaaaaatcaaccaactcattaagcctctctattggttaatgattctagcag

SEQ ID NO: 400852 - DNA, 120 bp, Artificial Sequence
  ENSG00000146425_17 (sequence is synthesized)
ttaatgattctagcagccagttgaaatggaagaagagaatgaattctagtttaaagtgaagtcttagattgtggcatgattaaaacaaaacagggccaggtgtggtggcttacgcctgta

SEQ ID NO: 400853 - DNA, 120 bp, Artificial Sequence
  ENSG00000146425_18 (sequence is synthesized)
aaaataaataaataaaaataaaacaatacctttaaattatgtgcatgtattctagtcttctggtttctgaagactgtaatgccatccttggtaaagctgaacagtctagttagattattt

SEQ ID NO: 400854 - DNA, 120 bp, Artificial Sequence
  ENSG00000146425_19 (sequence is synthesized)
ctaaggtcttcatttctacattatgttcattacctacatttgcatttatcaatgtagtggaaatatcttttaaataaatcaaacttaactgaatgttcttccttacagactgcttttgtt

SEQ ID NO: 400855 - DNA, 120 bp, Artificial Sequence
  ENSG00000146425_20 (sequence is synthesized)
ttatgcagaagaatggagctggattacacacagcaagttcctgcttctgggacagctctactgacggtatgattttcattcatgtttgtgaagttttgttgtgtgaaatatatgactgga

SEQ ID NO: 400856 - DNA, 120 bp, Artificial Sequence
  ENSG00000146425_21 (sequence is synthesized)
agtttcctatctttgaatgcaatgcatgtttatcaccttttaaaacatttaataatagacttgccaaggttctttgtgtagcatagagatgggtacttgaatgttggccttattgtgagt

SEQ ID NO: 400857 - DNA, 120 bp, Artificial Sequence
  ENSG00000146425_22 (sequence is synthesized)
aaaacgtcgtcccccagctttccctgccgtaaatgctgctctcttccctcccgcagggagctgcactgtgcgatgggagaataagaccatgtactgcatcgtcagtgccttcggactgtc

SEQ ID NO: 400858 - DNA, 120 bp, Artificial Sequence
  ENSG00000146426_0 (sequence is synthesized)
gggcggcctatagatccaagagaaggtcctggacggcctccactagatggtagggatcattttggaagacctcctgtagatataagagagaatcttgtgaggccaggtatagatcatctt

SEQ ID NO: 400859 - DNA, 120 bp, Artificial Sequence
  ENSG00000146426_1 (sequence is synthesized)
ggtcgaagagaccactttggctttaatccagagaagccctgggggcatagaggagattttgatgagagagagcatcgggttctaccggtctatggtggtccaaaaggcttacatgaagaa

SEQ ID NO: 400860 - DNA, 120 bp, Artificial Sequence
  ENSG00000146426_2 (sequence is synthesized)
agaggtagatttcggtctggaaactatcgatttgatcctagaagtggtccttggaaccgaggatttggacaagaagttcacagagattttgatgaccgcagaagaccctgggagaggcaa

SEQ ID NO: 400861 - DNA, 120 bp, Artificial Sequence
  ENSG00000146426_3 (sequence is synthesized)
agggatagggatgacagagattttgatttctgcagagaaatgaatggaaatcgtcttggacgagacagaattcaaaacacttgggttccccctcctcatgctcgggtttttgattatttt

SEQ ID NO: 400862 - DNA, 120 bp, Artificial Sequence
  ENSG00000146426_4 (sequence is synthesized)
gaaggggccacttctcaacgaaaaggtgataatgtgcctcaggttaatggtgaaaatacagagagacatgctcagccaccacctataccagtacagaatgatcctgaactttatgaaaaa

SEQ ID NO: 400863 - DNA, 120 bp, Artificial Sequence
  ENSG00000146426_5 (sequence is synthesized)
ctgacatcttcaaatgaaataaacaaggagaagagtgacacagttgctgatatagaaagtgaaccagtggtagaaagcacagaaactgaggggacataatcatcactcagtaggttaatg

SEQ ID NO: 400864 - DNA, 120 bp, Artificial Sequence
  ENSG00000146426_6 (sequence is synthesized)
atgaaatggcaggtaattcacacttttggacagagcgcaccgcccccgtggaatcaccctacagaagaggccagctataaaggatgtctcacacctttaagatcagtgtttctcaatgtg

SEQ ID NO: 400865 - DNA, 120 bp, Artificial Sequence
  ENSG00000146426_7 (sequence is synthesized)
tggaccatggatacctgtattagaatacccaaaggatttgtttaaaattcaggctgagcccttcccaagacctaatagagctaaaagctttgggagtaggtggaggaaacctgcatcttt

SEQ ID NO: 400866 - DNA, 120 bp, Artificial Sequence
  ENSG00000146426_8 (sequence is synthesized)
acccagcaatccaggacagaatgacttggaagataacggagcttcgaagcttctagcagaatatgaagtctttcgtcttcagctacctgggttaagtttaagcagggctctgtgtatgaa

SEQ ID NO: 400867 - DNA, 120 bp, Artificial Sequence
  ENSG00000146426_9 (sequence is synthesized)
tgacaaggataccttcagccagctcattctggatgaatgaatgattacactaagtgtcctccacattcctctgtgggctcacttcatggactcactttgcgtgcttgttaaatgtgctgt

SEQ ID NO: 400868 - DNA, 120 bp, Artificial Sequence
  ENSG00000146426_10 (sequence is synthesized)
gttgctcccaagaccatgtaaagcctactgaccactaacctccctcacagcagaaactagacgtcaggttaaaatgggcaactccgacagtcagtacacccttcaaggatctaaaaatca

SEQ ID NO: 400869 - DNA, 120 bp, Artificial Sequence
  ENSG00000146426_11 (sequence is synthesized)
tagcaatactattactggtgctaagcaaattccttgctccctgaaaatacgtggcattcatgcaaaagaggaaaagtcattgcatggatggggtcacggaagcaacggagcaggttacaa

SEQ ID NO: 400870 - DNA, 120 bp, Artificial Sequence
  ENSG00000146426_12 (sequence is synthesized)
gtccaggtccctggcccgaagctgcctttctcactttaagagtaaccagccttacgcatcgagactcggtggccccacatgcaaggtctccagaggtgttgcctactccacgcacaggac

SEQ ID NO: 400871 - DNA, 120 bp, Artificial Sequence
  ENSG00000146426_13 (sequence is synthesized)
aaatgccccagggaaggatttccagggcatcagtgctgctttctcaactgagaatggcttccactctgttggccacgagctggcagataaccacatcacctccagagactgcaacggaca

SEQ ID NO: 400872 - DNA, 120 bp, Artificial Sequence
  ENSG00000146426_14 (sequence is synthesized)
ccttctcaactgctacgggaggaatgagagcattgcctccaccccaccgggcgaagaccgcaagagcccccgagtgctcatcaaaacgctggggaagctggatgggtgtttaagggtcga

SEQ ID NO: 400873 - DNA, 120 bp, Artificial Sequence
  ENSG00000146426_15 (sequence is synthesized)
gttccacaatggtggcaaccccagcaaagtgcctgcagaggactgcagtgagccggtgcagctgctgaggtactcacctaccttagcatcggaaacctcccctgtgcctgaagccaggag

SEQ ID NO: 400874 - DNA, 120 bp, Artificial Sequence
  ENSG00000146426_16 (sequence is synthesized)
ggggtccagcgccgattccctgcccagccatcgcccctctcccacggactctcgcctgcggtccagcaaaggcagctccctgagttctgagtcatcctggtacgactccccttggggcaa

SEQ ID NO: 400875 - DNA, 120 bp, Artificial Sequence
  ENSG00000146426_17 (sequence is synthesized)
tgctggagagctgagcgaggctgagggctccttcctggcccccggcatgcctgaccccagtctccatgccagcttcccacctggcgatgccaaaaagcctttcaaccaaagctcttccct

SEQ ID NO: 400876 - DNA, 120 bp, Artificial Sequence
  ENSG00000146426_18 (sequence is synthesized)
ctcctccctccgggaactgtacaaagatgccaacctggggagcctctccccctcaggtatccgcctttctgatgaatacatgggcacgcatgccagcctgagcaaccgtgtctcttttgc

SEQ ID NO: 400877 - DNA, 120 bp, Artificial Sequence
  ENSG00000146426_19 (sequence is synthesized)
ttccgacattgatgtgccctccagagtggcacacggggaccccatccagtacagttccttcactctcccctgtcggaagcccaaagcctttgttgaggatactgcgaagaaggactccct

SEQ ID NO: 400878 - DNA, 120 bp, Artificial Sequence
  ENSG00000146426_20 (sequence is synthesized)
caaagccaggatgcgacggatcagtgactggacgggaagcctctcaaggaagaaaaggaaactccaggagccgaggtccaaggagggcagtgactactttgacagtcgctctgatggact

SEQ ID NO: 400879 - DNA, 120 bp, Artificial Sequence
  ENSG00000146426_21 (sequence is synthesized)
gaatacagatgtgcagggatcctcccaggcatctgcttttctgtggtcagggggctctactcagatcctgtctcagagaagtgaatccacacatgcgattggcagcgatcccctccggca

SEQ ID NO: 400880 - DNA, 120 bp, Artificial Sequence
  ENSG00000146426_22 (sequence is synthesized)
gaacatttatgagaatttcatgcgagagttggaaatgagcaggaccaacactgagaacatagaaacatctacagaaaccgccgagtccagcagcgagtcactcagctctctggaacagct

SEQ ID NO: 400881 - DNA, 120 bp, Artificial Sequence
  ENSG00000146426_23 (sequence is synthesized)
ggatctgctctttgagaaggaacagggggtggtccggaaggccgggtggctcttcttcaagcccctggtcactgtgcagaaggaaaggaagcttgagctggtggcacgaaggaaatggaa

SEQ ID NO: 400882 - DNA, 120 bp, Artificial Sequence
  ENSG00000146426_24 (sequence is synthesized)
acagtactgggtaacgctgaaaggatgcacgctgctgttttatgagacctatgggaagaattccatggatcagagcagtgcccctcggtgtgctctgtttgcagaagacagcatagtgca

SEQ ID NO: 400883 - DNA, 120 bp, Artificial Sequence
  ENSG00000146426_25 (sequence is synthesized)
gtctgttccagagcatcccaagaaagaaaatgtgttctgcctcagcaactcctttggagatgtctaccttttccaggccaccagccagacagatctagaaaactgggtcactgctgtaca

SEQ ID NO: 400884 - DNA, 120 bp, Artificial Sequence
  ENSG00000146426_26 (sequence is synthesized)
ctctgcttgtgcatccctttttgcaaagaagcatgggaaagaggacacgctgcggctgctgaagaaccagaccaaaaacctgcttcagaagatagacatggacagcaagatgaagaagat

SEQ ID NO: 400885 - DNA, 120 bp, Artificial Sequence
  ENSG00000146426_27 (sequence is synthesized)
ggcagagctgcagctgtccgtggtgagcgacccaaagaacaggaaagccatagagaaccagatccagcaatgggagcagaatcttgagaaatttcacatggatctgttcaggatgcgctg

SEQ ID NO: 400886 - DNA, 120 bp, Artificial Sequence
  ENSG00000146426_28 (sequence is synthesized)
ctatctggccagcctacaaggtggggagttaccgaacccaaagagtctccttgcagccgccagccgcccctccaagctggccctcggcaggctgggcatcttgtctgtttcctctttcca

SEQ ID NO: 400887 - DNA, 120 bp, Artificial Sequence
  ENSG00000146426_29 (sequence is synthesized)
tgactctgctctccggaaaaggacactgtcactgacccagcgagggagaaacaagaagggaatattttcttcgttaaaagggctggacacactggccagaaaaggcaaggagaagagacc

SEQ ID NO: 400888 - DNA, 120 bp, Artificial Sequence
  ENSG00000146426_30 (sequence is synthesized)
ttctataactcaggtcgatgaacttctgcatatatatggttcaacagtagacggtgttccccgagacaatgcatgggaaatccagacttatgtccactttcaggacaatcacggagttac

SEQ ID NO: 400889 - DNA, 120 bp, Artificial Sequence
  ENSG00000146426_31 (sequence is synthesized)
tgtagggatcaagccagagcacagagtagaagatattttgactttggcatgcaagatgaggcagttggaacccagccattatggcctacagcttcgaaaattagtagatgacaatgttga

SEQ ID NO: 400890 - DNA, 120 bp, Artificial Sequence
  ENSG00000146426_32 (sequence is synthesized)
gtattgcatccctgcaccatatgaatatatgcaacaacaggtttatgatgaaatagaagtctttccactaaatgtttatgacgtgcagctcacgaagactgggagtgtgtgtgactttgg

SEQ ID NO: 400891 - DNA, 120 bp, Artificial Sequence
  ENSG00000146426_33 (sequence is synthesized)
gtttgcagttacagcgcaggtggatgagcgtcagcatctcagccggatatttataagcgacgttcttcccgatggcctggcgtatggggaagggctgagaaagggcaatgagatcatgac

SEQ ID NO: 400892 - DNA, 120 bp, Artificial Sequence
  ENSG00000146426_34 (sequence is synthesized)
cttaaatggggaagctgtgtctgatcttgaccttaagcagatggaggccctgttttctgagaagagcgtcggactcactctgattgcccggcctccggacacaaaagcaaccctgtgtac

SEQ ID NO: 400893 - DNA, 120 bp, Artificial Sequence
  ENSG00000146426_35 (sequence is synthesized)
atcctggtcagacagtgacctgttctccagggaccagaagagtctgctgccccctcctaaccagtcccaactgctggaggaattcctggataactttaaaaagaatacagccaatgattt

SEQ ID NO: 400894 - DNA, 120 bp, Artificial Sequence
  ENSG00000146426_36 (sequence is synthesized)
cagcaacgtccctgatatcacaacaggtctgaaaaggagtcagacagatggcactctggatcaggtttcccacagggagaaaatggagcagacattcaggagtgctgagcagatcactgc

SEQ ID NO: 400895 - DNA, 120 bp, Artificial Sequence
  ENSG00000146426_37 (sequence is synthesized)
actgtgcaggagttttaacgacagtcaggccaacggcatggaaggaccgcgggagaatcaggatcctcctccgaggtctctggcccgccacctgtctgatgcagaccgcctccgcaaagt

SEQ ID NO: 400896 - DNA, 120 bp, Artificial Sequence
  ENSG00000146426_38 (sequence is synthesized)
catccaggagcttgtggacacagagaagtcctacgtgaaggatttgagctgcctctttgaattatacttggagccacttcagaatgagacctttcttacccaagatgagatggagtcact

SEQ ID NO: 400897 - DNA, 120 bp, Artificial Sequence
  ENSG00000146426_39 (sequence is synthesized)
ttttggaagtttgccagagatgcttgagtttcagaaggtgtttctggagaccctggaggatgggatttcagcatcatctgactttaacaccctagaaaccccctcacagtttagaaaatt

SEQ ID NO: 400898 - DNA, 120 bp, Artificial Sequence
  ENSG00000146426_40 (sequence is synthesized)
actgttttcccttggaggctctttcctttattacgcggaccactttaaactgtacagtggattctgtgctaaccatatcaaagtacagaaggttctggagcgagctaaaactgacaaagc

SEQ ID NO: 400899 - DNA, 120 bp, Artificial Sequence
  ENSG00000146426_41 (sequence is synthesized)
cttcaaggcttttctggacgcccggaaccccaccaagcagcattcctccacgctggagtcctacctcatcaagccggttcagagagtgctcaagtacccgctgctgctcaaggagctggt

SEQ ID NO: 400900 - DNA, 120 bp, Artificial Sequence
  ENSG00000146426_42 (sequence is synthesized)
gtccctgacggaccaggagagcgaggagcactaccacctgacggaagcactaaaggcaatggagaaagtagcgagccacatcaatgagatgcagaagatctatgaggattatgggaccgt

SEQ ID NO: 400901 - DNA, 120 bp, Artificial Sequence
  ENSG00000146426_43 (sequence is synthesized)
gtttgaccagctagtagctgagcagagcggaacagagaaggaggtaacagaactttcgatgggagagcttctgatgcactctacggtttcctggttgaatccatttctgtctctaggaaa

SEQ ID NO: 400902 - DNA, 120 bp, Artificial Sequence
  ENSG00000146426_44 (sequence is synthesized)
agctagaaaggaccttgagctcacagtatttgtttttaagagagccgtcatactggtttataaagaaaactgcaaactgaaaaagaaattgccctcgaattcccggcctgcacacaactc

SEQ ID NO: 400903 - DNA, 120 bp, Artificial Sequence
  ENSG00000146426_45 (sequence is synthesized)
tactgacttggacccatttaaattccgctggttgatccccatctccgcgcttcaagtcagactggggaatccagcagggacagaaaataattccatatgggaactgatccatacgaagtc

SEQ ID NO: 400904 - DNA, 120 bp, Artificial Sequence
  ENSG00000146426_46 (sequence is synthesized)
agaaatagaaggacggccagaaaccatctttcagttgtgttgcagtgacagtgaaagcaaaaccaacattgttaaggtgattcgttctattctgagggagaacttcaggcgtcacataaa

SEQ ID NO: 400905 - DNA, 120 bp, Artificial Sequence
  ENSG00000146426_47 (sequence is synthesized)
gtgtgaattaccactggagaaaacgtgtaaggatcgcctggtacctcttaagaaccgagttcctgtttcggccaaattagcttcatccaggtctttaaaagtcctgaagaattcctccag

SEQ ID NO: 400906 - DNA, 120 bp, Artificial Sequence
  ENSG00000146426_48 (sequence is synthesized)
caacgagtggaccggtgagactggcaagggaaccttgctggactctgacgagggcagcttgagcagcggcacccagagcagcggctgccccacggctgagggcaggcaggactccaagag

SEQ ID NO: 400907 - DNA, 120 bp, Artificial Sequence
  ENSG00000146426_49 (sequence is synthesized)
cacttctcccgggaaatacccacaccccggcttggcagattttgccgacaatctcatcaaagagagtgacatcctgagcgatgaagatgatgaccaccgtcagactgtgaagcagggcag

SEQ ID NO: 400908 - DNA, 120 bp, Artificial Sequence
  ENSG00000146426_50 (sequence is synthesized)
ccctactaaagacatcgaaattcagttccagagactgaggatttccgaggacccagacgttcaccccgaggctgagcagcagcctggcccggagtcgggtgagggtcagaaaggaggaga

SEQ ID NO: 400909 - DNA, 120 bp, Artificial Sequence
  ENSG00000146426_51 (sequence is synthesized)
gcagcccaaactggtccgggggcacttctgccccattaaacgaaaagccaacagcaccaagagggacagaggaactttgctcaaggcgcagatccgtcaccagtcccttgacagtcagtc

SEQ ID NO: 400910 - DNA, 120 bp, Artificial Sequence
  ENSG00000146426_52 (sequence is synthesized)
tgaaaatgccaccatcgacctaaattctgttctagagcgagaattcagtgtccagagtttaacatctgttgtcagtgaggagtgtttttatgaaacagagagccacggaaaatcatagta

SEQ ID NO: 400911 - DNA, 120 bp, Artificial Sequence
  ENSG00000146426_53 (sequence is synthesized)
tgattcaatccagatatgggttaaattcctcattttacttttaaactggtggtaaagtggaaattgcaaaaaaaaaaaaaaaaaaaaactgttcattcctgggttttgtgcagtatacat

SEQ ID NO: 400912 - DNA, 120 bp, Artificial Sequence
  ENSG00000146426_54 (sequence is synthesized)
tttcccacaaaatggttgtaaagatttaagttattttaatttattgtggatcagaaacctagatgaaactggtcagaatctgtaaattacttagtttatatccactttgagcaggtatca

SEQ ID NO: 400913 - DNA, 120 bp, Artificial Sequence
  ENSG00000146426_55 (sequence is synthesized)
aatgatttaggatccttaaaattacattctaataattaagttatgtggaaaaagtaaggctggggaagtcgtgattaatagttttcaaagggccattttttaaaatcctctgggcatttt

SEQ ID NO: 400914 - DNA, 120 bp, Artificial Sequence
  ENSG00000146426_56 (sequence is synthesized)
ctttcagctgtttgttagtttttgctttatttaaagcatatttaagttattttaatgtggtttaggggcaaaatgtgcagatacttcatttttgtaagatagattgtaatagatgctgtt

SEQ ID NO: 400915 - DNA, 120 bp, Artificial Sequence
  ENSG00000146426_57 (sequence is synthesized)
tatactaaacatgtcataactatctatacagtatatattaaaagaaagcttgtactgtatcttatttgatgatatttattttctctgccaagctgtatagtaaaaggaaaataagtcaca

SEQ ID NO: 400916 - DNA, 120 bp, Artificial Sequence
  ENSG00000146426_58 (sequence is synthesized)
gagaaggagcagcccgaatggagctcagaggtgatggatgtactagatcccaggggaaagcttacaaaaggcactctggaagaaccacggacactggtaacagaactttcgatgggagag

SEQ ID NO: 400917 - DNA, 120 bp, Artificial Sequence
  ENSG00000146426_59 (sequence is synthesized)
agcttgtcccacagcgagctgtggagctgggagggccattcagagctctgcatggaggcagggtggccggccttcgtcccctcaggccagcagggcaaggcagctcccctcaatagagat

SEQ ID NO: 400918 - DNA, 120 bp, Artificial Sequence
  ENSG00000146426_60 (sequence is synthesized)
attgcctggggatgagagggagagacaacgtgtgtcttacacatctcccaacagccgacttagatgtgatccgttctcccagagggagcaggtttctttgaacttttcctttttatgtac

SEQ ID NO: 400919 - DNA, 120 bp, Artificial Sequence
  ENSG00000146426_61 (sequence is synthesized)
gcgttttatgagccatatggaagtctgaagagctgctcagctctgacagctgtttaaattatctgtgacactgcatcccaccattagcagggatgatggattgttgacagtctccatcag

SEQ ID NO: 400920 - DNA, 120 bp, Artificial Sequence
  ENSG00000146426_62 (sequence is synthesized)
gtgaaccagtggtagaaagcacagaaactgaggggacataatcatcactcagtaggcaagatgatgatgaatgaagtcctggcagcttcctgtgtcccaggccttgtagaaataaatgag

SEQ ID NO: 400921 - DNA, 120 bp, Artificial Sequence
  ENSG00000146426_63 (sequence is synthesized)
acagacgtgcttcaaagttctaatgtgcatcacatcggatcttgtttaaggaagcgttaaaaggaacccgccgttacctattgagaaggctctgtactctcaggcattgtttctgattga

SEQ ID NO: 400922 - DNA, 120 bp, Artificial Sequence
  ENSG00000146426_64 (sequence is synthesized)
atccagaggttgcaagcatgccttcctgtattacctgttggagcaggtttaattttataaattttaaacacaaactctatgagtttctagttcataattgttctttttggggatccactc

SEQ ID NO: 400923 - DNA, 120 bp, Artificial Sequence
  ENSG00000146426_65 (sequence is synthesized)
agatgaacagtattgcatctgtaagagatacccacttcccaggaccagatttgattggaatatcagtggcaacagactccatctgtagctcatccagtaccagtgatggaaaggacagat

SEQ ID NO: 400924 - DNA, 120 bp, Artificial Sequence
  ENSG00000146426_66 (sequence is synthesized)
gactgtgtagttcttgattggtggctttaatccattatcattaggtatctccttgaacgttctcaaacactgaaagtcttaagctttcattaaaaaaaaaagagtaaatgcagctttcag

SEQ ID NO: 400925 - DNA, 120 bp, Artificial Sequence
  ENSG00000146426_67 (sequence is synthesized)
aaaatccaggattctgtacagtcttcgagtgtttcacttcagcctccctgtcctgttattaccaacagcaggtacccgggtggtagacaagaagcctcatgggatagataaggaaatgaa

SEQ ID NO: 400926 - DNA, 120 bp, Artificial Sequence
  ENSG00000146426_68 (sequence is synthesized)
gataaacaaacatatcacactgtatcgtaaacatactttataagtacatttcttattagcttcttatccaggtagagattataaaaatttgctgcaagtatccagaccagaatttatgtt

SEQ ID NO: 400927 - DNA, 120 bp, Artificial Sequence
  ENSG00000146426_69 (sequence is synthesized)
ttggaaattatcagtgttcacaatacctgcagggaagaaaaaaatacaaaaactcaaatatgaatactctttacacccaaaagaatatttttatcattcttttatttgtttttggctctg

SEQ ID NO: 400928 - DNA, 120 bp, Artificial Sequence
  ENSG00000146426_70 (sequence is synthesized)
tcaaaaattaaagtgcttggaatgctgtagtctgtggtctcttgaaatttaatcaatgagaacttagcattttcacagtatgctgtcactttggacattcataataaaaattgaaactaa

SEQ ID NO: 400929 - DNA, 120 bp, Artificial Sequence
  ENSG00000146426_71 (sequence is synthesized)
acacacacacacacacctgagatggggtagatcattgtatttttgtgtctaccagcaagaaaaggaaggaaaaactaaggctggagtacaatggcatagtcttggcccactgcaacctcc

SEQ ID NO: 400930 - DNA, 120 bp, Artificial Sequence
  ENSG00000146426_72 (sequence is synthesized)
aggtgatccacctgcctcagcctcataagggctctgtgtatgaatgacaaggataccttcagccagctcattctggatgaatgaatgattacactaagtgtcctccacattcctctgtgg

SEQ ID NO: 400931 - DNA, 120 bp, Artificial Sequence
  ENSG00000146426_73 (sequence is synthesized)
acagcgcgcgtccaagtggagaacaaagtgacccccagaacttctccaactcctcccggcgttcccgcgagggccacgcgccgagggtagcggagggcggcgcgcgaccggccccaccga

SEQ ID NO: 400932 - DNA, 120 bp, Artificial Sequence
  ENSG00000146426_74 (sequence is synthesized)
agaaaaggctggagtcccagtccgtggaggagcacttacagggtctttcctaagtgctgatggcaaagaattagaaactaagtggatgctttcgacagaggaacagttggataagatgtc

SEQ ID NO: 400933 - DNA, 120 bp, Artificial Sequence
  ENSG00000146426_75 (sequence is synthesized)
ttaaatttggtcatagtagcatgaaatcttttagctgaatataaaacattttgacacctttaaaggataaacgctcataccttcaggactgtcaattcattttattagttatgtggtatt

SEQ ID NO: 400934 - DNA, 120 bp, Artificial Sequence
  ENSG00000146426_76 (sequence is synthesized)
agatgcatctcccttggtgcatactcttaattgttaatttaaagttccttgtagttttaattttaaaggacttatttggaatgttattacatttctctcattttgtaatcaccaacagaa

SEQ ID NO: 400935 - DNA, 120 bp, Artificial Sequence
  ENSG00000146426_77 (sequence is synthesized)
ttttgccattgccagataatttaactagtgcaggaatttgactttgttatatactcatgaggggcaaattctttactgatcatttgatggttagctttgccagaagattaggagtattac

SEQ ID NO: 400936 - DNA, 120 bp, Artificial Sequence
  ENSG00000146426_78 (sequence is synthesized)
tatttcagtttcccaagatgataagtctttgaaagtggataagagaattgactcagtaaaggttacagccacaaagacagcaaaattgtaaaatcattctcattgctgataaaattgagt

SEQ ID NO: 400937 - DNA, 75 bp, Artificial Sequence
  ENSG00000146426_79 (sequence is synthesized)
gaatgtaatctgtaaaatgtgttgccagtctcagaggaaactgtaaaataagtggagttttcgttgtcctggctt

SEQ ID NO: 400938 - DNA, 120 bp, Artificial Sequence
  ENSG00000146426_80 (sequence is synthesized)
ggaaactgtaaaataagtggagttttcgttgtcctggctttcttttctgcttctttttattgatttttaaattagcctaccccaatatcttccagggaatttttaaaaagttatctttct

SEQ ID NO: 400939 - DNA, 120 bp, Artificial Sequence
  ENSG00000146426_81 (sequence is synthesized)
ctctttcttgaggttcctcatatactctcactcacacgcacattttcacgagagcgaagtctacctttaactgaaatgaatgactgctgaatggtcaggaactccaagtccacatggaat

SEQ ID NO: 400940 - DNA, 120 bp, Artificial Sequence
  ENSG00000146426_82 (sequence is synthesized)
attccccttcagttgctccatctgggcagccagctcagggcctcagtccagagacaaagcagaggcagacgattctagttttctttgctgtaaatgccacactacatggaactagagaat

SEQ ID NO: 400941 - DNA, 120 bp, Artificial Sequence
  ENSG00000146426_83 (sequence is synthesized)
acaatgtccctttgggtgaggaggttgaaagagtttttggtttgttctgggaacttaaggtatattaagcagtccccacagacatgctgcctgcactccacctgctgagctggctctgag

SEQ ID NO: 400942 - DNA, 120 bp, Artificial Sequence
  ENSG00000146426_84 (sequence is synthesized)
gctcaggagacgtggccctctgtggtcccattgtctccacgtctgtggtaacccggtgcctttctagagcaggcaggctcccggcatgggtggaaacagagcagggggccagcttccccc

SEQ ID NO: 400943 - DNA, 120 bp, Artificial Sequence
  ENSG00000146426_85 (sequence is synthesized)
tttaagcagatggcagcatggggacactgaggatgattggagatgttggacactcaggagcagaatgactctgaaacagtcaagaggcagcaagcctggagcttcttccaaatcttcttg

SEQ ID NO: 400944 - DNA, 120 bp, Artificial Sequence
  ENSG00000146426_86 (sequence is synthesized)
aattctcctttgaaactcaccagcaaatgctgacctgggaatttgaaaacagcacactaaaatggagatatcaactcacttcctggactttaatctttatggctctgtggctggagtgca

SEQ ID NO: 400945 - DNA, 120 bp, Artificial Sequence
  ENSG00000146426_87 (sequence is synthesized)
gccatccagttcttcaaggtgcttccacgggaccatattgttactggggtgaataacctttgagaccccttaacagaaacacactctcgtttgtgaaatgaatggttgcagattgcaagt

SEQ ID NO: 400946 - DNA, 120 bp, Artificial Sequence
  ENSG00000146426_88 (sequence is synthesized)
cacaacaggtctgaaaaggagtcagacagatggcactctggatcaggtttcccacagggagaaaatggagcagacattcaggcattctatttcggtgcaggaggagcagcagaaccctag

SEQ ID NO: 400947 - DNA, 120 bp, Artificial Sequence
  ENSG00000146426_89 (sequence is synthesized)
tcagtccaggcctatggctcaacacagagtgggtcggcatgcggagggagagggatctcccgccagggatctgccgaaagatcatactgcaaagtgacgggaccagctcaccgaacagcg

SEQ ID NO: 400948 - DNA, 120 bp, Artificial Sequence
  ENSG00000146426_90 (sequence is synthesized)
tggcagtctctttcctagtagctttctatgttggttacgtctgttacggatcctcccccaacatacttttcctctaaagcaggaattgaaatgtagtacacactgcaaatgctgtccttc

SEQ ID NO: 400949 - DNA, 120 bp, Artificial Sequence
  ENSG00000146433_0 (sequence is synthesized)
gctccctcccccactcaggcctcttcacggggcggggggccgggtcccccagcccccacccgcgccgtgtccagctcctcgcgtgctcgcggcggagccctgagcgcactgggtccgagt

SEQ ID NO: 400950 - DNA, 120 bp, Artificial Sequence
  ENSG00000146433_1 (sequence is synthesized)
tgagcgcactgggtccgagtcctgcgcgccccctcaccacctcccccgcacctgctcctcctcctcggtcccgcccagcgcgccagcagcccgatccccagtgctgggagaagagagggg

SEQ ID NO: 400951 - DNA, 120 bp, Artificial Sequence
  ENSG00000146433_2 (sequence is synthesized)
gcgcaggcggcgacacaaagggtggagcggcgggaccgggacccgggaggctgcgcggcatggacgccgagtaccctgcctttgagcccccgctctgcagcgagctcaagcacctgtgcc

SEQ ID NO: 400952 - DNA, 120 bp, Artificial Sequence
  ENSG00000146433_3 (sequence is synthesized)
ggcggctgcgggaagcgtaccgcgagctcaaggaggacctcacgcccttcaaggatgaccgctactacaggctggcgcccatgcggctctacacgctctccaagcgccactttgtcctcg

SEQ ID NO: 400953 - DNA, 120 bp, Artificial Sequence
  ENSG00000146433_4 (sequence is synthesized)
tgtttgtcgtcttcttcatctgctttggcctgaccatcttcgttgggatcagaggacctaaagtgatccagacttctgcggctaatttttcactaaataatagcaaaaagctaaagccaa

SEQ ID NO: 400954 - DNA, 120 bp, Artificial Sequence
  ENSG00000146433_5 (sequence is synthesized)
ttcaaatactttcaaatccactgtctacatacaatcagcaactatggctgacatgtgttgttgagttggatcaatcaaaagaaacttctattaagacaagctttcccatgactgttaaag

SEQ ID NO: 400955 - DNA, 120 bp, Artificial Sequence
  ENSG00000146433_6 (sequence is synthesized)
tcgatggtgtagctcaagatggaaccacgatgtacattcataacaaagttcacaaccggacaaggaccctcacatgtgcagggaaatgtgcggagattattgtggctcaccttggctacc

SEQ ID NO: 400956 - DNA, 120 bp, Artificial Sequence
  ENSG00000146433_7 (sequence is synthesized)
tgaactacactcagtatacagtgatagtgggatttgaacacctgaagctccccatcaagggaatgaacttcacatggaagacttataaccctgccttctcccggttggaaatctggttcc

SEQ ID NO: 400957 - DNA, 120 bp, Artificial Sequence
  ENSG00000146433_8 (sequence is synthesized)
ggtttttctttgtggtgctcaccttcatcgtcacttgcctgtttgcgcattccctccggaaattttccatgagagactggggcatcgagcagaagtggatgtctgttctcctgcctctgc

SEQ ID NO: 400958 - DNA, 120 bp, Artificial Sequence
  ENSG00000146433_9 (sequence is synthesized)
tgctactttacaatgatccgttcttccccctctccttcctggtcaacagctggctcccagggatgctggatgacctctttcagtccatgttcctgtgcgccctgctgctcttctggctgt

SEQ ID NO: 400959 - DNA, 120 bp, Artificial Sequence
  ENSG00000146433_10 (sequence is synthesized)
gcgtgtaccacgggattcgtgtccagggagaaagaaagtgtttaactttctatttgcctaaattcttcattgttggactattgtggttggcttctgttacgctaggaatatggcaaacag

SEQ ID NO: 400960 - DNA, 120 bp, Artificial Sequence
  ENSG00000146433_11 (sequence is synthesized)
ttaacgaattacatgatccaatgtaccagtatcgagttgataccggaaattttcagggaatgaaggtcttcttcatggtggtggcagcggtgtacattctgtacctcttgttcttgatag

SEQ ID NO: 400961 - DNA, 120 bp, Artificial Sequence
  ENSG00000146433_12 (sequence is synthesized)
tgcgggcgtgttccgagctacgtcacatgccttatgtggatctcaggttgaaatttttgactgcattgactttcgtagtacttgtcattagcatcgccatcctttatttgagatttgggg

SEQ ID NO: 400962 - DNA, 120 bp, Artificial Sequence
  ENSG00000146433_13 (sequence is synthesized)
cgcaagtactacaagacaattttgtagcagagctgtcaactcactaccagaattcagccgagttcttatctttctatggcctgttgaacttctatctctacaccttggcctttgtatatt

SEQ ID NO: 400963 - DNA, 120 bp, Artificial Sequence
  ENSG00000146433_14 (sequence is synthesized)
ctccatcgaagaatgccctctatgagtcccagctgaaagacaatcctgccttctccatgctgaatgactcggatgatgatgtgatttatgggagtgactatgaggaaatgccgctgcaga

SEQ ID NO: 400964 - DNA, 120 bp, Artificial Sequence
  ENSG00000146433_15 (sequence is synthesized)
acggccaggccatccgggccaagtacaaggaggagtcagatagtgactgagccccggccagcccagcgaggcgacaagatgcctggatgctttccccggtgaccgtctgctgaccttccc

SEQ ID NO: 400965 - DNA, 120 bp, Artificial Sequence
  ENSG00000146433_16 (sequence is synthesized)
ctgttatattcagatttttcttacaagcagagatttcctgttcatttgtttacatatttttttaaaggaaaaccaaaactgagggtaaatttaaatgtttagccaaatttattgtcatgg

SEQ ID NO: 400966 - DNA, 120 bp, Artificial Sequence
  ENSG00000146433_17 (sequence is synthesized)
tggctacgagaagaggcattgataacaagtttcaacagccaaatccttttttacagagatttcagatgagcgtgttttcagtgatgaggaaatttcacgtttttagtacagtgaattatg

SEQ ID NO: 400967 - DNA, 120 bp, Artificial Sequence
  ENSG00000146433_18 (sequence is synthesized)
tacttttttttcctgtaatcattcactgattccaagttcacgggcagcctgtgactaggtcctcagcgtgacagcatcaccctctttcttcccttttccatggtactgttttgtgaccct

SEQ ID NO: 400968 - DNA, 120 bp, Artificial Sequence
  ENSG00000146433_19 (sequence is synthesized)
ttaaactcaaagggaagccttatctgtggctgcttcagggcagtccttcctcgttgagtggccagtgccctgggtaaccaggtggctgaagtgattggtcagttatgtggactgcgtttt

SEQ ID NO: 400969 - DNA, 120 bp, Artificial Sequence
  ENSG00000146433_20 (sequence is synthesized)
gtgcagtgtgtgagttatgactcatcgggaatgggagatgctggggttccaacccttcacgtcaccaaaggggaagtaatagtgtggagttctgaggagggtttgataagttgaataagg

SEQ ID NO: 400970 - DNA, 120 bp, Artificial Sequence
  ENSG00000146433_21 (sequence is synthesized)
aaaggctaagataatttacaggttaccaactcatgtggggaaggtcttactgccatggtgcttttcaggggcctgtgtgtacacacatgattaaatggatttgcctgtgggaggtatggg

SEQ ID NO: 400971 - DNA, 61 bp, Artificial Sequence
  ENSG00000146433_22 (sequence is synthesized)
gggcaacacagggagaccccgtctctataaaacatttagaaagttggctgggcatgctggg

SEQ ID NO: 400972 - DNA, 120 bp, Artificial Sequence
  ENSG00000146433_23 (sequence is synthesized)
actgcactccagcctgggtgtcagagcgagaacccgtgtcataaataaataaagctacatgaaagattgatagaatattttagattatttattggccaaaagtttttaaaactcatattt

SEQ ID NO: 400973 - DNA, 120 bp, Artificial Sequence
  ENSG00000146433_24 (sequence is synthesized)
ggaagcaaaatgaaaagcaagtaaaatgttttaaatggttcatggaaaacgtatttgggtagaaggcaactcgtgcttccggaaggggttccctgtcctccatgtgtccacatggcggtc

SEQ ID NO: 400974 - DNA, 120 bp, Artificial Sequence
  ENSG00000146433_25 (sequence is synthesized)
aggtagggacgacctgttctgtaaagtccttggcactgctgaatctgtggcatcatagaaggccctggagcttccccgttcctttcagtcagggactccatatagagtctcatgtggacg

SEQ ID NO: 400975 - DNA, 120 bp, Artificial Sequence
  ENSG00000146433_26 (sequence is synthesized)
tctcccgtgctttcctcttgacctctacagtcacacttctgttaacatctggtaactgtgggcaacctgactgatgccgtcttggcaattgaggtccagaagatgatagttccgcaacgc

SEQ ID NO: 400976 - DNA, 120 bp, Artificial Sequence
  ENSG00000146433_27 (sequence is synthesized)
aagcagtacctactttttttcttcatctatgcattgactctcagattaccatgcagagcttcacgttatcatccacgttaagtagtgctaggtaggaccttagagatgttcatgagaaac

SEQ ID NO: 400977 - DNA, 120 bp, Artificial Sequence
  ENSG00000146433_28 (sequence is synthesized)
tatttgttatgactttcctttgtatctttccttttaatttaaactttaatgataatgtacttttaatatggattctattcacatttgttttaaaaaccttgtaaatatgaatgtttaaga

SEQ ID NO: 400978 - DNA, 120 bp, Artificial Sequence
  ENSG00000146433_29 (sequence is synthesized)
caacttactgcaagggtaattcaagtttacatgatttttaaatttgcaatgatgttttttttattctgtgtattgaaaaaaattttctgttaccaaattttacaacttctaataagacta

SEQ ID NO: 400979 - DNA, 120 bp, Artificial Sequence
  ENSG00000146433_30 (sequence is synthesized)
ctataactttatgtaaactgatgaagatgtgctgattaacatattctgtgatatggtttacaacttttaatcataattgtccatgattttggaatgctgttatttatcagtaaatgtaaa

SEQ ID NO: 400980 - DNA, 120 bp, Artificial Sequence
  ENSG00000146433_31 (sequence is synthesized)
atatttgaggcatttagccatacacacactagaactttttaaaactttgtcctatagtgtaattataaactgatgactattatcttcatacattgagtcttcatgcatcaatgaaatgaa

SEQ ID NO: 400981 - DNA, 120 bp, Artificial Sequence
  ENSG00000146433_32 (sequence is synthesized)
aaatataggattatttatttactttttgtaactaagtgggaaataagaaaaaaagttagaaagtacttaaggggaaaatcgttcttactaagtcatgtattttcaacttgtcttccctgg

SEQ ID NO: 400982 - DNA, 120 bp, Artificial Sequence
  ENSG00000146433_33 (sequence is synthesized)
tatatcataaataccgacatattacataccccatgtaaaattttgcttaaactctctagcacttggcatgtagaatatgtaccataggtatcaggttaaaacactaaagtctgccagaaa

SEQ ID NO: 400983 - DNA, 120 bp, Artificial Sequence
  ENSG00000146433_34 (sequence is synthesized)
cttttgacagtagcaagaaaattgttgaagaaaaaataaattatttactgagggtagttatgttaaagttttgcgaacttaaagggctgactttagttccttcatggtaatggcttgagt

SEQ ID NO: 400984 - DNA, 120 bp, Artificial Sequence
  ENSG00000146433_35 (sequence is synthesized)
aacatcatctttgggattttttaaatactggtccagtctaggagaacctggaagatgaccagaggtatttcagtttccctagggagagcttcgttatccatgtggatgataagtctgctt

SEQ ID NO: 400985 - DNA, 120 bp, Artificial Sequence
  ENSG00000146433_36 (sequence is synthesized)
gatttattattaaatcattatagcagtgaagtggtgccattttctctctcttaagccccatttgaaaggctagagaaggggatatatatactatgttcaaggtttgtaaggttgttaatg

SEQ ID NO: 400986 - DNA, 120 bp, Artificial Sequence
  ENSG00000146433_37 (sequence is synthesized)
tacataattgcagattgcaataaaagcttagatacattttgtaaacccaacccactaaatgagcaggttacaagacaaatgtcaccagcctcaagtattttatgaactatttactgaggg

SEQ ID NO: 400987 - DNA, 120 bp, Artificial Sequence
  ENSG00000146433_38 (sequence is synthesized)
tagttatgttaaatagattataatgtggtaaattatttcctgaatcctttatcacaggaaaaacacagaccctcataaaagggataattaaaacggatgtgtctgaacatttagtgaaga

SEQ ID NO: 400988 - DNA, 120 bp, Artificial Sequence
  ENSG00000146433_39 (sequence is synthesized)
tgagacttaaaacatgaaagtgtatttgtgtattttgagggttttagaaaccggttgccttagaggttagacttttgaagaaaaaaaaaaaaagatacagatcttttcccctggccaaag

SEQ ID NO: 400989 - DNA, 120 bp, Artificial Sequence
  ENSG00000146433_40 (sequence is synthesized)
ggaagttgtattagtctgtgacatcttgtgatgctgtttatcttggtttgacattggagatacgctagtaactgtgataccatactataaaacagaagaattttctgctactaaaaactg

SEQ ID NO: 400990 - DNA, 120 bp, Artificial Sequence
  ENSG00000146433_41 (sequence is synthesized)
cctttttacaaaatgactgtaaatatttgtaaaataaaataacactaaactttaagcccaaaaggagagatagagccatgtgttcagttgtggacctgtccgtggggcacagtgccaccc

SEQ ID NO: 400991 - DNA, 120 bp, Artificial Sequence
  ENSG00000146433_42 (sequence is synthesized)
catcacagtgttgctgtcatcaggcaaaagtgaatgtttgtttatggcaaattcgtcttttgcgaatggcttaattctgacactacctttctgggaaatgttaataaatttttaatattc

SEQ ID NO: 400992 - DNA, 120 bp, Artificial Sequence
  ENSG00000146453_0 (sequence is synthesized)
agcgctgggcgactccgcggagctgcacggccatggacgtgggcgccgacgagttcgaggagagcctccctctgctgcaggagctcgtccaggaggccgacttcgtgggtctggacatag

SEQ ID NO: 400993 - DNA, 120 bp, Artificial Sequence
  ENSG00000146453_1 (sequence is synthesized)
agttcacgggccttcgttctaacctgtctgggccccagcagatcagtctttttgatttgccatcggagtggtatctaaagacccgtcagagtgttcagcaatttacagtctgtcagattg

SEQ ID NO: 400994 - DNA, 120 bp, Artificial Sequence
  ENSG00000146453_2 (sequence is synthesized)
gattgtctgtgttttccgctattgaaggagaggcaaacaagtatatagcccattcttgtaacttctatctcttccctacaacgtttgggattttggactcagaattctccttccaggctt

SEQ ID NO: 400995 - DNA, 120 bp, Artificial Sequence
  ENSG00000146453_3 (sequence is synthesized)
ccagtgttcagtttttgaatcagtatggcttcaactataacaagtttctcaaaaacggaatcccatatatgaatgaagaacaggagaagaaaattagacacgatatcctgactgggaact

SEQ ID NO: 400996 - DNA, 120 bp, Artificial Sequence
  ENSG00000146453_4 (sequence is synthesized)
ggagagttcgcagctctccggataaagaccaaatcaaggtggtgattgacgaagtgacgcggtggctggagctggccaaggaaggcgactggatgactcttcctgggatcactggcttcc

SEQ ID NO: 400997 - DNA, 120 bp, Artificial Sequence
  ENSG00000146453_5 (sequence is synthesized)
aggcctttgaggtccaactggtgctgaggcaggccctccccaacatctggacggtgctgaaagatgagggggtggtagtgaagaaagtgagtaaacaacatcgttggtatcttcagaaca

SEQ ID NO: 400998 - DNA, 120 bp, Artificial Sequence
  ENSG00000146453_6 (sequence is synthesized)
cctcttgtgaccgagagagctgttggaaggaaaatattcttctctcagcaaggggtttttctgtctttttccaaatgctggtgaaagcccagaagcccttagtgggacataatatgatga

SEQ ID NO: 400999 - DNA, 120 bp, Artificial Sequence
  ENSG00000146453_7 (sequence is synthesized)
tccatgagaagttcttcagacccctcccagaaagctacgatcaatttaagcagaatatccacagcctatttcctgttctcattgataccaagagtgtaacaaaggatatctggaaggaga

SEQ ID NO: 401000 - DNA, 120 bp, Artificial Sequence
  ENSG00000146453_8 (sequence is synthesized)
tgaatttcccgagggtgtcgaatctttcggaagtctatgaagtcctgaacagtgacttgaatcccaccaagaattctggaccagagattgttcacgcgagcaggtgtgagaaatatgttg

SEQ ID NO: 401001 - DNA, 120 bp, Artificial Sequence
  ENSG00000146453_9 (sequence is synthesized)
agacaaagtgcccccacgaagccgcgtatgatgccttcctctgtgggtcagttcttttgaaagtggcacacttgcttctacagaagatataccacatcgaccccgtgcccgagtcatcct

SEQ ID NO: 401002 - DNA, 120 bp, Artificial Sequence
  ENSG00000146453_10 (sequence is synthesized)
ttcctcagtaccttgacgtgctggctccttacgtgaaccaagtgaacctcatccgagcgggggtcccaaagatcaatttttctggtccagattatcccagtatccgacctcccatcctca

SEQ ID NO: 401003 - DNA, 120 bp, Artificial Sequence
  ENSG00000146453_11 (sequence is synthesized)
tcctcagcgtcaaaaggtggcctggggtcagcgagcagcaagtctaccataagtttcagaatctctgcaagtttgatgtcaggcgactcacaagaagccagttcttactcctgaccaata

SEQ ID NO: 401004 - DNA, 120 bp, Artificial Sequence
  ENSG00000146453_12 (sequence is synthesized)
agtttaaggatgcgcggaacatcctgaaggagtaccgggaccacccgaccctgtgcatctccctgtaccgctactggaggcactccccaaacgtcaactgcctgctccaagtctgtggca

SEQ ID NO: 401005 - DNA, 120 bp, Artificial Sequence
  ENSG00000146453_13 (sequence is synthesized)
tagtgactgcctgggcccttctcgcgttcatccttggaagatctggtacctgagtgcagcgaggcctcctgcggccaccctcgggtccccatgctctctgggaggtgtgctgggtgtgtt

SEQ ID NO: 401006 - DNA, 120 bp, Artificial Sequence
  ENSG00000146453_14 (sequence is synthesized)
cgtgtaaatcagattctgtttgcagatggatctgtttggtcttttctagaaattctgttatgtcctgaacgtgaaattctgtcaacactctcaatgataaatcagtccttagatatcgta

SEQ ID NO: 401007 - DNA, 120 bp, Artificial Sequence
  ENSG00000146453_15 (sequence is synthesized)
gtgggcagcacgtgggcagcacgtgatagcgctgggcgactccgcggagctgcacggccatggacgtgggcgccgacgagttcgaggagagcctccctctgctgcaggagctcgtccagg

SEQ ID NO: 401008 - DNA, 120 bp, Artificial Sequence
  ENSG00000146453_16 (sequence is synthesized)
aggccgacttcgtggaggtgagcgcgggtgccttggccgcctgcagatctacagtgtgaggagtgctggcgatgttctgcacccgaggactgctattttttgccttcctggcaggtctgg

SEQ ID NO: 401009 - DNA, 120 bp, Artificial Sequence
  ENSG00000146453_17 (sequence is synthesized)
ttttccgctattgaaggagaggcaaacaagtatgtatcaagagcttctgcaaacataggtgcttcccacctatgttccacagctgccaccttcaaattctgcctcaggtatatagcccat

SEQ ID NO: 401010 - DNA, 120 bp, Artificial Sequence
  ENSG00000146453_18 (sequence is synthesized)
tttccttttgtttagagatgcagagccatttctttaggcctcattcctagtaacccaggattcagggaatttgtccctgcttttcaggtggtagtgaagaaagtgagtaaacaacatcgt

SEQ ID NO: 401011 - DNA, 120 bp, Artificial Sequence
  ENSG00000146457_0 (sequence is synthesized)
ttactttgtttccttttttatttacttttttggctatgtaaaactaaaagttcaaagacagagaaatcttgtctccaccccccactctttataggcaactaaaaatgttaagtttccagg

SEQ ID NO: 401012 - DNA, 120 bp, Artificial Sequence
  ENSG00000146457_1 (sequence is synthesized)
tttccaggatatccttccaattcctccccgaaaataagcatatacacataaatattcatattaaatataaatatatatttttatgtatttaagtaaatacataaaagcatatatgcttat

SEQ ID NO: 401013 - DNA, 120 bp, Artificial Sequence
  ENSG00000146457_2 (sequence is synthesized)
ttgaatacagtgaatacttactacacttaaatatttaagtgaatacttaatacaacctgagactcattccaaagcaacacacgattatttcctgaatctttttaatggttgcattgtgtt

SEQ ID NO: 401014 - DNA, 120 bp, Artificial Sequence
  ENSG00000146457_3 (sequence is synthesized)
ctactgtatggatgcaccattcccaatcagttccctattaacggatatttgggttatccctaacttttgctatgacaaatagcactgcaataaccttgtatacctattgtttccatgtgt

SEQ ID NO: 401015 - DNA, 120 bp, Artificial Sequence
  ENSG00000146457_4 (sequence is synthesized)
ggagctgcaccttcagaataaggttagggttagaagtataactgcaaggtataagaataaacacaagtaattttgtactccgtggaacttgaaccatttttccactcccaccaggaaagg

SEQ ID NO: 401016 - DNA, 120 bp, Artificial Sequence
  ENSG00000146457_5 (sequence is synthesized)
taatttcaacgtgtatttccattgtaagtgaggtggagcgactttctatgtttaaagaccattacggtattttttctgagaatcatctgttcatgtccttccccattttctcctttggct

SEQ ID NO: 401017 - DNA, 120 bp, Artificial Sequence
  ENSG00000146457_6 (sequence is synthesized)
tttgcactttttgttttcaatttttgagagctcttgtgatacgagttgcaaagattttctccagaccgatctgattcactggaaatatactacgaccatctggaatgtactttaatctta

SEQ ID NO: 401018 - DNA, 120 bp, Artificial Sequence
  ENSG00000146457_7 (sequence is synthesized)
tcctaataaatcaccttactacaagacactcctttggggatgaacaggtttgataaagccggctaaggacagaccaatcaaaagaattacgtgctcttctagtaagtgtttagagactgt

SEQ ID NO: 401019 - DNA, 120 bp, Artificial Sequence
  ENSG00000146457_8 (sequence is synthesized)
ttcacgttctccaggtaacaccgccattactcggcggtccagatggcagtcttacttcagggagtctactccacttgcaggacctctttgattgagttcactaaacctcacagggccgcc

SEQ ID NO: 401020 - DNA, 120 bp, Artificial Sequence
  ENSG00000146457_9 (sequence is synthesized)
ttccccgtgttccagttagcaaggggccctcaacgccgcggacacagcgcaacctccgacgccagagaacaatagctcctcgatgcgtctccagagatgtcaaggaggaacgaacccagc

SEQ ID NO: 401021 - DNA, 120 bp, Artificial Sequence
  ENSG00000146457_10 (sequence is synthesized)
ggccaggagactgcgcctcacgactgatgagagggaaggcatcggtttctaagttctcaaaacttacaggtgagcttctgctaagagtaaacgcccgcggctcgccgcccacggcctctc

SEQ ID NO: 401022 - DNA, 120 bp, Artificial Sequence
  ENSG00000146457_11 (sequence is synthesized)
tcttgaggtggcacctggtcctccgacacgcggaagcatcacggatgagcgtcacgaacacagagcggccaatcacgcgccgccttcgcccagatccctccgcacgaggcagccccgcag

SEQ ID NO: 401023 - DNA, 120 bp, Artificial Sequence
  ENSG00000146457_12 (sequence is synthesized)
ccgcaggtggccccggcgagtacttccaccttcccttcccgtgatgccctggggctgacctccgacctcgctggcccgcccctcccctcggccgcttcccttactgagcttgctgagctc

SEQ ID NO: 401024 - DNA, 120 bp, Artificial Sequence
  ENSG00000146457_13 (sequence is synthesized)
cggggcccgcggagctcgcgccaggctcctgggaaaggacggggagtgttaccggggagcagctgctccattgtgcctcgaggccccgatcgggctaggccgacggcctccctcccttca

SEQ ID NO: 401025 - DNA, 120 bp, Artificial Sequence
  ENSG00000146457_14 (sequence is synthesized)
cctttcctctcctggcggggttcggcggcgggcgagtgactgcggccacgcctgaaaggcgactctcctgattcaagatgaccaacgaagaacctcttcccaagaaggttcgattgagtg

SEQ ID NO: 401026 - DNA, 120 bp, Artificial Sequence
  ENSG00000146457_15 (sequence is synthesized)
gaagcatatgtacaagctttggagggcaagtacacagatcttaactctaatgatgtaactggcctaagagagtctgaagaaaaactaaagcaacaacagcaggagtctgcacgcagggaa

SEQ ID NO: 401027 - DNA, 120 bp, Artificial Sequence
  ENSG00000146457_16 (sequence is synthesized)
aacatccttgtaatgcgactagcaaccaaggaacaagagatgcaagagtgtactactcaaatccagtacctcaagcaagtccagcagccgagcgttgcccaactgagatcaacaatggta

SEQ ID NO: 401028 - DNA, 120 bp, Artificial Sequence
  ENSG00000146457_17 (sequence is synthesized)
gacccagcgatcaacttgtttttcctaaaaatgaaaggtgaactggaacagactaaagacaaactggaacaagcccaaaatgaactgagtgcctggaagtttacgcctgatagccaaaca

SEQ ID NO: 401029 - DNA, 120 bp, Artificial Sequence
  ENSG00000146457_18 (sequence is synthesized)
gggaaaaagttaatggcgaagtgtcgaatgcttatccaggagaatcaagagcttggaaggcagctgtcccagggacgtattgcacaacttgaagcagagttggctttacagaagaaatac

SEQ ID NO: 401030 - DNA, 120 bp, Artificial Sequence
  ENSG00000146457_19 (sequence is synthesized)
agtgaggagcttaaaagcagtcaggatgaactgaatgacttcatcatccagcttgatgaagaagtagagggtatgcagagtaccattctagttctgcagcagcagctgaaggagacacgc

SEQ ID NO: 401031 - DNA, 120 bp, Artificial Sequence
  ENSG00000146457_20 (sequence is synthesized)
cagcagttggctcagtaccagcagcagcagtctcaggcctctgccccaagtaccagcaggactacagcttctgaacctgtagaacagtcagaggccacaagtaaagactgcagtcgtctg

SEQ ID NO: 401032 - DNA, 120 bp, Artificial Sequence
  ENSG00000146457_21 (sequence is synthesized)
acaaacggaccaagtaatggtagctcctcccgccagaggacgtctgggtctggatttcacagggagggcaacacaaccgaagatgactttccttcttctccagggaatggtaataagtcc

SEQ ID NO: 401033 - DNA, 120 bp, Artificial Sequence
  ENSG00000146457_22 (sequence is synthesized)
tccaacagctcagaggagagaactggcagaggaggtagtggttacgtaaatcaactcagtgcggggtatgaaagtgtagactctcccacgggcagtgaaaactctctcacacaccaatca

SEQ ID NO: 401034 - DNA, 120 bp, Artificial Sequence
  ENSG00000146457_23 (sequence is synthesized)
aatgacacagactccagtcatgaccctcaagaggagaaagcagtgagtgggaaaggtaatcgaactgtgggttcccgccacgttcagaatggcttggactcaagtgtaaatgtacagggt

SEQ ID NO: 401035 - DNA, 120 bp, Artificial Sequence
  ENSG00000146457_24 (sequence is synthesized)
tcagttttgtaatattttttcagcaaatttttatacagtgtcatttaatttgggagaggatactgtccagaaaattaatgcatacttttgtcacaatttgcctttttgtgggtgtacgtt

SEQ ID NO: 401036 - DNA, 81 bp, Artificial Sequence
  ENSG00000146457_25 (sequence is synthesized)
acttctgccgctttggaaattgtaacagttaattactttgaatgttgctaaaaggacattttgtgtagggtcaagttattt

SEQ ID NO: 401037 - DNA, 120 bp, Artificial Sequence
  ENSG00000146457_26 (sequence is synthesized)
atgttgctaaaaggacattttgtgtagggtcaagttatttttatatgagttaatgtgaaattgtaaatggaaatttttccttaaaatacaacacaatgatgtctgtataaatctgtctgt

SEQ ID NO: 401038 - DNA, 120 bp, Artificial Sequence
  ENSG00000146457_27 (sequence is synthesized)
ttagaatctgtgctgtgtaagggcattcgtactcatgctgttactgtacttatgcaccattcagacttgttagagtagatgtgggtttatgactgccaagtttgcccagtacagtagttt

SEQ ID NO: 401039 - DNA, 120 bp, Artificial Sequence
  ENSG00000146457_28 (sequence is synthesized)
tttatcactaaaagttggactcattgatggagtcctgtagtagtttcagtgttagatacagttttttccaccatacatctgtgcattttctctttaggtgactgtttaagaaatttgtgt

SEQ ID NO: 401040 - DNA, 120 bp, Artificial Sequence
  ENSG00000146457_29 (sequence is synthesized)
gcatagttactcagtttttatgaactgttgtatcctgttaatgcatattgctctgtgactccagtatatcttacctgtactgaccaaacctaaataaagatttttattgtaactccttaa

SEQ ID NO: 401041 - DNA, 120 bp, Artificial Sequence
  ENSG00000146457_30 (sequence is synthesized)
ctccctcagcgccattttgtggcagcgagacccacaaataaaggggagcgcaggggttgcggcgggactaggagcgcggcggggccggcggcagagctgtccggctgcgcggtggcccgg

SEQ ID NO: 401042 - DNA, 120 bp, Artificial Sequence
  ENSG00000146457_31 (sequence is synthesized)
ggggcccgggcggcagggcaagcagcgcggcctcggcctatgcgaccggtggcgccggcgcggcttctgcctggagaggattcaagatgaccaacgaagaacctcttcccaagaaggttc

SEQ ID NO: 401043 - DNA, 120 bp, Artificial Sequence
  ENSG00000146457_32 (sequence is synthesized)
gagaaacagaagtcttaagtctgtggcacactgtgtcttcagacagtttgaaggaatgaaaacctagagattttaaatcatgaattgaacatgtaaaattccagtaaaatgtaaaaacgg

SEQ ID NO: 401044 - DNA, 120 bp, Artificial Sequence
  ENSG00000146457_33 (sequence is synthesized)
aatatgcatcgctcttaaccttgagcatagtgacttagagacactgtgtatcagttttgccaataagactgtggacttcatgattgttgttgaacttctgggtcaaaactcaaatgaggt

SEQ ID NO: 401045 - DNA, 120 bp, Artificial Sequence
  ENSG00000146457_34 (sequence is synthesized)
gaattttgcctttaaagggtttatttgctgagaaccaactttcaatagtcatgagagaatcaaataatagatgtccgtacaagtagcgcatatatttaaccatttagtttggggctctat

SEQ ID NO: 401046 - DNA, 120 bp, Artificial Sequence
  ENSG00000146457_35 (sequence is synthesized)
attacttgcttgagccttaatcaatgtggttttattcaatggtttgttctttgaatggttgcaaaaactgtagataatcttactgaggactgtacaaacatgaaggtgtggtatcaaact

SEQ ID NO: 401047 - DNA, 120 bp, Artificial Sequence
  ENSG00000146457_36 (sequence is synthesized)
tcaggttgaaactgtttgaagcattataaacattcatttcacaactagattgtataaggatattagctgtgatgagactcactgcattattttttttagtgaattttatgaaatccccgt

SEQ ID NO: 401048 - DNA, 120 bp, Artificial Sequence
  ENSG00000146457_37 (sequence is synthesized)
tccattcaacaggcacatgtttaaaagagctttgtcgttggtgttaatgggggaatgtgttccttcattgtatttgggccttttgtattgcactcttgatattaaattaaatgtgccttg

SEQ ID NO: 401049 - DNA, 120 bp, Artificial Sequence
  ENSG00000146457_38 (sequence is synthesized)
ctttaaaaaaaaatagacttgaagggattatcgttgtttgcttatttttcatttctttgcctttataacaataatagcattggagttgtacagtgtgccagatattgtatcttatatcca

SEQ ID NO: 401050 - DNA, 120 bp, Artificial Sequence
  ENSG00000146457_39 (sequence is synthesized)
gtatattttttagaatattttcagattttggaaaactttagttataataatattcccatggtctactcttaatgttcattatgtgaatatttccaggtctactcttaatgttcattatgt

SEQ ID NO: 401051 - DNA, 120 bp, Artificial Sequence
  ENSG00000146457_40 (sequence is synthesized)
tgttcattatgtaaatatttccaggtacatatatacaaataatgtcaaaaatggacattatgagtatattattattcttttcctagtgtaaatccctttgattgtaattaaaaactactt

SEQ ID NO: 401052 - DNA, 120 bp, Artificial Sequence
  ENSG00000146457_41 (sequence is synthesized)
cttggcatgttctcagcagaaaaaaccttctctatatatctctttttacctgtttcctgtaaaatgggaaggaataatgagggactattttatgatcagttaaactagatttaggctggg

SEQ ID NO: 401053 - DNA, 120 bp, Artificial Sequence
  ENSG00000146457_42 (sequence is synthesized)
ctattttatgatcagttaaactagatttaggctgggtgtggtgactcaggcctgtaatttcagcagtttgggaggccagggtgtgaggatcatttgagctcgggagttcaagaccagcct

SEQ ID NO: 401054 - DNA, 120 bp, Artificial Sequence
  ENSG00000146457_43 (sequence is synthesized)
gcgagactctgtctaaaaaaaactagatttaaaatgaaaaatccagaagaatgctcagtattactaaaatctgtgagtttatagatatcttctagtttatttaataaactattttatcgt

SEQ ID NO: 401055 - DNA, 120 bp, Artificial Sequence
  ENSG00000146457_44 (sequence is synthesized)
aacaactaatgtatggatttttttttattagatggaaacaatatgaagcatatgtacaagctttggagggcaagtacacagatcttaactctaatgatgtaactggcctaagagagtctg

SEQ ID NO: 401056 - DNA, 120 bp, Artificial Sequence
  ENSG00000146457_45 (sequence is synthesized)
ccactacgagaaagctgtggtgggacagccaagtactcgtttccacaccaagactcagactttttgagccaaaaaaaagccacattcttacactgtccagcttgtaatggttaatgtaaa

SEQ ID NO: 401057 - DNA, 120 bp, Artificial Sequence
  ENSG00000146457_46 (sequence is synthesized)
acttaccagatgaaccttgtgtttcagcttttttcttttccccttccccttgcttcagaggcctgatggcgtcggactattccgaagaagtggccacctccgaaaaattccccttctaga

SEQ ID NO: 401058 - DNA, 120 bp, Artificial Sequence
  ENSG00000146457_47 (sequence is synthesized)
aaatactgttgctgtgctcttcaaagtgaaggaaaaggcgctgtgcctcatttttaaaagacctacataaaagacaaggagacttgacacttgttacttttatgacactttgtcccaggg

SEQ ID NO: 401059 - DNA, 120 bp, Artificial Sequence
  ENSG00000146457_48 (sequence is synthesized)
tattgcagtagaaagtaatgtgggacagcttcacagggtgtctgccagaagataatgtgttggaactgtgggctggcctaagtaagacattttgtgaattgaaaaaaggtatagtgatca

SEQ ID NO: 401060 - DNA, 120 bp, Artificial Sequence
  ENSG00000146457_49 (sequence is synthesized)
tttctagcaaattcatttaatcatttagataaatgaggcattattttcttcatgcttccatccaatcctggaggtgaattttttccgtcagatcattctataagtcaccaattcaaattt

SEQ ID NO: 401061 - DNA, 120 bp, Artificial Sequence
  ENSG00000146457_50 (sequence is synthesized)
tcgcttggtgataatggagtctaagatgagtggaagataaatgttccagcttgtcccaacgtttaagtgcagttttaacaagggtgacttaagttctctcttaatcattcaaatcaattc

SEQ ID NO: 401062 - DNA, 120 bp, Artificial Sequence
  ENSG00000146463_0 (sequence is synthesized)
gatttggtgatccctttaagaaaccgcaggcggaggaatttctctgagagaaaataatcctactcacggggccccttggaggccattaaccccccgagtcccggcccccaccccgtcccc

SEQ ID NO: 401063 - DNA, 120 bp, Artificial Sequence
  ENSG00000146463_1 (sequence is synthesized)
ggacccgtgggatctcagaagctgcggcccggcgcgcggcatccgccccctccccactctcggcgcaaggcccggccgggtccggggaagctgccgcgaggcggccgtgcctgcagtgtg

SEQ ID NO: 401064 - DNA, 120 bp, Artificial Sequence
  ENSG00000146463_2 (sequence is synthesized)
gcagtgtgggcgggggccggggggccgagaggtaccgccgccaccgcgcggggagccgcagcggttccgagcggggcccaacatggcggagagagaggtggagtccggcccccgaaagag

SEQ ID NO: 401065 - DNA, 120 bp, Artificial Sequence
  ENSG00000146463_3 (sequence is synthesized)
ccggcccccgaaagaggtttgaacaaaaaagtggtgcagtttttgatgaaattgtagagaactgtggtggtatcatggatacagaaatgtctgaagatatagaccacaacttaactccta

SEQ ID NO: 401066 - DNA, 120 bp, Artificial Sequence
  ENSG00000146463_4 (sequence is synthesized)
cccttgacagcatgtcttatggaatgccgaatcaaacaggatctgaaaattcattgctggatgaagatgattattttttgaactctggggatcttgcaggaattccagtcgttggtagtg

SEQ ID NO: 401067 - DNA, 120 bp, Artificial Sequence
  ENSG00000146463_5 (sequence is synthesized)
acaatgaggatgaacaggattttagttcaaaggacaatcttgtttcttcaattcatactgatgatagcttggaagtagagagaagagtcacacagcatgaatcagacaatgaaaatgaaa

SEQ ID NO: 401068 - DNA, 120 bp, Artificial Sequence
  ENSG00000146463_6 (sequence is synthesized)
tacaaattcaaaataagttaaaaaaagactttcctaaacaatttgatcaggtttctgtctttaaatcaatacggaaagattttagtctagtaagagaaaacagcaaagagacattttctg

SEQ ID NO: 401069 - DNA, 120 bp, Artificial Sequence
  ENSG00000146463_7 (sequence is synthesized)
gaaaggagaaaaatagagacctaacttatgaacgtgaaaaacggttggataaaccccataaagatttggattcaaggttgaaaagcagtttttttgataaagcagctaatcaagttgaag

SEQ ID NO: 401070 - DNA, 120 bp, Artificial Sequence
  ENSG00000146463_8 (sequence is synthesized)
aaacattacatacccatttaccacaaaccccagaaacaaactttagggattccagctacccatttgccaataaagaatccattggttcggaactggggaattcctttgcatcaaatatta

SEQ ID NO: 401071 - DNA, 120 bp, Artificial Sequence
  ENSG00000146463_9 (sequence is synthesized)
gaattaaagaagaacctttggatgatgagtatgacaaagcaatggcaccacagcagggactactagacaaaataaaagatgaacctgacaatgctcaagagtatagtcatggccaacagc

SEQ ID NO: 401072 - DNA, 120 bp, Artificial Sequence
  ENSG00000146463_10 (sequence is synthesized)
aaaaaactcaagagggggaactgaaaattagtgctgtgttttcagtcagtggcagccctcttgctccacagttgactactggctttcagccctcactggcgtcatctggcatgaataaaa

SEQ ID NO: 401073 - DNA, 120 bp, Artificial Sequence
  ENSG00000146463_11 (sequence is synthesized)
tgcttccttcagttccagccacagctgttcgagtttcctgttctggttgtaaaaaaatcctccagaaggggcaaactgcttatcagaggaaagggtctactcagctattctgctccacac

SEQ ID NO: 401074 - DNA, 120 bp, Artificial Sequence
  ENSG00000146463_12 (sequence is synthesized)
tgtgcctcactggatatacagttccacctgcccgcccaccgcctcctctcaccaagaaaacttgttcaagttgctcaaaagacattttaaatccaaaggatgtgatcagtgcccagtttg

SEQ ID NO: 401075 - DNA, 120 bp, Artificial Sequence
  ENSG00000146463_13 (sequence is synthesized)
aaaacaccaccactagtaaagatttttgcagtcagtcatgtttgtcaacatatgaactgaaaaaaaaacctattgttaccataaatacaaatagtatttcaaccaaatgcagcatgtgtc

SEQ ID NO: 401076 - DNA, 120 bp, Artificial Sequence
  ENSG00000146463_14 (sequence is synthesized)
agaagaatgctgttattcgacatgaagttaattaccagaatgtggtccataaactttgcagtgatgcctgcttctctaagtttcgttctgctaacaacctcaccatgaactgttgtgaga

SEQ ID NO: 401077 - DNA, 120 bp, Artificial Sequence
  ENSG00000146463_15 (sequence is synthesized)
actgtgggggttactgttacagtgggtcgggacaatgccacatgcttcagatagagggacagtctaagaagttttgtagttcatcgtgtatcacggcatacaagcagaaatcagccaaaa

SEQ ID NO: 401078 - DNA, 120 bp, Artificial Sequence
  ENSG00000146463_16 (sequence is synthesized)
ttacaccgtgtgcgctttgcaaatcattgagatcctcagcagaaatgattgaaaataccaatagcttggggaagacagagcttttctgttctgttaattgcttatctgcttacagagtta

SEQ ID NO: 401079 - DNA, 120 bp, Artificial Sequence
  ENSG00000146463_17 (sequence is synthesized)
aaatggttacttctgcaggtgtacaagttcagtgtaacagttgtaaaacctcagcaattcctcagtatcacctagccatgtcagatggaagtatacgcaacttctgcagctacagctgtg

SEQ ID NO: 401080 - DNA, 120 bp, Artificial Sequence
  ENSG00000146463_18 (sequence is synthesized)
tggtagctttccagaatttattcaacaaaccaactggaatgaattcttcagtagtgcccttgtctcagggccaagtaattgtaagcatccccacaggttccacagtgtcagccggaggag

SEQ ID NO: 401081 - DNA, 120 bp, Artificial Sequence
  ENSG00000146463_19 (sequence is synthesized)
gtagcacatctgctgtttctcccacctccatcagtagctctgctgcagctggtctccagcgtctcgctgcccagtcccagcatgttgggtttgcacgaagtgttgtgaaactcaaatgtc

SEQ ID NO: 401082 - DNA, 120 bp, Artificial Sequence
  ENSG00000146463_20 (sequence is synthesized)
aacactgtaaccgtctttttgccacaaaaccagaacttcttgactataagggcaaaatgtttcagttctgtggcaagaattgttctgatgaatataagaaaataaataatgtaatggcaa

SEQ ID NO: 401083 - DNA, 120 bp, Artificial Sequence
  ENSG00000146463_21 (sequence is synthesized)
tgtgtgaatattgtaaaattgagaaaattgtaaaggagactgttcggttctcaggtgctgacaagtcattctgtagtgaaggttgcaaattgctttataaacatgacttggcaaaacgct

SEQ ID NO: 401084 - DNA, 120 bp, Artificial Sequence
  ENSG00000146463_22 (sequence is synthesized)
ggggaaatcactgtaaaatgtgcagttattgtttacagacatctcccaaattggtacagaataatttaggagggaaagtggaagagttctgttgtgaagaatgcatgtccaaatatacag

SEQ ID NO: 401085 - DNA, 120 bp, Artificial Sequence
  ENSG00000146463_23 (sequence is synthesized)
ttttgttctatcagatggccaaatgtgatgcttgtaagcgacagggtaaactcagtgagtccttgaaatggcgaggggaaatgaaacatttctgtaacctgctttgtatcttgatgttct

SEQ ID NO: 401086 - DNA, 120 bp, Artificial Sequence
  ENSG00000146463_24 (sequence is synthesized)
gtaatcagcaaagtgtatgtgacccgccttcacaaaataatgcagcaaatatttccatggttcaagctgcttcagcaggacccccatctctgagaaaagattcgactccagttatagcca

SEQ ID NO: 401087 - DNA, 120 bp, Artificial Sequence
  ENSG00000146463_25 (sequence is synthesized)
atgtagtatcattggcaagtgcccctgctgctcagcctacagtgaattctaacagtgtcttacaaggtgcagttccaacagtaacagcgaaaatcatcggtgatgcaagtactcaaacag

SEQ ID NO: 401088 - DNA, 120 bp, Artificial Sequence
  ENSG00000146463_26 (sequence is synthesized)
atgccctgaaactgccaccttcccaacctccaaggcttttgaagaacaaagctttattatgcaaacccatcacacagactaaagccacctcttgcaaaccacatacccaaaacaaagaat

SEQ ID NO: 401089 - DNA, 120 bp, Artificial Sequence
  ENSG00000146463_27 (sequence is synthesized)
gccagacagaagacactccaagtcagccccagattattgtggtgccagttcccgtaccagtgtttgttcccatacctcttcacctttatactcaatatgctccagtcccatttggaattc

SEQ ID NO: 401090 - DNA, 120 bp, Artificial Sequence
  ENSG00000146463_28 (sequence is synthesized)
cagttccaatgcctgtccctatgcttattccatcttcaatggatagtgaagataaagtcacagagagtattgaagacattaaagaaaagcttcccacacatccatttgaagctgatctcc

SEQ ID NO: 401091 - DNA, 120 bp, Artificial Sequence
  ENSG00000146463_29 (sequence is synthesized)
ttgagatggcagaaatgattgcagaagatgaagagaagaagactctatctcagggagagtcccaaacttctgaacacgaactctttctagacaccaagatatttgaaaaagaccaaggaa

SEQ ID NO: 401092 - DNA, 120 bp, Artificial Sequence
  ENSG00000146463_30 (sequence is synthesized)
tagctgggaggaagagctgaatcactatgccttaaagtcaaatgctgtgcaagaggctgattcagaattgaagcagttctcaaaaggggaaactgaacaggacctggaagcagattttcc

SEQ ID NO: 401093 - DNA, 120 bp, Artificial Sequence
  ENSG00000146463_31 (sequence is synthesized)
atcagactcctttgacccacttaataaaggacagggaatccaggcacgttcccgaacaagacgacgacacagagatggcttcccccaacccagacgaagaggacggaagaagtctatagt

SEQ ID NO: 401094 - DNA, 120 bp, Artificial Sequence
  ENSG00000146463_32 (sequence is synthesized)
ggctgtggagcccaggagtcttattcaaggagcctttcaaggctgctcagtgtccgggatgacactgaaatacatgtatggggtaaatgcttggaagaactgggttcagtggaaaaatgc

SEQ ID NO: 401095 - DNA, 120 bp, Artificial Sequence
  ENSG00000146463_33 (sequence is synthesized)
caaggaagagcagggggatctaaaatgtggaggggttgaacaggcctcatctagcccacgttctgaccccttaggaagtactcaagaccatgcactctctcaagaatcctcagagccagg

SEQ ID NO: 401096 - DNA, 120 bp, Artificial Sequence
  ENSG00000146463_34 (sequence is synthesized)
ctgtagagtccgctctatcaagctgaaggaagacattctgtcctgcacttttgctgagttgagtttgggcttatgccagtttatccaagaggtgcggagaccaaatggtgaaaaatatga

SEQ ID NO: 401097 - DNA, 120 bp, Artificial Sequence
  ENSG00000146463_35 (sequence is synthesized)
tccagacagtatcttatacttgtgccttggaattcaacagtacctgtttgaaaatggtagaatagataacatttttactgagccctattccagatttatgattgaacttaccaaactctt

SEQ ID NO: 401098 - DNA, 120 bp, Artificial Sequence
  ENSG00000146463_36 (sequence is synthesized)
gaaaatatgggaacctacaatacttcctaatggttacatgttctctcgcattgaggaagagcatttgtgggagtgcaaacagctgggcgcttactcaccaatcgtccttttaaacaccct

SEQ ID NO: 401099 - DNA, 120 bp, Artificial Sequence
  ENSG00000146463_37 (sequence is synthesized)
ccttttcttcaataccaaatacttccaactaaagaatgttactgagcacttgaagctttcctttgcccatgtgatgagacggaccaggactctgaagtacagtaccaagatgacatatct

SEQ ID NO: 401100 - DNA, 120 bp, Artificial Sequence
  ENSG00000146463_38 (sequence is synthesized)
gaggttcttcccacctttacagaagcaggagtcagaaccagataaactgactgttggcaagaggaaacgaaatgaagatgatgaggttccagtgggggtggagatggcagagaatactga

SEQ ID NO: 401101 - DNA, 120 bp, Artificial Sequence
  ENSG00000146463_39 (sequence is synthesized)
caatccactaagatgcccagtccgactttatgagttttacctgtcaaaatgttctgaaagtgtgaagcaaaggaatgatgtgttttaccttcaacctgagcgctcctgtgtcccgaatag

SEQ ID NO: 401102 - DNA, 120 bp, Artificial Sequence
  ENSG00000146463_40 (sequence is synthesized)
ccccatgtggtactccacattcccgatagaccctggaaccctggacaccatgttaacacgtattctcatggtgagggaggtacatgaagaacttgccaaagccaaatctgaagactctga

SEQ ID NO: 401103 - DNA, 120 bp, Artificial Sequence
  ENSG00000146463_41 (sequence is synthesized)
tgttgaattatcagattaaaacggaagtgaggttcttattttcatacatattggtatgcaccaaactgtgaatgcatccagctgttggaaaatgatgtataagtctaagtcctcttgact

SEQ ID NO: 401104 - DNA, 120 bp, Artificial Sequence
  ENSG00000146463_42 (sequence is synthesized)
tgaccataagatcatggaaaacagatgacttgtgaaccccacagtgtggatgtgcaaatgaaaattgaaggaaagaatatgaactgagaaatgttctttggcagtgatatagttcttaga

SEQ ID NO: 401105 - DNA, 120 bp, Artificial Sequence
  ENSG00000146463_43 (sequence is synthesized)
catcttcagaatgactaatttctccgagtggtgcataatcttattttgtttgggagtaacaaatcgtggaatatttttaaggaaaactgttgtataaaactttaccatagtaaccttaga

SEQ ID NO: 401106 - DNA, 120 bp, Artificial Sequence
  ENSG00000146463_44 (sequence is synthesized)
ccttagagaggtagctttggagtgaaactttggctgcaataggctactttggcaagccctccgtaaaagtcagaggagagatcagtacagagctaagagtgacatcaaatgaggactgtg

SEQ ID NO: 401107 - DNA, 120 bp, Artificial Sequence
  ENSG00000146463_45 (sequence is synthesized)
ggacccagatttgaagacccaataaaaatactcaactttttaaaaaagatagtgaagtggtcttgattgattttgattttcactgccaagccaatcatgtgaaggacagaagcttttgcc

SEQ ID NO: 401108 - DNA, 120 bp, Artificial Sequence
  ENSG00000146463_46 (sequence is synthesized)
atgggcccctcacatcagggaaaatgaccttcactgctgttaacagtaatgtgtccctttcattttctggatcaagccttctcagcggtgggtctggatgtgggtaaactaaggtaaagg

SEQ ID NO: 401109 - DNA, 120 bp, Artificial Sequence
  ENSG00000146463_47 (sequence is synthesized)
ggatgatattccacaaactaattatgcacacagaaaatctgtggagcctatcagaccccaagtgtcttgaaatgtttgtagaaacccactaaaatgccccttctctgggtgtgggccctt

SEQ ID NO: 401110 - DNA, 120 bp, Artificial Sequence
  ENSG00000146463_48 (sequence is synthesized)
attgcagctgtctcacagcctgagctgtggtacagagaaatgggggttctccttttattttcattttttttccccaatggcagcttttctcccgttgttttaccttcctatttcccaaac

SEQ ID NO: 401111 - DNA, 120 bp, Artificial Sequence
  ENSG00000146463_49 (sequence is synthesized)
agttcctcttattttgtcttttgcaccagtttctggaggcccttgtcatttcaaaaaggatagtctcttttcttactctggcaaacctgtgagtgattccacaaagatacagtattactt

SEQ ID NO: 401112 - DNA, 120 bp, Artificial Sequence
  ENSG00000146463_50 (sequence is synthesized)
agctatctgaattatgatagaaaaggtcctagttaggttcctatataaagcatttggaagatgaccttgttgcccttgaaacttgaaaatagggattctggggtgaggatacaaagacat

SEQ ID NO: 401113 - DNA, 120 bp, Artificial Sequence
  ENSG00000146463_51 (sequence is synthesized)
tgtcttgcatatccataagcaggtcttagagcattattccaaactctagctgtttcagtagttctatgaggattgcaagtcataggtgtgtgtggcatatcagtccatctccctcatctc

SEQ ID NO: 401114 - DNA, 120 bp, Artificial Sequence
  ENSG00000146463_52 (sequence is synthesized)
cattctcagtttcttccccacaaaatttggaatcaaagcttttatgacgtttgccaattgcagaacttcttcagctaaggttaatttgacgctatgataaaactgagagatgtcaaaaag

SEQ ID NO: 401115 - DNA, 120 bp, Artificial Sequence
  ENSG00000146463_53 (sequence is synthesized)
cctcttagaaattttaatcttgaaagacttttcagggtatctcattttttaggtgggggtggcaggtgtatttcttttttaacaaataaaaggcatttaagtaaaactaaaatgaaaaaa

SEQ ID NO: 401116 - DNA, 120 bp, Artificial Sequence
  ENSG00000146463_54 (sequence is synthesized)
gtaggccttctgacattgtgtacttggtggttctgtccctctgcctgtaacaaatctcatttttgttaccaagaactgtatgaaagaagtaaatccaccccgattctgtatgattaattc

SEQ ID NO: 401117 - DNA, 120 bp, Artificial Sequence
  ENSG00000146463_55 (sequence is synthesized)
catctgtgtttgtcatttctgactggaaaacttcttactccataccttgttcgatatggaggacaaataattggattgtctgataagtctgccaataaactatccagaaatagcaagtgt

SEQ ID NO: 401118 - DNA, 120 bp, Artificial Sequence
  ENSG00000146463_56 (sequence is synthesized)
aatagtccccactatacgaattttatggtttgtataaacactaacattttccccttctgtagttgtatgaaaaaacaaatattgttagcatagtagataaattgttatgaaataccagaa

SEQ ID NO: 401119 - DNA, 120 bp, Artificial Sequence
  ENSG00000146463_57 (sequence is synthesized)
aaaaaaatctgtatcttttactgagaacacccaatacccagataaatgactgtatcaggatttcatttgcatgttagtccacagagttgcccagaaccctaaatttattcataagagaaa

SEQ ID NO: 401120 - DNA, 120 bp, Artificial Sequence
  ENSG00000146463_58 (sequence is synthesized)
atattgattaattattggtcattcctcataagtgtagctgttgatgtgtgcgtctgattattgcttttttaattttatgaaaattgtgtaaaattacattttttttccaggggagaaaaa

SEQ ID NO: 401121 - DNA, 120 bp, Artificial Sequence
  ENSG00000146463_59 (sequence is synthesized)
aacatcaaacaaaaacatctaaatcatcctttttgttctttttcagtttttaaccacttttaggttttccccttacagaaaccacagaaatattcccttagaataaaatagtatatttgt

SEQ ID NO: 401122 - DNA, 120 bp, Artificial Sequence
  ENSG00000146463_60 (sequence is synthesized)
atttgatgggtgagttcttcttctttacgtcttaaaagaatttgaaatctctttttctgattgaccttattggtatgacccagcaattagtaaaattacaaagaaagagagcagtttccg

SEQ ID NO: 401123 - DNA, 120 bp, Artificial Sequence
  ENSG00000146463_61 (sequence is synthesized)
atatggattggattaaataatctctaaagccctttcttgctctaagaactctgaatctttaggatataaaactaaattctttattctacaaatgtataccctttccagctttgagaaccc

SEQ ID NO: 401124 - DNA, 120 bp, Artificial Sequence
  ENSG00000146463_62 (sequence is synthesized)
tgagaaatacaagcaaaaacaacaaaaacaaaatatgcctgtccctatgcttattccatcttcaatggatagtgaagataaagtcacagagagtattgaagacattaaagaaaagcttcc

SEQ ID NO: 401125 - DNA, 120 bp, Artificial Sequence
  ENSG00000146463_63 (sequence is synthesized)
tcaagttgctcaaagtatagcagaattctaaattatcttttttgtttctttcctttctcttaacatactttgttcttaggtcatgtattacatttgatattctacatttattcctttttt

SEQ ID NO: 401126 - DNA, 120 bp, Artificial Sequence
  ENSG00000146463_64 (sequence is synthesized)
ttttttttttttttttgagaaataccacattattttctgtctgctttcagttgttgcttttcagtcttccaggtgctaggtgctcagcttgttttttagctttcaataatgttactttta

SEQ ID NO: 401127 - DNA, 120 bp, Artificial Sequence
  ENSG00000146463_65 (sequence is synthesized)
gagcggggcccaacatggcggagagagaggtggagtccggcccccgaaagagggaacatcgtgatcaattagccactgccaaagatccctgctggccaaaacattctgattaccgtttga

SEQ ID NO: 401128 - DNA, 120 bp, Artificial Sequence
  ENSG00000146469_0 (sequence is synthesized)
agggtagagtgagaagcaccagcaggcagtaacagccaacccttagccattgctaagggcagagaactggtggagcctttctcttactcccaggacttcagcacctaagacagctccaaa

SEQ ID NO: 401129 - DNA, 120 bp, Artificial Sequence
  ENSG00000146469_1 (sequence is synthesized)
acaaaccagaacagtcagctccgggggagcacgactgggcgagaggcacagaaatggacaccagaaataaggcccagctccttgtgctcctgactcttctcagtgtgctcttctcacaga

SEQ ID NO: 401130 - DNA, 120 bp, Artificial Sequence
  ENSG00000146469_2 (sequence is synthesized)
cttcggcatggcctctttacagggcaccttctgctctcaggttgggtgacagaataccctttgagggagcaaatgaacctgatcaagtttcattaaaagaagacattgacatgttgcaaa

SEQ ID NO: 401131 - DNA, 120 bp, Artificial Sequence
  ENSG00000146469_3 (sequence is synthesized)
atgcattagctgaaaatgacacaccctattatgatgtatccagaaatgccaggcatgctgatggagttttcaccagtgacttcagtaaactcttgggtcaactttctgccaaaaagtacc

SEQ ID NO: 401132 - DNA, 120 bp, Artificial Sequence
  ENSG00000146469_4 (sequence is synthesized)
ttgagtctcttatgggaaaacgtgttagcagtaacatctcagaagaccctgtaccagtcaaacgtcactcagatgcagtcttcactgacaactatacccgccttagaaaacaaatggctg

SEQ ID NO: 401133 - DNA, 120 bp, Artificial Sequence
  ENSG00000146469_5 (sequence is synthesized)
taaagaaatatttgaactcaattctgaatggaaagaggagcagtgagggagaatctcccgactttccagaagagttagaaaaatgatgaaaaagacctttggagcaaagctgatgacaac

SEQ ID NO: 401134 - DNA, 120 bp, Artificial Sequence
  ENSG00000146469_6 (sequence is synthesized)
gaaaatgatacgcaacataattaaattttgagttctacataagtaattcaagaaaacaacttcaatatccaaaccaaataaaaatattgtgttgtgaatgttgtgatgtattctagctaa

SEQ ID NO: 401135 - DNA, 120 bp, Artificial Sequence
  ENSG00000146469_7 (sequence is synthesized)
tgtaataactgtgaagtttacattgtaaatagtatttgagagttctaaattttgtctttaactcataaaaagcctgcaatttcatatgctgtatatcctttctaacaaaaaaatatattt

SEQ ID NO: 401136 - DNA, 120 bp, Artificial Sequence
  ENSG00000146469_8 (sequence is synthesized)
aatgataagtaaatgctaggttaattccaattatatgagacgtttttggaagagtagtaatagagcaaaattgatgtgtttatttatagagtgtacttaactattcaggagagtagaaca

SEQ ID NO: 401137 - DNA, 120 bp, Artificial Sequence
  ENSG00000146469_9 (sequence is synthesized)
gataatcagtgtgtctaaatttgaatgttaagcagatggaatgctgtgttaaataaacctcaaaatgtctaagatagtaacaatgaagataaaaagacattcttccaaaaagattttcag

SEQ ID NO: 401138 - DNA, 120 bp, Artificial Sequence
  ENSG00000146469_10 (sequence is synthesized)
aaaatattatgtgtttccatattttataggcaacctttatttttaatggtgttttaaaaaatctcaaatttggattgctaatcaccaaaggctctctcctgatagtctttcagttaagga

SEQ ID NO: 401139 - DNA, 120 bp, Artificial Sequence
  ENSG00000146469_11 (sequence is synthesized)
gaacgacccctgcttctgacactgaaacttccctttctgcttgtgttaagtatgtgtaaaatgtgaagtgaatgaaacactcagttgttcaataataaatatttttgccataatgactca

SEQ ID NO: 401140 - DNA, 120 bp, Artificial Sequence
  ENSG00000146469_12 (sequence is synthesized)
gaatattgctttggtcatatgagcttccttctgtgaaagtacatttggagacacaactatttttccaaaataattttaagaaatcaaagagagaaaataaagaccttgcttatgattgca

SEQ ID NO: 401141 - DNA, 120 bp, Artificial Sequence
  ENSG00000146476_0 (sequence is synthesized)
gctcctccttcgcggcggtaccgcctctgtttctgcggcgattgaacagccgagctttgcggccgggatcgcggaaagtgatggctgtcgtcccggcgtctctctcaggacaggacgtgg

SEQ ID NO: 401142 - DNA, 120 bp, Artificial Sequence
  ENSG00000146476_1 (sequence is synthesized)
gatcatttgcatatcttacaattaaagacagaataccacagatcttaactaaggttattgatacattgcatcgacataaaagtgaattttttgagaaacacggagaggaaggcgtggaag

SEQ ID NO: 401143 - DNA, 120 bp, Artificial Sequence
  ENSG00000146476_2 (sequence is synthesized)
ctgaaaagaaagctatctctctcctttctaaattacggaatgaattgcaaacagataaaccatttatccccttggttgagaaatttgttgatactgatatatggaatcagtacctagaat

SEQ ID NO: 401144 - DNA, 120 bp, Artificial Sequence
  ENSG00000146476_3 (sequence is synthesized)
atcaacagagtcttttaaatgaaagtgatggaaaatcaagatggttctactcaccgtggttgttggtagaatgttacatgtatcgaagaattcatgaagcaattatccagagtccaccaa

SEQ ID NO: 401145 - DNA, 120 bp, Artificial Sequence
  ENSG00000146476_4 (sequence is synthesized)
tcgattactttgatgtatttaaagaatcaaaagagcaaaatttctatgggtcacaggaatccatcattgctttatgtactcacctgcaacaattgataagaactattgaagacctagatg

SEQ ID NO: 401146 - DNA, 120 bp, Artificial Sequence
  ENSG00000146476_5 (sequence is synthesized)
aaaatcagctgaaagatgagttttttaaacttctgcagatttcactgtggggaaataagtgtgatctgtctctctcaggtggagaaagtagttctcagaataccaatgtactaaattcat

SEQ ID NO: 401147 - DNA, 120 bp, Artificial Sequence
  ENSG00000146476_6 (sequence is synthesized)
tggaagacctaaaacctttcattttattgaatgatatggaacatctttggtcattgcttagcaattgcaagaaaacaagagaaaaagcttctgctactagagtgtatattgttctcgata

SEQ ID NO: 401148 - DNA, 120 bp, Artificial Sequence
  ENSG00000146476_7 (sequence is synthesized)
attctggatttgagcttgttacagatttaatattagccgacttcttgttgtcctctgaactggctactgaggttcatttttatggaaaaacaattccatggtttgtttctgatactacta

SEQ ID NO: 401149 - DNA, 120 bp, Artificial Sequence
  ENSG00000146476_8 (sequence is synthesized)
tacatgattttaattggttaattgaacaggtaaaacacagtaatcataagtggatgtccaagtgtggggctgactgggaagagtatattaaaatgggtaaatgggtttaccacaatcata

SEQ ID NO: 401150 - DNA, 120 bp, Artificial Sequence
  ENSG00000146476_9 (sequence is synthesized)
tgacaggtgacagaaaatgggagttttctgttccatttcatcaggctctgaatggcttccatcctgcaccactctgtaccataagaacattaaaagctgaaattcaggttggtctgcagc

SEQ ID NO: 401151 - DNA, 120 bp, Artificial Sequence
  ENSG00000146476_10 (sequence is synthesized)
ctgggcaaggggaacagctcctggcctctgagcccagctggtggaccactggaaaatatggaatatttcagtacgatggtcccctttgacttgatttaggagctctcagttgcatagaaa

SEQ ID NO: 401152 - DNA, 120 bp, Artificial Sequence
  ENSG00000146476_11 (sequence is synthesized)
gatctggtgagcaccttttcatccccagaaaaggagcacgtgaattgagtcgcctggcggctctgtacgcgctcagggaagcttagcttcttggtgcccatctacgtgcactggatgatt

SEQ ID NO: 401153 - DNA, 120 bp, Artificial Sequence
  ENSG00000146476_12 (sequence is synthesized)
tttcttttgaacattttgccccactacactgttttggggatagctgggttaagcaagttaaagatatttacatttatattggaattttagcaactttttttcaggttaaatatataattt

SEQ ID NO: 401154 - DNA, 120 bp, Artificial Sequence
  ENSG00000146476_13 (sequence is synthesized)
caagtgcttttaatgaacttatttttaattggctagggagcaaaaaataagtgagttctgcttttagttagttaaccttgttcttttcttaaatagtacactgcatggtatttaatattc

SEQ ID NO: 401155 - DNA, 120 bp, Artificial Sequence
  ENSG00000146476_14 (sequence is synthesized)
caggaagcatgggattttattttgcttgattttgggcacatgaaataatagctctaggaaaatgcgcatcttaatgactctttgtaaagagaggcatttcttacaactgtgatgtttgct

SEQ ID NO: 401156 - DNA, 120 bp, Artificial Sequence
  ENSG00000146476_15 (sequence is synthesized)
tacataaaagttacctcataagttaattctaacttttattcttgaattttatttcatttcaatagcttgtttcatttgcacgcctttgtattttgattgacctgtagaatggatgttagg

SEQ ID NO: 401157 - DNA, 120 bp, Artificial Sequence
  ENSG00000146476_16 (sequence is synthesized)
aaactcaaaattgaacacagtgaaacaaatggtatttgaagaaatgtaatatcttttatattctatttatgatatccataatcaaatgagattattttaccacataaatgttttaaatat

SEQ ID NO: 401158 - DNA, 120 bp, Artificial Sequence
  ENSG00000146476_17 (sequence is synthesized)
cagatttttagtttgcagttttaggaaaatgctttagatagaaaaggttcttatgcattgaatttggagtactaccaacaatgaatgaatttattttttatattcttacacattttattg

SEQ ID NO: 401159 - DNA, 120 bp, Artificial Sequence
  ENSG00000146476_18 (sequence is synthesized)
gtcattgtcacagatagtaaatactaaaaatttcaggtcagtttgttttgaaactgaaattggaaataaatctggaaatgttttgttgcactaaaataataaaatgaattgtactgaaaa

SEQ ID NO: 401160 - DNA, 120 bp, Artificial Sequence
  ENSG00000146476_19 (sequence is synthesized)
aggccctgggacctcccggtcccttgcctgcttccggctttcgctcgcttccatatccgctcctctagtcgccctccgctggccccgccttcgtccccggaagattgggtcttctggcga

SEQ ID NO: 401161 - DNA, 120 bp, Artificial Sequence
  ENSG00000146476_20 (sequence is synthesized)
gcggccgggatcgcggaaagtgatggctgtcgtcccggcgtctctctcaggacaggacgtggggttagtctagcttttctcctccccacttttgcggaaagccgggcctcgccgggagcc

SEQ ID NO: 401162 - DNA, 120 bp, Artificial Sequence
  ENSG00000146476_21 (sequence is synthesized)
tgtggggactaagcggagggcgcccgctccccggtgggctgcgttcgagtcccgccgccgggcgcggctttccggggcgcctttgcgggtttcgcggactggctcggaggcgaagggagg

SEQ ID NO: 401163 - DNA, 120 bp, Artificial Sequence
  ENSG00000146477_0 (sequence is synthesized)
actccgaggcgcgggctgcgggcggcgggcggcgggcgcaccatgccctccttcgacgaggcgctgcagcgggtgggcgagttcgggcgcttccagaggcgcgtgtttttgctgctgtgc

SEQ ID NO: 401164 - DNA, 120 bp, Artificial Sequence
  ENSG00000146477_1 (sequence is synthesized)
ctgacgggcgtcaccttcgccttcctcttcgtcggcgtggtcttcctgggcacgcagcccgaccactactggtgccgcgggccaagtgccgcggcgctggccgagcgctgcggctggagc

SEQ ID NO: 401165 - DNA, 120 bp, Artificial Sequence
  ENSG00000146477_2 (sequence is synthesized)
ccggaggaggagtggaaccgcacggcgcccgcctcccgcggcccagagccccccgagcgccgcggccgctgccagcgctacctcctggaggcggccaacgacagcgcctccgccactagc

SEQ ID NO: 401166 - DNA, 120 bp, Artificial Sequence
  ENSG00000146477_3 (sequence is synthesized)
gctctcagctgcgcggacccactcgccgccttccccaaccgctcggctccccttgtgccgtgccgcggcggctggcgctacgcccaggcccactccaccatcgtcagcgagtttgacctt

SEQ ID NO: 401167 - DNA, 120 bp, Artificial Sequence
  ENSG00000146477_4 (sequence is synthesized)
gtctgtgtcaatgcgtggatgctggacctcacccaagccatcctgaacctcggcttcctgactggagcattcaccttaggctatgcagcagacaggtatggcaggatcgtcatttacttg

SEQ ID NO: 401168 - DNA, 120 bp, Artificial Sequence
  ENSG00000146477_5 (sequence is synthesized)
ctatcctgccttggtgttggcgtcactggggttgtggtggcctttgcaccaaacttccctgtgtttgtgatcttccgcttcctgcaaggtgtatttggaaaggggacgtggatgacttgc

SEQ ID NO: 401169 - DNA, 120 bp, Artificial Sequence
  ENSG00000146477_6 (sequence is synthesized)
tacgtgattgtgacagaaatagtaggttcgaaacaaaggaggattgtgggaatcgtgattcaaatgttctttacccttggaatcataattctccctggaattgcctacttcatccccaac

SEQ ID NO: 401170 - DNA, 120 bp, Artificial Sequence
  ENSG00000146477_7 (sequence is synthesized)
tggcaaggaatccagttagccatcacgctgcccagctttctcttcctcctttattactgggtggtccctgagtctccccgttggctgattactcggaagaaaggagataaagcattacag

SEQ ID NO: 401171 - DNA, 120 bp, Artificial Sequence
  ENSG00000146477_8 (sequence is synthesized)
atcctgagacgcattgctaagtgcaatgggaaatacctctcatcaaattactcagagatcactgttacagatgaggaagttagtaatccatcctttttagatctggtgagaactccccaa

SEQ ID NO: 401172 - DNA, 120 bp, Artificial Sequence
  ENSG00000146477_9 (sequence is synthesized)
atgaggaaatgcacacttattcttatgtttgcttggttcacaagcgcagtggtgtatcaaggacttgtcatgcgcctgggaattatagggggcaacctctatatagactttttcatctcg

SEQ ID NO: 401173 - DNA, 120 bp, Artificial Sequence
  ENSG00000146477_10 (sequence is synthesized)
ggcgtggtggaactgccaggagctctcttgatcttactaaccattgagcgccttggacgacgcctcccctttgcggcaagcaatatagtggcaggggtggcatgccttgtcactgcgttc

SEQ ID NO: 401174 - DNA, 120 bp, Artificial Sequence
  ENSG00000146477_11 (sequence is synthesized)
ttaccagaaggaatagcatggttgaggaccacagtggctacattgggaagactagggataaccatggcctttgaaattgtttatttggtaaattcagaattgtacccaacaacattacga

SEQ ID NO: 401175 - DNA, 120 bp, Artificial Sequence
  ENSG00000146477_12 (sequence is synthesized)
aatttcggagtttcgctctgttcaggtctgtgtgattttgggggaatcatagccccatttctgctctttcggctagcagccgtgtggctagaactacctctgatcatctttggtatcctg

SEQ ID NO: 401176 - DNA, 120 bp, Artificial Sequence
  ENSG00000146477_13 (sequence is synthesized)
aggaataagaaaaccccagtttcccgctctcacctttgaggcccccgacaaagacagaaagaaggagctatccaggagctgatcctccttgcaaagctgtgccttgcagagatgcacgtg

SEQ ID NO: 401177 - DNA, 120 bp, Artificial Sequence
  ENSG00000146477_14 (sequence is synthesized)
tgcatttcagctacatcatgccgcgctgttgtaatactgtataaagacctcaatctatccagagtatttttatataatgttggatgagttaggatttgtaatgctgttgaagtttctggg

SEQ ID NO: 401178 - DNA, 120 bp, Artificial Sequence
  ENSG00000146477_15 (sequence is synthesized)
aacacataatatgtagccagtttaacaaagaagctgtcaggtgcacagcccttcctgggtttttttcttgtgttccctgtggtctctgacccattaggctaaagagagacaagagaagcc

SEQ ID NO: 401179 - DNA, 120 bp, Artificial Sequence
  ENSG00000146477_16 (sequence is synthesized)
cccaacctgattctcatgacagctccatcaagaatgtgggatgtgccgaccaaggatttgagaaagttgtacagaaatgtgttcatcaaatctggtcaagggactaagctcctagctgac

SEQ ID NO: 401180 - DNA, 120 bp, Artificial Sequence
  ENSG00000146477_17 (sequence is synthesized)
cattcattctgaagattgcatggaggatgaacatctgggaatcctgttaatgagaaggctgaatcacaggcacctgggccaaagggtgtgagcattcatgttctctgctcaccttggttt

SEQ ID NO: 401181 - DNA, 120 bp, Artificial Sequence
  ENSG00000146477_18 (sequence is synthesized)
ccgcacaccttcgcaatgtgaacaggtcaggagtccctcccgtccacctcctctgtaacagctggggttccaggcatggtttaggccctgttccagcaataagaaccaatctgctgtaca

SEQ ID NO: 401182 - DNA, 120 bp, Artificial Sequence
  ENSG00000146477_19 (sequence is synthesized)
atctgaggacttggctctgttatttacaaaatgatgctgtggttctgagattatttgggacatttttggctctcctttagtggacacctagagccacagattcccttctttactaaacaa

SEQ ID NO: 401183 - DNA, 120 bp, Artificial Sequence
  ENSG00000146477_20 (sequence is synthesized)
atcccatggattctgatttctgggtcttaggattttaaaagtgaagggatatttttcttatatttgtgagttcagttccgatggtgcccgtggtcaaaagcgaaaaacatggacaattcc

SEQ ID NO: 401184 - DNA, 120 bp, Artificial Sequence
  ENSG00000146477_21 (sequence is synthesized)
tattcattcttagcactttgacatgtcttggggaaaagcttacattttaatttaaaagaaagatcaattatatccatgcttaacaggatcagcaggagctttataaatgactttacagag

SEQ ID NO: 401185 - DNA, 120 bp, Artificial Sequence
  ENSG00000146477_22 (sequence is synthesized)
actaataagggatttgatctttctttttttgttatcgaggcttttgaaatgtggaacttgtgtgttctgctttatatgttatattcaatatcttttcagatgcagtctatattttatgct

SEQ ID NO: 401186 - DNA, 120 bp, Artificial Sequence
  ENSG00000146477_23 (sequence is synthesized)
gagttttaaaaatgaaatactttatgcaaacaggcaaaattggtaccaaagggaaacattaaccatgaggaagagcatttttctaaggagaacaggtgacaatatacacatgtgcgctaa

SEQ ID NO: 401187 - DNA, 120 bp, Artificial Sequence
  ENSG00000146477_24 (sequence is synthesized)
tcgtaaaatgagcatcttagtctttaaaacacatcagaattgaatacgaataatctatttgtcgatgaaataaacacaactctttgaggatttgagactacattcaccctttattcacag

SEQ ID NO: 401188 - DNA, 120 bp, Artificial Sequence
  ENSG00000146477_25 (sequence is synthesized)
tcacttgcagttttgcttttctctgcatttctctgctgtaagatgactgttgcattgttgaattgtattttgagtggatatttttgtttggtaacaattaaaattttaaatcgtaaaaaa

SEQ ID NO: 401189 - DNA, 120 bp, Artificial Sequence
  ENSG00000146530_0 (sequence is synthesized)
agaacgaggacgcggagcttccctgttccaagcagcaacagactgagaaaatccaagaaaggaggcccgaggggctgctgtggccccatcctcctggcacccgcggcccgggctctgcga

SEQ ID NO: 401190 - DNA, 120 bp, Artificial Sequence
  ENSG00000146530_1 (sequence is synthesized)
cgcctttcgccccacctgcggaagcagcgatgcctggcggagcctgcgtgctggtgatcgcgctgatgttcctggcctggggggaagctcaggagtgctctcctgggggacaccagtttc

SEQ ID NO: 401191 - DNA, 120 bp, Artificial Sequence
  ENSG00000146530_2 (sequence is synthesized)
ttcggagtccttatagaagtgtccgttttgactcatggcacctccagcagtcagctgttcaagacctaatatgtgaccattccctctcccctggatggtatagatttctcatccttgaca

SEQ ID NO: 401192 - DNA, 120 bp, Artificial Sequence
  ENSG00000146530_3 (sequence is synthesized)
gacctgccgagatgccaaccaaatgtgttgagatgaaccattgtggaactcaggcccccatctggctgtctctgagagattcagaaacactgccatctcctggggagatcaagcaattga

SEQ ID NO: 401193 - DNA, 120 bp, Artificial Sequence
  ENSG00000146530_4 (sequence is synthesized)
cagcttgtgcaacatggcagtttttgttcagcactacaaaagactgctgtctctttcaaatcccagtgtctgtaagaaactgtgggaacttttctgtatacttactacaaccaactcagg

SEQ ID NO: 401194 - DNA, 120 bp, Artificial Sequence
  ENSG00000146530_5 (sequence is synthesized)
gatgtatgggctactgtgcggaagctatttctgatgcacgattacacccatgtggttctgatgaaactgaaacaggaggtgattgtgttcgtcagctggctgcctcattgccacctccac

SEQ ID NO: 401195 - DNA, 120 bp, Artificial Sequence
  ENSG00000146530_6 (sequence is synthesized)
ctgcaggaaggccagaggttctggtggagttgattgagtccaggcttttctgtaggtgttcttttgatgttcccgctacaaaaaactcagtgggatttcacatagcttggtctaggcttt

SEQ ID NO: 401196 - DNA, 120 bp, Artificial Sequence
  ENSG00000146530_7 (sequence is synthesized)
cttctcaagaagtcaaagaggagctgacacaagagaccacagttcaggcattctctcttttagaacttgatggcataaatctcagacttggagacaggatattctgcagcgcttctgtct

SEQ ID NO: 401197 - DNA, 120 bp, Artificial Sequence
  ENSG00000146530_8 (sequence is synthesized)
ttttcttggagaatcctcatgtacaaagtgtagccatcgaaagccaagaattttttgcaggctttaagctacagcctgaattgagcactatatcagaggatgggaaagaatactacctga

SEQ ID NO: 401198 - DNA, 120 bp, Artificial Sequence
  ENSG00000146530_9 (sequence is synthesized)
ggatagaaagcacagttcctattatttgttctgaatttagtgagcttgatcaagaatgcaaaatctcattaaaactgaaaactattggtcaaggtagagagcacctaggcttaaatttgg

SEQ ID NO: 401199 - DNA, 120 bp, Artificial Sequence
  ENSG00000146530_10 (sequence is synthesized)
cactgtcttcctgtcatgtggaccttctccagacatcttcctgtgctaatggaacctgtagccacacttttgtgtactacactgctgtcacagatttttctcgagatggagatagagtct

SEQ ID NO: 401200 - DNA, 120 bp, Artificial Sequence
  ENSG00000146530_11 (sequence is synthesized)
caaacattgtagtgcaaccaatagttaatgaggatttcctgtggaacaactacattccagacagcatccagatcaaagtaaaggatgtcccaactgcttactgctatacatttactgacc

SEQ ID NO: 401201 - DNA, 120 bp, Artificial Sequence
  ENSG00000146530_12 (sequence is synthesized)
cacatataattacatttgatggcagggtatatgataatttcaagactggaacatttgtgctttataagagtatgtcacgtgattttgaagtccatgtacgtcagtgggactgcagaagcc

SEQ ID NO: 401202 - DNA, 120 bp, Artificial Sequence
  ENSG00000146530_13 (sequence is synthesized)
ttcactatccagtgtcatgtaattgtgggtttgttgcccaggaaggaggtgatatagttacttttgatatgtgcaatggtcagctacgtgaatcacaaccatatttgttcataaaaagcc

SEQ ID NO: 401203 - DNA, 120 bp, Artificial Sequence
  ENSG00000146530_14 (sequence is synthesized)
aagatgtaaccaggaatatcaagataagtgaatcttacttaggaagaaaagtcacaatctggttttcttctggggcatttatccgtgctgatcttggtgaatggggcatgagtctaacga

SEQ ID NO: 401204 - DNA, 120 bp, Artificial Sequence
  ENSG00000146530_15 (sequence is synthesized)
tcagagcccctagtgtagattacagaaacactctgggactttgtggaacctttgatgaaaatccggaaaatgatttccatgacaaaaatgggatgcaaattgatcaaaattttaacaatt

SEQ ID NO: 401205 - DNA, 120 bp, Artificial Sequence
  ENSG00000146530_16 (sequence is synthesized)
atgttgcttttattaatgaatggaggattttaccaggaaaaagcatgtctgacacactgccagtttctatgacatcacctggaaagccatcctattgtagctgttcattggacactgcag

SEQ ID NO: 401206 - DNA, 120 bp, Artificial Sequence
  ENSG00000146530_17 (sequence is synthesized)
cgtatccgtcttccgaagatctggacagtgtttctcgatcagaaattgccttgggttgcaaagacctcaatcatgtcagcttatcttctttgataccagaactagatgtcacctccgaat

SEQ ID NO: 401207 - DNA, 120 bp, Artificial Sequence
  ENSG00000146530_18 (sequence is synthesized)
atattaattcagacactcttgtcagagagataaacaagcatacatctccagaagaatataatctaaatttatttctgcaagaaaaaaaacacataaacctgactaaactcggcttaaatg

SEQ ID NO: 401208 - DNA, 120 bp, Artificial Sequence
  ENSG00000146530_19 (sequence is synthesized)
tacaaaaacatcctggaaatgagaaagaagattcactacaatatttggccaataagaaatatacacaaggccggggaagccacagccaagaaatgaggtacaatcgacaaaacagatgga

SEQ ID NO: 401209 - DNA, 120 bp, Artificial Sequence
  ENSG00000146530_20 (sequence is synthesized)
aacggcagaactttcatgagtttcctcctttgtttgctttcccgagtctcagccaaacggatctggaagaacttacttattttttcccagaggaccatgctgaggatgtacagcaagagt

SEQ ID NO: 401210 - DNA, 120 bp, Artificial Sequence
  ENSG00000146530_21 (sequence is synthesized)
aggagactctagccaactccagcataggaaggctgtgtcttgcttttcttggcaagagattagacagtgttatagagatgtgtgtgaaggatgttctgttaaaagatgatcttagttggg

SEQ ID NO: 401211 - DNA, 120 bp, Artificial Sequence
  ENSG00000146530_22 (sequence is synthesized)
cagaagcaggtgtggcccttttagaaaatgaatgtgaaaagaggattgtggaggaggggaaatataacacagaagagtatggcacatcaattgaagacattctctcagtattaaaatgcc

SEQ ID NO: 401212 - DNA, 120 bp, Artificial Sequence
  ENSG00000146530_23 (sequence is synthesized)
ccaatttatgcagcggcaatgggcagtgcatggaatgggggtgtgcgtgttccccaagctttagttcctatgactgcagtgattcctatgacaaagctcctgaaattacagagcttggga

SEQ ID NO: 401213 - DNA, 120 bp, Artificial Sequence
  ENSG00000146530_24 (sequence is synthesized)
atgctggattctgtgatgttcaaaaatataattgtatgatggtgagagtttttggcaaaggcttcaaagaattaccttcaattaaatgtgaagttactaagctacagtataatagcagtg

SEQ ID NO: 401214 - DNA, 120 bp, Artificial Sequence
  ENSG00000146530_25 (sequence is synthesized)
aatggatgcctggagaacccatctatacacagactgttttccacaatagcagagctgttgattgtcagctgcccactgatgttcagcagtttgataccatggatctggtgggtgggaaac

SEQ ID NO: 401215 - DNA, 120 bp, Artificial Sequence
  ENSG00000146530_26 (sequence is synthesized)
caactgggaagtggcagttgaaggtatctaatgatggttataaattcagtaatcccaaaataacggtcatatatgatggtgcttgccaagtttgtggtctctataaaaatgactcatgta

SEQ ID NO: 401216 - DNA, 120 bp, Artificial Sequence
  ENSG00000146530_27 (sequence is synthesized)
ctataaaggaaaatgtttgcattattgatggactctgctatgttgaaggagacaaaaatccaaccagcccttgtttgatttgtagacccaaaatttcaagatttacttggtcatttttag

SEQ ID NO: 401217 - DNA, 120 bp, Artificial Sequence
  ENSG00000146530_28 (sequence is synthesized)
aaaacaaccagcccccagtgattcaagcattgcaagacaaattacagacattttatggtgaaaactttgagtatcagttcgtggccttcgatccagaaggttctgacatccattttacgt

SEQ ID NO: 401218 - DNA, 120 bp, Artificial Sequence
  ENSG00000146530_29 (sequence is synthesized)
tggactctggtcctgaaggggcaagtgtttcctctgcagggctttttatgtggaaaacagatttactaactacccaacaaattactgtacgccttaatgatgactgcgatgctgaaacta

SEQ ID NO: 401219 - DNA, 120 bp, Artificial Sequence
  ENSG00000146530_30 (sequence is synthesized)
gagtcacgattgaggtgactgtgaagtcttgtgattgcttgaatggtggatcatgtgtatctgataggaacttttctccagggagtggagtgtacctgtgtgtctgcttgcctggcttcc

SEQ ID NO: 401220 - DNA, 120 bp, Artificial Sequence
  ENSG00000146530_31 (sequence is synthesized)
atggcagcctttgtgaagtggacattagtgggtgccaatccaacccttgtggtcttggcagctatattagtggttttcacagttattcctgtgattgtccacctgagctcaaagttgaaa

SEQ ID NO: 401221 - DNA, 120 bp, Artificial Sequence
  ENSG00000146530_32 (sequence is synthesized)
cacagtttgtaaatcaatttactacacaaactgtggttctcacaagatctgataaaagtgtaaataaagaagaggatgataaaaatgcccaagggagaaagaggcatgttaagccaacaa

SEQ ID NO: 401222 - DNA, 120 bp, Artificial Sequence
  ENSG00000146530_33 (sequence is synthesized)
gtggaaatgccttcaccatttgtaaatatccatgtggaaaaagtagggagtgtgttgccccaaacatctgcaaatgtaaacctggttacattggttctaactgccaaactgctctttgtg

SEQ ID NO: 401223 - DNA, 120 bp, Artificial Sequence
  ENSG00000146530_34 (sequence is synthesized)
accctgattgcaaaaaccatggaaaatgtattaagcctaacatttgtcagtgtcttccaggacatggtggagcaacctgtgatgaagaacattgtaacccaccttgtcaacatggtggca

SEQ ID NO: 401224 - DNA, 120 bp, Artificial Sequence
  ENSG00000146530_35 (sequence is synthesized)
catgcttggctgggaatctctgcacttgtccttatggttttgtaggaccaaggtgtgaaacaatggtttgtaacaggcactgtgaaaatggaggccagtgtcttacaccagatatttgcc

SEQ ID NO: 401225 - DNA, 120 bp, Artificial Sequence
  ENSG00000146530_36 (sequence is synthesized)
agtgcaaacctggctggtatggacccacctgtagtacagctttgtgcgaccctgtctgcctcaatggtggttcgtgtaataagccaaatacttgcctctgtccaaatggattctttgggg

SEQ ID NO: 401226 - DNA, 120 bp, Artificial Sequence
  ENSG00000146530_37 (sequence is synthesized)
aacactgtcagaatgctttctgtcaccctccctgtaagaatggtggccactgcatgagaaataatgtgtgcgtctgtcgtgaaggatacactggtaggagattccaaaaaagcatctgtg

SEQ ID NO: 401227 - DNA, 120 bp, Artificial Sequence
  ENSG00000146530_38 (sequence is synthesized)
atcctacgtgcatgaatggaggaaaatgtgtgggaccaagcacttgctcttgtccttctggttggagtgggaaacgatgcaacacacctatctgcttgcagaaatgtaaaaacggtggtg

SEQ ID NO: 401228 - DNA, 120 bp, Artificial Sequence
  ENSG00000146530_39 (sequence is synthesized)
aatgcattgcgcccagcatatgccattgtccttcctcctgggaaggagtgcggtgtcaaataccaatttgcaacccaaaatgtctttatggaggcagatgcatatttcccaatgtgtgtt

SEQ ID NO: 401229 - DNA, 120 bp, Artificial Sequence
  ENSG00000146530_40 (sequence is synthesized)
cctgccgcactgaatactctggagtcaaatgtgagaagaaaatacagataagacgccattgagtagcatcaagtatatgaattacaagcctgtatcttaagaatggaaatattttgttca

SEQ ID NO: 401230 - DNA, 120 bp, Artificial Sequence
  ENSG00000146530_41 (sequence is synthesized)
gaaaaagttggagataacttggagtttatttgaacatcattcaaaaaatatcttaaagactgaagaaactaataaaatacataatgatctctgttgtaatcatagagaaaagcaaagaag

SEQ ID NO: 401231 - DNA, 120 bp, Artificial Sequence
  ENSG00000146530_42 (sequence is synthesized)
aaatccaggtaatctaaatttgatgttgagatgggataggatatttacatattgagatgatgtatctgatattccacccattcacaatatttaataaactgaatattttctcagccctaa

SEQ ID NO: 401232 - DNA, 120 bp, Artificial Sequence
  ENSG00000146530_43 (sequence is synthesized)
agagtacatagattagatccattcattgatggttcattaatagattcttatgactgcattggtgtccaatcaccagatagccccagaccactaggatagaatatgccacaagcatttcat

SEQ ID NO: 401233 - DNA, 120 bp, Artificial Sequence
  ENSG00000146530_44 (sequence is synthesized)
agttactgagcacaactaacaacatctcccgctcatcactgaaattaattacagcccaaatggataattcagtaaagcctatttcccatcagatatcagatattgaacatgtggatcgta

SEQ ID NO: 401234 - DNA, 120 bp, Artificial Sequence
  ENSG00000146530_45 (sequence is synthesized)
gtctcagtacaaatctcagtctggccatttgtaaatatccatgtggaaaaagtagggagtgtgttgccccaaacatctgcaaatgtaaacctggttacattggttctaactgccaaactg

SEQ ID NO: 401235 - DNA, 120 bp, Artificial Sequence
  ENSG00000146530_46 (sequence is synthesized)
ctttgagggagtagcatgcctgaatacctttggttcctatcattgtggttcatgtccagaaggattttatggggatggaaaaatatgccatggtaaaagtttctattttctgctatgaga

SEQ ID NO: 401236 - DNA, 120 bp, Artificial Sequence
  ENSG00000146530_47 (sequence is synthesized)
ttttttttgctgcagttaattattttttaatagcatagtttctgtttttgactcatgtatttatttagtgtaaatgcattaagtgtcatgcattgaactagatacaaaggatgcaaaaat

SEQ ID NO: 401237 - DNA, 120 bp, Artificial Sequence
  ENSG00000146530_48 (sequence is synthesized)
atataagacatgttttctgacttaataggtagagtgtaacagcagggaatatgactagtaattacagagtataataaagtgttctgtgtcttttgatagaaatcacaaaagggctagtag

SEQ ID NO: 401238 - DNA, 120 bp, Artificial Sequence
  ENSG00000146530_49 (sequence is synthesized)
gaatactacacagggaatcttatctacctggagaaataatgaaaaagttttaaaaaaggaagcgactagactatactagacacatgagaactgaatctgatagatcaagagagagaaagg

SEQ ID NO: 401239 - DNA, 120 bp, Artificial Sequence
  ENSG00000146530_50 (sequence is synthesized)
cattccaggcaaaaccaacagcaggagcaaagggacagaagcaggcaacatcacagcactccttgggcagccagccactgtgaatagttcagtgtgcctggaatataggaagaaagggga

SEQ ID NO: 401240 - DNA, 120 bp, Artificial Sequence
  ENSG00000146530_51 (sequence is synthesized)
aagggttctttgccaagattgtaaagtccccccacacgtgaaagcatcaaaacagacatctcacatttttccactggacataatgattgagtgtgttaaaaattctttggtttcctcaag

SEQ ID NO: 401241 - DNA, 120 bp, Artificial Sequence
  ENSG00000146530_52 (sequence is synthesized)
aataaatcatgttgcatgttgacatcaaattttagcccaatcatattactaatactcggccaaactgacgattgccaaagcaattcacatttcttcttcttggctgaaagcatacatttt

SEQ ID NO: 401242 - DNA, 80 bp, Artificial Sequence
  ENSG00000146535_0 (sequence is synthesized)
cctgaggggccatgtccggggtggtgcggaccctcagccgctgcctgctgccggccgaggccggcggggcccgcgagcgc

SEQ ID NO: 401243 - DNA, 120 bp, Artificial Sequence
  ENSG00000146535_1 (sequence is synthesized)
gcggagcgcgaggcccggaggcgtagccgcgacatcgacgcgctgctggcccgcgagcggcgcgcggtccggcgcctggtgaagatcctgctgctgggcgcgggcgagagcggcaagtcc

SEQ ID NO: 401244 - DNA, 120 bp, Artificial Sequence
  ENSG00000146535_2 (sequence is synthesized)
acgttcctcaagcagatgcgcatcatccacggccgcgagttcgaccagaaggcgctgctggagttccgcgacaccatcttcgacaacatcctcaagggctcaagggttcttgttgatgca

SEQ ID NO: 401245 - DNA, 120 bp, Artificial Sequence
  ENSG00000146535_3 (sequence is synthesized)
cgagataagcttggcattccttggcagtattctgaaaatgagaagcatgggatgttcctgatggccttcgagaacaaggcggggctgcctgtggagccggccaccttccagctgtacgtc

SEQ ID NO: 401246 - DNA, 120 bp, Artificial Sequence
  ENSG00000146535_4 (sequence is synthesized)
ccggccctgagcgcactctggagggattctggcatcagggaggctttcagccggagaagcgagtttcagctgggggagtcggtgaagtacttcctggacaacttggaccggatcggccag

SEQ ID NO: 401247 - DNA, 120 bp, Artificial Sequence
  ENSG00000146535_5 (sequence is synthesized)
ctgaattactttcctagtaagcaagatatcctgctggctaggaaagccaccaagggaattgtggagcatgacttcgttattaagaagatcccctttaagatggtggatgtgggcggccag

SEQ ID NO: 401248 - DNA, 120 bp, Artificial Sequence
  ENSG00000146535_6 (sequence is synthesized)
cggtcccagcgccagaagtggttccagtgcttcgacgggatcacgtccatcctgttcatggtctcctccagcgagtacgaccaggtcctcatggaggacaggcgcaccaaccggctggtg

SEQ ID NO: 401249 - DNA, 120 bp, Artificial Sequence
  ENSG00000146535_7 (sequence is synthesized)
gagtccatgaacatcttcgagaccatcgtcaacaacaagctcttcttcaacgtctccatcattctcttcctcaacaagatggacctcctggtggagaaggtgaagaccgtgagcatcaag

SEQ ID NO: 401250 - DNA, 120 bp, Artificial Sequence
  ENSG00000146535_8 (sequence is synthesized)
aagcacttcccggacttcaggggcgacccgcacaggctggaggacgtccagcgctacctggtccagtgcttcgacaggaagagacggaaccgcagcaagccactcttccaccacttcacc

SEQ ID NO: 401251 - DNA, 120 bp, Artificial Sequence
  ENSG00000146535_9 (sequence is synthesized)
accgccatcgacaccgagaacgtccgcttcgtgttccatgctgtgaaagacaccatcctgcaggagaacctgaaggacatcatgctgcagtgagcgaggaagccccggggtttgtcgtcg

SEQ ID NO: 401252 - DNA, 120 bp, Artificial Sequence
  ENSG00000146535_10 (sequence is synthesized)
ttgagcagcccccacggctgtcggtcagactcttgggtgtgtgttgtctgtgtggtccttgagtgggtttctcggatccgtgccctggaatacctggctcaggaatgctgtcagaccagc

SEQ ID NO: 401253 - DNA, 120 bp, Artificial Sequence
  ENSG00000146535_11 (sequence is synthesized)
cagccagcgagctctaggcaaaaggacatggaaactgtcacgttagctactgaatcctgggggcgagtgaaactactgaaaatccgagtgatgatgttgtgaatacggaacacctaatca

SEQ ID NO: 401254 - DNA, 120 bp, Artificial Sequence
  ENSG00000146535_12 (sequence is synthesized)
cacagcttgctttgcttttacagaaacgttcctctttttctgacgcagtttaattgaggaccgtgttgtgtgtgtatgtgtgtacacacgctctgtctttaatgacagaaacacaaaaac

SEQ ID NO: 401255 - DNA, 120 bp, Artificial Sequence
  ENSG00000146535_13 (sequence is synthesized)
cagctggccttgcagacggcttttctaactcacaagtcttccctgagacagactaacctgaaagctttgcctaacagtagcttgtagagatccagtgcacgccgatgctgctaaactcag

SEQ ID NO: 401256 - DNA, 120 bp, Artificial Sequence
  ENSG00000146535_14 (sequence is synthesized)
tgcctgagcccggccctgcagccccagccgcagtgtctgaaggccacctcccaaagggagcacgttgccttttcaaactcccgtgccgatttcctaagagcccctagtccaagcctctca

SEQ ID NO: 401257 - DNA, 120 bp, Artificial Sequence
  ENSG00000146535_15 (sequence is synthesized)
gatgaagctgaggagccgtgcctaggatcccttcccagctctgaggacgggctgcagagctctgcaggtgtggattcaccttacgcccctacagcaggctcagcccttcccaccctgccc

SEQ ID NO: 401258 - DNA, 120 bp, Artificial Sequence
  ENSG00000146535_16 (sequence is synthesized)
catgcccagcagcacaacacggagtgagacaggatgcccacggtgactgccgctccgtccgtgcacacacagcggtgctcttctccccttagccacccactgcccaacccaacggcaaag

SEQ ID NO: 401259 - DNA, 120 bp, Artificial Sequence
  ENSG00000146535_17 (sequence is synthesized)
tcatctgctcacacacagttggcagcacatagcgtttccttctttcagaaacattcctcttctggggcttcagaaagctggcaaggccactagcagagcttttgttaatgccccagctgc

SEQ ID NO: 401260 - DNA, 120 bp, Artificial Sequence
  ENSG00000146535_18 (sequence is synthesized)
ttggcgagctaacagctgacctttcgggaagcccacagacgctggaggaatcttgagtttctccaaactgccgctccaccagtgcctttggacagccgtgcctgttcgccgctctcccta

SEQ ID NO: 401261 - DNA, 120 bp, Artificial Sequence
  ENSG00000146535_19 (sequence is synthesized)
agtctgattctcatcgaggcccctcgcttctatgactgtgcttgcagaagagtaaacactctcggatgccgctgtcctgggggagcccgcgggagcctgtgaatgttgatacgagctggc

SEQ ID NO: 401262 - DNA, 120 bp, Artificial Sequence
  ENSG00000146535_20 (sequence is synthesized)
cagtcctgggcccagctcacttgtccagctacctgccaggtggctttcactgtgtttaaaatacattgcattccaagctggtcccctctgtgtatcactctactgagaaatcctgcctag

SEQ ID NO: 401263 - DNA, 120 bp, Artificial Sequence
  ENSG00000146535_21 (sequence is synthesized)
tgtgttttgggatgtgtcctagcatttacaagaaaatgaaaagcgtcctcttaattggcacccgaatgttgctgtggctcagtcacatatcccagggccctcgtcccgaggccgtgctgc

SEQ ID NO: 401264 - DNA, 120 bp, Artificial Sequence
  ENSG00000146535_22 (sequence is synthesized)
cccgagccccgagcccctctgcagctcacccttggcttgttttccgcaaacccggtaaacgcaagcccttggggcagatgcagaagcagaagagggaggggaaacctgcctctgggtcac

SEQ ID NO: 401265 - DNA, 120 bp, Artificial Sequence
  ENSG00000146535_23 (sequence is synthesized)
cctgttagcacagcgttctcatcgggagacagcatggaactctctctcgcagtgctcgaggctgtgtgtcagtgtttgctgggcttgtggctccttttttggctggataaagaagtcgct

SEQ ID NO: 401266 - DNA, 120 bp, Artificial Sequence
  ENSG00000146535_24 (sequence is synthesized)
gtttttgtactgcttctgtggctcttcacagacctcacggatgtgaccggagatgagtgccgatgaccacgttttaaaggagaaagagagctcctggtggggccctcggggtggtctcag

SEQ ID NO: 401267 - DNA, 120 bp, Artificial Sequence
  ENSG00000146535_25 (sequence is synthesized)
gtcccatttgcagtctgcaacagtgacgcgcagcccggtccggagcgtggtgagctttgtttgccttctgggtcagctttcgctgtgtctcctgtgtgtgttagaatccagagcccagag

SEQ ID NO: 401268 - DNA, 120 bp, Artificial Sequence
  ENSG00000146535_26 (sequence is synthesized)
gaagtgcaagcgggtcctccgccaacggggagagcctcttcgcggcgctgttggcgacagcagcgctgtgattcgcgtagcaggggagttgtttgaaacaccttcctgagtagtccggcc

SEQ ID NO: 401269 - DNA, 120 bp, Artificial Sequence
  ENSG00000146535_27 (sequence is synthesized)
ttgtcaatgagtgcttgttttcctttaaacagtctgacatatttactcgtcactttcaaaccagaagcatgagaggaaggagatattgtggggtccgtttaactcgatagaaagcgcagg

SEQ ID NO: 401270 - DNA, 120 bp, Artificial Sequence
  ENSG00000146535_28 (sequence is synthesized)
gggatggcccccggcgcgggctcttgacccgctcagcgctgaccccaccgccctggccgaggcacttggccttgctgagctggacttcctcctcctcctcctcatgaccggggtgaatta

SEQ ID NO: 401271 - DNA, 120 bp, Artificial Sequence
  ENSG00000146535_29 (sequence is synthesized)
gaacgtttttaaagacacccccttccaaattctgtaacacattgtaattggagaagaaggaaactctgcaaggctaaactgtcattcacaacttggctacacatagactctagtcagttt

SEQ ID NO: 401272 - DNA, 120 bp, Artificial Sequence
  ENSG00000146535_30 (sequence is synthesized)
tgtctccagaaccttaggcttttgtattttttaattttaatttcactgttaatccttattgtcttttttattaagatgttggaaaagcaggaggtagttgtgcctcaattattgcaaaaa

SEQ ID NO: 401273 - DNA, 120 bp, Artificial Sequence
  ENSG00000146535_31 (sequence is synthesized)
tgtaacaataaagttcctcaaaataagatctgttcctcatagctatactgtgtacacataagacgcatatagggttttactgaaatctatttttaactcttatgttcgtagagaaattgt

SEQ ID NO: 401274 - DNA, 120 bp, Artificial Sequence
  ENSG00000146535_32 (sequence is synthesized)
ttcaaggattttgagtcataggtctgtaatttatagagatctctagaattcttattgtaattttcctacttctttgataaaagaaaaataagtcagattgttaactccaagattgaaaaa

SEQ ID NO: 401275 - DNA, 120 bp, Artificial Sequence
  ENSG00000146535_33 (sequence is synthesized)
aaaaactcttgaaagaagattattagttgtaactaatttaggggttctgggcacagacatctaacctggtattgtaaggcagaggctcccattggaatggtagtggtccgggtcagttgt

SEQ ID NO: 401276 - DNA, 120 bp, Artificial Sequence
  ENSG00000146535_34 (sequence is synthesized)
tcatggtgtaagctttgcacagtgtattaacattgggagggtctggcttgaaaatttggccaccctcagcctctgaatgtttattaaaataaatttagtctttctttgcttaatataaaa

SEQ ID NO: 401277 - DNA, 90 bp, Artificial Sequence
  ENSG00000146535_35 (sequence is synthesized)
tttgtgccgtcagcaagccgggctgtgtctcagcctcacagcactcctcccacgggcctgggaaggcaaatgtgttttctgaactgtgtt

SEQ ID NO: 401278 - DNA, 120 bp, Artificial Sequence
  ENSG00000146535_36 (sequence is synthesized)
gtgtgtgtgtgtgtgttggggtgtcttgtgaagtcctgctaacctcttgtcagcagaatattcgagaaatgcttctgagaagagagaggaagatgacttcagaggctgcttgtggtctct

SEQ ID NO: 401279 - DNA, 120 bp, Artificial Sequence
  ENSG00000146535_37 (sequence is synthesized)
cactcaagtgaggaaagtgggaaccgccataccgtgtctggattcggtgggatcgtgtgtgtccagcagcagtcgcgcagcgcctggcgtgagtggtgggtgcacgccggccccgccatg

SEQ ID NO: 401280 - DNA, 120 bp, Artificial Sequence
  ENSG00000146535_38 (sequence is synthesized)
tgcaccttctgtgacgaccctaagtcagggtggtgtttcctagcagtgcagaacacgaagcccttacaacttctcctagaaacgaagcctgggttgacccctccacctcaggggggagtc

SEQ ID NO: 401281 - DNA, 120 bp, Artificial Sequence
  ENSG00000146535_39 (sequence is synthesized)
atttaagcagcctccttgactgtaggtccgctgactggcttcctccttgagagcacactcacagtgccggaccgcaggcacctcgccgatgttcctgtccacttgctttttgtattgctc

SEQ ID NO: 401282 - DNA, 120 bp, Artificial Sequence
  ENSG00000146535_40 (sequence is synthesized)
cttctccagtgagcttggaagcctcatgcgggcaaggccttgtctgtctggttctctgttgtgtcctcggagcctgccacagtggcggcgcttggtggctttgacaggggactggattgg

SEQ ID NO: 401283 - DNA, 120 bp, Artificial Sequence
  ENSG00000146535_41 (sequence is synthesized)
gtggaaggggcgagattagacctggatacagtgacgtccttgtcagccatgccgagtgcagagcgcctactgtattgtaggcatttgaaatgaaacggagaatgtttcccaggccgtgcc

SEQ ID NO: 401284 - DNA, 120 bp, Artificial Sequence
  ENSG00000146535_42 (sequence is synthesized)
tagcaaggatgcctggcagtcgtggttcgggaagcacaccagatggaaaccgaaagtgctgccgttttgagcacctactcattgcacaccctgggtccaggggctcaagggttcttgttg

SEQ ID NO: 401285 - DNA, 120 bp, Artificial Sequence
  ENSG00000146535_43 (sequence is synthesized)
aatgcttctgagaagagagaggaagatgacttcagaggctgcttgtggtctctcactcaaggctggtagggagccccggtctgcgtcctggaggaacggcacgctgagtcctgggccagt

SEQ ID NO: 401286 - DNA, 120 bp, Artificial Sequence
  ENSG00000146535_44 (sequence is synthesized)
ggccggcggggctgttggcgaccacagtagcacacaagggctctttctgaggagcaggagaccctggcacgggccccacgggagtgtctggggcgtccccgcctgtggcctcttctcccc

SEQ ID NO: 401287 - DNA, 120 bp, Artificial Sequence
  ENSG00000146535_45 (sequence is synthesized)
gccgcagcaccaatggctccacgagcagggctcggagctggccctctcctgcttcggagccgcgctgactgggtgtgtggcggatgggaggccgccctgagtgctcctcctcccttttgt

SEQ ID NO: 401288 - DNA, 120 bp, Artificial Sequence
  ENSG00000146535_46 (sequence is synthesized)
acagcctgggtggaaaggacgggcctggtgcacttcctgcgggagggaggacatggggcctgcttccctctggcgctcctccacccgggcagcgtggtttctttccaaatgatttatcct

SEQ ID NO: 401289 - DNA, 120 bp, Artificial Sequence
  ENSG00000146535_47 (sequence is synthesized)
tgcttaccacagcgtccgggaaagaccactgacattgattgctttgatctcctgggtgattggcagtgagccagttcagatcctctgacttggtgtccccctggtgtactgggggagtcg

SEQ ID NO: 401290 - DNA, 120 bp, Artificial Sequence
  ENSG00000146535_48 (sequence is synthesized)
tgggcacctgatagtgtgttttttacatgactattttggaccgttagttgaatttccttaaaaactgtgtaacagtccaagcaagctctaaatcaccgtaagttgtaatgatcaacaacc

SEQ ID NO: 401291 - DNA, 120 bp, Artificial Sequence
  ENSG00000146540_0 (sequence is synthesized)
gccggaaggcggcgtccgcgacgcagctgttcacgcttaggtgggcgacgtgggcgcaggtgggcgcaggatggcaaaacagaagagaaaagttcctgaagtgacagagaaaaagaacaa

SEQ ID NO: 401292 - DNA, 120 bp, Artificial Sequence
  ENSG00000146540_1 (sequence is synthesized)
aaagctgaagaaggcgtcagcagaggggccactgctgggccctgaggctgcaccaagtggcgaaggagccggctccaagggcgaagctgtgctcaggcccgggctggacgcagagccaga

SEQ ID NO: 401293 - DNA, 120 bp, Artificial Sequence
  ENSG00000146540_2 (sequence is synthesized)
gctgtccccagaggagcagagggtcctggaaaggaagctgaaaaaggaacggaagaaagaggagaggcagcgtctgcgggaggcaggccttgtggcccagcacccgcctgccaggcgctc

SEQ ID NO: 401294 - DNA, 120 bp, Artificial Sequence
  ENSG00000146540_3 (sequence is synthesized)
gggggccgaactggccctggactacctctgcagatgggcccaaaagcacaagaactggaggtttcagaagacgaggcagacgtggctcctgctgcacatgtatgacagtgacaaggttcc

SEQ ID NO: 401295 - DNA, 120 bp, Artificial Sequence
  ENSG00000146540_4 (sequence is synthesized)
cgatgagcacttctccaccctgctggcctacctggaggggctgcagggccgggcccgagagctgacggtgcagaaggcggaagccctgatgcgggagctggatgaggagggctctgatcc

SEQ ID NO: 401296 - DNA, 120 bp, Artificial Sequence
  ENSG00000146540_5 (sequence is synthesized)
ctgcctcagaccacacagggtgcagctcctccggcggtgggggccgggttcaccagcagggcagcggctgagcaagggctttcagctcctccggtggtgggggccgggatcaccagcacc

SEQ ID NO: 401297 - DNA, 120 bp, Artificial Sequence
  ENSG00000146540_6 (sequence is synthesized)
agagcctcgcaagggccccttccctcctccagaccctccttggccggtgacggctgtgacagtgatggcaggttcagtgccttcagcgcagagcgtggatgctctggaatcacccggacc

SEQ ID NO: 401298 - DNA, 120 bp, Artificial Sequence
  ENSG00000146540_7 (sequence is synthesized)
cctggccttggagggaccctccagccccaggaatctgctttggagggaaatgtctatttttctaccgggaatattttagagattggggcatgctggctcctcccgccagctgcaaacctg

SEQ ID NO: 401299 - DNA, 120 bp, Artificial Sequence
  ENSG00000146540_8 (sequence is synthesized)
caccttccgcctgattcccgatccccctgcgtgggccgcattcctggtcccctgcctgcgtccatcgaggggcctggctgtggcctgttttcctttgaccccacacagcgtcattgcggg

SEQ ID NO: 401300 - DNA, 120 bp, Artificial Sequence
  ENSG00000146540_9 (sequence is synthesized)
tcatggggagcccctggtgggagcttgtggagtcggatcacgtacctgtgcagaaaccgcctctgtggctgcatttgaaataaaacccgacccagcagcagccgtgggtcctgctctgtg

SEQ ID NO: 401301 - DNA, 120 bp, Artificial Sequence
  ENSG00000146540_10 (sequence is synthesized)
ggcgtccgcgacgcagctgttcacgcttaggtgggcgacgtgggcgcaggtgggcgcaggtaggcgcgtggggcggcggcggggtggccggcgggtcagggcgccaggagacccagagcc

SEQ ID NO: 401302 - DNA, 120 bp, Artificial Sequence
  ENSG00000146540_11 (sequence is synthesized)
gccggtgcgtcccggcgcgggctccgacacccgcacccgcctctgggttaactcagcgcgggcgagtggaagggactcagctggctcctaggtttcaggccgtcagggcttgcagtggct

SEQ ID NO: 401303 - DNA, 120 bp, Artificial Sequence
  ENSG00000146540_12 (sequence is synthesized)
ctggtttcattgtctttctctgaagacgccctgattgccctccgaggctttcagctcccactttctctttttcaatttttgaggcagtgtctcgctgtgccacccaggctggagtgcaat

SEQ ID NO: 401304 - DNA, 120 bp, Artificial Sequence
  ENSG00000146540_13 (sequence is synthesized)
cagcctccacctcctgggctcaagccgtcctcccgcctcatcctcccaagtagctgggaccacatgcgcgcgccaccacacccggataatttttaaaaatgttttttgtagaaatggggt

SEQ ID NO: 401305 - DNA, 120 bp, Artificial Sequence
  ENSG00000146540_14 (sequence is synthesized)
cacacccggataatttttaaaaatgttttttgtagaaatggggtctcaccatgttacccaggctggtctcgaattcttgggctcaagcgatggatcctcctgcctcggcctcccaaagtg

SEQ ID NO: 401306 - DNA, 120 bp, Artificial Sequence
  ENSG00000146540_15 (sequence is synthesized)
gcgcttggcctcactttccatcataagcatgctttccgtttccttccttccgtcattcattcattcatttttaaaaaacgttcattgggttcctcctgcactgttcggggcattgggcta

SEQ ID NO: 401307 - DNA, 120 bp, Artificial Sequence
  ENSG00000146540_16 (sequence is synthesized)
cagctgtcaacaagtggagacaagtctgtgatctagtgaacttccattctggaggggagagacagatgaacaaggtgcacagagcaggtgatggatggcaaaacagaagagaaaagttcc

SEQ ID NO: 401308 - DNA, 120 bp, Artificial Sequence
  ENSG00000146540_17 (sequence is synthesized)
cgggcggtgcgcactgcgggcgcatccctgccccggcgccgtccgtgcccgcgggacctgacagccgggtcagaggctcctgcacggcgggtgctgtgtctccgggcccaggtgacctcg

SEQ ID NO: 401309 - DNA, 120 bp, Artificial Sequence
  ENSG00000146540_18 (sequence is synthesized)
tccgggcccaggtgacctcggggtgagaaggaaggggcctctgagatgagaacatagttttgctgttttcagtttatactcaaagccctgcagtttcctgacagcacagagcacacctgt

SEQ ID NO: 401310 - DNA, 120 bp, Artificial Sequence
  ENSG00000146540_19 (sequence is synthesized)
cacgcgagcaggatgaagcccagaggctgcctggtgaagtgggcggcgcgctggaaaatccacgtagctttgttccctccacggggagcgtgcaaggccctctcgagcactacgggagcc

SEQ ID NO: 401311 - DNA, 120 bp, Artificial Sequence
  ENSG00000146540_20 (sequence is synthesized)
tcgccttctgcacagacttcggagccaggtgctggagcggcagcaactgaggggcgtggatgtctttgcatggttcccatacgttttttaaacgttaataatgtgattttcagtaaagtg

SEQ ID NO: 401312 - DNA, 120 bp, Artificial Sequence
  ENSG00000146540_21 (sequence is synthesized)
gcaggatcagcattgaagaatggggagcaactgtgagccgatttcctgcgagtggttgagaagcaggctttgtgtggttggccgtccttgtgcttagcggctgctcctgccggagctgcc

SEQ ID NO: 401313 - DNA, 120 bp, Artificial Sequence
  ENSG00000146540_22 (sequence is synthesized)
tgcctgtcttagaaacaacgccgcctccgactgctagttagcggtggcttccacaggtgaagcccaggcaggttagtgttctcacagctaggaaggacacgggcctggcagggagctgca

SEQ ID NO: 401314 - DNA, 120 bp, Artificial Sequence
  ENSG00000146540_23 (sequence is synthesized)
gcacagcctctgtcgacacagaagcactgccgtgcgaacccttgcctcccgggacagctgttgcgcgcccagcagctggagcgctggctctgcgagggctcttcagcaatgccaggtgca

SEQ ID NO: 401315 - DNA, 120 bp, Artificial Sequence
  ENSG00000146540_24 (sequence is synthesized)
gctgggctccaccctcaactggtccaatagtagcgaaagaaacgaggagtgtcgtgaatcgttagacagcgtccatatgcctaagttcaaattggagccgcccagccctacctgtggata

SEQ ID NO: 401316 - DNA, 120 bp, Artificial Sequence
  ENSG00000146540_25 (sequence is synthesized)
caaagctgccgttcagtggggagctggagccgaggggcctatgtgacacccctgcatgtggatgaaaatcacccagaggccctgccaacattctgggaggtggcaagggggcagggcctc

SEQ ID NO: 401317 - DNA, 120 bp, Artificial Sequence
  ENSG00000146540_26 (sequence is synthesized)
tgggatctggggtcacgagttccaggaggcctgcttctgcttctgcccagcagttcactcttccctccactgcagctgaagcttgagctgctgcggggcccacctggccggaggcagaag

SEQ ID NO: 401318 - DNA, 120 bp, Artificial Sequence
  ENSG00000146540_27 (sequence is synthesized)
gcccaggggaggcagtgaagggcccaaggctggtgatgcaggagtttccagagcgcagggaaatacagagcaagaaacgccagccctcagctccactggggagccacgcaacctctaccg

SEQ ID NO: 401319 - DNA, 120 bp, Artificial Sequence
  ENSG00000146540_28 (sequence is synthesized)
gtgctgaggggttacaaagctctgttaccagccccattcctcctggatgggcgaggtcggtccgtatcacacccccaacctcttgtgctctgcgacctcagaatacacggagctgtgtcc

SEQ ID NO: 401320 - DNA, 120 bp, Artificial Sequence
  ENSG00000146540_29 (sequence is synthesized)
acaggcctcagcggctgtgagcccctcgcctacactggggggtcctcagctgacacctgagccagtgtcctgtgccccagtggtgccagggcagagtccccctccctgacctgacttgtg

SEQ ID NO: 401321 - DNA, 120 bp, Artificial Sequence
  ENSG00000146540_30 (sequence is synthesized)
cacctcgtcacccaccgccagcagtgtccccccacaacaggcttgctcagtacagcacccaacccaagtccccagcacccacaccccagtgagtttcctgtgccctataggctcagctgc

SEQ ID NO: 401322 - DNA, 120 bp, Artificial Sequence
  ENSG00000146540_31 (sequence is synthesized)
ttctcgtcctccccccacttgggatccttggaacagggagtggttcttatttaggtccctgaggtaccaagcacaggctttgctcttagcagccgccactccagtgatgaagccgttagc

SEQ ID NO: 401323 - DNA, 120 bp, Artificial Sequence
  ENSG00000146540_32 (sequence is synthesized)
agactggcctctgcagagctctgcggggaggtgcctggcttctccggcctccaccctggcccagagctgcctcctgagcagcggatcccaacctgcctgcccctggggctgggtctccag

SEQ ID NO: 401324 - DNA, 120 bp, Artificial Sequence
  ENSG00000146540_33 (sequence is synthesized)
cagtcaggactgagttgttgctagctgctgacaggtgtggggcgaagggggcgcatttgccgcatgtccccattggcagcatctccacgccttcccttgtgacacctccaaccagaatag

SEQ ID NO: 401325 - DNA, 120 bp, Artificial Sequence
  ENSG00000146540_34 (sequence is synthesized)
agcaggtatgtgggagcccgcacctgctcccccagcgccccggggtcgtcttctgcctgctccttctgtcctccacactgaagagtgtgctccagctggggatgggcatgtgtgacgctg

SEQ ID NO: 401326 - DNA, 120 bp, Artificial Sequence
  ENSG00000146540_35 (sequence is synthesized)
gggaatggatacctgtgaaatggtggagtgtgcatcaagtctaaatagccgctcgcaggatctgggggctttttgttttcagaaacctgatctgatctttataaaaagtgctcccccact

SEQ ID NO: 401327 - DNA, 120 bp, Artificial Sequence
  ENSG00000146540_36 (sequence is synthesized)
cagtcagcctgggtgtccctcccgtccaggccagcagcgctgtctggctcggcaaggaggggctgaaactggagagcccctgggaaggctcttgtgggccaggtggcagcggggagggtg

SEQ ID NO: 401328 - DNA, 120 bp, Artificial Sequence
  ENSG00000146540_37 (sequence is synthesized)
gctcttgttccccgccctcatcctagcgttcagcagactgccccacaccacaggtttccattttcacccttgggttaagagaaaagcagaaataaaaagtttctaatgttgcttgcgaaa

SEQ ID NO: 401329 - DNA, 120 bp, Artificial Sequence
  ENSG00000146540_38 (sequence is synthesized)
gccggctccaaggaaccacgcaggaatggggggcctcaggggccacgcgtgtcggctggattcccaaggtgatcttcaggccggtggttttcagcctgttgggattaggaccacttgaag

SEQ ID NO: 401330 - DNA, 120 bp, Artificial Sequence
  ENSG00000146540_39 (sequence is synthesized)
ggccgggcggtgcgcactgcgggcgcatccctgccccggcgccgtccgtgcccgcgggacctgacagccgggtcagagggcgaagctgtgctcaggcccgggctggacgcagagccagag

SEQ ID NO: 401331 - DNA, 120 bp, Artificial Sequence
  ENSG00000146555_0 (sequence is synthesized)
gcactttcttctcagcgccgggcgggggcggcggcggcggcggctcctccgcgcccggcggacccctcggagctagcgcggcgggctcgggactgcgtgagcgccggacgcgaatttccc

SEQ ID NO: 401332 - DNA, 120 bp, Artificial Sequence
  ENSG00000146555_1 (sequence is synthesized)
aatttcccccgttgacaacttcttctcgcccggctcgtccccggcccgcgccgcgcccctcacgcggggacccaggacgccgcccctcagcgctgggcggccgctcacctcgggccgggg

SEQ ID NO: 401333 - DNA, 80 bp, Artificial Sequence
  ENSG00000146555_2 (sequence is synthesized)
gcgggcggcgggcggcaaagttggggccgggccgccgcggctggtgggcgctgctggcgctgcagctgcacttgctccgg

SEQ ID NO: 401334 - DNA, 120 bp, Artificial Sequence
  ENSG00000146555_3 (sequence is synthesized)
tgcagctgcacttgctccgggcgctggcgcaagatgatgttgctccatattttaaaacggagccaggcctaccacagatccacctggaagggaaccgccttgttctcacctgccttgccg

SEQ ID NO: 401335 - DNA, 120 bp, Artificial Sequence
  ENSG00000146555_4 (sequence is synthesized)
aagggagctggcctttggagttcaagtggatgcgcgatgacagtgagctcaccacctacagcagcgaatataagtacattattccatctttgcagaagctcgatgctgggttttaccgct

SEQ ID NO: 401336 - DNA, 120 bp, Artificial Sequence
  ENSG00000146555_5 (sequence is synthesized)
gcgtggtgcgaaacagaatgggagcactcctgcaaagaaaatcagaagttcaagtcgcatatatgggaagtttcatggatacggaccagaggaaaacagtttctcaaggacgtgcagcga

SEQ ID NO: 401337 - DNA, 120 bp, Artificial Sequence
  ENSG00000146555_6 (sequence is synthesized)
ttctaaacctgctgcccatcaccagctaccccagacctcaagtgacttggtttagagaagggcacaagattattccaagcaacagaatagccatcacattggagaatcagctggtgatcc

SEQ ID NO: 401338 - DNA, 120 bp, Artificial Sequence
  ENSG00000146555_7 (sequence is synthesized)
tcgccaccacaaccagtgatgccggggcatactacgtgcaggccgtgaatgagaaaaatggagaaaacaagacaagcccattcattcatttgagcatagcaagagatgttggcacacctg

SEQ ID NO: 401339 - DNA, 120 bp, Artificial Sequence
  ENSG00000146555_8 (sequence is synthesized)
aaaccatggccccaaccattgtggttcccccgggcaacagaagtgtggtggctggatccagtgagaccaccttggaatgtatagccagtgccaggcctgtggaggacctgagtgtgacct

SEQ ID NO: 401340 - DNA, 120 bp, Artificial Sequence
  ENSG00000146555_9 (sequence is synthesized)
ggaagaggaatggagtgagaatcaccagtggcctccacagctttggaagacgcctcaccatcagcaacccgacgtccgcggacaccgggccatacgtctgcgaggcggcgctgccgggga

SEQ ID NO: 401341 - DNA, 120 bp, Artificial Sequence
  ENSG00000146555_10 (sequence is synthesized)
gcgcttttgaaccggccagggcgacggcctttcttttcatcatagagccaccatattttactgctgagcccgagagtcggatttcagctgaagtagaagaaactgtggacatcggatgtc

SEQ ID NO: 401342 - DNA, 120 bp, Artificial Sequence
  ENSG00000146555_11 (sequence is synthesized)
aagccatgggggtcccccttcccaccctccagtggtacaaggatgccatctccatcagcaggctccagaatcctcgatacaaagtgctcgccagcggaggcctgcgcatccagaagctgc

SEQ ID NO: 401343 - DNA, 120 bp, Artificial Sequence
  ENSG00000146555_12 (sequence is synthesized)
gtccagaggactccggaatcttccagtgcttcgccagcaatgaaggaggggagatccagacccacacctacctggatgtaaccaatatcgctccagtgttcacccagcggccagtggaca

SEQ ID NO: 401344 - DNA, 120 bp, Artificial Sequence
  ENSG00000146555_13 (sequence is synthesized)
ccacagttactgacgggatgacagccattctaaggtgtgaggtgtccggggctcccaaacccgccatcacctggaaaagagaaaaccacattctggccagtggctctgtccggattccta

SEQ ID NO: 401345 - DNA, 120 bp, Artificial Sequence
  ENSG00000146555_14 (sequence is synthesized)
ggttcatgcttcttgaatcggggggtctacagatcgcgcccgtcttcatccaggatgccggcaactacacctgctatgcggccaacacagagggctccctgaatgcatcggccacgctca

SEQ ID NO: 401346 - DNA, 120 bp, Artificial Sequence
  ENSG00000146555_15 (sequence is synthesized)
ctgtgtggaatcggacgtccatcgtccaccctcctgaggaccacgtggtgattaaggggaccacggccacgctgcactgtggtgccacacatgacccccgggtttcactccgctacgttt

SEQ ID NO: 401347 - DNA, 120 bp, Artificial Sequence
  ENSG00000146555_16 (sequence is synthesized)
ggaagaaggacaacgtggccctgactccatcgagcacgtctaggatcgtggtggagaaggacgggtcccttctcatcagccagacgtggtcaggcgacatcggtgactacagctgcgaga

SEQ ID NO: 401348 - DNA, 120 bp, Artificial Sequence
  ENSG00000146555_17 (sequence is synthesized)
ttgtttctgaaggagggaatgactccaggatggcccggctggaagtgattgaactgcctcattcacctcagaacctcctggtcagccctaattcttcccacagccacgccgtggtgctct

SEQ ID NO: 401349 - DNA, 120 bp, Artificial Sequence
  ENSG00000146555_18 (sequence is synthesized)
cttgggtccggccctttgatggaaacagtcctattctttattacatcgtggagctctctgaaaacaactctccatggaaggtgcatctgtcaaacgttggccctgagatgacaggcgtca

SEQ ID NO: 401350 - DNA, 120 bp, Artificial Sequence
  ENSG00000146555_19 (sequence is synthesized)
ccgtgagtggcctgactccggctcgtacctatcaattccgggtgtgcgcggtgaatgaagtgggcaggggccagtacagcgccgagacaagcaggttgatgctacctgaagaaccaccca

SEQ ID NO: 401351 - DNA, 120 bp, Artificial Sequence
  ENSG00000146555_20 (sequence is synthesized)
gtgctcccccgaaaaatatagtggccagtgggcggactaatcagtccattatggtccagtggcagccacccccagaaacagagcacaacggggtgttgcgtggatacatcctcaggtacc

SEQ ID NO: 401352 - DNA, 120 bp, Artificial Sequence
  ENSG00000146555_21 (sequence is synthesized)
gcctggctggccttcccggagagtaccagcagcggaacatcaccagcccggaggtgaactactgcctggtgacagacctgatcatctggacacagtatgagatacaggtggcggcgtaca

SEQ ID NO: 401353 - DNA, 120 bp, Artificial Sequence
  ENSG00000146555_22 (sequence is synthesized)
acggggccggtctgggcgtcttcagcagggcagtgaccgagtacaccttgcagggagtgcccaccgcgcccccgcagaacgtgcagacggaagccgtgaactccaccaccattcagttcc

SEQ ID NO: 401354 - DNA, 120 bp, Artificial Sequence
  ENSG00000146555_23 (sequence is synthesized)
tgtggaaccctccgcctcagcagtttatcaatggcatcaaccagggatacaagcttctggcatggccggcagatgcccccgaggctgtcactgtggtcactattgccccagatttccacg

SEQ ID NO: 401355 - DNA, 120 bp, Artificial Sequence
  ENSG00000146555_24 (sequence is synthesized)
gagtccaccatggacacataacgaacctgaagaagtttaccgcctacttcacttccgttctgtgcttcaccacccctggggacgggcctcccagcacacctcagctggtctggactcagg

SEQ ID NO: 401356 - DNA, 120 bp, Artificial Sequence
  ENSG00000146555_25 (sequence is synthesized)
aagacaaaccaggagctgtgggacatctgagtttcacagagatcttggacacatctctcaaggtcagctggcaggagcccctggagaaaaatggcatcattactggctatcagatctctt

SEQ ID NO: 401357 - DNA, 120 bp, Artificial Sequence
  ENSG00000146555_26 (sequence is synthesized)
gggaagtgtacggcaggaacgactctcgtctcacgcacaccctgaacagcacgacgcacgagtacaagatccaaggcctctcatctctcaccacctacaccatcgacgtggccgctgtga

SEQ ID NO: 401358 - DNA, 120 bp, Artificial Sequence
  ENSG00000146555_27 (sequence is synthesized)
ctgccgtgggcactggcctggtgacttcatccaccatttcttctggagtgcccccagaccttcctggtgccccatccaacctggtcatttccaacatcagccctcgctccgccacccttc

SEQ ID NO: 401359 - DNA, 120 bp, Artificial Sequence
  ENSG00000146555_28 (sequence is synthesized)
agttccggccaggctatgacgggaaaacgtccatctccaggtggattgttgaggggcaggtgggagctatcggcgacgaggaggagtgggtcaccctctatgaagaggagaatgagcctg

SEQ ID NO: 401360 - DNA, 120 bp, Artificial Sequence
  ENSG00000146555_29 (sequence is synthesized)
atgcccagatgctggagatcccaaacctcacaccctacactcactacagatttcgaatgaagcaagtgaacattgttgggccgagcccctacagtccgtcttcccgggtcatccagaccc

SEQ ID NO: 401361 - DNA, 120 bp, Artificial Sequence
  ENSG00000146555_30 (sequence is synthesized)
tgcaggccccacccgacgtggctccaaccagcgtcacggtccgtactgccagtgagaccagcctgcggcttcgctgggtgcccctgccggattctcagtacaacgggaaccccgagtccg

SEQ ID NO: 401362 - DNA, 120 bp, Artificial Sequence
  ENSG00000146555_31 (sequence is synthesized)
tgggctacaggattaagtactggcgctcagacctccagtcctcagcagtggcccaagtcgtcagtgaccggctggagagagaattcaccatcgaggagctggaggagtggatggaatacg

SEQ ID NO: 401363 - DNA, 120 bp, Artificial Sequence
  ENSG00000146555_32 (sequence is synthesized)
agctgcagatgcaggccttcaacgccgtcggggctgggccgtggagcgaggtggtgcggggccggacgcgggagtcagttccttcagccgcccctgagaacgtgtcagccgaggctgtca

SEQ ID NO: 401364 - DNA, 120 bp, Artificial Sequence
  ENSG00000146555_33 (sequence is synthesized)
gctcgacccagattttactgacatggacatccgtgccggaacaggaccagaatgggctcatactgggctacaagatcctgttccgggccaaagacctggatcccgagcccaggagccaca

SEQ ID NO: 401365 - DNA, 120 bp, Artificial Sequence
  ENSG00000146555_34 (sequence is synthesized)
tcgtgcgagggaaccacacgcagtcggccctgctggcaggcctgcgcaagttcgtgctctacgagctccaggtgctggcgttcacccgcatcgggaacggggtccccagcacgcccctca

SEQ ID NO: 401366 - DNA, 120 bp, Artificial Sequence
  ENSG00000146555_35 (sequence is synthesized)
tcctggagcgcaccaaagacgatgccccaggcccaccagtgaggctcgtgttccccgaagtgagactcacctccgtgcggatagtgtggcaacctccggaggagcccaacggcatcatcc

SEQ ID NO: 401367 - DNA, 120 bp, Artificial Sequence
  ENSG00000146555_36 (sequence is synthesized)
tggggtaccagattgcctaccgcctggccagcagcagcccccacaccttcaccaccgtggaggtcggcgccacagtgaggcagttcacagccaccgacctggccccggagtccgcataca

SEQ ID NO: 401368 - DNA, 120 bp, Artificial Sequence
  ENSG00000146555_37 (sequence is synthesized)
tcttcaggctgtccgccaagacgaggcagggctggggggagccactggaggccaccgtcatcaccaccgagaagagagagcggccggcaccccccagagagctcctggtgccccaggcag

SEQ ID NO: 401369 - DNA, 120 bp, Artificial Sequence
  ENSG00000146555_38 (sequence is synthesized)
aagtgaccgcacgcagcctccggctccagtgggtcccgggcagcgacggggcctcccccatccggtacttcaccatgcaggtgcgagagctgcctcggggtgagtggcagacctactcct

SEQ ID NO: 401370 - DNA, 120 bp, Artificial Sequence
  ENSG00000146555_39 (sequence is synthesized)
cgtccatcagccatgaggcgacagcatgcgtcgttgacagactgaggcccttcacctcctacaagctgcgcctgaaagccaccaacgacattggggacagtgacttcagttcagagacag

SEQ ID NO: 401371 - DNA, 120 bp, Artificial Sequence
  ENSG00000146555_40 (sequence is synthesized)
aggcggtgaccacgctgcaggatgttccaggagagcccccgggatctgtctcagcgacgccacacaccacgtcctctgtcctgatacagtggcagcctccgagggacgaaagcctgaatg

SEQ ID NO: 401372 - DNA, 120 bp, Artificial Sequence
  ENSG00000146555_41 (sequence is synthesized)
gccttcttcagggatacaggatctactacagggagctggagtatgaagccgggtcaggcactgaggccaagacgctcaaaaaccctatagctttacatgctgagctcacagcccaaagca

SEQ ID NO: 401373 - DNA, 120 bp, Artificial Sequence
  ENSG00000146555_42 (sequence is synthesized)
cgatgtgtgaactaacacatttaaagaagtaccggcgctatgaagtaataatgaccgcctataacatcatcggcgagagcccagccagcgcgcccgtggaggtctttgtcggcgaggctg

SEQ ID NO: 401374 - DNA, 120 bp, Artificial Sequence
  ENSG00000146555_43 (sequence is synthesized)
ccccggccatggccccgcagaacgtgcaggtgaccccactcacggccagccagctggaggtcacgtgggacccaccacccccggagagccagaatgggaacatccaaggctacaagattt

SEQ ID NO: 401375 - DNA, 120 bp, Artificial Sequence
  ENSG00000146555_44 (sequence is synthesized)
actactgggaggcagacagccagaacgaaacggagaaaatgaaggtcctcttcctccccgagcccgtggtgaggctgaagaacctgaccagccataccaagtacctggtcagcatatcag

SEQ ID NO: 401376 - DNA, 120 bp, Artificial Sequence
  ENSG00000146555_45 (sequence is synthesized)
ccttcaacgccgccggagatggacctaagagtgacccccagcaggggcgcacccaccaggccgcccctggggcccccagctttctggcgttctcagaaataacctccaccacgctcaacg

SEQ ID NO: 401377 - DNA, 120 bp, Artificial Sequence
  ENSG00000146555_46 (sequence is synthesized)
tgtcctggggcgagcctgcggcggccaacggcatcctgcagggctatcgggtggtgtacgagcccttggcccctgtacaaggggtgagcaaggtggtgaccgtggaagtgagagggaact

SEQ ID NO: 401378 - DNA, 120 bp, Artificial Sequence
  ENSG00000146555_47 (sequence is synthesized)
ggcagcgctggctgaaggtgcgggacctcaccaagggagtgacctatttcttccgtgtccaagcgcggaccatcacctacgggcccgagctccaagccaatatcacagccgggccagccg

SEQ ID NO: 401379 - DNA, 120 bp, Artificial Sequence
  ENSG00000146555_48 (sequence is synthesized)
agggatccccgggctcgcctagagatgtcctggtcaccaagtccgcctctgaactgacgctgcagtggactgagggacactctggcgacacacctaccacgggctatgtgatcgaggccc

SEQ ID NO: 401380 - DNA, 120 bp, Artificial Sequence
  ENSG00000146555_49 (sequence is synthesized)
ggccctcagatgaaggcttatgggacatgtttgtgaaggacatcccgcggagcgccacatcctacaccctcagcctggataagctccggcaaggagtgacttacgagttccgggtggtgg

SEQ ID NO: 401381 - DNA, 120 bp, Artificial Sequence
  ENSG00000146555_50 (sequence is synthesized)
ctgtgaatgaggcgggctacggggagcccagcaacccctccacggctgtgtcagctcaagtggaagccccattctacgaggagtggtggttcctcctggtgatggctctgtccagcctga

SEQ ID NO: 401382 - DNA, 120 bp, Artificial Sequence
  ENSG00000146555_51 (sequence is synthesized)
tcgtcatcctgctggtggtgttcgccctcgtcctgcacgggcagaataagaagtataagaactgcagcacaggaaaggggatctccaccatggaggagtctgtgaccctggacaacggag

SEQ ID NO: 401383 - DNA, 120 bp, Artificial Sequence
  ENSG00000146555_52 (sequence is synthesized)
gatttgctgccctggagctcagcagccgccacctcaatgtcaagagcaccttctccaagaagaacgggaccaggtccccaccccggcctagccccggcggcctgcactactcagacgagg

SEQ ID NO: 401384 - DNA, 120 bp, Artificial Sequence
  ENSG00000146555_53 (sequence is synthesized)
acatctgcaacaagtacaacggcgccgtgctgaccgagagcgtgagcctcaaggagaagtcggcagatgcatcagaatctgaggccacggactctgactacgaggacgcgctgcccaagc

SEQ ID NO: 401385 - DNA, 120 bp, Artificial Sequence
  ENSG00000146555_54 (sequence is synthesized)
actccttcgtgaaccactacatgagcgaccccacctactacaactcatggaagcgcagggcccagggccgcgcacctgcgccgcacaggtacgaggcggtggcgggctccgaggcgggcg

SEQ ID NO: 401386 - DNA, 120 bp, Artificial Sequence
  ENSG00000146555_55 (sequence is synthesized)
cgcagctgcacccggtcatcaccacgcagagcgcgggcggcgtctacacccccgctggccccggcgcgcgaactccgctcaccggcttctcctccttcgtgtgagcaaagcgccgcgcct

SEQ ID NO: 401387 - DNA, 120 bp, Artificial Sequence
  ENSG00000146555_56 (sequence is synthesized)
ccctcagggcggaacggaggcaactttccggagtctatttttgttaagacaatcaactccaataactgagctgaagtttttgtttaaaaagaaaaaaatctgataagtgatgattttacc

SEQ ID NO: 401388 - DNA, 120 bp, Artificial Sequence
  ENSG00000146555_57 (sequence is synthesized)
tacttgtggacactagatttcaattaggaaggtttttttaaacggctttttgtaacttcgctgcaggaagcaggtttgtttctttttcttttctttttaagagaaggtgtatttcactgg

SEQ ID NO: 401389 - DNA, 120 bp, Artificial Sequence
  ENSG00000146555_58 (sequence is synthesized)
tgcaatggcttggcacctccggggcctgggaggacctcagacctccccagccctgggtttctccgtcttcaagaccaactaggaagggtcaagcggggagagggagtggagggtcaggtg

SEQ ID NO: 401390 - DNA, 120 bp, Artificial Sequence
  ENSG00000146555_59 (sequence is synthesized)
agatctcagagctgccccggccggcccccgtctctttctacctcctcttccagagaaccagcggctcacacccttctcaacgcaggacatcctcggcggctcctggggtttgaagagcaa

SEQ ID NO: 401391 - DNA, 120 bp, Artificial Sequence
  ENSG00000146555_60 (sequence is synthesized)
acgtttttccctgggctcagtgcgttttgtcccaacttcatctgtttctgaaatgttctcacttggcagtgtctagtcaaggagtcggctttcaggttcctgacggccaggcagggatgc

SEQ ID NO: 401392 - DNA, 120 bp, Artificial Sequence
  ENSG00000146555_61 (sequence is synthesized)
taaggtgtggctcagccgtcactgtctgtgtcactgcagtggtgcggtcctcaggcttttctgcctgtctttcccccttccttctcacctgacagcgagggagagggaagcctcttaggg

SEQ ID NO: 401393 - DNA, 120 bp, Artificial Sequence
  ENSG00000146555_62 (sequence is synthesized)
ctggaagccaccacgctggccctctccttccccgaacacagcacacggtcaactccgcgggacacgaggacacgggacggcgtctccagaattgcttgttacgtaggaagcgtgcattgt

SEQ ID NO: 401394 - DNA, 120 bp, Artificial Sequence
  ENSG00000146555_63 (sequence is synthesized)
taaccagagtatttttaaaatctttttatctttttttaaactatgtcacatgaaatgaatgcgtctttgctgtctccaggtgcctttttattaattgttcagctttgtacatgggaaaga

SEQ ID NO: 401395 - DNA, 120 bp, Artificial Sequence
  ENSG00000146555_64 (sequence is synthesized)
tgaaaagcaacagtgtctgcaaataaagcaaaacagctctgagaacacacgctcccgactcgcctcgtgcacaccaggccgtcccctccctctgtcctggcttctgctggctgctcgcag

SEQ ID NO: 401396 - DNA, 120 bp, Artificial Sequence
  ENSG00000146555_65 (sequence is synthesized)
cagccaccgcttctccaccactggcgctgctgctgccccctctcccagtccgaggccagcttttagccttaacaggttttttggaaatgtttcttttttttatttaaaattgtcattgtt

SEQ ID NO: 401397 - DNA, 120 bp, Artificial Sequence
  ENSG00000146555_66 (sequence is synthesized)
tggtttaaatttttcagctagatgaaaagagtatgaactactttggaaaacttaacagctcagagatggccatgcctccagcccctcacgtcatctttgcaacagacgactgggctgcca

SEQ ID NO: 401398 - DNA, 120 bp, Artificial Sequence
  ENSG00000146555_67 (sequence is synthesized)
tggtccacccctcagcccgggtcccgggtctggatggaacgggagcactgctggtgcccactggcgtgtgtgccccgggtccctgtaagtgccccctcaccagcagcagcgtgacacaca

SEQ ID NO: 401399 - DNA, 120 bp, Artificial Sequence
  ENSG00000146555_68 (sequence is synthesized)
caagactcaagaccaccctgtcagtgccccccagtgcacggcaaacgggcaggtgccgttcccccagtgacctgagggtaggggacaactgagcagtatctgaccagtgccacccaggag

SEQ ID NO: 401400 - DNA, 120 bp, Artificial Sequence
  ENSG00000146555_69 (sequence is synthesized)
ccagtctcctggccacatgcagaaagtgtggcccctgcttacctagatgttttgtgcacctccatgggcagagggtgtggatattgcctggattctgtgctgtcagcgttgctgagtatg

SEQ ID NO: 401401 - DNA, 120 bp, Artificial Sequence
  ENSG00000146555_70 (sequence is synthesized)
gccccaggagaccaaggagagttttgtataggctggaaaaccccttttcagtctttccaaaattagagggtatggcaagtttccttttttctctcctcccttccttcccctccttccttt

SEQ ID NO: 401402 - DNA, 87 bp, Artificial Sequence
  ENSG00000146555_71 (sequence is synthesized)
ttccttttttctctcctcccttccttcccctccttcctttcctttacccctcctttccttccttcctcccttcctctcttctttccc

SEQ ID NO: 401403 - DNA, 120 bp, Artificial Sequence
  ENSG00000146555_72 (sequence is synthesized)
ttcctctctcccctattccttcttccttttctcctcctttttctgagtggagggggaaatattctaaaccaaaaatcctagatgctctgcccaaagccacttctgcatgagaatcgcaac

SEQ ID NO: 401404 - DNA, 120 bp, Artificial Sequence
  ENSG00000146555_73 (sequence is synthesized)
ccacagttccccggatgagactcaccacagtggacagtgccacctccttcccctcggccccggagagggcgaagtgggcgggaagccaggatgtgagcactggaatttcttggaagagaa

SEQ ID NO: 401405 - DNA, 120 bp, Artificial Sequence
  ENSG00000146555_74 (sequence is synthesized)
gcgataaatggagaccatggccagcgctgctttctgtgcactctgatgactgctctctgcagccatgaggatgtggctttacatgccagggagagtgttgagacgtcttaggttgaggat

SEQ ID NO: 401406 - DNA, 120 bp, Artificial Sequence
  ENSG00000146555_75 (sequence is synthesized)
gagcagattcgagatatgtttgttgctctcgggttttcgatacaacatcatgacacttctgtttcaagctcatgttttccgtctcccctccactcttagtaaaccttgatctgtacggag

SEQ ID NO: 401407 - DNA, 120 bp, Artificial Sequence
  ENSG00000146555_76 (sequence is synthesized)
cggcctgtccgaggctacgccggcctcctggctgctgctggactgtgcttaggacagcgcccatgcctcggagggactctgtcccatgagaaccacctgtgcaaaggaacagagctggat

SEQ ID NO: 401408 - DNA, 120 bp, Artificial Sequence
  ENSG00000146555_77 (sequence is synthesized)
gtttccaggtagattttggcctcccagagcaatgcggcatttgagaagcaacagttcctaactccttatcttcagggaaggaaaagaaaatcacagcctaggaagatggaggttggattt

SEQ ID NO: 401409 - DNA, 120 bp, Artificial Sequence
  ENSG00000146555_78 (sequence is synthesized)
taatctcggttttaaaaagaggacaaacaaaatgtctctaagccaggctagatggaatgtgctcccgctctctcctgccgtgctgaaagtcatgccttgcggatgcctcatgacagcagt

SEQ ID NO: 401410 - DNA, 120 bp, Artificial Sequence
  ENSG00000146555_79 (sequence is synthesized)
ggctgagtctccccacccacccccaacgtggctcatttcagattgcttcggccccaccctgcaaggatgtggtcacggagtggccaggaggctccgtctgagccacagggatgggtgtgc

SEQ ID NO: 401411 - DNA, 120 bp, Artificial Sequence
  ENSG00000146555_80 (sequence is synthesized)
agagctccctcctcctggggtgccagggcagagattccaggcaggtgagcccagagagagctgccaggccacaccccctcggcctcctgcacggccaccttctgggtgaatcggtccagc

SEQ ID NO: 401412 - DNA, 120 bp, Artificial Sequence
  ENSG00000146555_81 (sequence is synthesized)
ccaagcccctctccccagcctcgccttcagcctctctcccagcctgcttttataaggcgcacttcactcaatgctgtagccaaaaaacgaggggccccagggagaggggacccagatggc

SEQ ID NO: 401413 - DNA, 120 bp, Artificial Sequence
  ENSG00000146555_82 (sequence is synthesized)
cacacacggaacgcgcctccacagccccgggaggtggctcactctgtacaggtcttcggaggccgtgtttgtatctaactgtgactgggctgaagcatgatgtttgcctaatggttcgta

SEQ ID NO: 401414 - DNA, 120 bp, Artificial Sequence
  ENSG00000146555_83 (sequence is synthesized)
gcatggtttttatttcttacgcattcttggcacacagtgtagctatcctcctgacgagcaacccgtctgcgtacctaagtgtggctccccgtgggtcagcgtcctggtagcatggatcca

SEQ ID NO: 401415 - DNA, 120 bp, Artificial Sequence
  ENSG00000146555_84 (sequence is synthesized)
gtctgaaaggtgaggacaacgtggaaactcatgagctgagcctgcccgctgggacacgtctccttcccgcgtcaccttctggtttagggagccgtcaggtccctaaacgttccctacaac

SEQ ID NO: 401416 - DNA, 120 bp, Artificial Sequence
  ENSG00000146555_85 (sequence is synthesized)
tttttctgaaattgtgcagaaaaacagatctcattaaaagaaaaaaagaaacaacttgtaggaagacagagaggtgctatgggtacaatttttaataaaaacattattttgttccttaaa

SEQ ID NO: 401417 - DNA, 120 bp, Artificial Sequence
  ENSG00000146555_86 (sequence is synthesized)
ctccaggatggcccggctggaagtgatgtgagtactgagacgtttggtgttagccagtccgcggttttctccgttactgtgcccctgttagtgactgccacttcacaagtgtcacgcccg

SEQ ID NO: 401418 - DNA, 120 bp, Artificial Sequence
  ENSG00000146555_87 (sequence is synthesized)
gcttgtgtcccaagtcagcggtcagaggccagcgcatcatgctgcataactacatatatggacaaggtttttttgtggtttctttcaacttcggaattgagaagtttcgtttttggtgta

SEQ ID NO: 401419 - DNA, 120 bp, Artificial Sequence
  ENSG00000146555_88 (sequence is synthesized)
ttgttttaaagatacagtcaatataggaggcatgccaagctatcttatccacattcaacacaattataatgaaagtaaaccagctctggaagacagttcccagaaattaattatcgcaca

SEQ ID NO: 401420 - DNA, 120 bp, Artificial Sequence
  ENSG00000146555_89 (sequence is synthesized)
gaaagtgaacacaacagccttttgttatcatgataatgaaatcaccaccaccttaatacttgacaaacttggccatgcctctgttgaatttctgctgaataaactggaaaaatgttgcaa

SEQ ID NO: 401421 - DNA, 120 bp, Artificial Sequence
  ENSG00000146555_90 (sequence is synthesized)
ttattaatggctttaattttgagtttattcatgttttcttatatgtgaggtttataataaatcatacatacatatatttactgtggggagatatgcataacctaacgtttcccactatga

SEQ ID NO: 401422 - DNA, 120 bp, Artificial Sequence
  ENSG00000146555_91 (sequence is synthesized)
ccatttcaagtgtccagttcagtagcattgagcacgttgttctacaatcatcacaccattcatctccagaacgctcttcgacttgcgaaactgagactccgtccccattcagcactcact

SEQ ID NO: 401423 - DNA, 120 bp, Artificial Sequence
  ENSG00000146555_92 (sequence is synthesized)
gggcactaactcaagctcccctggagcgcagtcactttacaaccaccttcctccccaaatgccagcatggacaaattagatccagaagccctgcacacagccatcctcagggagaaagca

SEQ ID NO: 401424 - DNA, 120 bp, Artificial Sequence
  ENSG00000146555_93 (sequence is synthesized)
cagttggctgggccttgattcacgaagggggcctgccccatgccacggcggtccctcctggcacccgcctcctgataaccctcgtgctgtgtcgataccacagatcctgttccgggccaa

SEQ ID NO: 401425 - DNA, 120 bp, Artificial Sequence
  ENSG00000146555_94 (sequence is synthesized)
aacaaaatagcgtatttcagtggctttatttgtaactcggcaaatgaaggtgaggttgagtttaccttcgaaatccttcctagccttctttcccaagaatataagtccattaaatccaaa

SEQ ID NO: 401426 - DNA, 120 bp, Artificial Sequence
  ENSG00000146555_95 (sequence is synthesized)
tatccctctccgggcccagcgtgccgcaggtaatgagagcaacgccattccttcggccaaggagaccacagaacctcaccctcctcgctggctggtgactttaaagagttccctgacttc

SEQ ID NO: 401427 - DNA, 120 bp, Artificial Sequence
  ENSG00000146555_96 (sequence is synthesized)
atttctctgaaggtttgacatccatagaagttccaagtcagcaggttcagcaagagggggctgttgccatggctctgatggtgcccggtcccctcatgtgctgcttgtctttctcataag

SEQ ID NO: 401428 - DNA, 120 bp, Artificial Sequence
  ENSG00000146555_97 (sequence is synthesized)
ctgcttgtctttctcataagcgtgtttctgacagcttgtcagcccggcttcccaccccttcctgggatcagcctgcaacacgggctttcttcgtcatcttaacatgcaatgcattttgcc

SEQ ID NO: 401429 - DNA, 120 bp, Artificial Sequence
  ENSG00000146574_0 (sequence is synthesized)
caacaggctgggcggtggtgtctcacgcctgtaatcggagcactttgggaggccgaagtgggagaccatttgaggccaggagttcgagagcagcctgggcaacacagaccccacctctac

SEQ ID NO: 401430 - DNA, 80 bp, Artificial Sequence
  ENSG00000146574_1 (sequence is synthesized)
agttcgagagcagcctgggcaacacagaccccacctctacaaaaaaataaaactggccttggtggcgggattgcttgagt

SEQ ID NO: 401431 - DNA, 120 bp, Artificial Sequence
  ENSG00000146574_2 (sequence is synthesized)
acactccagcctggatgacaaactgagaccctatcagaaaaaacaacaacaacaaaaaaacagtgcccgctcggtttttcctgaaacgcgcagccctcgcctgtagccaggagaaaactc

SEQ ID NO: 401432 - DNA, 120 bp, Artificial Sequence
  ENSG00000146574_3 (sequence is synthesized)
cgcgagccagcaaaacacaaactcggccaggaaacagacaacaaggccacccgggggtgcctgaagaggacgctgcgaggcggattctttttccgggcctgcggcgagtgcttccggggc

SEQ ID NO: 401433 - DNA, 120 bp, Artificial Sequence
  ENSG00000146574_4 (sequence is synthesized)
ggtggcgacggaggcggaagtgcggtgttttagccggtggctgctgtctctgggcgggccgtgggaggctcccgaggtgggggccggggcgggatggctgcagcggcggccggggccggg

SEQ ID NO: 401434 - DNA, 120 bp, Artificial Sequence
  ENSG00000146574_5 (sequence is synthesized)
agcgggccctgggcggcccaggagaagcagttcccgccggcgctgctgagtttcttcatctacaacccgcgcttcgggccgcgcgaaggacaggaggaaaataagattttattttatcat

SEQ ID NO: 401435 - DNA, 120 bp, Artificial Sequence
  ENSG00000146574_6 (sequence is synthesized)
ccaaatgaggtagaaaagaatgagaagattagaaatgtcggattgtgtgaagctattgtacagtttacaaggacatttagcccatcaaaacctgcaaaatctttacatacacagaagaac

SEQ ID NO: 401436 - DNA, 120 bp, Artificial Sequence
  ENSG00000146574_7 (sequence is synthesized)
agacagttcttcaatgaaccagaagaaaatttctggatggtcatggttgttcggaatcctataattgaaaaacagagtaaagatggaaaaccagttattgaatatcaagaggaggagttg

SEQ ID NO: 401437 - DNA, 120 bp, Artificial Sequence
  ENSG00000146574_8 (sequence is synthesized)
ttggacaaggtttatagctcggtgctgcggcagtgctacagcatgtacaagctttttaatggtacatttctgaaagccatggaagacggaggcgtcaagcttctgaaagaaagattagag

SEQ ID NO: 401438 - DNA, 120 bp, Artificial Sequence
  ENSG00000146574_9 (sequence is synthesized)
aaattcttccatcggtatttgcaaacgctacatttgcagtcatgtgacctacttgacatttttggtggaatcagcttcttcccgttggataaaatgacttatttgaaaatccagtccttt

SEQ ID NO: 401439 - DNA, 120 bp, Artificial Sequence
  ENSG00000146574_10 (sequence is synthesized)
attaatagaatggaggaaagcctgaatatagtcaaatacactgcttttctctataacgatcagctcatctggagtggattagaacaagatgacatgagaattttatacaaataccttacc

SEQ ID NO: 401440 - DNA, 120 bp, Artificial Sequence
  ENSG00000146574_11 (sequence is synthesized)
acctcccttttcccaaggcacatcgaacctgagttagcaggaagggattctccaataagagcagaaatgccaggaaatcttcaacactatggaagatttcttaccggacccttgaacctc

SEQ ID NO: 401441 - DNA, 120 bp, Artificial Sequence
  ENSG00000146574_12 (sequence is synthesized)
tccagatgcaaaatgcagattccccaaaatttttgtaaatacagatgacacttatgaagagctccatttaatcgtttataaggccatgagtgcggctgtgtgctttatgatcgacgcctc

SEQ ID NO: 401442 - DNA, 120 bp, Artificial Sequence
  ENSG00000146574_13 (sequence is synthesized)
tgtccacccaacgttggatttttgccgaagactggacagcatcgttgggccccagctcacagtgctggcctctgacatctgtgaacagtttaacatcaacaagaggatgtctgggtctga

SEQ ID NO: 401443 - DNA, 120 bp, Artificial Sequence; identical to SEQ ID NO: 247072
  ENSG00000146574_14 (sequence is synthesized)

SEQ ID NO: 401444 - DNA, 120 bp, Artificial Sequence; identical to SEQ ID NO: 247073
  ENSG00000146574_15 (sequence is synthesized)

SEQ ID NO: 401445 - DNA, 120 bp, Artificial Sequence; identical to SEQ ID NO: 247074
  ENSG00000146574_16 (sequence is synthesized)

SEQ ID NO: 401446 - DNA, 120 bp, Artificial Sequence
  ENSG00000146574_17 (sequence is synthesized)
tatctaaaaaacactctgcaaacatttggtcacatgcaagttagtggtcatatgacggactgcattcaggacaagggtaaagcaatacttgctttgaagaatcagatttcgactcggtct

SEQ ID NO: 401447 - DNA, 120 bp, Artificial Sequence
  ENSG00000146574_18 (sequence is synthesized)
gctgatctgaggtttttagattttaaatatttatgtggaattaattaaaggtagttggctatatcgctatcatttcattcttttgacattatttgaatattttactggaaaataagacta

SEQ ID NO: 401448 - DNA, 120 bp, Artificial Sequence; identical to SEQ ID NO: 247077
  ENSG00000146574_19 (sequence is synthesized)

SEQ ID NO: 401449 - DNA, 74 bp, Artificial Sequence; identical to SEQ ID NO: 247078
  ENSG00000146574_20 (sequence is synthesized)

SEQ ID NO: 401450 - DNA, 120 bp, Artificial Sequence; identical to SEQ ID NO: 247079
  ENSG00000146574_21 (sequence is synthesized)

SEQ ID NO: 401451 - DNA, 120 bp, Artificial Sequence; identical to SEQ ID NO: 247080
  ENSG00000146574_22 (sequence is synthesized)

SEQ ID NO: 401452 - DNA, 120 bp, Artificial Sequence
  ENSG00000146574_23 (sequence is synthesized)
gggagggtccagtatgaggtgagaggatgacacgtctgccggctccttgagcactgtgatgtccacctcatagtcatgtctcttggcctcttcctctctcaagataaagatgttcagcct

SEQ ID NO: 401453 - DNA, 120 bp, Artificial Sequence
  ENSG00000146574_24 (sequence is synthesized)
gtgttctgccaggaacagagaccaaatattcattcctttttatgtcaacgacgcccataggaaattacggcttgtccggaaagcacttggtcctgatgcgttctggcagctacggaagac

SEQ ID NO: 401454 - DNA, 120 bp, Artificial Sequence
  ENSG00000146574_25 (sequence is synthesized)
aggaagagagcgagcagctggggaaggagaggagggacctccttcttcacgtttatacgcatgaaagagcgtgttcacaaagaagacgaactgtgcgtcttgattacggcaccgcaggaa

SEQ ID NO: 401455 - DNA, 120 bp, Artificial Sequence
  ENSG00000146574_26 (sequence is synthesized)
ccctgtctctgctgggatgctgagctctgcgggagaaaatgacacaacccacagatttgcaccagagggagaagaaacctaggatgacgaggggtcacagaggccgaatctctgtgaaga

SEQ ID NO: 401456 - DNA, 120 bp, Artificial Sequence
  ENSG00000146574_27 (sequence is synthesized)
gtatttcaagaagctgacgcttttcctgactatggagagatcggttcaagtgacagcaggattcctggcggtggcaacacggagtcactgctgatgaaaaggggccttcagtggcctggg

SEQ ID NO: 401457 - DNA, 120 bp, Artificial Sequence
  ENSG00000146574_28 (sequence is synthesized)
gaggacagtgccacgtggagcaaaagctaagggacacacaggagaggtcctggagaaggtgagcacgtacacagcccaccaagatgcctagcagcaaaggtgtacatgtacacagccccc

SEQ ID NO: 401458 - DNA, 120 bp, Artificial Sequence
  ENSG00000146574_29 (sequence is synthesized)
gtatatagcaaaggtttatgtttatcatttacatgagcacaatctttttaaaatgtatatgcacccaatctcactaataccttctactcttcatctatattgaaagccctcctaaagtaa

SEQ ID NO: 401459 - DNA, 120 bp, Artificial Sequence
  ENSG00000146574_30 (sequence is synthesized)
agtgtgcctttagcgttcagtgaattcttaaaactgctgctggagaattgtcccaaacatatttttttaacctttgtaggacatttagcccatcaaaacctgcaaaatctttacatacac

SEQ ID NO: 401460 - DNA, 120 bp, Artificial Sequence
  ENSG00000146574_31 (sequence is synthesized)
caccacacccggccccacttgctttaggtttagttgactcctgttgtccaggatcttaagacgaaaggtcaggtcactgatttgagatctttcttctcttgagacaggatctcgctctcg

SEQ ID NO: 401461 - DNA, 120 bp, Artificial Sequence; identical to SEQ ID NO: 247099
  ENSG00000146574_32 (sequence is synthesized)

SEQ ID NO: 401462 - DNA, 120 bp, Artificial Sequence; identical to SEQ ID NO: 247100
  ENSG00000146574_33 (sequence is synthesized)

SEQ ID NO: 401463 - DNA, 120 bp, Artificial Sequence; identical to SEQ ID NO: 247101
  ENSG00000146574_34 (sequence is synthesized)

SEQ ID NO: 401464 - DNA, 120 bp, Artificial Sequence; identical to SEQ ID NO: 247102
  ENSG00000146574_35 (sequence is synthesized)

SEQ ID NO: 401465 - DNA, 120 bp, Artificial Sequence
  ENSG00000146574_36 (sequence is synthesized)
aatggacagtttctgccaattctctattctctctggactatacacagagagattagaacagtgaacccctaagtccccatcacacaagtgaataagattctggtcttcgttgcttctcca

SEQ ID NO: 401466 - DNA, 120 bp, Artificial Sequence; identical to SEQ ID NO: 247104
  ENSG00000146574_37 (sequence is synthesized)

SEQ ID NO: 401467 - DNA, 120 bp, Artificial Sequence; identical to SEQ ID NO: 247105
  ENSG00000146574_38 (sequence is synthesized)

SEQ ID NO: 401468 - DNA, 120 bp, Artificial Sequence; identical to SEQ ID NO: 247106
  ENSG00000146574_39 (sequence is synthesized)

SEQ ID NO: 401469 - DNA, 120 bp, Artificial Sequence
  ENSG00000146574_40 (sequence is synthesized)
cagcctaagctttttgtactttgctgcatcctattcttaagtgataaatatgttttgggggtttcggttgtttggggtttttttgttggagacggggtttcactcttggagtgcagtggc

SEQ ID NO: 401470 - DNA, 120 bp, Artificial Sequence
  ENSG00000146574_41 (sequence is synthesized)
tcgctgggactgccagtacacaccgccggacccagctaatgtttttgtggttgtttgtttagacagggtctcactatgttgcccgggctggtgtcaaactcctgggctcaagcgatccac

SEQ ID NO: 401471 - DNA, 120 bp, Artificial Sequence; identical to SEQ ID NO: 247109
  ENSG00000146574_42 (sequence is synthesized)

SEQ ID NO: 401472 - DNA, 120 bp, Artificial Sequence; identical to SEQ ID NO: 247110
  ENSG00000146574_43 (sequence is synthesized)

SEQ ID NO: 401473 - DNA, 120 bp, Artificial Sequence; identical to SEQ ID NO: 247111
  ENSG00000146574_44 (sequence is synthesized)

SEQ ID NO: 401474 - DNA, 120 bp, Artificial Sequence; identical to SEQ ID NO: 247112
  ENSG00000146574_45 (sequence is synthesized)

SEQ ID NO: 401475 - DNA, 120 bp, Artificial Sequence
  ENSG00000146574_46 (sequence is synthesized)
actggtgtgtatgaagtgggagtgtgttctgtttctagattcctgattctccttcacctcgttgaatcaagtcatgtctgttcttgcttttaagatttcttaccggacccttgaacctca

SEQ ID NO: 401476 - DNA, 120 bp, Artificial Sequence
  ENSG00000146574_47 (sequence is synthesized)
atgacatgagaattttatacaaataccttaccacctcccttttcccaaggcacatcgaacctgagatttcttaccggacccttgaacctcaatgatccagatgcaaaatgcagattcccc

SEQ ID NO: 401477 - DNA, 120 bp, Artificial Sequence
  ENSG00000146574_48 (sequence is synthesized)
aaaatttttgtaaatacagatgacacttatgaagagctccatttaatcgtttataaggtaacaactgttttccttccagcgttaatgattgtgctgaaatggatctttcttgcatgtgta

SEQ ID NO: 401478 - DNA, 120 bp, Artificial Sequence
  ENSG00000146574_49 (sequence is synthesized)
cagctccttttaaacagttctgttattagtgaaagaggaactgtttaagattgtgatttataaacgtgtgaagtctcacgtgctctcaaaccaaaggctgtcagaggttggtgctgcctg

SEQ ID NO: 401479 - DNA, 120 bp, Artificial Sequence
  ENSG00000146574_50 (sequence is synthesized)
ttctcgaaatggctctggatgggggccgtagccacgtgtctgtgcatatgctgcttttgctctgattttaaagctgtaggcttgctaattccataaggatcgtattttgtttctgtcagg

SEQ ID NO: 401480 - DNA, 120 bp, Artificial Sequence
  ENSG00000146574_51 (sequence is synthesized)
ttactgttcagaatttaggaaagttctctggctgttgcatccaagtaaaattaaaataaaattggttgcaattttaaaatcaagttcttcctatttgctttattcattcttggggctgtt

SEQ ID NO: 401481 - DNA, 120 bp, Artificial Sequence
  ENSG00000146574_52 (sequence is synthesized)
ttaagaagttgtgtttctggtgctgtagcatgttcaaagtttttaaattaaggcaaaataaacatggtctaatgaattcattgtataatttcagtttatcaaactttgtaggttgttcgg

SEQ ID NO: 401482 - DNA, 120 bp, Artificial Sequence
  ENSG00000146574_53 (sequence is synthesized)
gtatgatgggtaccatagctgcacacaattacatgcaggggcacagagagggcaggtggagtgagatggtggtgcatgggggtgtttctgatcgtttctgatgtatgttttgtcttagtg

SEQ ID NO: 401483 - DNA, 120 bp, Artificial Sequence
  ENSG00000146574_54 (sequence is synthesized)
accagctccgtgacccaggctggtctcgaactcccgtaatccagccatgtaggaaacctgagatgcagtgggccaaggggaaattacggcttgtccggaaagcacttggtcctgatgcgt

SEQ ID NO: 401484 - DNA, 80 bp, Artificial Sequence
  ENSG00000146576_0 (sequence is synthesized)
attcggccgctgttcggctgcgcggcggcagctcccggcggctcctggcggcgccgcagtcggaccttcgggcgcctgct

SEQ ID NO: 401485 - DNA, 120 bp, Artificial Sequence
  ENSG00000146576_1 (sequence is synthesized)
cagcgatggccccctgagcaggcagggagcaggcggcggcaggcgggcaagcgggcgggtgccgcagcccaggcccgggtcgcgcctctttgtttccacgggtagcggcgcagtcccggg

SEQ ID NO: 401486 - DNA, 120 bp, Artificial Sequence
  ENSG00000146576_2 (sequence is synthesized)
gcgggggccgcggcggccgcaccatgagcgacatccgccactcgctgctgcgccgcgatgcgctgagcgccgccaaggaggtgttgtaccacctggacatctacttcagcagccagctgc

SEQ ID NO: 401487 - DNA, 120 bp, Artificial Sequence
  ENSG00000146576_3 (sequence is synthesized)
agagcgcgccgctgcccatcgtggacaagggccccgtggagctgctggaggagttcgtgttccaggtgcccaaggagcgcagcgcgcagcccaagagactgaattcccttcaggagcttc

SEQ ID NO: 401488 - DNA, 120 bp, Artificial Sequence
  ENSG00000146576_4 (sequence is synthesized)
aacttcttgaaatcatgtgcaattatttccaggagcaaaccaaggactctgttcggcagattattttttcatcccttttcagccctcaagggaacaaagccgatgacagccggatgagct

SEQ ID NO: 401489 - DNA, 120 bp, Artificial Sequence
  ENSG00000146576_5 (sequence is synthesized)
tgttgggaaaactggtctccatggcggtggctgtgtgtcgaatcccggtgttggagtgtgctgcctcctggcttcagcggacgcccgtggtttactgtgtgaggttagccaaggcccttg

SEQ ID NO: 401490 - DNA, 120 bp, Artificial Sequence
  ENSG00000146576_6 (sequence is synthesized)
tagatgactactgctgtttggtgccgggatccattcagacgctgaagcagatattcagtgccagcccgagattctgctgccagttcatcacctccgttaccgcgctctatgacctgtcat

SEQ ID NO: 401491 - DNA, 120 bp, Artificial Sequence
  ENSG00000146576_7 (sequence is synthesized)
cagatgacctcattccacctatggacttgcttgaaatgattgtcacctggatttttgaggacccaaggttgattctcatcacttttttaaatactccgattgcggccaatctgccaatag

SEQ ID NO: 401492 - DNA, 120 bp, Artificial Sequence
  ENSG00000146576_8 (sequence is synthesized)
gattcttagagctcaccccgctcgttggattgatccgctggtgcgtgaaggcacccctggcttataaaaggaaaaagaagccccccttatccaatggccatgtcagcaacaaggtcacaa

SEQ ID NO: 401493 - DNA, 120 bp, Artificial Sequence
  ENSG00000146576_9 (sequence is synthesized)
tggacagagactcccacctcttgtactcaaaactccacctcagcgtcctgcaagtgctcatgacgctgcagctgcacctgaccgagaagaatctgtatgggcgcctggggctgatcctct

SEQ ID NO: 401494 - DNA, 120 bp, Artificial Sequence
  ENSG00000146576_10 (sequence is synthesized)
tcgaccacatggtcccgctggtagaggagatcaacaggttggcggatgaactgaaccccctcaacgcctcccaggagattgagctctcgctggaccggctggcgcaggctctgcaggtgg

SEQ ID NO: 401495 - DNA, 120 bp, Artificial Sequence
  ENSG00000146576_11 (sequence is synthesized)
ccatggcctcaggagctctgctgtgcacgagagatgacctgagaaccttgtgctccaggctgccccataataacctcctccagctggtgatctcgggtcccgtgcagcagtcgcctcacg

SEQ ID NO: 401496 - DNA, 120 bp, Artificial Sequence
  ENSG00000146576_12 (sequence is synthesized)
gctccccccggggttctacccccacatccacacgcccccgctgggctacggggctgtcccggcccaccccgccgcccaccccgccctgcccacgcatcccggccacaccttcatctccgg

SEQ ID NO: 401497 - DNA, 120 bp, Artificial Sequence
  ENSG00000146576_13 (sequence is synthesized)
ccggcgtgacctttcccttcaggcccatccgctaggctggcccgtgtgtgccttctgcgctctcgctggacgaagcctttcgagatggaaggggtggccggactcccagaagagaacctc

SEQ ID NO: 401498 - DNA, 120 bp, Artificial Sequence
  ENSG00000146576_14 (sequence is synthesized)
ggggaaggggtcgggcagcccctccccgccggcagaaccgtcttggtgtcacggagtccaggtgcttcccacccggtcgcattctttgacatgcagattggatggtggagggaagagtcc

SEQ ID NO: 401499 - DNA, 120 bp, Artificial Sequence
  ENSG00000146576_15 (sequence is synthesized)
agcctctgccgagagcctgctgcgtgcatttttaaaagatgccgatcctgggagcctctgttctctgcgcatttcagacacagcctgtgtggcgaggagtgtgacggcaggagccacggg

SEQ ID NO: 401500 - DNA, 120 bp, Artificial Sequence
  ENSG00000146576_16 (sequence is synthesized)
tgcaagcccgtgtgtctggcctctttcctcgtgaagacgatgtgtccccgccagaaaaagtgggctccttctgcagccccgtgagctgagcccaggctgcgtagtgaccacaagcttatg

SEQ ID NO: 401501 - DNA, 120 bp, Artificial Sequence
  ENSG00000146576_17 (sequence is synthesized)
tgcagcactgctcagggaggctgtcaggaattcccctcacctcggaaaggaacttctcagttttattgggggtgtctaaatttcctttcatatgttcaaataaatttttctaaacagtca

SEQ ID NO: 401502 - DNA, 120 bp, Artificial Sequence
  ENSG00000146576_18 (sequence is synthesized)
agtaagtatcctcaggactcctagctgggccagcttgctggagcagggtggagggaggcaagacagggcgagcccctttgtcctgggttctttggggagagcccagtaagcacatgatga

SEQ ID NO: 401503 - DNA, 120 bp, Artificial Sequence
  ENSG00000146576_19 (sequence is synthesized)
cagtggtgtttgtgaatttctcatcctactccttgccacgtggagacctccacaaacgcagtcatcaggactctgaatttcggggtcgtttgcaaggccagcttcctggggcttctgctt

SEQ ID NO: 401504 - DNA, 120 bp, Artificial Sequence
  ENSG00000146576_20 (sequence is synthesized)
ggaattcagcctcctccagctggtgatctcgggtcccgtgcagcagtcgcctcacgccgcgctccccccggggttctacccccacatccacacgcccccgctgggctacggggctgtccc

SEQ ID NO: 401505 - DNA, 120 bp, Artificial Sequence
  ENSG00000146576_21 (sequence is synthesized)
gagagatgacctgagaaccttgtgctccaggctgccccataataagactctgaatttcggggtcgtttgcaaggccagcttcctggggcttctgcttggaattcaggtagggcgcggtca

SEQ ID NO: 401506 - DNA, 120 bp, Artificial Sequence
  ENSG00000146576_22 (sequence is synthesized)
ttctcggctctgaggagactgtggccagctgttctgtgtgtcccagcgcagcagagagccgcagaggctgacgtggaggccacctgtgtgggctgcgcgcccgggagtgctacggccgga

SEQ ID NO: 401507 - DNA, 120 bp, Artificial Sequence
  ENSG00000146576_23 (sequence is synthesized)
gctccgtgggccacaggccccgtgcagagcccactcccacgcatcctcgcctgtggggtcctggctctgccactgcttctccgtgtccaccgcctggacccccgggtggtccgtgcctgt

SEQ ID NO: 401508 - DNA, 120 bp, Artificial Sequence
  ENSG00000146576_24 (sequence is synthesized)
caagggaacaaagccgatgacagccggatgagcttgttgggaaaactggtctccatggcggtggctgtgtgtcgaatcccggtgttggagtgtgctgcctcctggcttcagtggactgtg

SEQ ID NO: 401509 - DNA, 120 bp, Artificial Sequence
  ENSG00000146587_0 (sequence is synthesized)
ctctctgtgtgcgtgttcgcgcatgcgcgccgccgctgcactgccctcgcttcctgtgcgtcctcaggtcaccgcttgctctagttcccaggctttggcctccagtggacgagaatcgcg

SEQ ID NO: 401510 - DNA, 120 bp, Artificial Sequence
  ENSG00000146587_1 (sequence is synthesized)
gagcctgcggggctggaggcccggcccgggcccctcgggagcagaacaaccttagtgaggtggacaggaggggacctcgcgagcagacgcgcgccagcgacagcagccccgccccggcct

SEQ ID NO: 401511 - DNA, 120 bp, Artificial Sequence
  ENSG00000146587_2 (sequence is synthesized)
ctcgggagccgtggggcagaggctgcggagccccagaagggtctaccagccacagtctctgcacgtttccaagagcagcagaaaatgaacacattgcaggggccagtgtcattcaaagat

SEQ ID NO: 401512 - DNA, 120 bp, Artificial Sequence
  ENSG00000146587_3 (sequence is synthesized)
gtggctgtggatttcacccaggaggagtggcagcagctggaccctgatgagaagataacttacagggatgtgatgttggagaactatagccatctagtttctgtgggatatgataccacc

SEQ ID NO: 401513 - DNA, 120 bp, Artificial Sequence
  ENSG00000146587_4 (sequence is synthesized)
aagccaaacgtcatcattaagttggagcagggagaggagccgtggataatgggaggtgaatttccatgtcaacatagtccagaagcctggagagttgatgacctgatagagagaatccaa

SEQ ID NO: 401514 - DNA, 120 bp, Artificial Sequence
  ENSG00000146587_5 (sequence is synthesized)
gaaaacgaagacaaacattcaaggcaagctgcttgtatcaatagcaaaaccctgactgaagagaaagagaatacatttagtcaaatttacatggaaacaagccttgttccttcaagcata

SEQ ID NO: 401515 - DNA, 120 bp, Artificial Sequence
  ENSG00000146587_6 (sequence is synthesized)
atagctcataattgtgtctcatgtggaaagaatttagaatctatttcgcaattaattagtagtgatggaagctatgctaggacaaaacctgatgagtgtaatgaatgtgggaaaacatat

SEQ ID NO: 401516 - DNA, 120 bp, Artificial Sequence
  ENSG00000146587_7 (sequence is synthesized)
catggagagaaaatgtgtgaatttaatcaaaatggggatacctattctcacaatgaagaaaatattcttcagaaaattagtattttggagaaaccctttgaatataatgaatgcatggaa

SEQ ID NO: 401517 - DNA, 120 bp, Artificial Sequence
  ENSG00000146587_8 (sequence is synthesized)
gccttagacaatgaggctgtttttattgctcataagagagcttacataggggagaagccctatgagtggaatgattctggaccagacttcatacagatgtcaaattttaatgcatatcag

SEQ ID NO: 401518 - DNA, 120 bp, Artificial Sequence
  ENSG00000146587_9 (sequence is synthesized)
agatcacaaatggaaatgaagccctttgaatgcagtgaatgtggaaaatccttctgtaaaaagtcaaaattcatcatccaccagagggctcacacaggagagaaaccttatgaatgtaat

SEQ ID NO: 401519 - DNA, 120 bp, Artificial Sequence
  ENSG00000146587_10 (sequence is synthesized)
gtatgtgggaaatccttcagccaaaagggaaccctcactgtacatcggagatcacacttagaggagaagccctataaatgtaatgaatgtgggaaaaccttttgtcagaagttacacctc

SEQ ID NO: 401520 - DNA, 120 bp, Artificial Sequence
  ENSG00000146587_11 (sequence is synthesized)
actcaacacctaagaactcattcaggagagaaaccctacgaatgtagcgaatgtgggaaaaccttctgccaaaagacacatctcaccctgcaccagaggaatcattcaggagagaggccc

SEQ ID NO: 401521 - DNA, 120 bp, Artificial Sequence
  ENSG00000146587_12 (sequence is synthesized)
tatccatgtaacgaatgtgggaaatccttctcccgcaagtctgctctcagtgaccatcagagaactcacacgggagagaagctttataaatgtaatgaatgtgggaaatcctactaccga

SEQ ID NO: 401522 - DNA, 120 bp, Artificial Sequence
  ENSG00000146587_13 (sequence is synthesized)
aagtctactctgattacacatcagagaacacacacgggagagaagccctatcagtgtagcgagtgtgggaaattcttttctcgggtgtcatacctcactatacattatagaagtcattta

SEQ ID NO: 401523 - DNA, 120 bp, Artificial Sequence
  ENSG00000146587_14 (sequence is synthesized)
gaagagaaaccctatgaatgtaatgaatgtggcaaaaccttcaatttaaattcagccttcattagacatcggaaagtacacacagaagagaaatcccatgaatgtagtgaatgtggaaag

SEQ ID NO: 401524 - DNA, 120 bp, Artificial Sequence
  ENSG00000146587_15 (sequence is synthesized)
ttctctcagttgtatctcaccgaccatcatacagctcatttagaagagaaaccctatgaatgtaatgaatgtgggaaaaccttccttgtaaattcagccttcgatgggcaccagccactt

SEQ ID NO: 401525 - DNA, 120 bp, Artificial Sequence
  ENSG00000146587_16 (sequence is synthesized)
ccaaaaggggagaaatcctatgaatgtaatgtatgtggaaagttattcaatgagttgtcatactatactgaacattatagaagtcattcagaagagaaaccttatggatgtagcgaatgt

SEQ ID NO: 401526 - DNA, 120 bp, Artificial Sequence
  ENSG00000146587_17 (sequence is synthesized)
gtacacacaggcgagaaaccctatgaatgttacgaatgtggaaaattcttctctcagaaatcatatctcactatacatcatcgaattcattcaggagagaaaccctatgaatgtagtaaa

SEQ ID NO: 401527 - DNA, 120 bp, Artificial Sequence
  ENSG00000146587_18 (sequence is synthesized)
tgtggaaaagtcttctctcggatgtcaaacctcactgtccactacagaagccattcaggagagaaaccctatgaatgtaatgaatgtgggaaagtcttttctcagaagtcatacctcact

SEQ ID NO: 401528 - DNA, 120 bp, Artificial Sequence
  ENSG00000146587_19 (sequence is synthesized)
gtacactatagaactcattcaggagagaaaccctatgaatgtaacgagtgtgggaaaaaattccaccacagatcagccttcaatagccatcagagaattcatagaagaggaaatatgaac

SEQ ID NO: 401529 - DNA, 120 bp, Artificial Sequence
  ENSG00000146587_20 (sequence is synthesized)
gtacttgatgtggaaaatctctgaagtcagatctcaatttttagaaaactctctgaatataatgaatatggggaatccaataggaagtcaaagcgtttatctgagagttcgtgttcctga

SEQ ID NO: 401530 - DNA, 120 bp, Artificial Sequence
  ENSG00000146587_21 (sequence is synthesized)
acggtgagaagcatttaggcattagagtcattttaatccaaattttcacagagaagaatcccgaagaatgtaacaagaagcaaagccttcagcaagatcatacgactcatcggacactaa

SEQ ID NO: 401531 - DNA, 120 bp, Artificial Sequence
  ENSG00000146587_22 (sequence is synthesized)
tttatataggagtgaagttttataaatatttaatatttattttggattcaaattgtatttacatatcagggaatcatacaaaggcaaaatctgtcaatatggtgaatgtggaaaatatat

SEQ ID NO: 401532 - DNA, 120 bp, Artificial Sequence
  ENSG00000146587_23 (sequence is synthesized)
tgtcttggaaatttgttgtaaaagccatatttctaatggaaaatcaggtgtttacaggaaagatctcagaggctatgagctctgaataaatcttcattgtataaaatgaagtttttaaat

SEQ ID NO: 401533 - DNA, 120 bp, Artificial Sequence
  ENSG00000146587_24 (sequence is synthesized)
tgtcaggagttgatcatgaggacagtagcattaaataagtatatggccgttttttatcatgtcttaaaaatgcaatctaatggtaattctatgcaagtttggaattggatgacttgtgaa

SEQ ID NO: 401534 - DNA, 120 bp, Artificial Sequence
  ENSG00000146587_25 (sequence is synthesized)
gaggcagttttcttatttgagtattaggatggcaaaatgtattaagacaggacatattgttggtgagataatatttaataggtataaaatggtaaaatacctagttttctatttagagga

SEQ ID NO: 401535 - DNA, 120 bp, Artificial Sequence
  ENSG00000146587_26 (sequence is synthesized)
atttacaaatgggtttttaacaaatgcctcattagtacaggaggcagtcgttttgtaaagttttcaactgcatctgagtaagataagattttctaaaagactattttgataaactataca

SEQ ID NO: 401536 - DNA, 120 bp, Artificial Sequence
  ENSG00000146587_27 (sequence is synthesized)
tacataatttggaattgtttaagtctatttcagtgaaagagaacaagcatactgcccatactctaaaatatccccagctctcacaccacccttgttttttaacccataggtttgagtgtg

SEQ ID NO: 401537 - DNA, 120 bp, Artificial Sequence
  ENSG00000146587_28 (sequence is synthesized)
cctagtgccaatattttgtaatttagaaattttattcacaaacttctgtttggtacaaatacagtgtcattgttttgtgcattctcctttttcccagtatttcagaacaaattgattcaa

SEQ ID NO: 401538 - DNA, 120 bp, Artificial Sequence
  ENSG00000146587_29 (sequence is synthesized)
gtttctagcagatattttttgatcaattaacttaatgtcctcgctccatttcttgctggaacagtttaggtacctaccacttcttcacatgacacaggggaatcctgattagtcaaaata

SEQ ID NO: 401539 - DNA, 120 bp, Artificial Sequence
  ENSG00000146587_30 (sequence is synthesized)
ataatgatttcattctctttgccagtaacttgttttatagtggtcatatgacctgatactgggtaaacaaaacaaagatggacttgttctgggaaaaggtaaaatggtaatcaaatagat

SEQ ID NO: 401540 - DNA, 120 bp, Artificial Sequence
  ENSG00000146587_31 (sequence is synthesized)
tgtgttccaggaatgcaaaggtggcttaatattcacaagtcagttgctattatacaccacctgtagaaaagtaatctggcatgcagaacattcttgtggtacaattaatgttcgtttatg

SEQ ID NO: 401541 - DNA, 120 bp, Artificial Sequence
  ENSG00000146587_32 (sequence is synthesized)
atcttagcaaatgatggattgaaagggacttacttaactgcataaagagacttaaactacaacaaacaatatgcttaatgatgaaatagtgaacatttctcctaagattataaaaataag

SEQ ID NO: 401542 - DNA, 120 bp, Artificial Sequence
  ENSG00000146587_33 (sequence is synthesized)
acaaggatatctgctgtcaatgattttattcggcattgttcagaaggacctaaccagaaaactaatgcaaggaagagaaacaaaaggcatagagattagaaaagaagtaaaactttaaaa

SEQ ID NO: 401543 - DNA, 120 bp, Artificial Sequence
  ENSG00000146587_34 (sequence is synthesized)
actgccctcgcttcctgtgcgtcctcaggtcaccgcttgctctagttcccaggctttggcctccagtggacgagaatcgcggagcctgcggggctggaggttgagcgcccgggccagcac

SEQ ID NO: 401544 - DNA, 80 bp, Artificial Sequence
  ENSG00000146587_35 (sequence is synthesized)
ctaggcgggcgcgggggtgtgcaggccagggttcgcgcgggccgggtggaggcttgagcggggacccccgagcttgagcc

SEQ ID NO: 401545 - DNA, 120 bp, Artificial Sequence
  ENSG00000146587_36 (sequence is synthesized)
ggcggcggaggcgaaggggcggcgggacgcgggcctggcccgtgtgtgtcctggcggcctggcccaggctgccgctgtacggtgagcccgagggaggcggatctgggtcccgggaaggac

SEQ ID NO: 401546 - DNA, 120 bp, Artificial Sequence
  ENSG00000146587_37 (sequence is synthesized)
atgcaaaaagcattttatgatataccagcaaaaaacatggaaaatgaaattttgaaaagcaatgccacttcaaagatccctcaagtgcctagagggagaaaatgagttaatatgctttga

SEQ ID NO: 401547 - DNA, 120 bp, Artificial Sequence
  ENSG00000146587_38 (sequence is synthesized)
agaactgtatccagaaaataaaattacaaaggaggagagggataggattccaggacaatctcaaaactattgctttttcctaaattcattgcaaccttaaaatcctagcaagttctttaa

SEQ ID NO: 401548 - DNA, 120 bp, Artificial Sequence
  ENSG00000146587_39 (sequence is synthesized)
tgtaaattaacaagctaattctagaattcatatgcatattcaaaagtcgaataattgtcaaggctatcctgtagaatggacagagaggattgaaatttctaaatatcaagacctgttata

SEQ ID NO: 401549 - DNA, 120 bp, Artificial Sequence
  ENSG00000146587_40 (sequence is synthesized)
aagccatagaaataatgaaggtgttaatttggcacaaggatgaaaaaactgactagtggaacagcatacagattcaaaagtagacccacgtgtataccatcacctgagttttgagaaagg

SEQ ID NO: 401550 - DNA, 120 bp, Artificial Sequence
  ENSG00000146587_41 (sequence is synthesized)
tgacattgaagtgtagtgggggaaagggtgttctttccagtaaatgtactttgccaataaaattttgtaatttgataaaaagttatttggaggtggattgcagatctgaatatgaaatgt

SEQ ID NO: 401551 - DNA, 120 bp, Artificial Sequence
  ENSG00000146587_42 (sequence is synthesized)
gaaagctttacaaagaaatcttaggacagtttgtaatcttggagtaagcaaaggtttattgagacccaaaaagcattaacccataaaattagaacttaatattaaatttgagaacttcta

SEQ ID NO: 401552 - DNA, 120 bp, Artificial Sequence
  ENSG00000146587_43 (sequence is synthesized)
tttatcagaaagaccaccagtaagaaaatgaacaggaaatcatggggaggagaagatatttgcagttcatgtatgtgacaacagcaccgagtatagcagaagtgttggcaaactttataa

SEQ ID NO: 401553 - DNA, 120 bp, Artificial Sequence
  ENSG00000146587_44 (sequence is synthesized)
agcaaggcaccagatggtgaaaattttcagctttgtcacaactgctcatctttgctattgtgtgaaagcatccatacaccatgcattaaaaaaaaaatgagcatggctgcttcccagtaa

SEQ ID NO: 401554 - DNA, 120 bp, Artificial Sequence
  ENSG00000146587_45 (sequence is synthesized)
aaccattcacaatcccaggtggcagtctggatttggtctgcactcatagttttctggtccctgatctcgaatatgtaaagagcacctacaaatcaacaagggggaaactggaaaaggcaa

SEQ ID NO: 401555 - DNA, 120 bp, Artificial Sequence
  ENSG00000146587_46 (sequence is synthesized)
aagactttagaggatatccactcactttagaggatatccagacggccaataagcatgaaaagatgtgttagctttattagtaatcagggaaatgcaaacttaaaacatgtagcactgcta

SEQ ID NO: 401556 - DNA, 120 bp, Artificial Sequence
  ENSG00000146587_47 (sequence is synthesized)
cccatccatggaaatggttaaaatgaaaagcatgaaaaagcatcacgttttggcaaggatgtaagcaagaggaactgtacactactggtggaattgctcatcgataaaaccattttgaaa

SEQ ID NO: 401557 - DNA, 120 bp, Artificial Sequence
  ENSG00000146587_48 (sequence is synthesized)
gctggcactaaaagccaagcatatgtatactgttttacccaaacccagcaaaaatgcatgtgtctgtccaccaaaggacatgcactagaatatttatagcctaaaactgcacaaaacaga

SEQ ID NO: 401558 - DNA, 120 bp, Artificial Sequence
  ENSG00000146587_49 (sequence is synthesized)
actatcttaaggcacatgtgcaatggaatgaataaagaagtggcatatgtccatggaatactgtaaaacagtgagcatgaatgaactagaagtccgtgtaataacgcagctgaatttaac

SEQ ID NO: 401559 - DNA, 120 bp, Artificial Sequence
  ENSG00000146587_50 (sequence is synthesized)
aaaccttgctgaatgaaagactccagacacaaaagccaacatgctgtatgattccttctatataaattataaagacgggcaaaacttgtatacgtggtttaaaattagggtagcagttag

SEQ ID NO: 401560 - DNA, 120 bp, Artificial Sequence
  ENSG00000146587_51 (sequence is synthesized)
ccttggccaaggctgaaagggggcatttatctggtgctgggaataatctgtttctaaacctaggtgctaagtatttgagtgtgttttgagctgtgcacttaagatatgtgtatttttctg

SEQ ID NO: 401561 - DNA, 120 bp, Artificial Sequence
  ENSG00000146587_52 (sequence is synthesized)
catgtgtgttaaactttccataaaagttttctaaaatcacaaatggctaacatttgtgtcgctcatcactctaatcatatttttctagatgtgtatgaatatgctgcacaacaggaatta

SEQ ID NO: 401562 - DNA, 120 bp, Artificial Sequence
  ENSG00000146587_53 (sequence is synthesized)
aatggcagattttgcataattctgtgcaggaaatacatatttatagtaattttgatggcaactactaagatttcctacgctgtccttaaagcttagcataatgtatattttaagtgaaat

SEQ ID NO: 401563 - DNA, 120 bp, Artificial Sequence
  ENSG00000146587_54 (sequence is synthesized)
atttgagaaggttaaagaatcattacatactttgtcatcctatacttttgcatatataaataggtctgagctgcctcttcaataaagaagctaatgtgtaacatttcatatttccctaaa

SEQ ID NO: 401564 - DNA, 120 bp, Artificial Sequence
  ENSG00000146587_55 (sequence is synthesized)
tgtccccaaagctcagctagttcacttgcaaaataggagctcagttgtgttttgggtttttatttttgtggggcaatatatatatattttttatatatattatatatatttatatatatt

SEQ ID NO: 401565 - DNA, 120 bp, Artificial Sequence
  ENSG00000146587_56 (sequence is synthesized)
atatattttatatattatgtattataaccccaaaggatatgtgtttccaatatgatttcccttccataatctgtaacataaaataaggtatacaatgtttatggttaactttaccggtgg

SEQ ID NO: 401566 - DNA, 120 bp, Artificial Sequence
  ENSG00000146592_0 (sequence is synthesized)
gttcttcaacatttacaacaaagttgattctgtgtagggttggaggctagacagttccacaaatttttagtcacattttccatgtcagttaaatctagggagttcaagactactggaaaa

SEQ ID NO: 401567 - DNA, 120 bp, Artificial Sequence
  ENSG00000146592_1 (sequence is synthesized)
attagtctcattactaaaagaaacttagagaacgagggaggtaccagagtctaggaggtacctctgggttgcagaagtaattgtaaaataccagacctgttctttttactaaaagctagt

SEQ ID NO: 401568 - DNA, 120 bp, Artificial Sequence
  ENSG00000146592_2 (sequence is synthesized)
ttcactatcttctggtctgaaatactgaggcaaatactcaagacttattttcttcctaatcttgctggtgaaacagaagttactagaaagaaaggaagaaaaaacttgatttggtgactg

SEQ ID NO: 401569 - DNA, 120 bp, Artificial Sequence
  ENSG00000146592_3 (sequence is synthesized)
caggaagcaacacgttgctgcttttattctacagataatgatttatgaggaatccaagatgaatttggagcaggagaggccgtttgtctgcagtgccccaggctgctcccagcgcttccc

SEQ ID NO: 401570 - DNA, 120 bp, Artificial Sequence
  ENSG00000146592_4 (sequence is synthesized)
aacagaggaccatctgatgattcataggcacaaacatgaaatgactttgaagtttccttcaataaaaacagacaatatgttatcagatcaaactccgaccccaacgagattcctgaagaa

SEQ ID NO: 401571 - DNA, 120 bp, Artificial Sequence
  ENSG00000146592_5 (sequence is synthesized)
ctgcgaggaggtgggcctcttcagcgagctggactgctccctggagcacgagttcaggaaggctcaggaagaggagagcagcaagcggaatatctcgatgcataatgcagttggtggggc

SEQ ID NO: 401572 - DNA, 120 bp, Artificial Sequence
  ENSG00000146592_6 (sequence is synthesized)
catgacggggcccggaactcaccagcttagcagcgctcggctgcccaaccatgacaccaacgttgtgattcagcaagccatgccgtcgcctcagtccagctctgtcatcactcaggcacc

SEQ ID NO: 401573 - DNA, 120 bp, Artificial Sequence
  ENSG00000146592_7 (sequence is synthesized)
ttccaccaaccgccagatcgggcctgtcccaggctctctatcttctctgctacatctccacaacagacagagacagcccatgccagcctccatgcctgggaccctgcccaaccctacaat

SEQ ID NO: 401574 - DNA, 120 bp, Artificial Sequence
  ENSG00000146592_8 (sequence is synthesized)
gccaggatcttccgccgtcttgatgccaatggagcgacaaatgtcagtgaactccagcatcatggggatgcaaggtccaaatctcagcaacccctgtgcttctccccaggtccagccaat

SEQ ID NO: 401575 - DNA, 120 bp, Artificial Sequence
  ENSG00000146592_9 (sequence is synthesized)
gcattcagaagccaaaatgaggttgaaggctgcattgactcaccaccctgctgccatgtcaaatgggaacatgaacaccatgggacacatgatggagatgatgggctcccggcaggacca

SEQ ID NO: 401576 - DNA, 120 bp, Artificial Sequence
  ENSG00000146592_10 (sequence is synthesized)
gacgccacaccatcacatgcactcgcacccgcatcagcaccagacactgccaccccatcacccttacccacaccagcaccagcacccagcacaccatcctcaccctcaaccccatcacca

SEQ ID NO: 401577 - DNA, 120 bp, Artificial Sequence
  ENSG00000146592_11 (sequence is synthesized)
gcagaaccatccacatcaccactcccattcccaccttcatgcacacccagcacatcaccagacctcgccacatccgcccctgcacaccggcaaccaagcacaggtttcaccagcaacaca

SEQ ID NO: 401578 - DNA, 120 bp, Artificial Sequence
  ENSG00000146592_12 (sequence is synthesized)
acagatgcagccaacccagacaatacagccaccccagcccacaggggggcgccggcgaagggtggtagacgaggatccggacgagaggcggcggaaatttctggaacggaaccgggcagc

SEQ ID NO: 401579 - DNA, 120 bp, Artificial Sequence
  ENSG00000146592_13 (sequence is synthesized)
tgccacccgctgcagacagaagaggaaggtctgggtgatgtcattggaaaagaaagcagaagaactcacccagacaaacatgcagcttcagaatgaagtgtctatgttgaaaaatgaggt

SEQ ID NO: 401580 - DNA, 120 bp, Artificial Sequence
  ENSG00000146592_14 (sequence is synthesized)
ggcccagctgaaacagttgttgttaacacataaagactgcccaataacagccatgcagaaagaatcacaaggatatctaagtccagagagtagccctcctgctagtcctgtcccagcttg

SEQ ID NO: 401581 - DNA, 120 bp, Artificial Sequence
  ENSG00000146592_15 (sequence is synthesized)
ctcccagcaacaagtcatccagcataataccatcactacttcctcatcggtcagcgaggtggtaggaagctccaccctcagccagctcaccactcacagaacagacctgaatccgattct

SEQ ID NO: 401582 - DNA, 120 bp, Artificial Sequence
  ENSG00000146592_16 (sequence is synthesized)
ttaaaatgcaccatcagacctggcctccaagaagagctgtagcgtaccatgcgtcctttcttttaagggcatttttagaattaactcagacctggaagactcctcagttcttcaaagact

SEQ ID NO: 401583 - DNA, 120 bp, Artificial Sequence
  ENSG00000146592_17 (sequence is synthesized)
ggctttcatttttatagttattatggaaatgttgtcttttatacttagttatataagaaaaaagggagttatgcaattaatatctatcagcttgggaaacgctttggtgcttttctccag

SEQ ID NO: 401584 - DNA, 120 bp, Artificial Sequence
  ENSG00000146592_18 (sequence is synthesized)
ttttctggtaccagttacttgtttataaactgaaccttttctgtatatagccatggtttcattcttatcagtccaaccctttgcctgaaacattgaatcttgttaaaccacagcttttag

SEQ ID NO: 401585 - DNA, 120 bp, Artificial Sequence
  ENSG00000146592_19 (sequence is synthesized)
ctaaaatgaggtatacctagatgtcaagtaagacagatccaaggtaactgggtaggaaatcttttgacatcttaactcatgttgagtttgtgctgtggtgtcaccagaattccagataaa

SEQ ID NO: 401586 - DNA, 120 bp, Artificial Sequence
  ENSG00000146592_20 (sequence is synthesized)
cacacagcctttcccatacctttttttttcttactataaaatattataagatccattgatgtccaaataataccaccaagcatctcttcacctctcctcctcttggtccacttgctaatg

SEQ ID NO: 401587 - DNA, 120 bp, Artificial Sequence
  ENSG00000146592_21 (sequence is synthesized)
cccagttttcttctccatttccactttttcttaggctccctatttactattcattttgacttccttctgttttatttttttccctttagcattgcatgtgaataagaaaataatgtttaa

SEQ ID NO: 401588 - DNA, 120 bp, Artificial Sequence
  ENSG00000146592_22 (sequence is synthesized)
agaaaaaaaaaaaaaagcaaacctccaaaacgtggacctaaccattgcttcacttacacttcacccacagctggagttcattcaactcttgcttttcacaaaatagtaaccaggagatgt

SEQ ID NO: 401589 - DNA, 120 bp, Artificial Sequence
  ENSG00000146592_23 (sequence is synthesized)
ttaatgtgcctgatttaatgtttttaataatcacagcaaatgaaaggtggtttagttataagtgaagcatggttgaataccagctggggagacactagggaagggagctttgtaagcctt

SEQ ID NO: 401590 - DNA, 120 bp, Artificial Sequence
  ENSG00000146592_24 (sequence is synthesized)
gattgcgaaagtccaaattttgatgtggggctataacatgacacccttggattgcgactggttttatacggcctgcctataacgttgaaaatccatgtactacataataattcagaaggg

SEQ ID NO: 401591 - DNA, 120 bp, Artificial Sequence
  ENSG00000146592_25 (sequence is synthesized)
ctctattcactacacagattacattgttcaatcatcagctgctaatagcctaagatttatttttttttttttcttaagcctatggaaccggctttgctgttctggggggtgaaaatagac

SEQ ID NO: 401592 - DNA, 120 bp, Artificial Sequence
  ENSG00000146592_26 (sequence is synthesized)
taactactggagaaacaaagagagaaagaaaacccagtgtttccataggggcacttttagccttcccacaacagttaagcactctttgactgctgaaggaaccccatggatgaggtgcag

SEQ ID NO: 401593 - DNA, 120 bp, Artificial Sequence
  ENSG00000146592_27 (sequence is synthesized)
tttttcttttttgagacagagtctcacctattgcccagactgaagtgcagtggtgcgatcatggatcactgcagcagcatcctccgagttcaagctatccttccacctccgcctcctgag

SEQ ID NO: 401594 - DNA, 120 bp, Artificial Sequence
  ENSG00000146592_28 (sequence is synthesized)
acctccgcctcctgagtagctgggaccacaggttcacataaccatgcctggctaatttatttttacttttattttaaaataaaagatgaggtctgtcttatgttgcccaggctggtctca

SEQ ID NO: 401595 - DNA, 120 bp, Artificial Sequence
  ENSG00000146592_29 (sequence is synthesized)
ataggtgtgagccactgcacccagcctacttcactcttctgaattattctgatttattttcaacaacttttgtgaacttgcccgtgatacaaagcagatagtccctgaaccacagtcgtg

SEQ ID NO: 401596 - DNA, 120 bp, Artificial Sequence
  ENSG00000146592_30 (sequence is synthesized)
tgatacaaagcagatagtccctgaaccacagtcgtgcctccttgaaacaagccattctactgtgctaatgttttaatatcacatctcacaaataacaggggtgaatgtttctctctagca

SEQ ID NO: 401597 - DNA, 89 bp, Artificial Sequence
  ENSG00000146592_31 (sequence is synthesized)
acatctcacaaataacaggggtgaatgtttctctctagcaatctaggcaggtgctggtgtttcatctccatttgaatgcttgacctctt

SEQ ID NO: 401598 - DNA, 120 bp, Artificial Sequence
  ENSG00000146592_32 (sequence is synthesized)
gtagcttttataagagtgcagaaaagggaaggatgtgtttttttctctcactatagtataagaatctattttggagaaaaaaagaaaatatgagggtctcgaagcatgatttttatataa

SEQ ID NO: 401599 - DNA, 120 bp, Artificial Sequence
  ENSG00000146592_33 (sequence is synthesized)
ctagtttcagttttatctaataacttactttttaaatcaatatttatcaacaatctttccttgtatgcagtgctttcaaaagatggttttgagtgtccagtgaaacttatgacttggata

SEQ ID NO: 401600 - DNA, 66 bp, Artificial Sequence
  ENSG00000146592_34 (sequence is synthesized)
agatggttttgagtgtccagtgaaacttatgacttggatatatggttgaagaatcgcaaatggaat

SEQ ID NO: 401601 - DNA, 120 bp, Artificial Sequence
  ENSG00000146592_35 (sequence is synthesized)
atagttgttgttttttaaattccaacagtaacagctgaatggtttaatctgactggcttcctaagaaatgtttaagactcagctttaaaaagaagttaacattcatatctctgttttgaa

SEQ ID NO: 401602 - DNA, 120 bp, Artificial Sequence
  ENSG00000146592_36 (sequence is synthesized)
atcaaaaatcatatttcaaaattctttcctaggaccatctatgtgtctcccctcccctccacaaaaaggagaaagagtgcattaaaatgtttagttgggttttttaatttttaattttta

SEQ ID NO: 401603 - DNA, 120 bp, Artificial Sequence
  ENSG00000146592_37 (sequence is synthesized)
tgttatgttttgctttgttttaagtaaacaaaaatttttctttctttactgcatgcatagcacttaataaaatggatttttaaaaaatccactagtaatatcagaatgtccagggagtga

SEQ ID NO: 401604 - DNA, 120 bp, Artificial Sequence
  ENSG00000146592_38 (sequence is synthesized)
ctgtcactacaatgatggtttagtttacttctgttccaccttttgattgaaatatttagttgttaggctgaaagcctcggcagttaagaacttgcctgagttttcttcgttcagcaactt

SEQ ID NO: 401605 - DNA, 120 bp, Artificial Sequence
  ENSG00000146592_39 (sequence is synthesized)
gacagtttgactgatgtgcattatatatagctcaattatgtctgttttttatgctaagtaggaaaaccaaccacacacattagcaaaccggcctcaacatataattagaataaactgtct

SEQ ID NO: 401606 - DNA, 120 bp, Artificial Sequence
  ENSG00000146592_40 (sequence is synthesized)
tcttgttctactcagggcctttaggtgtgttcattcacggtatggaaatacagtaaatgaaagattccaactagttgtcagtgcttcttgaaattccaaacagaaagatacattggtcaa

SEQ ID NO: 401607 - DNA, 120 bp, Artificial Sequence
  ENSG00000146592_41 (sequence is synthesized)
atccaacacttggcttatcaatattaagtcttttacctaaaggcccagccgtcaccagacaacagaataatcaatctgcctgaaaatccctcctccttgtcctacactttttgcctgttt

SEQ ID NO: 401608 - DNA, 120 bp, Artificial Sequence
  ENSG00000146592_42 (sequence is synthesized)
gggagaatatctttgtactccattctcctccctcagccagttactgggtcacccatccatgtgttcatgaatcaatcatcacggcctgcagagcacctgtcctaaggagggaaaatcctg

SEQ ID NO: 401609 - DNA, 120 bp, Artificial Sequence
  ENSG00000146592_43 (sequence is synthesized)
tcacactgcctctccccattcgtgtgtggttttcttgatcggtgagatctgtctctgaagtcactgccagcctccctgggaacgtctatagtgcctcccctgccttatgtgatgggagtt

SEQ ID NO: 401610 - DNA, 120 bp, Artificial Sequence
  ENSG00000146592_44 (sequence is synthesized)
aacaactcagataagtacacctgagagcatttctatcaggtaaactgtcacttaaatggaggtgtccacatcttaattgtttctccttgacacatttctcaatccacgaagccaggagag

SEQ ID NO: 401611 - DNA, 120 bp, Artificial Sequence
  ENSG00000146592_45 (sequence is synthesized)
gtagagtgaaaatcccagccatggatgaatgtactaatttgaaagccaagtgttaagtcggatgttttcccgttacactactactcagccctctcctgcggccacatcaacggatgcaag

SEQ ID NO: 401612 - DNA, 120 bp, Artificial Sequence
  ENSG00000146592_46 (sequence is synthesized)
tcacagtcttaacacagcctgtgggagacaagcagtttgtgtgctcacagtatatattatagtaattagggtgacttagagcaaatactcttcagatcctatgtagtcagtgaaacaaaa

SEQ ID NO: 401613 - DNA, 120 bp, Artificial Sequence
  ENSG00000146592_47 (sequence is synthesized)
tggagagcgtattctgatagaaggacgtcgacggtgaatgttctggtggttgttgcctgttaagtaaactttagtgtgtaagttgagtttgtcattaaaatcataaaccagctgcggtaa

SEQ ID NO: 401614 - DNA, 120 bp, Artificial Sequence
  ENSG00000146592_48 (sequence is synthesized)
cagacaagcctttggctggggagttttaagcctcggtaactgctataaaactagccatccagttaggatagaatgtgtttctttctggttaaaaaaaggaaaaaccatctaagaaaatat

SEQ ID NO: 401615 - DNA, 120 bp, Artificial Sequence
  ENSG00000146592_49 (sequence is synthesized)
atatgtatgtatgtgtgtatacagtggaattcaaaggaccaaagcaaaatttgaacaggaatctattaatttagaattttataagatatttattaataaatgttatttttaaacattcca

SEQ ID NO: 401616 - DNA, 120 bp, Artificial Sequence
  ENSG00000146592_50 (sequence is synthesized)
tttgaacagtattctgtaggatctacttgtttttaaagtgttagtccataataaactactatagttatgtgtattttcatttttcagggtttcaaatggctattctccatcatttggtgg

SEQ ID NO: 401617 - DNA, 120 bp, Artificial Sequence
  ENSG00000146592_51 (sequence is synthesized)
aaatgtttgcttagatctctgtgcatagacatttcaaggatttttattgctctgtgagttattttttaatcaacattctgaacagttttttttaaacatttatttctgtgtgttcatttt

SEQ ID NO: 401618 - DNA, 120 bp, Artificial Sequence
  ENSG00000146592_52 (sequence is synthesized)
taaagtaagctctttcatttaggaagcagagttcagctaaagggaatcagtaactctaactggaacagctttcttgtagaagtgtaaaaacagcttcatctctgcctctctccaccccac

SEQ ID NO: 401619 - DNA, 120 bp, Artificial Sequence
  ENSG00000146592_53 (sequence is synthesized)
cccaatttcctagaaagccttgcactattcagctcccttagtgctttttgtcccttcccgaacaatatgcagtagctttaagccattcaagctccattatgcagtatatctgagaaggga

SEQ ID NO: 401620 - DNA, 120 bp, Artificial Sequence
  ENSG00000146592_54 (sequence is synthesized)
aaggaaacaacccatttaaatttgaataaaaccgtgcctatgcgaacagtagcaatttagaatctcttttctgcttttaaaataatttatatttaaaaattgcactttagctttttgatc

SEQ ID NO: 401621 - DNA, 120 bp, Artificial Sequence
  ENSG00000146592_55 (sequence is synthesized)
cctttgtatttctcttattctctttctaacctcttctctgtcctcaaacttgcctttgctctcctttacaataccccccacccctcctccaaggctctgagcggcatcatttaaaatact

SEQ ID NO: 401622 - DNA, 120 bp, Artificial Sequence
  ENSG00000146592_56 (sequence is synthesized)
ttacagatatttgcaccaggtacatttatgtgcgtccattggtagcacagctgagacctgtgtctcacatcagcctaggtgaagcctactacaagaatgccaaggagaagagccagtaca

SEQ ID NO: 401623 - DNA, 120 bp, Artificial Sequence
  ENSG00000146592_57 (sequence is synthesized)
ctatatggtttatactctttatccctttattcatagcatgttttttaaaaatgttatattatgcaacagatgtgaggcagcagctaagctatacttaagaattttctctcaccttccaaa

SEQ ID NO: 401624 - DNA, 120 bp, Artificial Sequence
  ENSG00000146592_58 (sequence is synthesized)
ccaaagtgtcctgaataagccaggagacttattcttttgtgcaccctggtgcacatctgactgttgtcctagccatagactctctgaggccactgaaagaacagtggccctatcgatttc

SEQ ID NO: 401625 - DNA, 120 bp, Artificial Sequence
  ENSG00000146592_59 (sequence is synthesized)
attcctaggtctcaaaaatacaatgttgccttgtaacataattagggacagcacctctatttcacaattataatctaaggtaggataagacgacacagcagcaataaacttacaagtaaa

SEQ ID NO: 401626 - DNA, 120 bp, Artificial Sequence
  ENSG00000146592_60 (sequence is synthesized)
attcaataccaaaacaaacacaaagaaatttaaaaaacaaaaaacctagctcatcatgttgtgaaaatgaaaaagtgaatgtccattcaaaatattttactatttcttgtggagtttttc

SEQ ID NO: 401627 - DNA, 120 bp, Artificial Sequence
  ENSG00000146592_61 (sequence is synthesized)
agtgatgtaatgcttgtagccaaattgcttaaagagtgtttatatatttttttccttataaattgtctattttttaaaaaagctatttaaccacagctgaagtggggggtaaggccaaat

SEQ ID NO: 401628 - DNA, 120 bp, Artificial Sequence
  ENSG00000146592_62 (sequence is synthesized)
tgccaacacttgttaaaagattaatactcttaagtggcactctgatacctttccaacttgtcatcagaaaggaatcaataattaccaactgttgtatttagaccaacttacaatatctag

SEQ ID NO: 401629 - DNA, 120 bp, Artificial Sequence
  ENSG00000146592_63 (sequence is synthesized)
ctcattagaagccaggatctagaaagctccttctaagccatttaagatattcttacattgagcttcatattatagaactttataggattggatattttacaatagaataatttagcctca

SEQ ID NO: 401630 - DNA, 120 bp, Artificial Sequence
  ENSG00000146592_64 (sequence is synthesized)
ggactgagaatgtggaagctgaataaattagctttaaatacatcattaaaatcttatgcacaataagctcattagattctagttttctcctttagaataccaatgccacagacactacag

SEQ ID NO: 401631 - DNA, 120 bp, Artificial Sequence
  ENSG00000146592_65 (sequence is synthesized)
gagataatgaaaggtatcagttgtgttgagtggagggagtttaagagaaaggacccttcccaaccagcagccagtagaaaatacaacctactcacctttttcccttctaagttctgctaa

SEQ ID NO: 401632 - DNA, 120 bp, Artificial Sequence
  ENSG00000146592_66 (sequence is synthesized)
atcacatctgcctcatagagaaaggaatgttgcctttgagaactgtcttggagaacagataagcttgaaatgttctctctagagaggacatagggtttgggatcctctgaaaaggcccag

SEQ ID NO: 401633 - DNA, 120 bp, Artificial Sequence
  ENSG00000146592_67 (sequence is synthesized)
aaaaatagctcagttcaaatacaatgttctaggacaattggaatataaatattgtccaaaaatataattaaaagaaaaaagtttagcactgtgtaaagtaagtgttaactgaggaagtcc

SEQ ID NO: 401634 - DNA, 120 bp, Artificial Sequence
  ENSG00000146592_68 (sequence is synthesized)
caaaaaggtgctgtcactttaagttctggacttggggttctttgtatttgtaaacagcaaagcatttgtgtttgtttgtctatttgtaaagcaaccaccttccttattggaaggagaaaa

SEQ ID NO: 401635 - DNA, 120 bp, Artificial Sequence
  ENSG00000146592_69 (sequence is synthesized)
aaaggggtacatacatgtaaatacttgctgcagcatttaatatgtttaattttgtgttaagctttttgttgcatcgtgaacacatttattgttaccaatggacaatgagttcattaagac

SEQ ID NO: 401636 - DNA, 120 bp, Artificial Sequence
  ENSG00000146592_70 (sequence is synthesized)
tgttcaactaggtcagatttttacatctctttctagcaagaagagacaagattttgtgcatttgtacaaatgttaatatcactgcaattccaatataataaagcactcaaatgcaaataa

SEQ ID NO: 401637 - DNA, 120 bp, Artificial Sequence
  ENSG00000146592_71 (sequence is synthesized)
cactctaaatagaatgtattgtaatctttgctcagtccaacgtggtcccttcacccgggctccgctcttgccttctccacacttgtttgatttatgaggaatccaagatgaatttggagc

SEQ ID NO: 401638 - DNA, 120 bp, Artificial Sequence
  ENSG00000146592_72 (sequence is synthesized)
acactcattgacagtgatattggagatgacaacctctttcttccaccaccccaatgactgaaaaccctaaggcttatattataaggattctttttgtcctcccatttcagtgcactacaa

SEQ ID NO: 401639 - DNA, 120 bp, Artificial Sequence
  ENSG00000146592_73 (sequence is synthesized)
atgtaaatcacgttcaactttctccttgcaggttaaaattatgccctcatcttaggtggaatttgacgctggaagggaatttgacttgatctttgcatcccactcaggggaatgactaaa

SEQ ID NO: 401640 - DNA, 120 bp, Artificial Sequence
  ENSG00000146592_74 (sequence is synthesized)
ccagtggataaactggaagctatttcatgtgttttaggtcactaggatttaggaataatgagtacaatcttagcagggattattaagagttggtatttacttccacatatgtgaatgaat

SEQ ID NO: 401641 - DNA, 120 bp, Artificial Sequence
  ENSG00000146592_75 (sequence is synthesized)
agagagcaagtgagcgagagcccagccggagggagagccagagctaggcgcaaaagaagggccagcacattacatcatcgcttggcctggaatcaaatgggaaggatatgactcactcaa

SEQ ID NO: 401642 - DNA, 120 bp, Artificial Sequence
  ENSG00000146592_76 (sequence is synthesized)
gatctgatgaatccaaggagtggagcaagaggcagattttggacacggttatgagaatgacagaaactgcctaaagcatttatgctctggcattcgtccctgtttctggaggtccagtaa

SEQ ID NO: 401643 - DNA, 120 bp, Artificial Sequence
  ENSG00000146592_77 (sequence is synthesized)
gtggtcccttcacccgggctccgctcttgccttctccacacttgtttgagggaagtccggccccgagtgctggtagactgtggaattcggctgtgtcctgaggccaccctagagaccccg

SEQ ID NO: 401644 - DNA, 120 bp, Artificial Sequence
  ENSG00000146592_78 (sequence is synthesized)
gcgtgagtgccggagcgctcggtggccgccgcgccgcgcgcctggagggatgctaacgtggagccggcgccgagtccgcccggcgtgcgtgcgtgtgtgggagcgcgcgagtcccctgac

SEQ ID NO: 401645 - DNA, 120 bp, Artificial Sequence
  ENSG00000146592_79 (sequence is synthesized)
tgacgcggggaccagttatgaatcgggggtgtgtgtttgcctccagagacctggcaaggtgcggagccctccagaagtgcggtcaagcggcagcggagacggcgagccaggaacctcccc

SEQ ID NO: 401646 - DNA, 120 bp, Artificial Sequence
  ENSG00000146592_80 (sequence is synthesized)
ccgcgtccccagcttcccagcgtggcggcggaacccccggagaaagtttgcaaacttccagcgggcgcggcgaggacgccgggtcacctagggggcgggtgggcgcgcgcgcagggggct

SEQ ID NO: 401647 - DNA, 120 bp, Artificial Sequence
  ENSG00000146592_81 (sequence is synthesized)
ggcgcgcgcccggggaggggaggtcgccctcggagggcgcttggctttcgctccaggcgctccgggctggagagcggcgaggctccgtccgctccagtccactcctccggccgcctcctg

SEQ ID NO: 401648 - DNA, 120 bp, Artificial Sequence
  ENSG00000146592_82 (sequence is synthesized)
cctccgctgctttcttgctggcatcgttacctcttcccggccgctgccccaaatgacagctccggctcgagctttggcggcgcccaggcaattcccaagacctggcggcggagtctcccc

SEQ ID NO: 401649 - DNA, 120 bp, Artificial Sequence
  ENSG00000146592_83 (sequence is synthesized)
ctgcggcagattctcggcagaatcacttgaacttttcacgaagttcttagaggggcaagatgcgaaggaaggaaccaaggagatgttttctctcagcagctgcatcccgcttcttctttg

SEQ ID NO: 401650 - DNA, 120 bp, Artificial Sequence
  ENSG00000146592_84 (sequence is synthesized)
ccatagatttatttttaaggggcgtctggtagataaagccctagaccttgtccacactctcacccccatccccaactttccctggaccggtgccgcccccacttgatgcttgctcaaggc

SEQ ID NO: 401651 - DNA, 120 bp, Artificial Sequence
  ENSG00000146592_85 (sequence is synthesized)
cggggactggagcgggctacttgtatatttcgttgtcagtctgcagaatgtgtttgatttttatttttccctccttctctgacatgtgtcaaggaataaagactggatacaggtccatta

SEQ ID NO: 401652 - DNA, 120 bp, Artificial Sequence
  ENSG00000146592_86 (sequence is synthesized)
ttcagaagccaaaatggtaagtaacagttataatcaccctttcattattctgtgactttttcttttgaattttactctgactccaaaaccttagttcagctaggtagagggctccatctt

SEQ ID NO: 401653 - DNA, 120 bp, Artificial Sequence
  ENSG00000146592_87 (sequence is synthesized)
tgttttggtgaatgaaaggcagtgcagagactgcctctctttttgaggatgtttgttacagagccttggtgtcagataatcatgtaacaagcactggattggcaagtggtattaatgaaa

SEQ ID NO: 401654 - DNA, 120 bp, Artificial Sequence
  ENSG00000146592_88 (sequence is synthesized)
ggaacatttaggagttttggtagatccatacaagttggggtaggatatacccaagcgtgtatatatttgctcagcatgtgaaataataaaaataatacaaaactactcattcttcaaggt

SEQ ID NO: 401655 - DNA, 120 bp, Artificial Sequence
  ENSG00000146592_89 (sequence is synthesized)
cttcagaatgaagtgtctatgttgaaaaatgaggtggcccagctgaaacagttgttgttaacacataaagactgcccaataacagccatgcagaaagaatcacaaggatatctaaattga

SEQ ID NO: 401656 - DNA, 120 bp, Artificial Sequence
  ENSG00000146592_90 (sequence is synthesized)
cagcttcccagcgtggcggcggaacccccggagaaagaataaagactggatacaggtccattacgtcattctgcaggccaatttatgaggaatccaagatgaatttggagcaggagaggc

SEQ ID NO: 401657 - DNA, 120 bp, Artificial Sequence
  ENSG00000146592_91 (sequence is synthesized)
ctttcaagagcactaggcagtgacgggaagcggagtgatataacggtagcctgagaaggaaacagtttttttaaaaattaaaggatagccgagctggagtttgtcaagaacaagaaacca

SEQ ID NO: 401658 - DNA, 120 bp, Artificial Sequence
  ENSG00000146592_92 (sequence is synthesized)
ggatgcatttgcaatcttacaaagagcttctggtgactcagaaaatcccatgcgtccattttccaaattggatgttatgtgattaaaaataaatgtaaatcacacagagactttggtgtg

SEQ ID NO: 401659 - DNA, 120 bp, Artificial Sequence
  ENSG00000146592_93 (sequence is synthesized)
cttccgaaaattcccatgtcaggagttggcatgtatcaaccatgtgtaggtgtgtgtgtgctcactaatactgtgtgagcatttaggaccttatttgagaagttctttcctggaagaaga

SEQ ID NO: 401660 - DNA, 120 bp, Artificial Sequence
  ENSG00000146592_94 (sequence is synthesized)
gcccatgacttcatgactgcagcagtggggaaagggcacaccgccctgatggatgtctcagtgctgcatgtggctgatttacaaggcagtcctctgatctgagtcactcttacttcctct

SEQ ID NO: 401661 - DNA, 120 bp, Artificial Sequence
  ENSG00000146592_95 (sequence is synthesized)
gctgcaaacccattgagtggcacccagcggttggagcgtctacttgcttaaagtgacagttaaaagaagagagtgggttgaatacaaataacgtggatgaaattattattgaacaagaaa

SEQ ID NO: 401662 - DNA, 120 bp, Artificial Sequence
  ENSG00000146618_0 (sequence is synthesized)
accagcaacctcgcccctccctgcggaaaaccgatgagaggcagggccaagccgaagcgatggcggcctatccggagagctgcgtggacactacggtgctggacttcgtcgcagacctgt

SEQ ID NO: 401663 - DNA, 120 bp, Artificial Sequence
  ENSG00000146618_1 (sequence is synthesized)
ccctggcctccccgagacgccctctcctctgcgacttcgcacccggggtctccttgggggacccagcccttgcgctccgagagggaagacccaggaggatggcgcggtttgaagaggggg

SEQ ID NO: 401664 - DNA, 120 bp, Artificial Sequence
  ENSG00000146618_2 (sequence is synthesized)
agaagaggaggaggaagaggagcgcggaagaggtgtctccctattaggccgccccaagaggaaaagggtgatcacctacgcccagcgccaggccgccaacatccgcgaaaggaagcggat

SEQ ID NO: 401665 - DNA, 120 bp, Artificial Sequence
  ENSG00000146618_3 (sequence is synthesized)
gttcaacctcaacgaggcctttgaccagctgcggaggaaggtgcccacgtttgcttacgagaaaaggctgtcccggatcgagaccctccgcctggccatcgtctatatctccttcatgac

SEQ ID NO: 401666 - DNA, 120 bp, Artificial Sequence
  ENSG00000146618_4 (sequence is synthesized)
cgagctcttggagagctgtgagaagaaggaaagcggctgagcctggtgtggagagtctgcccttcctcgtctggtagtgctggggtgtgtcaggaccgggcactgggtgaggctaaaggg

SEQ ID NO: 401667 - DNA, 80 bp, Artificial Sequence
  ENSG00000146648_0 (sequence is synthesized)
gcacggtgtgagcgcccgacgcggccgaggcggccggagtcccgagctagccccggcggccgccgccgcccagaccggac

SEQ ID NO: 401668 - DNA, 120 bp, Artificial Sequence
  ENSG00000146648_1 (sequence is synthesized)
cccagaccggacgacaggccacctcgtcggcgtccgcccgagtccccgcctcgccgccaacgccacaaccaccgcgcacggccccctgactccgtccagtattgatcgggagagccggag

SEQ ID NO: 401669 - DNA, 120 bp, Artificial Sequence
  ENSG00000146648_2 (sequence is synthesized)
cgagctcttcggggagcagcgatgcgaccctccgggacggccggggcagcgctcctggcgctgctggctgcgctctgcccggcgagtcgggctctggaggaaaagaaagtttgccaaggc

SEQ ID NO: 401670 - DNA, 120 bp, Artificial Sequence
  ENSG00000146648_3 (sequence is synthesized)
acgagtaacaagctcacgcagttgggcacttttgaagatcattttctcagcctccagaggatgttcaataactgtgaggtggtccttgggaatttggaaattacctatgtgcagaggaat

SEQ ID NO: 401671 - DNA, 120 bp, Artificial Sequence
  ENSG00000146648_4 (sequence is synthesized)
tatgatctttccttcttaaagaccatccaggaggtggctggttatgtcctcattgccctcaacacagtggagcgaattcctttggaaaacctgcagatcatcagaggaaatatgtactac

SEQ ID NO: 401672 - DNA, 120 bp, Artificial Sequence
  ENSG00000146648_5 (sequence is synthesized)
gaaaattcctatgccttagcagtcttatctaactatgatgcaaataaaaccggactgaaggagctgcccatgagaaatttacaggaaatcctgcatggcgccgtgcggttcagcaacaac

SEQ ID NO: 401673 - DNA, 120 bp, Artificial Sequence
  ENSG00000146648_6 (sequence is synthesized)
cctgccctgtgcaacgtggagagcatccagtggcgggacatagtcagcagtgactttctcagcaacatgtcgatggacttccagaaccacctgggcagctgccaaaagtgtgatccaagc

SEQ ID NO: 401674 - DNA, 120 bp, Artificial Sequence
  ENSG00000146648_7 (sequence is synthesized)
tgtcccaatgggagctgctggggtgcaggagaggagaactgccagaaactgaccaaaatcatctgtgcccagcagtgctccgggcgctgccgtggcaagtcccccagtgactgctgccac

SEQ ID NO: 401675 - DNA, 120 bp, Artificial Sequence
  ENSG00000146648_8 (sequence is synthesized)
aaccagtgtgctgcaggctgcacaggcccccgggagagcgactgcctggtctgccgcaaattccgagacgaagccacgtgcaaggacacctgccccccactcatgctctacaaccccacc

SEQ ID NO: 401676 - DNA, 120 bp, Artificial Sequence
  ENSG00000146648_9 (sequence is synthesized)
acgtaccagatggatgtgaaccccgagggcaaatacagctttggtgccacctgcgtgaagaagtgtccccgtaattatgtggtgacagatcacggctcgtgcgtccgagcctgtggggcc

SEQ ID NO: 401677 - DNA, 120 bp, Artificial Sequence
  ENSG00000146648_10 (sequence is synthesized)
gacagctatgagatggaggaagacggcgtccgcaagtgtaagaagtgcgaagggccttgccgcaaagtgtgtaacggaataggtattggtgaatttaaagactcactctccataaatgct

SEQ ID NO: 401678 - DNA, 120 bp, Artificial Sequence
  ENSG00000146648_11 (sequence is synthesized)
acgaatattaaacacttcaaaaactgcacctccatcagtggcgatctccacatcctgccggtggcatttaggggtgactccttcacacatactcctcctctggatccacaggaactggat

SEQ ID NO: 401679 - DNA, 120 bp, Artificial Sequence
  ENSG00000146648_12 (sequence is synthesized)
attctgaaaaccgtaaaggaaatcacagggtttttgctgattcaggcttggcctgaaaacaggacggacctccatgcctttgagaacctagaaatcatacgcggcaggaccaagcaacat

SEQ ID NO: 401680 - DNA, 120 bp, Artificial Sequence
  ENSG00000146648_13 (sequence is synthesized)
ggtcagttttctcttgcagtcgtcagcctgaacataacatccttgggattacgctccctcaaggagataagtgatggagatgtgataatttcaggaaacaaaaatttgtgctatgcaaat

SEQ ID NO: 401681 - DNA, 120 bp, Artificial Sequence
  ENSG00000146648_14 (sequence is synthesized)
acaataaactggaaaaaactgtttgggacctccggtcagaaaaccaaaattataagcaacagaggtgaaaacagctgcaaggccacaggccaggtctgccatgccttgtgctcccccgag

SEQ ID NO: 401682 - DNA, 120 bp, Artificial Sequence
  ENSG00000146648_15 (sequence is synthesized)
ggctgctggggcccggagcccagggactgcgtctcttgccggaatgtcagccgaggcagggaatgcgtggacaagtgcaaccttctggagggtgagccaagggagtttgtggagaactct

SEQ ID NO: 401683 - DNA, 120 bp, Artificial Sequence
  ENSG00000146648_16 (sequence is synthesized)
gagtgcatacagtgccacccagagtgcctgcctcaggccatgaacatcacctgcacaggacggggaccagacaactgtatccagtgtgcccactacattgacggcccccactgcgtcaag

SEQ ID NO: 401684 - DNA, 120 bp, Artificial Sequence
  ENSG00000146648_17 (sequence is synthesized)
acctgcccggcaggagtcatgggagaaaacaacaccctggtctggaagtacgcagacgccggccatgtgtgccacctgtgccatccaaactgcacctacggatgcactgggccaggtctt

SEQ ID NO: 401685 - DNA, 120 bp, Artificial Sequence
  ENSG00000146648_18 (sequence is synthesized)
gaaggctgtccaacgaatgggcctaagatcccgtccatcgccactgggatggtgggggccctcctcttgctgctggtggtggccctggggatcggcctcttcatgcgaaggcgccacatc

SEQ ID NO: 401686 - DNA, 120 bp, Artificial Sequence
  ENSG00000146648_19 (sequence is synthesized)
gttcggaagcgcacgctgcggaggctgctgcaggagagggagcttgtggagcctcttacacccagtggagaagctcccaaccaagctctcttgaggatcttgaaggaaactgaattcaaa

SEQ ID NO: 401687 - DNA, 120 bp, Artificial Sequence
  ENSG00000146648_20 (sequence is synthesized)
aagatcaaagtgctgggctccggtgcgttcggcacggtgtataagggactctggatcccagaaggtgagaaagttaaaattcccgtcgctatcaaggaattaagagaagcaacatctccg

SEQ ID NO: 401688 - DNA, 120 bp, Artificial Sequence
  ENSG00000146648_21 (sequence is synthesized)
aaagccaacaaggaaatcctcgatgaagcctacgtgatggccagcgtggacaacccccacgtgtgccgcctgctgggcatctgcctcacctccaccgtgcagctcatcacgcagctcatg

SEQ ID NO: 401689 - DNA, 120 bp, Artificial Sequence
  ENSG00000146648_22 (sequence is synthesized)
cccttcggctgcctcctggactatgtccgggaacacaaagacaatattggctcccagtacctgctcaactggtgtgtgcagatcgcaaagggcatgaactacttggaggaccgtcgcttg

SEQ ID NO: 401690 - DNA, 120 bp, Artificial Sequence
  ENSG00000146648_23 (sequence is synthesized)
gtgcaccgcgacctggcagccaggaacgtactggtgaaaacaccgcagcatgtcaagatcacagattttgggctggccaaactgctgggtgcggaagagaaagaataccatgcagaagga

SEQ ID NO: 401691 - DNA, 120 bp, Artificial Sequence
  ENSG00000146648_24 (sequence is synthesized)
ggcaaagtgcctatcaagtggatggcattggaatcaattttacacagaatctatacccaccagagtgatgtctggagctacggggtgactgtttgggagttgatgacctttggatccaag

SEQ ID NO: 401692 - DNA, 120 bp, Artificial Sequence
  ENSG00000146648_25 (sequence is synthesized)
ccatatgacggaatccctgccagcgagatctcctccatcctggagaaaggagaacgcctccctcagccacccatatgtaccatcgatgtctacatgatcatggtcaagtgctggatgata

SEQ ID NO: 401693 - DNA, 120 bp, Artificial Sequence
  ENSG00000146648_26 (sequence is synthesized)
gacgcagatagtcgcccaaagttccgtgagttgatcatcgaattctccaaaatggcccgagacccccagcgctaccttgtcattcagggggatgaaagaatgcatttgccaagtcctaca

SEQ ID NO: 401694 - DNA, 120 bp, Artificial Sequence
  ENSG00000146648_27 (sequence is synthesized)
gactccaacttctaccgtgccctgatggatgaagaagacatggacgacgtggtggatgccgacgagtacctcatcccacagcagggcttcttcagcagcccctccacgtcacggactccc

SEQ ID NO: 401695 - DNA, 120 bp, Artificial Sequence
  ENSG00000146648_28 (sequence is synthesized)
ctcctgagctctctgagtgcaaccagcaacaattccaccgtggcttgcattgatagaaatgggctgcaaagctgtcccatcaaggaagacagcttcttgcagcgatacagctcagacccc

SEQ ID NO: 401696 - DNA, 120 bp, Artificial Sequence
  ENSG00000146648_29 (sequence is synthesized)
acaggcgccttgactgaggacagcatagacgacaccttcctcccagtgcctgaatacataaaccagtccgttcccaaaaggcccgctggctctgtgcagaatcctgtctatcacaatcag

SEQ ID NO: 401697 - DNA, 120 bp, Artificial Sequence
  ENSG00000146648_30 (sequence is synthesized)
cctctgaaccccgcgcccagcagagacccacactaccaggacccccacagcactgcagtgggcaaccccgagtatctcaacactgtccagcccacctgtgtcaacagcacattcgacagc

SEQ ID NO: 401698 - DNA, 120 bp, Artificial Sequence
  ENSG00000146648_31 (sequence is synthesized)
cctgcccactgggcccagaaaggcagccaccaaattagcctggacaaccctgactaccagcaggacttctttcccaaggaagccaagccaaatggcatctttaagggctccacagctgaa

SEQ ID NO: 401699 - DNA, 120 bp, Artificial Sequence
  ENSG00000146648_32 (sequence is synthesized)
aatgcagaatacctaagggtcgcgccacaaagcagtgaatttattggagcatgaccacggaggatagtatgagccctaaaaatccagactctttcgatacccaggaccaagccacagcag

SEQ ID NO: 401700 - DNA, 120 bp, Artificial Sequence
  ENSG00000146648_33 (sequence is synthesized)
gtcctccatcccaacagccatgcccgcattagctcttagacccacagactggttttgcaacgtttacaccgactagccaggaagtacttccacctcgggcacattttgggaagttgcatt

SEQ ID NO: 401701 - DNA, 120 bp, Artificial Sequence
  ENSG00000146648_34 (sequence is synthesized)
cctttgtcttcaaactgtgaagcatttacagaaacgcatccagcaagaatattgtccctttgagcagaaatttatctttcaaagaggtatatttgaaaaaaaaaaaaagtatatgtgagg

SEQ ID NO: 401702 - DNA, 120 bp, Artificial Sequence
  ENSG00000146648_35 (sequence is synthesized)
atttttattgattggggatcttggagtttttcattgtcgctattgatttttacttcaatgggctcttccaacaaggaagaagcttgctggtagcacttgctaccctgagttcatccaggc

SEQ ID NO: 401703 - DNA, 120 bp, Artificial Sequence
  ENSG00000146648_36 (sequence is synthesized)
ccaactgtgagcaaggagcacaagccacaagtcttccagaggatgcttgattccagtggttctgcttcaaggcttccactgcaaaacactaaagatccaagaaggccttcatggccccag

SEQ ID NO: 401704 - DNA, 120 bp, Artificial Sequence
  ENSG00000146648_37 (sequence is synthesized)
caggccggatcggtactgtatcaagtcatggcaggtacagtaggataagccactctgtcccttcctgggcaaagaagaaacggaggggatggaattcttccttagacttacttttgtaaa

SEQ ID NO: 401705 - DNA, 120 bp, Artificial Sequence
  ENSG00000146648_38 (sequence is synthesized)
aatgtccccacggtacttactccccactgatggaccagtggtttccagtcatgagcgttagactgacttgtttgtcttccattccattgttttgaaactcagtatgctgcccctgtcttg

SEQ ID NO: 401706 - DNA, 120 bp, Artificial Sequence
  ENSG00000146648_39 (sequence is synthesized)
ctgtcatgaaatcagcaagagaggatgacacatcaaataataactcggattccagcccacattggattcatcagcatttggaccaatagcccacagctgagaatgtggaatacctaagga

SEQ ID NO: 401707 - DNA, 120 bp, Artificial Sequence
  ENSG00000146648_40 (sequence is synthesized)
tagcaccgcttttgttctcgcaaaaacgtatctcctaatttgaggctcagatgaaatgcatcaggtcctttggggcatagatcagaagactacaaaaatgaagctgctctgaaatctcct

SEQ ID NO: 401708 - DNA, 120 bp, Artificial Sequence
  ENSG00000146648_41 (sequence is synthesized)
acttcacttcaaaagctttttactcaaagagtatatgttccctccaggtcagctgcccccaaaccccctccttacgctttgtcacacaaaaagtgtctctgccttgagtcatctattcaa

SEQ ID NO: 401709 - DNA, 120 bp, Artificial Sequence
  ENSG00000146648_42 (sequence is synthesized)
gcacttacagctctggccacaacagggcattttacaggtgcgaatgacagtagcattatgagtagtgtggaattcaggtagtaaatatgaaactagggtttgaaattgataatgctttca

SEQ ID NO: 401710 - DNA, 120 bp, Artificial Sequence
  ENSG00000146648_43 (sequence is synthesized)
caacatttgcagatgttttagaaggaaaaaagttccttcctaaaataatttctctacaattggaagattggaagattcagctagttaggagcccaccttttttcctaatctgtgtgtgcc

SEQ ID NO: 401711 - DNA, 120 bp, Artificial Sequence
  ENSG00000146648_44 (sequence is synthesized)
ctgtaacctgactggttaacagcagtcctttgtaaacagtgttttaaactctcctagtcaatatccaccccatccaatttatcaaggaagaaatggttcagaaaatattttcagcctaca

SEQ ID NO: 401712 - DNA, 120 bp, Artificial Sequence
  ENSG00000146648_45 (sequence is synthesized)
gttatgttcagtcacacacacatacaaaatgttccttttgcttttaaagtaatttttgactcccagatcagtcagagcccctacagcattgttaagaaagtatttgatttttgtctcaat

SEQ ID NO: 401713 - DNA, 120 bp, Artificial Sequence
  ENSG00000146648_46 (sequence is synthesized)
gaaaataaaactatattcatttccactctattatgctctcaaatacccctaagcatctatactagcctggtatgggtatgaaagatacaaagataaataaaacatagtccctgattctaa

SEQ ID NO: 401714 - DNA, 120 bp, Artificial Sequence
  ENSG00000146648_47 (sequence is synthesized)
gaaattcacaatttagcaaaggaaatggactcatagatgctaaccttaaaacaacgtgacaaatgccagacaggacccatcagccaggcactgtgagagcacagagcagggaggttgggt

SEQ ID NO: 401715 - DNA, 120 bp, Artificial Sequence
  ENSG00000146648_48 (sequence is synthesized)
cctgcctgaggagacctggaagggaggcctcacaggaggatgaccaggtctcagtcagcggggaggtggaaagtgcaggtgcatcaggggcaccctgaccgaggaaacagctgccagagg

SEQ ID NO: 401716 - DNA, 120 bp, Artificial Sequence
  ENSG00000146648_49 (sequence is synthesized)
cctccactgctaaagtccacataaggctgaggtcagtcaccctaaacaacctgctccctctaagccaggggatgagcttggagcatcccacaagttccctaaaagttgcagcccccaggg

SEQ ID NO: 401717 - DNA, 120 bp, Artificial Sequence
  ENSG00000146648_50 (sequence is synthesized)
ggattttgagctatcatctctgcacatgcttagtgagaagactacacaacatttctaagaatctgagattttatattgtcagttaaccactttcattattcattcacctcaggacatgca

SEQ ID NO: 401718 - DNA, 120 bp, Artificial Sequence
  ENSG00000146648_51 (sequence is synthesized)
gaaatatttcagtcagaactgggaaacagaaggacctacattctgctgtcacttatgtgtcaagaagcagatgatcgatgaggcaggtcagttgtaagtgagtcacattgtagcattaaa

SEQ ID NO: 401719 - DNA, 120 bp, Artificial Sequence
  ENSG00000146648_52 (sequence is synthesized)
ttctagtatttttgtagtttgaaacagtaacttaataaaagagcaaaagctattctagctttcttcttcatattttaattttccaccataaagtttagttgctaaattctattaatttta

SEQ ID NO: 401720 - DNA, 120 bp, Artificial Sequence
  ENSG00000146648_53 (sequence is synthesized)
agattgtgcttcccaaaatagttctcacttcatctgtccagggaggcacagttctgtctggtagaagccgcaaagcccttagcctcttcacggatctggcgactgtgatgggcaggtcag

SEQ ID NO: 401721 - DNA, 120 bp, Artificial Sequence
  ENSG00000146648_54 (sequence is synthesized)
gagaggagctgcccaaagtcccatgattttcacctaacagccctgatcagtcagtactcaaagcttggactccatccctgaaggtcttcctgattgatagcctggccttaataccctaca

SEQ ID NO: 401722 - DNA, 120 bp, Artificial Sequence
  ENSG00000146648_55 (sequence is synthesized)
gaaagcctgtccattggctgtttcttcctcagtcagttcctggaagaccttaccccatgaccccagcttcagatgtggtctttggaaacagaggtcgaaggaaagtaaggagctgagagc

SEQ ID NO: 401723 - DNA, 120 bp, Artificial Sequence
  ENSG00000146648_56 (sequence is synthesized)
tcacattcataggtgccgccagccttcgtgcatcttcttgcatcatctctaaggagctcctctaattacaccatgcccgtcaccccatgagggatcagagaagggatgagtcttctaaac

SEQ ID NO: 401724 - DNA, 120 bp, Artificial Sequence
  ENSG00000146648_57 (sequence is synthesized)
tctatattcgctgtgagtccaggttgtaagggggagcactgtggatgcatcctattgcactccagctgatgacaccaaagcttaggtgtttgctgaaagttcttgatgttgtgacttacc

SEQ ID NO: 401725 - DNA, 120 bp, Artificial Sequence
  ENSG00000146648_58 (sequence is synthesized)
acccctgcctcacaactgcagacataaggggactatggattgcttagcaggaaaggcactggttctcaagggcggctgcccttgggaatcttctggtcccaaccagaaagactgtggctt

SEQ ID NO: 401726 - DNA, 120 bp, Artificial Sequence
  ENSG00000146648_59 (sequence is synthesized)
gattttctcaggtgcagcccagccgtagggccttttcagagcaccccctggttattgcaacattcatcaaagtttctagaacctctggcctaaaggaagggcctggtgggatctacttgg

SEQ ID NO: 401727 - DNA, 120 bp, Artificial Sequence
  ENSG00000146648_60 (sequence is synthesized)
cactcgctggggggccaccccccagtgccactctcactaggcctctgattgcacttgtgtaggatgaagctggtgggtgatgggaactcagcacctcccctcaggcagaaaagaatcatc

SEQ ID NO: 401728 - DNA, 120 bp, Artificial Sequence
  ENSG00000146648_61 (sequence is synthesized)
tgtggagcttcaaaagaaggggcctggagtctctgcagaccaattcaacccaaatctcgggggctctttcatgattctaatgggcaaccagggttgaaacccttatttctagggtcttca

SEQ ID NO: 401729 - DNA, 120 bp, Artificial Sequence
  ENSG00000146648_62 (sequence is synthesized)
gttgtacaagactgtgggtctgtaccagagcccccgtcagagtagaataaaaggctgggtagggtagagattcccatgtgcagtggagagaacaatctgcagtcactgataagcctgaga

SEQ ID NO: 401730 - DNA, 120 bp, Artificial Sequence
  ENSG00000146648_63 (sequence is synthesized)
cttggctcatttcaaaagcgttcaattcatcctcaccagcagttcagctggaaaggggcaaatacccccacctgagctttgaaaacgccctgggaccctctgcattctctaagtaagtta

SEQ ID NO: 401731 - DNA, 120 bp, Artificial Sequence
  ENSG00000146648_64 (sequence is synthesized)
tagaaaccagtctcttccctcctttgtgagtgagctgctattccacgtaggcaacacctgttgaaattgccctcaatgtctactctgcatttctttcttgtgataagcacacacttttat

SEQ ID NO: 401732 - DNA, 120 bp, Artificial Sequence
  ENSG00000146648_65 (sequence is synthesized)
tgcaacataatgatctgctcacatttccttgcctgggggctgtaaaaccttacagaacagaaatccttgcctctttcaccagccacacctgccataccaggggtacagctttgtactatt

SEQ ID NO: 401733 - DNA, 120 bp, Artificial Sequence
  ENSG00000146648_66 (sequence is synthesized)
gaagacacagacaggatttttaaatgtaaatctatttttgtaactttgttgcgggatatagttctctttatgtagcactgaactttgtacaatatatttttagaaactcatttttctact

SEQ ID NO: 401734 - DNA, 120 bp, Artificial Sequence
  ENSG00000146648_67 (sequence is synthesized)
aaaacaaacacagtttactttagagagactgcaatagaatcaaaatttgaaactgaaatctttgtttaaaagggttaagttgaggcaagaggaaagccctttctctctcttataaaaagg

SEQ ID NO: 401735 - DNA, 120 bp, Artificial Sequence
  ENSG00000146648_68 (sequence is synthesized)
cacaacctcattggggagctaagctaggtcattgtcatggtgaagaagagaagcatcgtttttatatttaggaaattttaaaagatgatggaaagcacatttagcttggtctgaggcagg

SEQ ID NO: 401736 - DNA, 120 bp, Artificial Sequence
  ENSG00000146648_69 (sequence is synthesized)
ttctgttggggcagtgttaatggaaagggctcactgttgttactactagaaaaatccagttgcatgccatactctcatcatctgccagtgtaaccctgtacatgtaagaaaagcaataac

SEQ ID NO: 401737 - DNA, 120 bp, Artificial Sequence
  ENSG00000146648_70 (sequence is synthesized)
atagcactttgttggtttatatatataatgtgacttcaatgcaaattttatttttatatttacaattgatatgcatttaccagtataaactagacatgtctggagagcctaataatgttc

SEQ ID NO: 401738 - DNA, 120 bp, Artificial Sequence
  ENSG00000146648_71 (sequence is synthesized)
agcacactttggttagttcaccaacagtcttaccaagcctgggcccagccaccctagagaagttattcagccctggctgcagtgacatcacctgaggagcttttaaaagcttgaagccca

SEQ ID NO: 401739 - DNA, 120 bp, Artificial Sequence
  ENSG00000146648_72 (sequence is synthesized)
gctacacctcagaccgattaaacgcaaatctctggggctgaaacccaagcattcgtagtttttaaagctcctgaggtcattccaatgtgcggccaaagttgagaactactggcctaggga

SEQ ID NO: 401740 - DNA, 120 bp, Artificial Sequence
  ENSG00000146648_73 (sequence is synthesized)
ttagccacaaggacatggacttggaggcaaattctgcaggtgtatgtgattctcaggcctagagagctaagacacaaagacctccacatctgtcgctgagagtcaagaacctgaacagag

SEQ ID NO: 401741 - DNA, 120 bp, Artificial Sequence
  ENSG00000146648_74 (sequence is synthesized)
tttccatgaaggttctccaagcactagaagggagagtgtctaaacaatggttgaaaagcaaaggaaatataaaacagacacctctttccatttcctaaggtttctctctttattaagggt

SEQ ID NO: 401742 - DNA, 120 bp, Artificial Sequence
  ENSG00000146648_75 (sequence is synthesized)
ggactagtaataaaatataatattcttgctgcttatgcagctgacattgttgccctccctaaagcaaccaagtagcctttatttcccacagtgaaagaaaacgctggcctatcagttaca

SEQ ID NO: 401743 - DNA, 120 bp, Artificial Sequence
  ENSG00000146648_76 (sequence is synthesized)
ttacaaaaggcagatttcaagaggattgagtaagtagttggatggctttcataaaaacaagaattcaagaagaggattcatgctttaagaaacatttgttatacattcctcacaaattat

SEQ ID NO: 401744 - DNA, 120 bp, Artificial Sequence
  ENSG00000146648_77 (sequence is synthesized)
acctgggataaaaactatgtagcaggcagtgtgttttccttccatgtctctctgcactacctgcagtgtgtcctctgaggctgcaagtctgtcctatctgaattcccagcagaagcacta

SEQ ID NO: 401745 - DNA, 120 bp, Artificial Sequence
  ENSG00000146648_78 (sequence is synthesized)
agaagctccaccctatcacctagcagataaaactatggggaaaacttaaatctgtgcatacatttctggatgcatttacttatctttaaaaaaaaaggaatcctatgacctgatttggcc

SEQ ID NO: 401746 - DNA, 120 bp, Artificial Sequence
  ENSG00000146648_79 (sequence is synthesized)
acaaaaataatcttgctgtacaatacaatctcttggaaattaagagatcctatggatttgatgactggtattagaggtgacaatgtaaccgattaacaacagacagcaataacttcgttt

SEQ ID NO: 401747 - DNA, 120 bp, Artificial Sequence
  ENSG00000146648_80 (sequence is synthesized)
tagaaacattcaagcaatagctttatagcttcaacatatggtacgttttaaccttgaaagttttgcaatgatgaaagcagtatttgtacaaatgaaaagcagaattctcttttatatggt

SEQ ID NO: 401748 - DNA, 120 bp, Artificial Sequence
  ENSG00000146648_81 (sequence is synthesized)
ttatactgttgatcagaaatgttgattgtgcattgagtattaaaaaattagatgtatattattcattgttctttactcctgagtaccttataataataataatgtattctttgttaacaa

SEQ ID NO: 401749 - DNA, 120 bp, Artificial Sequence
  ENSG00000146648_82 (sequence is synthesized)
catagacgacaccttcctcccagtgcctggtgagtggcttgtctggaaacagtcctgctcctcaacctcctcgacccactcagcagcagccagtctccagtgtccaagccaggtgctccc

SEQ ID NO: 401750 - DNA, 120 bp, Artificial Sequence
  ENSG00000146648_83 (sequence is synthesized)
tccagcatctccagagggggaaacagtggcagatttgcagacacagtgaagggcgtaaggagcagataaacacatgaccgagcctgcacaagctctttgttgtgtctggttgtttgctgt

SEQ ID NO: 401751 - DNA, 120 bp, Artificial Sequence
  ENSG00000146648_84 (sequence is synthesized)
acctctgttgtaagaatgaatctgcaaaatttctagcttatgaagcaaatcacggacatacacatctgtgtgtgtgagtgttcatgatgtgtgtacatctgtgtatgtgtgtgtgtgtat

SEQ ID NO: 401752 - DNA, 120 bp, Artificial Sequence
  ENSG00000146648_85 (sequence is synthesized)
gtgtgtgtttgtgacagatttgatccctgttctctctgctggctctatcttgacctgtgaaacgtatatttaactaattaaatattagttaatattaataaattttaagctttatccaga

SEQ ID NO: 401753 - DNA, 120 bp, Artificial Sequence
  ENSG00000146648_86 (sequence is synthesized)
ttttgatcaataactacaggccttttgagagagtgccctcctaatgaattgagtacctatttctccatacacagtgtctatcatgacctacaaacccttttcccatgaggtgtaacagag

SEQ ID NO: 401754 - DNA, 120 bp, Artificial Sequence
  ENSG00000146648_87 (sequence is synthesized)
agagattacagccttggaactggatgtcagactctcctggtttaagacaataagccatgacatagagcctgaaaccaacacaatcttccgagtggttccagaaacatataggggataatg

SEQ ID NO: 401755 - DNA, 120 bp, Artificial Sequence
  ENSG00000146648_88 (sequence is synthesized)
aacctcacctgcctcagcttgttcaacctgaaaacctaccaagtgaaagcaagagccacgtgaagacgccttagttatatgcacccacccagacacttgctcagaaaggaatcagtgggg

SEQ ID NO: 401756 - DNA, 120 bp, Artificial Sequence
  ENSG00000146648_89 (sequence is synthesized)
aaagccatgttattctgcctttttaaactatcatcctgtaatcaaagtaatgatggcagcgtgtcccaccagagcgggagcccagctgctcaggagtcatgcttaggatggatcccttct

SEQ ID NO: 401757 - DNA, 120 bp, Artificial Sequence
  ENSG00000146648_90 (sequence is synthesized)
cttctgccgtcagagtttcagctgggttggggtggatgcagccacctccatgcctggccttctgcatctgtgatcatcacggcctcctcctgccactgagcctcatgccttcacgtgtct

SEQ ID NO: 401758 - DNA, 120 bp, Artificial Sequence
  ENSG00000146648_91 (sequence is synthesized)
gttccccccgcttttcctttctgccacccctgcacgtgggccgccaggttcccaagagtatcctacccatttccttccttccactccctttgccagtgcctctcaccccaactagtagct

SEQ ID NO: 401759 - DNA, 120 bp, Artificial Sequence
  ENSG00000146648_92 (sequence is synthesized)
aaccatcacccccaggactgacctcttcctcctcgctgccagatgattgttcaaagcacagaatttgtcagaaacctgcagggactccatgctgccagccttctccgtaattagcatggc

SEQ ID NO: 401760 - DNA, 120 bp, Artificial Sequence
  ENSG00000146648_93 (sequence is synthesized)
cccagtccatgcttctagccttggttccttctgcccctctgtttgaaattctagagccagctgtgggacaattatctgtgtcaaaagccagatgtgaaaacatctcaataacaaactggc

SEQ ID NO: 401761 - DNA, 120 bp, Artificial Sequence
  ENSG00000146648_94 (sequence is synthesized)
tgctttgttcaatgctagaacaacgcctgtcacagagtagaaactcaaaaatatttgctgagtgaatgaacaaatgaataaatgcataataaataattaaccaccaatccaacatccaga

SEQ ID NO: 401762 - DNA, 120 bp, Artificial Sequence
  ENSG00000146648_95 (sequence is synthesized)
ggtttgagctgaattatcacatgaatataaatgggaaatcagtgttttagagagagaacttttcgacatatttcctgttcccttggaataaaaacatttcttctgaaattttaccgttaa

SEQ ID NO: 401763 - DNA, 120 bp, Artificial Sequence
  ENSG00000146648_96 (sequence is synthesized)
atcattcctttgggcctaggattgcatttatttccatgacaaaagggcctgtctggtgtttcagcaaatgaaaacaaaaatataaagcccatctccttttgaatgagctctaaaacagtt

SEQ ID NO: 401764 - DNA, 120 bp, Artificial Sequence
  ENSG00000146648_97 (sequence is synthesized)
ctccactggacttcagaacaagagggagctctgggctgctggctggttgtgcatttgctgtgggttccctccggcaggcgacctctccgcgctgagaaggttatccggataaccaatttg

SEQ ID NO: 401765 - DNA, 120 bp, Artificial Sequence
  ENSG00000146648_98 (sequence is synthesized)
cctacgggtcctaataaatcttcactgtctgactttagtctcccactaaaactgcatttcctttctacaatttcaatttctccctttgcttcaaataaagtcctgacactattcatttga

SEQ ID NO: 401766 - DNA, 120 bp, Artificial Sequence
  ENSG00000146648_99 (sequence is synthesized)
gaagagtccctctaatgagcatctcatgtcactgtgttctgtcacatgccagcctggcctccctgtgtcccagatcgcattattaaaccctccagcgcattagagcaagcctcagtaagg

SEQ ID NO: 401767 - DNA, 120 bp, Artificial Sequence
  ENSG00000146648_100 (sequence is synthesized)
cgcaggccacatcgtgaactaagcagcatccgtgagtggggcccacccaactccatctccccctccccgtctgaactctcctctggtgctcgtcctcactgtccggctagccaaagcctc

SEQ ID NO: 401768 - DNA, 120 bp, Artificial Sequence
  ENSG00000146648_101 (sequence is synthesized)
agctgggtctaagagagaagcatggtctattgggctttggtgtcaggcagacgtggcttcacacccctgactctccacttcttcgcatcacccaggcagccgatccacctatctccttcc

SEQ ID NO: 401769 - DNA, 120 bp, Artificial Sequence
  ENSG00000146670_0 (sequence is synthesized)
cttcccggttggcgcgcgcccggggcggcggcgctggaggagctcgagacggagcctaagttatgtctgggaggcgaacgcggtccggaggagccgctcagcgctccgggccaagggccc

SEQ ID NO: 401770 - DNA, 120 bp, Artificial Sequence
  ENSG00000146670_1 (sequence is synthesized)
catctcctactaagcctctgcggaggtcccagcggaaatcaggctctgaactcccgagcatcctccctgaaatctggccgaagacacccagtgcggctgcagtcagaaagcccatcgtct

SEQ ID NO: 401771 - DNA, 120 bp, Artificial Sequence
  ENSG00000146670_2 (sequence is synthesized)
taaagaggatcgtggcccatgctgtagaggtcccagctgtccaatcacctcgcaggagccctaggatttcctttttcttggagaaagaaaacgagccccctggcagggagcttactaagg

SEQ ID NO: 401772 - DNA, 120 bp, Artificial Sequence
  ENSG00000146670_3 (sequence is synthesized)
aggaccttttcaagacacacagcgtccctgccacccccaccagcactcctgtgccgaaccctgaggccgagtccagctccaaggaaggagagctggacgccagagacttggaaatgtcta

SEQ ID NO: 401773 - DNA, 120 bp, Artificial Sequence
  ENSG00000146670_4 (sequence is synthesized)
agaaagtcaggcgttcctacagccggctggagaccctgggctctgcctctacctccaccccaggccgccggtcctgctttggcttcgaggggctgctgggggcagaagacttgtccggag

SEQ ID NO: 401774 - DNA, 120 bp, Artificial Sequence
  ENSG00000146670_5 (sequence is synthesized)
tctcgccagtggtgtgctccaaactcaccgaggtccccagggtttgtgcaaagccctgggccccagacatgactctccctggaatctccccaccacccgagaaacagaaacgtaagaaga

SEQ ID NO: 401775 - DNA, 120 bp, Artificial Sequence
  ENSG00000146670_6 (sequence is synthesized)
agaaaatgccagagatcttgaaaacggagctggatgagtgggctgcggccatgaatgccgagtttgaagctgctgagcagtttgatctcctggttgaatgagatgcagtggggggtgcac

SEQ ID NO: 401776 - DNA, 120 bp, Artificial Sequence
  ENSG00000146670_7 (sequence is synthesized)
ctggccagactctccctcctgtcctgtacatagccacctccctgtggagaggacacttagggtcccctcccctggtcttgttacctgtgtgtgtgctggtgctgcgcatgaggactgtct

SEQ ID NO: 401777 - DNA, 120 bp, Artificial Sequence
  ENSG00000146670_8 (sequence is synthesized)
gcctttgagggcttgggcagcagcggcagccatcttggttttaggaaatggggccgcctggcccagccactcactggtgtcctgtctcttgtcgtcctgtccttcctatctccccaaagt

SEQ ID NO: 401778 - DNA, 120 bp, Artificial Sequence
  ENSG00000146670_9 (sequence is synthesized)
accatagccagtttccagatgggccacagactggggaggagaatcagtggcccagccagaagttaaagggctgagggttgaggtgagaggcacctctgctcttgttgggaggggtggctg

SEQ ID NO: 401779 - DNA, 120 bp, Artificial Sequence
  ENSG00000146670_10 (sequence is synthesized)
ttgaacccacctgtgtaaagaggttttcagttccgtgggtttcccctttgattctgtaaatagtcccagagagaattcgtgggctgagggcaattctgtcttggaggaagaagctggaca

SEQ ID NO: 401780 - DNA, 120 bp, Artificial Sequence
  ENSG00000146670_11 (sequence is synthesized)
ttcagcctgtggagtctgagttttgaaggatgtagggagccttagttgggtctcagaccataagtgtgtactacacagaagctgtgttttctagttctggtctgctgttgagatgtttgg

SEQ ID NO: 401781 - DNA, 120 bp, Artificial Sequence
  ENSG00000146670_12 (sequence is synthesized)
taaatgccaggttgatagggcgctggctgcttggagcaaagggtgcatttcagggtgtggccaccaggtgctgtgagtttctgtggctcatggcctctgggctggtcccttgcacagggc

SEQ ID NO: 401782 - DNA, 120 bp, Artificial Sequence
  ENSG00000146670_13 (sequence is synthesized)
ccacgctggagtcttaccactctgctgcaggggtggaaggtggcccctcttgtcacccatacccatttcttacaaaataagttacaccgagtctacttggccctagaagagaaagttgaa

SEQ ID NO: 401783 - DNA, 120 bp, Artificial Sequence
  ENSG00000146670_14 (sequence is synthesized)
gagtcccagacctactagcattttgcaactatgcttgtaaagtcctcggaaagtttcctcgcgtaccagacagcggcgggggctgatagcaattttagtttttggcctccctatcctctc

SEQ ID NO: 401784 - DNA, 120 bp, Artificial Sequence
  ENSG00000146670_15 (sequence is synthesized)
acatgagaacactgcctggatgcatctcatgatctctggagaatttccccatctttctcttctttccatcgtgtggattcaatagtgtggatttgaaggctgccctgcccccgactctcc

SEQ ID NO: 401785 - DNA, 120 bp, Artificial Sequence
  ENSG00000146670_16 (sequence is synthesized)
tgccgcacccctggccattgtaccttttgatgtttagaagttcgtggaagtagacgctgaggtgtgcagaggagctggtggataacagagaatgccagggaagatgagtgctgggtcagg

SEQ ID NO: 401786 - DNA, 120 bp, Artificial Sequence
  ENSG00000146670_17 (sequence is synthesized)
gtacttggatgaaacggtgcaggccaggcgggccctaataaaaccctctgccaggtctgggagtcccaggccatctgctcaacgctctgtggtttgtcagacctgcaagcaagccccctg

SEQ ID NO: 401787 - DNA, 120 bp, Artificial Sequence
  ENSG00000146670_18 (sequence is synthesized)
ctggggaagcctaggtgtccttgagctgaaccgcactgaagaactcttgtcctcactggctgatgcagcagaactcttgggaaatgtcttagtcctgcagaatcaggagtcaccagatga

SEQ ID NO: 401788 - DNA, 120 bp, Artificial Sequence
  ENSG00000146670_19 (sequence is synthesized)
tgcagagttgagatcatcattgcaaagttctctgttcctgaggaactaaatttaaggaaaaaatgggattttgttttagagttggaaaaaaagcctgattaaagagtttctgcctgttca

SEQ ID NO: 401789 - DNA, 120 bp, Artificial Sequence
  ENSG00000146670_20 (sequence is synthesized)
ttcccggttggcgcgcgcccggggcggcggcgctggaggagctcgagacggagcctaagttatgtctgggaggcgaacgcggtccggaggagccgctcagcgctccggtgagcggagggc

SEQ ID NO: 401790 - DNA, 120 bp, Artificial Sequence
  ENSG00000146670_21 (sequence is synthesized)
gcgcgggagacgtgaggtcgagccgtttgggggacgcagtccggtgaaagatggcctcttccctcccgctgccgccgccggaggaggcgcccttaaaagggcttgtttgggaatcttctc

SEQ ID NO: 401791 - DNA, 120 bp, Artificial Sequence
  ENSG00000146670_22 (sequence is synthesized)
gcccatgctgtagaggtaaaggctaaggagagtgttgtgggtggttaggcgggcaaaactggggaccagctatgtgatcaattggtattgtcccccgcaggtcccagctgtccaatcacc

SEQ ID NO: 401792 - DNA, 120 bp, Artificial Sequence
  ENSG00000146670_23 (sequence is synthesized)
tcagaaagcccatcgtcttaaagaggatcgtggcccatgctgtagaggtcccagctgtccaatcacctcgcaggagccctagggccgccggtcctgctttggcttcgaggggctgctggg

SEQ ID NO: 401793 - DNA, 120 bp, Artificial Sequence
  ENSG00000146670_24 (sequence is synthesized)
acagaaacgtaagaagaagaaaatgccagagatcttgtctcttaggggcagacaaagagcccactccaagctggccaacaagccagtggtgcagcctgttgaggagcaagaacccaaggg

SEQ ID NO: 401794 - DNA, 120 bp, Artificial Sequence
  ENSG00000146670_25 (sequence is synthesized)
ccctcaggcttccgaggagcggaacttggagccaccttcctcagaacaactggaacccaccgtcacgttcctgtttacactcctgaacacctctgagcccactgagccaaaagaccctga

SEQ ID NO: 401795 - DNA, 120 bp, Artificial Sequence
  ENSG00000146670_26 (sequence is synthesized)
atcggactcggagatccaggagtaccagttcttagatcaggaggactggggcccccagcggacctcaaaggagatcaggcagttgcagaatgactgcatgaggcttcgggagtcactgaa

SEQ ID NO: 401796 - DNA, 120 bp, Artificial Sequence
  ENSG00000146670_27 (sequence is synthesized)
cctgaaggagggagcccaggccatccaggaggaggcccaggccatccaggatgaagtgaaggccctgcaggaggaaagccaggccctgccggaggtggctctgctcaggtgtgcgggcag

SEQ ID NO: 401797 - DNA, 120 bp, Artificial Sequence
  ENSG00000146670_28 (sequence is synthesized)
ccatggcagcggggagggaagaggcggctgccccatgctgctcactcgagctgtctctgcctgcagtgacccaaacccccggaaggcaggtctcctcttcaagctgcctgacctgcccca

SEQ ID NO: 401798 - DNA, 120 bp, Artificial Sequence
  ENSG00000146670_29 (sequence is synthesized)
cgaccacagagaccagggtcaggcctggccaggccccaggccagaggtcggacacctcctcgggaggccgctccttcagccagctcctccctagatcccagaaataaacttggaagctaa

SEQ ID NO: 401799 - DNA, 120 bp, Artificial Sequence
  ENSG00000146670_30 (sequence is synthesized)
ctgccgtgtgctctgggagacgtgcagggctggggctctggctcttttgggggataggcagcacctgcagggtgtgggtgagatgctccagccaccatgttcccttctcactcacctgct

SEQ ID NO: 401800 - DNA, 120 bp, Artificial Sequence
  ENSG00000146670_31 (sequence is synthesized)
cctcatttctcttccctcagaaaacggagctggatgagtgggctgcggccatgaatgccgagtttgaagctgctgagcagtttgatctcctggttgaatgagatgcagtggggggtgcac

SEQ ID NO: 401801 - DNA, 120 bp, Artificial Sequence
  ENSG00000146670_32 (sequence is synthesized)
gctctgctcagtgacccaaacccccggaaggcaggtctcctcttcaagctgcctgacctgccccacgaccacagagaccagggtcaggcctggccaggccccaggccagaggtcggacac

SEQ ID NO: 401802 - DNA, 120 bp, Artificial Sequence
  ENSG00000146670_33 (sequence is synthesized)
cctagggtgagttcactttcatctacttaattaagtagaatctgggtcactctagagctggacagcacacattggctcctcacatctgcccagggagctgttttgcagtactgcaaaaac

SEQ ID NO: 401803 - DNA, 120 bp, Artificial Sequence
  ENSG00000146674_0 (sequence is synthesized)
ccagatgcgagcactgcggctgggcgctgaggatcagccgcttcctgcctggattccacagcttcgcgccgtgtactgtcgccccatccctgcgcgcccagcctgccaagcagcgtgccc

SEQ ID NO: 401804 - DNA, 120 bp, Artificial Sequence
  ENSG00000146674_1 (sequence is synthesized)
cggttgcaggcgtcatgcagcgggcgcgacccacgctctgggccgctgcgctgactctgctggtgctgctccgcgggccgccggtggcgcgggctggcgcgagctcggcgggcttgggtc

SEQ ID NO: 401805 - DNA, 120 bp, Artificial Sequence
  ENSG00000146674_2 (sequence is synthesized)
ccgtggtgcgctgcgagccgtgcgacgcgcgtgcactggcccagtgcgcgcctccgcccgccgtgtgcgcggagctggtgcgcgagccgggctgcggctgctgcctgacgtgcgcactga

SEQ ID NO: 401806 - DNA, 120 bp, Artificial Sequence
  ENSG00000146674_3 (sequence is synthesized)
gcgagggccagccgtgcggcatctacaccgagcgctgtggctccggccttcgctgccagccgtcgcccgacgaggcgcgaccgctgcaggcgctgctggacggccgcgggctctgcgtca

SEQ ID NO: 401807 - DNA, 120 bp, Artificial Sequence
  ENSG00000146674_4 (sequence is synthesized)
acgctagtgccgtcagccgcctgcgcgcctacctgctgccagcgccgccagctccaggaaatgctagtgagtcggaggaagaccgcagcgccggcagtgtggagagcccgtccgtctcca

SEQ ID NO: 401808 - DNA, 120 bp, Artificial Sequence
  ENSG00000146674_5 (sequence is synthesized)
gcacgcaccgggtgtctgatcccaagttccaccccctccattcaaagataatcatcatcaagaaagggcatgctaaagacagccagcgctacaaagttgactacgagtctcagagcacag

SEQ ID NO: 401809 - DNA, 120 bp, Artificial Sequence
  ENSG00000146674_6 (sequence is synthesized)
atacccagaacttctcctccgagtccaagcgggagacagaatatggtccctgccgtagagaaatggaagacacactgaatcacctgaagttcctcaatgtgctgagtcccaggggtgtac

SEQ ID NO: 401810 - DNA, 120 bp, Artificial Sequence
  ENSG00000146674_7 (sequence is synthesized)
acattcccaactgtgacaagaagggattttataagaaaaagcagtgtcgcccttccaaaggcaggaagcggggcttctgctggtgtgtggataagtatgggcagcctctcccaggctaca

SEQ ID NO: 401811 - DNA, 120 bp, Artificial Sequence
  ENSG00000146674_8 (sequence is synthesized)
ccaccaaggggaaggaggacgtgcactgctacagcatgcagagcaagtagacgcctgccgcaaggttaatgtggagctcaaatatgccttattttgcacaaaagactgccaaggacatga

SEQ ID NO: 401812 - DNA, 120 bp, Artificial Sequence
  ENSG00000146674_9 (sequence is synthesized)
ttgaatggtaaacttgagcatcttttcactttccagtagtcagcaaagagcagtttgaattttcttgtcgcttcctatcaaaatattcagagactcgagcacagcacccagacttcatgc

SEQ ID NO: 401813 - DNA, 120 bp, Artificial Sequence
  ENSG00000146674_10 (sequence is synthesized)
gcccgtggaatgctcaccacatgttggtcgaagcggccgaccactgactttgtgacttaggcggctgtgttgcctatgtagagaacacgcttcacccccactccccgtacagtgcgcaca

SEQ ID NO: 401814 - DNA, 120 bp, Artificial Sequence
  ENSG00000146674_11 (sequence is synthesized)
ggctttatcgagaataggaaaacctttaaaccccggtcatccggacatcccaacgcatgctcctggagctcacagccttctgtggtgtcatttctgaaacaagggcgtggatccctcaac

SEQ ID NO: 401815 - DNA, 120 bp, Artificial Sequence
  ENSG00000146674_12 (sequence is synthesized)
caagaagaatgtttatgtcttcaagtgacctgtactgcttggggactattggagaaaataaggtggagtcctacttgtttaaaaaatatgtatctaagaatgttctagggcactctggga

SEQ ID NO: 401816 - DNA, 120 bp, Artificial Sequence
  ENSG00000146674_13 (sequence is synthesized)
acctataaaggcaggtatttcgggccctcctcttcaggaatcttcctgaagacatggcccagtcgaaggcccaggatggcttttgctgcggccccgtggggtaggagggacagagagaca

SEQ ID NO: 401817 - DNA, 120 bp, Artificial Sequence
  ENSG00000146674_14 (sequence is synthesized)
gggagagtcagcctccacattcagaggcatcacaagtaatggcacaattcttcggatgactgcagaaaatagtgttttgtagttcaacaactcaagacgaagcttatttctgaggataag

SEQ ID NO: 401818 - DNA, 120 bp, Artificial Sequence
  ENSG00000146674_15 (sequence is synthesized)
ctctttaaaggcaaagctttattttcatctctcatcttttgtcctccttagcacaatgtaaaaaagaatagtaatatcagaacaggaaggaggaatggcttgctggggagcccatccagg

SEQ ID NO: 401819 - DNA, 120 bp, Artificial Sequence
  ENSG00000146674_16 (sequence is synthesized)
acactgggagcacatagagattcacccatgtttgttgaacttagagtcattctcatgcttttctttataattcacacatatatgcagagaagatatgttcttgttaacattgtatacaac

SEQ ID NO: 401820 - DNA, 120 bp, Artificial Sequence
  ENSG00000146674_17 (sequence is synthesized)
atagccccaaatatagtaagatctatactagataatcctagatgaaatgttagagatgctatatgatacaactgtggccatgactgaggaaaggagctcacgcccagagactgggctgct

SEQ ID NO: 401821 - DNA, 120 bp, Artificial Sequence
  ENSG00000146674_18 (sequence is synthesized)
ggtgtcatgtgaggctggatgtgggctccaaagtcatagctgtgacattcgcaggcagcggggatgttctcagtcccacatttggcagagaagtcagtcaagaggttctacaagggctgg

SEQ ID NO: 401822 - DNA, 120 bp, Artificial Sequence
  ENSG00000146674_19 (sequence is synthesized)
tgtccaccttatactcctagaaacacaaaactgcccccacccccgctttcttggagcaggaagttacacccacacgcatgcacaggcgcacactcagcgggcctaggcacgcatggctct

SEQ ID NO: 401823 - DNA, 120 bp, Artificial Sequence
  ENSG00000146674_20 (sequence is synthesized)
acagaggggtctcaagacattctgcctacctattagcttttctttatttttttaactttttggggggaaaagtatttttgagaagtttgtcttgcaatgtatttataaatagtaaataaa

SEQ ID NO: 401824 - DNA, 120 bp, Artificial Sequence
  ENSG00000146674_21 (sequence is synthesized)
gtttttaccattaaaaaaatatctttccctttgttattgaccatctctgggctttgtatcactaattattttattttattatataataattattttattataataaaatcctgaaagggg

SEQ ID NO: 401825 - DNA, 120 bp, Artificial Sequence
  ENSG00000146674_22 (sequence is synthesized)
gagcaagtagacgcctgccgcaagggtgagtactcaggaggggcagcctggggctccagggcctcactgtccttggaccagcctcaggggctgggcgtggccactggcccttccccaggc

SEQ ID NO: 401826 - DNA, 120 bp, Artificial Sequence
  ENSG00000146674_23 (sequence is synthesized)
ttacagacccaggagctgcagctcagggccagaaagagcaaagcaaataggacagagccctcagaagggtgcagggagagggagaccccatcaacccaaccaaacaagtgtggggaagga

SEQ ID NO: 401827 - DNA, 120 bp, Artificial Sequence
  ENSG00000146674_24 (sequence is synthesized)
ggccggccagtgcacctcagggacactctgctttatctcagatacctcacagcacctaagctatcattcatccacacacaaagtgaagattttcaaagttaggctttacccgtgaggtct

SEQ ID NO: 401828 - DNA, 120 bp, Artificial Sequence
  ENSG00000146674_25 (sequence is synthesized)
agtccaagcgggagacagaatatgtgagagcttttcctcttgttaaaggaggagggcaagacctgccaagcctgggtactcagagcctcttgagggcaattcttactcaacaaaccccag

SEQ ID NO: 401829 - DNA, 120 bp, Artificial Sequence
  ENSG00000146674_26 (sequence is synthesized)
cgcctggctgatgggtgggcaacccctagcccctctgtgccctacctctctcctctccttacataaagaatattgacccttttggagaatcttatgaggatcaagctgaaataacactct

SEQ ID NO: 401830 - DNA, 120 bp, Artificial Sequence
  ENSG00000146674_27 (sequence is synthesized)
gcatgcagagcaagtagacgcctgccgcaaggatacctcacagcacctaagctatcattcatccacacacaaagtgaagattttcaaagttaggctttacccgtgaggtctggaggtcca

SEQ ID NO: 401831 - DNA, 120 bp, Artificial Sequence
  ENSG00000146674_28 (sequence is synthesized)
tttatcttcacagagaaaccgttttaatccgcaagaacctgctaaagatacatgtttctaaattaaagatgtgaatgtgagacagctgaaatagctcagttgggagagcatcagtttgaa

SEQ ID NO: 401832 - DNA, 120 bp, Artificial Sequence
  ENSG00000146674_29 (sequence is synthesized)
agtttgaagatgcagctttttttttctgtaaaatatataatgaatattctgttagtctgtggctaatataattttaataaagttaatttaaatctgatagaaaaatgaaattttaaacga

SEQ ID NO: 401833 - DNA, 120 bp, Artificial Sequence
  ENSG00000146674_30 (sequence is synthesized)
gagaatgctattatatccagtcttcttttttcttttaataaatgagggaactattgggggaaaggaataaatacattttctttcattttattaagacaaatttagtaagcagaagaaatt

SEQ ID NO: 401834 - DNA, 120 bp, Artificial Sequence
  ENSG00000146674_31 (sequence is synthesized)
gctagtgccgtcagccgcctgcgcgcctacctgctgccagcgccgccagctccaggtgagccgcccgcgccaggaaatgctagtgagtcggaggaagaccgcagcgccggcagtgtggag

SEQ ID NO: 401835 - DNA, 120 bp, Artificial Sequence
  ENSG00000146674_32 (sequence is synthesized)
attctcctcgccccgcacgggggtgcacacggactgcaatcccagggatgcttggggatgggggggatataggcggatttggaccaaggaaggtgggcaggcacgttgtaggaaatagta

SEQ ID NO: 401836 - DNA, 120 bp, Artificial Sequence
  ENSG00000146674_33 (sequence is synthesized)
cctctcttttaaaatactgactttgcacagccttttggtttgcaaagcaatgtctagtcccggtatgtccaaaaacaagtaaagtggattcgggttttgatatcttctgcggttggaaaa

SEQ ID NO: 401837 - DNA, 120 bp, Artificial Sequence
  ENSG00000146674_34 (sequence is synthesized)
gaactccgcgtgccactttcagtaccataccattcttacaactcgggccacccctgcacctgcgccgacctcaaacaaacttccaggaaatgctagtgagtcggaggaagaccgcagcgc

SEQ ID NO: 401838 - DNA, 120 bp, Artificial Sequence
  ENSG00000146674_35 (sequence is synthesized)
gggcgcatcttcagatgcgtatttgtgggcccctggggatataaacagcccagcgggtgtaaattaaaccccgcagtgccttggctccctgagacccaaatgtaagtcagaaatgtccca

SEQ ID NO: 401839 - DNA, 120 bp, Artificial Sequence
  ENSG00000146674_36 (sequence is synthesized)
agacttcgcctgccaacggaattaaattttagaaagctccacgaggtacacacgaatgcggagcgctgtatgccagtttccccgacaccggctcgccgcagggagacctcaccccgagag

SEQ ID NO: 401840 - DNA, 80 bp, Artificial Sequence
  ENSG00000146676_0 (sequence is synthesized)
gcgagccggagggcgggggcgcgagcgcggcgggcggtggcggcgaggcggcggcctagaagatggcggacggcgacagc

SEQ ID NO: 401841 - DNA, 120 bp, Artificial Sequence
  ENSG00000146676_1 (sequence is synthesized)
agcccgcgtcccgcggcggcggcgagcaagagacgcaggagctggcctcgaagcggctggacatccagaacaagcgcttctacttagatgtgaagcagaacgccaagggccgcttcctca

SEQ ID NO: 401842 - DNA, 120 bp, Artificial Sequence
  ENSG00000146676_2 (sequence is synthesized)
agatcgccgaggtgggcgcgggcggttccaagagccgcctcacgctgtccatggcggtggccgccgagttccgcgactcgctgggcgacttcatagaacactacgcgcagctgggcccta

SEQ ID NO: 401843 - DNA, 120 bp, Artificial Sequence
  ENSG00000146676_3 (sequence is synthesized)
gcagccccgagcagctggcggctggcgccgaggagggcggcgggccgcggcgcgcgctcaagagcgaattcttggtgcgtgagaaccgcaagtactacctggacctcaaggagaaccagc

SEQ ID NO: 401844 - DNA, 120 bp, Artificial Sequence
  ENSG00000146676_4 (sequence is synthesized)
ccgcttcctgcgcatccgccaaacggtcaaccgcggcggtggcggcttcggcgcgggccccgggccgggcggcttgcagagcggccagaccatcgcgctgcctgcgcagggcctcatcga

SEQ ID NO: 401845 - DNA, 120 bp, Artificial Sequence
  ENSG00000146676_5 (sequence is synthesized)
tcgagttccgcgacgcgctggcgaagctcatagacgactacggaggcgaggacgacgagctggcaggcggcccgggaggcggcgccgggggcccagggggcggcctgtatggagagctcc

SEQ ID NO: 401846 - DNA, 120 bp, Artificial Sequence
  ENSG00000146676_6 (sequence is synthesized)
cggagggcacctccatcaccgtggactccaagcgcttcttcttcgatgtgggctgcaacaaatacggggtgtttctgcgagtgagcgaggtgaagccgtcctaccgcaatgccatcaccg

SEQ ID NO: 401847 - DNA, 120 bp, Artificial Sequence
  ENSG00000146676_7 (sequence is synthesized)
tacccttcaaagcctggggcaagttcggaggcgccttttgccggtatgcggatgagatgaaagaaatccaggaacgacagagggataagctttatgagcgacgtggtgggggcagcggcg

SEQ ID NO: 401848 - DNA, 120 bp, Artificial Sequence
  ENSG00000146676_8 (sequence is synthesized)
gcggcgaagagtcagagggtgaggaggtggatgaggattgaaacgggcagcttcccctacaggcctccacccaaccaccatccccttggctagagaattccctttcctgctcatccccag

SEQ ID NO: 401849 - DNA, 120 bp, Artificial Sequence
  ENSG00000146676_9 (sequence is synthesized)
tgagctagtggagagggagcaagggaggccgcagagggaaaaaacaaaacgtaacacagttaagagaaataatcgtaagagaacagtgacggacaacttgagaaaagcagtcaagttcca

SEQ ID NO: 401850 - DNA, 120 bp, Artificial Sequence
  ENSG00000146676_10 (sequence is synthesized)
aggaactgacagcaacctgcaaagaggaaaacagcatctcctcacctgcgtaaaattgtctcagcttctgttgtttctcaactgaggttcgtaaacccatcaggataatccctggaggga

SEQ ID NO: 401851 - DNA, 120 bp, Artificial Sequence
  ENSG00000146676_11 (sequence is synthesized)
atagatccttgcacatccagggcaagaaacatgtccaagttacccagaccattgataacagttgcatttaggttgcacctgggtaatctggcataaaagatctctctaggcctcactgtt

SEQ ID NO: 401852 - DNA, 120 bp, Artificial Sequence
  ENSG00000146676_12 (sequence is synthesized)
gcggtgtctatcccttcacctccattgaaatcagcattttggatctaggtcttcatggaatccttgagaagagaggcctttacaattacccagttctgagggttcaggttcacgaaaaga

SEQ ID NO: 401853 - DNA, 120 bp, Artificial Sequence
  ENSG00000146676_13 (sequence is synthesized)
aatgcaacttgggataatcatgaacaggttaaagataagatttcaagaagccatctaagaatacagaaccaaattggatccatttttttaaaaaaatggttttgcatggaacctggacca

SEQ ID NO: 401854 - DNA, 120 bp, Artificial Sequence
  ENSG00000146676_14 (sequence is synthesized)
aggcaaatgtcttttcttcgcagaattgttttccaggatgccagtggattcagatagcaatgcttggagtagaatccgttactaaaatagtttcaaagttgacaaaaaattttcaaagat

SEQ ID NO: 401855 - DNA, 120 bp, Artificial Sequence
  ENSG00000146676_15 (sequence is synthesized)
aaaagcagttttacattgggggttgctgaggtaggcacaagaaaaagtcaggcataaagcacaaggcagactgtttgagtggattggttgctgctcactaaagttgttcccctgatctct

SEQ ID NO: 401856 - DNA, 120 bp, Artificial Sequence
  ENSG00000146676_16 (sequence is synthesized)
aaatatggaggtcattaccaagaaatgctttggtatgaatgagagccagatctccactgtgtgagccagtgaattatggctaattcggctgttacagccactggttggctggattttaaa

SEQ ID NO: 401857 - DNA, 120 bp, Artificial Sequence
  ENSG00000146676_17 (sequence is synthesized)
ccataaaacttgaagattacctacaaaagtaacagtgtggctataagcctgagctttaatggatatacatcctcacagaaaagttggaaataaccaaaactgaagtcttaatttaccttc

SEQ ID NO: 401858 - DNA, 120 bp, Artificial Sequence
  ENSG00000146676_18 (sequence is synthesized)
agtttaatctgtggatttgttcaaatactaaagatcctcaggtccagaattccagcatcatttattcttttaaaatttttaagaacttgatccattgtatcagtacctcacaatcagagt

SEQ ID NO: 401859 - DNA, 120 bp, Artificial Sequence
  ENSG00000146676_19 (sequence is synthesized)
tggcaaatgatggatgagtgattcaagcagtgcacccggtggaagctgaaatccatctgtgaatggaactgaagtgaacgtgaatatgctgactatatcctggaagcatttttataccat

SEQ ID NO: 401860 - DNA, 120 bp, Artificial Sequence
  ENSG00000146676_20 (sequence is synthesized)
cttgaaatttcaacaaactggcttttgccagttaatccagctgtctttcaagaataaaagttggggttttcaaggatcgcctcttctatattttaaatggattttcagtagaaatgattt

SEQ ID NO: 401861 - DNA, 120 bp, Artificial Sequence
  ENSG00000146676_21 (sequence is synthesized)
ttactaatcaagttaatcccaccccatcaaaaggtattcctagaaatgtcatagacctaggtaactttgaattgaatgggagctaacgttctttccaaagttttcaggtattctttgtgt

SEQ ID NO: 401862 - DNA, 120 bp, Artificial Sequence
  ENSG00000146676_22 (sequence is synthesized)
gacaccttctcaaccaggaggcaagtaaccccgcctccacaatcttagtattttttttaaactgcatgcctgccccttatttgagctgcctttttaatttattgcatatcctttttatta

SEQ ID NO: 401863 - DNA, 120 bp, Artificial Sequence
  ENSG00000146676_23 (sequence is synthesized)
tcttattttggtattattcaatctatacaatctttttgtatttattgggaaatgagtaatatacaaaaaggttttcatgtatttgtggctgagagggcgggaaataattgtgtacataaa

SEQ ID NO: 401864 - DNA, 120 bp, Artificial Sequence
  ENSG00000146676_24 (sequence is synthesized)
attaggcttttttaaaaaaatagattatgatgcagaatattgttgatcttagattaaaaagtggaagagccacaaacattggtgcccttttcagactatttctctactctcatcatccac

SEQ ID NO: 401865 - DNA, 120 bp, Artificial Sequence
  ENSG00000146676_25 (sequence is synthesized)
agtagaatttttaaacagatttttttaaagcttttcttttaaatttttctccgttgcaaagaatgtttcctaaattgtatgggagcaatagtatttttgatgttttaatgacatccgtat

SEQ ID NO: 401866 - DNA, 120 bp, Artificial Sequence
  ENSG00000146676_26 (sequence is synthesized)
acttgtactgtattttgtactacaaggcagctgtttttcaataatgtcctgctgtatttacctacgtgttttgagtgtctatttctttgctgcggagaacaaattcctaaatagttttag

SEQ ID NO: 401867 - DNA, 120 bp, Artificial Sequence
  ENSG00000146676_27 (sequence is synthesized)
taaaggagctgagaagctagcattaggtttgcagaaactatttaagtttcaactctgaggcagcaatgaaaatttaagttgcagctattagttgattgctgtaactttttcattttcaaa

SEQ ID NO: 401868 - DNA, 120 bp, Artificial Sequence
  ENSG00000146676_28 (sequence is synthesized)
ccatgtacaattcttgtatagaccaacttgttttcttgcttcagtggtggttctgttgctcagctgcagtgagccagttcaattttgcaaaggtgcagtacctctcctttttaaggggtt

SEQ ID NO: 401869 - DNA, 120 bp, Artificial Sequence
  ENSG00000146676_29 (sequence is synthesized)
ggtttattcttttttctttttgtttggctgaattgcagtaactagccttgcctttctattctgtagaaatgacagggtcttcacaatccttcaccagtggctactaagctataattagct

SEQ ID NO: 401870 - DNA, 120 bp, Artificial Sequence
  ENSG00000146676_30 (sequence is synthesized)
gaatagaaagaatgtggaagtggtctgaggcatatagagtatatgccaagaacactaccatatatggcatcagctttggttaccagagaaattttcttagtcattagaccatgtaacagt

SEQ ID NO: 401871 - DNA, 120 bp, Artificial Sequence
  ENSG00000146676_31 (sequence is synthesized)
aatatatcatatgtaaatctttagatatcaatttgaaaatcctccaaaaaaaggagcaaagaatgcataagctatgtgttggcaaaagtaatttatattaaaattttgacctgcctatgt

SEQ ID NO: 401872 - DNA, 120 bp, Artificial Sequence
  ENSG00000146676_32 (sequence is synthesized)
aagattaagtggtaatgtcatagtggtgggtttttaagtcttaaccaatctctaaggtttgtttctcctgcaagggatggttcatggcctctcttcccactgcaggaagattgcagaagg

SEQ ID NO: 401873 - DNA, 120 bp, Artificial Sequence
  ENSG00000146676_33 (sequence is synthesized)
ctgtggattaattgtagcatttcactgatcttcactccagtcactagggacaatagaaacctgcaaaacacagattcattcgtaaatattattaatagcttattaaaggaaatggtcttt

SEQ ID NO: 401874 - DNA, 120 bp, Artificial Sequence
  ENSG00000146676_34 (sequence is synthesized)
gttaattccagtcagataatggcattgtacagacatgggaaacaaccaatttttttgtttttcagttgttgctatgaatgattttgagcctttttttttaagcttggcaaacatcccagc

SEQ ID NO: 401875 - DNA, 120 bp, Artificial Sequence
  ENSG00000146676_35 (sequence is synthesized)
taatcaaaatagtcatattcctgagaagtaggaaactaaaacttcttttcatataattgttagaaggtttgtttcccaaactaccatagttacaaaggtgaaaagccaaattttaggaac

SEQ ID NO: 401876 - DNA, 120 bp, Artificial Sequence
  ENSG00000146676_36 (sequence is synthesized)
agaatcaaaagaataaaaatctgtgaagagatcctactactcttccttctatgttttggttttggtttctattgtccctatcatttcagcaagtggaacagcagcaagtttttcagtgca

SEQ ID NO: 401877 - DNA, 120 bp, Artificial Sequence
  ENSG00000146676_37 (sequence is synthesized)
atgactgtagctgtgatacacacatggctacttgtcacatcactttccataattatttactgcaaaatgattgagaggcttttggtgcaggcagccgttaacctcctgcttcctttgtta

SEQ ID NO: 401878 - DNA, 120 bp, Artificial Sequence
  ENSG00000146676_38 (sequence is synthesized)
cctctggattactttgcagtaaattgcaggtcttttaagagatttaagcttcagttttctcaaaacaaaacaattatcctgtcttatctgaagatgcagggttgtgggcaaaagaggctg

SEQ ID NO: 401879 - DNA, 120 bp, Artificial Sequence
  ENSG00000146676_39 (sequence is synthesized)
gttataataatgccctcatattgagtggtctgtaaacggctgcacacttcaggcactgtagttgctgaagatgctttgttaaatgtgaccttgactggctttacaggggtgtagaatgta

SEQ ID NO: 401880 - DNA, 120 bp, Artificial Sequence
  ENSG00000146676_40 (sequence is synthesized)
atctacacaaggtgactttgcatctatcttgctcttgaggtggatgaaattgagaagctggagtgtgtaagccatgcacataagtattcttcactgtaaattttgttttcatttttaacc

SEQ ID NO: 401881 - DNA, 120 bp, Artificial Sequence
  ENSG00000146676_41 (sequence is synthesized)
caattatggtactttatccaatgcacaactgatctctcagtagatattcatttgaaaatagtgtggccttgatcagtgagaaagggaaggagaaaagtgacttttttgcttatgtagaaa

SEQ ID NO: 401882 - DNA, 120 bp, Artificial Sequence
  ENSG00000146676_42 (sequence is synthesized)
tgactcatttgctgagagtttgtctttctgcagcactcttggtatatagtgatcggtctcctttttgattggggaaagttaatgtttttgaccctggagttaattcagttgagttatctt

SEQ ID NO: 401883 - DNA, 120 bp, Artificial Sequence
  ENSG00000146676_43 (sequence is synthesized)
atatttttaggaagtatcagaattgctctgatgaataacaaagttgactgttttgatgtccaatctcaggttttagaatatagtggtgtaaagtcccactatttttaattcttaaaacaa

SEQ ID NO: 401884 - DNA, 120 bp, Artificial Sequence
  ENSG00000146676_44 (sequence is synthesized)
ctttaatttcgtacaccctaaaagtcacatgcataaggcctgttcagagagcagagcctccatctttttgctccttttctactttgtacttcacttgaaaaaatatcaagtgactttaca

SEQ ID NO: 401885 - DNA, 120 bp, Artificial Sequence
  ENSG00000146676_45 (sequence is synthesized)
ttgtatatttccattgtaaccctgacatttctcaaagataaagcactttttgatcatgaaatacatgaaatctttgtgtgatgtggatcatagtttctcaggctcccttagataattgct

SEQ ID NO: 401886 - DNA, 120 bp, Artificial Sequence
  ENSG00000146676_46 (sequence is synthesized)
tatgaatattgttctaactctgtgtaagaagagtagaaatctttgctaatgttagaaggtttgtattattgatccagaatgcattttgctagtttccaatggatgggagagtaaataatg

SEQ ID NO: 401887 - DNA, 120 bp, Artificial Sequence
  ENSG00000146676_47 (sequence is synthesized)
ctgcattcacaatttaataagttactttcccttgagccttaaggtaactttttctttcctgtcaactacagcactgaagttatagtaagtgaatgagattatcagttttcagggttggtt

SEQ ID NO: 401888 - DNA, 120 bp, Artificial Sequence
  ENSG00000146676_48 (sequence is synthesized)
ttagagtactgtaaatcaattagctgtcttcctaaagagttacaactcccattcagtatactggataatgggtgtgtgggtggggctggggagggcgggagatagtttgtagaaaagaaa

SEQ ID NO: 401889 - DNA, 120 bp, Artificial Sequence
  ENSG00000146676_49 (sequence is synthesized)
gaaaaaagaaaaaaaaaaaaacacatttaccttaagaaaatacagacaaaaaagaataaagtatgtgtcatatgctccatttgagattccaaatgcggccgggcgtggtggctcacgcct

SEQ ID NO: 401890 - DNA, 120 bp, Artificial Sequence
  ENSG00000146676_50 (sequence is synthesized)
aaaaaataaataaataaattccaaatgtaaggtggaaatggcagattataacttcatttcccccatttttaacttagaaaaaacaaagtccttaattttcaagtattagccccccagaag

SEQ ID NO: 401891 - DNA, 120 bp, Artificial Sequence
  ENSG00000146676_51 (sequence is synthesized)
tttcagcagatagctggactcttgaataatgatttcttttgatatgtctgactttgctatttaaagtctcctttcccagccctcagtcttaaaactcagttttattactgacggatttaa

SEQ ID NO: 401892 - DNA, 120 bp, Artificial Sequence
  ENSG00000146676_52 (sequence is synthesized)
cagactcttacttgaaaattgtccaattatcagtactgaaaattagatttggaaaatgaaaaaataataaaatcgcatcaagaaaacttattaccttagagattcccaattgatatctgt

SEQ ID NO: 401893 - DNA, 120 bp, Artificial Sequence
  ENSG00000146676_53 (sequence is synthesized)
acccctgatccaagtaaggcctttatgaatgtattttatatttcctaaagaaatagggaatatgccatcagtgtaatcacctctattcacagtcatttaatttgaaaatctaactcatgt

SEQ ID NO: 401894 - DNA, 120 bp, Artificial Sequence
  ENSG00000146676_54 (sequence is synthesized)
ctcttgaattagacattccaattgggataggtagagtcatgttaaaacaatagaatagcaactgccatattggtagtttcactgctcaatatgatttctaataagagcagagctttattg

SEQ ID NO: 401895 - DNA, 120 bp, Artificial Sequence
  ENSG00000146676_55 (sequence is synthesized)
gaagctaaaactcatttttctccatagatgattctaacagtttaataaaaaagtataattatactttaagtgtcaacagattttgagtctagaagcaaatttcattttccttgtgttata

SEQ ID NO: 401896 - DNA, 120 bp, Artificial Sequence
  ENSG00000146676_56 (sequence is synthesized)
tctaatatccattgacatgggtaagaaaactaattatgtctttttagtatgatgaaatgtgggcccagagtattggaaagaaagcaatagccctattcagtgtccactaggatggatatt

SEQ ID NO: 401897 - DNA, 120 bp, Artificial Sequence
  ENSG00000146676_57 (sequence is synthesized)
gcagaaggcatgagtttgtccttttttcccccttaccttaaataacacttcaatagctaactttttccaaaatatccatttaggccatctcttatttcttaaagccaaatatttcgtccc

SEQ ID NO: 401898 - DNA, 120 bp, Artificial Sequence
  ENSG00000146676_58 (sequence is synthesized)
cagtcttaactctgagttgcaagatcaggctggttggaagaatctttatatttagaaataggatggtgagtggtttgtttattctcttgtaaaattcctttttcagagacataactgcag

SEQ ID NO: 401899 - DNA, 120 bp, Artificial Sequence
  ENSG00000146676_59 (sequence is synthesized)
ggagagtcccaagagaactgaagaactggattatatcattaaacacatttgtgttgtaggaatttgggagtttcattttgaactgataagatattagacataaacccttgttccagccca

SEQ ID NO: 401900 - DNA, 86 bp, Artificial Sequence
  ENSG00000146676_60 (sequence is synthesized)
aactgataagatattagacataaacccttgttccagcccacatgtgtcatccctgtgtacaaaagctctctggattccgtccaggc

SEQ ID NO: 401901 - DNA, 88 bp, Artificial Sequence
  ENSG00000146676_61 (sequence is synthesized)
tgcccgcctcagcttcacgcctagcctactctctgaatttctaaaagtcagtaggttgaccaaaaagtctagaaactggctttaagtc

SEQ ID NO: 401902 - DNA, 120 bp, Artificial Sequence
  ENSG00000146676_62 (sequence is synthesized)
cagtaggttgaccaaaaagtctagaaactggctttaagtcagtatgggacgtacttataaagagtccatggttttgcacgtttcggtagacaagtaaatctgagttatttttcaatgact

SEQ ID NO: 401903 - DNA, 120 bp, Artificial Sequence
  ENSG00000146676_63 (sequence is synthesized)
taccaatatttgaatagtaactaagatcgtcagtgtatctggacttctttttttgaagttctaaaacaattatagtagggatttattattttgggcctccatccagatgtttttccaaga

SEQ ID NO: 401904 - DNA, 120 bp, Artificial Sequence
  ENSG00000146676_64 (sequence is synthesized)
tcatttttaaaattcatttgtcttctgtttccagataacatactttccgttctataggaatcttcactgccaatcatagtatctaccagtggctttcttagactattcactccaaagctg

SEQ ID NO: 401905 - DNA, 120 bp, Artificial Sequence
  ENSG00000146676_65 (sequence is synthesized)
ggactgatgtcctgccagtagagaatctacagaaataatttgaatgaattaaaaccaaatcttgatagcaggagacagcttcctgatctagatgtacaattagagtttaggttggaaatt

SEQ ID NO: 401906 - DNA, 120 bp, Artificial Sequence
  ENSG00000146676_66 (sequence is synthesized)
actttaaaatgtgttttttggggatgtcttcaatctctgtgtaaatacccacatgcttatgcattgtaaaccaagtgtgtattcctgtgtatgaatttgtagaactgatttctgcttcaa

SEQ ID NO: 401907 - DNA, 120 bp, Artificial Sequence
  ENSG00000146676_67 (sequence is synthesized)
gagaagctgcacctttaattttataaggtcccctccacctgtaaccctataaatgtctgtaaataaaacactaaaatttgtagtgataggatcaatttgggaatatctgctgagagacca

SEQ ID NO: 401908 - DNA, 120 bp, Artificial Sequence
  ENSG00000146676_68 (sequence is synthesized)
aaaagttcatttttttaagtaccttggttaaagagtaaagattattcctcttattttttaaagaagaatgcactttaacaaacatagagctgcatgggcaattcaaacaaatctgtgaag

SEQ ID NO: 401909 - DNA, 120 bp, Artificial Sequence
  ENSG00000146676_69 (sequence is synthesized)
tgcagtacccattcagaaatcacacttcctgaaaaccgttcaaaagcagagtccagacgggctgttgatctcactgcctgtaggttgaagctcagattctgatcaattttgagaggagca

SEQ ID NO: 401910 - DNA, 120 bp, Artificial Sequence
  ENSG00000146676_70 (sequence is synthesized)
gggctgcttcaaaagagcaatgtgaatacagtcagaagcttcagactggtctgtaaaaatggcgggtcccgtatttaccactaactagcaaaactgacagaaaaactcacagagaaaaaa

SEQ ID NO: 401911 - DNA, 120 bp, Artificial Sequence
  ENSG00000146676_71 (sequence is synthesized)
tgtaagaatccttcctgctggtgtgcactccttacaatagacttttgcaaatggagttttacagtctatatttaaaaaaaattgtatgtttgtaacaaataaagtatgcagaaaagtgaa

SEQ ID NO: 401912 - DNA, 120 bp, Artificial Sequence
  ENSG00000146678_0 (sequence is synthesized)
atcggccaccgccatcccatccagcgagcatctgccgccgcgccgccgccaccctcccagagagcactggccaccgctccaccatcacttgcccagagtttgggccaccgcccgccgcca

SEQ ID NO: 401913 - DNA, 120 bp, Artificial Sequence
  ENSG00000146678_1 (sequence is synthesized)
ccagcccagagagcatcggcccctgtctgctgctcgcgcctggagatgtcagaggtccccgttgctcgcgtctggctggtactgctcctgctgactgtccaggtcggcgtgacagccggc

SEQ ID NO: 401914 - DNA, 120 bp, Artificial Sequence
  ENSG00000146678_2 (sequence is synthesized)
gctccgtggcagtgcgcgccctgctccgccgagaagctcgcgctctgcccgccggtgtccgcctcgtgctcggaggtcacccggtccgccggctgcggctgttgcccgatgtgcgccctg

SEQ ID NO: 401915 - DNA, 120 bp, Artificial Sequence
  ENSG00000146678_3 (sequence is synthesized)
cctctgggcgccgcgtgcggcgtggcgactgcacgctgcgcccggggactcagttgccgcgcgctgccgggggagcagcaacctctgcacgccctcacccgcggccaaggcgcctgcgtg

SEQ ID NO: 401916 - DNA, 120 bp, Artificial Sequence
  ENSG00000146678_4 (sequence is synthesized)
caggagtctgacgcctccgctccccatgctgcagaggcagggagccctgaaagcccagagagcacggagataactgaggaggagctcctggataatttccatctgatggccccttctgaa

SEQ ID NO: 401917 - DNA, 120 bp, Artificial Sequence
  ENSG00000146678_5 (sequence is synthesized)
gaggatcattccatcctttgggacgccatcagtacctatgatggctcgaaggctctccatgtcaccaacatcaaaaaatggaaggagccctgccgaatagaactctacagagtcgtagag

SEQ ID NO: 401918 - DNA, 120 bp, Artificial Sequence
  ENSG00000146678_6 (sequence is synthesized)
attttatcacagcagacagtgtgagacatccatggatggagaggcgggactctgctggtgcgtctacccttggaatgggaagaggatccctgggtctccagagatcaggggagaccccaa

SEQ ID NO: 401919 - DNA, 120 bp, Artificial Sequence
  ENSG00000146678_7 (sequence is synthesized)
ctgccagatatattttaatgtacaaaactgaaaccagatgaaataatgttctgtcacgtgaaatatttaagtatatagtatatttatactctagaacatgcacatttatatatatatgta

SEQ ID NO: 401920 - DNA, 120 bp, Artificial Sequence
  ENSG00000146678_8 (sequence is synthesized)
tatagtaactactttttatactccatacataacttgatatagaaagctgtttatttattcactgtaagtttattttttctacacagtaaaaacttgtactatgttaataacttgtcctat

SEQ ID NO: 401921 - DNA, 120 bp, Artificial Sequence
  ENSG00000146678_9 (sequence is synthesized)
aacttgtcctatgtcaatttgtatatcatgaaacacttctcatcatattgtatgtaagtaattgcatttctgctcttccaaagctcctgcgtctgtttttaaagagcatggaaaaatact

SEQ ID NO: 401922 - DNA, 120 bp, Artificial Sequence
  ENSG00000146678_10 (sequence is synthesized)
gcctagaaaatgcaaaatgaaataagagagagtagtttttcagctagtttgaaggaggacggttaacttgtatattccaccattcacatttgatgtacatgtgtagggaaagttaaaagt

SEQ ID NO: 401923 - DNA, 120 bp, Artificial Sequence
  ENSG00000146678_11 (sequence is synthesized)
gttgattacataatcaaagctacctgtggtgatgttgccacctgttaaaatgtacactggatatgttgttaaacacgtgtctataatggaaacatttacaataaatattctgcatggaaa

SEQ ID NO: 401924 - DNA, 120 bp, Artificial Sequence
  ENSG00000146678_12 (sequence is synthesized)
ggtgcactagcaaaacaaacttattttgaacactcagctcctagcgtgcggcgctgccaatcattaacctcctggtgcaagtggcgcggcctgtgccctttataaggtgcgcgctgtgtc

SEQ ID NO: 401925 - DNA, 120 bp, Artificial Sequence
  ENSG00000146700_0 (sequence is synthesized)
ctttttctggggccgctccagctggtgccggccacctccactcccctttgcttcttgctgtccctaaggtcggatggggacaggctggggccaccagccagctccatggacagggacttt

SEQ ID NO: 401926 - DNA, 120 bp, Artificial Sequence
  ENSG00000146700_1 (sequence is synthesized)
gcctctgctcaccttccagctgtggaaagaaaagaagaaacgcctgtgttgatttccatttggaagatccttcctcctcctaaacttccaggggcagacaaagtgattcgatcttggatt

SEQ ID NO: 401927 - DNA, 120 bp, Artificial Sequence
  ENSG00000146700_2 (sequence is synthesized)
gactgtagaagaagggacagaaagagcccagaacattcccccagatgttccaactgtgacttctccctggcgccttgatgggagcatctgaaacacccttcaccatctagatgcacaagg

SEQ ID NO: 401928 - DNA, 120 bp, Artificial Sequence
  ENSG00000146700_3 (sequence is synthesized)
aagcagagatgctaattggtccccagctggatgagaagcgctgggggtggaggttgggagatgggagtgctgcccctcccttcctcccccaagccctgtctttccttctcctcctgccac

SEQ ID NO: 401929 - DNA, 120 bp, Artificial Sequence
  ENSG00000146700_4 (sequence is synthesized)
tggccagcgccctacagcccactccactgccctttcaagagctgaggctggtggggggccccagccgctgccggggccgcctggaagtcatgcacggtggctcctggggcagcgtctgtg

SEQ ID NO: 401930 - DNA, 120 bp, Artificial Sequence
  ENSG00000146700_5 (sequence is synthesized)
atgacgactgggacgtggtggacgccaacgtagtgtgtcgccagctgggctgtggcctggcactgcccgtgccacggccccttgcctttggccaaggccgaggccccatcctgctggaca

SEQ ID NO: 401931 - DNA, 120 bp, Artificial Sequence
  ENSG00000146700_6 (sequence is synthesized)
acgtggagtgccgcgggcaggaagctgcgctgagcgagtgcggcagccgcggctggggcgtccacaattgctttcactacgaggatgtggctgtcctgtgtgatgaattcttgccaacgc

SEQ ID NO: 401932 - DNA, 120 bp, Artificial Sequence
  ENSG00000146700_7 (sequence is synthesized)
agcccccaacaaggaagatgttaaccagtagagcacctcctacgacactgccgaatggaaaaagtgagggcagcgtacgcctggtagggggcgcgaacctgtgtcagggccgagtggaga

SEQ ID NO: 401933 - DNA, 120 bp, Artificial Sequence
  ENSG00000146700_8 (sequence is synthesized)
tcctgcacagtggcctgtggggcaccgtgtgtgacgacgactgggggctgccggatgccgctgtggtctgtcgtcagctgggctgcggggcggccatggccgccaccaccaacgccttct

SEQ ID NO: 401934 - DNA, 120 bp, Artificial Sequence
  ENSG00000146700_9 (sequence is synthesized)
tcggctatggcaccggacacatcctgctggacaacgtgcactgcgaaggcggcgagccccgcctggcagcctgccagagcctgggctggggtgtgcacaactgcggccaccacgaggacg

SEQ ID NO: 401935 - DNA, 120 bp, Artificial Sequence
  ENSG00000146700_10 (sequence is synthesized)
cgggcgcgctctgcgcaggcctgggtcccccaacgctcacagcactgccatcctcagccacaagagaggactgggcttggcagacagatccgtccgctacaggagttggcccccagcctt

SEQ ID NO: 401936 - DNA, 120 bp, Artificial Sequence
  ENSG00000146700_11 (sequence is synthesized)
ggggaagaaaagtggacggctgcgactggtgggcggcccgggtccgtgccgcggccgcgtggaggtgttgcacgccgggggctggggcaccgtgtgcgacgatgactgggactttgcgga

SEQ ID NO: 401937 - DNA, 120 bp, Artificial Sequence
  ENSG00000146700_12 (sequence is synthesized)
tttgcggacgcgcgcgtggcctgccgcgaagcgggctgcgggcctgcgctgggcgctacgggactgggccacttcggctacggccgcggccccgtgctgctggacaacgtgggctgcgcc

SEQ ID NO: 401938 - DNA, 120 bp, Artificial Sequence
  ENSG00000146700_13 (sequence is synthesized)
ggctcgcctgagcgactgcttccacctgggctggggccagcacaactgcggccaccacgaggacgcgggagcgctctgcgcaggcccagaggagctgggactgcaagtccagcaggatgg

SEQ ID NO: 401939 - DNA, 120 bp, Artificial Sequence
  ENSG00000146700_14 (sequence is synthesized)
ttctgagaccacgcgggtgcccactcctcggcccagggacgggcatctacgtctggtcaatggagcccaccgatgcgagggacgtgtagagctctacctagggcaacggtggggcactgt

SEQ ID NO: 401940 - DNA, 120 bp, Artificial Sequence
  ENSG00000146700_15 (sequence is synthesized)
ctgtgatgatgcttgggacctgcgggcagccggtgtcctgtgccgccagctgggctgtggccaggccctcgcagcccctggcgaggctcactttggcccaggccgaggccccattctcct

SEQ ID NO: 401941 - DNA, 120 bp, Artificial Sequence
  ENSG00000146700_16 (sequence is synthesized)
ggacaatgtcaagtgccgtggggaagaaagtgctctgctgctctgctctcatatccgctgggatgcccacaactgtgaccacagcgaggatgccagtgtcctgtgccagccttcatgacc

SEQ ID NO: 401942 - DNA, 120 bp, Artificial Sequence
  ENSG00000146700_17 (sequence is synthesized)
cagcccgctctgcagaccacctcttcttctgggagctgtgacctcccttcctcctccaggaagccctcctcttgtgatgactacagttcactttgcccctccttcccttgcctgggagag

SEQ ID NO: 401943 - DNA, 120 bp, Artificial Sequence
  ENSG00000146700_18 (sequence is synthesized)
agcctacctagacagtgcagtcctgcttgggggagcctggctgtacccccgtccacttactgcgtgacctcagcctgtcatcgactgttgtgagcccaattcagtgaaagctcctgtggt

SEQ ID NO: 401944 - DNA, 120 bp, Artificial Sequence
  ENSG00000146700_19 (sequence is synthesized)
tttgctcagccaaaaccaaaacgaggggaagaggatgattcctaactcttctgtttggtggggctctttttatagcaccagactctgccttccttgacctagatccaggaggctcagggg

SEQ ID NO: 401945 - DNA, 120 bp, Artificial Sequence
  ENSG00000146700_20 (sequence is synthesized)
ctctttaaatggggtatctcctcttcccccaacccatcttgggatccccaagaagagggaaggcaggaggggcctacagctcctaccttgggccctcaggggctgcagaggaacctgggt

SEQ ID NO: 401946 - DNA, 120 bp, Artificial Sequence
  ENSG00000146700_21 (sequence is synthesized)
ccctgtcctgccctgctccgcgagggcctggactaactcagatggtgctcggctggacaaggggactgggggaggggccaaagcagggacagtggcccctccctgcagctggaaccagca

SEQ ID NO: 401947 - DNA, 120 bp, Artificial Sequence
  ENSG00000146700_22 (sequence is synthesized)
tctctgatttatgccgtctccaccacagagcctccactttgcaggagtgaagaaccctgggggcctgtagccaccagttcataggtgccaagtcaataaagcattgtcccccgtctctta

SEQ ID NO: 401948 - DNA, 120 bp, Artificial Sequence
  ENSG00000146700_23 (sequence is synthesized)
cgaggctcgcctgagcgactgcttccacctgggctggggccagcacaactgcggccaccacgaggacgcgggagcgctctgcgcaggtgaggctgacagcgaaggcccagaggagctggg

SEQ ID NO: 401949 - DNA, 120 bp, Artificial Sequence
  ENSG00000146701_0 (sequence is synthesized)
acttccccgtcaccagctcctgtgcctgccagtcggtgcccctcccgctccagccatgctctccgccctcgcccggcctgccagcgctgctctccgccgcagcttcagcacctcggccca

SEQ ID NO: 401950 - DNA, 120 bp, Artificial Sequence
  ENSG00000146701_1 (sequence is synthesized)
gaacaatgctaaagtagctgtgctaggggcctctggaggcatcgggcagccactttcacttctcctgaagaacagccccttggtgagccgcctgaccctctatgatatcgcgcacacacc

SEQ ID NO: 401951 - DNA, 120 bp, Artificial Sequence
  ENSG00000146701_2 (sequence is synthesized)
cggagtggccgcagatctgagccacatcgagaccaaagccgctgtgaaaggctacctcggacctgaacagctgcctgactgcctgaaaggttgtgatgtggtagttattccggctggagt

SEQ ID NO: 401952 - DNA, 120 bp, Artificial Sequence
  ENSG00000146701_3 (sequence is synthesized)
ccccagaaagccaggcatgacccgggacgacctgttcaacaccaatgccacgattgtggccaccctgaccgctgcctgtgcccagcactgcccggaagccatgatctgcgtcattgccaa

SEQ ID NO: 401953 - DNA, 120 bp, Artificial Sequence
  ENSG00000146701_4 (sequence is synthesized)
tccggttaattccaccatccccatcacagcagaagttttcaagaagcatggagtgtacaaccccaacaaaatcttcggcgtgacgaccctggacatcgtcagagccaacacctttgttgc

SEQ ID NO: 401954 - DNA, 120 bp, Artificial Sequence
  ENSG00000146701_5 (sequence is synthesized)
agagctgaagggtttggatccagctcgagtcaacgtccctgtcattggtggccatgctgggaagaccatcatccccctgatctctcagtgcacccccaaggtggactttccccaggacca

SEQ ID NO: 401955 - DNA, 120 bp, Artificial Sequence
  ENSG00000146701_6 (sequence is synthesized)
gctgacagcactcactgggcggatccaggaggccggcacggaggtggtcaaggctaaagccggagcaggctctgccaccctctccatggcgtatgccggcgcccgctttgtcttctccct

SEQ ID NO: 401956 - DNA, 120 bp, Artificial Sequence
  ENSG00000146701_7 (sequence is synthesized)
tgtggatgcaatgaatggaaaggaaggtgttgtggaatgttccttcgttaagtcacaggaaacggaatgtacctacttctccacaccgctgctgcttgggaaaaagggcatcgagaagaa

SEQ ID NO: 401957 - DNA, 120 bp, Artificial Sequence
  ENSG00000146701_8 (sequence is synthesized)
cctgggcatcggcaaagtctcctcttttgaggagaagatgatctcggatgccatccccgagctgaaggcctccatcaagaagggggaagatttcgtgaagaccctgaagtgagccgctgt

SEQ ID NO: 401958 - DNA, 120 bp, Artificial Sequence
  ENSG00000146701_9 (sequence is synthesized)
cagtttccttaatttatgaaggcatcatgtcactgcaaagccgttgcagataaactttgtattttaatttgctttggtgatgattactgtattgacatcatcatgccttccaaattgtgg

SEQ ID NO: 401959 - DNA, 120 bp, Artificial Sequence
  ENSG00000146701_10 (sequence is synthesized)
gtggctctgtgggcgcatcaataaaagccgtccttgattttatttttcaaggtcccttctgtaaatgctgtgctttcttccctgtgagagccaactttagagtgtctgctacctcttcat

SEQ ID NO: 401960 - DNA, 120 bp, Artificial Sequence
  ENSG00000146701_11 (sequence is synthesized)
taccaatcagaattagatgatgtttaactgttagactgaagcgtgacgctttcatcagtagcttcaagaaagtctaaattgttaatttatggaattggacacagtattcagtttacccgt

SEQ ID NO: 401961 - DNA, 120 bp, Artificial Sequence
  ENSG00000146701_12 (sequence is synthesized)
acatgctcctcccgcccctcctgttggcacccttgcatcgcccaggcctgattcctcctgggggtagttcacccccacgggttcatagttcagcggcgaatgccaggcagctgttttctg

SEQ ID NO: 401962 - DNA, 120 bp, Artificial Sequence
  ENSG00000146701_13 (sequence is synthesized)
gctgagcaaacagcacctttctcattgagcttcctctactgacctctgtcccccttgggatttcatcttctgaccgaaccctgatgttcagtggcagagacagcccatagccagaactgt

SEQ ID NO: 401963 - DNA, 120 bp, Artificial Sequence
  ENSG00000146701_14 (sequence is synthesized)
gggtagaccagggttggggtgtgcggtttgggacagcccaaaccccagccgctgtgtcaaggcctaggacgccatgctgccatcaaaagggggttccaggtttccatcagtggcctaaag

SEQ ID NO: 401964 - DNA, 120 bp, Artificial Sequence
  ENSG00000146701_15 (sequence is synthesized)
aagggacttcttgttgtactgaggagtgcggaattaaagagatttgactccctttagtattgggggcagtccgttccccagacactgtggcctctgaagtggaaactgaaagctgcatac

SEQ ID NO: 401965 - DNA, 120 bp, Artificial Sequence
  ENSG00000146701_16 (sequence is synthesized)
ctgggaaagaactttctaggaataggcaatggccttcagtggaagagggagggctggaggtgtgcccagtacttggatgttcatctgtccacaacagctttttgtttttttaaaaaagct

SEQ ID NO: 401966 - DNA, 120 bp, Artificial Sequence
  ENSG00000146701_17 (sequence is synthesized)
aaaatggaaatggattttatcataaaggatgacatcgttttcttctacaattaatacatgttcattgtataaaacccaaaaagcagctaaaaaataaagcgggaaaggaactactggtaa

SEQ ID NO: 401967 - DNA, 120 bp, Artificial Sequence
  ENSG00000146701_18 (sequence is synthesized)
ccacaccgctgctgcttggggtacgtatccaggcgtgggtccttctgactgtggaataagggggcgttccctttgcttaagcctcaggagctctccctggccctttatgcagtaagctca

SEQ ID NO: 401968 - DNA, 120 bp, Artificial Sequence
  ENSG00000146701_19 (sequence is synthesized)
tgtgcctgcctggcgagtgctgttgttttcaagggtggacgcacacccgagaaaaaagagctgggaggatcacagactgtgaagggtgaacctcccagcaagtgggtctccttccctgca

SEQ ID NO: 401969 - DNA, 120 bp, Artificial Sequence
  ENSG00000146701_20 (sequence is synthesized)
gcgctgctctccgccgcagcttcagcacctcggcccaggtaggccagacgaggggcggcctgcaggcggaggccccccggcccgggccacgtgcgtccccggttcgcgggcagctctgac

SEQ ID NO: 401970 - DNA, 120 bp, Artificial Sequence
  ENSG00000146701_21 (sequence is synthesized)
gcgtccccggttcgcgggcagctctgaccctctccaggccagcctggaccgcagggatgcccggcactggctggagactgtggcgcccggggcaggccctgacactggcctggaggtgcg

SEQ ID NO: 401971 - DNA, 120 bp, Artificial Sequence
  ENSG00000146701_22 (sequence is synthesized)
gaactgggccagggttacagtcatttggccagaggattagaattcagcgcttctgacctgaagacggcttcctcttaacctttttggaggatctctcctgctgtgggcggactgagcctg

SEQ ID NO: 401972 - DNA, 120 bp, Artificial Sequence
  ENSG00000146701_23 (sequence is synthesized)
ccgccaggtgtcttaacagtgcttgacttggcccgcgaccacttaagcctaggagcctaggctatttttagccatcttctagaatggtggttcttaaactctgcagtgtgtcagaatcac

SEQ ID NO: 401973 - DNA, 120 bp, Artificial Sequence
  ENSG00000146701_24 (sequence is synthesized)
cagaaagctaataaaaaacagacgtctgggttcattgaagaagcttaagactgcgggggggggggggggggtccgcatttttaccaggtgaatctaattaaacctaattttgagaaccca

SEQ ID NO: 401974 - DNA, 120 bp, Artificial Sequence
  ENSG00000146701_25 (sequence is synthesized)
gtttataaagctgcaggttgaagggaaggctgctgttaccagtccagctgcctgatggagtccagcttgttcttcatctttcaggagggttttgaagtaccctgagtatcacagactcta

SEQ ID NO: 401975 - DNA, 120 bp, Artificial Sequence
  ENSG00000146701_26 (sequence is synthesized)
cagacataaattctccccatttgaaagtggacctttggaatgaaggtcctgaattcttccagaatgagactgttacaaatacaatgattgtatcttgctttggcaactgcagtaaaaaga

SEQ ID NO: 401976 - DNA, 120 bp, Artificial Sequence
  ENSG00000146707_0 (sequence is synthesized)
ggctgcggcggctggagcaggcgagcggcggcggccgatagcgagtgtcagggccggccggggcggcgcttctcggcctgtcgctggtcggcctcctactgtacctcgtgcctgctgcgg

SEQ ID NO: 401977 - DNA, 120 bp, Artificial Sequence
  ENSG00000146707_1 (sequence is synthesized)
ctgcgctggcctggctggccgtggggactaccgcggcctggtggggactgagccgcgagccccgaggttcgcgccccttgtcctccttcgttcagaaggcgcgacatcggcgaacactgt

SEQ ID NO: 401978 - DNA, 120 bp, Artificial Sequence
  ENSG00000146707_2 (sequence is synthesized)
tcgcttcgcctccggccaagtcgacagccaacggaaacctcctagagccgcggaccctgctcgaaggacctgaccctgccgaactgctcctcatgggcagttacctgggcaagcccgggc

SEQ ID NO: 401979 - DNA, 120 bp, Artificial Sequence
  ENSG00000146707_3 (sequence is synthesized)
gcagcccgcccccgctccggagggccaggacctgcggaataggcctggccgccgcccgcccgcccggcgccgcgctccacaccgccctccccgccgacccatcgcgttcaccacttttac

SEQ ID NO: 401980 - DNA, 120 bp, Artificial Sequence
  ENSG00000146707_4 (sequence is synthesized)
ttacccctctctccccactcctcttctccgaccctccgggaggccttccccacgggatcgtgggactttaccagatcggtttgtaataacacctcgaagacgctatccgatccatcaggc

SEQ ID NO: 401981 - DNA, 120 bp, Artificial Sequence
  ENSG00000146707_5 (sequence is synthesized)
ccagtattcctgtccgggggtacttcccacagtgtgctggaatggttatcacaagaaggctgtgctgtcccctcgcaactccaggatggtgtgtagcccagtgactctgaggatcgcccc

SEQ ID NO: 401982 - DNA, 120 bp, Artificial Sequence
  ENSG00000146707_6 (sequence is synthesized)
caacactgtcctcaccatcaagtaatgccccagacccatgtgcaaaggagactgtactgagtgccctcaaagagaagaagaagaaaaggacagtggaggaagaagaccaaatattccttg

SEQ ID NO: 401983 - DNA, 120 bp, Artificial Sequence
  ENSG00000146707_7 (sequence is synthesized)
atggccaggaaaataaaagaagctgtcttgtcgacggtctcactgatgcctcttctgcattcaaagttcctcgacccgggccagatacactccagttcacagtggatgtcttccactttg

SEQ ID NO: 401984 - DNA, 120 bp, Artificial Sequence
  ENSG00000146707_8 (sequence is synthesized)
ctaatgactccagaaacatgatatacatcacctgccacctgaaggtcaccctagctgagcaggacccagatgaactcaacaaggcctgttccttcagcaagccttccaacagctggttcc

SEQ ID NO: 401985 - DNA, 120 bp, Artificial Sequence
  ENSG00000146707_9 (sequence is synthesized)
cagtggaaggcctggctgacatctgtcaatgctgtaacaaaggtgactgtggcactccaagccattccaggaggcagcctcgtgtcgtgagccagtggtccacgtctgcttccctgtaac

SEQ ID NO: 401986 - DNA, 120 bp, Artificial Sequence
  ENSG00000146707_10 (sequence is synthesized)
cgcaggcatgtgacagaagaagcagatgtcaccgtggggccactgatcttcctggacaggaggggtgaccatgaagtagagcagtgggctttgccttctgacacctcagtggtgctgctg

SEQ ID NO: 401987 - DNA, 120 bp, Artificial Sequence
  ENSG00000146707_11 (sequence is synthesized)
ggcgtaggcctggctgtggtggtgtccctgactctgactgctgttatcctggttctcaccaggaggtgtcgcactgcctcccaccctgtgtctgcttccgaataaaagaagaaagcaata

SEQ ID NO: 401988 - DNA, 60 bp, Artificial Sequence
  ENSG00000146707_12 (sequence is synthesized)
ggtgcccggcccacctgtctggctttaacaccgttctgttttcttccaagctgtcttgtc

SEQ ID NO: 401989 - DNA, 120 bp, Artificial Sequence
  ENSG00000146729_0 (sequence is synthesized)
ggcgccgagcaagatggcggcgcgagtgctgcgcgcccgcggagcggcctgggccggcggcctcctgcagcgggcggccccctgcagcctcctgcccaggctccggacatggacatcttc

SEQ ID NO: 401990 - DNA, 120 bp, Artificial Sequence
  ENSG00000146729_1 (sequence is synthesized)
atggacatcttccagcaacagatctcgagaagacagctggctaaaatccttatttgtccggaaagttgatccaagaaaagatgcccactccaatctcctagccaaaaaggaaacaagcaa

SEQ ID NO: 401991 - DNA, 120 bp, Artificial Sequence
  ENSG00000146729_2 (sequence is synthesized)
tctatacaaattacagtttcacaatgttaaaccggaatgcctagaagcatacaacaaaatttgtcaagaggtgttgccaaagattcacgaagataaacactacccttgtactttggtggg

SEQ ID NO: 401992 - DNA, 120 bp, Artificial Sequence
  ENSG00000146729_3 (sequence is synthesized)
gacttggaacacgtggtatggcgagcaggaccaagctgtccacctctggaggtatgaaggaggctatccagccctcacagaagtcatgaataaactcagagaaaataaggaatttttgga

SEQ ID NO: 401993 - DNA, 120 bp, Artificial Sequence
  ENSG00000146729_4 (sequence is synthesized)
atttcgtaaggcaagaagtgacatgcttctctccaggaagaatcagctcctgttggagttcagtttctggaatgagcctgtgccaagatccggacctaatatatatgaactcaggtctta

SEQ ID NO: 401994 - DNA, 120 bp, Artificial Sequence
  ENSG00000146729_5 (sequence is synthesized)
ccaactccgaccaggaaccatgattgaatggggcaattactgggctcgtgcaatccgcttcagacaggatggtaacgaagccgtcggaggattcttctctcagattgggcagctgtacat

SEQ ID NO: 401995 - DNA, 120 bp, Artificial Sequence
  ENSG00000146729_6 (sequence is synthesized)
ggtgcaccatctttgggcttacagggatcttcagaccagggaagacatacggaatgcagcatggcacaaacatggctgggaggaattggtatattacacagttccacttattcaggaaat

SEQ ID NO: 401996 - DNA, 120 bp, Artificial Sequence
  ENSG00000146729_7 (sequence is synthesized)
ggaatccagaatcatgatcccactgaagacctcgcccctccagtaaagctgtagagtttctatgtgcctacatacatttctgtgacaagtatttgtcgtaaattaattttaattgtgtat

SEQ ID NO: 401997 - DNA, 120 bp, Artificial Sequence
  ENSG00000146729_8 (sequence is synthesized)
acataatcacaagaaaggaaagaattacagttggactgattgtgacagtgccttgtcgtcctctttgaaacaccccgtgttgtccagtataccttataacactgagccacttctccccac

SEQ ID NO: 401998 - DNA, 120 bp, Artificial Sequence
  ENSG00000146729_9 (sequence is synthesized)
cctccagaaggggtccacgttgaattctgaatcatcttgaaaataagattccaaccacaaaaaaaatttagccatttctttactaaaaaaaaccaaaaaacaaatctgttttataatcac

SEQ ID NO: 401999 - DNA, 120 bp, Artificial Sequence
  ENSG00000146729_10 (sequence is synthesized)
agatttttagacaaatttcttgtatcaggaagaaatacaaattttgtcatgtttctcaagcagtttttctgagtagtttctgaggaggaacaaattacaagtgtacccaataactgaaaa

SEQ ID NO: 402000 - DNA, 120 bp, Artificial Sequence
  ENSG00000146729_11 (sequence is synthesized)
tgttttaactcactctcatttgtaagcagtccacatagtagacaatgggttttccaagctgggcaaggtacatttaatcagtaaatcagtttcacatcatgtattgtgatgtttcaatgt

SEQ ID NO: 402001 - DNA, 120 bp, Artificial Sequence
  ENSG00000146729_12 (sequence is synthesized)
gagacacaaaaacaatggcttgaaacttgtgtatcatatgtgattttgaaatgaacaccttgaatagcactaatttttatttgtggtatttttctataacaaaacaagtagctctaggaa

SEQ ID NO: 402002 - DNA, 120 bp, Artificial Sequence
  ENSG00000146729_13 (sequence is synthesized)
aagaggttttattttgtaaacgatcatttgtgacctcagacactctctggctaatattttaataagctcacagcagataattctgagatcatgggtgaggggtggtgcatgttgagattt

SEQ ID NO: 402003 - DNA, 120 bp, Artificial Sequence
  ENSG00000146729_14 (sequence is synthesized)
aaattggcataaagctgcatactttttgtctagctgtttgatttcattttttaatatagtatgccaattttgtgactgttaccatgtgaaagtcctgttgaaatgaacaattgtctgccc

SEQ ID NO: 402004 - DNA, 120 bp, Artificial Sequence
  ENSG00000146729_15 (sequence is synthesized)
cacaatcaagaatgtatgtgtaaagtgtgaataaatctcatatcaaatgtcaaacttttacatgtgaatgattttctcaaagaacatagaaaagtcaataaaatcctcttaatttccaca

SEQ ID NO: 402005 - DNA, 120 bp, Artificial Sequence
  ENSG00000146729_16 (sequence is synthesized)
taaaccggaatgcctagaagcatacaacaaaatttggtgtgtataccaaactatcctttacttggggaaaaataatgactttatttgttagttaattccactaacacttgatagcataga

SEQ ID NO: 402006 - DNA, 120 bp, Artificial Sequence
  ENSG00000146729_17 (sequence is synthesized)
gagagatctttcatccctctcttttgaagctgaacattcagaggctcttaaactgagcttcatgtgggattgccgaaggcgttttgattttaagcactcacacagctaaatcatcatata

SEQ ID NO: 402007 - DNA, 63 bp, Artificial Sequence
  ENSG00000146729_18 (sequence is synthesized)
agtatctaggctcactgcgacctctgcctcccgggtttaagcgattcttctgctttagcctcc

SEQ ID NO: 402008 - DNA, 120 bp, Artificial Sequence
  ENSG00000146729_19 (sequence is synthesized)
tgatgagtatctaggctcactgcgacctctgcctcccgggtttaagcgattcttctgctttagcctcccaagtagctggaaatacaggtgcccaccaccacacccaggtaatttttgtat

SEQ ID NO: 402009 - DNA, 120 bp, Artificial Sequence
  ENSG00000146729_20 (sequence is synthesized)
cagcctacagttttgtgctgtgttaacgttatacctatctagaacattttcaagtagtagtatcatgaaattctaaacgtatactgtcttttaaaatgcatttcagtccacctctggagg

SEQ ID NO: 402010 - DNA, 120 bp, Artificial Sequence
  ENSG00000146729_21 (sequence is synthesized)
gggccctgaccggcgcgacccgtggccagggacagggacagcgcgcgcctgaggccgcaggccccggacgccgtctgctgggtcctcgccggaggctgttccaagcctgagtggctgcgt

SEQ ID NO: 402011 - DNA, 120 bp, Artificial Sequence
  ENSG00000146729_22 (sequence is synthesized)
cctggtttttaggggtcccaataatgggattctgcccaacccatccagttctgggtacaagtactgcctgccttacaatctccattcagtcaagaggtgttgccaaagattcacgaagat

SEQ ID NO: 402012 - DNA, 120 bp, Artificial Sequence
  ENSG00000146729_23 (sequence is synthesized)
gatttgcgatctaaacctgcttacagaatttgtaaactttaagacgaaaggggagaactaagcttaccagcttttaagttaacagaaatagtattttaatgacccatggtgagcaaatgt

SEQ ID NO: 402013 - DNA, 120 bp, Artificial Sequence
  ENSG00000146729_24 (sequence is synthesized)
gaagaaaaaggtttttagttttgttttgtttttacctttaatatctactacgttcttaagaaagcaaacaattttgtccctataatcagcatactttttagaagaaaaaccttttgtttt

SEQ ID NO: 402014 - DNA, 120 bp, Artificial Sequence
  ENSG00000146729_25 (sequence is synthesized)
ttattgttttgtttttgaagatagcttatgaaatgtaacaatagcattgaatttcttgctcattccagcacatttctctttattaaaaaatgcccttaaaacaaagcagatgtttatttc

SEQ ID NO: 402015 - DNA, 120 bp, Artificial Sequence
  ENSG00000146729_26 (sequence is synthesized)
taagtcttttctcataaaaatggaatttttccctatgccgatgttgtcctggattaccttttttgtcctgtcttatcacttcgtctcctgtctcgggtttctggctgtctgttcctattt

SEQ ID NO: 402016 - DNA, 120 bp, Artificial Sequence
  ENSG00000146729_27 (sequence is synthesized)
ctatttgatgttgtgctctcacttcacacccagcatgtagaatcaccttgctcttccaacttccctgtctgtgccactcaccttgttttactcagcccgttccttagttctctgtggtga

SEQ ID NO: 402017 - DNA, 120 bp, Artificial Sequence
  ENSG00000146729_28 (sequence is synthesized)
atctgtcacctaagctgtgcattcttcatcggacatgtattttggttctcttgtttccttctccatctctctctccaagcctctcgagccccattcccaagtagctttttttctgactac

SEQ ID NO: 402018 - DNA, 120 bp, Artificial Sequence
  ENSG00000146729_29 (sequence is synthesized)
ctttctgggctccaagctatacctgtgtctccttcctgccctgcaatacattaccccaaagtttgtcagattgatctgcttgagttctgttttcttttttcatcacgttttttcttttct

SEQ ID NO: 402019 - DNA, 120 bp, Artificial Sequence
  ENSG00000146729_30 (sequence is synthesized)
gccttacaatctccattcaggtaaggccagggctcctaagagcaggtttggggtccccagcaaagaggagtggctacaaatccatgcgtgactttgtgttggtgaaaaacctgggccccg

SEQ ID NO: 402020 - DNA, 120 bp, Artificial Sequence
  ENSG00000146729_31 (sequence is synthesized)
ttgccaggcccctttctggaccccacctgaatcatgtgtactgggcttcctcctgggcactgcctccaatgcagggttgtctattcctgctcatgtcatgcgacgaaaaggaaatgttgg

SEQ ID NO: 402021 - DNA, 120 bp, Artificial Sequence
  ENSG00000146729_32 (sequence is synthesized)
acatacatttccctagcagaatccctctttccctgtcctcgattttcattgatcccatgttatttctgaacattcatgagtcacgcatcagatacatttaatatcagatcctaatttaaa

SEQ ID NO: 402022 - DNA, 120 bp, Artificial Sequence
  ENSG00000146729_33 (sequence is synthesized)
aagtaaatgctactcttccaaaagtacacatgatgtggtcactatactgggtcataaagatgtatgggttttcagttagttagacttagaccgttttggaacttttctctgttaaccatt

SEQ ID NO: 402023 - DNA, 120 bp, Artificial Sequence
  ENSG00000146729_34 (sequence is synthesized)
tatgtatccctggtcgtatggagctccagtggtgcagtcggttagcacatggtacttacatacccttggtcctgtagccccagcatctggtggtgatcactagctaaatatcagagtcag

SEQ ID NO: 402024 - DNA, 120 bp, Artificial Sequence
  ENSG00000146729_35 (sequence is synthesized)
caaatagtgtgaacaggttccatttcttgcccttgatccccttttgcatccattgttgaatctgtatgatactttttcatcataatttttctattcaaaaagtgtgcaggttttagcttt

SEQ ID NO: 402025 - DNA, 120 bp, Artificial Sequence
  ENSG00000146729_36 (sequence is synthesized)
tctcttggtgtaaaacagttacactcttccctttgcctttccctgtacattagaatctataccataggaaagcttccatggaaccaagctccactctgacacccctgttaaattcataca

SEQ ID NO: 402026 - DNA, 120 bp, Artificial Sequence
  ENSG00000146729_37 (sequence is synthesized)
ctgccgtgacctgtcatggctttgtccctgtccctgcacaatgcgcgggaatgaattggttggtgtgttcggtgcgagactacgtgacacccctcccatccccttggcccattgaattga

SEQ ID NO: 402027 - DNA, 120 bp, Artificial Sequence
  ENSG00000146729_38 (sequence is synthesized)
gtagaacataatttatgcttcgcattgtatctttaatttttattcttctgccatgttgatgcccttggggagtattggaggttggagtcgcttccagactatgttgtgttccagctgtct

SEQ ID NO: 402028 - DNA, 120 bp, Artificial Sequence
  ENSG00000146729_39 (sequence is synthesized)
ggtactgcttgtgttgtctgcctctgtcttgaacattactttcctccctttccatcttccttatttcttctgtgttcttttctactattccccgtctctcattcttctgtctttggaacc

SEQ ID NO: 402029 - DNA, 120 bp, Artificial Sequence
  ENSG00000146729_40 (sequence is synthesized)
aacagaatgttttttggtgatgtcgttttttttcccctcaaatggaaaatagtagacccatagctcccaaaatcctgggacctttggtttttctttatcatcattatactgattgaacaa

SEQ ID NO: 402030 - DNA, 120 bp, Artificial Sequence
  ENSG00000146729_41 (sequence is synthesized)
ctcttctagatagttggggtatcagaaacctaagcttctgatcagcagggtgttggaatacaacataattcagctaaaaggttaactccacatgccgttttatcatgatgttctaaggtc

SEQ ID NO: 402031 - DNA, 120 bp, Artificial Sequence
  ENSG00000146729_42 (sequence is synthesized)
agttgttagaacacagagtaggtggtctttttcctgttactgatcaggtgctgtccacctggtcaaattttgctggttgtttaattagtgttgctgtttcttctctttaagtcaagaggt

SEQ ID NO: 402032 - DNA, 120 bp, Artificial Sequence
  ENSG00000146729_43 (sequence is synthesized)
ctttaactccgcccacggctaaggagatgcacggcctacgagaggggtagtgtgggactgagccaatgcgtacggcgtgacgccatcccgctgcgaccggcgctccccggggcaggtggc

SEQ ID NO: 402033 - DNA, 120 bp, Artificial Sequence
  ENSG00000146731_0 (sequence is synthesized)
agaagacccggatagttcctcccggccacgccgcgccggctctgggcactcagcatcgtttccttttcctccgctggagcagctatggcggcggtgaagaccctgaaccccaaggccgag

SEQ ID NO: 402034 - DNA, 120 bp, Artificial Sequence
  ENSG00000146731_1 (sequence is synthesized)
gtggcccgagcgcaggcggcgctggcggtcaacatcagcgcagcgcggggtctgcaggacgtgctaaggaccaacctggggcccaagggcaccatgaagatgctcgtttctggcgctgga

SEQ ID NO: 402035 - DNA, 120 bp, Artificial Sequence
  ENSG00000146731_2 (sequence is synthesized)
gacatcaaacttactaaagacggcaatgtgctgcttcacgaaatgcaaattcaacacccaacagcttccttaatagcaaaggtagcaacagcccaggatgatataactggtgatggtacg

SEQ ID NO: 402036 - DNA, 120 bp, Artificial Sequence
  ENSG00000146731_3 (sequence is synthesized)
acttctaatgtcctaatcattggagagctgctgaaacaggcggatctctacatttctgaaggccttcatcctagaataatcactgaaggatttgaagctgcaaaggaaaaggcccttcag

SEQ ID NO: 402037 - DNA, 120 bp, Artificial Sequence
  ENSG00000146731_4 (sequence is synthesized)
tttttggaagaagtcaaagtaagcagagagatggacagggaaacacttatagatgtggccagaacatctcttcgtactaaagttcatgctgaacttgcagatgtcttaacagaggctgta

SEQ ID NO: 402038 - DNA, 120 bp, Artificial Sequence
  ENSG00000146731_5 (sequence is synthesized)
gtggactccattttggccattaaaaagcaagatgaacctattgatctcttcatgattgagatcatggagatgaaacataaatctgaaactgatacaagcttaatcagagggcttgttttg

SEQ ID NO: 402039 - DNA, 120 bp, Artificial Sequence
  ENSG00000146731_6 (sequence is synthesized)
gaccacggagcacggcatcctgatatgaagaaaagggtggaggatgcatacatcctcacttgtaacgtgtcattagagtatgagaaaacagaagtgaattctggctttttttacaagagt

SEQ ID NO: 402040 - DNA, 120 bp, Artificial Sequence
  ENSG00000146731_7 (sequence is synthesized)
gcagaagagagagaaaaactcgtgaaagctgaaagaaaattcattgaagatagggttaaaaaaataatagaactgaaaaggaaagtctgtggcgattcagataaaggatttgttgttatt

SEQ ID NO: 402041 - DNA, 120 bp, Artificial Sequence
  ENSG00000146731_8 (sequence is synthesized)
aatcaaaagggaattgaccccttttccttagatgctctttcaaaagaaggcatagttgctctgcgcagagctaaaaggagaaatatggagaggctgactcttgcttgtggtggggtagcc

SEQ ID NO: 402042 - DNA, 120 bp, Artificial Sequence
  ENSG00000146731_9 (sequence is synthesized)
ctgaattcttttgacgacctaagtcctgactgcttgggacatgcaggacttgtatatgagtatacattgggagaagagaagtttacctttattgagaaatgtaacaaccctcgttctgtc

SEQ ID NO: 402043 - DNA, 120 bp, Artificial Sequence
  ENSG00000146731_10 (sequence is synthesized)
gcttgagggctgtcaaaaatgctattgatgatggctgtgtggttccaggtgctggtgccgtggaagtggcaatggcagaagccctgattaaacataagcccagtgtaaagggcagggcac

SEQ ID NO: 402044 - DNA, 120 bp, Artificial Sequence
  ENSG00000146731_11 (sequence is synthesized)
agcttggagtccaagcatttgctgatgcattgctcattattcccaaggttcttgctcagaactctggttttgaccttcaggaaacattagttaaaattcaagcagaacattcagaatcag

SEQ ID NO: 402045 - DNA, 120 bp, Artificial Sequence
  ENSG00000146731_12 (sequence is synthesized)
gtcagcttgtgggtgtggacctgaacacaggtgagccaatggtggcagcagaagtaggcgtatgggataactattgtgtaaagaaacagcttcttcactcctgcactgtgattgccacca

SEQ ID NO: 402046 - DNA, 120 bp, Artificial Sequence
  ENSG00000146731_13 (sequence is synthesized)
acattctcttggttgatgagatcatgcgagctggaatgtcttctctgaaaggttgaattgaagcttcctctgtatctgaatcttgaagactgcaaagtgatcctgaggattacagctgtg

SEQ ID NO: 402047 - DNA, 120 bp, Artificial Sequence
  ENSG00000146731_14 (sequence is synthesized)
gaatttttgtccaagcttcaaataattttgaaagaaattttcccatatgaaaaaaggagagaacactggcatctgttgaaatttggaagttctgaaattatagtatttttaaaaattgca

SEQ ID NO: 402048 - DNA, 120 bp, Artificial Sequence
  ENSG00000146731_15 (sequence is synthesized)
ctgaagtgtatacacataaagcaggtcttttatccagtgaacaggatgttttgctttagcagcagtgacataaaattccatgttagataagcatatgttacttaccttgttattaaatat

SEQ ID NO: 402049 - DNA, 120 bp, Artificial Sequence
  ENSG00000146731_16 (sequence is synthesized)
ttcttgaaaagcaaattttaatggtttaattttatgtggacgtatgttaaattatccaactaccctattgttaagcatttggttttaaaatttttatgctaatataaatgctcaagtaat

SEQ ID NO: 402050 - DNA, 120 bp, Artificial Sequence
  ENSG00000146731_17 (sequence is synthesized)
ttaaaatattgaaagcatccctgttggtataaatttctgagtaaatgcattggatcagttggactttgaacgcctttgaaatggctttgctaaaatgctcccgccacaaagttgtaggaa

SEQ ID NO: 402051 - DNA, 120 bp, Artificial Sequence
  ENSG00000146731_18 (sequence is synthesized)
atgggaagaggagtcaactagaggcaagggagttgagagagctgcaactgtaaagggcaagaacaggcagaggtaaaaagatgatggaaggtgtggtgactaagggccacggttattggg

SEQ ID NO: 402052 - DNA, 120 bp, Artificial Sequence
  ENSG00000146731_19 (sequence is synthesized)
tgaaatttgagattgtaggccaactgtattttcaagcttctgaacttaggcaaaatattcatcgcaaagtctctagcgtcatatttttctcacccaaattacgtttccacgagattattt

SEQ ID NO: 402053 - DNA, 120 bp, Artificial Sequence
  ENSG00000146731_20 (sequence is synthesized)
atatatagttggtctatctctgcagtccttgaaggtgaagttgtgtgttactaggctgtgttttgggatgtcagcagtggcctgaagtgagttgtgcaataaatgttaagttgaaacctc

SEQ ID NO: 402054 - DNA, 120 bp, Artificial Sequence
  ENSG00000146731_21 (sequence is synthesized)
gtcagcttgtgggtgtggacctgaacacaggtaagagaatgcaactgttgtagagggaaaactagatgtaatacgtgtgagttgaagccaggaaagattaaaaatgttttgctttgcaat

SEQ ID NO: 402055 - DNA, 120 bp, Artificial Sequence
  ENSG00000146731_22 (sequence is synthesized)
ttgacaccagtgctgttagggaactctgggttctaaaatgggataaaataggatattaataaaaaatggaatgactaggtataattaagggacgagtagacatgagtaatttggggatac

SEQ ID NO: 402056 - DNA, 120 bp, Artificial Sequence
  ENSG00000146731_23 (sequence is synthesized)
tatttttgggtttttcaactgtatagttaattggcattaactatattcacattgtgcaccccgtcagcactgtccatctctaggacttttttcatcatcacaaactgaaactgtataccc

SEQ ID NO: 402057 - DNA, 120 bp, Artificial Sequence
  ENSG00000146731_24 (sequence is synthesized)
attaaatagttactccccatttctccctcccccttgccccttgtaaacattattttactttttgtttctgaattcaatatacttttttccaaagagctccccacaataaaaagctttttt

SEQ ID NO: 402058 - DNA, 85 bp, Artificial Sequence
  ENSG00000146731_25 (sequence is synthesized)
ttttcttggtaatttttgtagaaacaggttcataattgtgttgcccaggctggtcttaaactcccgggctcaggctgtccttcac

SEQ ID NO: 402059 - DNA, 120 bp, Artificial Sequence
  ENSG00000146731_26 (sequence is synthesized)
agccaccgtgcctggttcatgaagtctttagcagaaaaattaattgaaattcaggatcagatttttgtttatatacattttgaaggtttatgtgtagtaatgggaagccattgatgggga

SEQ ID NO: 402060 - DNA, 120 bp, Artificial Sequence
  ENSG00000146731_27 (sequence is synthesized)
tcattctctgtaagtccctcttctctcttcactctgcacaaatcctgtttttgaaaatcatattttttctacacatagggagaagagaagtttacctttattgagaaatgtaacaaccct

SEQ ID NO: 402061 - DNA, 120 bp, Artificial Sequence
  ENSG00000146733_0 (sequence is synthesized)
attggagcttcccggaccgtgtgctcgacggtgccctaggtgccgtggggccacacgcgagtctgataagcaccctcccccggaatcatgcggtgctgtgaggcctagcgaagatgaaga

SEQ ID NO: 402062 - DNA, 120 bp, Artificial Sequence
  ENSG00000146733_1 (sequence is synthesized)
tagaatgcaaggtagaaagtgctggatacctttagaaagctgcaggactggtgcgatgggagttgagacgtaagaacctgcccgtccgtagggctctggatgctgctgaggcccgaggcc

SEQ ID NO: 402063 - DNA, 120 bp, Artificial Sequence
  ENSG00000146733_2 (sequence is synthesized)
cctatggcagatttgaaaattcacccttgtagagtcattcctgcctttgagcggactcccttttaagcagatctcaagagagcgttcggtggaggccctgggtctgcacagctcacctcc

SEQ ID NO: 402064 - DNA, 120 bp, Artificial Sequence
  ENSG00000146733_3 (sequence is synthesized)
ctgggaactgctcgcccgagcgtcggagccggcgctggccccctgcagccggaaggttgcagccgcaggagccccggaggcccaggacacagggctcttgctcttgcagaatccacaggt

SEQ ID NO: 402065 - DNA, 120 bp, Artificial Sequence
  ENSG00000146733_4 (sequence is synthesized)
ctttcttgaggaaatctgtagacagaactttgtgctgcgtttttatctagggaaggaacagaagagtgtcgtctcctagaaatctagcactggagaaacgaggaaaattcttccagcgat

SEQ ID NO: 402066 - DNA, 120 bp, Artificial Sequence
  ENSG00000146733_5 (sequence is synthesized)
ggtctcccactcagagctgaggaagcttttctactcagcagatgctgtgtgttttgatgttgacagcacggtcatcagagaagaaggaatcgatgagctagccaaaatctgtggcgttga

SEQ ID NO: 402067 - DNA, 120 bp, Artificial Sequence
  ENSG00000146733_6 (sequence is synthesized)
ggacgcggtgtcagaaatgacacggcgagccatgggcggggcagtgcctttcaaagctgctctcacagagcgcttagccctcatccagccctccagggagcaggtgcagagactcatagc

SEQ ID NO: 402068 - DNA, 120 bp, Artificial Sequence
  ENSG00000146733_7 (sequence is synthesized)
agagcaacccccacacctgacccccggcataagggagctggtaagtcgcctacaggagcgaaatgttcaggttttcctaatatctggtggctttaggagtattgtagagcatgttgcttc

SEQ ID NO: 402069 - DNA, 120 bp, Artificial Sequence
  ENSG00000146733_8 (sequence is synthesized)
taacggtgaatatgcaggttttgatgagacgcagccaacagctgaatctggtggaaaaggaaaagtgattaaacttttaaaggaaaaatttcattttaagaaaataatcatgattggaga

SEQ ID NO: 402070 - DNA, 120 bp, Artificial Sequence
  ENSG00000146733_9 (sequence is synthesized)
tggtgccacagatatggaagcctgtcctcctgctgatgctttcattggatttggaggaaatgtgatcaggcaacaagtcaaggataacgccaaatggtatatcactgattttgtagagct

SEQ ID NO: 402071 - DNA, 120 bp, Artificial Sequence
  ENSG00000146733_10 (sequence is synthesized)
gctgggagaactggaagaataacatccattgtcgtacagctccaaacaacttcagatgaatttttacaagttatacagattgatactgtttgcttacagttgcctattacaacttgctat

SEQ ID NO: 402072 - DNA, 120 bp, Artificial Sequence
  ENSG00000146733_11 (sequence is synthesized)
agaaagttggtacaaatgatctgtactttaaactacagttaggaatcctagaagattgctttttttttttttttaactgtagttccagtattatatgatgactattgatttcctggagag

SEQ ID NO: 402073 - DNA, 120 bp, Artificial Sequence
  ENSG00000146733_12 (sequence is synthesized)
tcccaaagtgctgggattacaggcttgggccaccgcgcccagccaatgtcctagagagttttgtgatctgaattctttatgtatatttgtagctatatttcatacaaagtgctttaagtg

SEQ ID NO: 402074 - DNA, 120 bp, Artificial Sequence
  ENSG00000146733_13 (sequence is synthesized)
gtgctttaagtgtggagagtcaattaaacacctttactcttagaaatacggattcggcagccttcagtgaatattggtttctctttggtatgtcaataaaagtttatccgtatgtcagaa

SEQ ID NO: 402075 - DNA, 120 bp, Artificial Sequence
  ENSG00000146733_14 (sequence is synthesized)
gttcccggcattccgtgctccttggttccggcgttggagctctttggggcccagctttgcggacccgggagctcgggacgcaggcggggcttgtgctccgcgggggcagggcgtagggtg

SEQ ID NO: 402076 - DNA, 77 bp, Artificial Sequence
  ENSG00000146733_15 (sequence is synthesized)
acacgcgagtctgataagcaccctcccccggaatcatgcggtgctgtgaggcctagcgaagatgaagatagaatgca

SEQ ID NO: 402077 - DNA, 120 bp, Artificial Sequence
  ENSG00000146733_16 (sequence is synthesized)
ctcagctcactgcaacctccccttcccaagttcaagcaattttcatgccgcagcctcctagctgggattacagtttacagaagcacttgcagaactcatcagaagccaccccgcttatca

SEQ ID NO: 402078 - DNA, 88 bp, Artificial Sequence
  ENSG00000146733_17 (sequence is synthesized)
tgtacctggtcactatattttctttatgtatgatttgcatattattactttttaaatatttgatgactgatattggaatgaggatcag

SEQ ID NO: 402079 - DNA, 120 bp, Artificial Sequence
  ENSG00000146755_0 (sequence is synthesized)
agagcatgatggggcacgcgcggtagcgcgaggcggggcatgtaaccatagcgtgcgggtcatgatgaggcacggacgtggggggttaggtggggcacgtaattggagctcgcggggcag

SEQ ID NO: 402080 - DNA, 120 bp, Artificial Sequence
  ENSG00000146755_1 (sequence is synthesized)
gatggggcatctaactggagcgacagagagcacgatggggcacttacaggggccggaggctggcccgggcagtgagtgtggatggcttggcaggtgagcctgccagagctggaggaccgg

SEQ ID NO: 402081 - DNA, 120 bp, Artificial Sequence
  ENSG00000146755_2 (sequence is synthesized)
cttcagtgtcccatctgcctggaggtcttcaaggagcccctgatgctgcagtgtggccactcttactgcaagggctgcctggtttccctgtcctgccacctggatgccgagctgcgctgc

SEQ ID NO: 402082 - DNA, 120 bp, Artificial Sequence
  ENSG00000146755_3 (sequence is synthesized)
cccgtgtgccggcaggcggtggacggcagcagctccctgcccaacgtctccctggccagggtgatcgaagccctgaggctccctggggacccggagcccaaggtctgcgtgcaccaccgg

SEQ ID NO: 402083 - DNA, 120 bp, Artificial Sequence
  ENSG00000146755_4 (sequence is synthesized)
aacccgctcagccttttctgcgagaaggaccaggagctcatctgtggcctctgcggtctgctgggctcccaccaacaccacccggtcacgcccgtctccaccgtctacagccgcatgaag

SEQ ID NO: 402084 - DNA, 120 bp, Artificial Sequence
  ENSG00000146755_5 (sequence is synthesized)
gaggagctcgcagccctcatctctgagctgaagcaggagcagaaaaaggtggatgagctcatcgccaaactggtgaacaaccggacccgaatcgtcaatgagtcggatgtcttcagctgg

SEQ ID NO: 402085 - DNA, 120 bp, Artificial Sequence
  ENSG00000146755_6 (sequence is synthesized)
gtgatccgccgcgagttccaggagctgcaccacctggtggatgaggagaaggcccgctgcctggaggggatagggggtcacacccgtggcctggtggcctccctggacatgcagctggag

SEQ ID NO: 402086 - DNA, 120 bp, Artificial Sequence
  ENSG00000146755_7 (sequence is synthesized)
caggcccagggaacccgggagcggctggcccaagccgagtgtgtgctggaacagttcggcaatgaggaccaccacaagttcatccggaagttccactccatggcctccagagcagagatg

SEQ ID NO: 402087 - DNA, 120 bp, Artificial Sequence
  ENSG00000146755_8 (sequence is synthesized)
ggcccttagaaggcgcattcagccccatctccttcaagccaggcctccaccaggctgacatcaagctgaccgtgtggaaaaggctcttccggaaagttttgccagccccggagcctctca

SEQ ID NO: 402088 - DNA, 120 bp, Artificial Sequence
  ENSG00000146755_9 (sequence is synthesized)
agttggaccctgccactgcccacccactcctggagctctccaagggcaacacggtggtgcagtgcgggcttctggcccagcggcgagccagccagcctgagcgcttcgactacagcacct

SEQ ID NO: 402089 - DNA, 120 bp, Artificial Sequence
  ENSG00000146755_10 (sequence is synthesized)
gcgtcctggccagccgcggcttctcctgcggccgccactactgggaggtggtggtgggcagcaagagcgactggcgcctgggggtcatcaagggcacagccagccgtaagggcaagctga

SEQ ID NO: 402090 - DNA, 120 bp, Artificial Sequence
  ENSG00000146755_11 (sequence is synthesized)
acaggtcccccgagcacggcgtgtggctgatcggcctgaaggagggccgggtgtacgaagcctttgcctgcccccgggtacccctgcccgtggccggccacccccaccgcatcgggctct

SEQ ID NO: 402091 - DNA, 120 bp, Artificial Sequence
  ENSG00000146755_12 (sequence is synthesized)
acctgcactatgagcagggcgaactcaccttcttcgatgccgaccgccccgatgacctgcggccgctctacaccttccaggccgacttccagggcaagctctaccccatcctggacacct

SEQ ID NO: 402092 - DNA, 120 bp, Artificial Sequence
  ENSG00000146755_13 (sequence is synthesized)
gctggcacgagaggggcagcaactcgctgcccatggtgctgcccccgcccagcgggcctggccccctcagccccgagcagcccaccaagctgtagggccgcccggagtcctgccggccca

SEQ ID NO: 402093 - DNA, 120 bp, Artificial Sequence
  ENSG00000146755_14 (sequence is synthesized)
caggcccatcccggcggggcaccggggactcgcgggcttctgctgggtcccgcctgaggtgatatcgtcactgtttaggaaggtcttcaggcctgtgtgtccctggaacatgtaatgata

SEQ ID NO: 402094 - DNA, 120 bp, Artificial Sequence
  ENSG00000146755_15 (sequence is synthesized)
gggaacaggaccccagtccctttcccctcagccaagggtgtatttgtaaacttcggcccccaggccttggcagccagggacacactgaaatccccatggttcctgccacttgctaaccat

SEQ ID NO: 402095 - DNA, 120 bp, Artificial Sequence
  ENSG00000146755_16 (sequence is synthesized)
gctatctgcgcagacgcttccgagggcagaaatagtcccatgtataccttttccatattactgtgaactttcaactactatcaaggataataaatttgacattatttctttctctttaaa

SEQ ID NO: 402096 - DNA, 120 bp, Artificial Sequence
  ENSG00000146755_17 (sequence is synthesized)
tttcccacttctgactctgtgcctgctgttccctgctgggaagaaggaaagccagtgatgctggcttgaggctgtagtgggaggcccagcggattgtgagaagccagcccgggcagtgag

SEQ ID NO: 402097 - DNA, 120 bp, Artificial Sequence
  ENSG00000146755_18 (sequence is synthesized)
gaccattttccaaccaacactgctggtccccaaacctgcactctagaagcaccactatagagcgtttccccttctaggaaggagatgggtcctccctgaaggggctgtgcaggggagggg

SEQ ID NO: 402098 - DNA, 120 bp, Artificial Sequence
  ENSG00000146755_19 (sequence is synthesized)
atgatgggcattgatgggcattgtgactgcagtcctgcactgtggatctggctgggcaaacatagataggatggaggggtggggtgggccacgtgatacctcactctcttgtactgtgaa

SEQ ID NO: 402099 - DNA, 120 bp, Artificial Sequence
  ENSG00000146757_0 (sequence is synthesized)
aatcaggcacgcaactggagcggacagcacagcttccgggatttggcggggcctttgtctctcgctgcagccggcgctccacgtctagtcttcactgctctgcgtcctgtgctgataaag

SEQ ID NO: 402100 - DNA, 120 bp, Artificial Sequence
  ENSG00000146757_1 (sequence is synthesized)
gctcgccgctgtgaccctgttacctgcaagaacttggaggttcacagctaagacgccaggaccccctggaagcctagaaatgggaccactgacatttagggatgtgaaaatagaattctc

SEQ ID NO: 402101 - DNA, 120 bp, Artificial Sequence
  ENSG00000146757_2 (sequence is synthesized)
tctagaggaatggcaatgcctggacactgcgcagcggaatttatatagagatgtgatgttagagaactacagaaacctggtcttccttggtattgctgtctctaagccagacctgatcac

SEQ ID NO: 402102 - DNA, 120 bp, Artificial Sequence
  ENSG00000146757_3 (sequence is synthesized)
ctggctggagcaaggaaaagagccctggaatctgaagagacatgagatggtagacaaaaccccagttatgtgttctcattttgcccaagatgtttggccagagcacagcataaaagattc

SEQ ID NO: 402103 - DNA, 120 bp, Artificial Sequence
  ENSG00000146757_4 (sequence is synthesized)
tttccaaaaagtgatactgagaacatatggaaaatatggacatgagaatttacagctaagaaaagaccataaaagtgtggatgcatgtaaggtgtacaaaggaggttataatggacttaa

SEQ ID NO: 402104 - DNA, 120 bp, Artificial Sequence
  ENSG00000146757_5 (sequence is synthesized)
ccagtgtttgacaactactgacagcaagatatttcagtgtgataaatatgtgaaagtctttcataaatttccaaatgtaaatagaaataagataagacatactggaaagaaacctttcaa

SEQ ID NO: 402105 - DNA, 120 bp, Artificial Sequence
  ENSG00000146757_6 (sequence is synthesized)
atgtaaaaaccgtggcaaatcattttgcatgctttcacaattaactcaacataagaaaattcatactagagagtattcttacaaatgtgaagaatgtggtaaagcctttaactggtcctc

SEQ ID NO: 402106 - DNA, 63 bp, Artificial Sequence
  ENSG00000146757_7 (sequence is synthesized)
acaaatgtgaagaatgtggtaaagcctttaactggtcctcaacccttactaaacataagatgt

SEQ ID NO: 402107 - DNA, 84 bp, Artificial Sequence
  ENSG00000146757_8 (sequence is synthesized)
gaagaatgtggcaaagcttttaaccggtcctcaacccttactaaacataaaagaattcatacagcctttaaccagttctcgatt

SEQ ID NO: 402108 - DNA, 82 bp, Artificial Sequence
  ENSG00000146757_9 (sequence is synthesized)
ccctacaaatgtgaagaatgtggcaaggcctttaaccagttctcgattcttaataaacataagagaattcatatggaagata

SEQ ID NO: 402109 - DNA, 83 bp, Artificial Sequence
  ENSG00000146757_10 (sequence is synthesized)
cctttagagtattctcaattcttaaaaaacataagataatccatactggggaaaaaccatctcaaaccttactaaacataaga

SEQ ID NO: 402110 - DNA, 74 bp, Artificial Sequence
  ENSG00000146757_11 (sequence is synthesized)
aatgtggcaaagcctttaaccagtcctcaacccttactaaacataaaagaattcatacgagtcctcaaccctta

SEQ ID NO: 402111 - DNA, 86 bp, Artificial Sequence
  ENSG00000146757_12 (sequence is synthesized)
gcaaggcctttagctggtcctcagcttttactaaacataagagaaatcatatggaagataaaccctacaaatgtgaagaatgtggc

SEQ ID NO: 402112 - DNA, 120 bp, Artificial Sequence
  ENSG00000146757_13 (sequence is synthesized)
tgtggcaaagcctttaaccagtcctcaatttttactaaacataagataattcacactgaagggaaatcctacaaatgtgaaaaatgtggcaatgcttttaaccagtcctcaaaccttact

SEQ ID NO: 402113 - DNA, 120 bp, Artificial Sequence
  ENSG00000146757_14 (sequence is synthesized)
tactgcacgtaagataatttatactggagagaaaccctacaaatatgaagaatgtgacaaagcctttaacaagttctcaacccttattacacatcagataatttatactggagagaaacc

SEQ ID NO: 402114 - DNA, 120 bp, Artificial Sequence
  ENSG00000146757_15 (sequence is synthesized)
ctgcaaacatgaatgtggcagagcctttaacaaatcctcaaattatactaaagagaaactacaaacctgaaagatgtgacaatgattttcactacacctcaaacttttctaaacataaac

SEQ ID NO: 402115 - DNA, 120 bp, Artificial Sequence
  ENSG00000146757_16 (sequence is synthesized)
catattggtgccctagaaatgtgaggaatatgacaaggactttaaatggttgtcacgcttgattgtaggtaagataatttatattggagaaaaatcctccaagtatgaagaatgtggcaa

SEQ ID NO: 402116 - DNA, 120 bp, Artificial Sequence
  ENSG00000146757_17 (sequence is synthesized)
acttttaaccaatcctcacaccttattgcacaggaaagcatttatacttgagaaaaattgtataaagaatatggaaaagccatttatatctgctcacatgtaaaaacatcagttcatact

SEQ ID NO: 402117 - DNA, 120 bp, Artificial Sequence
  ENSG00000146757_18 (sequence is synthesized)
taataaaatgcaattaccgtcaaatctttcagaaaatataagcctttaatacgaggaagagtattcttaagatgaacattacaaatagaaagagggttgtagtacctttagttttatgat

SEQ ID NO: 402118 - DNA, 120 bp, Artificial Sequence
  ENSG00000146757_19 (sequence is synthesized)
agatcttattgtacacattttgtaccagaggaaaaccctaaagcattagttgctcaaactttgttcgacatcagggaatttgtattggagaaaaaccctgcaaatgtaataaatatggaa

SEQ ID NO: 402119 - DNA, 120 bp, Artificial Sequence
  ENSG00000146757_20 (sequence is synthesized)
aaacattttttcaaaaactacagcttggaaaacatcagagagttcatactaaaatatatttttgcagatgcagtaaatatgaaaaatatttaatcccaaattaagtctatgtaaatatca

SEQ ID NO: 402120 - DNA, 120 bp, Artificial Sequence
  ENSG00000146757_21 (sequence is synthesized)
gaattcacagtagaaatcataaggcataaggcactgatacttcagacattacactaaattagagtgttgagtataggagatccaaaactaaaattgttaggtaagttatttatatataac

SEQ ID NO: 402121 - DNA, 120 bp, Artificial Sequence
  ENSG00000146757_22 (sequence is synthesized)
tttaaaagaagtagaagattttttggagatttataattacattcaaagtatacttttttcttgaaaaaaattacagattttttgaaaagcaattgatgtaatttaactctcaaattcatg

SEQ ID NO: 402122 - DNA, 120 bp, Artificial Sequence
  ENSG00000146757_23 (sequence is synthesized)
tttttcttcattcctattatattcacatgtgaaagcaagtgatctgttgttgctgaatcagagatatgagagattcttttttataggtgggcattatttatgcccctttctgtggaagag

SEQ ID NO: 402123 - DNA, 120 bp, Artificial Sequence
  ENSG00000146757_24 (sequence is synthesized)
taagaaaattaaaatacaagatgcatgaggaaaatgtagagatgctctttgtgattaacttagaatattaagtgctacttgaggtacatgttcagactaacattcttttgcagtatagtg

SEQ ID NO: 402124 - DNA, 120 bp, Artificial Sequence
  ENSG00000146757_25 (sequence is synthesized)
agtgagaaaaaaacattttaaaattaattatcattttgttgattgtgcttttatgtaataaaatgcagtactttaaaacatttagattgtgtgtgaacttaattttgtaattaaacattt

SEQ ID NO: 402125 - DNA, 120 bp, Artificial Sequence
  ENSG00000146757_26 (sequence is synthesized)
ctctttgtaaaatgttttttggtaatttatgctttgcataaatgagtttcagatcccagttttcaagaaaacagagatttgtcagtatagaaaagaacttcttcaagatgtttcattttg

SEQ ID NO: 402126 - DNA, 120 bp, Artificial Sequence
  ENSG00000146757_27 (sequence is synthesized)
acctgaactctccacattcctgagctgatctatatccttcactctaaattagtggtaattccagaaatttattggcataaaatattgttgctaccaccaatttttcatttagtagtactg

SEQ ID NO: 402127 - DNA, 120 bp, Artificial Sequence
  ENSG00000146776_0 (sequence is synthesized)
ccctccctccccctttcagaacactcaatgtcggaacgttccgaagatgacgtcggagcgttctcgaatcccgtgtctctcggctgctgctgccgaaggaacagggaaaaagcaacaaga

SEQ ID NO: 402128 - DNA, 120 bp, Artificial Sequence
  ENSG00000146776_1 (sequence is synthesized)
aggaagagcaatggcgacactggatcgcaaagtgcccagtccggaggcgtttctgggcaaaccctggtcctcctggatcgacgccgccaaattacactgctccgacaatgtagatttaga

SEQ ID NO: 402129 - DNA, 120 bp, Artificial Sequence
  ENSG00000146776_2 (sequence is synthesized)
agaggctggaaaagagggtggaaaaagcagggaggttatgaggcttaataaagaagatatgcacttatttggccattacccagcacatgacgacttctatctcgtagtgtgcagtgcctg

SEQ ID NO: 402130 - DNA, 120 bp, Artificial Sequence
  ENSG00000146776_3 (sequence is synthesized)
taaccaggtcgtcaagccacaggttttccagtcgcactgcgagagaagacacggttcaatgtgtagaccttctccctctccagtgtctccagcctccaatcccaggacatcactagtaca

SEQ ID NO: 402131 - DNA, 120 bp, Artificial Sequence
  ENSG00000146776_4 (sequence is synthesized)
ggtgaaaacaaaagcctgtctcagcggccatcactctgccagcagcacctcaaagccattcaaaacgcccaaagacaatctacttacctccagcagcaaacagcacacagtctttcctgc

SEQ ID NO: 402132 - DNA, 120 bp, Artificial Sequence
  ENSG00000146776_5 (sequence is synthesized)
gaaaggatcaagggataaaccatgtgttccagttcctgtagtcagtttagagaaaattcctaacctagtgaaggcagatggtgccaatgtcaaaatgaactccacaaccactactgcagt

SEQ ID NO: 402133 - DNA, 120 bp, Artificial Sequence
  ENSG00000146776_6 (sequence is synthesized)
ttctgcctcctccacctcgtcctctgccgtctccacccctcctttaattaagcctgtcctgatgtccaagtcagtgccaccttcaccagagaagatcttaaatggcaaaggaattctgcc

SEQ ID NO: 402134 - DNA, 120 bp, Artificial Sequence
  ENSG00000146776_7 (sequence is synthesized)
aaccaccatagacaagaaacaccaaaatggcaccaaaaacagcaacaagccttacaggagactttcagagagagaatttgacccaaataaacactgtggagtattggatcccgagacaaa

SEQ ID NO: 402135 - DNA, 120 bp, Artificial Sequence
  ENSG00000146776_8 (sequence is synthesized)
gaaaccttgcacaagatccctcacctgcaagacacattcgctaagccatcggagggcagtcccaggccggaaaaagcaatttgacctcctcctggcagaacacaaagcaaagtcccggga

SEQ ID NO: 402136 - DNA, 120 bp, Artificial Sequence
  ENSG00000146776_9 (sequence is synthesized)
aaaagaagttaaagataaagagcatctcctgacttccacgagggaaatacttccaagccaatccgggccggcacaggattctctgctagggtcttcagggagctctgggccagaaccaaa

SEQ ID NO: 402137 - DNA, 120 bp, Artificial Sequence
  ENSG00000146776_10 (sequence is synthesized)
agttgcatcccctgcaaaatccagaccacccaactctgtacttcctagaccatcatctgcaaatagcataagcagcagcacatcttcaaatcatagcggccacactccagagcccccact

SEQ ID NO: 402138 - DNA, 120 bp, Artificial Sequence
  ENSG00000146776_11 (sequence is synthesized)
cccaccggttggaggtgacctcgccagccgactgtccagtgatgaaggggagatggacggagccgacgaatccgagaagctagactgtcagttctccacgcaccaccccagacctctggc

SEQ ID NO: 402139 - DNA, 120 bp, Artificial Sequence
  ENSG00000146776_12 (sequence is synthesized)
gttttgctcatttgggagtcgcctcatgggacgagggtactatgtgtttgatagaagatgggatcgttttcgattcgcactaaactccatggtagaaaaacacctgaattcacagatgtg

SEQ ID NO: 402140 - DNA, 120 bp, Artificial Sequence
  ENSG00000146776_13 (sequence is synthesized)
gaagaagatccctcctgcggcagatagccccctgccctcgccagcagcccacatcaccacccccgttccagcatccgttttgcagcctttcagcaaccccagtgctgtgtatcttccttc

SEQ ID NO: 402141 - DNA, 120 bp, Artificial Sequence
  ENSG00000146776_14 (sequence is synthesized)
agctcccatcagctcgaggctcacctcttcttacataatgacatcagccatgctctcaaacgcagctttcgtgacatcgccggacccgagcgccctcatgtcccacaccacagctttccc

SEQ ID NO: 402142 - DNA, 120 bp, Artificial Sequence
  ENSG00000146776_15 (sequence is synthesized)
tcatgtggccgcaaccctcagcatcatggactcaaccttcaaggccccatccgccgtgtccccgataccagccgtcatcccttccccatcccacaagccatccaaaaccaaaaccagcaa

SEQ ID NO: 402143 - DNA, 120 bp, Artificial Sequence
  ENSG00000146776_16 (sequence is synthesized)
caaaaccagcaaatcctcaaaagtcaaagacctgtccacccgtagcgacgagtctccaagtaacaaaaaaaggaagccacagtcttcgacttcctcctcctcctcctcctcctcctcttc

SEQ ID NO: 402144 - DNA, 120 bp, Artificial Sequence
  ENSG00000146776_17 (sequence is synthesized)
cctctcgtctccactgtcagggcctcacaaaaagaactgtgttttgaatgccagttctgctttgaactcctatcaggcggcccctccctataacagcctgtctgtgcacaactcaaacaa

SEQ ID NO: 402145 - DNA, 120 bp, Artificial Sequence
  ENSG00000146776_18 (sequence is synthesized)
tggggtgagcccactcagtgccaaactggagccctcaggacggacctcgctgcccggcggccccgcggacatagtgagacaggtgggcgcggtgggaggcagcagtgactcctgtcccct

SEQ ID NO: 402146 - DNA, 120 bp, Artificial Sequence
  ENSG00000146776_19 (sequence is synthesized)
ctctgtgccctcccttgcgctccacgcaggggacctctctctggcctcacacaatgctgtgtcttctctgcccctctcttttgacaaatcagaaggaaaaaagcgtaagaactcgagttc

SEQ ID NO: 402147 - DNA, 120 bp, Artificial Sequence
  ENSG00000146776_20 (sequence is synthesized)
tagtagcaaagcctgtaaaatcactaaaatgcctggtatgaatagcgttcacaaaaagaacccgcccagccttctcgcaccggtgcccgatcccgttaacagcacctcctctcggcaggt

SEQ ID NO: 402148 - DNA, 120 bp, Artificial Sequence
  ENSG00000146776_21 (sequence is synthesized)
tgggaaaaatagcagcctagctttgtcacaatccagtccttcaagtatatccagcccaggacacagccgacagaacacaaacagaacgggcaggataaggactcttccataacaagacta

SEQ ID NO: 402149 - DNA, 120 bp, Artificial Sequence
  ENSG00000146776_22 (sequence is synthesized)
caattccaggccacctaatcccatccgaggaggccatggggaggaggagggaggggagtgggctggggggagagtctgttttctgtgcactccctgtgactctggcctttcttcttcttt

SEQ ID NO: 402150 - DNA, 120 bp, Artificial Sequence
  ENSG00000146776_23 (sequence is synthesized)
ttttaattgaccaatttttagttaaaaaggcaaaagaaggtgaatttgagatttacagaaaacagttccagtgtttggtttccgctgtctttcctttcatttgccatgtttttacattct

SEQ ID NO: 402151 - DNA, 120 bp, Artificial Sequence
  ENSG00000146776_24 (sequence is synthesized)
tccaaatttggggtcactcccctagctcctgatgctgctactgtaccatccttttgctccagccatgagagcagacattgcagaatgttggttccaggttggcatgctctgaagctcttg

SEQ ID NO: 402152 - DNA, 120 bp, Artificial Sequence
  ENSG00000146776_25 (sequence is synthesized)
aactgtagcacaggcagagccctttttcttcctgtcatctccacccgattccttccatccctacgtctaccactctctgggtcctcactggtcttcaaaggacctggctctcataggatc

SEQ ID NO: 402153 - DNA, 120 bp, Artificial Sequence
  ENSG00000146776_26 (sequence is synthesized)
ccctcaggattgtgtgcagggagagggggctttgctggggaggagctgggagtggagagttggagggtgggtggggttccctcatccagtttccacagcccaccatggctggagccaaat

SEQ ID NO: 402154 - DNA, 120 bp, Artificial Sequence
  ENSG00000146776_27 (sequence is synthesized)
gctagaagcgagattgagaacagtggccgtttagtgatgtggtttacctaataccactgtccagctgtgcagctcagaaaggataaaccagtcagggacaggggccagaacaggtttggg

SEQ ID NO: 402155 - DNA, 120 bp, Artificial Sequence
  ENSG00000146776_28 (sequence is synthesized)
aaggtggcagcaagcagagcatggtgggtaggagatgatccctaaaaaaactggagactgtggtggtctgagctggtcaggaatctgcagaatcccttccaggaatcagtgtgccagtgc

SEQ ID NO: 402156 - DNA, 120 bp, Artificial Sequence
  ENSG00000146776_29 (sequence is synthesized)
ccacagcagggtgagctaggagggagaaatcccaggaaaaaggtcgtgagaacccagaaagccactccatgaggaggcacggtgaccacagctgctaaaggttcttaggctgccttcctg

SEQ ID NO: 402157 - DNA, 120 bp, Artificial Sequence
  ENSG00000146776_30 (sequence is synthesized)
ggctaggaagagccccccagggagagcttccacaaaagggtatgtgtcaaaccttttgtcagaataaataatagcatttcccacccacccccatgccctgggccacagggacttggtggg

SEQ ID NO: 402158 - DNA, 120 bp, Artificial Sequence
  ENSG00000146776_31 (sequence is synthesized)
atcagcacacccatggatcagcttttgctgtcttagagacagccatccccatgaaggaatggtaaggacagccactgctcagtgaagaacagccatttggaagagccacgctggagccct

SEQ ID NO: 402159 - DNA, 120 bp, Artificial Sequence
  ENSG00000146776_32 (sequence is synthesized)
gcagccatagaactattcacactggagttttaaaagaaacagcaataccataagctctagtagggaatcataatcaggaaaggaattcacaacataaaataggtgttctgtgctattaat

SEQ ID NO: 402160 - DNA, 120 bp, Artificial Sequence
  ENSG00000146776_33 (sequence is synthesized)
catgtaactttgtatatgatgtatagcaaagatactgggaggttttgtttcatccttaaatcagaaatgaatgctagtttcatagctgggcagaaccctcatccccaccccaaagttttc

SEQ ID NO: 402161 - DNA, 120 bp, Artificial Sequence
  ENSG00000146776_34 (sequence is synthesized)
cttttctttcccgttcccccaacccaaagatcagactactgttaagtttcaccacacaattggaattgcaaagacgggaggcaaatggagtgattttcatcaatggaattgcactgacag

SEQ ID NO: 402162 - DNA, 120 bp, Artificial Sequence
  ENSG00000146776_35 (sequence is synthesized)
tgagtgtttcttataggattactaaattttttaatataaaatgatttgtttaaaaatcaggagttgatattaagtaccaggacattagttcggatgatttcatttttatttctacagtgt

SEQ ID NO: 402163 - DNA, 120 bp, Artificial Sequence
  ENSG00000146776_36 (sequence is synthesized)
taaaagtgcacttatatgctggtttatttacgtcttgggaaaagagactgcaaattgaagggatgattgttactttttctttttttaaaaaaaaaaggttaaggagattttaagacttat

SEQ ID NO: 402164 - DNA, 120 bp, Artificial Sequence
  ENSG00000146776_37 (sequence is synthesized)
aattataaacaaggttagaccctttgaaaaaaagtttagaagatattcttaaagtaaatttttatagtgttaattttgtaataatttatgttttactatattacagagctaactgaccag

SEQ ID NO: 402165 - DNA, 120 bp, Artificial Sequence
  ENSG00000146776_38 (sequence is synthesized)
ctaactgaccagaatagtttcagaaacaatatgaaacttaggaaagtttaagcaatgtttatatttttaaaatgttctttgaattatgtttttattgtacatttcttcagactgaaaagt

SEQ ID NO: 402166 - DNA, 120 bp, Artificial Sequence
  ENSG00000146776_39 (sequence is synthesized)
atgtacatatctttgttatttttgcacaattttgtcttgttcggtttcagaggtctgttgttttttataatttattttgagttgtaaaacttgcaggagtaaaaacaaaaaacaaaatct

SEQ ID NO: 402167 - DNA, 120 bp, Artificial Sequence
  ENSG00000146776_40 (sequence is synthesized)
ccacaacaaaataaccctctgatttataaactcttatagtcaaagagggaaaacaaaggttgagagattaagtggctgcttctgagaaataatgtctcaaggactaaaggagcaattcaa

SEQ ID NO: 402168 - DNA, 120 bp, Artificial Sequence
  ENSG00000146776_41 (sequence is synthesized)
taggtttagacattgtagctctctacatcttgaattggaagctggaataaagagcccccacccccccccccaccctcatcgaatgctgcttactttgtcaaaagactggctatgaccaag

SEQ ID NO: 402169 - DNA, 120 bp, Artificial Sequence
  ENSG00000146776_42 (sequence is synthesized)
gtgaggatatttctggaaaactgggcaaaaagggaaagcccacagtattcttccttggcagtcaaccacaggtttactttacaatgatgtattaaaaacttgcagcttgaaaaatggaat

SEQ ID NO: 402170 - DNA, 120 bp, Artificial Sequence
  ENSG00000146776_43 (sequence is synthesized)
gcaaataaaaggttctctttgggtttgtcttaatggagttaaactggagcagcctataaaacatttttagggtgatgtcctctgggtccttctgttctgcacacccactcagtcttctct

SEQ ID NO: 402171 - DNA, 120 bp, Artificial Sequence
  ENSG00000146776_44 (sequence is synthesized)
cccagccccttgactgcacacacccctctttgcctgaagatctcctgacttgtcgccagccatagaggctcgaaagctctggttgtgaagcataacgcaatgcatagacctgtcagccat

SEQ ID NO: 402172 - DNA, 120 bp, Artificial Sequence
  ENSG00000146776_45 (sequence is synthesized)
aatccagaccacccaactctgtacttcctagttttgctcatttgggagtcgcctcatgggacgagggtactatgtgtttgatagaagatgggatcgttttcgattcgcactaaactccat

SEQ ID NO: 402173 - DNA, 120 bp, Artificial Sequence
  ENSG00000146776_46 (sequence is synthesized)
gttttccagtcgcactgcgggagaaagcaagacaacaggagaaatgaaggcatctccaggagtggaccagagagcagccaagccatagagaagcatcaggtgtgagaatggaaaacgcag

SEQ ID NO: 402174 - DNA, 120 bp, Artificial Sequence
  ENSG00000146776_47 (sequence is synthesized)
aagagacgtacaacttctgaaagatctcagaggactggcattgtctggagacggcttcctggaagaggagactccagcagagccctgaagtgtggacaagcttccattcactgcaaattc

SEQ ID NO: 402175 - DNA, 120 bp, Artificial Sequence
  ENSG00000146776_48 (sequence is synthesized)
gtgagcacactctggtgtcaggatctagtaaggaaatgggcttgagcagagcagggggtacctgtggggttcttctcttcattttcaccaccacaaagctggtctaagctgccatcaatt

SEQ ID NO: 402176 - DNA, 120 bp, Artificial Sequence
  ENSG00000146776_49 (sequence is synthesized)
ctgttcctgcttccactcttgctcctctacaattcattctgcacgcagaagtcagaatcaaaatcaaagttcatcatgtcattctcttgacttgtggcttccctttgctcttaagctaaa

SEQ ID NO: 402177 - DNA, 120 bp, Artificial Sequence
  ENSG00000146776_50 (sequence is synthesized)
agtaaaaatcattatcatggctacaaagtcttgtgtggtctgggccacatcctgtgccaggctccctttcattgtctatattccagtcaagctggccttcaaaatttcagcacattgggt

SEQ ID NO: 402178 - DNA, 120 bp, Artificial Sequence
  ENSG00000146776_51 (sequence is synthesized)
ctttctgccacaggcccttgcacatacatgcttttccctctgtacatgtgattttctttcatccccgctttccaaagctaactctgactcatccttcagactgcatcttaatgattactt

SEQ ID NO: 402179 - DNA, 120 bp, Artificial Sequence
  ENSG00000146776_52 (sequence is synthesized)
ccttctggaagactcccctaattttcacaactagatgagctctcccttatatgttgaaaacaagtatttcttgtgtgaacagaaatgtttaatgtctgccttcccaactcagccacaagc

SEQ ID NO: 402180 - DNA, 120 bp, Artificial Sequence
  ENSG00000146776_53 (sequence is synthesized)
tctgtgaggatggggactcagtctttgcatccctcagagcctaacatagtctcagttaatacgtgatagctggagcgtgacatttcattaggaacagtgaggctagttgagaaattatac

SEQ ID NO: 402181 - DNA, 120 bp, Artificial Sequence
  ENSG00000146776_54 (sequence is synthesized)
ctcaccagtatataggagagtaccattaggaattcttaatgggatgaaaacctgaattcatgtctagaccctgccacctgctggctgtgctgttttaaataaattgcagatcctctcaga

SEQ ID NO: 402182 - DNA, 120 bp, Artificial Sequence
  ENSG00000146776_55 (sequence is synthesized)
actggccagggccctcatccaggagccaggaaacatctactaccacgagtcgcgttgcccagcgtgtgtcagcctccttatccaaacggcaaggcagcctccccgggatgtagagaagac

SEQ ID NO: 402183 - DNA, 120 bp, Artificial Sequence
  ENSG00000146776_56 (sequence is synthesized)
gcaatggcgacactggatcgcaaagtgcccagtccggaggcgtttctgggcaaaccctggtcctcctggatcgacgccgccaaattacactgctccgacaatatgcacttatttggccat

SEQ ID NO: 402184 - DNA, 120 bp, Artificial Sequence
  ENSG00000146776_57 (sequence is synthesized)
cggctctggggggcagggggagctgggcagcgcccctgcttagccgggcggctccgacaggtaacacaagcttgattcctgttctcgttttccccgaaggcagttttcaccctctgcttt

SEQ ID NO: 402185 - DNA, 120 bp, Artificial Sequence
  ENSG00000146776_58 (sequence is synthesized)
gagagcactttactgaacaagtacttgataccacgctcactatgtgctagacactgttctcggcactttacggttattacctcactgagtcctcacgacaccccagtgcagtgagtgcag

SEQ ID NO: 402186 - DNA, 120 bp, Artificial Sequence
  ENSG00000146776_59 (sequence is synthesized)
ttatcactttacagatgagtaaactgaggcacagagagattctgagttccccactccacatcggtcagttttatcttttgaggttctgagaacattgtcattaaagagttctgttgctaa

SEQ ID NO: 402187 - DNA, 120 bp, Artificial Sequence
  ENSG00000146776_60 (sequence is synthesized)
ggacacactgagtagataggtcatcccagaccaagatatgcaagagaagccacaacctgctgcaattgggcatcaaacacatatggtcgtcataaataaatcatatcctgttctcatttg

SEQ ID NO: 402188 - DNA, 120 bp, Artificial Sequence
  ENSG00000146776_61 (sequence is synthesized)
taagtggacccctgcaccgtcggccacatctgcagctgccgccctggggacagtcgccttcccctgggctccccgacagggtctcgccatgtcttgtctcagcctgaggctgtgggtaaa

SEQ ID NO: 402189 - DNA, 120 bp, Artificial Sequence
  ENSG00000146776_62 (sequence is synthesized)
gtcttcctgggctgctgcctctgctcgcaggctgttttaggagctgtagtccttctgctgaaatccgcagtcctgtcagaacaaatgagagaaaacctgcaacttgtctcggtcgatggg

SEQ ID NO: 402190 - DNA, 120 bp, Artificial Sequence
  ENSG00000146776_63 (sequence is synthesized)
actagactgaagccatctgcccagcctagcgatggcctctgcaggtgaccaggggaggggagagctgcttaaggagtcgctcctgcagccagacattttctccccctgaaagagggtcag

SEQ ID NO: 402191 - DNA, 120 bp, Artificial Sequence
  ENSG00000146776_64 (sequence is synthesized)
gagagagtctccccgagacttacaaaaaggagggctgcggccaagcacagcccagtgtgtggcccactggggtgctgccccaaggaaatggtgcatcagtaaaaccttacattccaattc

SEQ ID NO: 402192 - DNA, 120 bp, Artificial Sequence
  ENSG00000146776_65 (sequence is synthesized)
aggacttgcctaaccaatctgctgtcactgagcaacattggggctgcctgggtgtcaactctggagagcgtagcaccccgctaccctctcaacctcgctgcccaaaccccaggccccggc

SEQ ID NO: 402193 - DNA, 120 bp, Artificial Sequence
  ENSG00000146776_66 (sequence is synthesized)
gggcccgaacctggagggatggcagccgatgggggcgtggaagacattaggaagaaaaggaacggccaagactcttttttctttaacaagcatttaactctgcatcaggagccgccaaca

SEQ ID NO: 402194 - DNA, 120 bp, Artificial Sequence
  ENSG00000146802_0 (sequence is synthesized)
gcggatttcggcggcggaaacatggcggtcgcggccgggccggtaacggagaaagtttacgccgacactggcctgtattagcgcgtatggcctcgggccctcgttccccaaggcgtgccg

SEQ ID NO: 402195 - DNA, 120 bp, Artificial Sequence
  ENSG00000146802_1 (sequence is synthesized)
cctccctgttctcagtcgcaggctgaagccttgtctgctctcctcctttttggtttggttttggaactgactccgagggttgggagagcgcgttggtggcgacggccgagtcagatcact

SEQ ID NO: 402196 - DNA, 120 bp, Artificial Sequence
  ENSG00000146802_2 (sequence is synthesized)
ataaacaaaatttccacaagagaaaatgttgaaataggagttgcggatacattggatatactggatgaaatacaagcggttaatttttgtaacgtgagggaaaagcccacattgctggtt

SEQ ID NO: 402197 - DNA, 120 bp, Artificial Sequence
  ENSG00000146802_3 (sequence is synthesized)
acatgtgtaaatcactgcgttattgctttagtcattgtctctatttagcaatgacaagactggaagaagtaaatagagaagtgaacatgcattcttcagtgcggtatcttggctatttag

SEQ ID NO: 402198 - DNA, 120 bp, Artificial Sequence
  ENSG00000146802_4 (sequence is synthesized)
ccagaatcaatttattggttgctatatgcttaggtctatacgtaagatgggaaaaaacagcaaattccttaattttggtaatttttattcttggtctttttgttcttggaatcgccagca

SEQ ID NO: 402199 - DNA, 120 bp, Artificial Sequence
  ENSG00000146802_5 (sequence is synthesized)
tactctattactatttttcaatggaagcagcaagtttaagtctctccaatctttggtttggattcttgcttggcctcctatgttttcttgataattcatcctttaaaaatgatgtaaaag

SEQ ID NO: 402200 - DNA, 120 bp, Artificial Sequence
  ENSG00000146802_6 (sequence is synthesized)
aagaatcaaccaaatatttgcttctaacatccatagtgttaaggatattgtgctctctggtggagagaatttctggttatgtccgtcatcggcccactttactaaccacagttgaatttc

SEQ ID NO: 402201 - DNA, 120 bp, Artificial Sequence
  ENSG00000146802_7 (sequence is synthesized)
tggagcttgttggatttgccattgccagcacaactatgttggtggagaagtctctgagtgtcattttgcttgttgtagctctggctatgctgattattgatctgagaatgaaatctttct

SEQ ID NO: 402202 - DNA, 120 bp, Artificial Sequence
  ENSG00000146802_8 (sequence is synthesized)
tagctattccaaacttagttatttttgcagttttgttatttttttcctcattggaaactcccaaaaatccgattgcttttgcgtgtttttttatttgcctgataactgatcctttccttg

SEQ ID NO: 402203 - DNA, 120 bp, Artificial Sequence
  ENSG00000146802_9 (sequence is synthesized)
acatttattttagtggactttcagtaactgaaagatggaaaccctttttgtaccgtggaagaatttgcagaagactttcagtcgtttttgctggaatgattgagcttacattttttattc

SEQ ID NO: 402204 - DNA, 120 bp, Artificial Sequence
  ENSG00000146802_10 (sequence is synthesized)
tttccgcattcaaacttagagacactcacctctggtattttgtaatacctggcttttccatttttggaattttctggatgatttgtcatattatttttcttttaactctttggggattcc

SEQ ID NO: 402205 - DNA, 120 bp, Artificial Sequence
  ENSG00000146802_11 (sequence is synthesized)
ataccaaattaaatgactgccataaagtatattttactcacaggacagattacaatagccttgatagaatcatggcatccaaagggatgcgccatttttgcttgatttcagagcagttgg

SEQ ID NO: 402206 - DNA, 120 bp, Artificial Sequence
  ENSG00000146802_12 (sequence is synthesized)
tgttctttagtcttcttgcaacagcgattttgggagcagtttcctggcagccaacaaatggaattttcttgagcatgtttctaatcgttttgccattggaatccatggctcatgggctct

SEQ ID NO: 402207 - DNA, 120 bp, Artificial Sequence
  ENSG00000146802_13 (sequence is synthesized)
tccatgaattgggtaactgtttaggaggaacatctgttggatatgctattgtgattcccaccaacttctgcagtcctgatggtcagccaacactgcttcccccagaacatgtacaggagt

SEQ ID NO: 402208 - DNA, 120 bp, Artificial Sequence
  ENSG00000146802_14 (sequence is synthesized)
taaatttgaggtctactggcatgctcaatgctatccaaagattttttgcatatcatatgattgagacctatggatgtgactattccacaagtggactgtcatttgatactctgcattcca

SEQ ID NO: 402209 - DNA, 120 bp, Artificial Sequence
  ENSG00000146802_15 (sequence is synthesized)
aactaaaagctttcctcgaacttcggacagtggatggacccagacatgatacgtatattttgtattacagtgggcacacccatggtacaggagagtgggctctagcaggtggagatacac

SEQ ID NO: 402210 - DNA, 120 bp, Artificial Sequence
  ENSG00000146802_16 (sequence is synthesized)
tacgccttgacacacttatagaatggtggagagaaaagaatggttccttttgttcccggcttattatcgtattagacagcgaaaattcaaccccttgggtgaaagaagtgaggaaaatta

SEQ ID NO: 402211 - DNA, 120 bp, Artificial Sequence
  ENSG00000146802_17 (sequence is synthesized)
atgaccagtatattgcagtgcaaggagcagagttgataaaaacagtagatattgaagaagctgacccgccacagctaggtgactttacaaaagactgggtagaatataactgcaactcca

SEQ ID NO: 402212 - DNA, 120 bp, Artificial Sequence
  ENSG00000146802_18 (sequence is synthesized)
gtaataacatctgctggactgaaaagggacgcacagtgaaagcagtatatggtgtgtcaaaacggtggagtgactacactctgcatttgccaacgggaagcgatgtggccaagcactgga

SEQ ID NO: 402213 - DNA, 120 bp, Artificial Sequence
  ENSG00000146802_19 (sequence is synthesized)
tgttacactttcctcgtattacatatcccctagtgcatttggcaaattggttatgcggtctgaaccttttttggatctgcaaaacttgttttaggtgcttgaaaagattaaaaatgagtt

SEQ ID NO: 402214 - DNA, 120 bp, Artificial Sequence
  ENSG00000146802_20 (sequence is synthesized)
ggtttcttcctactgtgctggacacaggacaaggcttcaaacttgtcaaatcttaatttggaccccaaagcgggatattaataagcactcatactaccaattatcactaacttgccattt

SEQ ID NO: 402215 - DNA, 120 bp, Artificial Sequence
  ENSG00000146802_21 (sequence is synthesized)
tttgtatgctgtatttttatttgtggaaaataccttgctacttctgtagctgctctcactttgtcttttcttaagtaattatggtatatataaggcgttgggaaaaaacattttataatg

SEQ ID NO: 402216 - DNA, 120 bp, Artificial Sequence
  ENSG00000146802_22 (sequence is synthesized)
aaagtatgtagggagtcaaatgcttactgtaaatgcataagagacgttaaaaataacactgcactttcaggaatgtttgcttatggtcctgattagaaagaaacagttgtctatgctctg

SEQ ID NO: 402217 - DNA, 120 bp, Artificial Sequence
  ENSG00000146802_23 (sequence is synthesized)
caatggtcaatgatgaattactaatgccttattttctaggcatataataatagtttagagaatgtagaccagataaatttgtttactgttttaagaaaactaccagtttacttacagaag

SEQ ID NO: 402218 - DNA, 120 bp, Artificial Sequence
  ENSG00000146802_24 (sequence is synthesized)
attcttttttccaaacagtaggtttcatccaagaccatttgaagaactgcaaactctttctcttagaaaagaaagagggcagcctaaaataaacgcaaaatttgcttatactccatcaca

SEQ ID NO: 402219 - DNA, 120 bp, Artificial Sequence
  ENSG00000146802_25 (sequence is synthesized)
ttcagatgtcttggttgtgacttattaccagtgtggcagagaacccaagttacattttagatcaaaatattctttatgtaggtattgttaaaaggctagagcctacaagttgctcttcca

SEQ ID NO: 402220 - DNA, 120 bp, Artificial Sequence
  ENSG00000146802_26 (sequence is synthesized)
tgcgttggtcagggggccctgaaaacactggtaatattaagagtctttctcagggtaacttaatgttttcttaatgaacagtgtttccagctacaaattcttccaataaattgtcttcct

SEQ ID NO: 402221 - DNA, 120 bp, Artificial Sequence
  ENSG00000146802_27 (sequence is synthesized)
ttttgaaaagtactctcatagaagaaatttagcaatttctcgttgactgactcagtctattttaagtattcagaaaagattttgatccccattgagttaatgctctgccttgaaaattat

SEQ ID NO: 402222 - DNA, 120 bp, Artificial Sequence
  ENSG00000146802_28 (sequence is synthesized)
ttttctgatccttgttagtgataacattttttttctactgaaggtcagaggataggaaacaagtatttctcttctggtatacatgtaatgtattctgtaaaaaagtattcatattggcaa

SEQ ID NO: 402223 - DNA, 120 bp, Artificial Sequence
  ENSG00000146802_29 (sequence is synthesized)
ttttagttaggcataatattgtggttgtaatttttaaaacttagtgttttgtctgattaaagcaggcactgatcagggtatctcctaagaggtaattcacttcttattcctttccaataa

SEQ ID NO: 402224 - DNA, 120 bp, Artificial Sequence
  ENSG00000146802_30 (sequence is synthesized)
tcttcattgtttaaatggtttgccttctcaccattgaagccatttttttatagcctcagaaagaggaaataatgcctccaccattttctacctggtgacttgaaaattgaacttttaagt

SEQ ID NO: 402225 - DNA, 120 bp, Artificial Sequence
  ENSG00000146802_31 (sequence is synthesized)
taggaagaagttagagtcagggaacttgtataccactatctatgcagcattgttatagtctgattatttctgtgttttgaatatgattttcctaatgctctaaataaaattttgttaaaa

SEQ ID NO: 402226 - DNA, 120 bp, Artificial Sequence
  ENSG00000146802_32 (sequence is synthesized)
attaattttttatttaatgatgtgcaaatattgaatattttagtatatttattaaaagtggtagtcattaaaaatgcccatgttttagagttcatgtttggaagtttccattataggtta

SEQ ID NO: 402227 - DNA, 120 bp, Artificial Sequence
  ENSG00000146802_33 (sequence is synthesized)
aggatttatattagtattgtccaaataaaatagtatagttttttttattgctctgttcagcagtagggtagtagaaaagccaaatgttaaaattatgagcttttagcttaaaaaaagtta

SEQ ID NO: 402228 - DNA, 120 bp, Artificial Sequence
  ENSG00000146802_34 (sequence is synthesized)
atgttaagtaaaatctccttttaaatttctcagctatttgtgagcaggttagctttaaagcattatctcttcactttaagaaagccaaatacaaaagtatattctgcattctttataagg

SEQ ID NO: 402229 - DNA, 120 bp, Artificial Sequence
  ENSG00000146802_35 (sequence is synthesized)
tagtattaaggtggtactaaaaattacattttaaaaacagctgacagtttgacagccacaaacctaactttttcatatgtatttcctgtgaaagtaaaaccaaaaatggtctttgggcca

SEQ ID NO: 402230 - DNA, 120 bp, Artificial Sequence
  ENSG00000146802_36 (sequence is synthesized)
agaatgtgacttgagccaatttgttaaccaaaaatttatagaatgtccactttgatgaattctcctacccaaacaaacaaaaaacaataaatgactttttgggatggtatcacaaagcta

SEQ ID NO: 402231 - DNA, 60 bp, Artificial Sequence
  ENSG00000146802_37 (sequence is synthesized)
ttctttgtctcaaaaaaaaaaaaaagtacatgtttagccaggcatggtggctcatgcctg

SEQ ID NO: 402232 - DNA, 66 bp, Artificial Sequence
  ENSG00000146802_38 (sequence is synthesized)
tttgggaggccgaggcaggtggatcaaaaggtcaagagatcagctgggcgtggtggtgcacgcctg

SEQ ID NO: 402233 - DNA, 120 bp, Artificial Sequence
  ENSG00000146802_39 (sequence is synthesized)
aaaagaaacaaacaaaaaaaataataagggtgtagaaaagaaatattacaagaagaataaagtgattggttactttcacctaaagattgaaaaatagatctgacaatgagactaatttgt

SEQ ID NO: 402234 - DNA, 120 bp, Artificial Sequence
  ENSG00000146802_40 (sequence is synthesized)
gatctgacaatgagactaatttgtctatggctgtcatgtttaagaaagagttgcttggagtgaaaggaattattttagggcaaaactttaccattctactaaaaagaggtaacatggaga

SEQ ID NO: 402235 - DNA, 120 bp, Artificial Sequence
  ENSG00000146802_41 (sequence is synthesized)
ttttttcaacataactttgtttagtatttgtttcctcatgtgataccttgctaaaaccacaaaaccactagctctaaaaacatcatcttttttttcaatagaataaaaaaaacagtatga

SEQ ID NO: 402236 - DNA, 78 bp, Artificial Sequence
  ENSG00000146802_42 (sequence is synthesized)
tagcatacacactgttgcaaaataaataaggagccaagttctttctctccccatgacttttcagttatgccatcattt

SEQ ID NO: 402237 - DNA, 120 bp, Artificial Sequence
  ENSG00000146802_43 (sequence is synthesized)
ttctttctctccccatgacttttcagttatgccatcattttattcaaaaatttttagtttgctctgatctaaactcttccctgggaaacttggggttatatttccatagaattctgtctt

SEQ ID NO: 402238 - DNA, 120 bp, Artificial Sequence
  ENSG00000146802_44 (sequence is synthesized)
gctcttaataaattcaaaattctttggaaaagatgcatttcagaggattattcttatgaccagttatgctttaaaaaaattaaagtcttaattaaaatgcacttatatttaatgcattag

SEQ ID NO: 402239 - DNA, 120 bp, Artificial Sequence
  ENSG00000146802_45 (sequence is synthesized)
tgggtagatttttgttttgagtaaaatctttattagaatctatttgtaactggatattttgtaattttgggctcaaacatatttactcttgggtactgcttttttatatgtattcaaatt

SEQ ID NO: 402240 - DNA, 120 bp, Artificial Sequence
  ENSG00000146802_46 (sequence is synthesized)
tatagcttagtctcttttaaagtaatattctacattactttcccacaagtgatgatagttaatataatgtatgccagaagaaaatgatttaattttaagaatgtgattagatatatttga

SEQ ID NO: 402241 - DNA, 120 bp, Artificial Sequence
  ENSG00000146802_47 (sequence is synthesized)
cagtaagtgctcaaaggagttagatctgtcagtactttcgaatgtctcctgtattggaaactattagactgtcacctctttttaggcagaggcttacacatgttggtatttctggtacac

SEQ ID NO: 402242 - DNA, 120 bp, Artificial Sequence
  ENSG00000146802_48 (sequence is synthesized)
agttaccgagaagagtgccttgtccgtaatgagaagcatttaataaatattttggactgagtgaataaatctagaatcctaaggagaaattggaataacttgattgtaaattactacatt

SEQ ID NO: 402243 - DNA, 120 bp, Artificial Sequence
  ENSG00000146802_49 (sequence is synthesized)
ttctttagttttacttaaatggatattatttcaagatcttcattaagcaagtaatttagtaaaaaacttacagaatccataaaaagaaagcaaatctcaaatttgtagttaagagtaata

SEQ ID NO: 402244 - DNA, 120 bp, Artificial Sequence
  ENSG00000146802_50 (sequence is synthesized)
agtgttaagattagggaaggaaaaactgtttcagaactggtttgaatgaaaacatagctgatgttgccaaaaaatggctttttgtgagttgagtccatttccatcatgactctaatatca

SEQ ID NO: 402245 - DNA, 120 bp, Artificial Sequence
  ENSG00000146802_51 (sequence is synthesized)
ttaagattgaatcattcatttcctcactattatatctagacagattggaaatttaccagaaatggaaattattaaaagtctgactgatgaacaaagaaggaatttgactatgcatatcag

SEQ ID NO: 402246 - DNA, 120 bp, Artificial Sequence
  ENSG00000146802_52 (sequence is synthesized)
tgacaactaaattggaaggtcagtaaaataggcctataagcataagcaggttaaggacaagctagggaaactataagtatctccttttttatattgtcttacctattcactaattataac

SEQ ID NO: 402247 - DNA, 120 bp, Artificial Sequence
  ENSG00000146802_53 (sequence is synthesized)
acatagaaacaatataaaacgatgaagtttaagcagtaattgttttgagaaaccattctgttgataatttacatttatgtttattaggaaatattgttattattacttagaccaaagttg

SEQ ID NO: 402248 - DNA, 120 bp, Artificial Sequence
  ENSG00000146802_54 (sequence is synthesized)
actgaaaattgaaaactgtgggctacccgtaaggttttttgctttgaaatattcaatacctaaaagccattttgattttaaaaatgaagttgaccagtcatcttgtatgatgacctcata

SEQ ID NO: 402249 - DNA, 120 bp, Artificial Sequence
  ENSG00000146802_55 (sequence is synthesized)
atattttataagtttgaacttaaaatagttagaagtagacagttttagtaagcttttgtttttatttggtctagcctaaaagacattgatttatctcaaagatttttagcagtgtgcaag

SEQ ID NO: 402250 - DNA, 120 bp, Artificial Sequence
  ENSG00000146802_56 (sequence is synthesized)
ggacaaatgagtatgacatagcttcctagacaagcagtgttcactcaatgccaagtaaacttttctaagttcaaaaatatttttatattaaaacacataccaatgtattgatgaacaaaa

SEQ ID NO: 402251 - DNA, 120 bp, Artificial Sequence
  ENSG00000146802_57 (sequence is synthesized)
attgaactttatcatttgcttagttcactgctaaatcaaactgtttaatacttttttctaatagtaaaaacatactgaagattgagaagcactggtttagaaaaaatatgtaaatatata

SEQ ID NO: 402252 - DNA, 120 bp, Artificial Sequence
  ENSG00000146802_58 (sequence is synthesized)
aaatgtaatagcctggaaatcaatcagaaaattggaactgattccatttgtaagaacagaaacataaaataagttttaaacttataaaacttttattttaaaattactacaaacctcaat

SEQ ID NO: 402253 - DNA, 120 bp, Artificial Sequence
  ENSG00000146802_59 (sequence is synthesized)
cttcaataaatggaaaaacacaccatacttcctgggatgaaaagactcaatgcggtgccttgcaggcatttgtatacatagaggaaactgttttcaaagctgagctgcacttttggtccc

SEQ ID NO: 402254 - DNA, 120 bp, Artificial Sequence
  ENSG00000146809_0 (sequence is synthesized)
gtagattagctcaacactcgagaatcattgcagcttcaaggaatggatactaatgatgaccctgatgaagaccatcttacaagttatgatattcagctaagtattcaagaatccattgaa

SEQ ID NO: 402255 - DNA, 120 bp, Artificial Sequence
  ENSG00000146809_1 (sequence is synthesized)
gccagcaagactgcactttgtcctgaaagatttgtacccctaagtgctcaaaacagaaaacttgtggaggccataaaacaaggtcacattcctgagctccaggagtatgtaaaatataaa

SEQ ID NO: 402256 - DNA, 120 bp, Artificial Sequence
  ENSG00000146809_2 (sequence is synthesized)
tatgcaatggatgaagctgatgaaaaaggatggtttccattgcatgaagctgttgttcaacccattcaacaaatacttgagattgttctggatgcatcctataagacactctgggaattc

SEQ ID NO: 402257 - DNA, 120 bp, Artificial Sequence
  ENSG00000146809_3 (sequence is synthesized)
aagacctgtgatggagaaacacccttgactttggcagtcaaagctggtctggtggaaaatgtaagaactttattagaaaagggagtgtggcccaacacaaaaaatgataaaggagagacc

SEQ ID NO: 402258 - DNA, 120 bp, Artificial Sequence
  ENSG00000146809_4 (sequence is synthesized)
ccccttctgattgctgtgaaaaagggctcctatgacatggtgtcgactctgatcaaacataacactagcctagaccagccctgtgtcaagcgatggtcagcaatgcatgaagcagccaag

SEQ ID NO: 402259 - DNA, 120 bp, Artificial Sequence
  ENSG00000146809_5 (sequence is synthesized)
caaggccgaaaagatatcgtagctctgctgctgaaacatggaggcaatgtccacctgagagatggatttggagtcacaccactaggcgtcgctgccgagtatggtcactgtgacgtgtta

SEQ ID NO: 402260 - DNA, 120 bp, Artificial Sequence
  ENSG00000146809_6 (sequence is synthesized)
gaacatctaatccacaaaggtggtgatgtgcttgctttggcggatgatggggcgtcggtgctgtttgaggcagcaggaggtggcaatcccgactgcatttccctcctgctggaatatgga

SEQ ID NO: 402261 - DNA, 120 bp, Artificial Sequence
  ENSG00000146809_7 (sequence is synthesized)
ggaagcggaaatgtacctaaccgagcaggacatcttcctatacaccgagctgcctatgaggggcattatcttgcactgaaatatcttatcccagtaacatctaaaaatgcaattcggaaa

SEQ ID NO: 402262 - DNA, 120 bp, Artificial Sequence
  ENSG00000146809_8 (sequence is synthesized)
agtgggctaacaccaattcactcagcagcagatggacaaaatgcacagtgtctagaactgctcattgaaaatggttttgatgtcaacactctacttgctgaccacatttcccagagctat

SEQ ID NO: 402263 - DNA, 120 bp, Artificial Sequence
  ENSG00000146809_9 (sequence is synthesized)
gacgatgagaggaagactgcgctgtattttggcgtttctaataatgacgttcattgcacagaagtccttctggctgcaggtgcagacccaaacttagatcccctcaactgtctacttgtt

SEQ ID NO: 402264 - DNA, 120 bp, Artificial Sequence
  ENSG00000146809_10 (sequence is synthesized)
gcagtgagggccaataattatgaaattgtcaggctgcttctctcccatggagctaatgtcaattgttattttatgcatgtgaatgacactcgtttccccagtgtcattcaatatgctcta

SEQ ID NO: 402265 - DNA, 120 bp, Artificial Sequence
  ENSG00000146809_11 (sequence is synthesized)
atgcatggtgacatctttggaaattcatttgtgtggtcagagatacaggaagaggtgctgccaggatggacatcttgtgtaataaaagataacccgttctgtgagtttattacagttcct

SEQ ID NO: 402266 - DNA, 120 bp, Artificial Sequence
  ENSG00000146809_12 (sequence is synthesized)
tggatgaagcacttggtaggcagagttactcgtgtactaatagattacatggattatgttcctctgtgtgctaaactgaagtctgcactagaagtacagagagaatggccagaaatccgc

SEQ ID NO: 402267 - DNA, 120 bp, Artificial Sequence
  ENSG00000146809_13 (sequence is synthesized)
caaatactagagaatccttgttcattgaagcatttgtgtcggttaaaaattcgaaggcttatgggtctccagaaactctgccagccagcctcagtggagaagcttcctctaccaccagct

SEQ ID NO: 402268 - DNA, 120 bp, Artificial Sequence
  ENSG00000146809_14 (sequence is synthesized)
attcaaagatacatattatttaaagagtatgatctctatggacaagagctaaaattgacataacttaatattttaaaatgtgatttaaaaaaaatgttgaaatgtgattccctcagataa

SEQ ID NO: 402269 - DNA, 120 bp, Artificial Sequence
  ENSG00000146809_15 (sequence is synthesized)
tttcttgtaaccattttacatccttaattgtaaagtgtatttaaattcattgacagttttataggttatcatgtgttcttatgggaacaccatgatttatgtctttaaagacatttgcat

SEQ ID NO: 402270 - DNA, 120 bp, Artificial Sequence
  ENSG00000146809_16 (sequence is synthesized)
tttttaaagatagtattttgaacttagatttgtatctttgtttgctacaagtcatcaaactctccctatcaagtggctcctacaatatccacaatcaagtctctatgtttaaaaaacaga

SEQ ID NO: 402271 - DNA, 120 bp, Artificial Sequence
  ENSG00000146809_17 (sequence is synthesized)
taaccactttctcaaacccacatctgccagttgctggccagattctcctgtctttcacggtcttgctgtgtaaaagagctcctcctgcctgtaagttcacagactgtgatctggcatctg

SEQ ID NO: 402272 - DNA, 120 bp, Artificial Sequence
  ENSG00000146809_18 (sequence is synthesized)
accctccactgcttttctcaaggtccctgacaatctctttgttggtaaattcagtgaacattcttcagtccctcttccaatcgattcctacagcatctaacattgttgcctgttccttgc

SEQ ID NO: 402273 - DNA, 120 bp, Artificial Sequence
  ENSG00000146809_19 (sequence is synthesized)
ttgaaatgatatctctttccttgtttctcgcaaaacctgttctcttgggtgtcctcccacctccctggacactctgtctctggcttctttctgcctagctcatctctagccaatcttaca

SEQ ID NO: 402274 - DNA, 120 bp, Artificial Sequence
  ENSG00000146809_20 (sequence is synthesized)
gttatatatcttaagccctcttctctttgttctttaagttatatatcctaagccctctttgctttgttctctgggatattttatccacatccatggtcttaatcattttgctagagacta

SEQ ID NO: 402275 - DNA, 120 bp, Artificial Sequence
  ENSG00000146809_21 (sequence is synthesized)
caaaatttccatccaaagctcagctctttctctcatgttctcctgacctatgtagacaattggcctcatgaacatttgaacacaaagacacctcaaattcaacatgtccccagatgaact

SEQ ID NO: 402276 - DNA, 120 bp, Artificial Sequence
  ENSG00000146809_22 (sequence is synthesized)
cttcctctgatttaggaaggcaagtccctggataagaatgacaagatgatcattccaaaaggataaatcctgatgattctctcagggacctctagtagattagctcaacactcgagaatc

SEQ ID NO: 402277 - DNA, 120 bp, Artificial Sequence
  ENSG00000146809_23 (sequence is synthesized)
agatacacagaagcacacattggctccagggcacttcctctgatttaggaaggcaagtccctggataagaatgacaagatgatcattccaaaaggaaagcagtcaagacagtgcaggagg

SEQ ID NO: 402278 - DNA, 120 bp, Artificial Sequence
  ENSG00000146809_24 (sequence is synthesized)
tgaggccatcttataggaagagcagttgtccagcctctggaagaaaaagctcagtggagatctgacagccttcctgggggatattaacagggctcctgtgttgcagaggaacactacttt

SEQ ID NO: 402279 - DNA, 120 bp, Artificial Sequence
  ENSG00000146809_25 (sequence is synthesized)
ctcagtgtagctctgagaaagagaaccagaaaaaggatttctcttcagtagaaaaggcaaataccataaagaaggaatcgctgtaacttattgcttgaatggatactaatgatgaccctg

SEQ ID NO: 402280 - DNA, 120 bp, Artificial Sequence
  ENSG00000146809_26 (sequence is synthesized)
ttagcacaatgctcaattcagtttccaaagaaaaaagcctggacattaggtttgaccatcccattttcctcacccaataagacaaatcaccaaatcctattaagtttatctcctgaagtc

SEQ ID NO: 402281 - DNA, 120 bp, Artificial Sequence
  ENSG00000146809_27 (sequence is synthesized)
atcttccactcagcagccccccaccacccaccccgcatttggccctaagtctattatcttctttttcctgggataatacaatgctgcttatctggctcccctgactctgtcttgccctgt

SEQ ID NO: 402282 - DNA, 120 bp, Artificial Sequence
  ENSG00000146809_28 (sequence is synthesized)
cccaaacactttctacatacagcatctcagaagagtcttttacaaatataatagagtttcacttctctgcttaagatcattcccattgctcttaaattccaaagttcttacttgaacttt

SEQ ID NO: 402283 - DNA, 120 bp, Artificial Sequence
  ENSG00000146809_29 (sequence is synthesized)
catgatctaactcctgccttcttctttagcctcatctctggatgtctacctttcctcctttcccttgaaccttctagaattttattttttaaacactgattcccagacttcaaggtgtca

SEQ ID NO: 402284 - DNA, 120 bp, Artificial Sequence
  ENSG00000146809_30 (sequence is synthesized)
tacactaataggttttattgtgtttatttttcaaaaagagtcattaaaaaataccatctactatcaccatcatttcataaaagaggggtcattttaatgccagaaagtaagatggtcata

SEQ ID NO: 402285 - DNA, 120 bp, Artificial Sequence
  ENSG00000146809_31 (sequence is synthesized)
aattcagtcattcaagttgaatgacttttaccttgaaaagacctcacactgctctcatttccccattgacgagtgagaatttcactgtgggccatcaaatatctgaggacctttgtatgg

SEQ ID NO: 402286 - DNA, 120 bp, Artificial Sequence
  ENSG00000146809_32 (sequence is synthesized)
ggaacctctgctgtagaatagaccatgctctcttttaacctcagggtcttcgcatttccttctctcatctggaactctctttccgctttttttgcaccctttcacctgatcaactcccac

SEQ ID NO: 402287 - DNA, 120 bp, Artificial Sequence
  ENSG00000146809_33 (sequence is synthesized)
ttaccctataggtctcagctgagatgttgcttcctctaggatgggaagcctcagcacagaacttgtcatgccatattatagatgcctgtgttccctgctgtcttcccactagactataag

SEQ ID NO: 402288 - DNA, 120 bp, Artificial Sequence
  ENSG00000146809_34 (sequence is synthesized)
ctctatgagggtaggttctatgtttgttttgttttccagtgctttctcagggccaaacacattccctagagcatggagttcaataattgtttgttgaaatatattgaataagtgacaaaa

SEQ ID NO: 402289 - DNA, 120 bp, Artificial Sequence
  ENSG00000146809_35 (sequence is synthesized)
taagtgacaaaaataatcagtgacatcatggtgaaataatagttttaaatttctgagtgagttatgtaatcttgtaattatttaatgctattattcttagattttaatagtgtatttttc

SEQ ID NO: 402290 - DNA, 120 bp, Artificial Sequence
  ENSG00000146809_36 (sequence is synthesized)
ttaccttgttaccgtattctttaaacagtaatatctcactggtctgtaaagttttcaagttgtatttagctttagttacctttgaaagataaataagtatgaaaaaaatcgtacaattag

SEQ ID NO: 402291 - DNA, 120 bp, Artificial Sequence
  ENSG00000146809_37 (sequence is synthesized)
ggctataattttaacttcttgtattccctagaggatatattttatatgtaagttaaactgtaatgtatttatatttaattgcaacatcttgtatacaagattttattattcttgtgttgc

SEQ ID NO: 402292 - DNA, 120 bp, Artificial Sequence
  ENSG00000146809_38 (sequence is synthesized)
actcttagacgtggttaaatgtattgttacctaaaaatattactctaatgaataaaaaatcatattgaggttataagtctgctttatgatacttcatatattaaacttttgctcactaaa

SEQ ID NO: 402293 - DNA, 120 bp, Artificial Sequence
  ENSG00000146809_39 (sequence is synthesized)
tagctcaacactcgagaatcattgcagcttcaagggaccactgacagcagctgtttgcaatagttgacaaggagaaggaatagagggaaaagatagagaaaagaagagattttgtttcct

SEQ ID NO: 402294 - DNA, 120 bp, Artificial Sequence
  ENSG00000146809_40 (sequence is synthesized)
tgctgaataatggctatcaagtggagatgtgctttgactgcatgcatggtgacatctttggaaattcatttgtgtgctaaactgaagtctgcactagaagtacagagagaatggccagaa

SEQ ID NO: 402295 - DNA, 120 bp, Artificial Sequence
  ENSG00000146826_0 (sequence is synthesized)
gcttcctgtttctctccagtcattcggctcagtaccccggttccggcgctgccgggtctcggttcgggttcgttgccccggtgccgggaccgggccggtctctccggccgccccagccgg

SEQ ID NO: 402296 - DNA, 120 bp, Artificial Sequence
  ENSG00000146826_1 (sequence is synthesized)
gcgcagcagccggaggtgtcgggaccctctggacccaccctagcgggccccgccggcggtcggcctccggtccgggctcccagtcgcgccgtcctcgccgccccatggagtcccagtgcg

SEQ ID NO: 402297 - DNA, 120 bp, Artificial Sequence
  ENSG00000146826_2 (sequence is synthesized)
actactcgatgtacttcccggccgtgccgctgccgccgcgcgcggagctggcaggggatccgggccggtaccgggcgctgccccggcgcaaccatctgtacttgggggagactgtccgtt

SEQ ID NO: 402298 - DNA, 120 bp, Artificial Sequence
  ENSG00000146826_3 (sequence is synthesized)
cgttttctgctggtgttgcgctgccggggcggtgcggggtccggcaccgggggcggcccgggcttgggctccagaggagcctgggcagaactggcaaccgccctggccgccctggcctcg

SEQ ID NO: 402299 - DNA, 120 bp, Artificial Sequence
  ENSG00000146826_4 (sequence is synthesized)
gcgccggaggcgggatgccggggggcggcggcgccggcgaccaggattcggagcccccagggggaggggatcctgggggtgggggtttgttccgaggctgcagcccccttctcacccacg

SEQ ID NO: 402300 - DNA, 120 bp, Artificial Sequence
  ENSG00000146826_5 (sequence is synthesized)
gcccgggccctgctacctcagggggagcgaccacgctgcctgtggaggaaccgattgtgtccacagatgaggtcatcttcccactcaccgtttcactggatagactgcccccagggacac

SEQ ID NO: 402301 - DNA, 120 bp, Artificial Sequence
  ENSG00000146826_6 (sequence is synthesized)
ctaaggccaagattgtagtgactgtgtggaagcgggagattgaggcaccagaggtcagagatcaaggctacctgcgattgctgcagacccgatctcctggggagacattccggggcgagc

SEQ ID NO: 402302 - DNA, 120 bp, Artificial Sequence
  ENSG00000146826_7 (sequence is synthesized)
agagcgctttcaaggcccaagtgagcacgctgctgactctgctgccccctccggttctgagatgccggcagttcactgtggctggaaaacacttgaccgtgctcaaggtgctgaacagct

SEQ ID NO: 402303 - DNA, 120 bp, Artificial Sequence
  ENSG00000146826_8 (sequence is synthesized)
cctctcaggaggaaatctccatctgggatatccgaatcctccccaacttcaacgccagttatctacctgtcatgcccgatggctctgtgctgctggtggacaatgtctgtcaccagtctg

SEQ ID NO: 402304 - DNA, 120 bp, Artificial Sequence
  ENSG00000146826_9 (sequence is synthesized)
gggaagtctccatgggctccttctgccgcctacccgggacctctggctgcttcccctgcccgctgaatgccctggaggaacacaacttcctgtttcagctgagagggggtgagcagcccc

SEQ ID NO: 402305 - DNA, 120 bp, Artificial Sequence
  ENSG00000146826_10 (sequence is synthesized)
attgctgtggttcagtggtctaccccaaagctgcccttcactcagagcatctacacccactaccgcctgcccagtgtccgcttggaccgcccgtgttttgtgatgaccgcttcttgtaag

SEQ ID NO: 402306 - DNA, 120 bp, Artificial Sequence
  ENSG00000146826_11 (sequence is synthesized)
tcccctgttcggacctacgagcgtttcactgtcacctacacgctgcttaacaatctccaagacttccttgctgtgaggctcgtgtggaccccagagcatgcacaggctggaaagcagctg

SEQ ID NO: 402307 - DNA, 120 bp, Artificial Sequence
  ENSG00000146826_12 (sequence is synthesized)
tgtgaggaggagcgccgggccatgcaggctgccctggactccgtcgtctgccacacgcccctcaacaaccttggcttttcccggaagggcagcgcgctcaccttcagtgtggccttccag

SEQ ID NO: 402308 - DNA, 120 bp, Artificial Sequence
  ENSG00000146826_13 (sequence is synthesized)
gctctgaggacggggctcttcgagctaagccagcacatgaaactgaagctgcagttcaccgccagcgtgtcccaccctccacccgaggcccggcccctctcccgcaagagcagccccagc

SEQ ID NO: 402309 - DNA, 120 bp, Artificial Sequence
  ENSG00000146826_14 (sequence is synthesized)
agccctgctgtccgggacttggtggagaggcatcaggctagcctgggccgctcccagtccttctcccaccagcagccttcccgaagccacctcatgaggtcgggcagtgtgatggagcgc

SEQ ID NO: 402310 - DNA, 120 bp, Artificial Sequence
  ENSG00000146826_15 (sequence is synthesized)
agagccatcacgccccctgtggcctctcctgttggccgccccctctacctgcccccggacaaggctgtgttgtctctggacaagattgccaagcgcgagtgcaaggtcctggtggtggaa

SEQ ID NO: 402311 - DNA, 120 bp, Artificial Sequence
  ENSG00000146826_16 (sequence is synthesized)
cccgtcaagtagcaccgtgccagctctgttccctcttacactccagagacccaacgcccccagaggggatccctgctcccgggctgtgcctcccctgggatgcctcccagacgggggtga

SEQ ID NO: 402312 - DNA, 120 bp, Artificial Sequence
  ENSG00000146826_17 (sequence is synthesized)
agaggcctggcagagctgcctgtcttgtgtctgctgatgagggatgggggaagaagctgtgaagtgggcgggcatggctgggactaagccaccagtattccccgagttcctgtggggggg

SEQ ID NO: 402313 - DNA, 120 bp, Artificial Sequence
  ENSG00000146826_18 (sequence is synthesized)
gctggccccacccctaggccagggcaagggttcccagagctcccttgtccccggccctttaccctggttctgagtttacaaagtctcttcctcattcccgttgagttctttcccacctct

SEQ ID NO: 402314 - DNA, 120 bp, Artificial Sequence
  ENSG00000146826_19 (sequence is synthesized)
gacattccctccctccctcccgcagggctgagattagagggtggtgatggctaagggcccctgacagtgaccttcctgtctcaggggttggggacagggccaggtagcctcctgcccctt

SEQ ID NO: 402315 - DNA, 120 bp, Artificial Sequence
  ENSG00000146826_20 (sequence is synthesized)
atgtttacgtttgcagcctgaagcactttaatttttttttttttggtctgttcctgtaacttattttccaactattgcttccaactgaaataagactattaaatgcctgttcaggaggga

SEQ ID NO: 402316 - DNA, 120 bp, Artificial Sequence
  ENSG00000146826_21 (sequence is synthesized)
ctccaagacttccttgctgtgaggctcgtgtggaccccagagcatgcacaggctgtttactccacagagtggctttgagaatcagatgagactgtgctggcgaaggccctgtgggaatga

SEQ ID NO: 402317 - DNA, 120 bp, Artificial Sequence
  ENSG00000146826_22 (sequence is synthesized)
ggggatggcttcaggggctgagctctggcatggggagaccatgccttgtcctcttttctgagctagtcaccagtctggggaagtctccatgggctccttctgccgcctacccgggacctc

SEQ ID NO: 402318 - DNA, 120 bp, Artificial Sequence
  ENSG00000146826_23 (sequence is synthesized)
cgaggtgggctggggagggtctgggctgagtgctgagtgatgcagaatgctggggtggacggaggcaggacccttagattttggggatgaaataaaaagctgggcagagggaaggtggga

SEQ ID NO: 402319 - DNA, 120 bp, Artificial Sequence
  ENSG00000146826_24 (sequence is synthesized)
ctcaggaggaaatctccatctgggatatccgaatcctccccaacttcaacgccagttatctacctgtcatgcccgatggctctgtgctgctggtggacaatgtctgctagtcaccagtct

SEQ ID NO: 402320 - DNA, 120 bp, Artificial Sequence
  ENSG00000146826_25 (sequence is synthesized)
taggtcagctgccaggtaggaatttggtccccagggaggggaagagaaaggaaaaagtcagggaggcaggacagtgaaaacagccaaatttggtgccagccccatcacaggaggcgactt

SEQ ID NO: 402321 - DNA, 120 bp, Artificial Sequence
  ENSG00000146828_0 (sequence is synthesized)
ggggacaggctccaggcctggcatcccggtagccgcagctgtcttttccggcccccgtgcactctccgcccgagcggagccccccggctcgcggggatcgcccccgagcgctgcgtcctg

SEQ ID NO: 402322 - DNA, 120 bp, Artificial Sequence
  ENSG00000146828_1 (sequence is synthesized)
cgggtcacctaacccatttgtggcttcctctacctgtgctcagccatggccagcgagagctcacctctgctggcctaccggctcctgggggaggagggggttgccctccctgccaatggg

SEQ ID NO: 402323 - DNA, 120 bp, Artificial Sequence
  ENSG00000146828_2 (sequence is synthesized)
gccgggggtcctggaggggcgtctgcccggaagctgtccaccttcctgggtgtggtggtgcccactgtcctgtccatgttcagcatagttgtttttctgaggattgggttcgtggtgggt

SEQ ID NO: 402324 - DNA, 120 bp, Artificial Sequence
  ENSG00000146828_3 (sequence is synthesized)
catgctgggctactgcaggccctggccatgctgctggttgcctacttcatcctggcactcaccgtcctctctgtctgtgccatcgccaccaatggagccgtgcaggggggcggagcctac

SEQ ID NO: 402325 - DNA, 120 bp, Artificial Sequence
  ENSG00000146828_4 (sequence is synthesized)
ttcatgatcagccgcacactggggcccgaggtcgggggcagcattgggctcatgttctacctggctaacgtctgtggctgtgccgtctccctcctggggctggtggagtctgtgcttgat

SEQ ID NO: 402326 - DNA, 120 bp, Artificial Sequence
  ENSG00000146828_5 (sequence is synthesized)
gtcttcggggccgatgccacagggcccagtgggctccgggtcctgccccagggctacggctggaacctgctgtatggctccctgctgctgggccttgtgggtggggtctgcaccctggga

SEQ ID NO: 402327 - DNA, 120 bp, Artificial Sequence
  ENSG00000146828_6 (sequence is synthesized)
gccggcctctatgcccgggcctcattcctcacattcctgctggtctctggctccctggcctctgtgctcatcagttttgtggctgtggggccgagggacatccgcttgactcctaggcct

SEQ ID NO: 402328 - DNA, 120 bp, Artificial Sequence
  ENSG00000146828_7 (sequence is synthesized)
ggccccaatggctcctccctgccgccccggtttggccacttcaccggcttcaacagcagtaccctgaaggacaacttgggcgctggctatgctgaggactacaccacgggagccgtgatg

SEQ ID NO: 402329 - DNA, 120 bp, Artificial Sequence
  ENSG00000146828_8 (sequence is synthesized)
aattttgccagcgtctttgctgtcctctttaacggctgtacaggcatcatggctggggccaacatgtcaggggagctgaaggaccccagccgggcgatccctctgggcacgatcgtcgcc

SEQ ID NO: 402330 - DNA, 120 bp, Artificial Sequence
  ENSG00000146828_9 (sequence is synthesized)
gtcgcctacaccttcttcgtctatgtcctgcttttctttctctccagcttcacttgtgacaggaccctgctgcaggaagactatgggttcttccgcgccatcagcctgtggcccccactg

SEQ ID NO: 402331 - DNA, 120 bp, Artificial Sequence
  ENSG00000146828_10 (sequence is synthesized)
gtgttgatcggaatctatgccacagcgctctcagcgtccatgagctcgctcattggtgcctcccgcatcctccatgccctggcccgggatgacctctttggcgtgatcttggcaccggcc

SEQ ID NO: 402332 - DNA, 120 bp, Artificial Sequence
  ENSG00000146828_11 (sequence is synthesized)
aaggttgtgtcccgagggggaaacccctgggcagctgtactttattcttggggcctggtgcagctggtgctcctggctgggaagctgaacacactggctgctgtggtcactgtcttctac

SEQ ID NO: 402333 - DNA, 120 bp, Artificial Sequence
  ENSG00000146828_12 (sequence is synthesized)
ctggtggcctatgctgccgtggacctgtcctgcctgagcctggagtgggcctcggcccccaacttccgccccaccttcagcctgttctcctggcacacctgcctgctgggggtggcctcc

SEQ ID NO: 402334 - DNA, 120 bp, Artificial Sequence
  ENSG00000146828_13 (sequence is synthesized)
ctgctcaccgcgcgaggaggccccagtagctggggctatgtcagccaggccttgcttttccaccaggtgcgtaagtatctgcttcggctggacgtccggaaggatcacgtgaagttctgg

SEQ ID NO: 402335 - DNA, 120 bp, Artificial Sequence
  ENSG00000146828_14 (sequence is synthesized)
cggccccagctgctgctcctggtggggaacccccggggcgccctgcctctgctgcggttggccaaccagcttaagaagggggggctgtatgtgctgggccacgtcaccctgggagacctc

SEQ ID NO: 402336 - DNA, 120 bp, Artificial Sequence
  ENSG00000146828_15 (sequence is synthesized)
gactccctgccctcggaccctgtacagccgcagtatggggcatggctcagcctggtggaccgtgcccaggtgaaggcttttgtggatctaaccctctcaccctccgtgcgccagggggct

SEQ ID NO: 402337 - DNA, 120 bp, Artificial Sequence
  ENSG00000146828_16 (sequence is synthesized)
cagcatctgctgcgaatctccggcctcggtggcatgaagcccaacacgttggtcctaggtttctacgatgacgctccaccgcaggaccatttcctgacggacccggctttctctgagcct

SEQ ID NO: 402338 - DNA, 120 bp, Artificial Sequence
  ENSG00000146828_17 (sequence is synthesized)
gcagacagcaccagggagggcagttccccagctctgagcaccctgttccctcctccccgggctcctgggagcccccgggccctcaatccccaggactatgtggccacggtggccgacgcc

SEQ ID NO: 402339 - DNA, 120 bp, Artificial Sequence
  ENSG00000146828_18 (sequence is synthesized)
ctcaagatgaacaagaatgtggtgctggcccgggccagcggggccttgccccctgagcggctgagccgggggtctgggggcacctctcagctgcaccatgtggacgtgtggcccctcaac

SEQ ID NO: 402340 - DNA, 120 bp, Artificial Sequence
  ENSG00000146828_19 (sequence is synthesized)
ctgctgcggccccggggtgggcccggctatgtggatgtctgcggcctcttcctgctgcagatggcaaccatcttgggcatggtgcccgcttggcatagcgcccggctccggatcttcctg

SEQ ID NO: 402341 - DNA, 120 bp, Artificial Sequence
  ENSG00000146828_20 (sequence is synthesized)
tcttcctgtgcctggggcctcgggaggcgcctggggcggccgaggggcggctgcgggcactgctgagccaactgaggatccgggctgaggtgcaggaggtggtgtggggcgagggggccg

SEQ ID NO: 402342 - DNA, 120 bp, Artificial Sequence
  ENSG00000146828_21 (sequence is synthesized)
gaacccgaggcggaggaggaaggggactttgtgaacagtgggcggggagacgcagaggcagaggccctggcacgcagcgccaacgccctggttcgggcccagcaggggcgcggcacagga

SEQ ID NO: 402343 - DNA, 120 bp, Artificial Sequence
  ENSG00000146828_22 (sequence is synthesized)
ggagggccgggtgggccggagggtggggatgctgagggccccatcacagccctcaccttcctgtacttgcctcggccgccagccgatcccgcccgatacccccgctacctggcgctactg

SEQ ID NO: 402344 - DNA, 120 bp, Artificial Sequence
  ENSG00000146828_23 (sequence is synthesized)
gagactctaacccgagacctgggccccacgctgctggttcatggggtcactccagtcacctgcactgatctgtgatgcccctgcctccagggctaggtagagagggcccaggcaggcggc

SEQ ID NO: 402345 - DNA, 120 bp, Artificial Sequence
  ENSG00000146828_24 (sequence is synthesized)
ctatcctgatccttggaggaggaggaagaggaggccactgtggcccgtggccctgcccttgggacgtggagcccaggggaggtttgaaggggatcctgggcttgggcatcacgcccacct

SEQ ID NO: 402346 - DNA, 120 bp, Artificial Sequence
  ENSG00000146828_25 (sequence is synthesized)
cctttggcagagggaccccagcacactaactctgggtggctgtccccaccgtgcaggggagggagtccgcagcctcccttcactggtgccttgatgctaggggccaggcctcctctgtga

SEQ ID NO: 402347 - DNA, 120 bp, Artificial Sequence
  ENSG00000146828_26 (sequence is synthesized)
ctctgggctacctcagtttccccattttggccagactcaccggcccactggggtggtgatgttttcgttctgttttatttttctaactctgctgaccatgaataaaagaccaaaacacta

SEQ ID NO: 402348 - DNA, 120 bp, Artificial Sequence
  ENSG00000146828_27 (sequence is synthesized)
tggtgcaggtgagccttcttcttcaaggggccctttccctcaccccaccagctggcaggatgggggtgcagttagatgcaggctgggagacaaatgtaaagacaaatgcgtatgcacttg

SEQ ID NO: 402349 - DNA, 120 bp, Artificial Sequence
  ENSG00000146828_28 (sequence is synthesized)
gggttgcactggcactctgcagggttcactggcactttgtggggttcaccagcaccttgcaggttgccccagtgctttgcagagttcattggcaccctgggaggttcactggcacttttt

SEQ ID NO: 402350 - DNA, 120 bp, Artificial Sequence
  ENSG00000146828_29 (sequence is synthesized)
ggcaagaggaccgtgggaatgtgtggagagggtggctaagaggcctggatccctgagacggatgctgatgcactctcctccctgggaggatcctcctagctggctatgctgaggactaca

SEQ ID NO: 402351 - DNA, 120 bp, Artificial Sequence
  ENSG00000146828_30 (sequence is synthesized)
tggggctgccaccgtgagggacccagggggatggctggagggctgacctcactccctctgctccccctctccaggggagctgaaggaccccagccgggcgatccctctgggcacgatcgt

SEQ ID NO: 402352 - DNA, 120 bp, Artificial Sequence
  ENSG00000146828_31 (sequence is synthesized)
accaaggggaaacacaggctgggggactgggaagcagaaacccagcttgttggggtggagggtggctaccggcgattgacaacctatagccagcagctgccatggacccagtactgttgc

SEQ ID NO: 402353 - DNA, 120 bp, Artificial Sequence
  ENSG00000146828_32 (sequence is synthesized)
aggcacttagcttgggagtgagggtgggtagtggctttctacccagtttgcatttccacaaatatttggcctcttgtgcatataccattaggtatgacagccgggtgcggtggctcacac

SEQ ID NO: 402354 - DNA, 120 bp, Artificial Sequence
  ENSG00000146828_33 (sequence is synthesized)
ggctgaggtgggaggattgcttgagtccaagaggtcgaggctgcagtgagctatgattacagcactgcactttagcctgggggttggagtgagaccttgtctcttaaaaaaaaggaagga

SEQ ID NO: 402355 - DNA, 120 bp, Artificial Sequence
  ENSG00000146828_34 (sequence is synthesized)
gtgagaccttgtctcttaaaaaaaaggaaggaatgaccactgagtgattaaatccaaggctgcccaatgaataccaggcatatccctttagcacatttgatatctgagtctgatccttaa

SEQ ID NO: 402356 - DNA, 120 bp, Artificial Sequence
  ENSG00000146828_35 (sequence is synthesized)
gatcggggctggagattttcttaccccgtgacgcatgatcatccgtgtcctccttttcctccttcctaggaccctgctgcaggaagactatgggttcttccgcgccatcagcctgtggcc

SEQ ID NO: 402357 - DNA, 120 bp, Artificial Sequence
  ENSG00000146828_36 (sequence is synthesized)
ctccttgctggcttggagcacgccctcccttgtctgtctctccgtccccgctgagccctggctgatgtgtctgctgtggattctgtttttctaggcgtgatcttggcaccggccaaggtt

SEQ ID NO: 402358 - DNA, 120 bp, Artificial Sequence
  ENSG00000146828_37 (sequence is synthesized)
gcactttgtggggtgccccagcactttgagggattcactggcactctgtgggatgtaccaacactttgtgggggttcactgatactttggaggtttggtggcactctgtgggagtgcatt

SEQ ID NO: 402359 - DNA, 120 bp, Artificial Sequence
  ENSG00000146828_38 (sequence is synthesized)
ggccctttctggggatcactgacattgggggtgcacttgcactttacagggctcacgggcacttttcagggttcattgacactttggggtgcactggcactctctggggttcattgacac

SEQ ID NO: 402360 - DNA, 120 bp, Artificial Sequence
  ENSG00000146828_39 (sequence is synthesized)
tttgggggtgcgctggcactttgcatggttcactggtactttccagggttcactgacactttgggggtacactggcactttctggggttcactgacactggggatacactggcacttttg

SEQ ID NO: 402361 - DNA, 120 bp, Artificial Sequence
  ENSG00000146828_40 (sequence is synthesized)
ctcattgacactttgggggtgcactggcacttttggggtttaatagcattttgggggttcattgacactttgggggtgcactggcactttgcagggttcactggcactttctggggctca

SEQ ID NO: 402362 - DNA, 120 bp, Artificial Sequence
  ENSG00000146828_41 (sequence is synthesized)
ttgacactttggggtacactggcattctttggtgttcactggcattttgggggtgcactggcactttggaacaacggcacgcctcttggcccttgcccagctggtgctcctggctgggaa

SEQ ID NO: 402363 - DNA, 120 bp, Artificial Sequence
  ENSG00000146828_42 (sequence is synthesized)
ctgtgtccccagagagaagaagggaggactcgggctcaggcgtggggctggggactgcagcctcgtgtgcggcctgccctgagtttctgtccctcctcccctccatgcccgcagccccac

SEQ ID NO: 402364 - DNA, 120 bp, Artificial Sequence
  ENSG00000146828_43 (sequence is synthesized)
ggctccaggcctggcatcccggtagccgcagctgtcttttccggcccccgtgcactctccgcccgagcggagccccccggctcgcggggatcgcccccgagcgctgcgtcctgcgggtgg

SEQ ID NO: 402365 - DNA, 120 bp, Artificial Sequence
  ENSG00000146828_44 (sequence is synthesized)
ctggctatgctgaggactacaccacgggagccgtgatgaattttgccagcgtctttgctgtcctctttaacggctgtacaggcatcatggctggggccaacatgtcaggaccctgctgca

SEQ ID NO: 402366 - DNA, 120 bp, Artificial Sequence
  ENSG00000146828_45 (sequence is synthesized)
aaatgtgcagcaggcaggctggtatagtgaaggagatcaacattgccctgcacgttgatgccaatttctagtccaacaatctcatctgttaggcagtgattgttttacagatgcagaaac

SEQ ID NO: 402367 - DNA, 120 bp, Artificial Sequence
  ENSG00000146828_46 (sequence is synthesized)
tggcactcagaggatatgagtgacttgggcaaagccacatggctggggcctggctgcacttgggttcagtgcttggagctatggcaacttcctcacgtccatttcagtcttttcccttaa

SEQ ID NO: 402368 - DNA, 120 bp, Artificial Sequence
  ENSG00000146828_47 (sequence is synthesized)
gcagaggggcagactgagccattaccttggctttctggagcttctgctgtgtggccagcatcgtgcaggagatatggacatccctgagattgtccttgcctgcagggagctaaccatcta

SEQ ID NO: 402369 - DNA, 120 bp, Artificial Sequence
  ENSG00000146828_48 (sequence is synthesized)
atcggagagaccaggctaagattcttaaaactgacagagaccaccagggagagctaagatgctaggatggagctaagagggaagtggggaaggtggactctctgatagcaggtgggcaga

SEQ ID NO: 402370 - DNA, 86 bp, Artificial Sequence
  ENSG00000146828_49 (sequence is synthesized)
gaagtggggaaggtggactctctgatagcaggtgggcagaggagggcttgtcttgctttgggtcacagttggggctgggtcccttc

SEQ ID NO: 402371 - DNA, 64 bp, Artificial Sequence
  ENSG00000146828_50 (sequence is synthesized)
ggcgccctgccccttcttcttttttttttttttcttgagagaaggtctcactctgtcaccaagg

SEQ ID NO: 402372 - DNA, 120 bp, Artificial Sequence
  ENSG00000146828_51 (sequence is synthesized)
ctggagtgcagtggtaccatctcggctcaatgcaacttctgcctcccgggctcatgcgattctcccacctcagcctcccagtagctggactacaggcatgcctccccacacctggctaat

SEQ ID NO: 402373 - DNA, 120 bp, Artificial Sequence
  ENSG00000146828_52 (sequence is synthesized)
gtagctggactacaggcatgcctccccacacctggctaattttgcagtttttgtggagctggggtttcacaatgttgcccaggttagttttaaactcctggactcaagcaatcctcccac

SEQ ID NO: 402374 - DNA, 120 bp, Artificial Sequence
  ENSG00000146828_53 (sequence is synthesized)
ccgcccccctcccgttccagcactatcggtccgaagtgtttgggactgcagtgcccgggtaggggtagtcagaggccggcccctccactccgaggcccagatgttgggggggaggtccca

SEQ ID NO: 402375 - DNA, 120 bp, Artificial Sequence
  ENSG00000146828_54 (sequence is synthesized)
cccgcaaggaaactcaccttccaaagctgcggccaacgaagcccagcagagcagcacccggagctccatggcgccgcctcactcgggaccctgctgcaggaagactatgggttcttccgc

SEQ ID NO: 402376 - DNA, 120 bp, Artificial Sequence
  ENSG00000146828_55 (sequence is synthesized)
acagcatcctcctctccatagaattggagtgctcattagtggcaagaatcctaaggcgaactttgcctgtttaagtggaggagattagtcactgagataataaaataaatgcatgtgaaa

SEQ ID NO: 402377 - DNA, 120 bp, Artificial Sequence
  ENSG00000146828_56 (sequence is synthesized)
taccctgaaggacaacttgggcggtgagctgggtgctgccgtggcagggatctcggggtgaggggtgggcagacgtcgggccgggcccgtaaaacctctggatgagcacaggtgtcagag

SEQ ID NO: 402378 - DNA, 120 bp, Artificial Sequence
  ENSG00000146828_57 (sequence is synthesized)
ggaatggagggcaggaggtctggactgcagagcagtgcaatttaattcaagcctgtctagcgtgtgcttggccggcagggcaggaggaagcccacaaaacagtccctgctttagaggaac

SEQ ID NO: 402379 - DNA, 120 bp, Artificial Sequence
  ENSG00000146828_58 (sequence is synthesized)
ttgtgttctagctgaggagagacatgcattcaggaatcagttaaatagcacagaatggcccagcatgacttaaacagatcaggatcacccaggagtggagagaagggaggcctgactatg

SEQ ID NO: 402380 - DNA, 120 bp, Artificial Sequence
  ENSG00000146828_59 (sequence is synthesized)
ggctggggagggcaggagccggggagctggaggtggcctgagatagacaggtgggggattcagccaggagctgggagcagagagggaaggcatctcaggaaagagcttgagaccaggtgc

SEQ ID NO: 402381 - DNA, 120 bp, Artificial Sequence
  ENSG00000146828_60 (sequence is synthesized)
acacgaaaattagctgggcacgctggcttgcacctgtagtgccagacactcgggaagctgagggagaactgattgaacccgggaggaggagccgagattgtgccattcagtgagccgaga

SEQ ID NO: 402382 - DNA, 86 bp, Artificial Sequence
  ENSG00000146828_61 (sequence is synthesized)
accattgcactccagcctgggagacagtgaggttccctctccaaaaaacaaacaaacaaaaaaaacaccataaaagcacctgtagt

SEQ ID NO: 402383 - DNA, 89 bp, Artificial Sequence
  ENSG00000146828_62 (sequence is synthesized)
aagatcgccaccactgccctccagcctgggcttcagaacgagactccgtctcaaaaaaataaataggctgggtgcggtggctcccgcct

SEQ ID NO: 402384 - DNA, 90 bp, Artificial Sequence
  ENSG00000146828_63 (sequence is synthesized)
gactccgtctcaaaaaaataaataggctgactttcggaggtcgaggcgggtggatcacctgagtccaggagttcgagatcagcctggcca

SEQ ID NO: 402385 - DNA, 69 bp, Artificial Sequence
  ENSG00000146828_64 (sequence is synthesized)
gtgagccgagatcgcaccactgcactctctaaaaagttagatgggcatggtggtgcacacctgtagtcc

SEQ ID NO: 402386 - DNA, 85 bp, Artificial Sequence
  ENSG00000146828_65 (sequence is synthesized)
cagactgaggcaggaggatcgctctagcccaggaggtagaggttgcagtgagctacgatggtgccactgcactccagcctggatg

SEQ ID NO: 402387 - DNA, 120 bp, Artificial Sequence
  ENSG00000146828_66 (sequence is synthesized)
aaataaataaataaataaaagagcgtggattagggtctggagggaggaatatcggagcactggggggacgtggcaatgtgtctggctgacccagggccagtgcaggaacaggctggggtc

SEQ ID NO: 402388 - DNA, 120 bp, Artificial Sequence
  ENSG00000146828_67 (sequence is synthesized)
ttcctcttgcattgctagttaaggaaggagaggctggagaagcctgtgccgtcagagaacctttgcccctttccagaaccggtgccatccctagtctcaggaacataagggaaggggtgg

SEQ ID NO: 402389 - DNA, 120 bp, Artificial Sequence
  ENSG00000146830_0 (sequence is synthesized)
cctctgcctggggccccagggatgcgcctcctcctgaaagtcccctccatcctcccttagaggaacaggctgccgccgcgcccccatcagcctccattgccctgaccttatttccacctg

SEQ ID NO: 402390 - DNA, 120 bp, Artificial Sequence
  ENSG00000146830_1 (sequence is synthesized)
atggtgccagaggctgcttcccagctggtatcctgagatcctcgttcccttggtggcttggttgtttaagcctccattattgattgggggcggtggtctgggtgtgattcctgtggggga

SEQ ID NO: 402391 - DNA, 120 bp, Artificial Sequence
  ENSG00000146830_2 (sequence is synthesized)
aaccagcccgaggtgccttggctcaggcttgcctgcctggagtccttgtcgtgtacccgtctgtggccctagagtcacctcctgctccttttcactgggtttctccccagaccaagcccc

SEQ ID NO: 402392 - DNA, 120 bp, Artificial Sequence
  ENSG00000146830_3 (sequence is synthesized)
tggatttgagcttctgagcagccaactgatttttttcatgagggaaagaattttgctcctagatttatttctaatccttttctccgtaactgaccttttctctgtaagctatttgtggct

SEQ ID NO: 402393 - DNA, 120 bp, Artificial Sequence
  ENSG00000146830_4 (sequence is synthesized)
ctagtgggtttttgtttgcttgcttgtttttgttttatctttgccctgaacgtccatcctggcctcggctgcctccctccccgagttcttcactacacctcctgtctcagcctcccagag

SEQ ID NO: 402394 - DNA, 120 bp, Artificial Sequence
  ENSG00000146830_5 (sequence is synthesized)
agggtggcgagggtgctgatgcccagagacaccatccggcgaatggacctctcctgtcatgcggggcagggcagggctgccggcagagccatgtcctgaaccctccctcctcccccctgc

SEQ ID NO: 402395 - DNA, 120 bp, Artificial Sequence
  ENSG00000146830_6 (sequence is synthesized)
tctccttaagggtctttcccagatgtgaaggtccctcccaggctctactgaggtcagaccaattcccagtggcttgggtaccctcgttcactccagcaccagcccctgccctccttcttc

SEQ ID NO: 402396 - DNA, 120 bp, Artificial Sequence
  ENSG00000146830_7 (sequence is synthesized)
ccgggccaggctgccaggtgagccccgggccaagggtggttgccctgctgaggccgaaaggactcgagcttcccatctcctcgcctcccccaggtctttcaccgtctggactcatctctg

SEQ ID NO: 402397 - DNA, 120 bp, Artificial Sequence
  ENSG00000146830_8 (sequence is synthesized)
ggtaactcatggtgtgagtggccacgtggctggctcaggtgagtccttttagaccccaggtgacccaccagctagtccggggcccattgttgtgcccactaggatgtcccccatggtgtc

SEQ ID NO: 402398 - DNA, 120 bp, Artificial Sequence
  ENSG00000146830_9 (sequence is synthesized)
ctccctgcgctttaaagttctccttcgtgtgctgttcttcatggcccctgttcccccacaggtgtttggacagtgaacgccaggtcccctcctccccacccccggcctctcaaacacgcc

SEQ ID NO: 402399 - DNA, 120 bp, Artificial Sequence
  ENSG00000146830_10 (sequence is synthesized)
cagccccacgatggcagcagagacactcaactttgggcctgagtggctcagggccctgtccgggggcggcagcgtggcctccccacccccgtcccctgccatgcccaaatacaagctggc

SEQ ID NO: 402400 - DNA, 120 bp, Artificial Sequence
  ENSG00000146830_11 (sequence is synthesized)
tgactaccgttatgggcgagaggaaatgctggctctctacgtcaaggagaacaaggtcccggaagagctgcaggacaaggagttcgccgcggtgctgcaggacgagccactgcagcccct

SEQ ID NO: 402401 - DNA, 120 bp, Artificial Sequence
  ENSG00000146830_12 (sequence is synthesized)
ggctctggagccgctgactgaggaggaacagagaaacttctccctgtcagtgaacagcgtggctgtgctgaggctgatggggaaaggggctggcccccccctggctggcacctcccgagg

SEQ ID NO: 402402 - DNA, 120 bp, Artificial Sequence
  ENSG00000146830_13 (sequence is synthesized)
caggggcagcacgcggagccgaggccgcggccgtggtgacagctgcttttaccaaagaagcatcgaagaaggcgatggggcctttggacgaagcccccgggaaatccagcgcagccagag

SEQ ID NO: 402403 - DNA, 120 bp, Artificial Sequence
  ENSG00000146830_14 (sequence is synthesized)
ctgggatgacagaggcgagaggcggtttgagaagtcagcaaggcgggatggagcacgatgtggctttgaggagggaggggctggcccaaggaaggagcacgcccgctcagacagcgagaa

SEQ ID NO: 402404 - DNA, 120 bp, Artificial Sequence
  ENSG00000146830_15 (sequence is synthesized)
ctggcgctccctacgggaggaacaggaggaggaggaggagggcagctggaggctcggagcagggccccggcgagacggcgaccgctggcgctccgccagccctgatggtggtccccgctc

SEQ ID NO: 402405 - DNA, 120 bp, Artificial Sequence
  ENSG00000146830_16 (sequence is synthesized)
tgctggctggcgggaacatggggaacggcggcgcaagtttgaatttgatttgcgaggggatcgaggagggtgtggtgaagaggaggggcggggagggggaggcagctctcacctgcggcg

SEQ ID NO: 402406 - DNA, 120 bp, Artificial Sequence
  ENSG00000146830_17 (sequence is synthesized)
gtgccgagcgcctgaaggctttgaggaggacaaggatgggctcccagagtggtgcctggacgatgaggatgaagaaatgggcacctttgatgcctctggggccttcttgcctctcaagaa

SEQ ID NO: 402407 - DNA, 120 bp, Artificial Sequence
  ENSG00000146830_18 (sequence is synthesized)
gggccccaaggagcccattcctgaggagcaggagctggacttccaagggttggaggaggaggaggaaccttccgaagggctagaggaggaagggcctgaggcaggtgggaaagagctgac

SEQ ID NO: 402408 - DNA, 120 bp, Artificial Sequence
  ENSG00000146830_19 (sequence is synthesized)
cccactgcctcctcaggaggagaagtccagctccccatccccactgcccaccctgggcccactctgggggacaaacggggatggggacgaaactgcagagaaagagcccccagcggccga

SEQ ID NO: 402409 - DNA, 120 bp, Artificial Sequence
  ENSG00000146830_20 (sequence is synthesized)
agatgatattcgggggatccagctgagtcccggggtgggctcctctgctggcccacccggagatctggaggatgatgaaggcttgaagcacctgcagcaggaggcggagaagctggtggc

SEQ ID NO: 402410 - DNA, 120 bp, Artificial Sequence
  ENSG00000146830_21 (sequence is synthesized)
ctccctgcaggacagctccttggaggaggagcagttcacggctgccatgcagacccagggcctgcgccactctgcagccgccactgccctcccgctcagccatggggctgcccggaagtg

SEQ ID NO: 402411 - DNA, 120 bp, Artificial Sequence
  ENSG00000146830_22 (sequence is synthesized)
gttctacaaggacccacagggcgagatccaaggccccttcacgacacaggagatggcagagtggttccaggccggctacttttccatgtcactgctggtgaagcggggctgcgatgaggg

SEQ ID NO: 402412 - DNA, 120 bp, Artificial Sequence
  ENSG00000146830_23 (sequence is synthesized)
cttccagccgctgggcgaggtgatcaagatgtggggccgcgtgccctttgccccagggccctcacctcccccactgctgggaaacatggaccaggagcggctgaagaagcaacaggagct

SEQ ID NO: 402413 - DNA, 120 bp, Artificial Sequence
  ENSG00000146830_24 (sequence is synthesized)
ggccgcggcggccttgtaccagcagctgcagcaccagcagtttctccagctggtcagcagccgccagctcccacagtgcgcgctccgagaaaaggcagctctgggggacctgacaccgcc

SEQ ID NO: 402414 - DNA, 120 bp, Artificial Sequence
  ENSG00000146830_25 (sequence is synthesized)
accaccgccgccgccacagcagcagcagcagcagctcacggcattcctgcagcagctccaggcgctcaaaccccccagaggcggggaccagaacctgctcccgacgatgagccggtcctt

SEQ ID NO: 402415 - DNA, 120 bp, Artificial Sequence
  ENSG00000146830_26 (sequence is synthesized)
gtcggtgccagattcgggccgcctctgggacgtacatacctcagcctcatcacagtcaggtggtgaggccagtctttgggacataccaattaactcttcgactcagggtccaattctaga

SEQ ID NO: 402416 - DNA, 120 bp, Artificial Sequence
  ENSG00000146830_27 (sequence is synthesized)
gggcgaagcgggaggaagaggaacgcaagcgtcgagaggagaagcgccgccagcagcagcaggaggagcagaagcggcggcaggaggaggaagagctgtttcggcgcaagcacgtgcggc

SEQ ID NO: 402417 - DNA, 120 bp, Artificial Sequence
  ENSG00000146830_28 (sequence is synthesized)
agcaggagctattgctgaagttgctacagcagcagcaggcggtccctgtgccccccgcacccagctccccgcccccactctgggctggcctggccaagcaggggctgtccatgaagacgc

SEQ ID NO: 402418 - DNA, 120 bp, Artificial Sequence
  ENSG00000146830_29 (sequence is synthesized)
tcctggagttgcagctggagggcgagcggcagctgcacaaacagcccccacctcgggagccagctcgggcccaggcccccaaccaccgagtgcagcttgggggcctgggcactgcccccc

SEQ ID NO: 402419 - DNA, 120 bp, Artificial Sequence
  ENSG00000146830_30 (sequence is synthesized)
tgaaccagtgggtgtctgaggctgggccactgtggggcgggccagacaagagtgggggcggcagcagcggcctggggctctgggaggacacccccaagagcggcgggagcctggtccgtg

SEQ ID NO: 402420 - DNA, 120 bp, Artificial Sequence
  ENSG00000146830_31 (sequence is synthesized)
gcctcggcctgaagaacagccggagcagcccatctctcagtgactcatacagccacctatcgggtcggcccattcgcaaaaagacggaggaagaagagaagctgctgaagctgctgcagg

SEQ ID NO: 402421 - DNA, 120 bp, Artificial Sequence
  ENSG00000146830_32 (sequence is synthesized)
gcattcccaggccccaggacggcttcacccagtggtgcgagcagatgctgcacacgctgagcgccacgggcagcctggacgtgcccatggctgtagcgatcctcaaggaggtggaatccc

SEQ ID NO: 402422 - DNA, 120 bp, Artificial Sequence
  ENSG00000146830_33 (sequence is synthesized)
cctatgatgtccacgattatatccgttcctgcctgggggacacgctggaagccaaagaatttgccaaacaattcctggagcggagggccaagcagaaagccagccagcagcggcagcagc

SEQ ID NO: 402423 - DNA, 120 bp, Artificial Sequence
  ENSG00000146830_34 (sequence is synthesized)
agcaggaggcatggctgagcagcgcctcgctgcagacggccttccaggccaaccacagcaccaaactcggccccggggagggcagcaaggccaagaggcgggcactgatgctgcactcag

SEQ ID NO: 402424 - DNA, 120 bp, Artificial Sequence
  ENSG00000146830_35 (sequence is synthesized)
accccagcatcctggggtactccctgcacggatcttctggtgagatcgagagcgtggatgactactgaccagcccggacccccagcccctgggctgtaggccagggcagccacagcggcg

SEQ ID NO: 402425 - DNA, 120 bp, Artificial Sequence
  ENSG00000146830_36 (sequence is synthesized)
tggaccgagggtcccagcctgcaggctccccgcagagagcacaggaagaggcaggggcggggtccccagcacttgttacaaacacacgatgcaccttaactcacccaccacgaggcactt

SEQ ID NO: 402426 - DNA, 120 bp, Artificial Sequence
  ENSG00000146830_37 (sequence is synthesized)
ttttctttttatttttttttttaattttaaacgactgaagaaaacattaggagaggcaaaaatattgttaaaaactagactctaaacaccccttcctgctgtgaggatagtgggtgtgac

SEQ ID NO: 402427 - DNA, 89 bp, Artificial Sequence
  ENSG00000146830_38 (sequence is synthesized)
gaaaaaaagatgaaaaatgaaaaaaaaaatggttaggaggctgaaagaaaaaacacactgttattttggggcagtggggacacaggccc

SEQ ID NO: 402428 - DNA, 120 bp, Artificial Sequence
  ENSG00000146830_39 (sequence is synthesized)
aaaacacactgttattttggggcagtggggacacaggccccgtggacctgtcctgcctggcccccaaggccatacttaccccccagaaggcgggccatggggtaactggaagctgggggc

SEQ ID NO: 402429 - DNA, 120 bp, Artificial Sequence
  ENSG00000146830_40 (sequence is synthesized)
cagcagtttgcacaggaggcctgtctgagccccacccgccagacctgttgtgagcagctcctgtcactgaggctggctgaggtgtccggggtggggccaaagtagccccttggcttcgct

SEQ ID NO: 402430 - DNA, 120 bp, Artificial Sequence
  ENSG00000146830_41 (sequence is synthesized)
gctttgggggacagttgcacaaattggacgagtggccccagctctctggctgccatcttgtgctggccgagtagacgggaggggccaagccgtgccaacctctctggctggcagggtggg

SEQ ID NO: 402431 - DNA, 120 bp, Artificial Sequence
  ENSG00000146830_42 (sequence is synthesized)
gcagcaggactctggttctggtgaggggcgtctcccactgctgccattttgggggacaccctgggtttgaacctgaaagccccagctctctgccttgccacgtgaatgtattctttgggc

SEQ ID NO: 402432 - DNA, 120 bp, Artificial Sequence
  ENSG00000146830_43 (sequence is synthesized)
cacaagcccccgcctcacccctgcctgagctgcctcacccctgtgagcggcgggggtggatgattgctccagaggctgcagagagaaggctgagctgtttctccagtgaagggggcagga

SEQ ID NO: 402433 - DNA, 120 bp, Artificial Sequence
  ENSG00000146830_44 (sequence is synthesized)
ggaggggcctcaaaggcaaggagtgggtggctttgggcttagggttgcagtagaggggctgccgcccggggccccaacctgtagccagctcgtaagatgtggaccacccagctctgcacc

SEQ ID NO: 402434 - DNA, 120 bp, Artificial Sequence
  ENSG00000146830_45 (sequence is synthesized)
tgacccttccgctgaccaaatgggagaggagcaggtggccttccgggtctgatatgatgcgctttttaccgttgggtaaggttggggtgaagagaagtgtgcggctcctgggtcagagga

SEQ ID NO: 402435 - DNA, 120 bp, Artificial Sequence
  ENSG00000146830_46 (sequence is synthesized)
ggctgccccttctattgctcacccacttcttattcccggtcccctacttgggttcgtctccgcccattttgggttttgtaacagttttgtcttttgggtttctcatccagctcctcccat

SEQ ID NO: 402436 - DNA, 120 bp, Artificial Sequence
  ENSG00000146830_47 (sequence is synthesized)
tgacctcattgctcagagtgcagtattagggcaaggcttcgccactgcctccctccatgaatgtatttctccctcctgccctggggacatggggagtggcccgtttctttccccatctag

SEQ ID NO: 402437 - DNA, 120 bp, Artificial Sequence
  ENSG00000146830_48 (sequence is synthesized)
tttttttttttttttttttttgcaccaaagtggcaactaggtcagtgttgggggatcaagctggcctcggggtggggggcccccacctgcctctccctggttcccacagtgttagcgtcc

SEQ ID NO: 402438 - DNA, 120 bp, Artificial Sequence
  ENSG00000146830_49 (sequence is synthesized)
ccccacctgcctctccctggttcccacagtgttagcgtccctgaaaagacaatattctctctaaagcaataaggggtgacgggccggggggagtgtttgctgctgctggcccccagctcc

SEQ ID NO: 402439 - DNA, 120 bp, Artificial Sequence
  ENSG00000146830_50 (sequence is synthesized)
ccttccctcttgccaggtgtgggggagactcctgttgtgactgaatgtaacccccccacccctgccgcagccaatgcaggggaagggggacactcttcctgtctcttctccccagctaaa

SEQ ID NO: 402440 - DNA, 120 bp, Artificial Sequence
  ENSG00000146830_51 (sequence is synthesized)
gagactttggacttagggggcccatgagcctggagaggccttaaccctgtgaggaagtatagggggagccctctcccacccccatccccttctgagagtggtcaatgtttacaagcccct

SEQ ID NO: 402441 - DNA, 120 bp, Artificial Sequence
  ENSG00000146830_52 (sequence is synthesized)
gagcccccctgcccagggactcagaccctgttgctgtccttccccggccccggtcttcctgggccctcgctgctcccctgcccttcctggggttggggtgggtgcaggggtcaccgtgtt

SEQ ID NO: 402442 - DNA, 120 bp, Artificial Sequence
  ENSG00000146830_53 (sequence is synthesized)
ccctgtctgccttgtacccacagtctccccgccccctctccaccctgtgtgacttccctctcttttacctgctcctgtaaatactcccttctcccaataaaacttggtgtgtgttctccc

SEQ ID NO: 402443 - DNA, 120 bp, Artificial Sequence
  ENSG00000146830_54 (sequence is synthesized)
ccccgtctcctccccgaggccgccgcagcccgactgtggcgtcctggagttgatgggagctgcagcaccaagccgggccagcctccctcccagccagtgacaacaccgcagcacctggac

SEQ ID NO: 402444 - DNA, 120 bp, Artificial Sequence
  ENSG00000146833_0 (sequence is synthesized)
tgcgttgtacccttttacgtgaggcggtgacggcggttcggaagtcgtctggcctccccgcggccgctcgcagcttgctggcctctcccgcgcctcacgtcggactccgtctccgcggca

SEQ ID NO: 402445 - DNA, 120 bp, Artificial Sequence
  ENSG00000146833_1 (sequence is synthesized)
gggaagcagcatggaagctgaggacatccaggaggagttgacctgccccatctgcctggactatttccaggacccggtgtccatcgagtgcggccacaacttctgccgcggctgcctgca

SEQ ID NO: 402446 - DNA, 120 bp, Artificial Sequence
  ENSG00000146833_2 (sequence is synthesized)
ccgcaactgggcgccgggcggcggcccgttcccctgccccgaatgtcggcacccatcggcgcccgccgcgctgcgacccaactgggccctggccaggctgactgagaagacgcagcgccg

SEQ ID NO: 402447 - DNA, 120 bp, Artificial Sequence
  ENSG00000146833_3 (sequence is synthesized)
gcgcctgggccccgtgcccccgggcctgtgcggccgccactgggagccgctgcggctcttctgcgaggacgaccagcggccagtgtgcctggtgtgcagggagtcccaggagcaccagac

SEQ ID NO: 402448 - DNA, 120 bp, Artificial Sequence
  ENSG00000146833_4 (sequence is synthesized)
tcacgccatggcacccatcgacgaggccttcgagagctaccggacaggtaactttgacatccacgtggatgaatggaagagaagactaattaggctgctcttgtaccattttaagcagga

SEQ ID NO: 402449 - DNA, 120 bp, Artificial Sequence
  ENSG00000146833_5 (sequence is synthesized)
ggagaaacttcttaagtctcagcgtaatctcgtggccaagatgaagaaagtcatgcatttacaggatgtagaagtgaagaacgccacacagtggaaggataagataaagagtcagcgaat

SEQ ID NO: 402450 - DNA, 120 bp, Artificial Sequence
  ENSG00000146833_6 (sequence is synthesized)
gagaatcagcacggagttttcaaagctgcacaacttcctggttgaagaagaggacctgtttcttcagagattgaacaaagaagaagaagagacgaagaagaagctgaatgagaacacgtt

SEQ ID NO: 402451 - DNA, 120 bp, Artificial Sequence
  ENSG00000146833_7 (sequence is synthesized)
aaaactcaatcaaactatcgcttcattgaagaagctcatcttagaggtgggggagaagagccaggctcccaccctggagctgcttcagaatccaaaagaagtgttgaccaggagtgagat

SEQ ID NO: 402452 - DNA, 120 bp, Artificial Sequence
  ENSG00000146833_8 (sequence is synthesized)
ccaggatgtgaactattctcttgaagctgtaaaggtgaagacagtgtgccagataccattgatgaaggaaatgctaaagcgattccaagtggctgtaaacctagctgaagacacagctca

SEQ ID NO: 402453 - DNA, 120 bp, Artificial Sequence
  ENSG00000146833_9 (sequence is synthesized)
tcccaaactcgtcttctcccaggaagggagatacgtgaaaaatacagcatcagccagttcttggccagtgttttcttcagcatggaactactttgctggatggaggaatcctcagaagac

SEQ ID NO: 402454 - DNA, 120 bp, Artificial Sequence
  ENSG00000146833_10 (sequence is synthesized)
tgcttttgtagagagatttcagcacttaccctgtgttctgggaaaaaacgttttcacctcagggaaacattactgggaagttgagagtagagatagtctggaggttgctgttggggtgtg

SEQ ID NO: 402455 - DNA, 120 bp, Artificial Sequence
  ENSG00000146833_11 (sequence is synthesized)
tcgggaggacgtcatgggaattactgatcgttcaaaaatgtccccagatgtgggcatctgggcgatttattggagtgctgctggctattggcccttgataggcttccctggaactcccac

SEQ ID NO: 402456 - DNA, 120 bp, Artificial Sequence
  ENSG00000146833_12 (sequence is synthesized)
ccagcaagagccagctctccaccgagtgggggtttacctggatcgtgggactgggaatgtctccttctacagcgctgtggacggagtgcacctgcacaccttttcttgttcttctgtctc

SEQ ID NO: 402457 - DNA, 120 bp, Artificial Sequence
  ENSG00000146833_13 (sequence is synthesized)
acgcctccggccatttttttggttgagtccattagcatctttagtcattccaccagtgactgataggaaatgaggcttttcttcccctgaccaaaactccttccctgtagtccagctgag

SEQ ID NO: 402458 - DNA, 120 bp, Artificial Sequence
  ENSG00000146833_14 (sequence is synthesized)
tctgcccttcatgtctctatcctggatggtccatcttctgggtctccctaacggtaccgtttggtatctgccctttgtgtgcttcacaagaggcagtcccatgggaggtgggtctggcca

SEQ ID NO: 402459 - DNA, 120 bp, Artificial Sequence
  ENSG00000146833_15 (sequence is synthesized)
atggagatgggacaggaaattttccaagacgcttttgggaaatctttttgtagcttttaaagagatgtgcggggaagacatatggatgttagcagccatattggaactgagaacacagga

SEQ ID NO: 402460 - DNA, 120 bp, Artificial Sequence
  ENSG00000146833_16 (sequence is synthesized)
atggtggaaaggtagaagaaacagagtttttgttgccgttgtgaaattgttgaaatttccttcatgccaagcttcttgttatatgagataattacgcccttattgtataagacaatttta

SEQ ID NO: 402461 - DNA, 120 bp, Artificial Sequence
  ENSG00000146833_17 (sequence is synthesized)
gttgtatttggttacttgcagcctgaagtaccgtaactgcactaaagggacgtagtgtgaacatcccgcagtataggcttaagtcacttttgtgaaatttgacaaaggcatagaatcttt

SEQ ID NO: 402462 - DNA, 120 bp, Artificial Sequence
  ENSG00000146833_18 (sequence is synthesized)
ttctatccagtcaggcattgcctattctttccagtaactactgattcccccacttttctgtcttagaaaattgtgggaatcccccctcactctgcctatgttgcactctctctcttccca

SEQ ID NO: 402463 - DNA, 120 bp, Artificial Sequence
  ENSG00000146833_19 (sequence is synthesized)
accataactctgccctcagctattaactgtgctgtgtatttatcaagttggtatgttgtatgtacagtgttattcatgtcatcatgagaatgttgaacgcttgttaaatatcttttgcta

SEQ ID NO: 402464 - DNA, 120 bp, Artificial Sequence
  ENSG00000146833_20 (sequence is synthesized)
gcctcttcatatgctgttgcatatgactctcatcacaactcagtgagatggaaagtcaaatcctatttgtacaaatgagaaaactgaactctttagagtaactagctcagtattggccag

SEQ ID NO: 402465 - DNA, 120 bp, Artificial Sequence
  ENSG00000146833_21 (sequence is synthesized)
ctggtaaatggcagtgttgggattaaaatccagttcttatctactctccctttattcagaagcatttattggatgttgatctttgtttcaggttttgattttgttacttttttatactgt

SEQ ID NO: 402466 - DNA, 120 bp, Artificial Sequence
  ENSG00000146833_22 (sequence is synthesized)
gtatattttcctcagtctacccttctgctctagattgtctggactcaggagattgtggcagttactggatagttatttttaagataatgattgcttttctctgtttatataagtcatgtg

SEQ ID NO: 402467 - DNA, 120 bp, Artificial Sequence
  ENSG00000146833_23 (sequence is synthesized)
tacttattgtagaaagtttgtaagatgcaaaaagtataaaaattaaagttatgcactactaacatttcaatatattttctcccagattttcagtaaagactttcaggcagtgatttaacg

SEQ ID NO: 402468 - DNA, 120 bp, Artificial Sequence
  ENSG00000146833_24 (sequence is synthesized)
aggattttattttaacttatattttagtttaaggggaacacgtgcaggtttgttctatagatcaattacatgtcacaggggtttggtgtacatattatttcattacccaggtaataagca

SEQ ID NO: 402469 - DNA, 120 bp, Artificial Sequence
  ENSG00000146833_25 (sequence is synthesized)
tagtacccaatagatacttttttgataccccaccctcctccaccctctaccctcaagtagtccctggtgtctgttgttcccttttttgtgtccatgggtactcaatgtttagctctccct

SEQ ID NO: 402470 - DNA, 89 bp, Artificial Sequence
  ENSG00000146833_26 (sequence is synthesized)
tttgtgtccatgggtactcaatgtttagctctcccttatacatgtgttggtttgcttagggtaatggcctccagctccatccatgttgc

SEQ ID NO: 402471 - DNA, 120 bp, Artificial Sequence
  ENSG00000146833_27 (sequence is synthesized)
gaaggaaatgctaaagcgattccaagggattgagaaaggggacaatgtggcagaagaatcagacctctctggcagacttcatccttgaggggctcttcgatgactcccttacccaccttt

SEQ ID NO: 402472 - DNA, 120 bp, Artificial Sequence
  ENSG00000146833_28 (sequence is synthesized)
ccgttttcaaagcaccagacgtcaggcagtgaaggacggtgattcctgagaaatgtgaaacaaatgaggtcagcctatgattgccctaccctctgcctgagggagtttccagaccatgta

SEQ ID NO: 402473 - DNA, 120 bp, Artificial Sequence
  ENSG00000146833_29 (sequence is synthesized)
aggctgaggtaactgaggtagagccagggagacttgctgagttgaggaatagacctgggagttcacggagaacaaagtagtgagagttcgcaaagtactgggcagtatcctggagcggag

SEQ ID NO: 402474 - DNA, 120 bp, Artificial Sequence
  ENSG00000146833_30 (sequence is synthesized)
agagccggacacagagagaaccctcgccatctatggaggagcttcctagttgtttggcagagttctgatcagcacatgcctgtgaaaatctactcaaggctggagatagaagcttctaaa

SEQ ID NO: 402475 - DNA, 120 bp, Artificial Sequence
  ENSG00000146833_31 (sequence is synthesized)
acgattagagggaacggttcctggtgctcacacagggccaggaacagtgccagttcctatcagccacaccagaaaactcgtagttcacgggcactgagtagcgtactcaggaaaatcttg

SEQ ID NO: 402476 - DNA, 120 bp, Artificial Sequence
  ENSG00000146833_32 (sequence is synthesized)
cctcattagcagaaaatatttagcccttgactgggtgctgctccacacccaccttacaaatcatgaaagcaagacccaaaggggtcaaactctttccaactaacttaactgcatcccagg

SEQ ID NO: 402477 - DNA, 120 bp, Artificial Sequence
  ENSG00000146833_33 (sequence is synthesized)
ataaagccctagaaaattggtagaaataaacaaaaaaagagcacctaacaatataaattcacaatgtctggcatccagtcaaatatgcatgcaaaaagataggaaagcagtgacccataa

SEQ ID NO: 402478 - DNA, 120 bp, Artificial Sequence
  ENSG00000146833_34 (sequence is synthesized)
tggaggaaaataatcaactgaaactgacctagaattgacacagatgttagaataagcatggaaggactttaaaacatttattatgagtgtattctgtaaagaggtacatagagaccagat

SEQ ID NO: 402479 - DNA, 120 bp, Artificial Sequence
  ENSG00000146833_35 (sequence is synthesized)
caaagttttaaagatgaaaaatgtgattaaggcgaagaatgcactggatgggattaatagttgattaaatattacaaaagaaaaaattggtgaacttgaagacagagcaatggaaactac

SEQ ID NO: 402480 - DNA, 120 bp, Artificial Sequence
  ENSG00000146833_36 (sequence is synthesized)
gctcccaccctggagctgcttcaggtgagacagttacgagtgggggtgatctcatcttcactaactgaactctctcttgtctttagagctgaatgtccttcctggtgagtgggtttcata

SEQ ID NO: 402481 - DNA, 120 bp, Artificial Sequence
  ENSG00000146833_37 (sequence is synthesized)
gacatgtcttatctcttgctagttctgtgctgtcacataactaaaaagccaaagattcaccattcaaaggaaattaatgtgaaatgtaggtatgctgagctcagctcataggagataagt

SEQ ID NO: 402482 - DNA, 120 bp, Artificial Sequence
  ENSG00000146833_38 (sequence is synthesized)
tgattcacacagtctcatagttcatctaggatctgagacttagcacatataagatttttttcattcatcttatgtgtacatttataattattaaacaataaaacaaagcaagcataaaac

SEQ ID NO: 402483 - DNA, 120 bp, Artificial Sequence
  ENSG00000146834_0 (sequence is synthesized)
ctcttgttttggtctcgcgggctagtagggcgcacttggcggggaggcgcttgggcgcgagactaggcgtgaagagcagagctgcgcgcgcactcgggaaaggggggaagggagcagggt

SEQ ID NO: 402484 - DNA, 120 bp, Artificial Sequence
  ENSG00000146834_1 (sequence is synthesized)
ccaggcagggggggttaggccccctgatccccctcgttaccccgactggcacggaataaggggaggaaatgatcgagatggcggcggagaaggagccgtttctggtgccggccccgccgc

SEQ ID NO: 402485 - DNA, 120 bp, Artificial Sequence
  ENSG00000146834_2 (sequence is synthesized)
cgccgctcaaagatgagtcgggcggagggggcggccccacggtgccaccgcaccaagaggccgcctctggggagctccgcggcgggacggagcgtggtccgggtcgttgcgcgccatctg

SEQ ID NO: 402486 - DNA, 120 bp, Artificial Sequence
  ENSG00000146834_3 (sequence is synthesized)
cgtggtccgggtcgttgcgcgccatctgcggggtccccagccgctgcggtcggtcgggaaagccccggggccgcggccacctcctccagtggtccccaggcgcagcagcaccgagggggc

SEQ ID NO: 402487 - DNA, 120 bp, Artificial Sequence
  ENSG00000146834_4 (sequence is synthesized)
cccgcctgtcggatcccccggggcgagccgctcccccggacgtgggggaggagcgccggggagggggcgggacagagctgggtccccctgctcctcctcgaccccgcaatggctatcagc

SEQ ID NO: 402488 - DNA, 120 bp, Artificial Sequence
  ENSG00000146834_5 (sequence is synthesized)
cccaccggccacctggggggggcgggggcaagaggagaaatagctgtaatgtagggggaggcgggggaggcttcaaacatccggccttcaagaggcgcaggcgggtgaattcggactgtg

SEQ ID NO: 402489 - DNA, 120 bp, Artificial Sequence
  ENSG00000146834_6 (sequence is synthesized)
actctgtgttaccctccaacttcctcctggggggcaatatctttgatcccctgaacctgaatagcctcctggatgaggaagtgagccgcactctcaacgcggagacccctaagtcatccc

SEQ ID NO: 402490 - DNA, 120 bp, Artificial Sequence
  ENSG00000146834_7 (sequence is synthesized)
cccttccggccaaagggcgagatccggtggagatcctcatccccaaagatattactgacccgctcagtctcaatacttgcactgatgagggccatgtagttcttgcttcgccactcaaga

SEQ ID NO: 402491 - DNA, 120 bp, Artificial Sequence
  ENSG00000146834_8 (sequence is synthesized)
ctggtcggaagcggcatagacaccggggacagcaccaccagcagcagcaggcagccggagggagtgagagtcaccccgtgccgcccacagcccctctcacccccttactccacggggagg

SEQ ID NO: 402492 - DNA, 120 bp, Artificial Sequence
  ENSG00000146834_9 (sequence is synthesized)
gcgcctcacagcagccgcggcacaggggccagaaccgggatgccccccaaccctatgaactcaacacagccatcaactgcagggatgaagtggtgtctccccttccatctgctctgcagg

SEQ ID NO: 402493 - DNA, 120 bp, Artificial Sequence
  ENSG00000146834_10 (sequence is synthesized)
gtccctcaggctccctatcagcccctccagctgcctcagttatctctgcacccccatcttcctcctcccgacatcgcaaacgtcgcaggacttccagcaagtcggaggcaggggctaggg

SEQ ID NO: 402494 - DNA, 120 bp, Artificial Sequence
  ENSG00000146834_11 (sequence is synthesized)
cacccactgcctgcagcaggcttcaaaaagcaacagcgcaagttccagtatgggaattattgcaaatactatgggtaccgcaatccttcctgtgaggatgggcgccttcgggtgttgaag

SEQ ID NO: 402495 - DNA, 120 bp, Artificial Sequence
  ENSG00000146834_12 (sequence is synthesized)
cctgagtggtttcggggccgggacgtcctagatctgggctgcaatgtgggccatctgaccctgagcattgcctgcaagtggggcccgtcccgcatggtgggcctggatatcgattcccgg

SEQ ID NO: 402496 - DNA, 120 bp, Artificial Sequence
  ENSG00000146834_13 (sequence is synthesized)
ctcatccattctgcccgccaaaacatccgacactacctttccgaggagctgcgtctcccaccccagactttggaaggggacccgggggcagagggtgaggaagggaccaccaccgttcga

SEQ ID NO: 402497 - DNA, 120 bp, Artificial Sequence
  ENSG00000146834_14 (sequence is synthesized)
aagaggagctgcttcccagcctcgctgactgccagccggggtcccatcgctgccccccaagtgcccttggatggagcggacacatcagtcttccccaacaatgttgtcttcgtcacgggt

SEQ ID NO: 402498 - DNA, 120 bp, Artificial Sequence
  ENSG00000146834_15 (sequence is synthesized)
aattatgtgctggatcgagatgacctggtggaggcccaaacacctgagtatgatgtggtgctctgcctcagcctcaccaagtgggtgcatctgaactggggagacgagggcctgaagcgc

SEQ ID NO: 402499 - DNA, 120 bp, Artificial Sequence
  ENSG00000146834_16 (sequence is synthesized)
atgtttcgccggatctaccggcacctacgccctgggggcatcctggtcctagagccccaaccctggtcgtcgtatggcaagagaaagactcttacagaaacgatctacaagaactactac

SEQ ID NO: 402500 - DNA, 120 bp, Artificial Sequence
  ENSG00000146834_17 (sequence is synthesized)
cgaatccaattgaagccagagcagttcagttcctacctgacatccccagacgtgggcttctccagctatgagcttgtggccacaccccacaacacctctaaaggcttccagcgtcctgtg

SEQ ID NO: 402501 - DNA, 120 bp, Artificial Sequence
  ENSG00000146834_18 (sequence is synthesized)
tacctgttccacaaggcccgatcccccagccactaagtggccccctaaacagaaagtgtgaagaggctgccctcgctgctcataaggacctgggggaagaggaaagtgtcccaaggtctt

SEQ ID NO: 402502 - DNA, 120 bp, Artificial Sequence
  ENSG00000146834_19 (sequence is synthesized)
tcctttctgactccaaaaatagtttcctttcttggatctgcaaagaaagcttttcttccgtcgctgcctcagcctcctccctatgcctctggcacctgcgcagcaaggctggctgtgctg

SEQ ID NO: 402503 - DNA, 120 bp, Artificial Sequence
  ENSG00000146834_20 (sequence is synthesized)
gagtcaccatcatcttcctctcccccagcctcccaggctggatggcatggactgtttgctgacctctgttctcttagggcatgggaggtgggaggatatcaaattctctagccctttcct

SEQ ID NO: 402504 - DNA, 120 bp, Artificial Sequence
  ENSG00000146834_21 (sequence is synthesized)
cctattctcccaaggagagagattcccatttctcctcggccattgtacctagctcttgtccctagctgcatttcagtggaccatggatagagggactgagggttagacggggaagactgg

SEQ ID NO: 402505 - DNA, 120 bp, Artificial Sequence
  ENSG00000146834_22 (sequence is synthesized)
cagggaggcacgcaggtactgtgaaaatccttccctttgccctcccccagtgggagagggggttgggttttcaatgtgagaacagcacaataaacttgatgtctagggcagtggccccca

SEQ ID NO: 402506 - DNA, 120 bp, Artificial Sequence
  ENSG00000146834_23 (sequence is synthesized)
cactaggggggaggaaggaggcggggtggggaggttgttggatttagagccgggcggagaccgctgagactcattcctcaggaacaagggtcgggtgtcaaggagaccttttcacaccag

SEQ ID NO: 402507 - DNA, 120 bp, Artificial Sequence
  ENSG00000146834_24 (sequence is synthesized)
agtgagcgggcgtcgggagtgggcggatgcgttggggttcgggtcgtgggtgttgaggcggagaggaaggcgtggtgtggcgtctccaggtgattgcgattgggggaaggtagaggagcc

SEQ ID NO: 402508 - DNA, 120 bp, Artificial Sequence
  ENSG00000146834_25 (sequence is synthesized)
agagaacgactcagccgtttcgggggaagaggaagttggacaacatcggctgttttagtgctttttatttttccccaattcagcagagaatattttcaagggggcctcctggatgaggaa

SEQ ID NO: 402509 - DNA, 120 bp, Artificial Sequence
  ENSG00000146839_0 (sequence is synthesized)
agactccatggttgctattgaaaagctggatgccatgttgatttctgatccttgagcttttctgtgtttctctgttcattcttcatggcatccttggaaggatgccaagctaaggaggcc

SEQ ID NO: 402510 - DNA, 120 bp, Artificial Sequence
  ENSG00000146839_1 (sequence is synthesized)
aggggggaataaaaggagtccaggctcccaactgtgcccttcccctctcccctgggagcaaccacttagggtcctcatggttcctccagtctggactctgctgcttctggtgggggctgc

SEQ ID NO: 402511 - DNA, 120 bp, Artificial Sequence
  ENSG00000146839_2 (sequence is synthesized)
ccttttcaggaaagagaagcctccggaccagaagctggttgttcgcagctctagggacaactatgtcctcacccagtgtgattttgaggatgacgccaaacccctctgtgactggtccca

SEQ ID NO: 402512 - DNA, 120 bp, Artificial Sequence
  ENSG00000146839_3 (sequence is synthesized)
agtgtccgcagacgatgaagactgggttcgagccagtgggccctctcccaccggctccaccggggcccccggggggtaccctaacggagagggcagctatctgcatatggaatcgaacag

SEQ ID NO: 402513 - DNA, 120 bp, Artificial Sequence
  ENSG00000146839_4 (sequence is synthesized)
cttccaccgtgggggagtggcccgcctgctcagccccgacctatgggagcaaggccccctctgtgtgcactttgcccaccacatgttcgggctgtcttggggcgcccagctcaggctgct

SEQ ID NO: 402514 - DNA, 120 bp, Artificial Sequence
  ENSG00000146839_5 (sequence is synthesized)
gctgctctcgggtgaagagggccgccgccccgatgtgctctggaaacactggaacacccagagaccctcctggatgctcaccaccgtcactgtgcccgcagggttcaccctgcccacccg

SEQ ID NO: 402515 - DNA, 120 bp, Artificial Sequence
  ENSG00000146839_6 (sequence is synthesized)
gctgatgtttgagggaacacggggtagcactgcctacctggacatcgccctggatgccctctctatccgccggggctcctgtaatcgcgtctgtatgatgcaaacatgcagctttgacat

SEQ ID NO: 402516 - DNA, 120 bp, Artificial Sequence
  ENSG00000146839_7 (sequence is synthesized)
tccaaatgacctctgtgactggacctggatcccaactgcctccggggccaagtggactcagaagaaagggtcatcaggaaagccaggcgtggggcctgatggcgacttctctagccctgg

SEQ ID NO: 402517 - DNA, 120 bp, Artificial Sequence
  ENSG00000146839_8 (sequence is synthesized)
tagtggctgctacatgctcctggaccccaagaatgcaagacctgggcagaaagctgtcctcctgagccccgtgagcctgtcctctggctgtctgagcttttccttccactacatcctccg

SEQ ID NO: 402518 - DNA, 120 bp, Artificial Sequence
  ENSG00000146839_9 (sequence is synthesized)
gggccagtctcctggtgcagccctccacatttatgcttcagtcttggggagtatccggaaacacactctcttctcaggacaacctgggcccaactggcaggctgtttctgtcaattacac

SEQ ID NO: 402519 - DNA, 120 bp, Artificial Sequence
  ENSG00000146839_10 (sequence is synthesized)
agccgtgggacggatacagtttgccgtggtaggcgtttttggaaagaccccagagccagctgtggcagttgatgcaaccagcattgctccttgtggggagggttttcctcagtgtgactt

SEQ ID NO: 402520 - DNA, 120 bp, Artificial Sequence
  ENSG00000146839_11 (sequence is synthesized)
tgaagacaacgcccatcccttctgtgactgggtccagacttccggggatggtggacactgggccctcggacataaaaatggacccgtccatggcatgggccctgcgggaggtttccctaa

SEQ ID NO: 402521 - DNA, 120 bp, Artificial Sequence
  ENSG00000146839_12 (sequence is synthesized)
tgcagggggtcactatatctaccttgaggctgacgagttctcccaggcaggccagtcagtcagactggtgagccggcccttctgcgccccaggtgacatctgcgtggagttcgcatacca

SEQ ID NO: 402522 - DNA, 120 bp, Artificial Sequence
  ENSG00000146839_13 (sequence is synthesized)
catgtatggccttggggagggtactatgctcgaactcctcctgggaagtcctgcggggagtcccccgattcctctctggaaacgcgtggggtctcagcgcccttactggcagaacacctc

SEQ ID NO: 402523 - DNA, 120 bp, Artificial Sequence
  ENSG00000146839_14 (sequence is synthesized)
cgtcaccgtcccctcaggacaccaacagcccatgcagcttattttcaagggcatccagggaagcaacacggcctctgtggttgctatgggtttcatcttgatcaatcctgggacttgtcc

SEQ ID NO: 402524 - DNA, 120 bp, Artificial Sequence
  ENSG00000146839_15 (sequence is synthesized)
agtaaaagtgctaccagagcttcctcccgtatctccagtttcttccactggcccttctgaaaccactggcctcacagaaaaccctacaatctccaccaagaaacctacagtttccataga

SEQ ID NO: 402525 - DNA, 120 bp, Artificial Sequence
  ENSG00000146839_16 (sequence is synthesized)
aaaacccagtgtcaccacagaaaagcccacagtccccaaagaaaagcccaccattcccacagaaaaacccaccatctccacagaaaaacccaccattccttcagaaaaacccaacatgcc

SEQ ID NO: 402526 - DNA, 120 bp, Artificial Sequence
  ENSG00000146839_17 (sequence is synthesized)
ctcagaaaaacccaccattccctcagaaaaacccaccatcctcacagaaaaacccaccattccctcagaaaaacccaccattccctcagaaaaacccaccatttccacagaaaaacccac

SEQ ID NO: 402527 - DNA, 120 bp, Artificial Sequence
  ENSG00000146839_18 (sequence is synthesized)
cgtccccacagaagagcccaccacccccactgaggagaccaccacctccatggaagagcctgtcatccctacagaaaaacccagcatccctacagaaaaacccagcatccccacggaaaa

SEQ ID NO: 402528 - DNA, 120 bp, Artificial Sequence
  ENSG00000146839_19 (sequence is synthesized)
acccaccatctccatggaagagactatcatctccacagaaaaacccaccatctccccagaaaaacccaccatccccacagaaaaacccaccatccccacagaaaaatccaccatctcccc

SEQ ID NO: 402529 - DNA, 120 bp, Artificial Sequence
  ENSG00000146839_20 (sequence is synthesized)
agaaaaacccaccacccccacagaaaaacccaccatccccacagaaaaacccaccatctccccagaaaaacccaccacccccacagaaaaacccaccatctccccagaaaaactcaccat

SEQ ID NO: 402530 - DNA, 120 bp, Artificial Sequence
  ENSG00000146839_21 (sequence is synthesized)
ccccacagaaaaacccaccatccccacagaaaaacccaccattcccacagaaaaacccaccatctccacagaagagcccaccacccccactgaggagaccaccatctccacagaaaaacc

SEQ ID NO: 402531 - DNA, 120 bp, Artificial Sequence
  ENSG00000146839_22 (sequence is synthesized)
cagcatccccatggaaaaacccactctccccactgaagaaaccaccacctctgttgaagagactaccatctctacagaaaaactcaccatccccatggaaaaacccaccatctccacaga

SEQ ID NO: 402532 - DNA, 120 bp, Artificial Sequence
  ENSG00000146839_23 (sequence is synthesized)
aaaacccaccatccccacagaaaaacccaccatctccccagaaaaactcaccatccccacggaaaaactcaccatccccacggaaaaacccaccatccccattgaagagactaccatctc

SEQ ID NO: 402533 - DNA, 120 bp, Artificial Sequence
  ENSG00000146839_24 (sequence is synthesized)
cacagaaaaactcaccatccccacagaaaaacccaccatctccccagaaaaacccaccatctccacggaaaaacccaccatccccacggaaaaacccaccatccccactgaagagactac

SEQ ID NO: 402534 - DNA, 120 bp, Artificial Sequence
  ENSG00000146839_25 (sequence is synthesized)
catctccacagaaaaactcaccatccccacagaaaaacccaccatctccccagaaaaactcaccatccccacagaaaaacccaccatctccacggaaaaacccaccatccccacggaaaa

SEQ ID NO: 402535 - DNA, 120 bp, Artificial Sequence
  ENSG00000146839_26 (sequence is synthesized)
acttaccatccccacggaaaaacccaccatccccacagaaaaacccaccattcccacagagaagctcacagccctgaggccaccccatcccagccccacagccactgggctggcagcctt

SEQ ID NO: 402536 - DNA, 120 bp, Artificial Sequence
  ENSG00000146839_27 (sequence is synthesized)
ggtgatgtctccacatgctccaagtacccctatgaccagtgtgattctgggcactaccacaacctccagatccagtacagagcgctgccctccaaatgcccgctacgaatcctgtgcttg

SEQ ID NO: 402537 - DNA, 120 bp, Artificial Sequence
  ENSG00000146839_28 (sequence is synthesized)
tcctgcttcgtgcaagagccccaggcctagctgtgggcccctctgtcgggagggctgtgtctgcaaccctggctttttgtttagtgacaaccactgcatccaggcctcttcctgcaattg

SEQ ID NO: 402538 - DNA, 120 bp, Artificial Sequence
  ENSG00000146839_29 (sequence is synthesized)
cttctacaacaacgactactatgagcctggggcagagtggttcagccccaactgcacagaacattgccgctgctggcccggcagtcgggtcgagtgccagatctctcagtgtgggacaca

SEQ ID NO: 402539 - DNA, 120 bp, Artificial Sequence
  ENSG00000146839_30 (sequence is synthesized)
caccgtgtgccagcttaagaatggccagtatggatgccacccctacgcaggcactgccacctgcttggtctacggagaccctcattatgtcacctttgacgggaggcactttggcttcat

SEQ ID NO: 402540 - DNA, 120 bp, Artificial Sequence
  ENSG00000146839_31 (sequence is synthesized)
gggcaagtgcacttacatcttggcccagccctgtggcaactcaacagacccattcttcagggtgacagccaagaatgaggagcagggacaggaaggcgtgtcctgcctgagcaaagtcta

SEQ ID NO: 402541 - DNA, 120 bp, Artificial Sequence
  ENSG00000146839_32 (sequence is synthesized)
cgtgaccctgcccgagagcaccgtcaccctgcttaagggcagacgcactctggttgggggtcagcaagttactctcccagccataccctctaaaggcgtcttcctgggtgcaagcgggcg

SEQ ID NO: 402542 - DNA, 120 bp, Artificial Sequence
  ENSG00000146839_33 (sequence is synthesized)
gtttgtggagctgcagacggagttcggtttgcgggtgagatgggatggtgaccagcagctgtatgttactgtgtccagcacatactctggcaaactctgtggtttgtgtgggaactatga

SEQ ID NO: 402543 - DNA, 120 bp, Artificial Sequence
  ENSG00000146839_34 (sequence is synthesized)
cggcaacagtgacaatgaccacctgaagttggacggcagcccagcaggagacaaggaggagctggggaacagctggcagacggaccaggacgaggaccaggagtgtcagaagtaccaggt

SEQ ID NO: 402544 - DNA, 120 bp, Artificial Sequence
  ENSG00000146839_35 (sequence is synthesized)
ggtgaattccccgtcttgtgattcatctctgcagagcagcatgtcggggccagggttctgtggacggctggtcgacactcatggcccatttgagacatgcctgctgcacgtgaaggccgc

SEQ ID NO: 402545 - DNA, 120 bp, Artificial Sequence
  ENSG00000146839_36 (sequence is synthesized)
gtgcacacacatgtccaccatgaccaccacctgccaggacgcaggccacgctgtgaagccctggagggaaccccacttctgcccaatggcctgcccgcccaacagcaagtactccctgtg

SEQ ID NO: 402546 - DNA, 120 bp, Artificial Sequence
  ENSG00000146839_37 (sequence is synthesized)
tgcgaagccatgccctgacacctgccattcaggattctccggcatgttctgctcagaccggtgcgtggaggcctgtgaatgcaatccgggcttcgtcctcagtggcctcgagtgcatacc

SEQ ID NO: 402547 - DNA, 120 bp, Artificial Sequence
  ENSG00000146839_38 (sequence is synthesized)
tcgctcccagtgtgggtgcctccaccctgcaggcagctacttcaaggtaggggagcggtggtacaagccaggctgcaaagagttgtgcgtctgtgaaagcaacaacagaattcgctgcca

SEQ ID NO: 402548 - DNA, 120 bp, Artificial Sequence
  ENSG00000146839_39 (sequence is synthesized)
gccctggaggtgtagggcccaggagttctgtggccaacaggatggtatctatggctgccatgcccaaggtgccgccacctgcacagcctcgggtgacccccactacctgaccttcgatgg

SEQ ID NO: 402549 - DNA, 120 bp, Artificial Sequence
  ENSG00000146839_40 (sequence is synthesized)
cgccttgcaccacttcatgggcacctgcacctatgtcctgacccggccttgctggtccaggtcccaagacagctattttgttgtgagcgccaccaacgagaaccgcggggggatcctgga

SEQ ID NO: 402550 - DNA, 120 bp, Artificial Sequence
  ENSG00000146839_41 (sequence is synthesized)
ggtctcctacatcaaagccgtccacgtgacagtctttgacctcagcatctcactgctcagaggctgtaaggtcatgctgaatggccatcgggtggccctacctgtgtggcttgcacaagg

SEQ ID NO: 402551 - DNA, 120 bp, Artificial Sequence
  ENSG00000146839_42 (sequence is synthesized)
ccgggtgaccataaggctcagcagcaacctcgtcctcctctacacgaactttgggctccaagttcgctacgacgggagccacttggtggaagtgacagtcccctcctcctatggcggcca

SEQ ID NO: 402552 - DNA, 120 bp, Artificial Sequence
  ENSG00000146839_43 (sequence is synthesized)
gctctgtgggctgtgtgggaactacaacaacaacagcttggatgacaacctgcgccccgacagaaagcttgcaggcgattccatgcagctgggggccgcctggaagttacctgaatcctc

SEQ ID NO: 402553 - DNA, 120 bp, Artificial Sequence
  ENSG00000146839_44 (sequence is synthesized)
tgaacctggctgtttccttgtgggtggcaagccctccagctgccaggagaacagcatggcagacgcctggaacaagaactgtgcgatcttaataaaccctcagggacccttctctcaatg

SEQ ID NO: 402554 - DNA, 120 bp, Artificial Sequence
  ENSG00000146839_45 (sequence is synthesized)
tcaccaggtggtgcctccccagtccagctttgccagttgcgtgcatggtcagtgtgggaccaagggcgacaccacagccctgtgccgctccctgcaggcctacgcgtccctgtgtgccca

SEQ ID NO: 402555 - DNA, 120 bp, Artificial Sequence
  ENSG00000146839_46 (sequence is synthesized)
ggctggccaggcccctgcctggcggaacagaaccttctgccctatgaggtgcccacctggcagcagctacagcccctgcagcagcccctgcccagacacctgcagcagcataaacaaccc

SEQ ID NO: 402556 - DNA, 120 bp, Artificial Sequence
  ENSG00000146839_47 (sequence is synthesized)
gagggactgccccaaagcactgccctgtgctgagagctgtgaatgtcagaaaggccacatcttgagtggaacctcctgcgtgccccttggccagtgtggctgcactgacccagcgggctc

SEQ ID NO: 402557 - DNA, 120 bp, Artificial Sequence
  ENSG00000146839_48 (sequence is synthesized)
ctaccacccggtcggggagcgctggtacacagagaacacctgcaccaggctctgcacctgctccgtccacaacaacatcacctgcttccagagcacctgcaaacccaaccagatatgctg

SEQ ID NO: 402558 - DNA, 120 bp, Artificial Sequence
  ENSG00000146839_49 (sequence is synthesized)
ggccctggatgggctgctccattgtcgggcctcaggtgtgggagtgtgtcagctcccaggggagtcccactacgtgagctttgatggtagtaaccattctatcccggacgcctgcactct

SEQ ID NO: 402559 - DNA, 120 bp, Artificial Sequence
  ENSG00000146839_50 (sequence is synthesized)
tgtcctggtgaaagtgtgccaccccgccatggccttgcccttcttcaagatcagtgccaagcatgagaaggaggaaggtggaactgaggctttccgccttcatgaggtctacattgacat

SEQ ID NO: 402560 - DNA, 120 bp, Artificial Sequence
  ENSG00000146839_51 (sequence is synthesized)
ctacgatgcccaggtcaccctgcagaagggccaccgtgtgctaatcaacagcaaacaggtcaccctccccgccatctcccagatccctggggtcagtgtcaagtccagcagcatctacag

SEQ ID NO: 402561 - DNA, 120 bp, Artificial Sequence
  ENSG00000146839_52 (sequence is synthesized)
cattgttaacatcaagatcggggtgcaagtcaagtttgacgggaatcatctcttagagattgaaatccccacaacctactatggaaaggtctgcggcatgtgtgggaacttcaatgatga

SEQ ID NO: 402562 - DNA, 120 bp, Artificial Sequence
  ENSG00000146839_53 (sequence is synthesized)
ggaagaggacgaactaatgatgcccagcgatgaagtagcaaatagtgacagtgaatttgtgaacagttggaaagataaggacattgacccaagttgtcagagtctcctggtagatgagca

SEQ ID NO: 402563 - DNA, 120 bp, Artificial Sequence
  ENSG00000146839_54 (sequence is synthesized)
gcagattccagcggaacagcaggagaacccgagtggaaactgcagggcggccgacctccgcagggcgcgggaaaagtgcgaggcagcgctccgggctcctgtgtgggcccagtgcgcctc

SEQ ID NO: 402564 - DNA, 120 bp, Artificial Sequence
  ENSG00000146839_55 (sequence is synthesized)
ccgcatagacctcacgcccttcctggtggactgtgcaaacaccctctgtgagttcggaggtctctaccaggccctctgccaggctctgcaagccttcggggccacctgccagagccaggg

SEQ ID NO: 402565 - DNA, 120 bp, Artificial Sequence
  ENSG00000146839_56 (sequence is synthesized)
gctcaagcccccactctggagaaacagcagcttctgccctctggaatgccctgcctacagcagctacaccaactgccttccctcctgctcaccctcctgctgggacctggatggccggtg

SEQ ID NO: 402566 - DNA, 120 bp, Artificial Sequence
  ENSG00000146839_57 (sequence is synthesized)
tgagggcgccaaagtcccctctgcctgcgctgagggctgcatttgtcagcccggctatgtgctgagtgaagacaagtgtgtccccagaagtcagtgtggctgcaaggatgcccatggtgg

SEQ ID NO: 402567 - DNA, 120 bp, Artificial Sequence
  ENSG00000146839_58 (sequence is synthesized)
ctccatccctctgggcaagagctgggtctccagcggttgcacggagaagtgtgtctgcacgggaggagccattcagtgcggggacttccgatgcccctctgggtcccactgccagctcac

SEQ ID NO: 402568 - DNA, 120 bp, Artificial Sequence
  ENSG00000146839_59 (sequence is synthesized)
ttccgacaacagcaacagcaattgtgtctcagacaagtctgaacaatgctcagtctatggcgacccccgttacctcacatttgacggcttcagctaccgcttgcaaggccgcatgaccta

SEQ ID NO: 402569 - DNA, 120 bp, Artificial Sequence
  ENSG00000146839_60 (sequence is synthesized)
tgttctgatcaagactgtggacgtactgcctgagggggtggagcccctcctcgtggaaggacgcaacaagatggatccgcccaggagctccatcttcttgcaggaagtgattaccaccgt

SEQ ID NO: 402570 - DNA, 120 bp, Artificial Sequence
  ENSG00000146839_61 (sequence is synthesized)
ctacggctataaagtgcagctccaagctggtctggagcttgtggtcaacaaccagaagatggccgtcccctacaggccaaatgaacacctgcgggtcaccctgtggggccaacggctcta

SEQ ID NO: 402571 - DNA, 120 bp, Artificial Sequence
  ENSG00000146839_62 (sequence is synthesized)
cctggtcaccgactttgagctggtcgtcagctttggtggaaggaaaaatgcagtgatctccctacccagcatgtacgaggggcttgtgagtggcctgtgcggaaactacgacaagaaccg

SEQ ID NO: 402572 - DNA, 120 bp, Artificial Sequence
  ENSG00000146839_63 (sequence is synthesized)
caagaatgacatgatgctgcccagtggcgccctgacccagaacctcaacacctttggcaacagctgggaggtgaagaccgaggacgcactcctgcgcttccccagggctataccagcgga

SEQ ID NO: 402573 - DNA, 120 bp, Artificial Sequence
  ENSG00000146839_64 (sequence is synthesized)
ggaggagggacaaggggcggagctgggcctccgcacgggcctccaagtgtccgaatgtagcccggagcagctggcgagcaacagcacccaggcctgtagggtgctggcagacccccaggg

SEQ ID NO: 402574 - DNA, 120 bp, Artificial Sequence
  ENSG00000146839_65 (sequence is synthesized)
cccctttgctgcctgtcaccagacggtggccccagagcccttccaagagcactgcgtgctggatctgtgctctgctcaggacccaagagagcaagaggagctgcgttgccaggtcctcag

SEQ ID NO: 402575 - DNA, 120 bp, Artificial Sequence
  ENSG00000146839_66 (sequence is synthesized)
tggccatggagtgtccagcaggtaccatatatcagagctgtatgacaccctgcccagcatcctgtgccaacctggcagaccccggggactgcgagggcccctgcgtggaaggctgcgcca

SEQ ID NO: 402576 - DNA, 120 bp, Artificial Sequence
  ENSG00000146839_67 (sequence is synthesized)
gcatcccaggctatgcctacagtggcacccagagcctcccctggctgactgtggctgcaccagcaatggcatctactaccagctgggcagcagctttctgactgaggactgctctcagcg

SEQ ID NO: 402577 - DNA, 120 bp, Artificial Sequence
  ENSG00000146839_68 (sequence is synthesized)
gtgcacctgtgccagctcacggatcctgctgtgtgagcccttcagctgcagagcgggggaggtctgcaccctggggaaccacacccaaggctgctttccagaaagcccgtgtctgcagaa

SEQ ID NO: 402578 - DNA, 120 bp, Artificial Sequence
  ENSG00000146839_69 (sequence is synthesized)
cccctgtcagaatgacgggcagtgtcgggagcagggagccaccttcacctgcgagtgtgaagttggttacgggggaggcctgtgtatggagcctcgagatgcgccacctcccagaaagcc

SEQ ID NO: 402579 - DNA, 120 bp, Artificial Sequence
  ENSG00000146839_70 (sequence is synthesized)
agcatctaacctggtgggcgtcctactgggactgctggtgcctgtggtggtcgtactactggccgtgaccagagagtgcatttacagaacgaggaggaagagagagaaaacgcaggaggg

SEQ ID NO: 402580 - DNA, 120 bp, Artificial Sequence
  ENSG00000146839_71 (sequence is synthesized)
agacagactggccaggctggtggacacagatactgttctggactgtgcctgttaagttgctcagttttgagctgtcttcagacaagaagattaaataaatttatatatttatttatttga

SEQ ID NO: 402581 - DNA, 120 bp, Artificial Sequence
  ENSG00000146839_72 (sequence is synthesized)
ggccctggggagcagaggcgccaaggagagccagaccagggatggaactggaacgtctcctcctggcccttcccctttctagctgggcagcagctttctgactgaggactgctctcagcg

SEQ ID NO: 402582 - DNA, 120 bp, Artificial Sequence
  ENSG00000146842_0 (sequence is synthesized)
ggcgcgagcctgcgttttccggccagaggacatgatgcagggggaggcacaccctagtgcttcccttattgacagaaccatcaagatgagaaaagaaacagaggctaggaaagtggtctt

SEQ ID NO: 402583 - DNA, 120 bp, Artificial Sequence
  ENSG00000146842_1 (sequence is synthesized)
agcctggggactcctaaatgtatctatggctggaatgatatatactgaaatgactggaaaattgattagttcatactacaatgtgacatactggcccctctggtatattgagcttgccct

SEQ ID NO: 402584 - DNA, 120 bp, Artificial Sequence
  ENSG00000146842_2 (sequence is synthesized)
tgcatctctcttcagccttaatgccttatttgatttttggagatatttcaaatatactgtggcaccaacaagtctggttgttagtcctggacagcaaacacttttagggttgaaaacagc

SEQ ID NO: 402585 - DNA, 120 bp, Artificial Sequence
  ENSG00000146842_3 (sequence is synthesized)
tgttgtacagactacgcctccacatgatctggcagcaacccaaatccctcccgctccaccttccccttcaattcagggtcagagtgtgttgagttatagcccttctcgttcgcccagtac

SEQ ID NO: 402586 - DNA, 120 bp, Artificial Sequence
  ENSG00000146842_4 (sequence is synthesized)
cagtcccaagttcaccaccagctgtatgactggttacagccctcagctgcaaggtctgtcctcaggtggcagtggttcttatagccctggagtgacctactcgcccgtcagtggttataa

SEQ ID NO: 402587 - DNA, 120 bp, Artificial Sequence
  ENSG00000146842_5 (sequence is synthesized)
taagttggcgagctttagcccctctcctccttctccgtaccctaccactgttggaccagtggagagcagtggattgagatctcgctaccgttcttcacctaccgtctacaactcacctac

SEQ ID NO: 402588 - DNA, 120 bp, Artificial Sequence
  ENSG00000146842_6 (sequence is synthesized)
tgacaaagaagactacatgaccgacctacgaactttggatacttttctcagaagtgaagaggagaaacagcatagggttaagctggggagcccagattctacctctccttccagcagtcc

SEQ ID NO: 402589 - DNA, 120 bp, Artificial Sequence
  ENSG00000146842_7 (sequence is synthesized)
tactttctggaactatagtcgttctatgggggattatgcacaaactttaaagaagtttcagtatcagcttgcctgtaggtctcaggccccatgtgctaacaaagatgaagccgatctcag

SEQ ID NO: 402590 - DNA, 120 bp, Artificial Sequence
  ENSG00000146842_8 (sequence is synthesized)
ctctaaacaagccgcagaagaggtctgggcaagagtggctatgaatagacaacttcttgatcatatggattcatggacagctaaatttagaaattggatcaatgagacaatattagtgcc

SEQ ID NO: 402591 - DNA, 120 bp, Artificial Sequence
  ENSG00000146842_9 (sequence is synthesized)
acttgttcaagagattgagtctgtcagcacacagatgagacgaatgggttgtccagagctacagataggagaggctagtattactagcttgaaacaagctgccctggttaaagcgcctct

SEQ ID NO: 402592 - DNA, 120 bp, Artificial Sequence
  ENSG00000146842_10 (sequence is synthesized)
cattccgactttgaacacaatcgttcagtatctagaccttactccaaatcaggaatacttgtttgaaaggatcaaagaactatctcagggaggttgtatgagctcatttcgatggaacag

SEQ ID NO: 402593 - DNA, 120 bp, Artificial Sequence
  ENSG00000146842_11 (sequence is synthesized)
aggtggcgacttcaaaggacgaaagtgggatacagacctgcccaccgattctgctatcatcatgcatgtattttgcacctaccttgattccagattacctccacatccgaagtatcccga

SEQ ID NO: 402594 - DNA, 120 bp, Artificial Sequence
  ENSG00000146842_12 (sequence is synthesized)
cggaaaaacttttacttctcagcactttgttcagacaccaaataaaccagatgttacaaatgagaatgttttttgcatttatcagagtgctatcaaccctccccattatgagctcatcta

SEQ ID NO: 402595 - DNA, 120 bp, Artificial Sequence
  ENSG00000146842_13 (sequence is synthesized)
ccagcgtcatgtatacaacctgccaaagggcagaaataatatgtttcatacattgttgatgtttctctacatcataaagaccaaagagtcaggaatgcttgggagagttaatcttggtct

SEQ ID NO: 402596 - DNA, 120 bp, Artificial Sequence
  ENSG00000146842_14 (sequence is synthesized)
aaacatctctgagccactgactcttctgaaataaaatacacatgggtgtatgttacagactctttagatttaacagaaaatgtagctgttatgaaatgtaattgtaaaaatatgtcccgt

SEQ ID NO: 402597 - DNA, 120 bp, Artificial Sequence
  ENSG00000146842_15 (sequence is synthesized)
atcttctatatcgagacattgcctttaattttatatcgcttttcagaaatttcagttgactacaaaactgcaacccttcggatttttattgactcaaaatagtgccattccccttaatga

SEQ ID NO: 402598 - DNA, 120 bp, Artificial Sequence
  ENSG00000146842_16 (sequence is synthesized)
aatagattttgagtctttttttcattgtaacccccaaatgagaatcatctacctgattcttgtaccaaaaaaaaatttttttcagtcttttttttttttagagagggtctctgtcaacgc

SEQ ID NO: 402599 - DNA, 90 bp, Artificial Sequence
  ENSG00000146842_17 (sequence is synthesized)
tgcgcccagcctcagttattttatttaacagtgtaagtacttagaaagtaagaaaattgctgatttagtttttttttttttttttttaat

SEQ ID NO: 402600 - DNA, 120 bp, Artificial Sequence
  ENSG00000146842_18 (sequence is synthesized)
ggccaaagcccacattcaaagaaatgagattaactcttaagtaatgtattaagtttatgtatattttaaaatattattaaaggaggtttgaaagtattgacatttaaaaagtcaacactt

SEQ ID NO: 402601 - DNA, 120 bp, Artificial Sequence
  ENSG00000146842_19 (sequence is synthesized)
agattaaatttagctggtagttttaatttgggttttagttaagagtgtgaggacatcaggaaaactgtttactactttggttttagcagctcagttttactattccataatgtgttattt

SEQ ID NO: 402602 - DNA, 120 bp, Artificial Sequence
  ENSG00000146842_20 (sequence is synthesized)
ttaaagttctctttttaagatcacagtgatatcctatcttcaaattttttaaatatgttcaaaatatctggagggtgagaagttaccaagtttgtatgttttgtttgactcaccatcttt

SEQ ID NO: 402603 - DNA, 120 bp, Artificial Sequence
  ENSG00000146842_21 (sequence is synthesized)
attttctgtatatgtagtagctggcaattgcatatattttcttgattaacatattagagactgcttccatcatcttatgtaaacctggaaacagctgaaactagtcttttctgaagaacc

SEQ ID NO: 402604 - DNA, 120 bp, Artificial Sequence
  ENSG00000146842_22 (sequence is synthesized)
gtgtatcagtgttagatgtgcatcccgttttgtcattccctcagactttgaatacagtcattactctctggaagagaaatgtaagtatattttttgttatctgcagtatggtttaacatg

SEQ ID NO: 402605 - DNA, 120 bp, Artificial Sequence
  ENSG00000146842_23 (sequence is synthesized)
tattaataatacacatatgcagactcactaaagtatccccagtaattagtaaattccaaatttaagtcagtacagttctgtatttgtaaattctgtctttcaaaaagttgttcgtgtttt

SEQ ID NO: 402606 - DNA, 120 bp, Artificial Sequence
  ENSG00000146842_24 (sequence is synthesized)
taaaagttgatgtccaaaggaaaggagcttcttttaagtacttttggtgtatgttgaatatttatttgctatgatattctagaagaaaatatcaaacatgttaaatataagaacatgtta

SEQ ID NO: 402607 - DNA, 120 bp, Artificial Sequence
  ENSG00000146842_25 (sequence is synthesized)
aaatttaaatttgctatttcaaaagttactgaagatgtcttggaataacaattgtcatgctgttaaactagttgcatatacttcattaaaagcaccatggagaaacattttaacaatgca

SEQ ID NO: 402608 - DNA, 120 bp, Artificial Sequence
  ENSG00000146842_26 (sequence is synthesized)
gcttcctgtcttggaatctacgcgggttgtgggagttccgcgcctgctgatctgtcctgggttcagccaagggggatgtggctaggcgttccgcctctctaggggaagggaagaaagaag

SEQ ID NO: 402609 - DNA, 120 bp, Artificial Sequence
  ENSG00000146842_27 (sequence is synthesized)
caatagggttgctgaagttcgtgcccaggagccggggagggaagctctggactgggaaattgggacgcgggggctgagtggcgcgaaagctattgctctgtcctctgtgggatacgactg

SEQ ID NO: 402610 - DNA, 120 bp, Artificial Sequence
  ENSG00000146842_28 (sequence is synthesized)
agttagttaatttacactccagtggcatatttatttaaccatctcttgatttcgggtagctattactttcattctctttcactatactttatgattcttttaatattcaactataagata

SEQ ID NO: 402611 - DNA, 120 bp, Artificial Sequence
  ENSG00000146842_29 (sequence is synthesized)
gacgaaagtgggatacagacctgcccaccgattctgctgtaagcccctagattctttcattcatttatttatttactgttgattgactgacacagggtcttactctgtcacccaggctgt

SEQ ID NO: 402612 - DNA, 120 bp, Artificial Sequence
  ENSG00000146842_30 (sequence is synthesized)
gtcacgtctcactgcagctttgatctcccagggctcaagtgctcctcccagctcagcctcccaagtagctgggactaggcctgaaccaccacacccagctaatttttttaattttttgta

SEQ ID NO: 402613 - DNA, 120 bp, Artificial Sequence
  ENSG00000146842_31 (sequence is synthesized)
gagatggggtctcacttttttgcccaggctggtcttgaagtcctgggttcaagtgatccccctgcctcagcttcccaaagtgctgggtttacagacacgagctactgtgcctgaccctta

SEQ ID NO: 402614 - DNA, 87 bp, Artificial Sequence
  ENSG00000146842_32 (sequence is synthesized)
aaatgcttcttggacttctaagtttgtggaagggtctcactctgtcgcccagactggaaggcttcccaggctcaagtgattctcctg

SEQ ID NO: 402615 - DNA, 120 bp, Artificial Sequence
  ENSG00000146856_0 (sequence is synthesized)
gttgcctgatgacgagagttgggagtgtggctggggctgcggatctccagcagtggcgttacttctagcggctggataccgggttctccgcgagatcgcgagatcccgagatattctccc

SEQ ID NO: 402616 - DNA, 120 bp, Artificial Sequence
  ENSG00000146856_1 (sequence is synthesized)
cgcacggaagcgacgactggcctggccagaggactcgcgtgggagcgaggtgccggccccgacaggacggtgagaaattgttttacagcctacccgtatattacaagaaatctcaagtca

SEQ ID NO: 402617 - DNA, 120 bp, Artificial Sequence
  ENSG00000146856_2 (sequence is synthesized)
aacactggaaaagatgtcagaagattcagaaaaggaagactattcagacagaacaatcagtgatgaagatgaatcggatgaggatatgttcatgaaatttgtaagtgaagatcttcatcg

SEQ ID NO: 402618 - DNA, 120 bp, Artificial Sequence
  ENSG00000146856_3 (sequence is synthesized)
gtgtgcacttttaacagctgactcttttggtgatcccttcttcccccggactacacagatactattagaatatcagctagggagatgggtgccacgtcttcgtgaaccaagggatttata

SEQ ID NO: 402619 - DNA, 120 bp, Artificial Sequence
  ENSG00000146856_4 (sequence is synthesized)
tggtgtctcttcttctggtccattgagcccaacacggtggccataccattgtgaagtcatcgatgaaaaagtccagcatattgattggactccttcttgtcctgagccagtgtatatccc

SEQ ID NO: 402620 - DNA, 120 bp, Artificial Sequence
  ENSG00000146856_5 (sequence is synthesized)
aacgggcttagaaacggaacccctttatccagactccaaggaagctactgtggtttatctagctgaagatgcttacaaagagccctgttttgtgtattcccgagttgggggtaaccgaac

SEQ ID NO: 402621 - DNA, 120 bp, Artificial Sequence
  ENSG00000146856_6 (sequence is synthesized)
acctttgaagcagcctgtggattaccgtgacaatactttgatgtttgaagcaaggtttgagagtggtaatctacagaaggtagtcaaagtggcagaatacgaataccaattgactgtacg

SEQ ID NO: 402622 - DNA, 120 bp, Artificial Sequence
  ENSG00000146856_7 (sequence is synthesized)
ccctgacctcttcacaaataaacacacccagtggtactatttccaagtcactaatatgcgagcaggaatagtctacagattcactattgtcaacttcaccaaacctgctagtctttacag

SEQ ID NO: 402623 - DNA, 120 bp, Artificial Sequence
  ENSG00000146856_8 (sequence is synthesized)
tcggggtatgcgcccactgttctattctgaaaaagaggccaaggctcatcacattggctggcagagaataggagaccaaatcaagtattataggaacaacccaggccaagatgggcgcca

SEQ ID NO: 402624 - DNA, 120 bp, Artificial Sequence
  ENSG00000146856_9 (sequence is synthesized)
ttatttctctcttacatggacatttcaatttccacacaacaaagatacctgctactttgctcattgctatccatacacttacaccaacctgcaagaatacctttctggcatcaataatga

SEQ ID NO: 402625 - DNA, 120 bp, Artificial Sequence
  ENSG00000146856_10 (sequence is synthesized)
tccagtacggtcaaagttttgtaaaatacgtgttttgtgccacacgcttgctaggaacatggtgtatattttaacaatcactacccccttgaagaactctgactcaagaaagcggaaggc

SEQ ID NO: 402626 - DNA, 120 bp, Artificial Sequence
  ENSG00000146856_11 (sequence is synthesized)
tgtgattctgactgcaagggtccatccaggggaaaccaacagctcttggatcatgaaaggcttcctagattatattttaggaaactcaagtgatgcacagttgcttcgggacacttttgt

SEQ ID NO: 402627 - DNA, 120 bp, Artificial Sequence
  ENSG00000146856_12 (sequence is synthesized)
cttcaaggtggtacccatgctcaatccagatggtgtgattgtgggaaattatcgctgttccttagctggacgggatttaaaccgtaattatacatctctcctgaaggaatcttttccttc

SEQ ID NO: 402628 - DNA, 120 bp, Artificial Sequence
  ENSG00000146856_13 (sequence is synthesized)
tgtatggtatacccggaacatggttcatagactgatggagaaacgagaggttattttatactgtgatcttcatggccatagtaggaaagagaacatcttcatgtatggctgtgatggtag

SEQ ID NO: 402629 - DNA, 120 bp, Artificial Sequence
  ENSG00000146856_14 (sequence is synthesized)
gcaaaaattgtccagataaattttcattctcagcttgcaagtttaatgtccagaagagcaaagaaggaacaggaagggtggtaatgtggaaaatgggaatcaggaacagctttaccatgg

SEQ ID NO: 402630 - DNA, 120 bp, Artificial Sequence
  ENSG00000146856_15 (sequence is synthesized)
aggccaccttctgtggatctactctgggtaacaaacgaggcactcatttcagcacgaaagacctggaatcaatgggatatcatttttgtgattctctcttggattattgtgatcccgacc

SEQ ID NO: 402631 - DNA, 120 bp, Artificial Sequence
  ENSG00000146856_16 (sequence is synthesized)
ggaccaagtattatcggtgcctgaaagaattagaagaaatggaaagacatataaccctggaaaaagtctttgaggattcagacacacctgtgatagacattacattggatgtagagtcta

SEQ ID NO: 402632 - DNA, 120 bp, Artificial Sequence
  ENSG00000146856_17 (sequence is synthesized)
gtagccgaggctctgacagttcagaatccattgactctctgacttaccttctcaagttaacttctcagaaaaaacatttgaaaacaaagaaggaaaggaattctaccatagcaagccacc

SEQ ID NO: 402633 - DNA, 120 bp, Artificial Sequence
  ENSG00000146856_18 (sequence is synthesized)
aaaatgccagaggacaagaggtttatgatagagggcatttgctgcaaagacacacacaatcaaattctgatgtgaaagatacaaggccaaatgaaccagatgattatatggttgattatt

SEQ ID NO: 402634 - DNA, 120 bp, Artificial Sequence
  ENSG00000146856_19 (sequence is synthesized)
tcagaagacaattacctaatcaaggtttggatctgcaccacaacttaaaaagcaaaataaaagaatgcatatctttccaaagcaagaagactggcataaattggacagatgatgaaaaaa

SEQ ID NO: 402635 - DNA, 120 bp, Artificial Sequence
  ENSG00000146856_20 (sequence is synthesized)
gaagctacaaggataaaggaatagttcaaactcaagaaatattgcagtatttgctccccatcgtgcatagcactaaaaacatgcaaaccactcagataaaacagctattcaatccaagaa

SEQ ID NO: 402636 - DNA, 120 bp, Artificial Sequence
  ENSG00000146856_21 (sequence is synthesized)
ccaacttccaaatccaacatcaactaaatccggctacttgcagaaatataaagaaatacagcacatcttggacagcacccagaaatcacccttttgtaatccaaggggatgttatggcaa

SEQ ID NO: 402637 - DNA, 120 bp, Artificial Sequence
  ENSG00000146856_22 (sequence is synthesized)
actcttcagaatgggtccagtctaagccccacaggtcattggaaagtttatcacctctcaaaggccccaagaagaataaacattctcaaatctgggccataaagaatgaagacataaaac

SEQ ID NO: 402638 - DNA, 120 bp, Artificial Sequence
  ENSG00000146856_23 (sequence is synthesized)
ctctcagcagcaagtgggagactgcttcttcaagctttggaatggatgcaaatgttctaaaatataagagtcttcaagctgaagaaactaaccagcaaagctctaagcatacagccctcc

SEQ ID NO: 402639 - DNA, 120 bp, Artificial Sequence
  ENSG00000146856_24 (sequence is synthesized)
atctaactaaaaataaggatgagcaggccaataagaatgatggacaacccaccttatatctgaagttccaaagggagagttaatctagctttatactgctctgagaactgtgaatgaagg

SEQ ID NO: 402640 - DNA, 120 bp, Artificial Sequence
  ENSG00000146856_25 (sequence is synthesized)
ataacatatgcttatgtagtaaaaagaaaaaaaggaaagccctccccttcccctttccctatctctccccttacacatgcatatgcataaactaaaaattttagatatcccatcttctgt

SEQ ID NO: 402641 - DNA, 120 bp, Artificial Sequence
  ENSG00000146856_26 (sequence is synthesized)
agtgggaacatctttcagagatttaaaaagaaatccagagaaaatatggaaaaatattaaagcagatatttatatttagtttttatcagcatggaaaaaaatctctgaagttttgatttc

SEQ ID NO: 402642 - DNA, 120 bp, Artificial Sequence
  ENSG00000146856_27 (sequence is synthesized)
ttccaaaactacttacacattcgacaccaaaaaaacttaagaactcaaagtaggaatgacatataatatgtcactgattttaacctccctactagacactttaatcaattagtcaacaaa

SEQ ID NO: 402643 - DNA, 120 bp, Artificial Sequence
  ENSG00000146856_28 (sequence is synthesized)
catcatttcctgattttctgttatatcattagtgtgctaggaaccatttctctctactaggagattaccacataattgtacagataaaacatacctgaataaaatgattacagaataaga

SEQ ID NO: 402644 - DNA, 120 bp, Artificial Sequence
  ENSG00000146856_29 (sequence is synthesized)
ggctccttccctttctggaattattgtgtgatataatcaagacatttacctggctctttaaatcagttggtttgccggctacagtgtaggtaaagagtatgtcataatggacaataaaaa

SEQ ID NO: 402645 - DNA, 120 bp, Artificial Sequence
  ENSG00000146856_30 (sequence is synthesized)
ggaaataatttggctgaaaaagctaagctatcactgggaacactatgccctgtctagaaagagaaactatatttgtattttttttgagaaaatattttagctaagattcttctaggtttt

SEQ ID NO: 402646 - DNA, 120 bp, Artificial Sequence
  ENSG00000146856_31 (sequence is synthesized)
attaaaatttgtatatgaaattattagtagggttttagttttaggattgatgtccacttattttcttctatgtgctgattggattgtgttacatcgtagtatgaatcatagtagaaccac

SEQ ID NO: 402647 - DNA, 120 bp, Artificial Sequence
  ENSG00000146856_32 (sequence is synthesized)
caacgggcttagaaacggaacccctttatccagactccaaggaagctactgtggtttatctagctgaagatggtgagcacataatgacacatgttgctgtaaaatataatttggtactta

SEQ ID NO: 402648 - DNA, 120 bp, Artificial Sequence
  ENSG00000146856_33 (sequence is synthesized)
cttatctatttaacacatcttttttaaaaaagcagggcttattaatttattatcctacgaaaaaaaaatctgctcttgaaaatgatgtcagctccatcacatttggcaaagaacaaagac

SEQ ID NO: 402649 - DNA, 120 bp, Artificial Sequence
  ENSG00000146856_34 (sequence is synthesized)
ccaaagctgtcagaaaacactggataaatgaaggagtaagttatcaggccttatttaattgattatttgcatgaaactactcattaatttagatctattaataaagtaggcataaataaa

SEQ ID NO: 402650 - DNA, 120 bp, Artificial Sequence
  ENSG00000146856_35 (sequence is synthesized)
tccattgagcccaacacggtggccataccattgtgaagtcatcgatgaaaaagtccagcatattgatggagtctcatgctggagtgagtctcaccaggctggagcgcagtggtgcgatct

SEQ ID NO: 402651 - DNA, 66 bp, Artificial Sequence
  ENSG00000146856_36 (sequence is synthesized)
acctccacctcccaggttcaagcgattcgcctgcttcagcctcctgagtagcagagactacaggcg

SEQ ID NO: 402652 - DNA, 90 bp, Artificial Sequence
  ENSG00000146856_37 (sequence is synthesized)
aacattctgtatctcttagctgacattggaaatctgacctgtaattttcaaaagtgtcaaagtcatgaaatataaggaaagactgaaaag

SEQ ID NO: 402653 - DNA, 120 bp, Artificial Sequence
  ENSG00000146856_38 (sequence is synthesized)
aaagtgtcaaagtcatgaaatataaggaaagactgaaaagctgttctatatcgaagaaaactaaaatacacattaaagttcaatgcaatgtgtgattctaaagtggatccttttgctata

SEQ ID NO: 402654 - DNA, 120 bp, Artificial Sequence
  ENSG00000146856_39 (sequence is synthesized)
gaggacattatttatacaactgtcaaaattttaagtctaaggattaaatattagaaataaatcagtattaatgtcctgatcttgatggttgtattatggttatttatataggaggatttc

SEQ ID NO: 402655 - DNA, 120 bp, Artificial Sequence
  ENSG00000146856_40 (sequence is synthesized)
cttcactggaggaaatataagtatttggagaggatggggtattatgtttgcaaatatttcagggaaaaaaagttgtttttcctgttattgcaacttttctgtatgttttcaactgtttca

SEQ ID NO: 402656 - DNA, 120 bp, Artificial Sequence
  ENSG00000146856_41 (sequence is synthesized)
aataaaattaaaaaccacatgcctaggaataaatctgatagacaagatttctatgaagaagcaataaagcattgagagagatttttaaaagacctaagtaaatagagggaaatagcatgt

SEQ ID NO: 402657 - DNA, 120 bp, Artificial Sequence
  ENSG00000146856_42 (sequence is synthesized)
tcatagattgggagactcattattttaaagatgtcagttatctccaaactgatctacatgtcccatgcaataccagtcaaaatcccaattgtgatttttttatagaaattgacaaggtac

SEQ ID NO: 402658 - DNA, 120 bp, Artificial Sequence
  ENSG00000146856_43 (sequence is synthesized)
ggcattgctgaaaggaaacaggaatggaatagaacagagagcttagaaacagacctatgcatatatggtcattatgacaaaggtggaactgcaagagaaagttaaagatggtcttttcag

SEQ ID NO: 402659 - DNA, 120 bp, Artificial Sequence
  ENSG00000146856_44 (sequence is synthesized)
taaataatactggaataattggatttccatatggaaaaagtgaaatctcaccccaaccttatgcacaaaagtccattttaaatgggttatggatataaaaatgaaaggtaaaacaataag

SEQ ID NO: 402660 - DNA, 120 bp, Artificial Sequence
  ENSG00000146856_45 (sequence is synthesized)
acttctagaaaataatacaagaaaatatcttcataatattaaaatctggaaaggcttaaacagaacagaaaataccctaaaccataaagaaaaagactgataaatttgactacgatacaa

SEQ ID NO: 402661 - DNA, 120 bp, Artificial Sequence
  ENSG00000146856_46 (sequence is synthesized)
ttaaaaacctcagttcatcaaaaaataaaacgaggcaaacaatagtttgggagaatatattaatatttgcaatacataactgacaaatagatcatttctggaatacataaagcatttctg

SEQ ID NO: 402662 - DNA, 120 bp, Artificial Sequence
  ENSG00000146856_47 (sequence is synthesized)
aaagtaataagaaaagacaaacaacccagtaggaaaatgggcaagagacttgaatgggcacttaataaaaaatgatattcacatggccaataaacatatgagataatatcaaccttatca

SEQ ID NO: 402663 - DNA, 120 bp, Artificial Sequence
  ENSG00000146856_48 (sequence is synthesized)
tgaagtcttgttgtgattttaatttgctattccctgattgttaatgaggctgagttctgtttcacagaaaccttgcaaggttaaatttaacttatactaaggaatggtgagcatatggag

SEQ ID NO: 402664 - DNA, 120 bp, Artificial Sequence
  ENSG00000146856_49 (sequence is synthesized)
caaacagaaactttgtgacctgctggtgggtgtgtaaattggtataatcattttggatgatagcttggcgttatttactgaaattgatacatgccctgcaacctagaatttttactccca

SEQ ID NO: 402665 - DNA, 120 bp, Artificial Sequence
  ENSG00000146856_50 (sequence is synthesized)
gttgtatacctaaaactgatgtgagcacaggtgctctaagcaatatgtataaagctgttcatagcaccatttttcttaatagccccaaactgaaacagcccaaatgtccattataaatag

SEQ ID NO: 402666 - DNA, 120 bp, Artificial Sequence
  ENSG00000146856_51 (sequence is synthesized)
aaattgataaattgtaacattttgtacaatattatatatcaatgaaataagcaaattacagcagtatgccacaatgtggattgatttcatgaatatacgtgaaaaacagcacagaagaat

SEQ ID NO: 402667 - DNA, 120 bp, Artificial Sequence
  ENSG00000146856_52 (sequence is synthesized)
accatacactatgtgattttaattttataaagttcaaatataggcaaagcaaagcaatagttttatttacacttctgtagataaaaactgtattatacacatgcatatatatgaatgctt

SEQ ID NO: 402668 - DNA, 120 bp, Artificial Sequence
  ENSG00000146856_53 (sequence is synthesized)
aggtggtaaaattataaaggagagtaaagaaatgactgcattatattaagactaatggctacttttcaaagggagggagaggctggtgatgggaaaggggcatgagtggagtatgtaagg

SEQ ID NO: 402669 - DNA, 120 bp, Artificial Sequence
  ENSG00000146856_54 (sequence is synthesized)
tgcttgcaatgtaatatttcttggcctatgtggtgtttgctttgtgataaatcagtaagctgtagttctttgtttttgcacttttcataagtataatacctaataaacatttaaatattt

SEQ ID NO: 402670 - DNA, 120 bp, Artificial Sequence
  ENSG00000146856_55 (sequence is synthesized)
tgaaaaagtccagcatattgtaacagtgacgagagaatgagagcagaagagacccaaaaggaagaggaaagcaagaccccgtcgggccactgcttctcagtgtcacttccagccgcatgt

SEQ ID NO: 402671 - DNA, 120 bp, Artificial Sequence
  ENSG00000146856_56 (sequence is synthesized)
gctcattccactcaacttggttccacctcacctaactagaaaacccttctgtcacatctttgccacacctttctcttccttaaatttcctagccctcactttcagccgtcattttgccct

SEQ ID NO: 402672 - DNA, 120 bp, Artificial Sequence
  ENSG00000146856_57 (sequence is synthesized)
cagtcacaggagtcaccatcagcagctcagagtggggagagtttctattttccttggttgcttggtaatcccccactgttactgctgaggttctttcagatgtgggcagctgtgtttctg

SEQ ID NO: 402673 - DNA, 120 bp, Artificial Sequence
  ENSG00000146857_0 (sequence is synthesized)
atggggaagattgatgtggacaagatcctctttttcaatcaagaaatcaggctgtggcagcttataatggcaacccctgaagaaaacagcaatccccatgacagagcaacaccccagctg

SEQ ID NO: 402674 - DNA, 120 bp, Artificial Sequence
  ENSG00000146857_1 (sequence is synthesized)
ccagcacagctgcaggagcttgagcatcgggtggcccggagacggctgtcccaggcccgccaccgagccaccctggcagcgctcttcaacaacctcaggaagacagtgtactctcagtct

SEQ ID NO: 402675 - DNA, 120 bp, Artificial Sequence
  ENSG00000146857_2 (sequence is synthesized)
gatctcatagcctcaaagtggcaggttctgaataaggcaaagagtcatattccagaactggagcaaaccctggataatttgctgaagctgaaagcatccttcaacctggaagatgggcat

SEQ ID NO: 402676 - DNA, 120 bp, Artificial Sequence
  ENSG00000146857_3 (sequence is synthesized)
gcaagcagcttagaggaggtcaagaaagaatatgccagcatgtattctggaaatgacagttttcctcagaatggttcctccccttggtatctcaacttttacaaacagacgatggacctt

SEQ ID NO: 402677 - DNA, 120 bp, Artificial Sequence
  ENSG00000146857_4 (sequence is synthesized)
gcggcgctgcccatcgtctccgcggccatctcccacctgtggcagaacctctcggaggagaggaaggccagcctccggcaggcctgggcgcagaagcaccgcggccctgcgaccctggcg

SEQ ID NO: 402678 - DNA, 120 bp, Artificial Sequence
  ENSG00000146857_5 (sequence is synthesized)
gaggcctgccgagagccggcctgtgccgagggcagcgtgaaggacagcggcgtggacagccagggggccagctgctcgctggtctccacgcccgaggagatcctttttgaggatgccttt

SEQ ID NO: 402679 - DNA, 120 bp, Artificial Sequence
  ENSG00000146857_6 (sequence is synthesized)
gatgtggcaagcttcctggacaaaagtgaggttccgagtacatctagctccagttcagtgcttgccagctgcaacccagaaaacccagaggagaagtttcagctctatatgcagatcatc

SEQ ID NO: 402680 - DNA, 120 bp, Artificial Sequence
  ENSG00000146857_7 (sequence is synthesized)
aacttttttaaaggccttagctgtgcaaacactcaagtaaagcaggaagcatcctttcccgttgatgaagagatgatcatgttgcagtgcacagagacctttgacgatgaagatttgtaa

SEQ ID NO: 402681 - DNA, 120 bp, Artificial Sequence
  ENSG00000146857_8 (sequence is synthesized)
actccggcgcacgaagccgggtgactgctgtcccgggagtggggacgtcgcgtgcaccgttggcgacttataatggcaacccctgaagaaaacagcaatccccatgacagagcaacaccc

SEQ ID NO: 402682 - DNA, 120 bp, Artificial Sequence
  ENSG00000146857_9 (sequence is synthesized)
gcagtcaggaaggatgctgaggaggaggaagatgaggaagaggaagatcaagaagaagaggaggaggaagaagaagaggaggaggaggaagaggaggaagaggaagaggaggaggaggaa

SEQ ID NO: 402683 - DNA, 120 bp, Artificial Sequence
  ENSG00000146857_10 (sequence is synthesized)
gtgatcttatactccccaggaactttgtcgcctgacctcatggaatttgaacggtatctcaacttttacaaacagacgatggaccttctgactggcagcgggatcattaccccgcaggag

SEQ ID NO: 402684 - DNA, 120 bp, Artificial Sequence
  ENSG00000146858_0 (sequence is synthesized)
gcgcacagggcccgcgccagcgaccatggcggagcccacagtgtgctccttcctcaccaaggtgctgtgcgcccacggcggccgcatgttcctgaaggacctgcgcggccacgtggagct

SEQ ID NO: 402685 - DNA, 120 bp, Artificial Sequence
  ENSG00000146858_1 (sequence is synthesized)
agctgtcggaggccaggctccgggacgtgctgcagcgcgccgggcccgagcgtttcctgctgcaggaggtggagacgcaggagggcctcggggacgcggaggccgaggcggcggccggcg

SEQ ID NO: 402686 - DNA, 120 bp, Artificial Sequence
  ENSG00000146858_2 (sequence is synthesized)
gggcggtggcggcacctccgcctggagggtggtggccgtgtcctctgtgcgcctctgcgcccgctaccagcgcggcgagtgccaggcctgcgaccagctgcacttctgccgccggcacat

SEQ ID NO: 402687 - DNA, 120 bp, Artificial Sequence
  ENSG00000146858_3 (sequence is synthesized)
gctgggcaagtgccccaaccgggactgctggtctacctgtaccctttcccatgatatccacacacctgtcaacatgcaggtcctgaaaagccatggactttttggtctcaatgaaaacca

SEQ ID NO: 402688 - DNA, 120 bp, Artificial Sequence
  ENSG00000146858_4 (sequence is synthesized)
gcttcggatcctgcttttgcagaatgacccctgtcttttaccagaggtctgtttgctctacaacaaaggggaagccctgtatggctactgcaacctcaaggataaatgcaacaagtttca

SEQ ID NO: 402689 - DNA, 120 bp, Artificial Sequence
  ENSG00000146858_5 (sequence is synthesized)
tgtgtgcaaatcctttgtgaaaggagaatgcaaacttcagacctgcaaacggtcccatcagcttatccatgctgcatctttgaagctgctacaggaccaaggactgaatattccaagtgt

SEQ ID NO: 402690 - DNA, 120 bp, Artificial Sequence
  ENSG00000146858_6 (sequence is synthesized)
tgttaattttcagataatctccacctacaagcatatgaagctgcacaagatgcttgaaaatacagataattcatcaccttcgactgagcattcacaaggccttgagaagcaaggagtgca

SEQ ID NO: 402691 - DNA, 120 bp, Artificial Sequence
  ENSG00000146858_7 (sequence is synthesized)
aaagaagatggaaaaggagaaaatgtccttttggaagaatacatttgggcatgggtggttggggatggggtgggacattgaacaggcaaagagaggctaaaattgagtgcagatggggct

SEQ ID NO: 402692 - DNA, 120 bp, Artificial Sequence
  ENSG00000146858_8 (sequence is synthesized)
agtccagggcaagtgctgaagatggcagctgctatctgcagctcctaggtgctttcctcaggctgggtagatggagctctgctgacttctgtggtccaccattgtttttctatcaattta

SEQ ID NO: 402693 - DNA, 120 bp, Artificial Sequence
  ENSG00000146858_9 (sequence is synthesized)
tattgtggcaatcctagagtactttgcactcatttttttttttcacttaatattgtctcataagcatctttctatatttgttcacatcgtacataatcatgtttttgcacagatacatta

SEQ ID NO: 402694 - DNA, 120 bp, Artificial Sequence
  ENSG00000146858_10 (sequence is synthesized)
catcgtacataatcatgtttttgcacagatacattaatattatcatagtttgtttaactacttggctttttctaacagtttttttttttgagatggtcttgctctgttgcccaggctgga

SEQ ID NO: 402695 - DNA, 69 bp, Artificial Sequence
  ENSG00000146858_11 (sequence is synthesized)
gaccagctaattttttgtattttttttttgtagagagggtattttgccatgttgcccaggctagtcttg

SEQ ID NO: 402696 - DNA, 67 bp, Artificial Sequence
  ENSG00000146858_12 (sequence is synthesized)
ctgcttaacaaattttgaatataactcctgtcttaaaatctgcagaatattgaatttttccagctat

SEQ ID NO: 402697 - DNA, 120 bp, Artificial Sequence
  ENSG00000146858_13 (sequence is synthesized)
ctgtcttaaaatctgcagaatattgaatttttccagctattttttacttttgcttagcttatagatgctaaaggatactgtcatttgcatttttaaaaatatatgtatgagtgaatagtt

SEQ ID NO: 402698 - DNA, 120 bp, Artificial Sequence
  ENSG00000146859_0 (sequence is synthesized)
agagagctgtttactaggcacgactgcgaaggcaagggggcaccagctcaggactgcatctgcctgccatttcccttccactcctcctttctggagtctgacattagaaagccagcgaga

SEQ ID NO: 402699 - DNA, 120 bp, Artificial Sequence
  ENSG00000146859_1 (sequence is synthesized)
aggaagattcaaacaaccaaccctgatttcctgcttctccttttcatgagtgttcctgtggtctctgcacctcctttctgtcccccggcagagggcagtagagatggccggcccaaggcc

SEQ ID NO: 402700 - DNA, 120 bp, Artificial Sequence
  ENSG00000146859_2 (sequence is synthesized)
tcggtggcgcgaccagctgctgttcatgagcatcatagtcctcgtgattgtggtcatctgcctgatgttttacgctcttctctgggaggctggcaacctcactgacctgcccaacctgag

SEQ ID NO: 402701 - DNA, 120 bp, Artificial Sequence
  ENSG00000146859_3 (sequence is synthesized)
aatcggcttctataacttctgcctgtggaatgaggacaccagcaccctacagtgtcaccagttccctgagctggaagccctgggggtgcctcgggttggcctgggcctggccaggcttgg

SEQ ID NO: 402702 - DNA, 120 bp, Artificial Sequence
  ENSG00000146859_4 (sequence is synthesized)
cgtgtacgggtccctggtcctcaccctctttgccccccagcctctcctcctagcccagtgcaacagtgatgagagagcgtggcggctggcagtgggcttcctggctgtgtcctctgtgct

SEQ ID NO: 402703 - DNA, 120 bp, Artificial Sequence
  ENSG00000146859_5 (sequence is synthesized)
gctggcaggcggcctgggcctcttcctctcctatgtgtggaagtgggtcaggctctccctcccggggcctgggtttctagctctgggcagcgcccaggccttactcatcctcttgcttat

SEQ ID NO: 402704 - DNA, 120 bp, Artificial Sequence
  ENSG00000146859_6 (sequence is synthesized)
agccatggctgtgttccctctgagggctgagagggctgagagcaagcttgagagctgctaaaggcttacgtgattgcaagggttcagttccaaccatggtcagaggtggcacatctgctc

SEQ ID NO: 402705 - DNA, 120 bp, Artificial Sequence
  ENSG00000146859_7 (sequence is synthesized)
agccatctcattttacagctaacgctgatctccagctccagcgatggaacccactacagaggaggtggggcccctgtgtcaaagaggccgaggggcagcaagggcagccagggcacctgt

SEQ ID NO: 402706 - DNA, 120 bp, Artificial Sequence
  ENSG00000146859_8 (sequence is synthesized)
tcacaccaattcctgctttaattaatggatctgagcaaatcttcctctagcttcaggagggtggggagggagtgattgctgtcatggggccagacttccaggctgatttgccaaatgcca

SEQ ID NO: 402707 - DNA, 120 bp, Artificial Sequence
  ENSG00000146859_9 (sequence is synthesized)
aaatgaaacctagcaaagaacttacggcaacaaacgaggacattaaaagagcgagcacctcagtgtctctggggacatggttaaggagcttccactcagcccaccatagtgagtgggccg

SEQ ID NO: 402708 - DNA, 120 bp, Artificial Sequence
  ENSG00000146859_10 (sequence is synthesized)
ccataagccatcactggaactccaaccccagaggtccaggagtgatctctgagtgactcaacaaagacaggacacatggggtacaaagacaaggcttgactgcttcaaagcttccctgga

SEQ ID NO: 402709 - DNA, 120 bp, Artificial Sequence
  ENSG00000146859_11 (sequence is synthesized)
cctgaagccagacagggcagaggcgtccgctgacaaatcactcccatgatgagaccctggaggactccaaatcctcgctgtgaacaggactggacggctgcacacaaacaaacgctgcca

SEQ ID NO: 402710 - DNA, 120 bp, Artificial Sequence
  ENSG00000146859_12 (sequence is synthesized)
ccctccacttcccaacccagaacttggaaagacattagcacaacttacgcattggggaattgtgtgtattttctagcacttgtgtattggaaaacctgtatggcagtgatttattcatat

SEQ ID NO: 402711 - DNA, 120 bp, Artificial Sequence
  ENSG00000146859_13 (sequence is synthesized)
attcctgtccaaagccacactgaaaacagaggcagagacatgtactctggtgtgatctcttgtcctcagtgtctcttctgggctcctgtccctcttgctttatagctagctgcccgggga

SEQ ID NO: 402712 - DNA, 120 bp, Artificial Sequence
  ENSG00000146859_14 (sequence is synthesized)
ccaaggtacaggtgaaagcaaggtagcagcttgcgggaggaggcctgtctggcttaccagtctatacactgtggcctcaacctcccagacagggcagagaactgtgggcagctcgtttgc

SEQ ID NO: 402713 - DNA, 120 bp, Artificial Sequence
  ENSG00000146859_15 (sequence is synthesized)
tttctaggctggctggagaggtgggagctcattgatagactcatgatggaaactatttttgaaacaggcttcctccttcaggagagatcatgcggactaaactgtagcaattccagtgca

SEQ ID NO: 402714 - DNA, 120 bp, Artificial Sequence
  ENSG00000146859_16 (sequence is synthesized)
aagattcaaacaaccaaccctgatttcctgcttctccttttcatgagtgttcctgtggtctctgcacctcctttcttgtgtaatgtttaacagcagcaaaattaaaacatgtaagttcca

SEQ ID NO: 402715 - DNA, 120 bp, Artificial Sequence
  ENSG00000146859_17 (sequence is synthesized)
ctgctggtggtgcccgatggggaaggggctgccaaactatgcatctgaccaaggactaatatccagaatctacaagaacacaaacaactcaacaagaaaaaacaatcccattaaaaagtg

SEQ ID NO: 402716 - DNA, 120 bp, Artificial Sequence
  ENSG00000146859_18 (sequence is synthesized)
ggtaaaggacataaacagacattttccaaaggaagacatacaagtggccaagaaacatatgaaaaatgctcaacatcactaatcaccagataaatgcaaattaaaaccacaatgagatac

SEQ ID NO: 402717 - DNA, 80 bp, Artificial Sequence
  ENSG00000146872_0 (sequence is synthesized)
tgtacgcgagcccggggatctgcggccttcgtgccccccctcccccgcccgccctctcgtggagcccggcgccggcggcg

SEQ ID NO: 402718 - DNA, 80 bp, Artificial Sequence
  ENSG00000146872_1 (sequence is synthesized)
cccgggcctgcccagggggagagcggagcggtccgcagccgggtcgggtcggggcccctcccgggaggagcgtggagcgg

SEQ ID NO: 402719 - DNA, 120 bp, Artificial Sequence
  ENSG00000146872_2 (sequence is synthesized)
tggagcggcggcggcggcggcggcagcagaaatgatggaagaattgcatagcctggacccacgacggcaggaattattggaggccaggtttactggagtaggtgttagtaagggaccact

SEQ ID NO: 402720 - DNA, 120 bp, Artificial Sequence
  ENSG00000146872_3 (sequence is synthesized)
taatagtgagtcttccaaccagagcttgtgcagcgtcggatccttgagtgataaagaagtagagactcccgagaaaaagcagaatgaccagcgaaatcggaaaagaaaagctgaaccata

SEQ ID NO: 402721 - DNA, 120 bp, Artificial Sequence
  ENSG00000146872_4 (sequence is synthesized)
tgaaactagccaagggaaaggcactcctaggggacataaaattagtgattactttgagtttgctgggggaagcgcgccaggaaccagccctggcagaagtgttccaccagttgcacgatc

SEQ ID NO: 402722 - DNA, 120 bp, Artificial Sequence
  ENSG00000146872_5 (sequence is synthesized)
ctcaccgcaacattccttatccaatcccttaccgcgacgagtagaacagcccctctatggtttagatggcagtgctgcaaaggaggcaacggaggagcagtctgctctgccaaccctcat

SEQ ID NO: 402723 - DNA, 120 bp, Artificial Sequence
  ENSG00000146872_6 (sequence is synthesized)
gtcagtgatgctagcaaaacctcggcttgacacagagcagctggcgcaaaggggagctggcctctgcttcacttttgtttcagctcagcaaaacagtccctcatctacgggatctggcaa

SEQ ID NO: 402724 - DNA, 120 bp, Artificial Sequence
  ENSG00000146872_7 (sequence is synthesized)
cacagagcattcctgcagctcccaaaaacagatctccatccagcacagacagacccagtccgacctcacaatagaaaaaatatctgcactagaaaacagtaagaattctgacttagagaa

SEQ ID NO: 402725 - DNA, 120 bp, Artificial Sequence
  ENSG00000146872_8 (sequence is synthesized)
gaaggagggaagaatagatgatttattaagagccaactgtgatttgagacggcagattgatgaacagcaaaagatgctagagaaatacaaggaacgattaaatagatgtgtgacaatgag

SEQ ID NO: 402726 - DNA, 120 bp, Artificial Sequence
  ENSG00000146872_9 (sequence is synthesized)
caagaaactccttatagaaaagtcaaaacaagagaagatggcgtgtagagataagagcatgcaagaccgcttgagactgggccactttactactgtccgacacggagcctcatttactga

SEQ ID NO: 402727 - DNA, 120 bp, Artificial Sequence
  ENSG00000146872_10 (sequence is synthesized)
acagtggacagatggttatgcttttcagaatcttatcaagcaacaggaaaggataaattcacagagggaagagatagaaagacaacggaaaatgttagcaaagcggaaacctcctgccat

SEQ ID NO: 402728 - DNA, 120 bp, Artificial Sequence
  ENSG00000146872_11 (sequence is synthesized)
gggtcaggcccctcctgcaaccaatgagcagaaacagcggaaaagcaagaccaatggagctgaaaatgaaacgttaacgttagcagaataccatgaacaagaagaaatcttcaaactcag

SEQ ID NO: 402729 - DNA, 120 bp, Artificial Sequence
  ENSG00000146872_12 (sequence is synthesized)
attaggtcatcttaaaaaggaggaagcagagatccaggcagagctggagagactagaaagggttagaaatctacatatcagggaactaaaaaggatacataatgaagataattcacaatt

SEQ ID NO: 402730 - DNA, 120 bp, Artificial Sequence
  ENSG00000146872_13 (sequence is synthesized)
taaagatcatccaacgctaaatgacagatatttgttgttacatcttttgggtagaggaggtttcagtgaagtttacaaggcatttgatctaacagagcaaagatacgtagctgtgaaaat

SEQ ID NO: 402731 - DNA, 120 bp, Artificial Sequence
  ENSG00000146872_14 (sequence is synthesized)
atcatcccagaatagttaagctgtatgattacttttcactggatactgactcgttttgtacagtattagaatactgtgagggaaatgatctggacttctacctgaaacagcacaaattaa

SEQ ID NO: 402732 - DNA, 120 bp, Artificial Sequence
  ENSG00000146872_15 (sequence is synthesized)
tgtcggagaaagaggcccggtccattatcatgcagattgtgaatgctttaaagtacttaaatgaaataaaacctcccatcatacactatgacctcaaaccaggtaatattcttttagtaa

SEQ ID NO: 402733 - DNA, 120 bp, Artificial Sequence
  ENSG00000146872_16 (sequence is synthesized)
atggtacagcgtgtggagagataaaaattacagattttggtctttcgaagatcatggatgatgatagctacaattcagtggatggcatggagctaacatcacaaggtgctggtacttatt

SEQ ID NO: 402734 - DNA, 120 bp, Artificial Sequence
  ENSG00000146872_17 (sequence is synthesized)
ggtatttaccaccagagtgttttgtggttgggaaagaaccaccaaagatctcaaataaagttgatgtgtggtcggtgggtgtgatcttctatcagtgtctttatggaaggaagccttttg

SEQ ID NO: 402735 - DNA, 120 bp, Artificial Sequence
  ENSG00000146872_18 (sequence is synthesized)
gccataaccagtctcagcaagacatcctacaagagaatacgattcttaaagctactgaagtgcagttcccgccaaagccagtagtaacacctgaagcaaaggcgtttattcgacgatgct

SEQ ID NO: 402736 - DNA, 120 bp, Artificial Sequence
  ENSG00000146872_19 (sequence is synthesized)
tggcctaccgaaaggaggaccgcattgatgtccagcagctggcctgtgatccctacttgttgcctcacatccgaaagtcagtctctacaagtagccctgctggagctgctattgcatcaa

SEQ ID NO: 402737 - DNA, 120 bp, Artificial Sequence
  ENSG00000146872_20 (sequence is synthesized)
cctctggggcgtccaataacagttcttctaattgagactgactccaaggccacaaactgttcaacacacacaaagtggacaaatggcgttcagcagcgggtttggaacatagcgaatccg

SEQ ID NO: 402738 - DNA, 120 bp, Artificial Sequence
  ENSG00000146872_21 (sequence is synthesized)
aatggatctgatgaaacctgtaccaggtgcttttattttcttgcttttttcccatccatagagcatgacagcatcgattctcattgaggagaaaccttgggcagctccggccaggccttg

SEQ ID NO: 402739 - DNA, 120 bp, Artificial Sequence
  ENSG00000146872_22 (sequence is synthesized)
taggaaaaggccccgcccgaggttccagcgtcaacggccactgtgtgtggctgctctgagtgaggaaaaaattaaaaagaaaaactggttccatgtactgtgaacttgaaaacttgcaga

SEQ ID NO: 402740 - DNA, 120 bp, Artificial Sequence
  ENSG00000146872_23 (sequence is synthesized)
ctcaggggggtccctgatgcagtgcttcagatgaagaatgtggacttgaaaatacagactgggctagtccagtgtctatatttaaacttgttcttttcttttaataaagtttaggtaaca

SEQ ID NO: 402741 - DNA, 120 bp, Artificial Sequence
  ENSG00000146872_24 (sequence is synthesized)
tctcctgaaaagcttgtagcacaaaggctcagctggggatggtgtttgacttcggaggaaaaaagttgctattgcccgttaaaggcactagagttagtgttttatccctaaataatttca

SEQ ID NO: 402742 - DNA, 120 bp, Artificial Sequence
  ENSG00000146872_25 (sequence is synthesized)
atttttaaaaacatgcagcttccctctccccttttttatttttgaaagaatacatttggtcataaagtgaaacccgtattagcaagtacgtggcaatgttcattccaatcagatgcagct

SEQ ID NO: 402743 - DNA, 120 bp, Artificial Sequence
  ENSG00000146872_26 (sequence is synthesized)
ttctcctccgtctggtctcctgtttgcaattgcttccctcatctcagtagggaaaaaattgagtgggagtactgagatgtgtgggtttttgccattggacaaagaatgaggttagaagac

SEQ ID NO: 402744 - DNA, 120 bp, Artificial Sequence
  ENSG00000146872_27 (sequence is synthesized)
tgcagcttggagtctctctaggttttcaactatttcttcacaatttgaacacttgacggttgtcccttttaatttatttgaagtgctatttttttaaataaaggttcatctgtccatgca

SEQ ID NO: 402745 - DNA, 120 bp, Artificial Sequence
  ENSG00000146872_28 (sequence is synthesized)
tgtctcctgacacttcatatggtgacagaattttcgcttcctcaggaagttcacatgaggccatggtttgtagatggaggaccgtgaagttagatcgttcccatccaaaccagcgaagac

SEQ ID NO: 402746 - DNA, 120 bp, Artificial Sequence
  ENSG00000146872_29 (sequence is synthesized)
aaagagagattttttttttttctgttggtcttagtgctttgggggcaggagtatttagaggtcatgcttcctttttcctcccttcagtaatggctcagccctttctgtctgagaagggat

SEQ ID NO: 402747 - DNA, 120 bp, Artificial Sequence
  ENSG00000146872_30 (sequence is synthesized)
cggtggcagcagagaggtacttctgttggtgcttctccttcccttgtgttctttgggtctgcctggtgatttctgaggaaggccttaagccccttctctttagttgatatttgctctggg

SEQ ID NO: 402748 - DNA, 120 bp, Artificial Sequence
  ENSG00000146872_31 (sequence is synthesized)
ctgaatgtagtaactatgaagctatgccaaaggtaggcagaaaatgggcttgggagccagacactccagggatcagtagttcctacccatagtctttgtgtgcttgctaaatggtgtaca

SEQ ID NO: 402749 - DNA, 120 bp, Artificial Sequence
  ENSG00000146872_32 (sequence is synthesized)
atcttttggcagcaaacaaccttccccccaagcctctgaattttgtgggtgtgtggtggtgtgtgtctgtgtgtgcatgtacacacacactttgtctagctcactttaaaagattcatca

SEQ ID NO: 402750 - DNA, 120 bp, Artificial Sequence
  ENSG00000146872_33 (sequence is synthesized)
acacacacactttgtctagctcactttaaaagattcatcaaatggaattttaaaaataatctgaaaagaaatagatatttcaggccgggcctggtggttcacgcctgtaatcccagcact

SEQ ID NO: 402751 - DNA, 75 bp, Artificial Sequence
  ENSG00000146872_34 (sequence is synthesized)
ggtcgggagttcgagatcagtctggttggcgtggtggcgtgtgcctctagtcccagctacccgggaggctgaggc

SEQ ID NO: 402752 - DNA, 73 bp, Artificial Sequence
  ENSG00000146872_35 (sequence is synthesized)
tgcagtgagccgagatggcaccactgcaatccagcctaggcaacagaatgtttcaaatatgaacattcttttg

SEQ ID NO: 402753 - DNA, 120 bp, Artificial Sequence
  ENSG00000146872_36 (sequence is synthesized)
caaatatgaacattcttttggcaccaattttcttttttaatttggttgtttctgagatgtatgatcaactgaagatggagctgaaatgggagacgggtggccccaccgtgcccttgaaac

SEQ ID NO: 402754 - DNA, 120 bp, Artificial Sequence
  ENSG00000146872_37 (sequence is synthesized)
agcagagcactcctcagtagagagggagggagccaagagcctgaacatgtggtcgccagcttggaatgttactgacatatgtggcgagggcttagccagaaatatttaaagatgtagtat

SEQ ID NO: 402755 - DNA, 120 bp, Artificial Sequence
  ENSG00000146872_38 (sequence is synthesized)
tccggcctgtgagttgtctgggcagggagggggagtcagaaagggtagagagctctcaaataactcatgactctagtgttcctttcacatgtgaacagtgtcactgatgacacattttct

SEQ ID NO: 402756 - DNA, 120 bp, Artificial Sequence
  ENSG00000146872_39 (sequence is synthesized)
aggaccttcgtttgttttgtggacctgcctcagtctcctcagtatcaggcgatcttaagggaagatggagtgtttcaaattggagagaagttcatgggtaggtatcgtcctgtggaattc

SEQ ID NO: 402757 - DNA, 120 bp, Artificial Sequence
  ENSG00000146872_40 (sequence is synthesized)
tgaatgcaaggaagtcaaccccagaggccttggtacccccagctttctaaaactactttattacaatttatatgtatatacacatgcacatataaacgtgtgcatttatgtatgtgtgta

SEQ ID NO: 402758 - DNA, 120 bp, Artificial Sequence
  ENSG00000146872_41 (sequence is synthesized)
tagtaccttttttaaaaaaacatttcctccaagctgctaagcaaagggtctcacaggtcgagcacagtgctgagaggatggtgtctgcataatgaagacatggatgaagctgagaccgtg

SEQ ID NO: 402759 - DNA, 120 bp, Artificial Sequence
  ENSG00000146872_42 (sequence is synthesized)
ttcaaactcactgaaaacaatgaagttctattccttttttcttcctctccaatgatcttgcagttgatttgtttgttttttaattttttaacatttttttaacgttgaaaaaatgctgcg

SEQ ID NO: 402760 - DNA, 120 bp, Artificial Sequence
  ENSG00000146872_43 (sequence is synthesized)
tctttctttaagccttcccagtaacttcctgccttttttttccccgtgggcttttaagtgaagctgcaggattttatctttcaatctgccctttctacccttgtcctattgaaaggatgc

SEQ ID NO: 402761 - DNA, 120 bp, Artificial Sequence
  ENSG00000146872_44 (sequence is synthesized)
cctcttcccttgcttttttggtctagggcctgtttggagctaactaggcttggctgagtccgggcaagaccttcttccgaggcatggacaagccccagagaacatgcagaacattgacct

SEQ ID NO: 402762 - DNA, 120 bp, Artificial Sequence
  ENSG00000146872_45 (sequence is synthesized)
ttccattgactgtctttcaagcagccagtgaaatcactaagtggggttcttccatgacatattttgttaatatgggtttcactttttccaagaatagtcccttgttgccacaatgttgat

SEQ ID NO: 402763 - DNA, 120 bp, Artificial Sequence
  ENSG00000146872_46 (sequence is synthesized)
ttactttacacaatgacagtatgtattaatttgtaattaaacccatccagattgttttagccttttcccaatggggtgggggagggaagaaggatattaaaataagttttaagaagcaaa

SEQ ID NO: 402764 - DNA, 120 bp, Artificial Sequence
  ENSG00000146872_47 (sequence is synthesized)
agttcagccaggtgcaggcactgtcatgttcatggccaccaggcatctgccaagcaccaggctctgtgctgcccactttacacagatggtctcatttggccttgatgacagcctgtggag

SEQ ID NO: 402765 - DNA, 120 bp, Artificial Sequence
  ENSG00000146872_48 (sequence is synthesized)
gtctgtgttctgttaaaatatggaagaattaagagaagaacgaagaaataagggcagaaactccactggggagtacttgtctaaccctgaaaaagttcaaggctgttgttcaaggtctga

SEQ ID NO: 402766 - DNA, 120 bp, Artificial Sequence
  ENSG00000146872_49 (sequence is synthesized)
ggtatggtatgaaaaggaaaactagaaaagaggaggaaaaaacaataaatatgcaagaagaaataaatacattgcaaaacagaagaatgggaaataatcaagagttggaaaattaggaaa

SEQ ID NO: 402767 - DNA, 120 bp, Artificial Sequence
  ENSG00000146872_50 (sequence is synthesized)
aggagatactctgtgaggggccggcgtgttttctccatcttggcacttaccctcagaccctcctaagtacccgggagggccgtgtttttcatcggaggttgaaatggaacctccccctgg

SEQ ID NO: 402768 - DNA, 120 bp, Artificial Sequence
  ENSG00000146872_51 (sequence is synthesized)
gtgcccggggagagtaccttgggggcagcgcccctccttccggagggcagcatccccgcgggggcgggggctcggctttgatcccagggcaccttttgtccctggagacgctctgccagc

SEQ ID NO: 402769 - DNA, 120 bp, Artificial Sequence
  ENSG00000146872_52 (sequence is synthesized)
gtgtttgaagtgtaggtgtagtgggacataaggaacccagcagaggacttgaagaatgagatgagacaagcagatttcatttcttaagccatgtgattctaggccatttgtgtgagcaag

SEQ ID NO: 402770 - DNA, 120 bp, Artificial Sequence
  ENSG00000146872_53 (sequence is synthesized)
tgctttttcccacccccccgagaaaggtaatgagaagagtgtgatgacatataacatgttgagactaatcctaaatttgttttacctttgtctctgtagtccgacctcacaatagaaaaa

SEQ ID NO: 402771 - DNA, 120 bp, Artificial Sequence
  ENSG00000146872_54 (sequence is synthesized)
cttcttattccttacttgagatgaaaatatttaaaagtagagctttttaggaacatgatttgacaattagaattttttccttacatggacaccagaccaaccatccagagtgttaatttg

SEQ ID NO: 402772 - DNA, 120 bp, Artificial Sequence
  ENSG00000146872_55 (sequence is synthesized)
gttcagaatacagctgagcccagagattgcatggcaccaagagaggtttctgtcaagccgtcccgttccgagatgccccatcgcaccaacgaagcaactgctgagcagaaatgatggaag

SEQ ID NO: 402773 - DNA, 120 bp, Artificial Sequence
  ENSG00000146872_56 (sequence is synthesized)
ggcagggctgttttttgttcttgtttctctttttattttaataaacaatatgccaaattacagggtggttttgtaaacaatcataccaaagaagtatattgtgaggggttattttctcca

SEQ ID NO: 402774 - DNA, 120 bp, Artificial Sequence
  ENSG00000146872_57 (sequence is synthesized)
ggaggcaggcagtgtgtgtccctggaatttcaaaagtgacaggatgtttgaagcttgtaaagtcccagtgtcaactgaaggataagagacaacctaaggcagacgggtcccagacaggaa

SEQ ID NO: 402775 - DNA, 120 bp, Artificial Sequence
  ENSG00000146872_58 (sequence is synthesized)
tagatggtgtccagaaagagaatggttgggaaatgattctgaaggcaggggctatctttctgtttgtggtgttggcctggttttatgttctaaatcccttggtgccagtgtgtctggaga

SEQ ID NO: 402776 - DNA, 120 bp, Artificial Sequence
  ENSG00000146872_59 (sequence is synthesized)
ttgcaacactgatataagtatgtgatgtatttaataatgtattttggactttgattatgttatatgttaaattaaagcttcacatcagttacctgtaatttttcttaacatttacccagt

SEQ ID NO: 402777 - DNA, 120 bp, Artificial Sequence
  ENSG00000146872_60 (sequence is synthesized)
atagttttgtacagtattagaatactgtgagggaaatgatctggacttctacctgaaacagcacaaattaatgtcggagaaagaggcccggtccattatcatgcagattgtgaatgcttt

SEQ ID NO: 402778 - DNA, 120 bp, Artificial Sequence
  ENSG00000146872_61 (sequence is synthesized)
cttttaaaatacgatttacttttaatgggttcagatcagagaattgtttccttagctgttaaaaaggaatcagaaaattgttccttctgagtcagaaaataaggtcacaatagaaatttg

SEQ ID NO: 402779 - DNA, 120 bp, Artificial Sequence
  ENSG00000146872_62 (sequence is synthesized)
atatgttccttcctgtccactctgaaaatagtaataactagtgtcttaaagcacagactcattcccagaaaacatctatcaccaattatttggcccttccaatctgaagttaaaatcaaa

SEQ ID NO: 402780 - DNA, 120 bp, Artificial Sequence
  ENSG00000146872_63 (sequence is synthesized)
attctggttgtttagacgtggatgtgtggcatgggtgtgtaaaggagccccttccaagaagatacctagcttaaatacattatagttcttatcagtattcttatagtctagactcaagaa

SEQ ID NO: 402781 - DNA, 120 bp, Artificial Sequence
  ENSG00000146872_64 (sequence is synthesized)
gaggtctgccatgggtgaacttgagcacaacagattccaacattgagggtgtggaaactcttcaagagaataagcagtttcttaccagaaacccctcagctaatactgaataaacaattg

SEQ ID NO: 402782 - DNA, 120 bp, Artificial Sequence
  ENSG00000146872_65 (sequence is synthesized)
cagcaaaacagtccctcatctacgggatctggcaacacagagcattcctgcagctcccaaaaacagatctccatccagcacagacagacccaggccaactgtgatttgagacggcagatt

SEQ ID NO: 402783 - DNA, 120 bp, Artificial Sequence
  ENSG00000146904_0 (sequence is synthesized)
atccgggccactgtcccaggtcccggcccggagctatggagcggcgctggcccctggggctagggctggtgctgctgctctgcgccccgctgcccccgggggcgcgcgccaaggaagtta

SEQ ID NO: 402784 - DNA, 120 bp, Artificial Sequence
  ENSG00000146904_1 (sequence is synthesized)
cgcgccaaggaagttactctgatggacacaagcaaggcacagggagagctgggctggctgctggatcccccaaaagatgggtggagtgaacagcaacagatactgaatgggacacccctg

SEQ ID NO: 402785 - DNA, 120 bp, Artificial Sequence
  ENSG00000146904_2 (sequence is synthesized)
tacatgtaccaggactgcccaatgcaaggacgcagagacactgaccactggcttcgctccaattggatctaccgcggggaggaggcttcccgcgtccacgtggagctgcagttcaccgtg

SEQ ID NO: 402786 - DNA, 120 bp, Artificial Sequence
  ENSG00000146904_3 (sequence is synthesized)
cgggactgcaagagtttccctgggggagccgggcctctgggctgcaaggagaccttcaaccttctgtacatggagagtgaccaggatgtgggcattcagctccgacggcccttgttccag

SEQ ID NO: 402787 - DNA, 120 bp, Artificial Sequence
  ENSG00000146904_4 (sequence is synthesized)
aaggtaaccacggtggctgcagaccagagcttcaccattcgagaccttgtgtctggctccgtgaagctgaatgtggagcgctgctctctgggccgcctgacccgccgtggcctctacctc

SEQ ID NO: 402788 - DNA, 120 bp, Artificial Sequence
  ENSG00000146904_5 (sequence is synthesized)
gctttccacaacccgggtgcctgtgtggccctggtgtctgtccgggtcttctaccagcgctgtcctgagaccctgaatggcttggcccaattcccagacactctgcctggccccgctggg

SEQ ID NO: 402789 - DNA, 120 bp, Artificial Sequence
  ENSG00000146904_6 (sequence is synthesized)
ttggtggaagtggcggggacctgcttgccccacgcgcgggccagccccaggccctcaggtgcaccccgcatgcactgcagccctgatggcgagtggctggtgcctgtaggacggtgccac

SEQ ID NO: 402790 - DNA, 120 bp, Artificial Sequence
  ENSG00000146904_7 (sequence is synthesized)
tgtgagcctggctatgaggaaggtggcagtggcgaagcatgtgttgcctgccctagcggctcctaccggatggacatggacacaccccattgtctcacgtgcccccagcagagcactgct

SEQ ID NO: 402791 - DNA, 120 bp, Artificial Sequence
  ENSG00000146904_8 (sequence is synthesized)
gagtctgagggggccaccatctgtacctgtgagagcggccattacagagctcccggggagggcccccaggtggcatgcacaggtcccccctcggccccccgaaacctgagcttctctgcc

SEQ ID NO: 402792 - DNA, 120 bp, Artificial Sequence
  ENSG00000146904_9 (sequence is synthesized)
tcagggactcagctctccctgcgttgggaacccccagcagatacggggggacgccaggatgtcagatacagtgtgaggtgttcccagtgtcagggcacagcacaggacggggggccctgc

SEQ ID NO: 402793 - DNA, 120 bp, Artificial Sequence
  ENSG00000146904_10 (sequence is synthesized)
cagccctgtggggtgggcgtgcacttctcgccgggggcccgggggctcaccacacctgcagtgcatgtcaatggccttgaaccttatgccaactacacctttaatgtggaagcccaaaat

SEQ ID NO: 402794 - DNA, 120 bp, Artificial Sequence
  ENSG00000146904_11 (sequence is synthesized)
ggagtgtcagggctgggcagctctggccatgccagcacctcagtcagcatcagcatggggcatgcagagtcactgtcaggcctgtctctgagactggtgaagaaagaaccgaggcaacta

SEQ ID NO: 402795 - DNA, 120 bp, Artificial Sequence
  ENSG00000146904_12 (sequence is synthesized)
gagctgacctgggcggggtcccggccccgaagccctggggcgaacctgacctatgagctgcacgtgctgaaccaggatgaagaacggtaccagatggttctagaacccagggtcttgctg

SEQ ID NO: 402796 - DNA, 120 bp, Artificial Sequence
  ENSG00000146904_13 (sequence is synthesized)
tctcccctgatcatgagtttcggaccagcccaccagtgtccaggggcctgactggaggagagattgtagccgtcatctttgggctgctgcttggtgcagccttgctgcttgggattctcg

SEQ ID NO: 402797 - DNA, 120 bp, Artificial Sequence
  ENSG00000146904_14 (sequence is synthesized)
ttttccggtccaggagagcccagcggcagaggcagcagaggcagcgtgaccgcgccaccgatgtggatcgagaggacaagctgtggctgaagccttatgtggacctccaggcatacgagg

SEQ ID NO: 402798 - DNA, 120 bp, Artificial Sequence
  ENSG00000146904_15 (sequence is synthesized)
accctgcacagggagccctggactttacccgggagcttgatccagcgtggctgatggtggacactgtcataggagaaggagagtttggggaagtgtatcgagggaccctgaggctcccca

SEQ ID NO: 402799 - DNA, 120 bp, Artificial Sequence
  ENSG00000146904_16 (sequence is synthesized)
gccaggactgcaagactgtggccattaagaccttaaaagacacatccccaggtggccagtggtggaacttccttcgagaggcaactatcatgggccagtttagccacccgcatattctgc

SEQ ID NO: 402800 - DNA, 120 bp, Artificial Sequence
  ENSG00000146904_17 (sequence is synthesized)
atctggaaggcgtcgtcacaaagcgaaagccgatcatgatcatcacagaatttatggagaatggagccctggatgccttcctgagggagcgggaggaccagctggtccctgggcagctag

SEQ ID NO: 402801 - DNA, 120 bp, Artificial Sequence
  ENSG00000146904_18 (sequence is synthesized)
tggccatgctgcagggcatagcatctggcatgaactacctcagtaatcacaattatgtccaccgggacctggctgccagaaacatcttggtgaatcaaaacctgtgctgcaaggtgtctg

SEQ ID NO: 402802 - DNA, 120 bp, Artificial Sequence
  ENSG00000146904_19 (sequence is synthesized)
actttggcctgactcgcctcctggatgactttgatggcacatacgaaacccagggaggaaagatccctatccgttggacagcccctgaagccattgcccatcggatcttcaccacagcca

SEQ ID NO: 402803 - DNA, 120 bp, Artificial Sequence
  ENSG00000146904_20 (sequence is synthesized)
gcgatgtgtggagctttgggattgtgatgtgggaggtgctgagctttggggacaagccttatggggagatgagcaatcaggaggttatgaagagcattgaggatgggtaccggttgcccc

SEQ ID NO: 402804 - DNA, 120 bp, Artificial Sequence
  ENSG00000146904_21 (sequence is synthesized)
ctcctgtggactgccctgcccctctgtatgagctcatgaagaactgctgggcatatgaccgtgcccgccggccacacttccagaagcttcaggcacatctggagcaactgcttgccaacc

SEQ ID NO: 402805 - DNA, 120 bp, Artificial Sequence
  ENSG00000146904_22 (sequence is synthesized)
cccactccctgcggaccattgccaactttgaccccaggatgactcttcgcctgcccagcctgagtggctcagatgggatcccatatcgaaccgtctctgagtggctcgagtccatacgca

SEQ ID NO: 402806 - DNA, 120 bp, Artificial Sequence
  ENSG00000146904_23 (sequence is synthesized)
tgaaacgctacatcctgcacttccactcggctgggctggacaccatggagtgtgtgctggagctgaccgctgaggacctgacgcagatgggaatcacactgcccgggcaccagaagcgca

SEQ ID NO: 402807 - DNA, 120 bp, Artificial Sequence
  ENSG00000146904_24 (sequence is synthesized)
ttctttgcagtattcagggattcaaggactgatccctcctctcaccccatgcccaatcagggtgcaaggagcaaggacggggccaaggtcgctcatggtcactccctgcgccccttccca

SEQ ID NO: 402808 - DNA, 120 bp, Artificial Sequence
  ENSG00000146904_25 (sequence is synthesized)
caacctgccagactaggctatcggtgctgcttctgcccactttcaggagaaccctgctctgcaccccagaaaacctctttgttttaaaagggaggtgggggtagaagtaaaaggatgatc

SEQ ID NO: 402809 - DNA, 120 bp, Artificial Sequence
  ENSG00000146904_26 (sequence is synthesized)
atgggagggagctgaggggttaatatatatacatacatacacatatatatatttttgtaaataaacaggaactgattttctgcctccatcccacccatgagggctgcaggcactacaaaa

SEQ ID NO: 402810 - DNA, 120 bp, Artificial Sequence
  ENSG00000146904_27 (sequence is synthesized)
agaaaagaaaagggccggaggactggaggggttgctgcctgtcccctggaggagccctgcagtgcatcgggccacagcctgttttctttctacccaggagagtttggggaagtgtatcga

SEQ ID NO: 402811 - DNA, 90 bp, Artificial Sequence
  ENSG00000146904_28 (sequence is synthesized)
aggtagaatcttgaaaagaatttggcgcttgaaggctgggcatggtggcttgtgcctgtaattccagtgctttgggaaaccgatgtggga

SEQ ID NO: 402812 - DNA, 75 bp, Artificial Sequence
  ENSG00000146904_29 (sequence is synthesized)
gcctgggcaacatagcaaaacttcatctctgcaaaaaattaaaaatcacctgggcatggtggcccatacctgtag

SEQ ID NO: 402813 - DNA, 84 bp, Artificial Sequence
  ENSG00000146904_30 (sequence is synthesized)
cagaaaaaaagaacagtgtggcattggaaatcagaagggctggatttgagtatcttttctgctgtgccgtgactttgggggtgt

SEQ ID NO: 402814 - DNA, 120 bp, Artificial Sequence
  ENSG00000146904_31 (sequence is synthesized)
gaaaggcctagttgctaaatggagactttctcccacctcagcccaaacaggagtcaccttgggaaacagggaggtgtggagaagtgtgtggtccgctgctggcccttctcctgaccccca

SEQ ID NO: 402815 - DNA, 120 bp, Artificial Sequence
  ENSG00000146904_32 (sequence is synthesized)
aagagcacgtgaccgtccagggggaagcagccattgtcatctgcctcaatcgacaggggcttcccgcagtcctgggaagaaggaagggtgaggggcactggaccggaaggcccctgctct

SEQ ID NO: 402816 - DNA, 120 bp, Artificial Sequence
  ENSG00000146904_33 (sequence is synthesized)
gctccaccctaccccaccccatccagctccatcttggaattagaaagatgcttcatggctcagagctggtgtcatcgctttttccagccacacccaactccccatccctatcctacttcc

SEQ ID NO: 402817 - DNA, 120 bp, Artificial Sequence
  ENSG00000146904_34 (sequence is synthesized)
agtcacccactaggaccttcctgcaagagggcaagcagtgggtagagctgctcccaaggtgcttgctcccctgcccaccaccaccctaataaaatagaggttggctcacctccattcgaa

SEQ ID NO: 402818 - DNA, 120 bp, Artificial Sequence
  ENSG00000146904_35 (sequence is synthesized)
agcatggggcatgcaggtgagaggctgagaggggctgggacagggacctggtggagacagaagggcttaagaccacagaacaaactgatgggcaggaagccatagaaaagttactaaggt

SEQ ID NO: 402819 - DNA, 120 bp, Artificial Sequence
  ENSG00000146909_0 (sequence is synthesized)
agtcgtgcgtccacgcgtttcgaaagatggcggcgtccaggagcgcgggagaggccggcccgggcggctcccagggacgcgtggtccgcatgaagcgcagaggcgggcgcgggccgcgcc

SEQ ID NO: 402820 - DNA, 120 bp, Artificial Sequence
  ENSG00000146909_1 (sequence is synthesized)
gcggtcctgctggcggtggggagaaggccctgaagaggctgaagctagcggtggaggagttcgtgcacgcgacttcggaaggcgaggctcccgggggttgcgaggggcgcggcgccccgg

SEQ ID NO: 402821 - DNA, 120 bp, Artificial Sequence
  ENSG00000146909_2 (sequence is synthesized)
tgagctttcgcccgggagggagaaaaagccgtaaggaactgaggaaggagaagcggcacctgcggaaagcacgccggctgcagaggacggcgggccccgaacagggtcccggcctgggag

SEQ ID NO: 402822 - DNA, 120 bp, Artificial Sequence
  ENSG00000146909_3 (sequence is synthesized)
gccgaagcggagccgaagaagccagcggtcaccggcaggacacggaggagcgcgcccgcccagcccctagtcgggacccctcgcctcccaggaagccgcggccgtcccgggtcaaggcca

SEQ ID NO: 402823 - DNA, 120 bp, Artificial Sequence
  ENSG00000146909_4 (sequence is synthesized)
aggccacggccgccaccgcaaagaccagaccctccgcagccgccaccgccgctgcccggaaacgggcgcttttagcggcgaacgaggaggaggaccgagagatccgaaagctggagcgtt

SEQ ID NO: 402824 - DNA, 120 bp, Artificial Sequence
  ENSG00000146909_5 (sequence is synthesized)
gcctcggtttgaacaagcgcaaaaagaaggacggcagcagctccgtgccgctgagctttgcacgcgacggtcttgactatattctgggagccctggagtctgggaaaaatagcggcttgt

SEQ ID NO: 402825 - DNA, 120 bp, Artificial Sequence
  ENSG00000146909_6 (sequence is synthesized)
acgacagcagtggtgaggaggaggaagatgccggacagacactccccgaaagtgacttagagagtgactcccaggacgaaagtgaggaggaggaggagggagacgtagaaaaggaaaaga

SEQ ID NO: 402826 - DNA, 120 bp, Artificial Sequence
  ENSG00000146909_7 (sequence is synthesized)
aggcgcaggaagcagaagcgcagagcgaggacgacgacgaggatacagaagaggaacagggggaagaaaaggaaaagggagcgcaggagaaaaggagggggaagagagtccgttttgcag

SEQ ID NO: 402827 - DNA, 120 bp, Artificial Sequence
  ENSG00000146909_8 (sequence is synthesized)
aagatgaagaaaagagtgaaaattcctcggaggacggtgacataacggataagagtctttgtggaagtggtgaaaagtacatcccacctcatgtgaggcaagctgaggagacagtggact

SEQ ID NO: 402828 - DNA, 120 bp, Artificial Sequence
  ENSG00000146909_9 (sequence is synthesized)
tcaagaaaaaggaagaactagaaaggctgaagaaacatgtaaaaggtctacttaacaggttgagtgaacccaacatggcttccatcagtgggcagctggaggaactgtacatggcccaca

SEQ ID NO: 402829 - DNA, 120 bp, Artificial Sequence
  ENSG00000146909_10 (sequence is synthesized)
gcagaaaggacatgaatgacaccctgacctccgctctcatgggtgcctgcgtcactgcctcggccatgcccagcagactgatgatggagcatgttctcttagtcagcatccttcaccaca

SEQ ID NO: 402830 - DNA, 120 bp, Artificial Sequence
  ENSG00000146909_11 (sequence is synthesized)
cagttggaatcgaggtcggtgcccactttctggaggcagtggtgaggaagttcgatgccatctataaatacggaagcgaagggaaagagtgtgacaacctgttcaccgtcattgcccatt

SEQ ID NO: 402831 - DNA, 120 bp, Artificial Sequence
  ENSG00000146909_12 (sequence is synthesized)
tatacaacttccacgtggtacagtctctcctcatcttcgacattttgaaaaaactgattggaactttcaccgaaaaagatattgaactgatcttgttaatgctgaaaaacgtgggttttt

SEQ ID NO: 402832 - DNA, 120 bp, Artificial Sequence
  ENSG00000146909_13 (sequence is synthesized)
cattgaggaaagatgatgctttatcacttaaggaattgatcactgaagcccagaccaaagccagcggggcaggcagcgagtttcaggaccagaccaggattcggtttatgctagagacga

SEQ ID NO: 402833 - DNA, 120 bp, Artificial Sequence
  ENSG00000146909_14 (sequence is synthesized)
tgttggccctgaagaacaatgacatgcgcaaaattccaggctatgaccccgagcccgtggagaagctgaggaaactgcagagagctttggtccgcaacgccggctcaggttctgagacgc

SEQ ID NO: 402834 - DNA, 120 bp, Artificial Sequence
  ENSG00000146909_15 (sequence is synthesized)
agcttcgcgtctcctgggacagtgtcttgagtgcggagcagacgggtcgctggtggattgtggggtccgcctggagtggggccccgatgatcgacaacagtcaccatacgcacctgcaga

SEQ ID NO: 402835 - DNA, 120 bp, Artificial Sequence
  ENSG00000146909_16 (sequence is synthesized)
agcagcttgtggggacggtcagttcaaagatcctagaactcgcccggaagcagaggatgaacacagacatccggagaaacatattctgcacaataatgacaagtgaagattttttggatg

SEQ ID NO: 402836 - DNA, 120 bp, Artificial Sequence
  ENSG00000146909_17 (sequence is synthesized)
cttttgaaaagcttctgaagcttggacttaaggatcagcaggagagagaaatcattcacgttctcatggattgctgccttcaagagaaaacttacaatcccttctatgctttcctggcta

SEQ ID NO: 402837 - DNA, 120 bp, Artificial Sequence
  ENSG00000146909_18 (sequence is synthesized)
gcaaattctgtgaatatgaaaggagatttcagatgactttccagttcagcatatgggacaaatttcgggacttggaaaacttgccagctacgaatttctctaatttggttcatctggtgg

SEQ ID NO: 402838 - DNA, 120 bp, Artificial Sequence
  ENSG00000146909_19 (sequence is synthesized)
cccacttgttgaagacaaaatcgctttccctttccatcttaaaggtagttgaattcagtgaattggacaaacccagagtccgttttttacgaaaagtattaagtatcctattaatggaaa

SEQ ID NO: 402839 - DNA, 120 bp, Artificial Sequence
  ENSG00000146909_20 (sequence is synthesized)
cagaagttgaagacctcagtttaattttcacaagagtatctgacaacccaaagctgggggtgttacgtgagggtttgaagcttttcatcagccacttcttgctaaagaacgcacaggccc

SEQ ID NO: 402840 - DNA, 120 bp, Artificial Sequence
  ENSG00000146909_21 (sequence is synthesized)
acagaagcgccgacgaagccaacgtgctgagagagaaagctgaccttgcaacgaagtgtctgcaaggaaaagcttccctgagaatgtagtcagggaaggaaggagggcaggtggcccttt

SEQ ID NO: 402841 - DNA, 120 bp, Artificial Sequence
  ENSG00000146909_22 (sequence is synthesized)
gactgtaaaatgtccttggtaaacccaaaggcttattctgttgcctgcgtgtgaatgtttggtagagctatatcattgtctgttaatgtattatattttgagattttttttgatctaagg

SEQ ID NO: 402842 - DNA, 120 bp, Artificial Sequence
  ENSG00000146909_23 (sequence is synthesized)
ttttattgtttgtatttcaagccattttcaaataactatcttgggggtgagaggagaaggagggagggaaaaggggtcaggcacactggacagggttctctaagcagtgaggctggtgtg

SEQ ID NO: 402843 - DNA, 86 bp, Artificial Sequence
  ENSG00000146909_24 (sequence is synthesized)
gcacactggacagggttctctaagcagtgaggctggtgtgtatgattgtcttaaaattttttaatagatatggccgagcgaggcca

SEQ ID NO: 402844 - DNA, 78 bp, Artificial Sequence
  ENSG00000146909_25 (sequence is synthesized)
tggacagtgagacttttgacagtgagactgtcaaaaaaaaaaaaaaaattaatagataaaacaggccactagagggtg

SEQ ID NO: 402845 - DNA, 120 bp, Artificial Sequence
  ENSG00000146909_26 (sequence is synthesized)
aaaaaaaaaattaatagataaaacaggccactagagggtgcagttataaagaaattgatgaggtttttacctttttaaaatattggttagaagttcaaaaaccatcccttaaaggtgatt

SEQ ID NO: 402846 - DNA, 82 bp, Artificial Sequence
  ENSG00000146909_27 (sequence is synthesized)
tattggttagaagttcaaaaaccatcccttaaaggtgagtggagtgcagtgtcctgtaatctcagctcactgcaacctctac

SEQ ID NO: 402847 - DNA, 120 bp, Artificial Sequence
  ENSG00000146909_28 (sequence is synthesized)
tacaggcttgagccaccacgcccagcttaaatgtgattcttgatactgttttaagtatttaggttgcaattaactttggcaaagtcagtcgacataagccctgtggatatggccttatgt

SEQ ID NO: 402848 - DNA, 120 bp, Artificial Sequence
  ENSG00000146909_29 (sequence is synthesized)
ctgtggatatggccttatgtacactgtaatgcagacaggtgcttttcatcattcatgtaacattctcacacagttgaggatattcatctcctcaccaattccagattgtaaatgtaccat

SEQ ID NO: 402849 - DNA, 120 bp, Artificial Sequence
  ENSG00000146909_30 (sequence is synthesized)
cttaaacaactctgaggtcaccaaacagtagttatttgactgttaataggtgctacttgcttgcaaggatttggagatgtaaacatgaagaaaatatagttactgcctgcaaagaattaa

SEQ ID NO: 402850 - DNA, 120 bp, Artificial Sequence
  ENSG00000146909_31 (sequence is synthesized)
catccgtctagtgggagaaacaaacacaccccactcactaagtatggaaaactgattctgggaggaagcagaaatgtccctagataacagcatgtattgcagatacccaaatgtttattg

SEQ ID NO: 402851 - DNA, 120 bp, Artificial Sequence
  ENSG00000146909_32 (sequence is synthesized)
ttttctcagcccttcaattttgcttttctctctcaaatgctacagactcaatttaaatcttacctttgattgttgaaaaaagtcactaagatgtgaatacagaatagacattgagaggtt

SEQ ID NO: 402852 - DNA, 120 bp, Artificial Sequence
  ENSG00000146909_33 (sequence is synthesized)
atatatgtccaaaactcatctgtccagcagtcaccgtcctcttcagagtggtcacgttgggcagatgggcacaggtgctggtgatgcctctcctgggcaaaacgccccatttgtggcact

SEQ ID NO: 402853 - DNA, 120 bp, Artificial Sequence
  ENSG00000146909_34 (sequence is synthesized)
ttcagatactatttatttactttttaagagagagacaggctcactctgtcacccaggccagagtgcagtggcacgatcatagttaccgcagcatcaaattcctggactgaagcggtcctt

SEQ ID NO: 402854 - DNA, 120 bp, Artificial Sequence
  ENSG00000146909_35 (sequence is synthesized)
ttgcctcagcctcgcggatagctaggaccacaagcagtagagacaagatctccgtatgttatacaggctggcctcaagtgatcctcttaccttggcctcccaaacaccgggattataggc

SEQ ID NO: 402855 - DNA, 120 bp, Artificial Sequence
  ENSG00000146909_36 (sequence is synthesized)
gtgagcccccgtgcctggcctcaaattttattttagctcgaccctatggcagtttgtgtttggaaatcgtgatgtgaagtcatcagtatctgtgcatatccctaaactaatggtttaagc

SEQ ID NO: 402856 - DNA, 120 bp, Artificial Sequence
  ENSG00000146909_37 (sequence is synthesized)
tttgaagcatgcgcaagcaacatgaacaactgaatacagaaagtaactgaaagcagcacagagactgtgtcgtccctacagacttctaaccctgcattcagcaacatcattcgacccgaa

SEQ ID NO: 402857 - DNA, 120 bp, Artificial Sequence
  ENSG00000146909_38 (sequence is synthesized)
gccagattcaaaccctatgtcttctagcaggttctgaatttagaggacaaataaggtgacaggtactaagagaagagtgaattaagtgaaaatcttccctttgttaaggagctttttaac

SEQ ID NO: 402858 - DNA, 120 bp, Artificial Sequence
  ENSG00000146909_39 (sequence is synthesized)
aagagtgtctttgctgggtggtgattgggatgtaacagatcagttctactggacttgtagcttgatagtgaaataaggagcttgggctaaggtataaatcaacacactgcttccttcctc

SEQ ID NO: 402859 - DNA, 120 bp, Artificial Sequence
  ENSG00000146909_40 (sequence is synthesized)
cagaaggtcttactgtgaaggaaaaaatgtcagttgaactaaattgtgcttcacgcctcggtagatttgcattctgatgcaagcccccaacctcacggaccaagaggatccctggctgcc

SEQ ID NO: 402860 - DNA, 120 bp, Artificial Sequence
  ENSG00000146909_41 (sequence is synthesized)
tgtgaatggcccacatttgagtggtgctaacttgatgtgagtaggcattaattatgggtgcggctactaagatgggaaaaactatcacgacagtggcaccacctgatttcatgatgtacc

SEQ ID NO: 402861 - DNA, 120 bp, Artificial Sequence
  ENSG00000146909_42 (sequence is synthesized)
atatgcagtaacccatgtttgaggtacagaattgaagctgatttttctgcaaaagatgaatttctataaacaatcccatttttatattttattattaaaacaaaaatacctctctttgct

SEQ ID NO: 402862 - DNA, 120 bp, Artificial Sequence
  ENSG00000146909_43 (sequence is synthesized)
tgctagagagttatatgtatgacttaaattattagctatggtttgcatttagtacatggcagattgcctgtaagtctgttcattttaacaacatacagggctgggcacggtggctcacgc

SEQ ID NO: 402863 - DNA, 120 bp, Artificial Sequence
  ENSG00000146909_44 (sequence is synthesized)
gaaactctcaaaagcagaaacaaaaacccaacatatatgggctgttagatagtaattgtaatttcgtataaatagtaaatgagtacatcttgattaaaagctatgaattcagaattgctt

SEQ ID NO: 402864 - DNA, 120 bp, Artificial Sequence
  ENSG00000146909_45 (sequence is synthesized)
ttaaatatatagggggttttttgaaatttattacagtgcaattgaaaatacacttaaaatactgcaggatgcttagtgctcagtgttatgtatgaacttgtggactttacaatgcaggtt

SEQ ID NO: 402865 - DNA, 120 bp, Artificial Sequence
  ENSG00000146909_46 (sequence is synthesized)
gagaactgctaatgtatagaatgactaaacagctgtctttcagggtatcatttttaaaggtataaggaacaaactttaatgtattgaaatgcataaataaaatttattttttatattttg

SEQ ID NO: 402866 - DNA, 120 bp, Artificial Sequence
  ENSG00000146909_47 (sequence is synthesized)
ctgatgctgcctagggaggactgggctgttctcatgaccatccgctcacgctgttggattcgtgcatctctgggttagtcgtcatgttcctattaatttgcctctagtagttcctcatta

SEQ ID NO: 402867 - DNA, 120 bp, Artificial Sequence
  ENSG00000146909_48 (sequence is synthesized)
gctcgcctctaaccagacccttccaggcgggaagatgttcccctgaaaggtatcagccattaaactttggaagtcgagtgatgttccagtcattgctgttctgttttctaggcttggact

SEQ ID NO: 402868 - DNA, 120 bp, Artificial Sequence
  ENSG00000146909_49 (sequence is synthesized)
ctggctttacctggagcagctctcttactgttcttgaatggtcactgaaatgtacaaggtttatctggaggccttacagaaattgctattaatattacattgtgatataattattccatt

SEQ ID NO: 402869 - DNA, 120 bp, Artificial Sequence
  ENSG00000146909_50 (sequence is synthesized)
tctgttgtatctttttattggactttaaaagatctaaaagttgaatggcacggggcaggggagcgcatgaggacctgaacgctcacggggcaggagtccgttgctgagacccctcaggct

SEQ ID NO: 402870 - DNA, 120 bp, Artificial Sequence
  ENSG00000146909_51 (sequence is synthesized)
gaaattcaagcccatttttcatccagacttccctcgttatcccctcatgtccttccctgtcccagattctgtgtcactcatggtcacggtttcccaggctctgccagtgactggttctct

SEQ ID NO: 402871 - DNA, 120 bp, Artificial Sequence
  ENSG00000146909_52 (sequence is synthesized)
gttttattcatcgtcgcttgccctgaggttgaaccacgactgagaagcctcccacatgagtgttttctcccccagcggctgtggcttcactatgtgttccccttgcacagaggggcgttg

SEQ ID NO: 402872 - DNA, 120 bp, Artificial Sequence
  ENSG00000146909_53 (sequence is synthesized)
cccgagagtggacttggtgccatccgcccacgtagacctcacagttctattcagtgacactgaagtacagtttggcacctctcgggaggcagtttgcatggagacatgcgtatgacttgt

SEQ ID NO: 402873 - DNA, 120 bp, Artificial Sequence
  ENSG00000146909_54 (sequence is synthesized)
cttttgggaatggaggtaatttatggttcagttctagatactgaatttctgattcataaggtgtatgacccgggaattccacttacactgctgagttgttctcaacggtggctgtggccg

SEQ ID NO: 402874 - DNA, 120 bp, Artificial Sequence
  ENSG00000146909_55 (sequence is synthesized)
gccacacctctgccagcagtgtgtaggaattcccaaggcccacatccttgccaacaggtgttcatttcttagctctggaaatagcttcttaaatcgggtagagtgggggaaggggggaga

SEQ ID NO: 402875 - DNA, 120 bp, Artificial Sequence
  ENSG00000146909_56 (sequence is synthesized)
ttaatttttactctaattaactatattacaaatcattgaaaaagttggctaaatcagtgtaactttatttttctccatgtcctgaccattaggtagttgaattcagtgaattggacaaac

SEQ ID NO: 402876 - DNA, 120 bp, Artificial Sequence
  ENSG00000146910_0 (sequence is synthesized)
agactctgtctcaaaaaataaataaatgaataaataggaaagcacatttgaaggctgcacatggtggctgatacttgtaatcccagcaattcaggaggccaagcgtgcagggcgctgatg

SEQ ID NO: 402877 - DNA, 120 bp, Artificial Sequence
  ENSG00000146910_1 (sequence is synthesized)
aggaggccaagcgtgcagggcgctgatggacgagatagagcacgacatcaccaaggctcggcagaagaagaccaaggtgggatccttccgaatcaatcccgatgggactcaggagaggag

SEQ ID NO: 402878 - DNA, 120 bp, Artificial Sequence
  ENSG00000146910_2 (sequence is synthesized)
aaagatccccctagctcagtcggaggcgttcctaacggatcttttggagaaagtctgtgagcgaatgaacgactacaagcttgaggaagaccctgtgacgaaggagagaactttcaagag

SEQ ID NO: 402879 - DNA, 120 bp, Artificial Sequence
  ENSG00000146910_3 (sequence is synthesized)
attcgctcctaggaaaggagacaaaatataccaagaatttaaaaaattgtatttttattctgatgcttacagacctttgaaatttgcgtgtgaaactataatagaagagtatgaagatga

SEQ ID NO: 402880 - DNA, 120 bp, Artificial Sequence
  ENSG00000146910_4 (sequence is synthesized)
aatatcctcacttatcgcccaggagacacactatctagctgacaagctgtgcagtgaaaaatcagatctgtgtgaaacttctgctaatcatactgagctctaggagtgccgttctgctgg

SEQ ID NO: 402881 - DNA, 120 bp, Artificial Sequence
  ENSG00000146910_5 (sequence is synthesized)
tcgtagagaggagtaaagtcacacccaaaggtcaatgtctgcattttatgtttgcatgttgtctttcatgataagaaaaattttgtctcttgtttataccgtgtttgtctccgtttatga

SEQ ID NO: 402882 - DNA, 120 bp, Artificial Sequence
  ENSG00000146910_6 (sequence is synthesized)
acttaaattaacctttgcagattttgataaatcaagcttgacaatagaggatttaattctgtattgaggaaaaaagcgaagacatttcataaacaaaatagggatttcataatgtatgct

SEQ ID NO: 402883 - DNA, 120 bp, Artificial Sequence
  ENSG00000146910_7 (sequence is synthesized)
gcttattttataacagtgtatgtgcacatatgcaagcgcagtggctgtctgataagaactggatttgaatcctcaaatacttgattgcctataaatttaaggaaatacatggcaacaaat

SEQ ID NO: 402884 - DNA, 120 bp, Artificial Sequence
  ENSG00000146910_8 (sequence is synthesized)
tcaaaatgtggccttctgggtgagatatggctattagtgaaagaaacccactttttatcaggaatgaaattaaaatttttagaaaccacaagtttaaaaacccatctctaaaatttagtg

SEQ ID NO: 402885 - DNA, 120 bp, Artificial Sequence
  ENSG00000146910_9 (sequence is synthesized)
gaatgtgtaaaaactaatgaatgctttaatttatagtaaacaataattatattggcctctcaaacaccattctgagtttaagtggcttagaaagttgatttattattgcatcaggtgtta

SEQ ID NO: 402886 - DNA, 120 bp, Artificial Sequence
  ENSG00000146910_10 (sequence is synthesized)
aaagatgacactagtgattgcgttttgtttcgctccaaactcttctggcttgtttgtttttcttctaaacgttttttttttggctcacatttagtgtgttgagtttactactaaataatc

SEQ ID NO: 402887 - DNA, 120 bp, Artificial Sequence
  ENSG00000146910_11 (sequence is synthesized)
taccattcttctacaggaatggaaaaagagttgggacctggtgggaaattatcttttggccacacttaatatacaaagtctagtaacaatcactcccggaaatttctttatctctgttac

SEQ ID NO: 402888 - DNA, 120 bp, Artificial Sequence
  ENSG00000146910_12 (sequence is synthesized)
atttgcattcaatggaatctgactttaatgattaaaaatgtcagggtatggtctacaccagtttctaaaaagagattctcattgtctttggtgacaatcaagtgggtaggatgctacaaa

SEQ ID NO: 402889 - DNA, 120 bp, Artificial Sequence
  ENSG00000146910_13 (sequence is synthesized)
ggggctcgatctgcctccgcgccagctggccgcgcgcccctgcccagcaccctcctgccggctgccgccctgaatcgctgcccggcgctctgagcatcgtggcatgtcctggggtctctg

SEQ ID NO: 402890 - DNA, 120 bp, Artificial Sequence
  ENSG00000146910_14 (sequence is synthesized)
ggccgggagtagctttgctgagagaaccctgattttgttcagctttgccaagagctgcagaggactggctggcccttcccagcccctgagggtgcggccccattggcctcagccaaacac

SEQ ID NO: 402891 - DNA, 120 bp, Artificial Sequence
  ENSG00000146910_15 (sequence is synthesized)
catcattgcgtctccacgccaggacgggggctgggccaggctgcgggacagctttggccaatgggagcgggaaggggcttgcgggggtgtcaggcaacgttttccttacaaatggaagtt

SEQ ID NO: 402892 - DNA, 120 bp, Artificial Sequence
  ENSG00000146910_16 (sequence is synthesized)
gacagggcagtagtgatcctccacacctccagatgtagggctctgagggtttgaagcttagaaccgcggacaccatctgacatccctgtgggaagaccaagaacgttgcagagaggtgga

SEQ ID NO: 402893 - DNA, 120 bp, Artificial Sequence
  ENSG00000146910_17 (sequence is synthesized)
gacagagtcaggaggtgcctgaggggctgaggccaccagtgctgacgagccaacctgtggacgtcttgccctgtggacatgagatttccccttactgctggttatggcttaattgtgtct

SEQ ID NO: 402894 - DNA, 120 bp, Artificial Sequence
  ENSG00000146910_18 (sequence is synthesized)
gccccaaattcatgtgaaattcctaacccctaatgtgactgtgtgtgaagatgggcccagtgacctctaaagaggtcattaaggtaacatgggatcttggggtgggccctttagacaagg

SEQ ID NO: 402895 - DNA, 120 bp, Artificial Sequence
  ENSG00000146910_19 (sequence is synthesized)
cccatattaaacttatgactggtgtccttataagaagagaagattaggacacagacacacacagagggacggccacgtgaggacatagggagaagacagctgtctgcaagtcaaggaggg

SEQ ID NO: 402896 - DNA, 120 bp, Artificial Sequence
  ENSG00000146910_20 (sequence is synthesized)
gagaggagtaaagtcacacccaaaggtttcagatgaggaaaccaaggcccagagaggaaaaggcacagcaggcatgacaccagtgccatcggtgtttgcttcacccttgcagattacgag

SEQ ID NO: 402897 - DNA, 120 bp, Artificial Sequence
  ENSG00000146910_21 (sequence is synthesized)
gttacttagttgcttaaaaagcacattatgtgtttaaatcattctcctgactcttcagcaggaaacaattcttaaatttaggaaaatttaccaaagctaaggggaagggctttccatgcc

SEQ ID NO: 402898 - DNA, 120 bp, Artificial Sequence
  ENSG00000146910_22 (sequence is synthesized)
ccctccccacctaaactctgattaaaagttagtgagttaatgtcacttaattacttgggtgcttcttttttgtcttgtctgtggctgcttaagtctgatggctcctacataacccagcga

SEQ ID NO: 402899 - DNA, 120 bp, Artificial Sequence
  ENSG00000146910_23 (sequence is synthesized)
actcgcacccgagctgacacacgatggaaatagaactgaataataattaacactattttccagtagggtaggacaattgttatttaaaacatagtccctatagctttatttaaacgtatc

SEQ ID NO: 402900 - DNA, 120 bp, Artificial Sequence
  ENSG00000146910_24 (sequence is synthesized)
tagttaaggttaatttggcatttaaagtagtaaatcaggaacattctcctaacttggattttcttgggaaatgcactaaacaggacaattattcctgaaaacctagtgaccttcacagga

SEQ ID NO: 402901 - DNA, 120 bp, Artificial Sequence
  ENSG00000146910_25 (sequence is synthesized)
acatggcgggacctgtgacactaagtaagcttcagtgaaaactgttcacggtcgtaaccgtagaagtgttgccaaatctgtttccatactctctttgatcatcatcaaacattctcaaat

SEQ ID NO: 402902 - DNA, 120 bp, Artificial Sequence
  ENSG00000146910_26 (sequence is synthesized)
gtaggcaatgctaacactaattatagaaattaagaaaatgtgggctcctgtttgtaactaaacggacgtggggaggtgcacctcctgtcactgaggggtgcctttcatggacagtgatgc

SEQ ID NO: 402903 - DNA, 120 bp, Artificial Sequence
  ENSG00000146910_27 (sequence is synthesized)
tttgctttgaatggagagggcgaggaaccttgacttacagtgactatctaaggttgtgataaatatggcatttcaggtttttttcttggatttcccattaaaaatagtcttgtatcttgc

SEQ ID NO: 402904 - DNA, 120 bp, Artificial Sequence
  ENSG00000146918_0 (sequence is synthesized)
gagggcggggcccgtctggggcgccggcgggtgcgtttgaatctggtccgagcgcgggaaacggcgggtccccgagcccagggttacaaaataaatgccatttgaacagtgccatctgtc

SEQ ID NO: 402905 - DNA, 120 bp, Artificial Sequence
  ENSG00000146918_1 (sequence is synthesized)
atggaaaaacgtgagacgtttgtacaagccgtgtctaaggagctggttggagagtttttgcaatttgttcaacttgataaagaggcctctgatcctttcagcctaaatgaattactagat

SEQ ID NO: 402906 - DNA, 120 bp, Artificial Sequence
  ENSG00000146918_2 (sequence is synthesized)
gaattatcaaggaaacagaaagaagaattatggcaaaggctgaagaatttattgacagatgtgttgttagaaagcccagtggatgggtggcaggtagtggaagcccagggtgaagacaat

SEQ ID NO: 402907 - DNA, 120 bp, Artificial Sequence
  ENSG00000146918_3 (sequence is synthesized)
atggaaaccgaacatggctcaaaaatgagaaaaagcatagaaataatttatgcaattacatctgtgattcttgcttctgtgtctgtaataaatgaaagtgagaactacgaagccctactg

SEQ ID NO: 402908 - DNA, 120 bp, Artificial Sequence
  ENSG00000146918_4 (sequence is synthesized)
gaatgtgttattatattaaatggtattttatatgcattacctgagtctgaacgaaaactacagagttctattcaggatttgtgtgttacctggtgggagaaaggcctgcctgccaaggaa

SEQ ID NO: 402909 - DNA, 120 bp, Artificial Sequence
  ENSG00000146918_5 (sequence is synthesized)
gacacaggaaagacagcctttgtcatgttactaaggaggagtctggagactaagacaggtgcagacgtatgtcggctttggcgtatccatcaagctttatattgctttgattatgatttg

SEQ ID NO: 402910 - DNA, 120 bp, Artificial Sequence
  ENSG00000146918_6 (sequence is synthesized)
gaggaaagtggagaaattaaagatatgttacttgagtgcttcataaatattaattatatcaagaaagaagagggaagaagatttcttagttgtctcttcaactggaatatcaacttcatc

SEQ ID NO: 402911 - DNA, 120 bp, Artificial Sequence
  ENSG00000146918_7 (sequence is synthesized)
aaaatgatccacgggaccattaaaaaccagttacagggattacaaaagtctttgatggtatacattgcagaaatttatttcagagcttggaaaaaggcttcagggaaaatactggaggcg

SEQ ID NO: 402912 - DNA, 120 bp, Artificial Sequence
  ENSG00000146918_8 (sequence is synthesized)
attgaaaatgattgcatccaggacttcatgttccacgggatacaccttccgaggaggtctccagtgcattccaaagtgcgggaggttctgagttactttcaccatcaaaagaaagttcgg

SEQ ID NO: 402913 - DNA, 120 bp, Artificial Sequence
  ENSG00000146918_9 (sequence is synthesized)
cagggagtggaagagatgctttatagattatataagcccatcctttggagaggattaaaggccagaaactctgaagttcgatcaaatgctgcattgttgtttgttgaagcatttcctatt

SEQ ID NO: 402914 - DNA, 120 bp, Artificial Sequence
  ENSG00000146918_10 (sequence is synthesized)
agggatccaaaccttcatgctattgaaatggatagtgaaatccagaaacagtttgaagagctctatagccttttagaagatccttacccgatggtccgttccacagggatccttggtgtt

SEQ ID NO: 402915 - DNA, 120 bp, Artificial Sequence
  ENSG00000146918_11 (sequence is synthesized)
tgtaaaataacttctaagtactgggaaatgatgcccccgaccattcttattgacctcctgaagaaggtgactggggaactggcatttgacacgagctcagctgatgttcgttgttctgtc

SEQ ID NO: 402916 - DNA, 120 bp, Artificial Sequence
  ENSG00000146918_12 (sequence is synthesized)
tttaagtgtctgccaatgattttggacaacaaactgagccacccattgttagagcagctccttccagctctcagatacagtctccacgacaattcggagaaagtgagggtagcttttgtg

SEQ ID NO: 402917 - DNA, 120 bp, Artificial Sequence
  ENSG00000146918_13 (sequence is synthesized)
gacatgctgttgaagatcaaagctgtgagggctgctaagttttggaaaatatgtcccatggagcacattctggttcgtctggaaactgattctcgacctgtgtctcggcgcctggtgagc

SEQ ID NO: 402918 - DNA, 120 bp, Artificial Sequence
  ENSG00000146918_14 (sequence is synthesized)
ctcatctttaattctttcctgcctgtgaatcagccggaggaggtctggtgcgagcgctgtgtcaccctggtgcagatgaaccacgccgctgccaggaggttctatcagtacgcccacgaa

SEQ ID NO: 402919 - DNA, 120 bp, Artificial Sequence
  ENSG00000146918_15 (sequence is synthesized)
cacaccgcctgcaccaacatagcaaagctgattcacgttattcgtcattgcttaaatgcctgtatccagagggcagtgagagagcctccagaggacgaggaggaagaggacggaagggag

SEQ ID NO: 402920 - DNA, 120 bp, Artificial Sequence
  ENSG00000146918_16 (sequence is synthesized)
gaaaagtattgacagaagtatggaaaataataaagaggccaaactttacacgattaacaagtttgcctctgtgcttccagagtatctgaaagtatttaaggatgatcgctgcaagatccc

SEQ ID NO: 402921 - DNA, 120 bp, Artificial Sequence
  ENSG00000146918_17 (sequence is synthesized)
tttattcatgctaatgtcctttatgccggcctctgctgtccccccattcagctgtggtgtgatttccacgctgagaagccgggaggagggcgctgtggacaagagctactgcactttgtt

SEQ ID NO: 402922 - DNA, 120 bp, Artificial Sequence
  ENSG00000146918_18 (sequence is synthesized)
ggattgcctctgctcctgggggcaggtggggcacattctggagcttgttgacaactggctgcccacagagcatgcccaggccaagagcaacacagcttctaaaggtagggtgcagatcca

SEQ ID NO: 402923 - DNA, 120 bp, Artificial Sequence
  ENSG00000146918_19 (sequence is synthesized)
tgacacacgcccagtcaaacctgaattggcattggtctacattgagtatctgctgactcatccaaagaaccgcgagtgcttgctctctgctcctcggaagaaacttaaccatcttttgaa

SEQ ID NO: 402924 - DNA, 120 bp, Artificial Sequence
  ENSG00000146918_20 (sequence is synthesized)
agcccttgaaacgtcaaaggcagatctggagtcacttctgcagacaccgggtgggaagcctcgtggcttcagtgaagcagctgccccgcgagcctttggtctccactgtcgcctgagcat

SEQ ID NO: 402925 - DNA, 120 bp, Artificial Sequence
  ENSG00000146918_21 (sequence is synthesized)
ccatcttcagcacaagttctgctcagaaggaaaggtgtatttgtccatgttggaagacactggcttttggttagaaagcaaaattttatcttttattcaagatcaagaagaagactacct

SEQ ID NO: 402926 - DNA, 120 bp, Artificial Sequence
  ENSG00000146918_22 (sequence is synthesized)
gaagcttcatagggtcatttatcagcaaattatccagacctacctgactgtgtgtaaagatgttgttatggtaggccttggtgaccatcagtttcagatgcaactcttacagcggagtct

SEQ ID NO: 402927 - DNA, 120 bp, Artificial Sequence
  ENSG00000146918_23 (sequence is synthesized)
tggaatcatgcaaacagtgaagggatttttttatgtttcattacttcttgacattctgaaagagataactggaagttccttgattcagaaaacagattcagatgaagaagttgcaatgct

SEQ ID NO: 402928 - DNA, 120 bp, Artificial Sequence
  ENSG00000146918_24 (sequence is synthesized)
gttggacacagtccagaaagtatttcagaaaatgttggaatgtattgcacggagcttcaggaagcagccggaagaaggcctgcggctgctttattctgttcagaggcctcttcatgagtt

SEQ ID NO: 402929 - DNA, 120 bp, Artificial Sequence
  ENSG00000146918_25 (sequence is synthesized)
cattactgctgttcagtctcggcacacagacacccctgtgcaccggggtgtactttctactctgatcgctgggcctgtggttgagataagtcaccagctacggaaggtttctgacgtaga

SEQ ID NO: 402930 - DNA, 120 bp, Artificial Sequence
  ENSG00000146918_26 (sequence is synthesized)
agagcttacccctccagagcatctttctgatcttccaccattttcaaggtgtttaataggaataataataaagtcttcgaatgtggtcaggtcatttttggatgaattaaaggcatgtgt

SEQ ID NO: 402931 - DNA, 120 bp, Artificial Sequence
  ENSG00000146918_27 (sequence is synthesized)
ggcttctaatgatattgaaggcattgtgtgcctcacggctgctgtgcatattatcctggttattaatgcaggtaaacataaaagctcaaaagtgagggaggttgcagccactgttcacag

SEQ ID NO: 402932 - DNA, 120 bp, Artificial Sequence
  ENSG00000146918_28 (sequence is synthesized)
aaaactaaagacattcatggaaattactttggaagaggatagcattgaaagatttctctatgaatcatcatcaagaactctgggagaacttttgaattcataaccaagccaacatctcca

SEQ ID NO: 402933 - DNA, 120 bp, Artificial Sequence
  ENSG00000146918_29 (sequence is synthesized)
gacatgtaaaaatagggaaaagtgattcaaattgaaatgcctgtgtattttcctattgtttttaatgttaataacccatataatagggaaagggtgggatttttttgtgggaatgtggga

SEQ ID NO: 402934 - DNA, 120 bp, Artificial Sequence
  ENSG00000146918_30 (sequence is synthesized)
aggtgggggttatggaggagataactcaaaacttcttcaattttgcctagtgcctgcgtaaataatatatttaatataaaggactccaggtatgaatggtgtagaaatccatgattccaa

SEQ ID NO: 402935 - DNA, 120 bp, Artificial Sequence
  ENSG00000146918_31 (sequence is synthesized)
gaaaaaacacttttctagcaaacctggttgtttttaaaatgacttttatatatgtaatattgcttggaaactatgagtaataaagcaatgacaacatccatttgtttatttgaaagtatt

SEQ ID NO: 402936 - DNA, 61 bp, Artificial Sequence
  ENSG00000146918_32 (sequence is synthesized)
taaagcaatgacaacatccatttgtttatttgaaagtattaggggccatcacttgaggtca

SEQ ID NO: 402937 - DNA, 120 bp, Artificial Sequence
  ENSG00000146918_33 (sequence is synthesized)
gagggcggggcccgtctggggcgccggcgggtgcgtttgaatctggtccgagcgcgggaaacggcgggtccccgagcccagtaccagacctcctgtgcgaagagtaacctgctcttcgga

SEQ ID NO: 402938 - DNA, 120 bp, Artificial Sequence
  ENSG00000146918_34 (sequence is synthesized)
acattcatggaaattactttggaagaggatagcattgaaagatatgaggacttgctgtgttgcccaggctgggctctaactcctggactcctggactcaatctatccttctgcctcagtc

SEQ ID NO: 402939 - DNA, 120 bp, Artificial Sequence
  ENSG00000146918_35 (sequence is synthesized)
ccaattggctaggactgcaggcacacaccaccagacccagctaatgtaatttctatctatatgtgtctttatatttaaagtggtttttttatagacagtatataaatgggtcatgttttt

SEQ ID NO: 402940 - DNA, 120 bp, Artificial Sequence
  ENSG00000146918_36 (sequence is synthesized)
tgatcttctctgacaatctgtcttaaaattggtgcatatgtaccatattcaaagtgattattgatatagttggattaatatccaccatatttgttattgtcttctatttgttccccttgt

SEQ ID NO: 402941 - DNA, 120 bp, Artificial Sequence
  ENSG00000146918_37 (sequence is synthesized)
tatttgttcctatttctgtcttccactccttttctgtcttttgtggttttaactgaacattttatgatgccgttttctttcctagcatatcagttatacttttttttttttaaacctttc

SEQ ID NO: 402942 - DNA, 120 bp, Artificial Sequence
  ENSG00000146918_38 (sequence is synthesized)
ttagtggtttctttagagttggaatttttatttgtttttatctttcttagtggttgctttagagttggagttttcatttataactaatccacgtttgctttcagatgacactataccact

SEQ ID NO: 402943 - DNA, 120 bp, Artificial Sequence
  ENSG00000146918_39 (sequence is synthesized)
ttgcaggtagggtggtatataataacaaaataatcctaatccttgcctctcgttccttgtatcattgctgtcattcattttgctaaggtataagcagacataagcatacataattgaata

SEQ ID NO: 402944 - DNA, 120 bp, Artificial Sequence
  ENSG00000146918_40 (sequence is synthesized)
tattgttgctattattattttgaacaaactacatcttaggtcatttaagaataagaaaaataaaagtttttatttaccttcacttactccttctttgatgcttctcctttgtttgtgttg

SEQ ID NO: 402945 - DNA, 120 bp, Artificial Sequence
  ENSG00000146918_41 (sequence is synthesized)
atccaaattctgacctatattcttttccttccctccagagaacttcttttaatgcttctttcaaggcatgtctactggcaactaattctcttaattttggtttgtcagagagtcttttac

SEQ ID NO: 402946 - DNA, 120 bp, Artificial Sequence
  ENSG00000146918_42 (sequence is synthesized)
tttgtcagagagtcttttacttctactttatttctttgcagggataatgttatgtagtttataattctagttgatgaatttttttctctctgtactttatttaatttattattattattt

SEQ ID NO: 402947 - DNA, 120 bp, Artificial Sequence
  ENSG00000146918_43 (sequence is synthesized)
tcagttcactgcaacctctgcctcctaagttcaaacgattcttgtacctcagcctgctgagtagctggtatacaggcacatcgccgccacacccagctcatttttgtattagtggagaca

SEQ ID NO: 402948 - DNA, 120 bp, Artificial Sequence
  ENSG00000146918_44 (sequence is synthesized)
ccatgttgcccaggctggtctcgaattcttgatctcaagtgatctactcgcctcagcttctcaaattgctgggattactccccgtgcccggccactctctgtactttaaacatttcgcta

SEQ ID NO: 402949 - DNA, 120 bp, Artificial Sequence
  ENSG00000146918_45 (sequence is synthesized)
cccgtgcccggccactctctgtactttaaacatttcgctatactctcttcttggctcgtgtagtatctgagaaataggatataattcttttttgctcctcagtagataaggtgtattttt

SEQ ID NO: 402950 - DNA, 120 bp, Artificial Sequence
  ENSG00000146918_46 (sequence is synthesized)
cctcagtagataaggtgtatttttccctatctggtttctttcaatactttttctttgtttgatttttctgtaggttgaatatgatatgcctaggtgtagttttcttttcttttttttttt

SEQ ID NO: 402951 - DNA, 120 bp, Artificial Sequence
  ENSG00000146918_47 (sequence is synthesized)
gtattctatgagcttcctggataaattctcagttattattgtctgaatatttcttctgttcctttctctcttctgaaattcttattatacatgttaacaccttttacagttgtctcacag

SEQ ID NO: 402952 - DNA, 120 bp, Artificial Sequence
  ENSG00000146918_48 (sequence is synthesized)
gtcttggatatttcattctatcaaaacagctgcatttttgaattctgtttgctaatattttatttgagaatgtttgcattaggtttgaaataagattaaatggttgttggttgttttgtt

SEQ ID NO: 402953 - DNA, 120 bp, Artificial Sequence
  ENSG00000146918_49 (sequence is synthesized)
gtcggtaaggaaggcggagggacccagtagtggtccttatctttgcaagtgcaaggcagacagccatttggttgtgaggtgtctggaaagttttggaaaatatgtcccatggagcacatt

SEQ ID NO: 402954 - DNA, 120 bp, Artificial Sequence
  ENSG00000146918_50 (sequence is synthesized)
agtaccagacctcctgtgcgaagagtaacctgctcttcggactgataactggatggaatggcctttagaaagggagcatcttcagaatctgcagctgggatcagattgttcttttgttga

SEQ ID NO: 402955 - DNA, 120 bp, Artificial Sequence
  ENSG00000146918_51 (sequence is synthesized)
gtcagagaaggagtcaactgtggatgggacaggcagccccagggattcaggagtgatgccccagcctcttagataggagatggagtgtccacgtcaaaaacgttgtatatatttttactc

SEQ ID NO: 402956 - DNA, 120 bp, Artificial Sequence
  ENSG00000146918_52 (sequence is synthesized)
gaattcaaaggaatcctgaataccctacgtccaggtttgccagtttttaccacttgccacattttctttatcatcctttgtatttacatttttttgaatcacttgagtcagttgtaggca

SEQ ID NO: 402957 - DNA, 120 bp, Artificial Sequence
  ENSG00000146918_53 (sequence is synthesized)
ttgtgcctctttatctctaaacatttcagttcgtatttttctaaaagatattctgttatataatcacattaaaatcctcaaaatcaggaaatttaacattgtggataatcctgttaaata

SEQ ID NO: 402958 - DNA, 120 bp, Artificial Sequence
  ENSG00000146918_54 (sequence is synthesized)
gagcccgtggttgtcatgtaagaagtgcaggatcaccctctgctggagagagagaccacacacaaaggctggaggatgagactgcagagggagacctcattagtgggcaccaaagtgcca

SEQ ID NO: 402959 - DNA, 120 bp, Artificial Sequence
  ENSG00000146918_55 (sequence is synthesized)
gacatccaacacccagctgccaccttaagcacagaaagaggcctctgatcctttcagcctaaatgaattactagatgaattatcaaggaaacagaaagaagaattatggcaaaggctgaa

SEQ ID NO: 402960 - DNA, 120 bp, Artificial Sequence
  ENSG00000146926_0 (sequence is synthesized)
agcctcggagcgtgggacacaggggccttctgtctgtctgtatttccctcctgctctctctctctctctctgcctttggcatatacctctcctcctccccactcccctttccctgcccac

SEQ ID NO: 402961 - DNA, 120 bp, Artificial Sequence
  ENSG00000146926_1 (sequence is synthesized)
atgctcatgagttggtctccagaagagtgcaaggggcagggagagcccctcgatgacagacaccccctctgtgccaggctggtggagaagcccagcagagggtctgaggagcacctcaag

SEQ ID NO: 402962 - DNA, 120 bp, Artificial Sequence
  ENSG00000146926_2 (sequence is synthesized)
tctggcccgggacccatcgtcacccgcacagcctcaggacctgcccttgccttctggcaggcagtgctggctggggacgtgggctgtgtctcccgcatcctcgcggactccagtactggc

SEQ ID NO: 402963 - DNA, 120 bp, Artificial Sequence
  ENSG00000146926_3 (sequence is synthesized)
ctggctcctgattccgtctttgataccagcgacccagagcgatggagggatttccgcttcaacatccgtgctctgagactctggtctctgacatacgaagaggagctgaccaccccactg

SEQ ID NO: 402964 - DNA, 120 bp, Artificial Sequence
  ENSG00000146926_4 (sequence is synthesized)
catgtggcagccagccgtggccacacggaagtcctgcggctgctgctgaggcggcgagcaaggccagacagtgcccctgggggccgcaccgccctgcacgaggcctgtgctgcaggccac

SEQ ID NO: 402965 - DNA, 120 bp, Artificial Sequence
  ENSG00000146926_5 (sequence is synthesized)
actgcctgtgttcatgtgctgctggtggcaggagccgaccccaacatcgctgaccaggatgggaaacgccccctgcatctctgccgggggcctggcacccttgagtgtgcggagctgctc

SEQ ID NO: 402966 - DNA, 120 bp, Artificial Sequence
  ENSG00000146926_6 (sequence is synthesized)
ctcaggtttggagcgagagtggatggtcggtccgaggaagaagaggagacccctttgcatgtggccgcccggcttggccatgtggagctggcagatctgcttctaagacggggggcatgt

SEQ ID NO: 402967 - DNA, 120 bp, Artificial Sequence
  ENSG00000146926_7 (sequence is synthesized)
cttgctgctttcagctggagcagacgctgatgctgcggaccaggacaagcagcgacccctgcacctggcctgccgccgtggccatgcagctgtcgtggagctgctcctgtcctgtggtgt

SEQ ID NO: 402968 - DNA, 120 bp, Artificial Sequence
  ENSG00000146926_8 (sequence is synthesized)
cagcgccaacaccatggactatgggggacacacgcccctgcactgtgctctgcagggcccagctgcagccctggcccagagccccgagcacgtggttcgggctctgctcaaccatggcgc

SEQ ID NO: 402969 - DNA, 120 bp, Artificial Sequence
  ENSG00000146926_9 (sequence is synthesized)
cgtccgtgtctggccaggggccctccccaaggtgctggagcgctggagcacgtgccctcggaccatcgaggtcctgatgaacacctacagtgttgtgcagcttcccgaggaggccgtcgg

SEQ ID NO: 402970 - DNA, 120 bp, Artificial Sequence
  ENSG00000146926_10 (sequence is synthesized)
cctggtgactcctgaaactctgcagaaacatcagcgtttctactcctccctcttcgccttggtgaggcagcccaggtcgctgcagcatttgagccgctgtgcgctccgctcccacctgga

SEQ ID NO: 402971 - DNA, 120 bp, Artificial Sequence
  ENSG00000146926_11 (sequence is synthesized)
gggcagcctgccccaagcgctgccccgcctccccctgccaccgcgcctgctccgctacctgcagctggattttgagggcgtgctctactagatgtccatggccttttgagagggcctgaa

SEQ ID NO: 402972 - DNA, 120 bp, Artificial Sequence
  ENSG00000146926_12 (sequence is synthesized)
agcagatgccccagcctgcagagggcgcgcctctgcactaactcaggccaggtagccctggcagcaggaggcccagctccgcaggcaggtgtggatgctgcaattcccaatgcagagaag

SEQ ID NO: 402973 - DNA, 120 bp, Artificial Sequence
  ENSG00000146926_13 (sequence is synthesized)
cggaccgacagcggcagccgggtgatgtctgatgaagacacactcctactggggctctcctgaggcccccttctagcctgtgcaaaccctgtatgtgcattaaaaatctccaggtctgtg

SEQ ID NO: 402974 - DNA, 120 bp, Artificial Sequence
  ENSG00000146926_14 (sequence is synthesized)
aggtcctaagggcttgagtgaaaggagaagcccccggctgtttctccccgacctcaaagcttgcccaatagcctacaccttggcccaagaacacagtcatgtggagcccagaatagctcc

SEQ ID NO: 402975 - DNA, 120 bp, Artificial Sequence
  ENSG00000146926_15 (sequence is synthesized)
agtccaccagcaacatcgctgggagtcgtgctgctttggctctcccagaacaagccatgccctggggaaagaactcctctccccactggggacaccatctggggtgccttccctccgccc

SEQ ID NO: 402976 - DNA, 120 bp, Artificial Sequence
  ENSG00000146926_16 (sequence is synthesized)
cggcctgccggatctggaggccccactcccgcccagcctgggagccccctcggccatcaccactgctctgccaagacatggccctgcagaatgccctctacaccggggacctggcaaggt

SEQ ID NO: 402977 - DNA, 120 bp, Artificial Sequence
  ENSG00000146926_17 (sequence is synthesized)
tgcaggagctgttccccccgcacagcacagccgacctgctgctggagagccgggccgcagagcctcgctggagcagccaccagaggggtgaggggcatctgggggttgctgagaaccagg

SEQ ID NO: 402978 - DNA, 120 bp, Artificial Sequence
  ENSG00000146938_0 (sequence is synthesized)
atttaagcgattttttttccctccttcatctccgggcctcggataagatgacggcttgggtgatgcacgaaataacgcacgtgattgattagacctggcttggcttggctagggaacgat

SEQ ID NO: 402979 - DNA, 120 bp, Artificial Sequence
  ENSG00000146938_1 (sequence is synthesized)
ccaggcgcgctggagaccccgcgtgaagatgaaatgacggctgccttggagttttcataagaaattgtccctggaggtgttggatgatcacagcttccttggagcattgcagttgctgga

SEQ ID NO: 402980 - DNA, 120 bp, Artificial Sequence
  ENSG00000146938_2 (sequence is synthesized)
atccagtttcaggattaagggagggctgcctccttgcaatgggctgccaagaaaacggctgtgcttgttcttaacctcaggctctgtctgtgatcagtctgagagtctctcccaggtcta

SEQ ID NO: 402981 - DNA, 120 bp, Artificial Sequence
  ENSG00000146938_3 (sequence is synthesized)
ctgctccctggaaagccctatctctctgcaggctcgcctctgggctttgtctccttggagccacatcactgggacagctgtggatgtggatgcagatttgaaccatgtcacggccccagg

SEQ ID NO: 402982 - DNA, 120 bp, Artificial Sequence
  ENSG00000146938_4 (sequence is synthesized)
gactgctatggcttcctttgttgttcaccccggtctgcgtcatgttaaactccaatgtcctcctgtggttaactgctcttgccatcaagttcaccctcattgacagccaagcacagtatc

SEQ ID NO: 402983 - DNA, 120 bp, Artificial Sequence
  ENSG00000146938_5 (sequence is synthesized)
cagttgtcaacacaaattatggcaaaatccggggcctaagaacaccgttacccaatgagatcttgggtccagtggagcagtacttaggggtcccctatgcctcaccccccactggagaga

SEQ ID NO: 402984 - DNA, 120 bp, Artificial Sequence
  ENSG00000146938_6 (sequence is synthesized)
ggcggtttcagcccccagaacccccgtcctcctggactggcatccgaaatactactcagtttgctgctgtgtgcccccagcacctggatgagagatccttactgcatgacatgctgccca

SEQ ID NO: 402985 - DNA, 120 bp, Artificial Sequence
  ENSG00000146938_7 (sequence is synthesized)
tctggtttaccgccaatttggatactttgatgacctatgttcaagatcaaaatgaagactgcctttacttaaacatctacgtgcccacggaagatgatattcatgatcagaacagtaaga

SEQ ID NO: 402986 - DNA, 120 bp, Artificial Sequence
  ENSG00000146938_8 (sequence is synthesized)
agcccgtcatggtctatatccatgggggatcttacatggagggcaccggcaacatgattgacggcagcattttggcaagctacggaaacgtcatcgtgatcaccattaactaccgtctgg

SEQ ID NO: 402987 - DNA, 120 bp, Artificial Sequence
  ENSG00000146938_9 (sequence is synthesized)
gaatactagggtttttaagtaccggtgaccaggcagcaaaaggcaactatgggctcctggatcagattcaagcactgcggtggattgaggagaatgtgggagcctttggcggggacccca

SEQ ID NO: 402988 - DNA, 120 bp, Artificial Sequence
  ENSG00000146938_10 (sequence is synthesized)
agagagtgaccatctttggctcgggggctggggcctcctgtgtcagcctgttgaccctgtcccactactcagaaggtctcttccagaaggccatcattcagagcggcaccgccctgtcca

SEQ ID NO: 402989 - DNA, 120 bp, Artificial Sequence
  ENSG00000146938_11 (sequence is synthesized)
gctgggcagtgaactaccagccggccaagtacactcggatattggcagacaaggtcggctgcaacatgctggacaccacggacatggtagaatgcctgcggaacaagaactacaaggagc

SEQ ID NO: 402990 - DNA, 120 bp, Artificial Sequence
  ENSG00000146938_12 (sequence is synthesized)
tcatccagcagaccatcaccccggccacctaccacatagccttcgggccggtgatcgacggcgacgtcatcccagacgacccccagatcctgatggagcaaggcgagttcctcaactacg

SEQ ID NO: 402991 - DNA, 120 bp, Artificial Sequence
  ENSG00000146938_13 (sequence is synthesized)
acatcatgctgggcgtcaaccaaggggaaggcctgaagttcgtggacggcatcgtggataacgaggacggtgtgacgcccaacgactttgacttctccgtgtccaacttcgtggacaacc

SEQ ID NO: 402992 - DNA, 120 bp, Artificial Sequence
  ENSG00000146938_14 (sequence is synthesized)
tttacggctaccctgaagggaaagacactttgcgggagactatcaagttcatgtacacagactgggccgataaggaaaacccggagacgcggcggaaaaccctggtggctctctttactg

SEQ ID NO: 402993 - DNA, 120 bp, Artificial Sequence
  ENSG00000146938_15 (sequence is synthesized)
accaccagtgggtggcccccgccgtggccaccgccgacctgcacgcgcagtacggctcccccacctacttctatgccttctatcatcactgccaaagcgaaatgaagcccagctgggcag

SEQ ID NO: 402994 - DNA, 120 bp, Artificial Sequence
  ENSG00000146938_16 (sequence is synthesized)
attcggcccatggtgatgaggtcccctatgtcttcggcatccccatgatcggtcccaccgagctcttcagttgtaacttttccaagaacgacgtcatgctcagcgccgtggtcatgacct

SEQ ID NO: 402995 - DNA, 120 bp, Artificial Sequence
  ENSG00000146938_17 (sequence is synthesized)
actggacgaacttcgccaaaactggtgatccaaatcaaccagttcctcaggataccaagttcattcacacaaaacccaaccgctttgaagaagtggcctggtccaagtataatcccaaag

SEQ ID NO: 402996 - DNA, 120 bp, Artificial Sequence
  ENSG00000146938_18 (sequence is synthesized)
accagctctatctgcatattggcttgaaacccagagtgagagatcactaccgggcaacgaaagtggctttctggttggaactcgttcctcatttgcacaacttgaacgagatattccagt

SEQ ID NO: 402997 - DNA, 120 bp, Artificial Sequence
  ENSG00000146938_19 (sequence is synthesized)
atgtttcaacaaccacaaaggttcctccaccagacatgacatcatttccctatggcacccggcgatctcccgccaagatatggccaaccaccaaacgcccagcaatcactcctgccaaca

SEQ ID NO: 402998 - DNA, 120 bp, Artificial Sequence
  ENSG00000146938_20 (sequence is synthesized)
atcccaaacactctaaggaccctcacaaaacagggcctgaggacacaactgtcctcattgaaaccaaacgagattattccaccgaattaagtgtcaccattgccgtcggggcgtcgctcc

SEQ ID NO: 402999 - DNA, 120 bp, Artificial Sequence
  ENSG00000146938_21 (sequence is synthesized)
tcttcctcaacatcttagcttttgcggcgctgtactacaaaaaggacaagaggcgccatgagactcacaggcgccccagtccccagagaaacaccacaaatgatatcgctcacatccaga

SEQ ID NO: 403000 - DNA, 120 bp, Artificial Sequence
  ENSG00000146938_22 (sequence is synthesized)
agtcgctgcaggcacacgacacactgaggctcacctgcccgccagactacaccctcacgctgcgccggtcgccagatgacatcccacttatgacgccaaacaccatcaccatgattccaa

SEQ ID NO: 403001 - DNA, 120 bp, Artificial Sequence
  ENSG00000146938_23 (sequence is synthesized)
acacactgacggggatgcagcctttgcacacttttaacaccttcagtggaggacaaaacagtacaaatttaccccacggacattccaccactagagtatagctttgccctatttcccttc

SEQ ID NO: 403002 - DNA, 120 bp, Artificial Sequence
  ENSG00000146938_24 (sequence is synthesized)
ctatccctctgccctacccgctcagcaacatagaagagggaaggaaagagagaaggaaagagagagagaaagaaagtctccagaccaggaatgtttttgtcccactgacttaagacaaaa

SEQ ID NO: 403003 - DNA, 120 bp, Artificial Sequence
  ENSG00000146938_25 (sequence is synthesized)
atgcaaaaaggcagtcatcccatcccggcagacccttatcgttggtgttttccagtattacaagatcaacttctgaccctgtgaaatgtgagaagtacacatttctgttaaaataactgc

SEQ ID NO: 403004 - DNA, 120 bp, Artificial Sequence
  ENSG00000146938_26 (sequence is synthesized)
tttaagatctctaccactccaatcgatgtttagtgtgataggacatcaccatttcaaggccccgggtgtttccaacgtcatggaagcagctgacacttctgaaactcagccaaggacact

SEQ ID NO: 403005 - DNA, 120 bp, Artificial Sequence
  ENSG00000146938_27 (sequence is synthesized)
tgatattttttaattacaatggaagtttaaacatttctttctgtgccacacaatggatggctctccttaagtgaagaaagagtcaatgagattttgcccagcacatggagctgtaatcca

SEQ ID NO: 403006 - DNA, 120 bp, Artificial Sequence
  ENSG00000146938_28 (sequence is synthesized)
gagagaaggaaacgtagaaatttattattaaaagaatggactgtgcagcgaaatctgtacggttctgtgcaaagaggtgttttgccagcctgaactatatttaagagactttgtaaaaaa

SEQ ID NO: 403007 - DNA, 120 bp, Artificial Sequence
  ENSG00000146938_29 (sequence is synthesized)
gaaaaatgtatatagctgtgagtttaaacaaaaaccacaaacagacaaacaagaaaaaaagcttttattggtgttttcactttgaaagagcttttagcaaggttgtgcttttcattgtgc

SEQ ID NO: 403008 - DNA, 120 bp, Artificial Sequence
  ENSG00000146938_30 (sequence is synthesized)
tatatatatacacacacacacacacattagtcatatcacctctgtttcctccccaacaaaagaggcttttcttcttaattacttgtggtaaacaaagacatgggattttcttacatgaga

SEQ ID NO: 403009 - DNA, 120 bp, Artificial Sequence
  ENSG00000146938_31 (sequence is synthesized)
tgggattttcttacatgagattctcatttgtaggaggatgtgatgtcccacagaagacccagacggtctgtgtggcctatttcccccgtcaggttgcacaggtgcatgcaagagcattct

SEQ ID NO: 403010 - DNA, 120 bp, Artificial Sequence
  ENSG00000146938_32 (sequence is synthesized)
taggagaccactgttttgaaaaacttttgacttgtacgtgttagccttcatgaaattgcagtacagagatgggtccccaaagtggagtgtatttacagcttgttaaattagagacatgca

SEQ ID NO: 403011 - DNA, 120 bp, Artificial Sequence
  ENSG00000146938_33 (sequence is synthesized)
cacacaaagaatcagtagggagaaacaaaaatacaagtcccgttctgtagctctggccctttgaatatgtttaggaagagttgcttcccatttcagggccctgccaaaaaaagaagaaag

SEQ ID NO: 403012 - DNA, 120 bp, Artificial Sequence
  ENSG00000146938_34 (sequence is synthesized)
cttgcctttggtggggctatgccccttggagtaaatacggctctgtgttccctagcagctgcgggagggtttggccgatgaagtacctgctcagcttagctaatcagattgaaggaagac

SEQ ID NO: 403013 - DNA, 120 bp, Artificial Sequence
  ENSG00000146938_35 (sequence is synthesized)
atgtgtctttcctttttgtttaagcactcggtcccttatttatcagtaagcaggtttttaaaaatcttttatatcatttatgggatcaaacatatgattgtctgaaaacatcactttttg

SEQ ID NO: 403014 - DNA, 120 bp, Artificial Sequence
  ENSG00000146938_36 (sequence is synthesized)
tggatttgtgtatccggtcaccaaacggtgaatattatagaagaatgggggaagaaaggatagaatattaaaactgctttgcatgggttttctgggaaattaggataacttcactgagaa

SEQ ID NO: 403015 - DNA, 120 bp, Artificial Sequence
  ENSG00000146938_37 (sequence is synthesized)
gacattgaatggaaattattcacccattttaaattggtgacctagggatcagagatttgtctttccaacagcttgtcattttttcatttctcttctcatttttcaggaaagttttgagtg

SEQ ID NO: 403016 - DNA, 120 bp, Artificial Sequence
  ENSG00000146938_38 (sequence is synthesized)
ttataaggtggaaggaaacatagtagcaatggatacttttttgaaaaattattgcattaccaagaaacagtagccaaagatatttgaagatcatgttcctcggctccattgtgggttatt

SEQ ID NO: 403017 - DNA, 120 bp, Artificial Sequence
  ENSG00000146938_39 (sequence is synthesized)
ctagaaatccagtcttaaatctctccgctaaagtggacattccccataaaaattgtccagctgcctggctcttttgcaataacaacctttgattactgaatccctacactcaaactatag

SEQ ID NO: 403018 - DNA, 120 bp, Artificial Sequence
  ENSG00000146938_40 (sequence is synthesized)
tgatatatcagtgtttgagagtgacctctagaaaaaagaaaagtgtttttagaaatgcgtacaagtcacccccaaatcctattgcttatcttgggttaaatttgagagtgattctctgta

SEQ ID NO: 403019 - DNA, 120 bp, Artificial Sequence
  ENSG00000146938_41 (sequence is synthesized)
tataaatatgtgaaatattattatctcaacttagcacacgtgaagcaacatttctttcctacagagaggtgtcatggtaagatttcattccgaattcattgtttcatagagctatgatca

SEQ ID NO: 403020 - DNA, 120 bp, Artificial Sequence
  ENSG00000146938_42 (sequence is synthesized)
ggccatttctgcaagcaatgtatgaccccacctgagcaaccacaaataggctctctgtgaaactacaaaggaagttatgtgtggcatccatgttggtttcgtctgtctgtaatgtgaatt

SEQ ID NO: 403021 - DNA, 120 bp, Artificial Sequence
  ENSG00000146938_43 (sequence is synthesized)
ccagtatttgtttagtatttccagttgtctcctgctagcaatatgtacagtaacgcgtcaggcttgtgacatttgaataaggaaaaacagagttcctgttaagtgaataactttagcttt

SEQ ID NO: 403022 - DNA, 120 bp, Artificial Sequence
  ENSG00000146938_44 (sequence is synthesized)
tacaggggattatgatcaaaagtgattttagtacatcttaaatgatatcttatttctacatggaaagaagttatagaatcttcatagagttctatgagaaaaaatatacttgctatctat

SEQ ID NO: 403023 - DNA, 120 bp, Artificial Sequence
  ENSG00000146938_45 (sequence is synthesized)
gtttcgggttccctagaaaaatctggacgtgtaaaaagaactcttaacggccgatgcagctcttccaaagctaagggaccattcccctccaaaatcctacaaggtgggtccatgacatct

SEQ ID NO: 403024 - DNA, 120 bp, Artificial Sequence
  ENSG00000146938_46 (sequence is synthesized)
gctagagaaaaagagggacatgttggagcgataggattcccatgggcactgacatactggcctctggggataggaagattaatgcttagtacaagaaagaaggaaaagaaggccttggcg

SEQ ID NO: 403025 - DNA, 120 bp, Artificial Sequence
  ENSG00000146938_47 (sequence is synthesized)
aggactgttttatctcagcatttctcagaagctccttcagtggagacttcgcctgggaccttcgccccaccttcttctaatggcacttcctccctgtggggctccacgcgggacattacg

SEQ ID NO: 403026 - DNA, 120 bp, Artificial Sequence
  ENSG00000146938_48 (sequence is synthesized)
cttccatcccatcccaagcctctctgctgtcccgggccgatttcatctcgtctcttcccccgcctccccgcttccccgcctcccaattcccgcgcggctcggctcagccccttcccactc

SEQ ID NO: 403027 - DNA, 120 bp, Artificial Sequence
  ENSG00000146938_49 (sequence is synthesized)
cagtgggcagaactgatggagaagatccgccaagcgcgcagccggcggcggaggagacagtgcggggtgggcgaggggcttcgagaccacgcagagagagagtgaacttcagtcctgacc

SEQ ID NO: 403028 - DNA, 120 bp, Artificial Sequence
  ENSG00000146938_50 (sequence is synthesized)
cctccccaaggccgcggctggggcgcccacagcccgcgctggcacccgcgtggcctgacctgcggaagcgcgagcggggatgaggctgccttggagttttcataagaaattgtccctgga

SEQ ID NO: 403029 - DNA, 120 bp, Artificial Sequence
  ENSG00000146938_51 (sequence is synthesized)
gagaaaaaagaaaaaaaatgagaaaaaagtaagaaaaaaaaaaatcctgtcctaggcttttactcttgatcttcaaaggcacgcagggtttaatggttccttgggttattattttgcagt

SEQ ID NO: 403030 - DNA, 120 bp, Artificial Sequence
  ENSG00000146938_52 (sequence is synthesized)
tttgttttttattttgccttaagtaatgatagaagatatatatggccggacacatatgtataaacttttcagcagcatttttaataataaaatatcacagtattttctaatgctttgtgc

SEQ ID NO: 403031 - DNA, 120 bp, Artificial Sequence
  ENSG00000146938_53 (sequence is synthesized)
gcagaaccgtctctctcccttctctgtctcttagcacagagctcttattcagccactagcttggcccttcctgcttcaattgtaatgcttgttctgcccgtccacagactattggcggca

SEQ ID NO: 403032 - DNA, 120 bp, Artificial Sequence
  ENSG00000146938_54 (sequence is synthesized)
gaaacaacgaatttcctccaaactaggcggtgttggtggctcttgcattcctctggatgaggaaatctagttggggggttccagaaggggaaggctcctgggctttcaatacatcctcct

SEQ ID NO: 403033 - DNA, 120 bp, Artificial Sequence
  ENSG00000146938_55 (sequence is synthesized)
gaatcatacctcgtttcgggttccctagaaaaatctggacgtgtaaaaagaactcttaacggccgatgcagctcttccaaagctaaggctgccttggagttttcataagaaattgtccct

SEQ ID NO: 403034 - DNA, 120 bp, Artificial Sequence
  ENSG00000146938_56 (sequence is synthesized)
cggagcttgcagtgagctgagatcgtaccactgtactccagcctggttagagtttatatttcctttaaatttctagagaaaacagattgtcatgtatttttatagagacaaaatactgat

SEQ ID NO: 403035 - DNA, 120 bp, Artificial Sequence
  ENSG00000146938_57 (sequence is synthesized)
gagacaaaatactgatgaaggtgatatacaggtagcttaattatgatttttctaagatttaattagatggtaaatttacagtaattattaatatgttcactgcttttattaaaaaccatc

SEQ ID NO: 403036 - DNA, 120 bp, Artificial Sequence
  ENSG00000146938_58 (sequence is synthesized)
tccgcctctggttttccaagaggccggtcgctaccccggaggacactctcatccttcagtcagtctcctggacaccccttcctcctcctgtccctcaacctgacctggctctttcgcccc

SEQ ID NO: 403037 - DNA, 120 bp, Artificial Sequence
  ENSG00000146938_59 (sequence is synthesized)
gaattcaagactatccagaactataggatggtgtttataggacacaacagctgacttgaatggactcccactggctaaagatgacacactttgaccgtcagtaagaatgataatttaaat

SEQ ID NO: 403038 - DNA, 120 bp, Artificial Sequence
  ENSG00000146938_60 (sequence is synthesized)
gcatttcaatacatcaagtttgataaaagacacgagttcccaatgatgttaaagatatgcacattaattgtctttagaaaatagttgggaatcatttcattactttgtgaactgaaaaaa

SEQ ID NO: 403039 - DNA, 120 bp, Artificial Sequence
  ENSG00000146950_0 (sequence is synthesized)
actttctttccaagttacggcgcaagttctgcggcgctcggagcctcccttgcgatcccacggccgggactgcccggagtgcatgggcgcgggccagggacgctgagcggtcgcgccatg

SEQ ID NO: 403040 - DNA, 80 bp, Artificial Sequence
  ENSG00000146950_1 (sequence is synthesized)
aggccgagacgcgggcggcggacggcgggcgcctggtggaggtgcagctgagcggcggcgccccgtggggcttcaccctg

SEQ ID NO: 403041 - DNA, 120 bp, Artificial Sequence
  ENSG00000146950_2 (sequence is synthesized)
aagggcggccgcgagcacggcgagccgctggtcatcaccaagattgaagagggcagtaaagccgcggcggtcgacaagttactggctggagatgagatcgtcggcatcaatgacattggt

SEQ ID NO: 403042 - DNA, 120 bp, Artificial Sequence
  ENSG00000146950_3 (sequence is synthesized)
ctctcagggtttagacaggaagcgatttgcctggtgaaggggtcccataagaccctgaagctggtcgtcaaaaggaggagcgagctgggctggaggcctcactcctggcatgccaccaag

SEQ ID NO: 403043 - DNA, 120 bp, Artificial Sequence
  ENSG00000146950_4 (sequence is synthesized)
ttctctgacagccaccccgagctagcggcctccccattcacctccaccagcggctgtccttcctggtccggccgacaccacgcgagttcttcctcccacgacctgtccagttcctgggag

SEQ ID NO: 403044 - DNA, 120 bp, Artificial Sequence
  ENSG00000146950_5 (sequence is synthesized)
cagacgaacctacagcgcaccttagatcacttcagctccttggggagcgttgacagcctggaccacccctccagtcgcctctcggtggccaagtccaacagcagcatcgaccacctgggc

SEQ ID NO: 403045 - DNA, 120 bp, Artificial Sequence
  ENSG00000146950_6 (sequence is synthesized)
agccacagcaagcgcgactcggcctacggctccttctccaccagctctagcactcctgaccacaccttgtccaaagccgacacgtcctccgcagagaacatcctctacactgtgggcctc

SEQ ID NO: 403046 - DNA, 120 bp, Artificial Sequence
  ENSG00000146950_7 (sequence is synthesized)
tgggaggctcccaggcagggtggccggcaggcccaggccgcaggcgaccctcagggctcggaggagaagctcagttgtttcccgcccagggtccccggtgacagcggcaaaggccccagg

SEQ ID NO: 403047 - DNA, 120 bp, Artificial Sequence
  ENSG00000146950_8 (sequence is synthesized)
ccagagtacaatgccgagcccaagctggctgcccctgggaggtccaattttgggccagtctggtatgttcccgataagaagaaagcaccatcatccccacctcctccccctccccctctc

SEQ ID NO: 403048 - DNA, 120 bp, Artificial Sequence
  ENSG00000146950_9 (sequence is synthesized)
cgcagtgacagctttgctgccaccaagagccacgagaaggcccagggccctgtgttctcagaggcggctgcggcacagcactttacggccctggcccaggctcagcctcgtggtgaccgg

SEQ ID NO: 403049 - DNA, 120 bp, Artificial Sequence
  ENSG00000146950_10 (sequence is synthesized)
agaccagagctcaccgatcggccttggaggtcagcacacccggggagcctcgggaagggatcgggaggcccgggctgcccacaggaggcccacgcagacggcagctggccgccctccaag

SEQ ID NO: 403050 - DNA, 120 bp, Artificial Sequence
  ENSG00000146950_11 (sequence is synthesized)
gatggagcttccagtaggctgcaggcctctctgtccagctcagatgtgcgcttccctcagtctcctcatagcggccgacaccctcccctatacagcgaccacagccccctctgtgctgac

SEQ ID NO: 403051 - DNA, 120 bp, Artificial Sequence
  ENSG00000146950_12 (sequence is synthesized)
agccttgggcaggagccaggggctgccagcttccagaacgacagccctcctcaggtgagggggctcagcagctgtgaccagaagctggggagcggctggcagggtccccggccctgtgtg

SEQ ID NO: 403052 - DNA, 120 bp, Artificial Sequence
  ENSG00000146950_13 (sequence is synthesized)
cagggagacctgcaagcagcacagctctgggcgggatgctggccttctgacacagcccttggagccctcgagagtcttcccccacccacggtgggccagagcccacgccatcacctacct

SEQ ID NO: 403053 - DNA, 120 bp, Artificial Sequence
  ENSG00000146950_14 (sequence is synthesized)
cagcctgagggtcctccggatgcccgcgagacaggacggtgttacccgctggacaaaggggccgagggctgctccgcgggagcccaggagcctcccagggccagccgtgcagaaaaagcc

SEQ ID NO: 403054 - DNA, 120 bp, Artificial Sequence
  ENSG00000146950_15 (sequence is synthesized)
agccagaggctggcagccagcatcacgtgggcagatggggagagcagcaggatctgcccgcaggagacgcccctgttgcactccctgacccaggaggggaagcgccggcctgagagcagt

SEQ ID NO: 403055 - DNA, 120 bp, Artificial Sequence
  ENSG00000146950_16 (sequence is synthesized)
ccagaggacagcgccaccagaccgccaccgttcgacgcccacgtgggcaagcccacccgaagaagcgaccgctttgccaccaccctgcggaatgagatccagatgcatagagccaagctg

SEQ ID NO: 403056 - DNA, 120 bp, Artificial Sequence
  ENSG00000146950_17 (sequence is synthesized)
cagaagagccggagcacagtggctctgactgcagcaggggaggcggaggatggcaccggccgctggagggccgggttgggaggtggcacccaggaaggacccctcgctggcacctataaa

SEQ ID NO: 403057 - DNA, 120 bp, Artificial Sequence
  ENSG00000146950_18 (sequence is synthesized)
gaccacctgaaagaggcccaagcccgggtcctgagggccacgtccttcaagcgccgcgacttggaccccaacccaggagacctatacccggagtcactggaacaccggatgggggatcca

SEQ ID NO: 403058 - DNA, 120 bp, Artificial Sequence
  ENSG00000146950_19 (sequence is synthesized)
gacactgtcccccacttctgggaggcaggcctggcccagccaccctcatctacaagtggcgggccccacccgccccgcatcggaggccggagacggttcacagctgagcagaaattgaag

SEQ ID NO: 403059 - DNA, 120 bp, Artificial Sequence
  ENSG00000146950_20 (sequence is synthesized)
tcctactcggaacctgagaagatgaacgaggtgggcctcacgaggggctacagtcctcaccagcaccccaggacatctgaggatactgtgggcacgtttgctgacaggtggaagtttttt

SEQ ID NO: 403060 - DNA, 120 bp, Artificial Sequence
  ENSG00000146950_21 (sequence is synthesized)
gaggaaacgagcaaacctgttccccagaggcctgcccagaagcaagctcttcacggaatcccgagagacaagccagagaggccgcggacagcgggccgcacatgtgagggcacggagccc

SEQ ID NO: 403061 - DNA, 120 bp, Artificial Sequence
  ENSG00000146950_22 (sequence is synthesized)
tggtcgcgcaccacctcccttggggacagcctcaacgctcacagcgcagcggagaaggcagggacttcagacctgccgcggaggctcggcacctttgcagagtatcaggcctcttggaag

SEQ ID NO: 403062 - DNA, 120 bp, Artificial Sequence
  ENSG00000146950_23 (sequence is synthesized)
gaacagaggaaacctctggaggccaggagctctgggcgctgccactcagcggatgacatcctggatgtgagcctggacccacaggagaggccgcagcacgttcatgggaggtcccggtct

SEQ ID NO: 403063 - DNA, 120 bp, Artificial Sequence
  ENSG00000146950_24 (sequence is synthesized)
tcaccgtccacagaccactacaagcaggaagcttctgtcgaactgcgaaggcaggcaggggaccccggcgagcccagagaagagcttccctccgcagtccgggccgaggagggacagtcc

SEQ ID NO: 403064 - DNA, 120 bp, Artificial Sequence
  ENSG00000146950_25 (sequence is synthesized)
acgccgagacaagcagatgcccagtgtcgggaaggcagcccaggatcacagcagcacccaccgagtcagaaggcaccgaacccacccacattctctgaactatctcactgccggggagcc

SEQ ID NO: 403065 - DNA, 120 bp, Artificial Sequence
  ENSG00000146950_26 (sequence is synthesized)
ccagagctgccccgggagggccggggccgagcgggaaccctacctcgagattatagatactcggaggagagcaccccagcagacttgggaccccgagcccagagccctggctcacccctg

SEQ ID NO: 403066 - DNA, 120 bp, Artificial Sequence
  ENSG00000146950_27 (sequence is synthesized)
catgctcgaggacaagactcgtggccagtgagctcagccctgctctccaagaggccagccccacagaggccaccgccacccaagcgcgagcccaggagatacagggccacagacggcgca

SEQ ID NO: 403067 - DNA, 120 bp, Artificial Sequence
  ENSG00000146950_28 (sequence is synthesized)
cctgctgacgcccccgtgggcgtcctcggcaggcccttcccaacgccatcccctgcgtccctggatgtgtatgtggcccgcctgtccctctcccacagcccctctgtgttcagcagtgcc

SEQ ID NO: 403068 - DNA, 120 bp, Artificial Sequence
  ENSG00000146950_29 (sequence is synthesized)
cagccccaggacaccccgaaggccactgtctgtgagcgtggaagccagcatgtgagcggggacgcatcacgtcctctgccagaagcactgctccctcccaagcagcagcacctgcgcctg

SEQ ID NO: 403069 - DNA, 120 bp, Artificial Sequence
  ENSG00000146950_30 (sequence is synthesized)
cagacggccaccatggagacctcgcgctccccctcgccccagttcgccccccagaaactgacggacaaacctcccctgctcatccaggatgaggattcaaccagaattgagcgggtgatg

SEQ ID NO: 403070 - DNA, 120 bp, Artificial Sequence
  ENSG00000146950_31 (sequence is synthesized)
agatcgtgcactcggagagccagccagagaaggagagccgccagagcctggcatgccccgccgagccacctgccctgccccacgggctggagaaagaccagatcaagacgctgagcacat

SEQ ID NO: 403071 - DNA, 120 bp, Artificial Sequence
  ENSG00000146950_32 (sequence is synthesized)
ctgagcagttctactcgcgcttctgtctgtacacgcggcagggtgctgagcccgaggccccacatagggcccagccggctgagccccagcccctgggcacccaggtgccccccgagaaag

SEQ ID NO: 403072 - DNA, 120 bp, Artificial Sequence
  ENSG00000146950_33 (sequence is synthesized)
accgctgcacctcccctccagggctcagctacatgaaggccaaagagaagactgtggaagacctgaagtcggaggagctggccagggagatcgtggggaaggataagtccctggccgaca

SEQ ID NO: 403073 - DNA, 120 bp, Artificial Sequence
  ENSG00000146950_34 (sequence is synthesized)
tcctggatcccagtgtgaagatcaaaaccactatggacttgatggaaggcatcttccccaaagacgagcacctcctggaagaagcccagcaacggaggaagctgctccccaaaatcccct

SEQ ID NO: 403074 - DNA, 120 bp, Artificial Sequence
  ENSG00000146950_35 (sequence is synthesized)
ctcctagaagcacagaggagaggaaagaggagcccagcgtgcctgcggccgtgtccctggccaccaattctacctactacagcacgtcggcccccaaggcggagctgctgatcaagatga

SEQ ID NO: 403075 - DNA, 120 bp, Artificial Sequence
  ENSG00000146950_36 (sequence is synthesized)
aggacctgcaggagcagcaggagcacgaagaggattcgggaagcgacttggaccacgacctgtcggtgaagaagcaggagctcatcgagagcatcagccgcaagctgcaggtgctccggg

SEQ ID NO: 403076 - DNA, 120 bp, Artificial Sequence
  ENSG00000146950_37 (sequence is synthesized)
aggcccgcgagagcctgctggaggacgtgcaggccaacaccgtgctgggggccgaggtggaggccatcgtgaaaggcgtctgcaagcccagcgagtttgacaagttccggatgttcattg

SEQ ID NO: 403077 - DNA, 120 bp, Artificial Sequence
  ENSG00000146950_38 (sequence is synthesized)
gagacctggacaaagtggtgaacctcctgctgtcgctgtcaggccgcctggcccgggtggagaatgccctcaataatttggacgacggcgcttctcccggtgatcggcaatcactgcttg

SEQ ID NO: 403078 - DNA, 120 bp, Artificial Sequence
  ENSG00000146950_39 (sequence is synthesized)
agaagcagagagtcctgatccagcagcacgaggacgccaaggagctcaaggagaacctggaccgccgcgagcgcatcgtctttgacattttggccaactatctgagcgaggagagcctcg

SEQ ID NO: 403079 - DNA, 120 bp, Artificial Sequence
  ENSG00000146950_40 (sequence is synthesized)
cggactatgagcacttcgtgaagatgaagtcggccctcatcatcgagcagcgggagctggaagataaaatccaccttggtgaagagcagctgaagtgcttattggacagccttcagcccg

SEQ ID NO: 403080 - DNA, 120 bp, Artificial Sequence
  ENSG00000146950_41 (sequence is synthesized)
aaaggggcaaataagagaccagtccccggtggaggaggggcacggggcctccgagctccagctccgttcccaaggatactcgtgaagaccccatctgtgttcatggcctggaaagagact

SEQ ID NO: 403081 - DNA, 120 bp, Artificial Sequence
  ENSG00000146950_42 (sequence is synthesized)
tctcccatagcaaagaggctgttataaaagcaataacttttgtgtttgtgtgggatgatttatttaattttttagtttcccctttgattgctgagagccattttcctttacacataacta

SEQ ID NO: 403082 - DNA, 120 bp, Artificial Sequence
  ENSG00000146950_43 (sequence is synthesized)
cacctgacaccaggctctgctggatgtgagtttccactgcatgggctgtgggctgggcctgtggtgcctgccgagtggtcactgtcagtgggaaacccgttgttcctcccgtcttcagat

SEQ ID NO: 403083 - DNA, 120 bp, Artificial Sequence
  ENSG00000146950_44 (sequence is synthesized)
gctgagccaactgcttggacagcagccagcgcgtcatgacgtgcatgagagggggaccctggtgctcatcttctcttgtcattcatccaggcatgggctgccaggttttgtccctgctcg

SEQ ID NO: 403084 - DNA, 120 bp, Artificial Sequence
  ENSG00000146950_45 (sequence is synthesized)
ttcaacagtgtgagcatttgtctctgttatctaatgatgttctctgacccagcagaaatcatcatcatgatgatgataatttattaactttttggaagggtgaatagtttcctaatggtt

SEQ ID NO: 403085 - DNA, 120 bp, Artificial Sequence
  ENSG00000146950_46 (sequence is synthesized)
aaaaaccaactgtgaaaggaaccacctgtgtggttgggttcactcattctcagattaaattgccacttaaagaaataacgtgcatgctttaaaaaacacagtcacgcaccaagcaggcaa

SEQ ID NO: 403086 - DNA, 120 bp, Artificial Sequence
  ENSG00000146950_47 (sequence is synthesized)
atagctttagtccttctcacctcacatcacagttgttctgcaaagtaaaattttttggttaagagcgtgtccagtagtaatgtgcttgttagctgtttctcaagaccaacagaagatttt

SEQ ID NO: 403087 - DNA, 120 bp, Artificial Sequence
  ENSG00000146950_48 (sequence is synthesized)
ttcagttactttccccccatgtattttgtatgcatatgattgtccgtgataattggctacttttccattgtttcctccttaaatcgtttagcatggcatgagggccacattccatggacg

SEQ ID NO: 403088 - DNA, 120 bp, Artificial Sequence
  ENSG00000146950_49 (sequence is synthesized)
ggaagaccccttcctcttcagaggtcccgtggactacacagctcctgagcttgatctttttctgccatgaagtttaaagattctatgcccatttccttgattgaaatggcaggattctaa

SEQ ID NO: 403089 - DNA, 120 bp, Artificial Sequence
  ENSG00000146950_50 (sequence is synthesized)
agagagcctggtttgttaaaagaaaacactgtcatgctgtcagttcccaattgacaagtcacagactgggagaaaatatttgcaaatcgtgtatctgacaaaaggtttgtgtccaggatg

SEQ ID NO: 403090 - DNA, 120 bp, Artificial Sequence
  ENSG00000146950_51 (sequence is synthesized)
tacaaagaactctcaaaccggatagtaagaaaacaaacagcccaagtgaaaagcaggcaaaagacttgaatagacacttcaccaaagagcatacacgcgtggcaaacaagcacacgaaaa

SEQ ID NO: 403091 - DNA, 120 bp, Artificial Sequence
  ENSG00000146950_52 (sequence is synthesized)
gacgttcagccgccgatggcttggttataatttataacttacttatttttatctaataattgtagattcagtgtatttcttcaaaaaatgtttaattaaatgcatgttaatggtgagtga

SEQ ID NO: 403092 - DNA, 120 bp, Artificial Sequence
  ENSG00000146950_53 (sequence is synthesized)
atcccttgggtgacttcgtgtttaggtcgtattagggcatttgttggatcaacggatcattttaaccctgacttccccttattcccataaaagaagttttccagtggaatggagatttca

SEQ ID NO: 403093 - DNA, 120 bp, Artificial Sequence
  ENSG00000146950_54 (sequence is synthesized)
ttttgtcagcagcagtgaccacagccttaccaaagcagacgcgtgcgcgtgcacagatgcacacacacagatgtcttaaaagactagaatccacacttcctgagccagaggggccgtgtt

SEQ ID NO: 403094 - DNA, 120 bp, Artificial Sequence
  ENSG00000146950_55 (sequence is synthesized)
gacggtaatgcattctctatagagccaagtccaaactggcaagctcaatgatgcaggcaataaaccgcctttttggcagcctaccaatgccaaaaggataaatgtctttccaaaagtgtg

SEQ ID NO: 403095 - DNA, 120 bp, Artificial Sequence
  ENSG00000146950_56 (sequence is synthesized)
tattcctgttaaattaagctcttgctaacttgaaaaatccctgttctgccagcgaagcttcctcctcctctccagctggtagtcacttgcgtgaatgctggtcagtctgaaaaggtgaag

SEQ ID NO: 403096 - DNA, 120 bp, Artificial Sequence
  ENSG00000146950_57 (sequence is synthesized)
ctggctgtgcacttacccccatctttctccctcggggagacgacccaaggaatttcagagtattttgtttggcagagcttttacctgttattctttgccctcaaatacagtattgtggtc

SEQ ID NO: 403097 - DNA, 120 bp, Artificial Sequence
  ENSG00000146950_58 (sequence is synthesized)
attttgatgatatgtgtgtaaaatgtgaataatccaattggtgtctgtactcagccttttgatgtctttttaggactttctcttctacacagcaatacgtcgtgctcgagtatccttgta

SEQ ID NO: 403098 - DNA, 120 bp, Artificial Sequence
  ENSG00000146950_59 (sequence is synthesized)
gcaaagcacatagagccagctgtcctgtcagttcccctgtttgcctctgaaacgtctggttagtggggacccaaagattctagtgagtcaacatccataactctgtatctagttgtatta

SEQ ID NO: 403099 - DNA, 120 bp, Artificial Sequence
  ENSG00000146950_60 (sequence is synthesized)
ttcatagaaaatcaatctggtgctaatggttggccctggtgttgttgggtggcagctgctccttcgccctcttgtagtgtggctgtggagggctctgcctatggggggtggcctgtggct

SEQ ID NO: 403100 - DNA, 120 bp, Artificial Sequence
  ENSG00000146950_61 (sequence is synthesized)
tgtatccttcagtccaccacagcaaatgtgtgtagatttcatgctcgacacttaccactcacctatcaacagatcatcctgcttgactgtaacaaaataaatagtgtctcttcaagtgaa

SEQ ID NO: 403101 - DNA, 120 bp, Artificial Sequence
  ENSG00000146950_62 (sequence is synthesized)
atcaacaagacagcaggcacagacaggccagctgttgtgagcttggctttaggactccattcagtaggcaggaggagagctgcagcagaggcgggctgtgggtccctgaagcacatcgct

SEQ ID NO: 403102 - DNA, 120 bp, Artificial Sequence
  ENSG00000146950_63 (sequence is synthesized)
gtttgtagttcccagtggctcttttgttctgctatcttgaagggcaggttgcttgtcagctcacaatgctgtgggtaaggtctggtgaggtcggcgaatgtgttctcattgtttattctt

SEQ ID NO: 403103 - DNA, 120 bp, Artificial Sequence
  ENSG00000146950_64 (sequence is synthesized)
ctgcctgaagatgagaaataatgcaaatcagggtgcagattccggctcgagctccacaggcgtgcacgtatgtgtaagggcatgctcgccggtgctgcatgtcctcgtggatgcatgcaa

SEQ ID NO: 403104 - DNA, 120 bp, Artificial Sequence
  ENSG00000146950_65 (sequence is synthesized)
tttttacagctttgggattcacggttagctgaaagcacattggaactggaaggcggtgctcttaacaccgtgttctaggctggaagccgtagagccatcatctgctctgatgggactgca

SEQ ID NO: 403105 - DNA, 120 bp, Artificial Sequence
  ENSG00000146950_66 (sequence is synthesized)
gcccttggtatgtgggacccttgctccatgtgagttctgcagatgggttccccgagggagctggctggaggacgccagcatcgcatgaagacctgcctgcctcgtttgccttttgttttt

SEQ ID NO: 403106 - DNA, 120 bp, Artificial Sequence
  ENSG00000146955_0 (sequence is synthesized)
ctggatccccagttcctggtgctgaattccatcctttcttcctagttctgttctaggtggcaagaaccatgcacttctccagctcagccagggcagcagatgagaactttgactatttgt

SEQ ID NO: 403107 - DNA, 120 bp, Artificial Sequence
  ENSG00000146955_1 (sequence is synthesized)
tcaagattatcctcattggggattccaatgtggggaagacgtgtgtggtgcagcatttcaagtctggagtctacactgagacacagcagaacacgattggagtggactttaccgtgcgtt

SEQ ID NO: 403108 - DNA, 120 bp, Artificial Sequence
  ENSG00000146955_2 (sequence is synthesized)
cccttgatattgacggcaaaaaagtgaagatgcaggtgtgggacacagctggccaggagcgcttccgcaccatcacccaaagctactaccgcagtgcccacgcagccatcatcgcctatg

SEQ ID NO: 403109 - DNA, 120 bp, Artificial Sequence
  ENSG00000146955_3 (sequence is synthesized)
gtgacctctgggaaaagcggcacgtcctgttcgaggatgcctgcacactggctgagaagtacggcctcctggccgttttggagacatctgccaaggagtcaaagaacatagaagaagtct

SEQ ID NO: 403110 - DNA, 120 bp, Artificial Sequence
  ENSG00000146955_4 (sequence is synthesized)
tcgtgctcatggccaaggagctgatcgcgcgcaacagcctgcacctatatggggagagtgccctgaacggcctccccctggactccagccccgttcttatggcccagggtccaagtgaaa

SEQ ID NO: 403111 - DNA, 120 bp, Artificial Sequence
  ENSG00000146955_5 (sequence is synthesized)
agacccactgcacttgctaagatgtttgcaaagccagttgcacccaccaaagaggccgcctctgaaaccaaaggtagccaggataccgtagtgttgccccagtggcgctttagaccccag

SEQ ID NO: 403112 - DNA, 120 bp, Artificial Sequence
  ENSG00000146955_6 (sequence is synthesized)
ttgcactttcctttcactttctcaggacgccaaacccgacacctggggccagaactacacttcccaccaagcagcgaggcaggaggaagaagggggcactggggggctgaaaagcaaacc

SEQ ID NO: 403113 - DNA, 120 bp, Artificial Sequence
  ENSG00000146963_0 (sequence is synthesized)
gctcccgtcgtggcgacggtggcggcgagcggcgtcagagcttgagggggggttgacggcttctggcgggtggcggtgttgaaggcgagagcttgcttggcccgtgtcgcttctgtccca

SEQ ID NO: 403114 - DNA, 120 bp, Artificial Sequence
  ENSG00000146963_1 (sequence is synthesized)
agaaccggacggagagtgagggcacgagggtcgctgtcgggggctgtcgtcttccacgtacacgtcgtcgtgaggagcgcagtccggactcttcccgcaacccctccggctccctttccg

SEQ ID NO: 403115 - DNA, 120 bp, Artificial Sequence
  ENSG00000146963_2 (sequence is synthesized)
cacgcctcgaggcggcggcggccaccgagacagcagcgcaccttcccccatcccttccccttatcccccagcccaaaagggcccggtctgcgccccacccccgcccgtccgcccgctacg

SEQ ID NO: 403116 - DNA, 120 bp, Artificial Sequence
  ENSG00000146963_3 (sequence is synthesized)
ccgccgccatgtcggcgcaggcccagatgcgcgcgatgctggaccagttgatgggcacctcccgggacggagatacaactcgtcaacgaatcaaattcagtgatgacagagtatgcaaga

SEQ ID NO: 403117 - DNA, 120 bp, Artificial Sequence
  ENSG00000146963_4 (sequence is synthesized)
gtcaccttctcaactgttgtcctcatgatgtcctttctggaactagaatggatcttggagaatgtctgaaagtccatgacctggctttaagagcggattatgaaattgcatccaaagaac

SEQ ID NO: 403118 - DNA, 120 bp, Artificial Sequence
  ENSG00000146963_5 (sequence is synthesized)
aagattttttctttgaacttgatgccatggatcatctgcagtcattcattgcagattgtgatcgtagaacagaagtggccaagaaaagattagcagaaactcaagaagagattagtgctg

SEQ ID NO: 403119 - DNA, 120 bp, Artificial Sequence
  ENSG00000146963_6 (sequence is synthesized)
aagtagcagcaaaggcagaacgtgttcatgagttaaatgaagaaattggtaaattgttagccaaggtggaacaactaggagctgaagggaatgtggaggaatcccagaaagtaatggatg

SEQ ID NO: 403120 - DNA, 120 bp, Artificial Sequence
  ENSG00000146963_7 (sequence is synthesized)
aagtagagaaagcacgggcaaagaaaagagaagcagaggaagtttatcggaattctatgccagcttccagttttcagcagcagaaacttcgagtctgtgaagtctgctctgcctatttag

SEQ ID NO: 403121 - DNA, 120 bp, Artificial Sequence
  ENSG00000146963_8 (sequence is synthesized)
gacttcatgataatgacagacgactggctgatcattttgggggtaaactgcacctgggatttattgaaataagagagaagcttgaagaattaaagagagtcgtagctgagaagcaggaga

SEQ ID NO: 403122 - DNA, 120 bp, Artificial Sequence
  ENSG00000146963_9 (sequence is synthesized)
aaagaaaccaggaacggctgaaacgaagagaagagagagagagagaagaaagggagaagctgaggaggtcccgatcacacagcaagaatccaaaaagatccaggtccagagagcatcgca

SEQ ID NO: 403123 - DNA, 120 bp, Artificial Sequence
  ENSG00000146963_10 (sequence is synthesized)
gacatcgatctcgctccatgtcacgtgaacgcaagaggagaactcgatccaaatctcgggagaaacgccatcgccacaggtcccgctccagcagccgtagccgcagccgtagccaccaga

SEQ ID NO: 403124 - DNA, 120 bp, Artificial Sequence
  ENSG00000146963_11 (sequence is synthesized)
ataggagcagagaacgatccaagaggagatcctcaaaagaaagattcagagaccaagacttagcatcatgtgacagagacaggagttcaagagacagatcacctcgtgacagagatcgga

SEQ ID NO: 403125 - DNA, 120 bp, Artificial Sequence
  ENSG00000146963_12 (sequence is synthesized)
aagataagaagcggtcctatgagagtgctaatggcagatcagaagacaggaggagctctgaagagcgcgaagcaggggagatctaactagctgtgtacatttcttcagtccttaagcttc

SEQ ID NO: 403126 - DNA, 120 bp, Artificial Sequence
  ENSG00000146963_13 (sequence is synthesized)
ctacggagttacgtactattgtttagttcacagctgttcagggtgacagtgagcagatccagacaccagatccagctaggctagatgtacagtatctaacttgatctgaactgaacctgt

SEQ ID NO: 403127 - DNA, 120 bp, Artificial Sequence
  ENSG00000146963_14 (sequence is synthesized)
tttccttgatgatgcctaaaactacatccatagtttctggtgaacctgtaatacagttctgaaagtacagttttatataataagatgctgatctctttattctttcaagtaagagtgcta

SEQ ID NO: 403128 - DNA, 120 bp, Artificial Sequence
  ENSG00000146963_15 (sequence is synthesized)
gtgaacaaattgtgttacttgccttgggattttttgaacgtttgtaaaatgctgtcttcctagtccaaacagctgcagctttgggcatttttctttttaattattcttcctctgactttg

SEQ ID NO: 403129 - DNA, 120 bp, Artificial Sequence
  ENSG00000146963_16 (sequence is synthesized)
tatcccttaatacctacactctccaattgtaagagaaagggggcagggaagcaatatagcttccattctaaggctgtattcccgttatgaattactagctgattacagttcagagcattg

SEQ ID NO: 403130 - DNA, 120 bp, Artificial Sequence
  ENSG00000146963_17 (sequence is synthesized)
atcctggaatgtgtgctggagaaatttaaaatactggggttttttgtttaatggtgcctatttagagttggaagttgaacagctgttgcattacatacttttgcttttttattgaaattt

SEQ ID NO: 403131 - DNA, 120 bp, Artificial Sequence
  ENSG00000146963_18 (sequence is synthesized)
tgaaatcaaacgtcttgatttttctgttctgttgaattgctatgttcaggatgttctagggggtgggggcagggactcttttcgtaataagcacttgttttattttgtgtgtgtggagta

SEQ ID NO: 403132 - DNA, 120 bp, Artificial Sequence
  ENSG00000146963_19 (sequence is synthesized)
taaaggctacacccttattgtaaaaaaataataataataaaatgaaagaaacaatcaccaccaccattattaaactgtaacttgtctagtaaattgtcactagaactatttgctgtgggc

SEQ ID NO: 403133 - DNA, 120 bp, Artificial Sequence
  ENSG00000146963_20 (sequence is synthesized)
atttcctctattctgttacgtcattaacagtgccttactgtgcaaggcaccaaaggacataaatacgtacttgcaaagattccagatgagctgttcatgtgggccccttgctgactatat

SEQ ID NO: 403134 - DNA, 120 bp, Artificial Sequence
  ENSG00000146963_21 (sequence is synthesized)
tccagccacttcagggttgtttgtaatgaccgttatagagaagggctcgacctgcagaagaaactggggtgtttttattctcattcaacaaacccaaataaaaacagtatatgtaaccaa

SEQ ID NO: 403135 - DNA, 120 bp, Artificial Sequence
  ENSG00000146963_22 (sequence is synthesized)
ttaaagctgtgcaactatcaccataatccagttgagaacatttccatcattcttaaagtgactcttctaacaaagttgcattcctttgtttccccttgttttctgtcaaacgtttatgtc

SEQ ID NO: 403136 - DNA, 120 bp, Artificial Sequence
  ENSG00000146963_23 (sequence is synthesized)
ctctccatgccatttccaccctcaccatgcacccccacccaccccacaagttagtttgtgacctggtggaggctataaaagtgtcttaccttgtgggtttttttcttttcaaaaaatgtc

SEQ ID NO: 403137 - DNA, 120 bp, Artificial Sequence
  ENSG00000146963_24 (sequence is synthesized)
tttattttgccagcaccttgatcgtatattttctggtttttcagaatgtttttcgttctctatttctgtgtattcattagaaatacattttttttgcaatctgagtcaagttctcaaaaa

SEQ ID NO: 403138 - DNA, 120 bp, Artificial Sequence
  ENSG00000146963_25 (sequence is synthesized)
tgattttcgcaagtgttctttctcccaaactgtttgctccttgaatagagaactgtcttactgtgtttgttttgtcttgctctctattgcccaggctggaatgcagtggtgtgaacacag

SEQ ID NO: 403139 - DNA, 86 bp, Artificial Sequence
  ENSG00000146963_26 (sequence is synthesized)
tctctattgcccaggctggaatgcagtggtgtgaacacagctccctgtagccttgacttcctgggcttgggtgatcatccttcctt

SEQ ID NO: 403140 - DNA, 120 bp, Artificial Sequence
  ENSG00000146963_27 (sequence is synthesized)
ctagacatgcatattgtgggcattaaaaacttacttctatggttatctcacctttctaattcagacaaagagtaatttgtcctgacgtattcttcctcatctcttctcttcccttctgtc

SEQ ID NO: 403141 - DNA, 120 bp, Artificial Sequence
  ENSG00000146963_28 (sequence is synthesized)
caggtctgtcaggtacatatttaatttctagaggatacaaaaatgttcaagatatttaagtgcaattaaattcataacaaatctagataatatagcccctggcatatagtagtggttcaa

SEQ ID NO: 403142 - DNA, 120 bp, Artificial Sequence
  ENSG00000146963_29 (sequence is synthesized)
aagttgctttcacttgaaaaactatttctgataataaatttatacattactgattgctctctgagaattatcaatcagtgtcttgtttttgagacagaatttcactcttttgcccaggct

SEQ ID NO: 403143 - DNA, 120 bp, Artificial Sequence
  ENSG00000146963_30 (sequence is synthesized)
gacagaatttcactcttttgcccaggctggactgcagcgatgtgatcaccaggtcattgcagcagccttgacctccctggctcaagagattctctcacctcagcttcctgagtagctggg

SEQ ID NO: 403144 - DNA, 120 bp, Artificial Sequence
  ENSG00000146963_31 (sequence is synthesized)
tgtccagctaatttttgtatgttttatagagacagagtttcgccatgttgcctaggctggtcttgaaatcctgagctcaagcgatcctcctgcctcagactcccaaagtgttgggattac

SEQ ID NO: 403145 - DNA, 120 bp, Artificial Sequence
  ENSG00000146963_32 (sequence is synthesized)
gtagatttagctgacttggaatataattgacattaagactactgaaaaaaagtttctctttaaagaaaaggctttaataaatgagaaatatagtaattacaaaggtagaaacaaaatcaa

SEQ ID NO: 403146 - DNA, 120 bp, Artificial Sequence
  ENSG00000146963_33 (sequence is synthesized)
tctttttcttagattctttaacgttttgagtagatagccatatttgataagcaggttggatgcttctgttgcttaggaggtaggtgtattgtgttatatgaagacagaatgaatttaaat

SEQ ID NO: 403147 - DNA, 120 bp, Artificial Sequence
  ENSG00000146963_34 (sequence is synthesized)
atacccagtttggcagtatgaaaaagctcagactacataaaacttggaggtatggaacctttggacgcattaaagttaacgtttcattaggcaatgtgcctttgtttgactggtgtgtaa

SEQ ID NO: 403148 - DNA, 120 bp, Artificial Sequence
  ENSG00000146963_35 (sequence is synthesized)
gtccttcttccaggtttgtacgctcttaaacgcgttattctaccctctctaactcctcccagcagcaaaagggagacacttcagctggaacaaaatagtggaagaaatggcgtctggggt

SEQ ID NO: 403149 - DNA, 120 bp, Artificial Sequence
  ENSG00000146963_36 (sequence is synthesized)
tcagtggggattcgcagtgtgtatgcaatgtttgcaagattattttttatgtttttcaattactgtaaataaaaatatatcaatgcttagtgtcaagaagggaacattgtataccagtat

SEQ ID NO: 403150 - DNA, 120 bp, Artificial Sequence
  ENSG00000146963_37 (sequence is synthesized)
aaactctcttagtgggtctgcaagttgcttaacctctcggggcctcagttttctcatctgcaatatgaaggagttggactcgataatctttaaagtccattcctgctctaaaatcctatg

SEQ ID NO: 403151 - DNA, 120 bp, Artificial Sequence
  ENSG00000146963_38 (sequence is synthesized)
cttttctgaagtactctatttaacagaatgcattgctttctcactttgactatttgaattatgtatgcagtacacttactgcaactgcatgttgtctaaaatagtttttctataggatgt

SEQ ID NO: 403152 - DNA, 120 bp, Artificial Sequence
  ENSG00000146963_39 (sequence is synthesized)
atataaaaactaatccctcttgagctgatttataatgtgtgtatatagccacacataaaaagctagtaatagtagggctctcagaaaatactttccagttgtctaaccttgaatgttatt

SEQ ID NO: 403153 - DNA, 120 bp, Artificial Sequence
  ENSG00000146963_40 (sequence is synthesized)
caatttgcccagcgcgctgtgctccgcgacggcgcatgcccgcttttgcgcaggcgcggggactacggcgcaggcgcggagactattgcgcaggcaagcgcgtacgcagaagcgtgcgcg

SEQ ID NO: 403154 - DNA, 120 bp, Artificial Sequence
  ENSG00000146963_41 (sequence is synthesized)
cgcccgttcaacgtccggagcatcggtgcagtttcgaggccttcacagttgttgatcacatagcatggtcatccactcacagcttaaaaaaatacagggagcatcggagagaatgggaga

SEQ ID NO: 403155 - DNA, 120 bp, Artificial Sequence
  ENSG00000146963_42 (sequence is synthesized)
attttaactataaattactgttgttaaaattttatataccctggttgcaaattagaatgttttaaaaatatctttaaccacgttaaaacaatttgaacaaaatcttaccccatctaaaaa

SEQ ID NO: 403156 - DNA, 120 bp, Artificial Sequence
  ENSG00000146963_43 (sequence is synthesized)
tgatagtgtttagttgaatttaagttaagctctttagtatatgaccatatgaaggggtaaagttttaatcttttttgttatttacatgtgaaaatacagaaactaagtgattgaatcaca

SEQ ID NO: 403157 - DNA, 120 bp, Artificial Sequence
  ENSG00000146963_44 (sequence is synthesized)
tcctacacgaaagtttttggagtgctccaggcatatcatgtgaaatacagaggtatttatatctcttttggcaccaatagttcttgcttcagtaattcaccagtaggttttcattcatcg

SEQ ID NO: 403158 - DNA, 120 bp, Artificial Sequence
  ENSG00000146963_45 (sequence is synthesized)
ataatatatcagtttaaggctaaaataaaacacctacatttcttagggcttatcattctatatagaaagaggaaacatcctaatgagttttttcttttgtttttccaaagagattctaag

SEQ ID NO: 403159 - DNA, 120 bp, Artificial Sequence
  ENSG00000146963_46 (sequence is synthesized)
tgtattacataagacaggtataagtagtgaagttgtctttttcaaaggtagtttttatagattgattaaatggtcctttaaaaattttcttttttggctgggcacggtgatgcatgcttg

SEQ ID NO: 403160 - DNA, 120 bp, Artificial Sequence
  ENSG00000146963_47 (sequence is synthesized)
agacgccaaggaggctgaccgcagtccggtcgacgatgggcatggtctctacttactttccgcccaggctaacctctagcgcattttgctaatttgggtctgaatcgccatcaccgcggg

SEQ ID NO: 403161 - DNA, 120 bp, Artificial Sequence
  ENSG00000146963_48 (sequence is synthesized)
caatctgcaagggagtgtcagaaaggccccgcattcgccaagcccaaaagggagacacttcagctggaacaaaatagtggaagaaatggcgtctggggttcagtggggattcgcagtgtg

SEQ ID NO: 403162 - DNA, 120 bp, Artificial Sequence
  ENSG00000146963_49 (sequence is synthesized)
aagggagtgtcagaaaggccccgcattcgccaagccgtgagttatcgctaacttttcagatgtgttaatgaatgtggaacaaaagcagttgtgtttaaaaggaaaaaggaccatcaaaat

SEQ ID NO: 403163 - DNA, 120 bp, Artificial Sequence
  ENSG00000146966_0 (sequence is synthesized)
cccagagcccgcggagccgccgcccgcggggagggtcaaggtggaaggtccaaggactgagaaagaccctcgaaggcatccactttagtcctccattccattcctagagactgatcagga

SEQ ID NO: 403164 - DNA, 120 bp, Artificial Sequence
  ENSG00000146966_1 (sequence is synthesized)
gtcaggcttcagaaggagtcccctggaaggcctccacaacctcacgctagagtcaagaatggatatgttcagcttggatatgatcatcagtgacccagctgcagaagccagcagggctgg

SEQ ID NO: 403165 - DNA, 120 bp, Artificial Sequence
  ENSG00000146966_2 (sequence is synthesized)
gaagaagcagctcagaggtgttcagaacccttgcccatctgccagagccagaccccggcacaagtccctcaacataaaggacaagatatcagaatgggaagggaagaaagaggtgcccac

SEQ ID NO: 403166 - DNA, 120 bp, Artificial Sequence
  ENSG00000146966_3 (sequence is synthesized)
tcctgcacccagcaggagagcagacggacaggaggattatctgccgtcctctacggtggagaggaggagtagtgatggggtgagaactcaggtcacagaggctaagaatggaatgaggcc

SEQ ID NO: 403167 - DNA, 120 bp, Artificial Sequence
  ENSG00000146966_4 (sequence is synthesized)
aggaacagagagcacagagaaggagaggaataaaggagcagtgaacgtcgggggacaggacccagagccggggcaagacctaagccagccagaacgggaagtggatcctagctggggccg

SEQ ID NO: 403168 - DNA, 120 bp, Artificial Sequence
  ENSG00000146966_5 (sequence is synthesized)
aggccgagagccaagacttggcaagctacgctttcagaacgatcccctctccgtgctgaagcaggtcaagaaactcgagcaggctttgaaggatgggtcggcagggctggatccccagtt

SEQ ID NO: 403169 - DNA, 120 bp, Artificial Sequence
  ENSG00000146966_6 (sequence is synthesized)
accagggacttgttactccccacactgccctcctgacaaggcagaggcagggtccacccttcctgagaacctgggaggcgggagtggctcagaagtcagccagagggtccacccctcgga

SEQ ID NO: 403170 - DNA, 120 bp, Artificial Sequence
  ENSG00000146966_7 (sequence is synthesized)
cctggaaggcagggagcccacccctgagcttgtggaggacaggaaaggttcatgcagaaggccctgggaccggagccttgagaacgtgtataggggctcggagggttcccccacaaagcc

SEQ ID NO: 403171 - DNA, 120 bp, Artificial Sequence
  ENSG00000146966_8 (sequence is synthesized)
cttcatcaaccctctgccaaaaccccggagaacgttcaaacatgccggagaaggggacaaagatgggaagcctggcatcggcttcaggaaagagaaaagaaatctgcctcctctgccctc

SEQ ID NO: 403172 - DNA, 120 bp, Artificial Sequence
  ENSG00000146966_9 (sequence is synthesized)
tctacctcccccgcctctgccctcctctcccccaccttcctctgtgaacagaagactgtggaccgggagacagaaatccagtgcagaccacagaaagtcctatgagtttgaagatttact

SEQ ID NO: 403173 - DNA, 120 bp, Artificial Sequence
  ENSG00000146966_10 (sequence is synthesized)
gcagtcttcctctgagagcagcagggtggactggtacgcgcagactaagctggggctgacacgcactttatcggaggagaacgtctatgaagacattctagatccgccaatgaaggagaa

SEQ ID NO: 403174 - DNA, 120 bp, Artificial Sequence
  ENSG00000146966_11 (sequence is synthesized)
cccttatgaggacatcgagttacatggtcgctgcctgggaaagaagtgtgtcttgaattttcctgcttctcccacctcttccatccctgacacactcaccaagcagtcattgtccaaacc

SEQ ID NO: 403175 - DNA, 120 bp, Artificial Sequence
  ENSG00000146966_12 (sequence is synthesized)
tgcttttttccgacaaaattcagagaggaggaacttcaagctgctggacactaggaagctgagtcgggatggaactgggtccccttccaaaatcagccctccctccactcccagcagccc

SEQ ID NO: 403176 - DNA, 120 bp, Artificial Sequence
  ENSG00000146966_13 (sequence is synthesized)
taaccttggagacccacagaacggcaggaagaagagaaagatacccaagctggtgttgcgaatcaacgccatttatgaggtccggagaggaaagaaacgggtgaagaggctgtcccagtc

SEQ ID NO: 403177 - DNA, 120 bp, Artificial Sequence
  ENSG00000146966_14 (sequence is synthesized)
aatggagagcaactcaggaaaagtgacagatgagaacagtgagtctgacagtgacacagaggagaagctgaaagctcacagccagcgcctggtcaacgtgaagtcccggctgaagcaggc

SEQ ID NO: 403178 - DNA, 120 bp, Artificial Sequence
  ENSG00000146966_15 (sequence is synthesized)
gcctcggtacccatcacttgcccgggaactcatcgagtaccaggagaggcagctcttcgagtactttgtggttgtgtctttgcacaagaagcaggccggggctgcctacgtgccagaact

SEQ ID NO: 403179 - DNA, 120 bp, Artificial Sequence
  ENSG00000146966_16 (sequence is synthesized)
cacccaacagttccctctgaagttggaaaggtctttcaagttcatgagagaagctgaggaccaactgaaggccattccccagttctgttttcccgatgccaaggattgggttcctgtcca

SEQ ID NO: 403180 - DNA, 120 bp, Artificial Sequence
  ENSG00000146966_17 (sequence is synthesized)
gcagttcaccagtgaaacattctcatttgtcttaactggagaagatgggagcagaaggttcggttactgccgaagactgctgcctggaggcaaagggaagcgccttcctgaagtttactg

SEQ ID NO: 403181 - DNA, 120 bp, Artificial Sequence
  ENSG00000146966_18 (sequence is synthesized)
cattgtgagccgcctgggatgcttcagcctcttttcaaggatcttggatgaggtggaaaaaagacgaggcatctctcctgccctggttcagccactcatgagaagtgtcatggaagcccc

SEQ ID NO: 403182 - DNA, 120 bp, Artificial Sequence
  ENSG00000146966_19 (sequence is synthesized)
tttcccagccctgggcaaaaccatccttgtcaagaacttcctgccaggttcaggaactgaggtgatcgaactgtgccgcccgctggactcccggctcgagcacgtggactttgagtctct

SEQ ID NO: 403183 - DNA, 120 bp, Artificial Sequence
  ENSG00000146966_20 (sequence is synthesized)
cttctcctccctcagcgtccgccacctggtctgtgtgtttgcctccctgcttctggagaggagggtcatcttcattgcagacaagctcagcatcctgtccaagtgctgccacgcgatggt

SEQ ID NO: 403184 - DNA, 120 bp, Artificial Sequence
  ENSG00000146966_21 (sequence is synthesized)
ggcgctgatctaccccttcgcctggcagcacacctacatcccggtgctgccacccgccatggtcgacatcgtgtgctcgccgacgcccttcctcatcgggctgctctccagctcgctgcc

SEQ ID NO: 403185 - DNA, 120 bp, Artificial Sequence
  ENSG00000146966_22 (sequence is synthesized)
actgctcagggagctgccgctggaagaggtccttgtggttgacctcgtcaacagccggttcctcagacagatggacgatgaggactccatcctgccccggaagcttcaggtggccctgga

SEQ ID NO: 403186 - DNA, 120 bp, Artificial Sequence
  ENSG00000146966_23 (sequence is synthesized)
acacattctggaacagaggaacgagctggcttgtgagcaggacgaagggcccctagacggcaggcacggtccagagtccagccccttgaacgaggtggtgtctgaagcctttgtccgctt

SEQ ID NO: 403187 - DNA, 120 bp, Artificial Sequence
  ENSG00000146966_24 (sequence is synthesized)
cttcgtggagattgtgggacactactctttgttcctgacgtcgggcgagcgtgaggagagaaccctgcagcgggaggccttccgcaaagctgtctcctccaagagcctccgccacttcct

SEQ ID NO: 403188 - DNA, 120 bp, Artificial Sequence
  ENSG00000146966_25 (sequence is synthesized)
ggaggtcttcatggagactcagatgtttcggggcttcatccaggagcgggagctgcgccggcaggatgccaaaggtctgtttgaggtccgagcccaagagtatctggaaacactccccag

SEQ ID NO: 403189 - DNA, 120 bp, Artificial Sequence
  ENSG00000146966_26 (sequence is synthesized)
tggagagcacagcggtgtcaataagttcctgaagggactaggcaataaaatgaaatttctccacaagaaataactctcagcctcaagggaaaacttcctcctagtgcagccctatgcttt

SEQ ID NO: 403190 - DNA, 120 bp, Artificial Sequence
  ENSG00000146966_27 (sequence is synthesized)
aaaaacagttcctggtggcctttctgaaaggctgggtcccaggttgtcacggtgcggaactggaggccgcggtggcttctggccgaggctgggctcttccctggatgaggacctgggagc

SEQ ID NO: 403191 - DNA, 120 bp, Artificial Sequence
  ENSG00000146966_28 (sequence is synthesized)
cgcctgggaggacagccccagaaagggagcccgagaccaggcgtgtcgccgacatgcaaatgggttgttttggtggttgggtttttttttttatcttagatattaaaagtaagaaaaatg

SEQ ID NO: 403192 - DNA, 80 bp, Artificial Sequence
  ENSG00000146966_29 (sequence is synthesized)
gcagatcgtcgcggagccacggcaggaggaggcaggggccgcgggcgagcctgcgctgggccggccgagggaagcgcgcc

SEQ ID NO: 403193 - DNA, 120 bp, Artificial Sequence
  ENSG00000146966_30 (sequence is synthesized)
agccgtcccggcccgccccggagcccccaagatgcgccccagagcccgcggagccgccgcccgcggggaggtgacctggaactcccctcggtactgacatgatgacagtgtgcaggccgg

SEQ ID NO: 403194 - DNA, 120 bp, Artificial Sequence
  ENSG00000146966_31 (sequence is synthesized)
gctcttggaccctctagtctgtagagcaggtgaccgcctagcattgaagagtaagcccttctgagataaggatggaataggctgggcgcggtgactcacacctgtaatctcagcactttg

SEQ ID NO: 403195 - DNA, 89 bp, Artificial Sequence
  ENSG00000146966_32 (sequence is synthesized)
actaaaaatagaaaaattagccagccatggtggcccacgctcgggaatcgattgaacctgggaggtggacattgcagtgagctgagatc

SEQ ID NO: 403196 - DNA, 71 bp, Artificial Sequence
  ENSG00000146966_33 (sequence is synthesized)
gaggtggacaggagaccttccctcctgcccccacaaataaaggatggccaggcacggtggctcatgcctgt

SEQ ID NO: 403197 - DNA, 64 bp, Artificial Sequence
  ENSG00000146966_34 (sequence is synthesized)
agtctctactaaagatacaaaaatcagccagtcatggtggctcgtgcttgtaacaccagctact

SEQ ID NO: 403198 - DNA, 120 bp, Artificial Sequence
  ENSG00000146966_35 (sequence is synthesized)
caacatgatgaaactcagtctctactaaagatacaaaaatcagccagtcatggtggctcgtgcttgtaacaccagctacttgagaggctgaggtacaagaatcgcttgaacccaggaggc

SEQ ID NO: 403199 - DNA, 60 bp, Artificial Sequence
  ENSG00000146966_36 (sequence is synthesized)
caccattgcactccagcctgagcaacagaatgacattccatctcaaaaataaaaataaaa

SEQ ID NO: 403200 - DNA, 120 bp, Artificial Sequence
  ENSG00000146966_37 (sequence is synthesized)
agtgttggcgtatgctttgtacacctgggccacgcagcctgagcccacaggttcccggttctcaaaagagaggatgctcccccagtcatccccaaaagcctgccgaaggaagcgctcagt

SEQ ID NO: 403201 - DNA, 120 bp, Artificial Sequence
  ENSG00000146966_38 (sequence is synthesized)
actcccaggactgagcccggacgccgccgtctcgcgcctcggggacctgcagaaagccggtgacctggaactcccctcggtactgacatgatgacagtgtgcaggccggccaagggcagc

SEQ ID NO: 403202 - DNA, 120 bp, Artificial Sequence
  ENSG00000146966_39 (sequence is synthesized)
cagacccgccttccccgcagcccacggcatttccctgcggacttctgctgtgcagcctgtgttccttgacggtgtcctgcgtgacctggaactcccctcggtactgacatgatgacagtg

SEQ ID NO: 403203 - DNA, 120 bp, Artificial Sequence
  ENSG00000147003_0 (sequence is synthesized)
actttgccttgtgttttccaccctgaaagaatgttgtggctgctcttttttctggtgactgccattcatgctgaactctgtcaaccaggtgcagaaaatgcttttaaagtgagacttagt

SEQ ID NO: 403204 - DNA, 120 bp, Artificial Sequence
  ENSG00000147003_1 (sequence is synthesized)
atcagaacagctctgggagataaagcatatgcctgggataccaatgaagaatacctcttcaaagcgatggtagctttctccatgagaaaagttcccaacagagaagcaacagaaatttcc

SEQ ID NO: 403205 - DNA, 120 bp, Artificial Sequence
  ENSG00000147003_2 (sequence is synthesized)
catgtcctactttgcaatgtaacccagagggtatcattctggtttgtggttacagacccttcaaaaaatcacacccttcctgctgttgaggtgcaatcagccataagaatgaacaagaac

SEQ ID NO: 403206 - DNA, 120 bp, Artificial Sequence
  ENSG00000147003_3 (sequence is synthesized)
cggatcaacaatgccttctttctaaatgaccaaactctggaatttttaaaaatcccttccacacttgcaccacccatggacccatctgtgcccatctggattattatatttggtgtgata

SEQ ID NO: 403207 - DNA, 120 bp, Artificial Sequence
  ENSG00000147003_4 (sequence is synthesized)
ttttgcatcatcatagttgcaattgcactactgattttatcagggatctggcaacgtagaagaaagaacaaagaaccatctgaagtggatgacgctgaagataagtgtgaaaacatgatc

SEQ ID NO: 403208 - DNA, 120 bp, Artificial Sequence
  ENSG00000147003_5 (sequence is synthesized)
ggacatgaagggagggcatattaatgatgccttcatgacagaggatgagaggctcacccctctctgaagggctgttgttctgcttcctcaagaaattaaacatttgtttctgtgtgactg

SEQ ID NO: 403209 - DNA, 120 bp, Artificial Sequence
  ENSG00000147003_6 (sequence is synthesized)
ctgagcatcctgaaataccaagagcagatcatatattttgtttcaccattcttcttttgtaataaattttgaatgtgcttgaaagtgaaaagcaatcaattatacccaccaacaccactg

SEQ ID NO: 403210 - DNA, 120 bp, Artificial Sequence
  ENSG00000147003_7 (sequence is synthesized)
aaatcataagctattcacgactcaaaatattctaaaatatttttctgacagtatagtgtataaatgtggtcatgtggtatttgtagttattgatttaagcatttttagaaataagatcag

SEQ ID NO: 403211 - DNA, 120 bp, Artificial Sequence
  ENSG00000147003_8 (sequence is synthesized)
gcatatgtatatattttcacacttcaaagacctaaggaaaaataaattttccagtggagaatacatataatatggtgtagaaatcattgaaaatggatcctttttgacgatcacttatat

SEQ ID NO: 403212 - DNA, 120 bp, Artificial Sequence
  ENSG00000147003_9 (sequence is synthesized)
cactctgtatatgactaagtaaacaaaagtgagaagtaattattgtaaatggatggataaaaatggaattactcatatacagggtggaattttatcctgttatcacaccaacagttgatt

SEQ ID NO: 403213 - DNA, 120 bp, Artificial Sequence
  ENSG00000147003_10 (sequence is synthesized)
atatattttctgaatatcagcccctaataggacaattctatttgttgaccatttctacaatttgtaaaagtccaatctgtgctaacttaataaagtaataatcatctctttttgattgtg

SEQ ID NO: 403214 - DNA, 120 bp, Artificial Sequence
  ENSG00000147003_11 (sequence is synthesized)
ctcggaacaggcaagacccctctgttacatagatgactaaaagcttatgaagaaatttgtcacttttaagaaatgcaagactaaaggaacctgaagaagaattctgtgtttctactctgg

SEQ ID NO: 403215 - DNA, 120 bp, Artificial Sequence
  ENSG00000147003_12 (sequence is synthesized)
ctaaaggaacctgaagaagaattctgtgtttctactctgggagctgaggcaggagggttgcttgagcccaggaggttgaggctgcactgagctaagatggtgccactgcactccagcctg

SEQ ID NO: 403216 - DNA, 120 bp, Artificial Sequence
  ENSG00000147003_13 (sequence is synthesized)
caaacaacaacaaaacacagttaagttcaacaaagatgacaaagctgcataatagcatgaccccagttttgtttttaagaagaaatgtacatgtatttacacaaaaaagaaagcacaagg

SEQ ID NO: 403217 - DNA, 120 bp, Artificial Sequence
  ENSG00000147010_0 (sequence is synthesized)
gcaatttccactcgcggggagcaggaaacccggcgcagccgggcgcattgggccgcgatgcaacagcagcagcaggagtcgccccggggcagcagcggcagcagcagcagaggcagcagc

SEQ ID NO: 403218 - DNA, 120 bp, Artificial Sequence
  ENSG00000147010_1 (sequence is synthesized)
cgccgccactgaggaagaagccggcccagccgccgccgcgtccggaccctcgcgcctggatcccagcgccccgatcccggcgccccaacccccacgcccgcctccgccaactttcacgct

SEQ ID NO: 403219 - DNA, 120 bp, Artificial Sequence
  ENSG00000147010_2 (sequence is synthesized)
cctccgccaactttcacgctgcctcggcggcccggcccggctcgacgccaatggtggaggccatagtggagtttgactaccaggcccagcacgatgatgagctgacgatcagcgtgggtg

SEQ ID NO: 403220 - DNA, 120 bp, Artificial Sequence
  ENSG00000147010_3 (sequence is synthesized)
aaatcatcaccaacatcaggaaggaggatggaggctggtgggagggacagatcaacggcaggagaggtttgttccctgacaactttgtaagagaaataaagaaagagatgaagaaagacc

SEQ ID NO: 403221 - DNA, 120 bp, Artificial Sequence
  ENSG00000147010_4 (sequence is synthesized)
ctctcaccaacaaagctccagaaaagcccctgcacgaagtgcccagtggaaactctttgctgtcttctgaaacgattttaagaaccaataagagaggcgagcgacggaggcgccggtgcc

SEQ ID NO: 403222 - DNA, 120 bp, Artificial Sequence
  ENSG00000147010_5 (sequence is synthesized)
aggtggcattcagctacctgccccagaatgacgatgaacttgagctgaaagttggcgacatcatagaggtggtaggagaggtagaggaaggatggtgggaaggtgttctcaacgggaaga

SEQ ID NO: 403223 - DNA, 120 bp, Artificial Sequence
  ENSG00000147010_6 (sequence is synthesized)
ctggaatgtttccttccaacttcatcaaggagctgtcaggggagtcggatgagcttggcatttcccaggatgagcagctatccaagtcaagtttaagggaaaccacaggctccgagagtg

SEQ ID NO: 403224 - DNA, 120 bp, Artificial Sequence
  ENSG00000147010_7 (sequence is synthesized)
atgggggtgactcaagcagcaccaagtctgaaggtgccaacgggacagtggcaactgcagcaatccagcccaagaaagttaagggagtgggctttggagacattttcaaagacaagccaa

SEQ ID NO: 403225 - DNA, 120 bp, Artificial Sequence
  ENSG00000147010_8 (sequence is synthesized)
tcaaactaagaccaaggtcaattgaagtagaaaatgactttctgccggtagaaaagactattgggaagaagttacctgcaactacagcaactccagactcatcaaaaacagaaatggaca

SEQ ID NO: 403226 - DNA, 120 bp, Artificial Sequence
  ENSG00000147010_9 (sequence is synthesized)
gcaggacaaagagcaaggattactgcaaagtaatatttccatatgaggcacagaatgatgatgaattgacaatcaaagaaggagatatagtcactctcatcaataaggactgcatcgacg

SEQ ID NO: 403227 - DNA, 120 bp, Artificial Sequence
  ENSG00000147010_10 (sequence is synthesized)
taggctggtgggaaggagagctgaacggcagacgaggcgtgttccccgataacttcgtgaagttacttccaccggactttgaaaaggaagggaatagacccaagaagccaccgcctccat

SEQ ID NO: 403228 - DNA, 120 bp, Artificial Sequence
  ENSG00000147010_11 (sequence is synthesized)
ccgctcctgtcatcaaacaaggggcaggcaccactgagagaaaacatgaaattaaaaagatacctcctgaaagaccagaaatgcttccaaacagaacagaagaaaaagaaagaccagaga

SEQ ID NO: 403229 - DNA, 120 bp, Artificial Sequence
  ENSG00000147010_12 (sequence is synthesized)
gagagccaaaactggatttacagaagccctccgttcctgccataccgccaaaaaagcctcggccacctaagaccaattctctcagcagacctggcgcactgcccccgagaaggccggaga

SEQ ID NO: 403230 - DNA, 120 bp, Artificial Sequence
  ENSG00000147010_13 (sequence is synthesized)
gaccggtgggtccgctgacacacaccaggggtgacagtccaaagattgacttggccggcagttcgctatctggcatcctggacaaagatctctcggaccgcagcaatgacattgacttag

SEQ ID NO: 403231 - DNA, 120 bp, Artificial Sequence
  ENSG00000147010_14 (sequence is synthesized)
aaggttttgactccgtggtatcatctactgagaaactcagtcatccgaccacaagcagaccaaaagctacagggaggcggcctccgtcccagtccctcacatcttcatccctttcaagcc

SEQ ID NO: 403232 - DNA, 120 bp, Artificial Sequence
  ENSG00000147010_15 (sequence is synthesized)
ctgatatcttcgactccccaagtcccgaagaggataaggaggaacacatttcacttgcgcacagaggagtggacgcgtcaaagaaaacttccaagactgttaccatatcccaagtgtctg

SEQ ID NO: 403233 - DNA, 120 bp, Artificial Sequence
  ENSG00000147010_16 (sequence is synthesized)
acaacaaagcatccctgccgcccaagccggggaccatggcagcaggtggcggtgggccagcccctctgtcctcagcggcgccctcccccctgtcatcctctttgggaacagctggacaca

SEQ ID NO: 403234 - DNA, 120 bp, Artificial Sequence
  ENSG00000147010_17 (sequence is synthesized)
gagccaactccccgtctctgttcggcacggaaggaaaaccaaagatggagcctgcggccagcagccaggcggccgtggaggagctaaggacacaggtccgcgagctgaggagcatcatcg

SEQ ID NO: 403235 - DNA, 120 bp, Artificial Sequence
  ENSG00000147010_18 (sequence is synthesized)
agaccatgaaggaccagcagaaacgagagattaaacagttattgtctgagttggatgaagagaagaaaatccggcttcggttgcagatggaagtgaacgacataaagaaagctctacaat

SEQ ID NO: 403236 - DNA, 120 bp, Artificial Sequence
  ENSG00000147010_19 (sequence is synthesized)
cgagactcaaattttctgccccagccaaaataatcttgtgccaaaagattaaaggtttgcctcaaaatgtccctgtttgaaagattagcacaaaagtcttgatagcacaacacaaattcc

SEQ ID NO: 403237 - DNA, 120 bp, Artificial Sequence
  ENSG00000147010_20 (sequence is synthesized)
atccaagaggagaatcttccccagggtttagtcctggggctggcactcgttgtgacttacacagagcaaaattgtgctaaaggcttttctactctgagatctcaatgcgaaatgaaaact

SEQ ID NO: 403238 - DNA, 120 bp, Artificial Sequence
  ENSG00000147010_21 (sequence is synthesized)
caggcagtttagtccatagtggtactattttgatgatattttccattaataaaatgtaatttcagattattcgtttacaagctttataattttatgattttttaatcgtgttttgtcaca

SEQ ID NO: 403239 - DNA, 120 bp, Artificial Sequence
  ENSG00000147010_22 (sequence is synthesized)
gacttccctagtgtttgtactacacgtagtcagaagcgagtgtccttttcttttgcttcaggctaagagctgcctcgctctttgtccccccattaggattctattacatatgcaattgta

SEQ ID NO: 403240 - DNA, 120 bp, Artificial Sequence
  ENSG00000147010_23 (sequence is synthesized)
ggttcaacctgtccctttccctgccagcaaaccccaccaccctaagagaaattttagcttatatatgacggtatatttacaaaaagagaaagagaaaatctggtatttgcaatgatctgt

SEQ ID NO: 403241 - DNA, 120 bp, Artificial Sequence
  ENSG00000147010_24 (sequence is synthesized)
gccttctttttaccaccctcttgattggagcttttgtgatgcagctaccatgattcaaaaaaattaaaaattaaaaaaaaaaaatctgccacttatccaagtccactagaggccactgtc

SEQ ID NO: 403242 - DNA, 120 bp, Artificial Sequence
  ENSG00000147010_25 (sequence is synthesized)
ttcaaagcttctctcaccctagccaaaggtcctaagaggagacagctgtgaagttgggcgtgctctgtggtaccagctgtgacttttctatttctcctagttttaggttgttcatgaaac

SEQ ID NO: 403243 - DNA, 120 bp, Artificial Sequence
  ENSG00000147010_26 (sequence is synthesized)
tagaaatgtcatcctgcttgatttttcatcagccaagttaaacccctgctttctgtcctttgcaccttttgcgtgaacagaatatgcattattaaagcaaaaataaataaaagtaaaatg

SEQ ID NO: 403244 - DNA, 120 bp, Artificial Sequence
  ENSG00000147010_27 (sequence is synthesized)
caaatgaaaacaagggagggaaagttgtattatttcctgcactgggttacccgtgtgtgttatcgtttaaactgtattcacataatgtcatttgccttgctcacttgtaaccccttcctc

SEQ ID NO: 403245 - DNA, 120 bp, Artificial Sequence
  ENSG00000147010_28 (sequence is synthesized)
aggtccaagagaatgggaggagggtcatgttgaagtgtagccactggaactttcttgcatttatggagttgctttttctttcccaaggaaactgatgtttgcctgtccgctttatctttg

SEQ ID NO: 403246 - DNA, 120 bp, Artificial Sequence
  ENSG00000147010_29 (sequence is synthesized)
tagtacatgaacagttcagccttagactatgtaactgttttctcatccttagctgaaaatgaggggcctactgtattgcgagactgttcaggggtaggggtggagggggtggtcccttaa

SEQ ID NO: 403247 - DNA, 120 bp, Artificial Sequence
  ENSG00000147010_30 (sequence is synthesized)
tggcccctgaagatgttggatgtgtttctcaaaagctgctttgtctctttcctgagtttaatagtgaaactactaaacattaatagatttgcacagccacaaagaatgagagttgataat

SEQ ID NO: 403248 - DNA, 120 bp, Artificial Sequence
  ENSG00000147010_31 (sequence is synthesized)
accgaagaagtgatgcaaaaacaaaaaatcacattactgatcattgatagtattacaaataaatgtctcttcctttctcttcctcccttcctccccctgccttcctcttaacctatgtgc

SEQ ID NO: 403249 - DNA, 120 bp, Artificial Sequence
  ENSG00000147010_32 (sequence is synthesized)
tcatccttgctacttgaggctgttatttccctccgagtatttaaggagcccaaacaccttggtcttcctgggtgggggcataattaagggaagggagtgtataaggaaggaaacctcata

SEQ ID NO: 403250 - DNA, 120 bp, Artificial Sequence
  ENSG00000147010_33 (sequence is synthesized)
ccctccattcccatccctggatatattgccttttcagcagcctcgggttcagtgtgcttggggtcaggagtgccaggttcccaagagcagcgtaaaacatccctgtaccccttgacagtt

SEQ ID NO: 403251 - DNA, 120 bp, Artificial Sequence
  ENSG00000147010_34 (sequence is synthesized)
ataagcatttctgcgttaaacttgaagattccagagattccccacgacctaatgatctaagaatgcagattggattctttgatgttcaaatttctcatttacttatgaaaatccctaatt

SEQ ID NO: 403252 - DNA, 120 bp, Artificial Sequence
  ENSG00000147010_35 (sequence is synthesized)
atatagttttatataatgtgtatacagagtaggattgttgatgaaattgagcggttggaacaccctcatggaacactggcaacatggaatgtagagagctgatgtcttccccctcataga

SEQ ID NO: 403253 - DNA, 120 bp, Artificial Sequence
  ENSG00000147010_36 (sequence is synthesized)
ggccattggcttcctttgtataaggagagggagaagtgattctggaaggagaagttggtatgtctagcttcattgcggcccctcgggctacccagcaagaggattctgcatcaaggaact

SEQ ID NO: 403254 - DNA, 120 bp, Artificial Sequence
  ENSG00000147010_37 (sequence is synthesized)
ggacgagccgctacccaaactgccaccatctttactctttacaaaatggacccatcgagaatgttgaaaagcttggaagtatcacttttgaaaaaaaaaaaaattattttgcattcagca

SEQ ID NO: 403255 - DNA, 120 bp, Artificial Sequence
  ENSG00000147010_38 (sequence is synthesized)
tggactcgaccaggcatctatggagattatttttttgcttcattttataaagttgtatttagaaaagtcttaagtattgtgctttgtaaagaagatgattaaaatgaaattttgtgagaa

SEQ ID NO: 403256 - DNA, 120 bp, Artificial Sequence
  ENSG00000147010_39 (sequence is synthesized)
gctgtgctctcacctccggggcgggtgtggggtggctatggaaggaacacaggaggggaactgactgccacagaccttgggaggaagggagaggagaagggggtgctcaagcttccctct

SEQ ID NO: 403257 - DNA, 120 bp, Artificial Sequence
  ENSG00000147010_40 (sequence is synthesized)
tacatcctccagcaaaattatctgaagacaccggccacttctgtccttgctcctgcactcaggcaggagtgagtgtgaggttgaggggtgcggtgtgggtttcatgaggactgggtaccc

SEQ ID NO: 403258 - DNA, 120 bp, Artificial Sequence
  ENSG00000147010_41 (sequence is synthesized)
agcatttaggccctgctcacacacaggggtttttcctgggccttattagaagcaaggccaactgcccttcagcctggaaatgcaggtggcgtgtccctctttgtccccctggatgttgtg

SEQ ID NO: 403259 - DNA, 120 bp, Artificial Sequence
  ENSG00000147010_42 (sequence is synthesized)
aggaggtctcccaaagtccagaattgctgaaaatcaagctgagacttacttccagaacctcaccatattcctctaacgaagccctttaaaggttacccagccatcaggagacccaagaag

SEQ ID NO: 403260 - DNA, 120 bp, Artificial Sequence
  ENSG00000147010_43 (sequence is synthesized)
tttggtcccaagtatgactcagggttaggctgggtcctcaggctccgtgctgttggaaggaagtgggaggattccaggggagttctgggaccttttcaaactgaagagaggaggctggct

SEQ ID NO: 403261 - DNA, 120 bp, Artificial Sequence
  ENSG00000147010_44 (sequence is synthesized)
ccctttccagctcacggagcaaaaggaaagactacctttgaagggacaattctgtaccgagctgcaccgggaaagacggagggccacagacgctattacagtttaagggaaaccacaggc

SEQ ID NO: 403262 - DNA, 120 bp, Artificial Sequence
  ENSG00000147010_45 (sequence is synthesized)
gagcacggaacttattcctgcccagagttcagacacagccagaaattaccatttcatacttcacagaatggaggtttcagcagccaaagccccaagtgccgcagacttgtctgagattga

SEQ ID NO: 403263 - DNA, 120 bp, Artificial Sequence
  ENSG00000147027_0 (sequence is synthesized)
cggcgaaggtccggggtggaatcgacgtcgctgcggctgccgacgacccacacccggccggccgcctccgcagacccaccttggccgcgcggcagggggcgcgcagagccccgagggagc

SEQ ID NO: 403264 - DNA, 120 bp, Artificial Sequence
  ENSG00000147027_1 (sequence is synthesized)
gcgcagagccccgagggagcgagtccccgcgcgtggcagctcggcggcttctcccttcgggaggtccggctcccggctctccggacccgcctggcgtcctcgcctgcggcggggcggacg

SEQ ID NO: 403265 - DNA, 120 bp, Artificial Sequence
  ENSG00000147027_2 (sequence is synthesized)
acagcggcgcccaggaatggcttcggcgggcagcggcatggaggaggtgcgcgtgtcggtgctgacccccttgaagctggtcgggctggtgtgcatcttcctggcgctgtgtctggacct

SEQ ID NO: 403266 - DNA, 120 bp, Artificial Sequence
  ENSG00000147027_3 (sequence is synthesized)
gggggcggtgctgagcccggcctgggtcacagctgaccaccagtactacctgtcgttgtgggagtcctgccggaaacccgccagcttggacatctggcactgcgagtccacgctcagcag

SEQ ID NO: 403267 - DNA, 120 bp, Artificial Sequence
  ENSG00000147027_4 (sequence is synthesized)
cgattggcagattgctactctggctttactcctgggcggcgctgccatcattctcattgcattcctggtgggtttgatttctatctgcgtgggatctcgaaggcgtttctatagacctgt

SEQ ID NO: 403268 - DNA, 120 bp, Artificial Sequence
  ENSG00000147027_5 (sequence is synthesized)
tgcggtcatgctttttgcagcagttgttttacaggtttgcagcctggtcctttacccaatcaagttcattgaaactgtgagcttgaaaatttaccatgagttcaactggggttatggcct

SEQ ID NO: 403269 - DNA, 120 bp, Artificial Sequence
  ENSG00000147027_6 (sequence is synthesized)
ggcctggggtgcaactatattttcgtttgggggtgccatcctttattgcctgaaccctaagaactatgaagactactactagaaccaatagtctcaaagtaaaaacaaccaccaccatcc

SEQ ID NO: 403270 - DNA, 120 bp, Artificial Sequence
  ENSG00000147027_7 (sequence is synthesized)
aacaaaaggattacgtctgcatcttttctaacttactattttctaaaacacttgtggagcatcaagcagtttgctcagttgatttaatcttttttgccttttggctgtcaacatcataac

SEQ ID NO: 403271 - DNA, 120 bp, Artificial Sequence
  ENSG00000147027_8 (sequence is synthesized)
cagcttttacatccattttagaaatctgcacaaattaagagagctgattagacataggcaaatgctgcaaacttccaatatgttcatatcgtttttcttgacaaatgaagggtctatatg

SEQ ID NO: 403272 - DNA, 120 bp, Artificial Sequence
  ENSG00000147027_9 (sequence is synthesized)
acagcaaccattgtgagaaactagttggaatgagatttgcctcaatctcctattgcctgcaggggagcagttggcataagcaacatttagaagttcctttgcgctgacaaggattccact

SEQ ID NO: 403273 - DNA, 120 bp, Artificial Sequence
  ENSG00000147027_10 (sequence is synthesized)
gttagagcccttaccgcctgcttatcctacccaatgactacattggctgttggttatttgcttgagtgagcccttgaaaaatgaactgcccttcagcatctaatgggagttgtgaatgta

SEQ ID NO: 403274 - DNA, 120 bp, Artificial Sequence
  ENSG00000147027_11 (sequence is synthesized)
actggttaatgatacacattccaccttcaggaacactctttttaatgggaggttatgctttggcaatcagcgtctccctgggaagagagtcaagacttggagacatgtgcttctcattat

SEQ ID NO: 403275 - DNA, 120 bp, Artificial Sequence
  ENSG00000147027_12 (sequence is synthesized)
gtggttagaaattggtgcctcagccctatctagactggggaaaaattgaggatctctgtttttcctggggcaaacagaaagaaatctgcatgagttgcttttgtaccctttaaatcattt

SEQ ID NO: 403276 - DNA, 120 bp, Artificial Sequence
  ENSG00000147027_13 (sequence is synthesized)
gccaaacattgcagcaaacaagtgtgcgtatgtaacaagcttcactgtttttatagaaggtgaaccattagtataaatggtaataagttgttccctaaccctccacatacatttgcctat

SEQ ID NO: 403277 - DNA, 120 bp, Artificial Sequence
  ENSG00000147027_14 (sequence is synthesized)
cacacgtaaaattaatatttactctagtgaagtggtttgagcactaaccttgtacacattgttaagaggcttagattggtattcatacttatttaccatacaaaagtatggtaccttaaa

SEQ ID NO: 403278 - DNA, 120 bp, Artificial Sequence
  ENSG00000147027_15 (sequence is synthesized)
gcttttgctctatgttctttactgtttcactggaaagtgtcaatagagttgcctaagaataaaaattgaaatggtgttaatctgaaaattaatgattctctgtaagcactgtagttgaaa

SEQ ID NO: 403279 - DNA, 120 bp, Artificial Sequence
  ENSG00000147027_16 (sequence is synthesized)
gtcttcatttttttaagaaaggaatagcgatagatttatataaatatctaaatgtctcagtagaggagtagaattcatctggttatcacctggtcctctgaagttaactgatgggctaac

SEQ ID NO: 403280 - DNA, 120 bp, Artificial Sequence
  ENSG00000147027_17 (sequence is synthesized)
cgatttgtgcacacacttaggatggatttatgttaagggaattacttactgactgttcaatggaaggaagtattaataatagggaataagtttgcaactaatctcatgctgcaaacttgt

SEQ ID NO: 403281 - DNA, 120 bp, Artificial Sequence
  ENSG00000147027_18 (sequence is synthesized)
ttggatagcttaattataaacatatttttatatcaaatatacagttctaatataaaagttataaataattatttttgttaacaaagacactaaaacagtatgttctggttttggccctct

SEQ ID NO: 403282 - DNA, 120 bp, Artificial Sequence
  ENSG00000147027_19 (sequence is synthesized)
agtatgttctggttttggccctcttgcagaaagaagcattagaaaaattactttaaaagtagctatatgttactgtattgcaaaatctgttaagagcaggaccacatcgatagtatttaa

SEQ ID NO: 403283 - DNA, 120 bp, Artificial Sequence
  ENSG00000147027_20 (sequence is synthesized)
taatttgttttacctcccaaaacacagttcttctttcagcttgtcttaagaatggttgccaaaaacaacagccaaaaaaaaaaaacctattttattatccaaatgctagaaaacacacat

SEQ ID NO: 403284 - DNA, 120 bp, Artificial Sequence
  ENSG00000147027_21 (sequence is synthesized)
gaattttctataaaatcacgaatatgaagtaccaggtttagtcttactttagcaatgatagacaaaagcgaataaatacatcacagacagaaacctttataaaaatatatgattctataa

SEQ ID NO: 403285 - DNA, 120 bp, Artificial Sequence
  ENSG00000147027_22 (sequence is synthesized)
agaatcattagaaattatgagtggaaattctccagaaagatagtattatagagtcttttgaagcaattttttgagaaatagtaaaatctggggcagagtgtcttgcagttaattgcatat

SEQ ID NO: 403286 - DNA, 120 bp, Artificial Sequence
  ENSG00000147027_23 (sequence is synthesized)
tgtcagagcagcatgagaaatatgatatttggatagggatttcagcaactaaacattctctgttctgagatctctttattcctgaataatgaaagaatagtactttggtgctgacaccaa

SEQ ID NO: 403287 - DNA, 120 bp, Artificial Sequence
  ENSG00000147027_24 (sequence is synthesized)
tgaggcacttctcttggtcctagtagaggatgcagtgtactgttaaaccaatatcatcacatctcgagtcttatcaagttttcattctctgtcaatatgacaagctcaaagtgacagaat

SEQ ID NO: 403288 - DNA, 120 bp, Artificial Sequence
  ENSG00000147027_25 (sequence is synthesized)
atgttataggttgaagcacacatatttgcagtttactgaaaagtagatttcttatgtgacttttttcccttctcagcaaagagccctacactagatttctaccatcactaatatttggaa

SEQ ID NO: 403289 - DNA, 120 bp, Artificial Sequence
  ENSG00000147027_26 (sequence is synthesized)
gtatttcattactaacaatctcagtacaacatgaaaattgttgcttctcatctaaaatacaattttgtctatcagaataaacacaagtgaaattttcacctacattaacattatgtcttt

SEQ ID NO: 403290 - DNA, 120 bp, Artificial Sequence
  ENSG00000147027_27 (sequence is synthesized)
gcagctttaggtttgttagatgtgttcttaagcataatttttagccacaaacccattgttagatagatatctatggatatagatctacatctatagatatagatatacacacatatatat

SEQ ID NO: 403291 - DNA, 120 bp, Artificial Sequence
  ENSG00000147027_28 (sequence is synthesized)
actcacacacatatagcataaaatactcagcagggctagttattccgatttcttgcacaattatttagctttttgtaagttcaacatgtaaattttaaagacataaatatagagagactt

SEQ ID NO: 403292 - DNA, 120 bp, Artificial Sequence
  ENSG00000147027_29 (sequence is synthesized)
atgtgtttgaatataaatgatatatatggattagcatgtacctgtatattattaaacatgcaatgaactgactggtaagtgacgtctaattgtatggctagcaatgtaatttattcagac

SEQ ID NO: 403293 - DNA, 120 bp, Artificial Sequence
  ENSG00000147027_30 (sequence is synthesized)
tgtatttttgtacagagcagtgcactctaacctatgcctctgtgtcctctttaatgcctaaagctgtgcctagaaatttcatctgtcttaaaagtaaaatatacttcatgctgtttatgc

SEQ ID NO: 403294 - DNA, 120 bp, Artificial Sequence
  ENSG00000147027_31 (sequence is synthesized)
tattagtttctgtactgctattctatatttattatttttaaatatatgacatgtttactacttaaacatgaattcatggtatcctggttattttttttaagtcatctgggggaaaacctg

SEQ ID NO: 403295 - DNA, 120 bp, Artificial Sequence
  ENSG00000147027_32 (sequence is synthesized)
tttatcactccagtgattttgagtttgcagtttcacaatcagttcttcatttcatgatttttgtagttgacatgaagtcatctatgtggaaaaaaataaaaataaaagtgatttcacgga

SEQ ID NO: 403296 - DNA, 120 bp, Artificial Sequence
  ENSG00000147036_0 (sequence is synthesized)
gcccgggccactcgggagcctcgcggcagcccggcgccccacttggccatccgctccttgcccgcctcctcttgtcacctcccgtctcatccttctcgctccttccccgccgcatacacc

SEQ ID NO: 403297 - DNA, 120 bp, Artificial Sequence
  ENSG00000147036_1 (sequence is synthesized)
ggcatccgagtgcctcagagagccggaggtggtgtgcggggctgcagggcacgacttcaagcggtcctcagctccgcactagggggcacgggcaacagcatggacaccaagcgctgcttc

SEQ ID NO: 403298 - DNA, 120 bp, Artificial Sequence
  ENSG00000147036_2 (sequence is synthesized)
gccaatcgcttcgatgactaccagggcagcctgctggcgggccagtgtgaggaggcggtggcgcccttggtcaccgccaccatcgagcgcatcctccaggagcttcccccactcgggggc

SEQ ID NO: 403299 - DNA, 120 bp, Artificial Sequence
  ENSG00000147036_3 (sequence is synthesized)
ggcgcggaggcccgaggggcgacggcgggggctagcgcctgccagggggggctttatggcggcgtggccggagtggcgtatatgctctaccacgtctcgcagagcccgcttttcgccacg

SEQ ID NO: 403300 - DNA, 120 bp, Artificial Sequence
  ENSG00000147036_4 (sequence is synthesized)
gcccgggaacgctacctgcgctcggctaagcgcctcatcgacgcgtgcgcccgcgctgaggagtggggcgaaccggacgccgacacccgcgccgccttcctgctcgggggcgcgggcgtg

SEQ ID NO: 403301 - DNA, 120 bp, Artificial Sequence
  ENSG00000147036_5 (sequence is synthesized)
tacgccgtggccacgctcgtataccacgccctgggccggtccgactacgtgcagccgctgggcaagttccgggctctgtgtgccgtctgcgcgccggtctccttcctggagtgcggctcc

SEQ ID NO: 403302 - DNA, 120 bp, Artificial Sequence
  ENSG00000147036_6 (sequence is synthesized)
gacgagctgttcgtgggccgcgcgggttacctgtgtgccgcgctggtgctcaagcagaaactcgcccaggaggtgctgactccagcacagatcaagtcaatttgtcaggcaattctggac

SEQ ID NO: 403303 - DNA, 120 bp, Artificial Sequence
  ENSG00000147036_7 (sequence is synthesized)
tctgggaagcagtatgccataaagaagaggaaaccattccccctgatgtattcttactatggaaccgaatacttgggggcagctcacggcttgtcgtctattcttcagatgcttctttct

SEQ ID NO: 403304 - DNA, 120 bp, Artificial Sequence
  ENSG00000147036_8 (sequence is synthesized)
taccatgagcatctcaagccctcagatcgggaattggtatggcagagcgtggactttctcatggaacaggaacaaaactgcaactggccacctgagctcggcgagaccatcgagagagag

SEQ ID NO: 403305 - DNA, 120 bp, Artificial Sequence
  ENSG00000147036_9 (sequence is synthesized)
aatgagctggtgcactggtgccatggcgctccaggaattgcctatctgtttgccaaagcttatctggtttccaagaaaccgcagtacctggacacatgtattcggtgtggggaactcaca

SEQ ID NO: 403306 - DNA, 120 bp, Artificial Sequence
  ENSG00000147036_10 (sequence is synthesized)
tggcagaaaggcctgctaaagaaggggcctgggatttgccatggagtagccggcagtgcctatgtcttcctgctgctgtaccggctcacgggaaactctaaatacatctaccgagctcaa

SEQ ID NO: 403307 - DNA, 120 bp, Artificial Sequence
  ENSG00000147036_11 (sequence is synthesized)
aggtttgctcaattcttatttaccgaggaattcaaggccggttctcgggtccttgaaagtatatacagcttgtatgaaggcttctctgggacagtgtgctttctgattgacctgctgcag

SEQ ID NO: 403308 - DNA, 120 bp, Artificial Sequence
  ENSG00000147036_12 (sequence is synthesized)
gccctgcagagatcccctgagccaagccgaggcagtttccacataagccacattcaatggtatcgcaaccatgagccttaacattgccatcagaaggaaggaatcaggcaggtgaaggca

SEQ ID NO: 403309 - DNA, 120 bp, Artificial Sequence
  ENSG00000147036_13 (sequence is synthesized)
acatgatgccagatttgagaaaggatctgcaaaataaagataccacaattcatcttaaaactgcagagatttaatgtgtcagggaatagatgtgaaacaagggatcataggaaaagggga

SEQ ID NO: 403310 - DNA, 120 bp, Artificial Sequence
  ENSG00000147036_14 (sequence is synthesized)
aagagaaatgatctgtttttcagttatgacatagaaaaccaaactgcaagtgtagactatgacaaaaaatacactaatacctttgcaatctgaatgagaatttgaccatttgtgtgtgcc

SEQ ID NO: 403311 - DNA, 120 bp, Artificial Sequence
  ENSG00000147036_15 (sequence is synthesized)
ctctacccttaaattcagaaataaagacaataaaaaattaaaataattgcccagctgaaaactgctatgaggaatggattgtcaggttgctgaagtataaaaataaactcttggttgtcc

SEQ ID NO: 403312 - DNA, 120 bp, Artificial Sequence
  ENSG00000147036_16 (sequence is synthesized)
tgtgcttatacttattgaaatttatggtttttactgagcaaagatatttgcatatgaatctctatttttttcattaccctgggcaatttaaagaaatcatatcatagcgtagttcagata

SEQ ID NO: 403313 - DNA, 120 bp, Artificial Sequence
  ENSG00000147036_17 (sequence is synthesized)
ctaaaatttgaagtttccttaggccctagaacatctcttttcctggttccttttttttcctcaaagctcaattagaatagcaaaatttataagctagtaaacttatactatagcaagtgt

SEQ ID NO: 403314 - DNA, 120 bp, Artificial Sequence
  ENSG00000147036_18 (sequence is synthesized)
tgctgtaaagtgtttttctccataggaagtgtgaactgtgtattgtctattgttagtaattttaaaaatgcctttatgtacataatcttgatggagctattagctgaactataaaatatg

SEQ ID NO: 403315 - DNA, 120 bp, Artificial Sequence
  ENSG00000147036_19 (sequence is synthesized)
ctcttggtaaatatcactaatttcaaagatcaggggaaccactacaaagacgtgtcatttctgcctttgtttgggacaggcagacaggctgaggaagtcaccagtgattgtggaaataat

SEQ ID NO: 403316 - DNA, 120 bp, Artificial Sequence
  ENSG00000147036_20 (sequence is synthesized)
tttgctccattttatactattaaatgaagagatgagtgaattctgtggttggttaccttaccttccaagatacagggtccactagaaattggctgtaatactcattgagccaagttgtca

SEQ ID NO: 403317 - DNA, 120 bp, Artificial Sequence
  ENSG00000147036_21 (sequence is synthesized)
tatcaaattcaaccctgctgtaaacacatagaagttgtgaaactgcttcaagtaaatagtggtttgcagaacactgtaggagcatctgtcacttcattatgcagagcataagttgatcct

SEQ ID NO: 403318 - DNA, 120 bp, Artificial Sequence
  ENSG00000147036_22 (sequence is synthesized)
tttcctagaattttgtcagtggcaattgcatatatcagattgagtaggaaattgtgtactgtataagacttatttaaatagtcattaaatatttggatatattatgtgtgtgtgtgtgtg

SEQ ID NO: 403319 - DNA, 120 bp, Artificial Sequence
  ENSG00000147036_23 (sequence is synthesized)
tgtgtgtgtgtgtatggtgtgtattccatatctattcccatgtaaatccaaatacttattctttatttcagtaattcttaacttgaatcatagactttggaacgagttagggaatgctct

SEQ ID NO: 403320 - DNA, 120 bp, Artificial Sequence
  ENSG00000147036_24 (sequence is synthesized)
gttgcctaaaaagcaaacctacaagtatgttggtgtgtgtatgtgtatggaccagtttgtttgtgtgtgtgtgtgctcattttgaggggacaaggatctctagcattcataacattctca

SEQ ID NO: 403321 - DNA, 120 bp, Artificial Sequence
  ENSG00000147036_25 (sequence is synthesized)
caaagaaaggtaacaactatctttgtgtattttatgactgtgtgtgtttgcactcattgcaataaagtaggacaaaatgattttgaaatgcatacatcttttcagcttcctgtttcattt

SEQ ID NO: 403322 - DNA, 120 bp, Artificial Sequence
  ENSG00000147036_26 (sequence is synthesized)
ttacatcctcagatacaaccatatcaaattggcctcagttgttcatcagtgaaaatgctcagtttggggtgataccacataaatagcagctttcagatgactccccacattgggtccaga

SEQ ID NO: 403323 - DNA, 120 bp, Artificial Sequence
  ENSG00000147036_27 (sequence is synthesized)
agttctttcatataggctgaatataataaccatcctatatacagagctttatggaacacatgcagtttttatcgtccaagaacccctcaagatgtgtttggtaaatgctccaaagtctta

SEQ ID NO: 403324 - DNA, 120 bp, Artificial Sequence
  ENSG00000147036_28 (sequence is synthesized)
cagctagaaaaggacaaaaccaggattcaaacccagggtttcactttctaagtttatttattcagtattctagactagaatctggggatacaatagtgaacaaaataaactttccctcaa

SEQ ID NO: 403325 - DNA, 120 bp, Artificial Sequence
  ENSG00000147036_29 (sequence is synthesized)
agctaccttctgtttccatttgctgttcctttcacaattcatccttgagacctgaaacctaaagcactcagaactgatactctagttcattatcatatcagttccatttctagtaacttc

SEQ ID NO: 403326 - DNA, 120 bp, Artificial Sequence
  ENSG00000147036_30 (sequence is synthesized)
agaaaaacaagaccactttcaggcctatctgcccttttaagttctgataggtctgatgatgatgtgctaaccattttgatttgtgtgtcaaatctaagcaaagaccatgtttgagtattg

SEQ ID NO: 403327 - DNA, 120 bp, Artificial Sequence
  ENSG00000147036_31 (sequence is synthesized)
tctttatgaaatgacatttcggtaaattagaaacaacaataggcttgtttagcccttaaacatgttgatgaaacttttcattttcctgaaagaattatagattttggaaggtcctcttct

SEQ ID NO: 403328 - DNA, 120 bp, Artificial Sequence
  ENSG00000147036_32 (sequence is synthesized)
atattatttttccaagaaggggaaaacgattcttacattttgctgtaggaaagtgtggcatgttacttcttatttaattatccaacttgccccccttctctgtggtagcatttttaatgt

SEQ ID NO: 403329 - DNA, 120 bp, Artificial Sequence
  ENSG00000147036_33 (sequence is synthesized)
agtacttaaggctgttgtctcttaaaggctacaggggcattttcaccaccactagtataactttaatattatttactatatacagcatgagcaattataaaccctgaaggtaatagtgga

SEQ ID NO: 403330 - DNA, 120 bp, Artificial Sequence
  ENSG00000147036_34 (sequence is synthesized)
aatgtttgaggatacattgaaatagtctctcaataatggggagactgcattatgctttgatagcaagacattttggaaaccattacaactctgtgtattttgtttcattaatgtaattac

SEQ ID NO: 403331 - DNA, 120 bp, Artificial Sequence
  ENSG00000147036_35 (sequence is synthesized)
ataccatctcttccacacacaccccagaatattatacatttttattttgcccaagcctgtttcagtcatcagtttgtagtcttttacttccacttgtaacttgataactgagtagaacag

SEQ ID NO: 403332 - DNA, 120 bp, Artificial Sequence
  ENSG00000147036_36 (sequence is synthesized)
gggtttgctagagtatatttccctgtgcttctttaggtagttgactatgctattaagataacagtatttgcttactgataacttgagaaacagtcattttcttggtctgtgctaaattgc

SEQ ID NO: 403333 - DNA, 120 bp, Artificial Sequence
  ENSG00000147036_37 (sequence is synthesized)
atctcttccagtggcagcttatttctttaacttttttgacatattaagattttaatcatggtaatactgaaattgtttcaaatttgaaagagcgaacctcagtaacttcaatgaaacaaa

SEQ ID NO: 403334 - DNA, 120 bp, Artificial Sequence
  ENSG00000147036_38 (sequence is synthesized)
tgggtttgtgatttctagccatgttaaatgaacacacaattaaaaggaaaaccattagtggtgcaaagagccctgtgctggaaatctcaaagtcttgctctgccacttttaggggccact

SEQ ID NO: 403335 - DNA, 120 bp, Artificial Sequence
  ENSG00000147036_39 (sequence is synthesized)
gtagtaataataataatcaccctgtctacttcacagggttgttataaaagttgtcaatgataaaatggatataagtgagttttttaatgtgcagatcctttatatatttaaaagggatgt

SEQ ID NO: 403336 - DNA, 120 bp, Artificial Sequence
  ENSG00000147036_40 (sequence is synthesized)
tgaggtctgggtcactagatggataaaaaccaagtgtacatttttttatattctaccaccagtcctgagcacagcactttgcctcagaaggttctgattcaccaagacttactacatggg

SEQ ID NO: 403337 - DNA, 120 bp, Artificial Sequence
  ENSG00000147036_41 (sequence is synthesized)
aatagactgatttagctcaggagctccttttaatgcaaatatttattttgcttgctgagaacaaaggattacagtgccaataactcaagaaaaggagcaggcaagccaggtctgtagaga

SEQ ID NO: 403338 - DNA, 120 bp, Artificial Sequence
  ENSG00000147036_42 (sequence is synthesized)
gaaaatgaactggaaaataaagtaattctggggtgagtttgatctgcactttaattcaagtctcagaaccacgtgacatatagtgatcaaaatatactctcaattgcatattaggccttc

SEQ ID NO: 403339 - DNA, 120 bp, Artificial Sequence
  ENSG00000147036_43 (sequence is synthesized)
ctttggggacctgggctatttattcagcactgtcccaaattaatagctaaatgactgagcctcaaatttgccgagcccgtgtaatattggtataaatttggcaaggaaagcaaatgagaa

SEQ ID NO: 403340 - DNA, 120 bp, Artificial Sequence
  ENSG00000147036_44 (sequence is synthesized)
ggcaggcaaaggggtgggtgaggggaagcttgctgaagctcagtatctcaaagtgagttgtggatgcgtgtttaacactataaagaaccagtccattcttacccatgagttttattgctt

SEQ ID NO: 403341 - DNA, 120 bp, Artificial Sequence
  ENSG00000147036_45 (sequence is synthesized)
tctgggacctctaacccaggaccacccctgattcaccaacttctccttcttctcctctttaaatattatagttcattgtgatatgtttttcctgtatctgctctatcatgtgacctcctt

SEQ ID NO: 403342 - DNA, 120 bp, Artificial Sequence
  ENSG00000147036_46 (sequence is synthesized)
tcgcctgggagggcagattttctccttatctcttccatccatgtctgttcttagctaagagttccagcctcagtacagctggattaccctttggacagaagggcagacaacctcaaggtc

SEQ ID NO: 403343 - DNA, 120 bp, Artificial Sequence
  ENSG00000147036_47 (sequence is synthesized)
agcagcaacagaagttgggcctagtagtcagatcacaagtgagtgtggctattcatgagaatagggtggtggtggcatttatcctgcttcccctccataaataaacctggtaattttatt

SEQ ID NO: 403344 - DNA, 120 bp, Artificial Sequence
  ENSG00000147036_48 (sequence is synthesized)
tttaatgttacaaaaaaagttgatgctacattaaatgttttaccctcatccattatcataaatctcatactggaggtgtgatctctcttcttgtttctttaattgaaagtaccaatgaat

SEQ ID NO: 403345 - DNA, 120 bp, Artificial Sequence
  ENSG00000147036_49 (sequence is synthesized)
ttgttttgttttgtttttgttttcttgaatcattgaaacttgtcatttttatctagactcttccacaaatggcaaagtcacttatctgcagaattcccagaatcttcttttgcctttgtg

SEQ ID NO: 403346 - DNA, 120 bp, Artificial Sequence
  ENSG00000147036_50 (sequence is synthesized)
cagaattcccagaatcttcttttgcctttgtgcacctgctaattaccccctctgaactgaatttgaaaaaattaattaaaataaccgaatcacccatgtttttgttcttgcagggtttgg

SEQ ID NO: 403347 - DNA, 120 bp, Artificial Sequence
  ENSG00000147036_51 (sequence is synthesized)
tgagttatgtggattaaaagaacagactatcctctctctttttttgtctttcttctccctgtccaatactgaggaagaagagggagaagggggtaaagatacataaggcttaactaccca

SEQ ID NO: 403348 - DNA, 120 bp, Artificial Sequence
  ENSG00000147036_52 (sequence is synthesized)
gggttatgaaaacagtttgcaaagtcttcctgtttgcttcccttttggtttttcttagtccctgtaggaaaaagtttacccctctgtgtgcgagtgtgtgtgtgtgtgtgtgtaagtagt

SEQ ID NO: 403349 - DNA, 120 bp, Artificial Sequence
  ENSG00000147036_53 (sequence is synthesized)
tgagtgaaaaagaatgagactgacttaaggagagtcaatatcgcatatgaatcaaaagccaacatttagctattagatagatctcagtgaaaggatatgttcaagctaagttgattaagt

SEQ ID NO: 403350 - DNA, 120 bp, Artificial Sequence
  ENSG00000147036_54 (sequence is synthesized)
ttattaaacttatttattaagcttgactaagcttattaaaacttctgctaggttgaagccattagtaaccatctgtagaagataacagccatgagtttcacaaatacagcagcagtgtct

SEQ ID NO: 403351 - DNA, 120 bp, Artificial Sequence
  ENSG00000147036_55 (sequence is synthesized)
gctagaattgtgctgtgagccacgaatgcaaaccacatatgcaattttcaaattttctagtagctaccaaaaaggtaaaagaaaaagatgaaattaattttaataatgtatttgacttag

SEQ ID NO: 403352 - DNA, 120 bp, Artificial Sequence
  ENSG00000147036_56 (sequence is synthesized)
ccttatatatccaaaatgatagcatttcaatatgcaatcaatataaaaacatgaatgagctattttacatttttgtactgagtcttcaaactctagtgtgtattttatacttactataca

SEQ ID NO: 403353 - DNA, 120 bp, Artificial Sequence
  ENSG00000147036_57 (sequence is synthesized)
tctccagtctcgaagtagccacatttcaagtgtataagagctgcatgtgagttggctattgtattggacagtcccattcctgtttcctagtattgataaagtcttcctaccttccttcgt

SEQ ID NO: 403354 - DNA, 120 bp, Artificial Sequence
  ENSG00000147036_58 (sequence is synthesized)
tgttatgggagaaaatgtaaacagaacctgcctattacacgagagctgcaatatttccccaaatgcagcccagcagtaccatgagctgccctgtggaaaaatttaatctgtgattaaata

SEQ ID NO: 403355 - DNA, 120 bp, Artificial Sequence
  ENSG00000147036_59 (sequence is synthesized)
agttaggaaagttttattattttacccccttttgaagattacatggtacattaacatattaaagattgagtaaactctcctgggtaaaaaaacctgtttgacgttgtttagttgttgagt

SEQ ID NO: 403356 - DNA, 120 bp, Artificial Sequence
  ENSG00000147036_60 (sequence is synthesized)
tctgtgtctataagaatcctagaaattgccacaagtgtctctccataagaaaaactttgtgttttcctctctttctccactccttttggggcccatttctatttatctttgtattcagaa

SEQ ID NO: 403357 - DNA, 120 bp, Artificial Sequence
  ENSG00000147036_61 (sequence is synthesized)
tcacccgagagccacaatatctcttttgttctagaacaaccacctcctaaattgaaaccaacagatggctttaaagtcttgcacttggacatagatcttcagaaagtaccaaaatatata

SEQ ID NO: 403358 - DNA, 120 bp, Artificial Sequence
  ENSG00000147036_62 (sequence is synthesized)
ccttcctcttattctttcagaaacggtgaacactctaaaaagatgtgggggtgtggtgggggatatgtgaatgtgtatatgtgtaaacaccaaatacatacagtttcttaagtagagtaa

SEQ ID NO: 403359 - DNA, 120 bp, Artificial Sequence
  ENSG00000147036_63 (sequence is synthesized)
tcgtgatccgcccgcctcggcctcccaatatttttatattttgtgtgtggtgacaatgtacatgctttaatgtgtactgttctagtaatatgtatgaagtagctgtgacatagcagtcag

SEQ ID NO: 403360 - DNA, 120 bp, Artificial Sequence
  ENSG00000147036_64 (sequence is synthesized)
tatgtatgaagtagctgtgacatagcagtcagttttaaagatacagactataattgactactgtcaatctttaacaagtgatctttttgcaacttggttttagtggggtctctgacgttg

SEQ ID NO: 403361 - DNA, 120 bp, Artificial Sequence
  ENSG00000147036_65 (sequence is synthesized)
tccccacaagtttcattttaaaatctatgcttaagtggcagttaccaatataattaattctgctgctgaatttggttcatattgaatgtggtaacccttatatgtggatatattcaaaca

SEQ ID NO: 403362 - DNA, 120 bp, Artificial Sequence
  ENSG00000147036_66 (sequence is synthesized)
tgtggattgatttagatcatccgttttgtctttgttttttaggactttgctatttcaatattaaagatgtcttttgaatactgtagcagcagtagaatccctatgttcttgaaaatgcaa

SEQ ID NO: 403363 - DNA, 120 bp, Artificial Sequence
  ENSG00000147036_67 (sequence is synthesized)
aatgtaacatgagttgcacatagactctctagcagtagaaatggaatattctaagtgcagaagtttggttttagaatctgttaaggaaggacggcccaatctttgaaaaggtacagcttt

SEQ ID NO: 403364 - DNA, 120 bp, Artificial Sequence
  ENSG00000147036_68 (sequence is synthesized)
ctcaactttgaacatctgggggaactcttcttggaagtctgaattttaatatctttaatccaatggctctaaattaacaaacattaaaaaatggatttcgtagaatcaaattattagggg

SEQ ID NO: 403365 - DNA, 120 bp, Artificial Sequence
  ENSG00000147036_69 (sequence is synthesized)
gagcactttgcaaagccatatactggtgaatatatactgggtcaagcaccacatgttagttttggaatgtgtatttcccagcgaatagaatttactgctccaaaaagcttttttggcata

SEQ ID NO: 403366 - DNA, 120 bp, Artificial Sequence
  ENSG00000147036_70 (sequence is synthesized)
aatcacaatacttacagaaatataattgtatcattgaaaaaaacaaagctcaccttcctaatgatacatttcacaaactgcacattagggcaatttcttacttatgaggaggtacaaaga

SEQ ID NO: 403367 - DNA, 120 bp, Artificial Sequence
  ENSG00000147036_71 (sequence is synthesized)
aagaaatactctgtcaatatagtataactgcttatttcaaattgtatctaggaatgaataactactattatttaaagtactactgaattttgaggaactgatcaaagaattagtattatt

SEQ ID NO: 403368 - DNA, 120 bp, Artificial Sequence
  ENSG00000147036_72 (sequence is synthesized)
aaattgtactatttgcaatatatttgccttggcacaaatgcagagttaaaaacataaaattataaaaaaaaataatagtgattggttgttactactttaaaatcctactaatttccatta

SEQ ID NO: 403369 - DNA, 120 bp, Artificial Sequence
  ENSG00000147036_73 (sequence is synthesized)
gcactaaatcaaacagcacttatctgttgtatacaagtaaaattttgaaagactcggacacaaaatgaaaggctttttaaaaatgtctttgccataacaggttatatgacctcttgctaa

SEQ ID NO: 403370 - DNA, 120 bp, Artificial Sequence
  ENSG00000147036_74 (sequence is synthesized)
ttgttatatttccttaggggcactttgaggctctttcaaagacatctgcagcaattaggtctaaatttagagtagaatattttgccagatattttactatatcacaaaatgtcatactac

SEQ ID NO: 403371 - DNA, 120 bp, Artificial Sequence
  ENSG00000147036_75 (sequence is synthesized)
taaaaccaaattctcaagtattctggtatgttacatattaatataccaaaacatcactttctataagtctattattatgtacataatatttttaaaaataatgggtattttggtcctagt

SEQ ID NO: 403372 - DNA, 120 bp, Artificial Sequence
  ENSG00000147036_76 (sequence is synthesized)
tttggtcctagtgaaaaagtataatgcaatacatgacattaatctttagtcaaaacccattgaggtgtctgacagggaaattagcaatcataagctataagatatatattattttcaagg

SEQ ID NO: 403373 - DNA, 120 bp, Artificial Sequence
  ENSG00000147036_77 (sequence is synthesized)
acaaaatggcaaatgataatacagaaagacgtgatcactggagcaagttagctggtgtgcagactaagaaggatcaacttgcaaatgctcatcagaatttagcttttgttattggttgtt

SEQ ID NO: 403374 - DNA, 120 bp, Artificial Sequence
  ENSG00000147036_78 (sequence is synthesized)
ctgcaggggatagtactagtcagttgatattgcttccctttcatgtgggagtttgctcacagcccactgcatggtataatgaaatctctataagcaagatagagtcagaagcttagagat

SEQ ID NO: 403375 - DNA, 120 bp, Artificial Sequence
  ENSG00000147036_79 (sequence is synthesized)
gcactttatggtttttacaactgctgttacaatgttctaaacactgtgatctttccaaatgtgttttctgtattcgttttgtactgtagaaaataattcgctataaactggactttatag

SEQ ID NO: 403376 - DNA, 120 bp, Artificial Sequence
  ENSG00000147036_80 (sequence is synthesized)
tgtttaaagcgatgttatttattggcttattgcccctccttataatacatttatgtacagtacacttaatgtaaaacctgtgataatcctttgccttaaaataaaatctaatgctaaata

SEQ ID NO: 403377 - DNA, 120 bp, Artificial Sequence
  ENSG00000147041_0 (sequence is synthesized)
ggtttttcaagttcctgctccaagtagttcacaagggtcaagtagtccagcattctacagtttgtgtgtttgagagaaaaataagcccataaaaacattctaaccttcagattaagtgtt

SEQ ID NO: 403378 - DNA, 120 bp, Artificial Sequence
  ENSG00000147041_1 (sequence is synthesized)
ttctgcattctctcccagcggatctgattcctgttctgaagaattgaagttgagcatcgttagttaaattcagctgctgcctgactgtataccacagcaaaggctttggaaacatttttc

SEQ ID NO: 403379 - DNA, 120 bp, Artificial Sequence
  ENSG00000147041_2 (sequence is synthesized)
agttaaaacaataatgactttcttggagtgtaatcccagtggaggctgttctacgtatagcctgaaagaatacttaactaccatacgcaattctgcagagaccttgtaaaaatcacactt

SEQ ID NO: 403380 - DNA, 120 bp, Artificial Sequence
  ENSG00000147041_3 (sequence is synthesized)
tacaccaaacaactgagtgattctgaattggttgggggaatcttagttgtagatatcaattcaccttcttgaagattcaaccactgctactcagagctgctgctgaaataccatgtctaa

SEQ ID NO: 403381 - DNA, 120 bp, Artificial Sequence
  ENSG00000147041_4 (sequence is synthesized)
gaactcagagttcatcaatctgtcatttttattagatcatgagaaggaaatgatcctgggcgtcctaaagagagatgaatatttgaaaaaagtggaggacaagagaataaggaagctgaa

SEQ ID NO: 403382 - DNA, 120 bp, Artificial Sequence
  ENSG00000147041_5 (sequence is synthesized)
aaatgaactcttagaagcaaaacgtagaagtgggaaaactcaacaagaggccagcagagtttgtgttcactgtcacagaaacctgggcctaatctttgaccggggagacccttgtcaggc

SEQ ID NO: 403383 - DNA, 120 bp, Artificial Sequence
  ENSG00000147041_6 (sequence is synthesized)
ttgctcactgagggtatgcagggagtgtcgagttgcaggccccaatggcagctggaagtgcactgtctgtgacaaaatcgcgcagctaaggattataactggtgagtggttttttgaaga

SEQ ID NO: 403384 - DNA, 120 bp, Artificial Sequence
  ENSG00000147041_7 (sequence is synthesized)
aaaggcaaaacgtttcaagcaagtcaatgttctcggcactgatgttgtccgacagtccattttaagaagaagtccaggagctgaagaagtacagagccaagagcaaacccgccaggatgc

SEQ ID NO: 403385 - DNA, 120 bp, Artificial Sequence
  ENSG00000147041_8 (sequence is synthesized)
agaaaagtcagacacttcacctgttgctgggaagaaggccagccatgatgggcccaagagaaagggatttcttcttagcaagttcagatcggcaaccagaggagaaatcataactcccaa

SEQ ID NO: 403386 - DNA, 120 bp, Artificial Sequence
  ENSG00000147041_9 (sequence is synthesized)
aactgacactgggcggagctatagcttggacttagacggtcaacattttcggagtttaaaatcacctcctggttcagacaggggaagcactggctcatcagatctcaatgaccaggaacc

SEQ ID NO: 403387 - DNA, 120 bp, Artificial Sequence
  ENSG00000147041_10 (sequence is synthesized)
tggtcctaggaccccgaagagcagtcggagcaatggtgtgaccccaggcactcagagttcaccagccccaagcacacgaactgtgacctcagtcatcagtagagagtatggttttgaaaa

SEQ ID NO: 403388 - DNA, 120 bp, Artificial Sequence
  ENSG00000147041_11 (sequence is synthesized)
ttccatggatttggctgctattgaaggtacctctcaggagctcacaaagagtcaccgcagaaacacttctggcacaccttccatagcagtgtctggaacctctctctcctcagatcagag

SEQ ID NO: 403389 - DNA, 120 bp, Artificial Sequence
  ENSG00000147041_12 (sequence is synthesized)
tcgatctgagttagatttgagtgagtcatttacagaagactcagaggatactgtaagcataagaagcaagtctgtccctggggctttagacaaggactccttggaagagactgaagaaag

SEQ ID NO: 403390 - DNA, 120 bp, Artificial Sequence
  ENSG00000147041_13 (sequence is synthesized)
cattgatgccttagtgtcctcgcagttatctacaaacactcaccgtctggcaagtggcctatcaactaccagccttaacagcatgatgagcgtttacagtgaaacgggagactatggcaa

SEQ ID NO: 403391 - DNA, 120 bp, Artificial Sequence
  ENSG00000147041_14 (sequence is synthesized)
cgtgaaagtcagtggtgaaatccttctccatatcagctactgctacaaaactggtgggctgtacatttttgtcaagaattgcagaaatctggccataggagatgaaaagaaacagaggac

SEQ ID NO: 403392 - DNA, 120 bp, Artificial Sequence
  ENSG00000147041_15 (sequence is synthesized)
agatgcttatgtcaagtcatatcttcttcctgacaagtcccggaacaacaagcgtaagaccaaaatcagaacaggcaccaatccagaattcaatgaaacactaaagtacactatcagcca

SEQ ID NO: 403393 - DNA, 120 bp, Artificial Sequence
  ENSG00000147041_16 (sequence is synthesized)
tacccagctggaaacaagaactctgcagctctcagtctggcactatgatcgatttggacgtaatagcttcctcggggaagtagagattccttttgactcatggaactttgaaaatccaac

SEQ ID NO: 403394 - DNA, 120 bp, Artificial Sequence
  ENSG00000147041_17 (sequence is synthesized)
tgatgagtggtttgtgcttcaacccaaggtggagtttgctcctgatattggccttcaatacaaaggagagctgacagttgttttacgttacattcccccagaagagaacctgatgcttcc

SEQ ID NO: 403395 - DNA, 120 bp, Artificial Sequence
  ENSG00000147041_18 (sequence is synthesized)
accagaacaactccaaggaaataagacttttaaaaagggaaagaagaaggagtcacctgtaatctctggaggaatactagaagtgttcatcaaagaggcaaagaatttgacagcagtgaa

SEQ ID NO: 403396 - DNA, 120 bp, Artificial Sequence
  ENSG00000147041_19 (sequence is synthesized)
aaactctggtaataaaaaagagtgttaaccctcagtggaatcatacattcatgttcagtggcatccatccccaggatataaagaatgtttgcctagaacttactatctgggacaaggagg

SEQ ID NO: 403397 - DNA, 120 bp, Artificial Sequence
  ENSG00000147041_20 (sequence is synthesized)
ccttttccagcaacatctttctgggaggagttcgtttgaattctggaagtggtgtgagccatgggaagaacgtggattggatggactctcagggggaagagcagcgcctttggcagaaga

SEQ ID NO: 403398 - DNA, 120 bp, Artificial Sequence
  ENSG00000147041_21 (sequence is synthesized)
tggccaacaaccctggaactccctttgagggtgtactcatgcttcgttccagcatgggaaaatgtaggctctaaagggaccagttctccaagaatgaggccaccaggacctatctggctg

SEQ ID NO: 403399 - DNA, 120 bp, Artificial Sequence
  ENSG00000147041_22 (sequence is synthesized)
tcttttcctaccattagcaaactgagacctgggattctgcttccctgccatttctcacctgacagtgttgggacatgaggggagagatgtcagtagtatgaacatttagggtcttgctga

SEQ ID NO: 403400 - DNA, 120 bp, Artificial Sequence
  ENSG00000147041_23 (sequence is synthesized)
gtgcctaaaaaacatatatttccatccaatcaaggccttcttgattggatgatagaaagtgtactacttgtcctgtcaacaagcaaattgtgcaaaggcttatagggtttatgccataaa

SEQ ID NO: 403401 - DNA, 120 bp, Artificial Sequence
  ENSG00000147041_24 (sequence is synthesized)
agaaatggcacaagcctccatttgctaattataagttactttagatttcctcaaatcctttgaagagaaagaggaccactgagaaggtagatcacttgaaaagtcagaagaaaggatact

SEQ ID NO: 403402 - DNA, 120 bp, Artificial Sequence
  ENSG00000147041_25 (sequence is synthesized)
ggccaacttttactcaccctaggaatccacatgatctcaagaaggcatggtggagatggttgcttgagcaaggggattgtcctgttattgcagcaaacttgtggattaaccaagtagtat

SEQ ID NO: 403403 - DNA, 120 bp, Artificial Sequence
  ENSG00000147041_26 (sequence is synthesized)
ttcaagatggattgacagggctttctatgattactatagaatttatcatctaaatcagtttactttttagaacaaagagagctaaataactacatcagaacgattgatgttgattagaat

SEQ ID NO: 403404 - DNA, 120 bp, Artificial Sequence
  ENSG00000147041_27 (sequence is synthesized)
tgacctgggaaaattgggatgtagggtcaccctactgatgacctaagagagctctgttttaaacatttattttataaaatgttctaagccattaactaaaaggaaatgagatataatggt

SEQ ID NO: 403405 - DNA, 120 bp, Artificial Sequence
  ENSG00000147041_28 (sequence is synthesized)
caattgatataccttttcacattgtgttcactgacgagactagtttaatgaaaaaggaggtactctacctgctattttacttctgttcctcttctgccctgttatgggagagaatcaaag

SEQ ID NO: 403406 - DNA, 120 bp, Artificial Sequence
  ENSG00000147041_29 (sequence is synthesized)
actccatctgctctcttcccccttgttttctccttcactgagtttttcttatctccttttgcagtggttaactattgtcacaataatgctgaatgaaaaaacacaccaaatgtcagtggc

SEQ ID NO: 403407 - DNA, 120 bp, Artificial Sequence
  ENSG00000147041_30 (sequence is synthesized)
ttaaaatgaccatcctttttctcacagttatgaagattggctatggcacctctgcttcctgctataggcctgaggttctagggcttcttatgcctcatcctctttaagccaaagggatag

SEQ ID NO: 403408 - DNA, 120 bp, Artificial Sequence
  ENSG00000147041_31 (sequence is synthesized)
ccagagcatcttgatggcagaagtgcaataagatgagccccactgctcgggtacattttcagcccctggttgtgtcatgtctactgatatctcattggtcaaaggaagtcagagggccaa

SEQ ID NO: 403409 - DNA, 120 bp, Artificial Sequence
  ENSG00000147041_32 (sequence is synthesized)
gatgaagaggcagggaaatatgcactgcccacagtgaagccatgacaagagtgaggatgcaggaaggcatgaagaattggggccaacagttcaatctaccataccttctctcacctggaa

SEQ ID NO: 403410 - DNA, 120 bp, Artificial Sequence
  ENSG00000147041_33 (sequence is synthesized)
ttccagatgcttgagctacgaaacttagatgcaaagaaagttaaagctagaaggaacctcaggcccagttgctcattttgcagattccaaatgtgaatttcagagagctgagataacttg

SEQ ID NO: 403411 - DNA, 120 bp, Artificial Sequence
  ENSG00000147041_34 (sequence is synthesized)
cccaaggccatatagaggctgtgactaaatctggacttaaatccagactatcaatcttaggccagtgttcttttttcaatatagtccttggcataatgctatgcttattaggtagataaa

SEQ ID NO: 403412 - DNA, 120 bp, Artificial Sequence
  ENSG00000147041_35 (sequence is synthesized)
agggcttatgtcaagaaatttggagcagagtctgattacttgagcatgaacatacccgaccaaggtatgttctggagtcatattctagcctctgagctcattttttcatgcgagttcata

SEQ ID NO: 403413 - DNA, 120 bp, Artificial Sequence
  ENSG00000147041_36 (sequence is synthesized)
taaaatcctcgaaagtttagaaactaggttttagtagtaacggagctagaatcatcttcgggcttattcctgctagttgttccatatttctagatttcatcttgaattttgaaaactgat

SEQ ID NO: 403414 - DNA, 120 bp, Artificial Sequence
  ENSG00000147041_37 (sequence is synthesized)
ttaagaatatatttagtattattattagtaagggaatacgcaatccagtttcaattttattcagaagtaggtcacctaattctagaaaatggttattagtctagtgtcgcttagcaaggt

SEQ ID NO: 403415 - DNA, 120 bp, Artificial Sequence
  ENSG00000147041_38 (sequence is synthesized)
acttaaaagaaaatctgcacatatccttgtgctgcccttcttaaaaacagaaaacaaaaagtgtaagatcatcattgcttcccacataggaaaaataaaatgtcttcagacttgatgtga

SEQ ID NO: 403416 - DNA, 120 bp, Artificial Sequence
  ENSG00000147044_0 (sequence is synthesized)
cgctgcggccgctatcccctccggaccatggccgacgacgacgtgctgttcgaggatgtgtacgagctgtgcgaggtgatcggaaagggtcccttcagtgttgtacgacgatgtatcaac

SEQ ID NO: 403417 - DNA, 120 bp, Artificial Sequence
  ENSG00000147044_1 (sequence is synthesized)
agagaaactgggcaacaatttgctgtaaaaattgttgatgtagccaagttcacatcaagtccagggttaagtacagaagatctaaagcgggaagccagtatctgtcatatgctgaaacat

SEQ ID NO: 403418 - DNA, 120 bp, Artificial Sequence
  ENSG00000147044_2 (sequence is synthesized)
ccacacattgtagagttattggagacatatagctcagatggaatgctttacatggttttcgaatttatggatggagcagatctgtgttttgaaatcgtaaagcgagctgacgctggtttt

SEQ ID NO: 403419 - DNA, 120 bp, Artificial Sequence
  ENSG00000147044_3 (sequence is synthesized)
gtgtacagtgaagctgtagccagccattatatgagacagatactggaagctctacgctactgccatgataataacataattcacagggatgtgaagccccactgtgttctccttgcctca

SEQ ID NO: 403420 - DNA, 120 bp, Artificial Sequence
  ENSG00000147044_4 (sequence is synthesized)
aaagaaaactcggcacctgttaaacttggaggctttggggtagctattcaattaggggagtctggacttgtagctggaggacgtgttggaacacctcattttatggcaccagaagtggtc

SEQ ID NO: 403421 - DNA, 120 bp, Artificial Sequence
  ENSG00000147044_5 (sequence is synthesized)
aaaagagagccttacggaaagcctgtagacgtctgggggtgcggtgtgatcctttttatcctgctcagtggttgtttgcctttttacggaaccaaggaaagattgtttgaaggcattatt

SEQ ID NO: 403422 - DNA, 120 bp, Artificial Sequence
  ENSG00000147044_6 (sequence is synthesized)
aaaggaaaatataagatgaatccaaggcagtggagccatatctctgaaagtgccaaagacctagtacgtcgcatgctgatgctggatccagctgaaaggatcactgtttatgaagcactg

SEQ ID NO: 403423 - DNA, 120 bp, Artificial Sequence
  ENSG00000147044_7 (sequence is synthesized)
aatcacccatggcttaaggagcgggatcgttacgcctacaagattcatcttccagaaacagtagagcagctgaggaaattcaatgcaaggaggaaactaaagggtgcagtactagccgct

SEQ ID NO: 403424 - DNA, 120 bp, Artificial Sequence
  ENSG00000147044_8 (sequence is synthesized)
gtgtcaagtcacaaattcaactcattctatggggatccccctgaagagttaccagatttctccgaagaccctacctcctcaggacttctagcagcagaaagagcagtctcacaggtgctg

SEQ ID NO: 403425 - DNA, 120 bp, Artificial Sequence
  ENSG00000147044_9 (sequence is synthesized)
gacagcctggaagagattcatgcgcttacagactgcagtgaaaaggacctagattttctacacagtgttttccaggatcagcatcttcacacactactagatctgtatgacaaaattaac

SEQ ID NO: 403426 - DNA, 120 bp, Artificial Sequence
  ENSG00000147044_10 (sequence is synthesized)
acaaagtcttcaccacaaatcaggaatcctccaagcgatgcagtacagagagccaaagaggtattggaagaaatttcatgttaccctgagaataacgacgcaaaggaactaaagcgtatt

SEQ ID NO: 403427 - DNA, 120 bp, Artificial Sequence
  ENSG00000147044_11 (sequence is synthesized)
ttaacacaacctcatttcatggccttacttcagactcacgacgtagtggcacatgaagtttacagtgatgaagcattgagggtcacacctcctcccacctctccctatttaaacggcgat

SEQ ID NO: 403428 - DNA, 120 bp, Artificial Sequence
  ENSG00000147044_12 (sequence is synthesized)
tctccagaaagtgctaacggagacatggatatggagaatgtgaccagagttcggctggtacagtttcaaaagaacacagatgaaccaatgggaatcactttaaaaatgaatgaactaaat

SEQ ID NO: 403429 - DNA, 120 bp, Artificial Sequence
  ENSG00000147044_13 (sequence is synthesized)
cattgtattgttgcaagaattatgcatgggggcatgattcacaggcaaggtacacttcatgttggtgatgaaattcgagaaatcaatggcatcagtgtggctaaccaaacagtggaacaa

SEQ ID NO: 403430 - DNA, 120 bp, Artificial Sequence
  ENSG00000147044_14 (sequence is synthesized)
ctgcaaaaaatgcttagggaaatgcgggggagtattaccttcaagattgtgccaagttaccgcactcagtcttcgtcctgtgagagagattccccttccacttccagacagtccccagct

SEQ ID NO: 403431 - DNA, 120 bp, Artificial Sequence
  ENSG00000147044_15 (sequence is synthesized)
aatggtcatagcagcactaacaattctgtttcggacttgccatcaactacccaaccaaaaggacgacagatctatgtaagagcacaatttgaatatgatccagccaaggatgacctcatc

SEQ ID NO: 403432 - DNA, 120 bp, Artificial Sequence
  ENSG00000147044_16 (sequence is synthesized)
atccagattattagtaaggatgatcataattggtggcagggtaaactggaaaactccaaaaatggaactgcaggtctcattccttctcctgaacttcaggaatggcgagtagcttgcatt

SEQ ID NO: 403433 - DNA, 120 bp, Artificial Sequence
  ENSG00000147044_17 (sequence is synthesized)
gccatggagaagaccaaacaggagcagcaggccagctgtacttggtttggcaagaaaaagaagcagtacaaagataaatatttggcaaagcacaatgcagatcttgtcacatatgaagaa

SEQ ID NO: 403434 - DNA, 120 bp, Artificial Sequence
  ENSG00000147044_18 (sequence is synthesized)
gtagtaaaactgccagcattcaagaggaaaacactagtcttattaggcgcacatggtgttgggagaagacacataaaaaacactctcatcacaaagcacccagaccggtttgcgtaccct

SEQ ID NO: 403435 - DNA, 120 bp, Artificial Sequence
  ENSG00000147044_19 (sequence is synthesized)
attccacatacaaccagacctccaaagaaagacgaagaaaatggaaagaattattactttgtatctcatgaccaaatgatgcaagacatctctaataacgagtacttggagtacggcagc

SEQ ID NO: 403436 - DNA, 120 bp, Artificial Sequence
  ENSG00000147044_20 (sequence is synthesized)
cacgaggatgcgatgtatgggacaaaactggagaccatccggaagatccacgagcaggggctgattgcaatactggacgtggagcctcaggcactgaaggtcctgagaactgcagagttt

SEQ ID NO: 403437 - DNA, 120 bp, Artificial Sequence
  ENSG00000147044_21 (sequence is synthesized)
gctccttttgttgttttcattgctgcaccaactattactccaggtttaaatgaggatgaatctcttcagcgtctgcagaaggagtctgacatcttacagagaacatatgcacactacttc

SEQ ID NO: 403438 - DNA, 120 bp, Artificial Sequence
  ENSG00000147044_22 (sequence is synthesized)
gatctcacaattatcaacaatgaaattgatgagacaatcagacatctggaggaagctgttgagctcgtgtgcacagccccacagtgggtccctgtctcctgggtctattaggcctctccc

SEQ ID NO: 403439 - DNA, 120 bp, Artificial Sequence
  ENSG00000147044_23 (sequence is synthesized)
cagatatctgagcataactgggagcacctcatttgtggaaaagcctctttgttatcggccttgtgtcagcaggtcatggtccctagagactacctagttgtagtgtgacctacatttata

SEQ ID NO: 403440 - DNA, 120 bp, Artificial Sequence
  ENSG00000147044_24 (sequence is synthesized)
attattgtcatgtccgaatagataggaggagaaaaacaattacacactaatttaaagagacagtatcttttttaatcagttctcctaaactttaataaaatgtatctttaaatgtatgta

SEQ ID NO: 403441 - DNA, 120 bp, Artificial Sequence
  ENSG00000147044_25 (sequence is synthesized)
ttattcaatcctttggaatgttatatttttggaaatcatagctttttatttccaaggcccctaaaaactgcacaaaatagatgctgctttctataatctattttaataataataaacaat

SEQ ID NO: 403442 - DNA, 120 bp, Artificial Sequence
  ENSG00000147044_26 (sequence is synthesized)
gattctgttaccttgactgggggtggaacactacattctttttagagtctgattttatggattggaatattgggatatctttctttcctttatttatttgaaataattagtgtagtgatt

SEQ ID NO: 403443 - DNA, 120 bp, Artificial Sequence
  ENSG00000147044_27 (sequence is synthesized)
acaaaacagtcataaatttttaaaggccttttttctctctttttttttttttagaatagtatttttttttaagtcctttatgtaacatccagataatgtgatactgtctctttgaagcac

SEQ ID NO: 403444 - DNA, 120 bp, Artificial Sequence
  ENSG00000147044_28 (sequence is synthesized)
cctgtaaaccttttagagatttgaagttgggtcttgactcttaatgcatgtggacagtcgcgagcgtttatgctgtcggtgtgtctgtgttggacaaaacaatctgtaatctacagcaaa

SEQ ID NO: 403445 - DNA, 120 bp, Artificial Sequence
  ENSG00000147044_29 (sequence is synthesized)
gtacattctacattccgttcatggggcacacccaggggaataagaataaaatgctattatgactaagttgtaaacctatgcacatcccttgcattttgggcaactttataaaaaaaaaga

SEQ ID NO: 403446 - DNA, 120 bp, Artificial Sequence
  ENSG00000147044_30 (sequence is synthesized)
aactgatttttattaataataatcatgtagtgaaatgtgtttgtaattttgtctcaatttaatttgttgtaaggtggggtggggggaattgctggtttcaccatttcagatctgtgttgt

SEQ ID NO: 403447 - DNA, 120 bp, Artificial Sequence
  ENSG00000147044_31 (sequence is synthesized)
ctaagagtattaacgttttaattaagcaaagaaatgatttttaatctgtatgtaattgttttaaagcacccattttaagagaaaatactgtgcaatgaagaaaccagtttaggcatttgc

SEQ ID NO: 403448 - DNA, 120 bp, Artificial Sequence
  ENSG00000147044_32 (sequence is synthesized)
tataaactgaaatattccaaaagaatcatctataacagccctgtaaattcctttaaaatgataactaacaggacagtttgaccaattttttttaaatatacttccttttatgtgttcaat

SEQ ID NO: 403449 - DNA, 120 bp, Artificial Sequence
  ENSG00000147044_33 (sequence is synthesized)
cgccgatccgccgccgccgccacctccctccgcggcgatcctcgctccatggtcctgccgcggccccctctgtagcccgagctgctccgcgacgcgacggagccggcctcggacagaggg

SEQ ID NO: 403450 - DNA, 80 bp, Artificial Sequence
  ENSG00000147044_34 (sequence is synthesized)
agcggtcgcggcctcgcggcccgcgcgggctgacgagcggagagcgcgacgccgcgcggtccccgaggatccgcacgccg

SEQ ID NO: 403451 - DNA, 80 bp, Artificial Sequence
  ENSG00000147044_35 (sequence is synthesized)
ccgccgcccgcgccggggcggtcgcctgcagaggaaggcgccgcagtctctgggcctcgcggccccactcgagcgtcctc

SEQ ID NO: 403452 - DNA, 120 bp, Artificial Sequence
  ENSG00000147044_36 (sequence is synthesized)
atttgttcaggcttccaagctgataatctttacaattgtataatttgttagatgctcattgaacctttgaaggcccaggagtgagtatcagttggcagggtgacaaagtagcctgccaga

SEQ ID NO: 403453 - DNA, 120 bp, Artificial Sequence
  ENSG00000147044_37 (sequence is synthesized)
cacagagccatgcgcccaagggccacgggtgtactggaggccacctgtggtctctccttcctcttgctgtatcccttggcacaggggaatcatctgtccttgttgctttagagacattaa

SEQ ID NO: 403454 - DNA, 120 bp, Artificial Sequence
  ENSG00000147044_38 (sequence is synthesized)
ccatctcataactcttccatgaagtcacattcttccaatacaggagattcgggctggggttctcagactctttgccagaggtcagtagaatgtttttcattagcatgtgagggtgtgaag

SEQ ID NO: 403455 - DNA, 120 bp, Artificial Sequence
  ENSG00000147044_39 (sequence is synthesized)
tgcttatattaacctgtgatccttgaaaacataccatcattttttgcttcttgtaggttagatggccttgtcactttgtgccttggcaggatgtgcagggtgtgttctgagctgaacagc

SEQ ID NO: 403456 - DNA, 120 bp, Artificial Sequence
  ENSG00000147044_40 (sequence is synthesized)
tcctcttaaaggaccaaacagagaaggcattagtatacttcttttacattgtcaacaccatacccgcctccgccccccaccgcctattattaaatggtggcgatttttttttttctgatg

SEQ ID NO: 403457 - DNA, 120 bp, Artificial Sequence
  ENSG00000147044_41 (sequence is synthesized)
ttgttctttgccagtgaccagatgagtctgcaacttactaacaaggtattgagtgaactacttctgtatgggccccacagtggggtgaccaagccaccaaaccagagataagctcaacag

SEQ ID NO: 403458 - DNA, 120 bp, Artificial Sequence
  ENSG00000147044_42 (sequence is synthesized)
tggtctcacactagatagagagagaaaccttcaaagagttgggtagggctgtgttagaactgattcgaatctgatagatgccaaggccagacagtcgttcctggtatggtactgaccaca

SEQ ID NO: 403459 - DNA, 120 bp, Artificial Sequence
  ENSG00000147044_43 (sequence is synthesized)
atttcgggctcttagtgtgaaggtgcgcactctacctcttttctggtgaagcacaaagacaactacaactaacacatgggaaacagaaacttccctccctctagtggaaacccccacgcc

SEQ ID NO: 403460 - DNA, 120 bp, Artificial Sequence
  ENSG00000147044_44 (sequence is synthesized)
cccacttgccctttgagcccacatctccagagatgctgatgatgcctgtcttaagccatctgccatatttataaaggtggattaagcagaggaggagaaaagcaatgccaacttaaatgt

SEQ ID NO: 403461 - DNA, 120 bp, Artificial Sequence
  ENSG00000147044_45 (sequence is synthesized)
ctgtggccccacaattcacaagcactgtagcactcatcctcagtggctttatacgtcctctgagaagcacacaggcaggcatcattcttgccatcattccgatggtgaaatccctgcatg

SEQ ID NO: 403462 - DNA, 120 bp, Artificial Sequence
  ENSG00000147044_46 (sequence is synthesized)
cagaactcattgacttctcaaagatgttacctgttccattccactaatacatgtcttctctaaagcagtgtctttatgacctagctgcatatacttacatttctgaattcagagtaattt

SEQ ID NO: 403463 - DNA, 120 bp, Artificial Sequence
  ENSG00000147044_47 (sequence is synthesized)
tgctgctgctgctgctgctgctgctgctactgctacattacaattgtccactaagcaatcagagaaaattgctaaaagcttctttactgcttccattccatcagcagaaccttttttttt

SEQ ID NO: 403464 - DNA, 120 bp, Artificial Sequence
  ENSG00000147044_48 (sequence is synthesized)
gcttccattccatcagcagaacctttttttttctttctttcttttaaagaccagaatgaatgtttagagtactaaatcttattagtggtcaattgaagtattggagagccacattttgaa

SEQ ID NO: 403465 - DNA, 120 bp, Artificial Sequence
  ENSG00000147044_49 (sequence is synthesized)
ggttctctcccccacccaactccattccccacagcaagaaagggagtgtttttatatgttgaattctttgttaaaaagatgaaatgtcctgattttccagtcacaagacagtaattactt

SEQ ID NO: 403466 - DNA, 120 bp, Artificial Sequence
  ENSG00000147044_50 (sequence is synthesized)
tgcacatacagcatatcccattttaatgctaaaaagggaaatgtcactcaatttaattcatctggaagtttcccagtgtcaagataacattgtagcctttttaaatgcaattaaatgtat

SEQ ID NO: 403467 - DNA, 120 bp, Artificial Sequence
  ENSG00000147044_51 (sequence is synthesized)
ctcttgtcaggtgagatgatttaaaatctttgctcagagaggaaaacaaatggttgacctacttcttgctatttgcattcagaaggcatcgtcccagcccatcctattggtggcagaata

SEQ ID NO: 403468 - DNA, 120 bp, Artificial Sequence
  ENSG00000147044_52 (sequence is synthesized)
tctaaagatgtcgcaaagtcccccactgcagtagaaatgcaggaggtgttcctgttccccgtccaattccttcttaggctgctagagacagccagtgggccaagccttcccctgtgctcc

SEQ ID NO: 403469 - DNA, 120 bp, Artificial Sequence
  ENSG00000147044_53 (sequence is synthesized)
aggcaggcctgggctgcagctactgttacctttttacagcctttgatctgatcgctgcagagttcttttgtttttaaatcacttgtatttgtctcttcattaaggcttcaagtttatttc

SEQ ID NO: 403470 - DNA, 120 bp, Artificial Sequence
  ENSG00000147044_54 (sequence is synthesized)
ttgaaaaagtttagtcaattgaaccaccctccaggaagattcccagcgtggaaactgcccctgaaaaacaaggcagcccaaagccagctctcttttgtcccccactgatgtcatgtcctt

SEQ ID NO: 403471 - DNA, 120 bp, Artificial Sequence
  ENSG00000147044_55 (sequence is synthesized)
tttttttttcatttcaggccagtttcttaacttggggcaaagagaatgtgttgctaaagctaccaagaaaactgcttgattaacaaattcttaatagaaatgcctcccacactgtctctt

SEQ ID NO: 403472 - DNA, 120 bp, Artificial Sequence
  ENSG00000147044_56 (sequence is synthesized)
tgaaaagagaaggcaccttggaatcggcattccaaaaccaagctccttgtcatcctcatccctcctccttcttgcttcctattatcaaactcgtgtgtgtttcttgttttctcagaactg

SEQ ID NO: 403473 - DNA, 120 bp, Artificial Sequence
  ENSG00000147044_57 (sequence is synthesized)
aacacagcctcctaattccatcctcttgactagggcttacaatactgagagcgattacaggctgtaataagttaaaggtccctgagcgtggctttcttgttctgcgcctctaattaattc

SEQ ID NO: 403474 - DNA, 120 bp, Artificial Sequence
  ENSG00000147044_58 (sequence is synthesized)
ttctattaaaagatgctttccttctcactgcagcttacagaaaggctacaagctttaatcacagatcatttcatttgccagagcctttccttttctaactcctttagaaataagatttcc

SEQ ID NO: 403475 - DNA, 120 bp, Artificial Sequence
  ENSG00000147044_59 (sequence is synthesized)
ctctctgtttggaatctctggatacaggactctcctccaagctcatggcttgattggctttgcctgtgcacacacacatcagtttgccttaaacttggagctatggggagtcccagattt

SEQ ID NO: 403476 - DNA, 120 bp, Artificial Sequence
  ENSG00000147044_60 (sequence is synthesized)
tccagcttagtgggtgaagtttagctgtcacctacatccaggaagtgggggaaaagggaaaaaaagaggatattcaccaccatgttcccatccggtctttcccctgccttgctttgtgca

SEQ ID NO: 403477 - DNA, 120 bp, Artificial Sequence
  ENSG00000147044_61 (sequence is synthesized)
gcaggtgggcagacagagcccacagaaacagaagtagaaagagggccgcaccatctctggggccagcactcctaagtcttagctctttgtgggaatagaaaatcctgagctcccaccacc

SEQ ID NO: 403478 - DNA, 120 bp, Artificial Sequence
  ENSG00000147044_62 (sequence is synthesized)
tctcgtctgaccctccatcaactccctcgaacctgtgcaaatggactgagcaaaagaaaatggaaagagatgtttgtcaccacacaggagacctcctttctggccccaagcacaactcca

SEQ ID NO: 403479 - DNA, 120 bp, Artificial Sequence
  ENSG00000147044_63 (sequence is synthesized)
tctctgcgtatgctcagaaactcagaatttagctgctacttatgtgttagctccattctctctggtgtgtgactgagagaacacgccagtgttcttactgacagaggcttaggggtgacc

SEQ ID NO: 403480 - DNA, 120 bp, Artificial Sequence
  ENSG00000147044_64 (sequence is synthesized)
ctctctggacccagaggaagtacaacctctgtagcgagaattgtccttgggaacagaaacaggcattcctccacagtgagtggctccccctattttttttttatttggaagagaccaaga

SEQ ID NO: 403481 - DNA, 120 bp, Artificial Sequence
  ENSG00000147044_65 (sequence is synthesized)
attgggggaattgatttccagtcttagctgtttcccggaatgtcatctgtgcaggcaggtaggcggctgccgggtgcagcaggcagcgtgactgatgtgaaggccgcccaatcctcacgt

SEQ ID NO: 403482 - DNA, 120 bp, Artificial Sequence
  ENSG00000147044_66 (sequence is synthesized)
gctaagacccgagtatcgtgtttaattgcagtgtaggcacgtcgccattcaaactcagttctggggtggttttgcataaagttttgccaacgtgttcttttttctgtatgtattattgcc

SEQ ID NO: 403483 - DNA, 120 bp, Artificial Sequence
  ENSG00000147044_67 (sequence is synthesized)
tttttataaaaggtgttgaagtattgtctcagtgataaaaagagagagatgttaatggttgttgtatatttcaccgtatccaattgtaagtatttgcagggtacagcagagccttagctt

SEQ ID NO: 403484 - DNA, 120 bp, Artificial Sequence
  ENSG00000147044_68 (sequence is synthesized)
gcaagagcgtttgtgcaggaggtgtccctcaacacccaggagctgaagggattggaaaggtttggattctttgtaaatgtcctgcttttctttctctctgtgtgtatctatttacatgcc

SEQ ID NO: 403485 - DNA, 120 bp, Artificial Sequence
  ENSG00000147044_69 (sequence is synthesized)
ttagcacacgccctcccatcctgatccctttgccctgtcgccggaacaaccagaatgctggtgcgctgccggcacagtacaagttgatgaaaccctaatcagttatcttgtgtgacaggg

SEQ ID NO: 403486 - DNA, 120 bp, Artificial Sequence
  ENSG00000147044_70 (sequence is synthesized)
gaagaagagaaactccatagtattccttgtagaatatacatacctgtaggatgctgtgtaatgggaaaccatagaattgggcttttgtcatttcaaagttggagaaatgtatgaataaaa

SEQ ID NO: 403487 - DNA, 120 bp, Artificial Sequence
  ENSG00000147044_71 (sequence is synthesized)
cctgacttttaatttgccctttgagaatatatcaacttttttatcaggtaaaattgtaaataatttagaaattatctcaaatggaatgatattctaagtatatcgtaagagaaattatga

SEQ ID NO: 403488 - DNA, 120 bp, Artificial Sequence
  ENSG00000147044_72 (sequence is synthesized)
aagaaaattgtctatgactttattttcaactttaaaataggctaccaaaggaattcattcataacagttaacatttaatacttttaagatgatgaaaagccatatagccattgaattttt

SEQ ID NO: 403489 - DNA, 120 bp, Artificial Sequence
  ENSG00000147044_73 (sequence is synthesized)
caaaatctaaatggttgcagtgactaagttgaaaagggcaacagctccttttatttattttttttttttaataggctgtttcacttgcagtggcttttgtgttgaagatgctgagttgtt

SEQ ID NO: 403490 - DNA, 120 bp, Artificial Sequence
  ENSG00000147044_74 (sequence is synthesized)
tcttaagaacacattttctctctgcttaaacttacctgctttcttcagcttgctgctaaatggcctgggtttgactttttgataactcaacatttctgataaatggaataatgtatatta

SEQ ID NO: 403491 - DNA, 120 bp, Artificial Sequence
  ENSG00000147044_75 (sequence is synthesized)
tctctttacaacttaaatctagctcatttttttaaccatattgtaacagaacacacaaattactttgtactcttgaaaaataaatgaaaatttttctcctgggttggctttattctacag

SEQ ID NO: 403492 - DNA, 120 bp, Artificial Sequence
  ENSG00000147044_76 (sequence is synthesized)
ggaggggttgtctctgacttcaccaccaagggctcatagaagggaattaagatatcgctgatagaggcatgaatcaccaccctgtcttcacaatacgcagatagaagcagagagactctg

SEQ ID NO: 403493 - DNA, 120 bp, Artificial Sequence
  ENSG00000147044_77 (sequence is synthesized)
gggacaattctttggctcaactggacagtgaaaacctgctggtttccccctaaccctgcttaggtggaaataccacacctctgtatttaaaaataaactaggagaggagcaaggacccag

SEQ ID NO: 403494 - DNA, 120 bp, Artificial Sequence
  ENSG00000147044_78 (sequence is synthesized)
agagagtatgtggttttgtcctctcatttcactaatagagaaactcggagcataaaatacaccaaggataattggtttatcatcttgaaacaatatgaattaacagcataaccagcactc

SEQ ID NO: 403495 - DNA, 120 bp, Artificial Sequence
  ENSG00000147044_79 (sequence is synthesized)
taatgaacagggtattcggataagaaagctctgtcatttttgcttgtttgtttgttcttccctgaggcagtagttgagtagcacagaacattctagttatgatgctaaaatctaaggctc

SEQ ID NO: 403496 - DNA, 120 bp, Artificial Sequence
  ENSG00000147044_80 (sequence is synthesized)
gggccatgtgacctcacaacatccccctcctgccccagtaggaagcttttgtatggttttcacaggttgaggtgagagtcctcctggatggatggtggtatgatcctgccatccagttgt

SEQ ID NO: 403497 - DNA, 120 bp, Artificial Sequence
  ENSG00000147044_81 (sequence is synthesized)
gccaaagcaatcctttattggcttaatggttggaattcagttgagtgtaatgcaaacctctgaatccagccatatgcagttagaatagcagcaggtgtttactcagaaaaagaacagagg

SEQ ID NO: 403498 - DNA, 120 bp, Artificial Sequence
  ENSG00000147044_82 (sequence is synthesized)
ctttttcatgggttcatgtcccataaataacttacacaggtaaactccatcctggtggtaaaggagaactttttaaaacaattttatttgaaaacaatcaattttacctgtgcagaaaaa

SEQ ID NO: 403499 - DNA, 120 bp, Artificial Sequence
  ENSG00000147044_83 (sequence is synthesized)
tgttaatgactaattagtgaagaaaatttgagtggaaagagaaaataaggctttaaaaaattgttctcttaggctccctggcatttaaccctaagagccattagcagaggcatgactttc

SEQ ID NO: 403500 - DNA, 120 bp, Artificial Sequence
  ENSG00000147044_84 (sequence is synthesized)
tctgtgtgggcagatgactatggggaaaaacattgatccggcaggcatttttgcattttctacattacttaaagaaaaattacttgtgtattcttaattaagtagtctaattaattagtt

SEQ ID NO: 403501 - DNA, 120 bp, Artificial Sequence
  ENSG00000147044_85 (sequence is synthesized)
ctgttcttgaaatcgtttctatttgtgcctgtgtcattttgacatttctaaagggaattggcagtgctgttaatataaaagaaaacttcttattaactttttgtccatattgatttttat

SEQ ID NO: 403502 - DNA, 120 bp, Artificial Sequence
  ENSG00000147044_86 (sequence is synthesized)
tactcttccgttaagtttcataaatctgtaataaatatatgttgcagccttgtcattttgctttatatttttcaataaccttttaggttatagttgacagacttttagaacaatttgctt

SEQ ID NO: 403503 - DNA, 120 bp, Artificial Sequence
  ENSG00000147044_87 (sequence is synthesized)
catttttattaccatcaatactgttcttctatgtattaataacatttgaataaaatgaaaagtttttcaaaataattgttttgcctgccataaaaatccactcataatttttaacttaaa

SEQ ID NO: 403504 - DNA, 120 bp, Artificial Sequence
  ENSG00000147044_88 (sequence is synthesized)
agaatttaacattttgtaaatcttgtgtcatgtttgtattattgtatatcttgtttattttttaggtattggaagaaatttcatgttaccctgagaataacgacgcaaaggaactaaagc

SEQ ID NO: 403505 - DNA, 120 bp, Artificial Sequence
  ENSG00000147044_89 (sequence is synthesized)
ttttcaatgccttagaagggaactgaaagggatctcagaggcccttctgtcttgagtgcagcattttctcatgggcctatacattgcccacagccacacagtgtctttagcgacaggact

SEQ ID NO: 403506 - DNA, 120 bp, Artificial Sequence
  ENSG00000147044_90 (sequence is synthesized)
aagacacaaagtctagggctcctaactccagccctgggcaaggttcccccttccccaggagtcccagggggcttttctgcagagcaacacacagttacagtggacagatttgctagcaat

SEQ ID NO: 403507 - DNA, 120 bp, Artificial Sequence
  ENSG00000147044_91 (sequence is synthesized)
ccttggctagcaatttgaaatttgaaatgtgagggagtggcctccagattagtggtaaaaccagccggcaggtccaagtctccccttaaatgcatttcctgttgattaaaattcaggcta

SEQ ID NO: 403508 - DNA, 120 bp, Artificial Sequence
  ENSG00000147044_92 (sequence is synthesized)
aaactaatagccaggtttaaatgaacattaaccaacataatcagtgttaacttttatgaagaaaaatagattgattcatgagtcataagaaaaatgtccagtttgccaacttttattttc

SEQ ID NO: 403509 - DNA, 120 bp, Artificial Sequence
  ENSG00000147044_93 (sequence is synthesized)
tgatggctattgtccatcctttagaaaaaaagtaatataagttatgtataaagttggtaaatttaataataccttgccaaaaatttgagccaagagcttggaattttcagttgtataaaa

SEQ ID NO: 403510 - DNA, 120 bp, Artificial Sequence
  ENSG00000147044_94 (sequence is synthesized)
tttcctggacagctacaggctctgcctgttgactctttcacctgcctctgctctatatatttggtgactttcaaccatgtgaaaattagaaaatttaaacttcttcatgaggacgtgttg

SEQ ID NO: 403511 - DNA, 120 bp, Artificial Sequence
  ENSG00000147044_95 (sequence is synthesized)
ttatacataaggaaacgtgggcccaaatggagaagcagcagccttccatctggcattgtctttcagtctgatcttcgagaaacagttcaagcataagcaggaggaaagcaatctttaagt

SEQ ID NO: 403512 - DNA, 120 bp, Artificial Sequence
  ENSG00000147044_96 (sequence is synthesized)
ttgtgagaacattccttcctagaaggagttgggtttgccctttcccaagatttaggtttctgtgaaaattcttccagacgtgccttggccagaaagcattctttcattttactccgtgta

SEQ ID NO: 403513 - DNA, 120 bp, Artificial Sequence
  ENSG00000147044_97 (sequence is synthesized)
gacgtgccttggccagaaagcattctttcattttactctgtattcatgctattgaaagttgcttctgtcagaggaaacaaacactgtgattgaggaaatattgatgaattttaaatgaca

SEQ ID NO: 403514 - DNA, 120 bp, Artificial Sequence
  ENSG00000147044_98 (sequence is synthesized)
aggaaattgccacattgacagaattttggtccatctatttaaagatgattttttgaaaagatatgcataagactcatattctgacaagtttcacagaacaattcagaggttattaccaag

SEQ ID NO: 403515 - DNA, 120 bp, Artificial Sequence
  ENSG00000147044_99 (sequence is synthesized)
aggatcccactgaaatcatcagcctgcctttttaaaagaaaaatattgtttagtgaaataataaatatgaagctctgatttttagcaaagaattgtgagtgtttactggattttcttctt

SEQ ID NO: 403516 - DNA, 79 bp, Artificial Sequence
  ENSG00000147044_100 (sequence is synthesized)
atgagaagccaccatgcctggcccagccttcttttctaatatgtgcctttaagactaaactctccctctaagtactgtc

SEQ ID NO: 403517 - DNA, 120 bp, Artificial Sequence
  ENSG00000147044_101 (sequence is synthesized)
tatgtgcctttaagactaaactctccctctaagtactgtcttaatgtatcccaccagttttgacatgacgcatttttataactcagttctaagtatttttatatttctattatgatattt

SEQ ID NO: 403518 - DNA, 120 bp, Artificial Sequence
  ENSG00000147044_102 (sequence is synthesized)
ttcattgacctatattatttataattgtctgttacttttcacacttaacaggattttctgtatatctttttgtaatttacttctaacttaattacattgtggtcagagaatgtagtctgt

SEQ ID NO: 403519 - DNA, 120 bp, Artificial Sequence
  ENSG00000147044_103 (sequence is synthesized)
atgacaccatttctttgaggtttgttgagacttgctttatggcatagcactttaatcgtttttataaatggcccacgtgtacttaagatgaatgtttattctttaattgttgcatgcaga

SEQ ID NO: 403520 - DNA, 120 bp, Artificial Sequence
  ENSG00000147044_104 (sequence is synthesized)
ggtatctttttgtaatgaagccaggtcagtgtgtacatttctgcacaatttataaataaggaagcaacattgtaaataacactctaagcattggttcttggtcatttctttctagctgaa

SEQ ID NO: 403521 - DNA, 120 bp, Artificial Sequence
  ENSG00000147044_105 (sequence is synthesized)
gtattacaagatgctgaaatgccaaccaaaagattaaattatctttaacagaatttgctgttgtgtagatattatcatgtcacaactcttggaaaattgacaaccttcgtatcatatctg

SEQ ID NO: 403522 - DNA, 120 bp, Artificial Sequence
  ENSG00000147044_106 (sequence is synthesized)
gtagataacgatagcagccaacactgtcatggtgcttggtatgtgccaagaacagttctaagccttctgcatttattaaatttgtttagttcttaaaacaatcctatgagatgggtacta

SEQ ID NO: 403523 - DNA, 120 bp, Artificial Sequence
  ENSG00000147044_107 (sequence is synthesized)
ttttcatctccattttacaaatgtgaaaactgaggtatggagagtttcagtaatttacccaagatcttaaagctagtaagcaaggaagctggaatttgaacccaggcagtctggatccag

SEQ ID NO: 403524 - DNA, 120 bp, Artificial Sequence
  ENSG00000147044_108 (sequence is synthesized)
aagccatacttttaaaccactatacataccacctctctcagaaaaatagatttctgcagccatccatcaaaactgtgccttccacaagtagatatatctgttttgatgaggttactacat

SEQ ID NO: 403525 - DNA, 120 bp, Artificial Sequence
  ENSG00000147044_109 (sequence is synthesized)
gagttaaataattctgctgcaaccaaacttgtacctgcctctgaaatattggccctcaatattcaacttagtttttaaaaattacattgatgcctctggattttgttactatgaaagcat

SEQ ID NO: 403526 - DNA, 120 bp, Artificial Sequence
  ENSG00000147044_110 (sequence is synthesized)
gaacagagtaggtcccatccacctactcagccctgcttccatgtggatctcctcagcactttgaactttttgcaggctgaaatctgagcaaaatgtagagaagttacaaatgatgacata

SEQ ID NO: 403527 - DNA, 120 bp, Artificial Sequence
  ENSG00000147044_111 (sequence is synthesized)
aggcttaataaggaaaaaacggagtgtctgagggaaaaaaactaaaggccataattgcagtaatatttccaggaagttcattcacttcccttgttaagaaatcacatagatagttcttct

SEQ ID NO: 403528 - DNA, 120 bp, Artificial Sequence
  ENSG00000147044_112 (sequence is synthesized)
ttctaaggatctgagaagtgatctatttctgttgagatacagttgttcatacaattgtgacaggtctctagatggaagttaagtctgcaatgaattgataattgacttcactagagggaa

SEQ ID NO: 403529 - DNA, 120 bp, Artificial Sequence
  ENSG00000147044_113 (sequence is synthesized)
ataggcttttgcaaccttttgtaaaactgtttaaatttagaatggtatgtgatctgtaaacaagtaagttttctagagtaatacagccccaaagtttctttcttaaaataggcttatcct

SEQ ID NO: 403530 - DNA, 120 bp, Artificial Sequence
  ENSG00000147044_114 (sequence is synthesized)
gtagaaattatagttcttccaacctatattattcagttttgtgttggttgttaaatgagattcaaaaatctattctttttgtattggaaatataaatgggcataaatgatatcatccttt

SEQ ID NO: 403531 - DNA, 120 bp, Artificial Sequence
  ENSG00000147044_115 (sequence is synthesized)
ggtcattgcacgttcagctcgagtgttatttattgaagcttgttctttcatgtgcatcttccgagagtatgtgcatcaatatgaagtacacacttcctaaagtttatttttaagactgac

SEQ ID NO: 403532 - DNA, 120 bp, Artificial Sequence
  ENSG00000147044_116 (sequence is synthesized)
aggtaacttattggatttgtacttaggagaacctgagagagaattgtaatacttctagtctctagtgatggtgtaaatttcataagaaaaatcagaggcttcatattttttaaaagccta

SEQ ID NO: 403533 - DNA, 120 bp, Artificial Sequence
  ENSG00000147044_117 (sequence is synthesized)
ttgaagatacatattaaaatgtatagttttgtcaagtatatttttggtgagccatggcaattgaggtgtccgttgtaacgggtcttgagctcctcttggtggctttttatggaacttcaa

SEQ ID NO: 403534 - DNA, 120 bp, Artificial Sequence
  ENSG00000147044_118 (sequence is synthesized)
ttaatagtatatttcaaaagaaaatgcagaattgcttctgttccaggattcagagtattgaaatttgttacctagaacacaaactttgctgggaaacaaagaatgtcacacttaacattc

SEQ ID NO: 403535 - DNA, 120 bp, Artificial Sequence
  ENSG00000147044_119 (sequence is synthesized)
tatgtaaataattttaatattccagagttacagatgtccttatatcatttctcatctgttgaagaaatttagtaaatacaattgacttttgtctttttggctaactaaccagaaggtact

SEQ ID NO: 403536 - DNA, 120 bp, Artificial Sequence
  ENSG00000147044_120 (sequence is synthesized)
gttagttattaatacaacataagtttctctttttttttttaaatggtcgaactagtttggggtggaaccagtatcatagatgtaaattctatgttcttgagtaagaagaacccctcttac

SEQ ID NO: 403537 - DNA, 120 bp, Artificial Sequence
  ENSG00000147044_121 (sequence is synthesized)
cttctttgcctttgaatagtagaaaaaataatgatacttctctcctagctccacctccagcctttttggccctcctgttccctggcagaattcaagcttgtggttggactcttcccagct

SEQ ID NO: 403538 - DNA, 120 bp, Artificial Sequence
  ENSG00000147044_122 (sequence is synthesized)
agcagaaggcggcggccgcggctcccgcccgcacagagcgccggtcccgcgaagccccctcccactcccgggcgggcggtggcggctgcgggaggaggagaaagaggagggagcgtctct

SEQ ID NO: 403539 - DNA, 120 bp, Artificial Sequence
  ENSG00000147044_123 (sequence is synthesized)
aaatgtagccagcttcatctcatgcatttttatccatatcatatgagactattaagattacaataccaggtaataccaaatattttaagactgttttgtttactttgtgtcacaactgta

SEQ ID NO: 403540 - DNA, 120 bp, Artificial Sequence
  ENSG00000147044_124 (sequence is synthesized)
aagatactcttggtgaagtggcttttcagggactgtactcatcagacaagggattttctttcttatggggtagtcctttagtcactggaactgtttatgttacttaaaccacaaagaact

SEQ ID NO: 403541 - DNA, 120 bp, Artificial Sequence
  ENSG00000147044_125 (sequence is synthesized)
aaaattagagacagttttcaataataaggaatcgtctgaatctaggtgatatattggaagaattacatctcttttgacaatgcaaaactgctgcactttcttggttcatttctactatat

SEQ ID NO: 403542 - DNA, 120 bp, Artificial Sequence
  ENSG00000147044_126 (sequence is synthesized)
ggaaaatggggataacacctgtatttagccaaatataaagctaaatagctaaacaaagctcaaagctcaaaatagataagatactttgctgtggaaaaaggtccatgcttatctacctaa

SEQ ID NO: 403543 - DNA, 120 bp, Artificial Sequence
  ENSG00000147044_127 (sequence is synthesized)
ctgcaatacaaaaacacaattacagatggaaattcatgttgaatataccattttaaaagcattagccacatcagtttatgtgaaaaatatgtgaaaagtggaaaatttacctcactgccc

SEQ ID NO: 403544 - DNA, 120 bp, Artificial Sequence
  ENSG00000147044_128 (sequence is synthesized)
cactgccctttgggagaaaatctgacttaaaagccttgttcttataactactattacagatgatactttgaatttttatttatttatttacttttgagatggagtctcaccctgtcaccc

SEQ ID NO: 403545 - DNA, 120 bp, Artificial Sequence
  ENSG00000147044_129 (sequence is synthesized)
gccacaggtgacacttttaaaataatagtaacagtataatatgtgtatcaaagcaattacctgtgagttattatatatatgctgttttatgatagtgtttctttttttctttttcttttt

SEQ ID NO: 403546 - DNA, 120 bp, Artificial Sequence
  ENSG00000147044_130 (sequence is synthesized)
caggcgtaagccaccgtgcctggccctttatgatagtgtttctaaacttttaaccaagttattgaaataaagtttttttcctaaaagtaactacctggaaagaagcaattaccatattca

SEQ ID NO: 403547 - DNA, 120 bp, Artificial Sequence
  ENSG00000147044_131 (sequence is synthesized)
ttaccatattcatccttcctaactctcccacccaagcattaaaggctgaattcaagtataatccttgagagtatttgactttattctatggtaacagcactgtccagtgaaatacaatta

SEQ ID NO: 403548 - DNA, 120 bp, Artificial Sequence
  ENSG00000147044_132 (sequence is synthesized)
ggatacaggttctaatgcctgtagatgagtgcatttttacaacctaggtgtataaacacagaacttcgttcaaatctcacctcttttatcaaggtatcttgtaacctctctacccttctc

SEQ ID NO: 403549 - DNA, 120 bp, Artificial Sequence
  ENSG00000147044_133 (sequence is synthesized)
ttgaactttctcttctctaactcttttccacttgtttgtattcacctgcataacattctaatgcttgctggcctgccagagcaggtctcttcccagtgaatgagccagggcaatttttct

SEQ ID NO: 403550 - DNA, 120 bp, Artificial Sequence
  ENSG00000147044_134 (sequence is synthesized)
ttgtccttccatatcccagcccagttttgttgttctcattgagcttatctcatttagtcattgtgattatctctatttcacagagcaggagaataaagaaactatatgctttattaataa

SEQ ID NO: 403551 - DNA, 120 bp, Artificial Sequence
  ENSG00000147044_135 (sequence is synthesized)
tcctcaaatgtgatgaatcacaaatatctgcagttaaattaccgttaatattaccttgttcactgtttcatgcatatgtgctgtgtttccccagattataattcattcccttttagacag

SEQ ID NO: 403552 - DNA, 120 bp, Artificial Sequence
  ENSG00000147044_136 (sequence is synthesized)
catgtcttctatagcaggggtctccaacccctgggccactgaccagtacccatccgtggcctgttaggaaccaggccacacaacaggaggtgagcagcaggccagccagcattaccacct

SEQ ID NO: 403553 - DNA, 90 bp, Artificial Sequence
  ENSG00000147044_137 (sequence is synthesized)
caacaggaggtgagcagcaggccagccagcattaccacctgtgtccccctcctgtcagatcagcctaggcattaggtcctcataggagtg

SEQ ID NO: 403554 - DNA, 120 bp, Artificial Sequence
  ENSG00000147044_138 (sequence is synthesized)
taatctgaggtggaacggtttcatcccaaaactattccccgacctctatcccccacccccacccaccctgccatccgtggaaaaattgtcttccacaaaatgggtccctggtgccaaaaa

SEQ ID NO: 403555 - DNA, 120 bp, Artificial Sequence
  ENSG00000147044_139 (sequence is synthesized)
ggttggggaccactgttctatattataaaagtggttaaagatgtgaattcagatgacctggggttgaactccatccttgccaccgtaactttatgaactctgactctgagtcaacctcgt

SEQ ID NO: 403556 - DNA, 120 bp, Artificial Sequence
  ENSG00000147044_140 (sequence is synthesized)
ggagtcagaataagaattaagtagctgatatatctactgtgcgtagcacaatgcttgacatatgcttagtgcctaatagatgttatctgatacctattattagttgctccatagtatcta

SEQ ID NO: 403557 - DNA, 120 bp, Artificial Sequence
  ENSG00000147044_141 (sequence is synthesized)
tcatgtatagggcacatagtaagttatcagtaaaacattgaatagattaggaacctgcccgtttgcagataggttaggctctccttggctgactgctctgtgcagtgttccatagctaga

SEQ ID NO: 403558 - DNA, 64 bp, Artificial Sequence
  ENSG00000147044_142 (sequence is synthesized)
ctccttggctgactgctctgtgcagtgttccatagctagaaacagatatataataaattttgag

SEQ ID NO: 403559 - DNA, 120 bp, Artificial Sequence
  ENSG00000147044_143 (sequence is synthesized)
tgacttgaatgtcttcaaattcattgccctgactccttctggctgaagagcaagggacctagtctcagggatggagcagccatggctatggcacaaaataaagaatatgctcaatgtgtg

SEQ ID NO: 403560 - DNA, 120 bp, Artificial Sequence
  ENSG00000147044_144 (sequence is synthesized)
gtattttaattcttaaagggtaaaacttgaagcaatgttggtgttggataatgctaacacttttctcttgaaatttagcagtagttgtgaacttatctgttcagaaagacctaaagtcac

SEQ ID NO: 403561 - DNA, 120 bp, Artificial Sequence
  ENSG00000147044_145 (sequence is synthesized)
aagaaaaaaggattatgtcatcataaggtttacagtggcaaaggaagcaaaagctgggcatattcagttactcttcatgctttcagcatgcttcagagaagagactccaaaaggaaattg

SEQ ID NO: 403562 - DNA, 120 bp, Artificial Sequence
  ENSG00000147044_146 (sequence is synthesized)
agttcagaggaataggaggaccccaaactataaacttctgaccagtagaagtcttagtgaagaagagtaggatgaaagtggaggcatccatgtagcaagactcttggcaactaaaaacaa

SEQ ID NO: 403563 - DNA, 120 bp, Artificial Sequence
  ENSG00000147044_147 (sequence is synthesized)
aactctgtctcaaaaaaaaaaaagaatgtggtattgttttatgtttttatattttacataaatgatttcatgcagtacatacccttttgcaattttgtggggttttttttactcaacatt

SEQ ID NO: 403564 - DNA, 120 bp, Artificial Sequence
  ENSG00000147044_148 (sequence is synthesized)
ggttttttttactcaacattatatttgagatatacccatgttgatgcatgtgagtgtagttcatttcattgcatcgctacatgatattccatttcgtgagtaaaccagttcacttctcca

SEQ ID NO: 403565 - DNA, 120 bp, Artificial Sequence
  ENSG00000147044_149 (sequence is synthesized)
gcctcagggattggaaaaatcttctggccaggggtggctagaggcaaagtctcaatcctggtcctggtcttcgacatcctctccttgggttccacactggtcttcacctgaacgtcgttt

SEQ ID NO: 403566 - DNA, 120 bp, Artificial Sequence
  ENSG00000147044_150 (sequence is synthesized)
ttttctgagcagttttcattagtttttttcatcttgtttgctgttcctgcacatcatctgtgaacatctgaatagaagacataccatttgagtgtcatgcagctatcagagggtaaaaaa

SEQ ID NO: 403567 - DNA, 120 bp, Artificial Sequence
  ENSG00000147044_151 (sequence is synthesized)
caggattaagacagaatatatcaggggaaggcctcttttttctctgccaacatgtgttccaaagatatgcaacatcaacaactgaagtaataccatgttataataaattaactatcttta

SEQ ID NO: 403568 - DNA, 120 bp, Artificial Sequence
  ENSG00000147050_0 (sequence is synthesized)
ggggggtgtcggcgttggagttgtgaattcgctgcgtttccatgaaatcctgcggagtgtcgctcgctaccgccgccgctgccgccgccgctttcggtgatgaggaaaagaaaatggcgg

SEQ ID NO: 403569 - DNA, 120 bp, Artificial Sequence
  ENSG00000147050_1 (sequence is synthesized)
cgggaaaagcgagcggcgagagcgaggaggcgtcccccagcctgacagccgaggagagggaggcgctcggcggactggacagccgcctctttgggttcgtgagatttcatgaagatggcg

SEQ ID NO: 403570 - DNA, 120 bp, Artificial Sequence
  ENSG00000147050_2 (sequence is synthesized)
ccaggacgaaggccctactgggcaaggctgttcgctgctatgaatctctaatcttaaaagctgaaggaaaagtggagtctgatttcttttgtcaattaggtcacttcaacctcttattgg

SEQ ID NO: 403571 - DNA, 120 bp, Artificial Sequence
  ENSG00000147050_3 (sequence is synthesized)
aagattatccaaaagcattatctgcataccagaggtactacagtttacagtctgactactggaagaatgctgcctttttatatggtcttggtttggtctacttccattataatgcatttc

SEQ ID NO: 403572 - DNA, 120 bp, Artificial Sequence
  ENSG00000147050_4 (sequence is synthesized)
agtgggcaattaaagcatttcaggaggtgctttatgttgatcccagcttttgtcgagccaaggaaattcatttacgacttgggcttatgttcaaagtgaacacagactatgagtctagtt

SEQ ID NO: 403573 - DNA, 120 bp, Artificial Sequence
  ENSG00000147050_5 (sequence is synthesized)
taaagcattttcagttagctttggttgactgtaatccctgcactttgtccaatgctgaaattcaatttcacattgcccacttatatgaaacccagaggaaatatcattctgcaaaagaag

SEQ ID NO: 403574 - DNA, 120 bp, Artificial Sequence
  ENSG00000147050_6 (sequence is synthesized)
cttatgaacaacttttgcagacagagaatctttctgcacaagtaaaagcaactgtcttacaacagttaggttggatgcatcacactgtagatctcctgggagataaagccaccaaggaaa

SEQ ID NO: 403575 - DNA, 120 bp, Artificial Sequence
  ENSG00000147050_7 (sequence is synthesized)
gctatgctattcagtatctccaaaagtccttggaagcagatcctaattctggccagtcctggtatttcctcggaaggtgctattcaagtattgggaaagttcaggatgcctttatatctt

SEQ ID NO: 403576 - DNA, 120 bp, Artificial Sequence
  ENSG00000147050_8 (sequence is synthesized)
acaggcagtctattgataaatcagaagcaagtgcagatacatggtgttcaataggtgtgctatatcagcagcaaaatcagcccatggatgctttacaggcctatatttgtgctgtacaat

SEQ ID NO: 403577 - DNA, 120 bp, Artificial Sequence
  ENSG00000147050_9 (sequence is synthesized)
tggaccatggccatgctgcagcctggatggacctaggcactctctatgaatcctgcaaccagcctcaggatgccattaaatgctacttaaatgcaactagaagcaaaagttgtagtaata

SEQ ID NO: 403578 - DNA, 120 bp, Artificial Sequence
  ENSG00000147050_10 (sequence is synthesized)
cctctgcacttgcagcacgaattaagtatttacaggctcagttgtgtaaccttccacaaggtagtctacagaataaaactaaattacttcctagtattgaggaggcgtggagcctaccaa

SEQ ID NO: 403579 - DNA, 120 bp, Artificial Sequence
  ENSG00000147050_11 (sequence is synthesized)
ttcccgcagagcttacctccaggcagggtgccatgaacacagcacagcagaatacttctgacaattggagtggtggacatgctgtgtcacatcctccagtacagcaacaagctcattcat

SEQ ID NO: 403580 - DNA, 120 bp, Artificial Sequence
  ENSG00000147050_12 (sequence is synthesized)
ggtgtttgacaccacagaaattacagcatttggaacagctccgcgcaaatagaaataatttaaatccagcacagaaactgatgctggaacagctggaaagtcagtttgtcttaatgcaac

SEQ ID NO: 403581 - DNA, 120 bp, Artificial Sequence
  ENSG00000147050_13 (sequence is synthesized)
aacaccaaatgagaccaacaggagttgcacaggtacgatctactggaattcctaatgggccaacagctgactcatcactgcctacaaactcagtctctggccagcagccacagcttgctc

SEQ ID NO: 403582 - DNA, 120 bp, Artificial Sequence
  ENSG00000147050_14 (sequence is synthesized)
tgaccagagtgcctagcgtctctcagcctggagtccgtcctgcctgccctgggcagcctttggccaatggacccttttctgcaggccatgttccctgtagcacatcaagaacgctgggaa

SEQ ID NO: 403583 - DNA, 120 bp, Artificial Sequence
  ENSG00000147050_15 (sequence is synthesized)
gtacagacactattttgataggcaataatcatataacaggaagtggaagtaatggaaacgtgccttacctgcagcgaaacgcactcactctacctcataaccgcacaaacctgaccagca

SEQ ID NO: 403584 - DNA, 120 bp, Artificial Sequence
  ENSG00000147050_16 (sequence is synthesized)
gcgcagaggagccgtggaaaaaccaactatctaactccactcaggggcttcacaaaggtcagagttcacattcggcaggtcctaatggtgaacgacctctctcttccactgggccttccc

SEQ ID NO: 403585 - DNA, 120 bp, Artificial Sequence
  ENSG00000147050_17 (sequence is synthesized)
agcatctccaggcagctggctctggtattcagaatcagaacggacatcccaccctgcctagcaattcagtaacacagggggctgctctcaatcacctctcctctcacactgctacctcag

SEQ ID NO: 403586 - DNA, 120 bp, Artificial Sequence
  ENSG00000147050_18 (sequence is synthesized)
gtggacaacaaggcattaccttaaccaaagagagcaagccttcaggaaacatattgacggtgcctgaaacaagcaggcacactggagagacacctaacagcactgccagtgtcgagggac

SEQ ID NO: 403587 - DNA, 120 bp, Artificial Sequence
  ENSG00000147050_19 (sequence is synthesized)
ttcctaatcatgtccatcagatgacggcagatgctgtttgcagtcctagccatggagattctaagtcaccaggtttactaagttcagacaatcctcagctctctgccttgttgatgggaa

SEQ ID NO: 403588 - DNA, 120 bp, Artificial Sequence
  ENSG00000147050_20 (sequence is synthesized)
aagccaataacaatgtgggtactggaacctgtgacaaagtcaataacatccacccagctgttcatacaaagactgataactctgttgcctcttcaccatcttcagccatttcaacagcaa

SEQ ID NO: 403589 - DNA, 120 bp, Artificial Sequence
  ENSG00000147050_21 (sequence is synthesized)
caccttctccaaaatccactgagcagacaaccacaaacagtgttaccagccttaacagccctcacagtgggctacacacaattaatggagaagggatggaagaatctcagagccccatga

SEQ ID NO: 403590 - DNA, 120 bp, Artificial Sequence
  ENSG00000147050_22 (sequence is synthesized)
cagatcataccatcaatgtctgtgtccatataccccagctcagcagaagttctgaaggcatgcaggaatctaggtaaaaatggcttatctaacagtagcattttgttggataaatgtcca

SEQ ID NO: 403591 - DNA, 120 bp, Artificial Sequence
  ENSG00000147050_23 (sequence is synthesized)
cctccaagaccaccatcttcaccataccctcccttgccaaaggacaagttgaatccacctacacctagtatttacttggaaaataaacgtgatgctttctttcctccattacatcaattt

SEQ ID NO: 403592 - DNA, 120 bp, Artificial Sequence
  ENSG00000147050_24 (sequence is synthesized)
tgtacaaatccgaacaaccctgttacagtaatacgtggccttgctggagctcttaagttagacctgggacttttctctactaaaactttggtggaagctaacaatgaacatatggtagaa

SEQ ID NO: 403593 - DNA, 120 bp, Artificial Sequence
  ENSG00000147050_25 (sequence is synthesized)
gtgaggacacagttgttgcagccagcagatgaaaactgggatcccactggaacaaagaaaatctggcattgtgaaagtaatagatctcatactacaattgctaaatatgcacagtaccag

SEQ ID NO: 403594 - DNA, 120 bp, Artificial Sequence
  ENSG00000147050_26 (sequence is synthesized)
gcctcctcattccaggaatcattgagagaagaaaatgaaaaaagaagtcatcataaagaccactcagatagtgaatctacatcgtcagataattctgggaggaggaggaaaggacccttt

SEQ ID NO: 403595 - DNA, 120 bp, Artificial Sequence
  ENSG00000147050_27 (sequence is synthesized)
aaaaccataaagtttgggaccaatattgacctatctgatgacaaaaagtggaagttgcagctacatgagctgactaaacttcctgcttttgtgcgtgtcgtatcagcaggaaatcttcta

SEQ ID NO: 403596 - DNA, 120 bp, Artificial Sequence
  ENSG00000147050_28 (sequence is synthesized)
agccatgttggtcataccatattgggcatgaacacagttcaactatacatgaaagttccagggagcagaacaccaggtcatcaggaaaataacaacttctgttcagttaacataaatatt

SEQ ID NO: 403597 - DNA, 120 bp, Artificial Sequence
  ENSG00000147050_29 (sequence is synthesized)
ggcccaggtgactgtgaatggtttgttgttcctgaaggttactggggtgttctgaatgacttctgtgaaaaaaataatttgaatttcctaatgggttcttggtggcccaatcttgaagat

SEQ ID NO: 403598 - DNA, 120 bp, Artificial Sequence
  ENSG00000147050_30 (sequence is synthesized)
ctttatgaagcaaatgttccagtgtataggtttattcagcgacctggagatttggtctggataaatgcaggcactgttcattgggttcaggctattggctggtgcaacaacattgcttgg

SEQ ID NO: 403599 - DNA, 120 bp, Artificial Sequence
  ENSG00000147050_31 (sequence is synthesized)
aatgttggtccacttacagcctgccagtataaattggcagtggaacggtacgaatggaacaaattgcaaagtgtgaagtcaatagtacccatggttcatctttcctggaatatggcacga

SEQ ID NO: 403600 - DNA, 120 bp, Artificial Sequence
  ENSG00000147050_32 (sequence is synthesized)
aatatcaaggtctcagatccaaagctttttgaaatgattaagtattgtcttctaagaactctgaagcaatgtcagacattgagggaagctctcattgctgcaggaaaagagattatatgg

SEQ ID NO: 403601 - DNA, 120 bp, Artificial Sequence
  ENSG00000147050_33 (sequence is synthesized)
catgggcggacaaaagaagaaccagctcattactgtagcatttgtgaagtggaggtttttgatctgctttttgtcactaatgagagtaattcacgaaagacctacatagtacattgccaa

SEQ ID NO: 403602 - DNA, 120 bp, Artificial Sequence
  ENSG00000147050_34 (sequence is synthesized)
gattgtgcacgaaaaacaagcggaaacttggaaaactttgtggtgctagaacagtacaaaatggaggacctgatgcaagtctatgaccaatttacattagctcctccattaccatccgcc

SEQ ID NO: 403603 - DNA, 120 bp, Artificial Sequence
  ENSG00000147050_35 (sequence is synthesized)
tcatcttgatattgttccatggacattaaatgagaccttttctgctattcaggaaataacccagttctgcaccactggtttttgtagctatctcgtaaggctgctggctgaaaactgtgt

SEQ ID NO: 403604 - DNA, 120 bp, Artificial Sequence
  ENSG00000147050_36 (sequence is synthesized)
ctatgcaaccttccaagtgcggagtgtcaaccaactggacgggagagagtactgctcctactccaggactctcacaaagctgatgagctgtacttcagaaaaaaataataatttccatgt

SEQ ID NO: 403605 - DNA, 120 bp, Artificial Sequence
  ENSG00000147050_37 (sequence is synthesized)
tttgtatatatctgacaaaactggcaacatcttacagactactgacttgaagacaacctcttttatatttctctatttctgggctgatgaatttgttttcatctgtcttttcccccttca

SEQ ID NO: 403606 - DNA, 120 bp, Artificial Sequence
  ENSG00000147050_38 (sequence is synthesized)
gaattttccttggaaaaaaaatactagcctagctggtcatttctttgtaaggtagttagcaattttaagtctttctttggtcaacttttttttaatgtgaaaagttaggtaagacacttt

SEQ ID NO: 403607 - DNA, 120 bp, Artificial Sequence
  ENSG00000147050_39 (sequence is synthesized)
tttactgcttttatgtttttctgtcttgttttgagaccatgatggttacacttttggttcctaaataaaatttaaaaaattaacagccaagtcacaaaggtaatggattgcacatagact

SEQ ID NO: 403608 - DNA, 120 bp, Artificial Sequence
  ENSG00000147050_40 (sequence is synthesized)
aaggaataaacttcagatttgtgatttttgtttctaatcttgatgtaaatttacactatttataaatacatatttattgcttgaaaatatttgtgaatggaatgctgttattttttccag

SEQ ID NO: 403609 - DNA, 120 bp, Artificial Sequence
  ENSG00000147050_41 (sequence is synthesized)
atttacctgccattgaaattttaaggagttctgtaatttcaaacactactcctattacattttctatgtgtaaataaaactgcttagcattgtacagaaacttttattaaaattgtttaa

SEQ ID NO: 403610 - DNA, 120 bp, Artificial Sequence
  ENSG00000147050_42 (sequence is synthesized)
ttgtttaatgtttaaagagttttctattgtttgagttttaaaaaagactttatgtacagtgcccagtttttgttcatttttgaaatctgattatatatattttatatatacttatgtatg

SEQ ID NO: 403611 - DNA, 120 bp, Artificial Sequence
  ENSG00000147050_43 (sequence is synthesized)
atatatatagaaatctggatatatatgtataaatctttagaacttaaatttttctcgttttaagtttcacatctatggtagatttttgaggtgtctactgtaaagtattgcttacaaaaa

SEQ ID NO: 403612 - DNA, 120 bp, Artificial Sequence
  ENSG00000147050_44 (sequence is synthesized)
gtatgattatttttaaagaaatatatatggtatgtatcctcaagacctaaaatgtcagactggtttattgttaagttgcaattactgcaatgacagaccaataaacaattgctgccaaaa

SEQ ID NO: 403613 - DNA, 120 bp, Artificial Sequence
  ENSG00000147050_45 (sequence is synthesized)
gtgacacaattacaacaactttgtgctggtgccggggaagtttgtgtctccaacgaatcccctcagtgctccccagccccgcgcgctccggccgttcccgccgtccccgcctgtggctgc

SEQ ID NO: 403614 - DNA, 120 bp, Artificial Sequence
  ENSG00000147050_46 (sequence is synthesized)
cccctgcccaaccccgcgatgtgaccctacagccgaaagccgccgctgccgacccgggggctccgcagcccctgccgccgccgccgccgccttcaccgccgccgcgttgggatttttcgt

SEQ ID NO: 403615 - DNA, 120 bp, Artificial Sequence
  ENSG00000147050_47 (sequence is synthesized)
tatttacaggcatgtaaacctcatcatccaaatactgaacctgtattaggcctcagtcaaacaccaatttcacagcaatccttgccactacacatgattccttctagccaagtagatgac

SEQ ID NO: 403616 - DNA, 120 bp, Artificial Sequence
  ENSG00000147050_48 (sequence is synthesized)
ctgtccagtcctgccaagaggaaaagaacatctagtccaacaaagaatacttctgacaattggagtggtggacatgctgtgtcacatcctccagtacagcaacaagctcattcatggtgt

SEQ ID NO: 403617 - DNA, 120 bp, Artificial Sequence
  ENSG00000147050_49 (sequence is synthesized)
acgggccgccgtcactcgcccggtcggctccggacgggcagtagccgctctcccgggaggaccgagcgcggcttgtctctggcggcggcggggcgggcacctcggtttggcgctcttcgc

SEQ ID NO: 403618 - DNA, 120 bp, Artificial Sequence
  ENSG00000147050_50 (sequence is synthesized)
gccgcctccgctggggcctcgggctcgggcagggacgggtcggtggcgttccctgagcgttaacgagtaaactgtgtctgtctccacagccgcctctttgggttcgtgagatttcatgaa

SEQ ID NO: 403619 - DNA, 120 bp, Artificial Sequence
  ENSG00000147050_51 (sequence is synthesized)
gtacagatgatgctgttaatgagtgtttaggtagtgttgattaaaaaaaaaataatgtgccttcctgccttactagaatcatagaagttcatatctggaattcataccccttatttcacg

SEQ ID NO: 403620 - DNA, 120 bp, Artificial Sequence
  ENSG00000147050_52 (sequence is synthesized)
gatgaggaaattgactcccagagaggttaactgacttgcccaaattaagagccaaaattagcaactcacatttaagcagggagtcagtttttatgtactaagaccattatattttgatat

SEQ ID NO: 403621 - DNA, 120 bp, Artificial Sequence
  ENSG00000147050_53 (sequence is synthesized)
ccagatattacttttctcaactttaaatgttttaatattgtcttcatcaggcctgctgagcattgtcattttaaaatctgagaatatttgataaattgatgaaagaaaaattatgaagtc

SEQ ID NO: 403622 - DNA, 120 bp, Artificial Sequence
  ENSG00000147050_54 (sequence is synthesized)
ttccaaagtaaattttcttaaaacatatattagaaagcagtaattgtaaacgacaacttaccaagctggatctcctaatggatacattgccagtattcacttaccattcagcgaagaatt

SEQ ID NO: 403623 - DNA, 120 bp, Artificial Sequence
  ENSG00000147050_55 (sequence is synthesized)
cattttaaattatttgattccaaacctcatattttgtgttattggaaatactttaagaaagatgccatgaaacaacttcatgcagtagtagtacccatgaattaagaagatagaaaagtt

SEQ ID NO: 403624 - DNA, 120 bp, Artificial Sequence
  ENSG00000147050_56 (sequence is synthesized)
cactccagcctggtcaacaggagtcaaaccttgtctcaaaaaattaaaaacatgaaacttagtttcaaaacacaaataatactattcaatctagatatgaactttttttcagttgtatgg

SEQ ID NO: 403625 - DNA, 120 bp, Artificial Sequence
  ENSG00000147050_57 (sequence is synthesized)
ggcacgaaatatcaaggtctcagatccaaagctttttgaaatgattaagatattttcattgtctccgaattttagagctgaaaagtgccttagagatcatctagttcaacctctccgttc

SEQ ID NO: 403626 - DNA, 120 bp, Artificial Sequence
  ENSG00000147059_0 (sequence is synthesized)
ggagcccaggaggggccccaagaaaagaaaggcagatctgctctgtgattagaatggaagacatcactactaagaggaaactaacactgtagtcttgtgcagaaaaagggcagagactac

SEQ ID NO: 403627 - DNA, 120 bp, Artificial Sequence
  ENSG00000147059_1 (sequence is synthesized)
agccactgcatcagggactggtggcagcccaacgtggctgaggggtggccgccaccaacagggaggtagacggccagcgagcgaagcgctggggacaccgctgcagtgctctttgcctgt

SEQ ID NO: 403628 - DNA, 120 bp, Artificial Sequence
  ENSG00000147059_2 (sequence is synthesized)
ctcgccgcgctcctacacacgctcctcatctatggatcctaccctccccgctcttgcaagcagtcactcagcgagtcgcctgttgaccctccttcgccacaggctcacagcagaggcagc

SEQ ID NO: 403629 - DNA, 120 bp, Artificial Sequence
  ENSG00000147059_3 (sequence is synthesized)
atcgagcaggcatgaagacccccaacgcacaggaagccgaagggcaacaaaccagggcagctgcaggacgggccactgggtctgcaaacatgacaaagaaaaaagtctcccaaaagaagc

SEQ ID NO: 403630 - DNA, 120 bp, Artificial Sequence
  ENSG00000147059_4 (sequence is synthesized)
agagaggccgaccttcatcccagccccgcaggaacatcgtgggctgcagaatttctcatggatggaaggaaggagatgagcccatcacgcagtggaaaggaaccgttctggatcaggtgc

SEQ ID NO: 403631 - DNA, 120 bp, Artificial Sequence
  ENSG00000147059_5 (sequence is synthesized)
tctcacattagtgatgccaaccttgcaaataccataattggcaaagcagtggaacacatgtttgagggagagcatggttctaaggatgaatggagggggatggtcttagctcaagcacct

SEQ ID NO: 403632 - DNA, 120 bp, Artificial Sequence
  ENSG00000147059_6 (sequence is synthesized)
atcatgaaagcctggttttatattacctatgagaaagatcctgtcttgtacatgtaccagcttctagatgattataaggaaggtgacctccgcatcatgccagaatccagtgagtctcct

SEQ ID NO: 403633 - DNA, 120 bp, Artificial Sequence
  ENSG00000147059_7 (sequence is synthesized)
ccaacagagagggagccaggaggagttgtagatggcctaataggtaagcatgtggaatataccaaagaagatggctccaaaaggatcggcatggtcattcaccaagtggaaaccaaaccc

SEQ ID NO: 403634 - DNA, 120 bp, Artificial Sequence
  ENSG00000147059_8 (sequence is synthesized)
tctgtgtatttcatcaagtttgatgatgatttccatatctatgtctacgatttggtgaaaaagtcctaactgttagggtaaaatttggcacatgtgtggaaacaaatgtataatttgtag

SEQ ID NO: 403635 - DNA, 120 bp, Artificial Sequence
  ENSG00000147059_9 (sequence is synthesized)
acatgcaaaaaatgttgcctttcagtgtactgaaagcttatggaatccctgataactaaacatctttgccagcattaactgttgttttgctctaaaaaatacaaatttgtgaatacatga

SEQ ID NO: 403636 - DNA, 120 bp, Artificial Sequence
  ENSG00000147059_10 (sequence is synthesized)
ggcagtgggggttacagacagcaccagaggcactcagggcaggagggtagtgggtgctggtcaaggccgctttgcaggggattgggagtggatgctagtggcagtaaagggtaaagggag

SEQ ID NO: 403637 - DNA, 120 bp, Artificial Sequence
  ENSG00000147059_11 (sequence is synthesized)
ggcagtgggctctgagctaggaggaggtggcccagccacttctgcagagttcctaaccccagacagctctactgcaccaccccagcccttccccacagcccaaaggaacttaagagggag

SEQ ID NO: 403638 - DNA, 120 bp, Artificial Sequence
  ENSG00000147059_12 (sequence is synthesized)
agcactgcgggcatgcagccaggatttccagcattgcttccaggctcctaggggaaacttaggcactagcgcagactacatccagacatggctatagggaaaagtttgccttgtggcaca

SEQ ID NO: 403639 - DNA, 120 bp, Artificial Sequence
  ENSG00000147059_13 (sequence is synthesized)
gtgtgtttggtagatggggcatggaaggaacgaacagctgtcaatttcggctgtgaataaagttcagctagaatcataatcagtcatttaaaaatggcactggatttagctggtctggtc

SEQ ID NO: 403640 - DNA, 120 bp, Artificial Sequence
  ENSG00000147059_14 (sequence is synthesized)
tggagggggcaggggaaggaacaagagattggctgtcttggggagagaggaggaggtgactgcttaggaagaggtggaaaagggccagaaagggaggggctccttgggggaggggatgac

SEQ ID NO: 403641 - DNA, 120 bp, Artificial Sequence
  ENSG00000147059_15 (sequence is synthesized)
ctatgagaaggaaacatccaactcagaaggaagactaacagagggagagtgagatcttggggcttagaggaaaatagaataaactgagtagagaggaacacaaagaagcttagaagaggg

SEQ ID NO: 403642 - DNA, 120 bp, Artificial Sequence
  ENSG00000147059_16 (sequence is synthesized)
tccagagtaaggtggagaaggatcaacctgacagggatctgggagaggctaaaggatacacaaaggaagaggctatgtgggttagggtgttggagggattagaagagggccactgaggaa

SEQ ID NO: 403643 - DNA, 120 bp, Artificial Sequence
  ENSG00000147059_17 (sequence is synthesized)
ggaggaattcaaagaagaaagactgacagagggagtgagaatacaggaaaagagttgtggggtatggggcccatgagagatcggaaggcccaggaaaatgttggacttctggtagtgtcc

SEQ ID NO: 403644 - DNA, 120 bp, Artificial Sequence
  ENSG00000147059_18 (sequence is synthesized)
acattgctcttcctggctctatgcacaaaggaagtggcaactgtcaaagatgccagatgcattggaggttcactagaagagcatgttgacaggaatgactcagtcaagttaatcaggagc

SEQ ID NO: 403645 - DNA, 120 bp, Artificial Sequence
  ENSG00000147059_19 (sequence is synthesized)
caagtttatgcccataaggcttttcctgtttcagggagttaatgacacacttgtccagcagaaacccaatgctcagcctaaacacgctaacatggtgccccacatgtgctgggctgtggg

SEQ ID NO: 403646 - DNA, 120 bp, Artificial Sequence
  ENSG00000147059_20 (sequence is synthesized)
ctgcctcctcacatttgtcctgcgctagataagcaatcttggtagaggatgggttagtggggctctcagaacttaagagatgtgccatcttgcatttggaaagtactttatccagaaaaa

SEQ ID NO: 403647 - DNA, 120 bp, Artificial Sequence
  ENSG00000147059_21 (sequence is synthesized)
atgaaatcttactgaactcaggtacagcagtctcatcactcctattccttctgctggaatgtttgttttctatctagagatgaggggcatcagaggactgagcctagtgtttctctcgag

SEQ ID NO: 403648 - DNA, 120 bp, Artificial Sequence
  ENSG00000147065_0 (sequence is synthesized)
ggctctttcctgggtggggtttgtgaagtcgtggcccgttagcaggaagcctaacagtcgccccgacgctagtgagggacccaatctgagtccccggccagccgaatccaagccgtgtgt

SEQ ID NO: 403649 - DNA, 120 bp, Artificial Sequence
  ENSG00000147065_1 (sequence is synthesized)
actgcgtgctcagcactgcccgacagtcctagctaaacttcgccaactccgctgcctttgccgccaccatgcccaaaacgatcagtgtgcgtgtgaccaccatggatgcagagctggagt

SEQ ID NO: 403650 - DNA, 120 bp, Artificial Sequence
  ENSG00000147065_2 (sequence is synthesized)
ttgccatccagcccaacaccaccgggaagcagctatttgaccaggtggtgaaaactattggcttgagggaagtttggttctttggtctgcagtaccaggacactaaaggtttctccacct

SEQ ID NO: 403651 - DNA, 120 bp, Artificial Sequence
  ENSG00000147065_3 (sequence is synthesized)
ggctgaaactcaataagaaggtgactgcccaggatgtgcggaaggaaagccccctgctctttaagttccgtgccaagttctaccctgaggatgtgtccgaggaattgattcaggacatca

SEQ ID NO: 403652 - DNA, 120 bp, Artificial Sequence
  ENSG00000147065_4 (sequence is synthesized)
ctcagcgcctgttctttctgcaagtgaaagagggcattctcaatgatgatatttactgcccgcctgagaccgctgtgctgctggcctcgtatgctgtccagtctaagtatggcgacttca

SEQ ID NO: 403653 - DNA, 120 bp, Artificial Sequence
  ENSG00000147065_5 (sequence is synthesized)
ataaggaagtgcataagtctggctacctggccggagacaagttgctcccgcagagagtcctggaacagcacaaactcaacaaggaccagtgggaggagcggatccaggtgtggcatgagg

SEQ ID NO: 403654 - DNA, 120 bp, Artificial Sequence
  ENSG00000147065_6 (sequence is synthesized)
aacaccgtggcatgctcagggaggatgctgtcctggaatatctgaagattgctcaagatctggagatgtatggtgtgaactacttcagcatcaagaacaagaaaggctcagagctgtggc

SEQ ID NO: 403655 - DNA, 120 bp, Artificial Sequence
  ENSG00000147065_7 (sequence is synthesized)
tgggggtggatgccctgggtctcaacatctatgagcagaatgacagactaactcccaagataggcttcccctggagtgaaatcaggaacatctctttcaatgataagaaatttgtcatca

SEQ ID NO: 403656 - DNA, 120 bp, Artificial Sequence
  ENSG00000147065_8 (sequence is synthesized)
agcccattgacaaaaaagccccggacttcgtcttctatgctccccggctgcggattaacaagcggatcttggccttgtgcatggggaaccatgaactatacatgcgccgtcgcaagcctg

SEQ ID NO: 403657 - DNA, 120 bp, Artificial Sequence
  ENSG00000147065_9 (sequence is synthesized)
ataccattgaggtgcagcagatgaaggcacaggcccgggaggagaagcaccagaagcagatggagcgtgctatgctggaaaatgagaagaagaagcgtgaaatggcagagaaggagaaag

SEQ ID NO: 403658 - DNA, 120 bp, Artificial Sequence
  ENSG00000147065_10 (sequence is synthesized)
agaagattgaacgggagaaggaggagctgatggagaggctgaagcagatcgaggaacagactaagaaggctcagcaagaactggaagaacagacccgtagggctctggaacttgagcagg

SEQ ID NO: 403659 - DNA, 120 bp, Artificial Sequence
  ENSG00000147065_11 (sequence is synthesized)
aacggaagcgtgcccagagcgaggctgaaaagctggccaaggagcgtcaagaagctgaagaggccaaggaggccttgctgcaggcctcccgggaccagaaaaagactcaggaacagctgg

SEQ ID NO: 403660 - DNA, 120 bp, Artificial Sequence
  ENSG00000147065_12 (sequence is synthesized)
ccttggaaatggcagagctgacagctcgaatctcccagctggagatggcccgacagaagaaggagagtgaggctgtggagtggcagcagaaggcccagatggtacaggaagacttggaga

SEQ ID NO: 403661 - DNA, 120 bp, Artificial Sequence
  ENSG00000147065_13 (sequence is synthesized)
agacccgtgctgagctgaagactgccatgagtacacctcatgtggcagagcctgctgagaatgagcaggatgagcaggatgagaatggggcagaggctagtgctgacctacgggctgatg

SEQ ID NO: 403662 - DNA, 120 bp, Artificial Sequence
  ENSG00000147065_14 (sequence is synthesized)
ctatggccaaggaccgcagtgaggaggaacgtaccactgaggcagagaagaatgagcgtgtgcagaagcacctgaaggccctcacttcggagctggccaatgccagagatgagtccaaga

SEQ ID NO: 403663 - DNA, 120 bp, Artificial Sequence
  ENSG00000147065_15 (sequence is synthesized)
agactgccaatgacatgatccatgctgagaacatgcgactgggccgagacaaatacaagaccctgcgccagatccggcagggcaacaccaagcagcgcattgacgaatttgagtctatgt

SEQ ID NO: 403664 - DNA, 120 bp, Artificial Sequence
  ENSG00000147065_16 (sequence is synthesized)
aatgggcacccagcctctagggacccctcctccctttttccttgtccccacactcctacacctaactcacctaactcatactgtgctggagccactaactagagcagccctggagtcatg

SEQ ID NO: 403665 - DNA, 120 bp, Artificial Sequence
  ENSG00000147065_17 (sequence is synthesized)
ccaagcatttaatgtagccatgggaccaaacctagccccttagcccccacccacttccctgggcaaatgaatggctcactatggtgccaatggaacctcctttctcttctctgttccatt

SEQ ID NO: 403666 - DNA, 120 bp, Artificial Sequence
  ENSG00000147065_18 (sequence is synthesized)
gaatctgtatggctagaatatcctacttctccagcctagaggtactttccacttgattttgcaaatgcccttacacttactgttgtcctatgggagtcaagtgtggagtaggttggaagc

SEQ ID NO: 403667 - DNA, 120 bp, Artificial Sequence
  ENSG00000147065_19 (sequence is synthesized)
tagctcccctcctctcccctaccactgtcttcttcagggtcctgagatttacacggttggagtgttatgcggtctagggaatgagacaggacctaggatatcttctccaggatgtcaact

SEQ ID NO: 403668 - DNA, 120 bp, Artificial Sequence
  ENSG00000147065_20 (sequence is synthesized)
gacctaaaatttgccctcccatcccgtttagagttatttaggctttgtaacgattgggggataaaaagatgttcagtcatttttgtttctacctcccagatcggatctgttgcaaactca

SEQ ID NO: 403669 - DNA, 120 bp, Artificial Sequence
  ENSG00000147065_21 (sequence is synthesized)
gcctcaataagccttgtcgttgactttagggactcaatttctccccagggtggatgggggaaatggtgccttcaagaccttcaccaaacatactagaagggcattggccattctattgtg

SEQ ID NO: 403670 - DNA, 120 bp, Artificial Sequence
  ENSG00000147065_22 (sequence is synthesized)
gcaaggctgagtagaagatcctaccccaattccttgtaggagtataggccggtctaaagtgagctctatgggcagatctaccccttacttattattccagatctgcagtcacttcgtggg

SEQ ID NO: 403671 - DNA, 120 bp, Artificial Sequence
  ENSG00000147065_23 (sequence is synthesized)
atctgcccctccctgcttcaatacccaaatcctctccagctataacagtagggatgagtacccaaaagctcagccagccccatcaggactcttgtgaaaagagaggatatgttcacacct

SEQ ID NO: 403672 - DNA, 120 bp, Artificial Sequence
  ENSG00000147065_24 (sequence is synthesized)
agcgtcagtattttccctgctaggggttttaggtctcttcccctctcagagctacttgggccatagctcctgctccacagccatcccagccttggcatctagagcttgatgccagtaggc

SEQ ID NO: 403673 - DNA, 120 bp, Artificial Sequence
  ENSG00000147065_25 (sequence is synthesized)
tcaactagggagtgagtgcaaaaagctgagtatggtgagagaagcctgtgccctgatccaagtttactcaaccctctcaggtgaccaaaatccccttctcatcactcccctccaaagagg

SEQ ID NO: 403674 - DNA, 120 bp, Artificial Sequence
  ENSG00000147065_26 (sequence is synthesized)
tgactgggccctgcctctgtttgacaaacctctaacccaggtcttgacaccagctgttctgtcccttggagctgtaaaccagagagctgctggggattctggcctagtcccttccacacc

SEQ ID NO: 403675 - DNA, 120 bp, Artificial Sequence
  ENSG00000147065_27 (sequence is synthesized)
cccaccccttgctctcaacccaggagcatccacctccttctctgtctcatgtgtgctcttcttctttctacagtattatgtactctactgatatctaaatattgatttctgccttccttg

SEQ ID NO: 403676 - DNA, 120 bp, Artificial Sequence
  ENSG00000147065_28 (sequence is synthesized)
ctaatgcaccattagaagatattagtcttggggcaggatgattttggcctcattactttaccacccccacacctggaaagcatatactatattacaaaatgacattttgccaaaattatt

SEQ ID NO: 403677 - DNA, 120 bp, Artificial Sequence
  ENSG00000147065_29 (sequence is synthesized)
aatataagaagctttcagtattagtgatgtcatctgtcactataggtcatacaatccattcttaaagtacttgttatttgtttttattattactgtttgtcttctccccagggttcagtc

SEQ ID NO: 403678 - DNA, 120 bp, Artificial Sequence
  ENSG00000147065_30 (sequence is synthesized)
ctcaaggggccatcctgtcccaccatgcagtgcccctagcttagagcctccctcaattccccctggccaccaccccccactctgtgcctgaccttgaggagtcttgtgtgcattgctgtg

SEQ ID NO: 403679 - DNA, 120 bp, Artificial Sequence
  ENSG00000147065_31 (sequence is synthesized)
aattagctcacttggtgatatgtcctatattggctaaattgaaacctggaattgtggggcaatctattaatagctgccttaaagtcagtaacttacccttagggaggctgggggaaaagg

SEQ ID NO: 403680 - DNA, 120 bp, Artificial Sequence
  ENSG00000147065_32 (sequence is synthesized)
ttagattttgtattcaggggttttttgtgtactttttgggttttttaaaaattgtttttggaggggtttatgctcaatccatgttctatttcagtgccaataaaatttaggaagacttca

SEQ ID NO: 403681 - DNA, 120 bp, Artificial Sequence
  ENSG00000147065_33 (sequence is synthesized)
ggcgcccggaaaaccttagctcttggctatctcttccctgagcacaccctggccctggggcctgagatctctccatgcaggggcagccatgagctccgggggcagcagcaaggctggcca

SEQ ID NO: 403682 - DNA, 120 bp, Artificial Sequence
  ENSG00000147065_34 (sequence is synthesized)
gccccgccgctcaaccagccatcagtcccttaactgccagtgttcgtggaccatgcaaaacaaccaagaggaagagaagggaccatctcaggtatgacttcaaatcaagccactgggttg

SEQ ID NO: 403683 - DNA, 120 bp, Artificial Sequence
  ENSG00000147065_35 (sequence is synthesized)
tctgagaagtaccccaagcaactagtctggactgggaggttgaattgagtccttgctgttgctgaagctgtgagaataattctgtttaaaaaacttttaaataaaatatccttcaaaata

SEQ ID NO: 403684 - DNA, 120 bp, Artificial Sequence
  ENSG00000147065_36 (sequence is synthesized)
ctcattaagcccaaagcaattttagggtgcccagtggagagactcacagaggctgctagtgccgatgctgctggtgctgctgctgaggagtgcccaggaccaggtgccaggggagttgga

SEQ ID NO: 403685 - DNA, 120 bp, Artificial Sequence
  ENSG00000147065_37 (sequence is synthesized)
gtcaataaccaccactgtcagatctactgacccccaagccagtttctccagtcagtagatcccagccagcctagaagcaggctcacagttttccatggagggcttggataataaactgat

SEQ ID NO: 403686 - DNA, 120 bp, Artificial Sequence
  ENSG00000147065_38 (sequence is synthesized)
taataaactgatcctggatgttggtggcatacgccacctgatctacatcagcaccatgagggcctttccagcatttagaactataaatttccagtcccagctactcaggagactgaggca

SEQ ID NO: 403687 - DNA, 71 bp, Artificial Sequence
  ENSG00000147065_39 (sequence is synthesized)
caagggacgaactacaaatttccctctaatcagtgtcttcactttattcccaaatttttggtatgctgtgt

SEQ ID NO: 403688 - DNA, 120 bp, Artificial Sequence
  ENSG00000147065_40 (sequence is synthesized)
ttaatttcttctttgactcattggttgcttatgtcatttaacttccacatatttgcaaaatttccagttttcctttagttattgacttcactgcatgtggtcgaggaagatactttgtat

SEQ ID NO: 403689 - DNA, 120 bp, Artificial Sequence
  ENSG00000147065_41 (sequence is synthesized)
ggtttcaatgtttaaaaaatttattgggacttgttttatgacctaacatatggtctattctggagaatgtttcatttgcacttcagaagaatgtgtgttttgagaagaatatgtattctg

SEQ ID NO: 403690 - DNA, 120 bp, Artificial Sequence
  ENSG00000147065_42 (sequence is synthesized)
ctgttgttgaatggagtgttctatatttgttggtctagctggtttatggtgctgttcaaatcctctactttcttattcatcttctgtctatccattgtttagaatagggtattgtgtctt

SEQ ID NO: 403691 - DNA, 120 bp, Artificial Sequence
  ENSG00000147065_43 (sequence is synthesized)
ccactgttattttagaacagtgtatttcttccttcatttctgtcagcttatttcatattttgaggttttaactgtttgttgcacatatgtttataataattatacattattaatgaattg

SEQ ID NO: 403692 - DNA, 120 bp, Artificial Sequence
  ENSG00000147065_44 (sequence is synthesized)
acccttttatcaatatataatttcattctttgtttcttgtaacagtttgttttgtttgatacatatattgccacccagctatcttttggttactatttgcatggaatgctttttctccat

SEQ ID NO: 403693 - DNA, 120 bp, Artificial Sequence
  ENSG00000147065_45 (sequence is synthesized)
ccttttatgttcaacctatttgtgtctttgaatataaagtgagactgttgtagacagacaacatatagttggatcatgttttctaactatcctgccaatttctgccttttgattggatga

SEQ ID NO: 403694 - DNA, 120 bp, Artificial Sequence
  ENSG00000147065_46 (sequence is synthesized)
tttaatcaatttacatttaaagtgattactgatatggaagaacttacttctacctttttgctatttgatttttgtatttctttttcccttttaaataatttttatctctttattgatatt

SEQ ID NO: 403695 - DNA, 120 bp, Artificial Sequence
  ENSG00000147065_47 (sequence is synthesized)
tactgacccccaagccagtttctccagtcagatctacacagctaaatgagaagcggaactgggaatcttttttgcaaacaaaactctggcccattaagaactctctgctgccttgtgaag

SEQ ID NO: 403696 - DNA, 120 bp, Artificial Sequence
  ENSG00000147081_0 (sequence is synthesized)
ggcagtcaaggctgtaggagggcatggagagttgaagaaaaaagcagtatcttgaggcagactggaagagtcatcacagcatccaaatcaacaagaaaacatcattccagggtcctacat

SEQ ID NO: 403697 - DNA, 120 bp, Artificial Sequence
  ENSG00000147081_1 (sequence is synthesized)
gatggcgtactctgatactacaatgatgtctgatgatattgactggttacgcagccacaggggtgtgtgcaaggtagatctctacaacccagaaggacagcaagatcaggaccggaaagt

SEQ ID NO: 403698 - DNA, 120 bp, Artificial Sequence
  ENSG00000147081_2 (sequence is synthesized)
gatatgctttgtcgatgtgtccaccctgaatgtagaagataaagattacaaggatgctgctagttccagctcagaaggcaacttaaacctgggaagtctggaagaaaaagagattatcgt

SEQ ID NO: 403699 - DNA, 120 bp, Artificial Sequence
  ENSG00000147081_3 (sequence is synthesized)
gatcaaggacactgagaagaaagaccagtctaagacagagggatctgtatgccttttcaaacaagctccctctgatcctgtaagtgtcctcaactggcttctcagtgatctccagaagta

SEQ ID NO: 403700 - DNA, 120 bp, Artificial Sequence
  ENSG00000147081_4 (sequence is synthesized)
tgccttgggtttccaacatgcactgagcccctcaacctctacctgtaaacataaagtaggagacacagagggcgaatatcacagagcatcctctgagaactgctacagtgtctatgccga

SEQ ID NO: 403701 - DNA, 120 bp, Artificial Sequence
  ENSG00000147081_5 (sequence is synthesized)
tcaagtgaacatagattatttgatgaacagacctcaaaacctacgtctagaaatgacagcagctaaaaacaccaacaataatcaaagtccttcagctcctccagccaaacctcctagcac

SEQ ID NO: 403702 - DNA, 120 bp, Artificial Sequence
  ENSG00000147081_6 (sequence is synthesized)
tcagagagcagtcatttcccctgatggagaatgttctatagatgacctttccttctacgtcaaccgactatcttctctggtaatccagatggcccataaggaaatcaaggagaagttgga

SEQ ID NO: 403703 - DNA, 120 bp, Artificial Sequence
  ENSG00000147081_7 (sequence is synthesized)
aggtaaaagcaaatgccttcatcattcaatctgtccatcccctgggaacaaagagagaatcagtccccgaactcctgcgagcaagattgcttctgaaatggcctatgaagctgtggaact

SEQ ID NO: 403704 - DNA, 120 bp, Artificial Sequence
  ENSG00000147081_8 (sequence is synthesized)
gacagctgcagaaatgcgtggcactggagaggagtccagggaaggtggccagaaaagctttctatatagcgaattatccaacaagagcaaaagtggagacaaacagatgtcccagagaga

SEQ ID NO: 403705 - DNA, 120 bp, Artificial Sequence
  ENSG00000147081_9 (sequence is synthesized)
gagcaaagaatttgcagattccatcagcaaggggctcatggtttatgcaaatcaggtggcatctgacatgatggtctctctcatgaagaccttgaaagtgcacagctctgggaagccaat

SEQ ID NO: 403706 - DNA, 120 bp, Artificial Sequence
  ENSG00000147081_10 (sequence is synthesized)
tccagcatctgtggtcctgaagagggtgttgctaaggcacaccaaggagattgtgtccgatttgattgattcttgcatgaagaacctgcataatattactggggtcctgatgactgactc

SEQ ID NO: 403707 - DNA, 120 bp, Artificial Sequence
  ENSG00000147081_11 (sequence is synthesized)
gaggagaaggagactaagtctcagagtctgtcatatgcatctttaaaagctgggtcccatgatcccaaatgcaggaatcagagtcttgaattctccaccatgaaagctgaaatgaaagag

SEQ ID NO: 403708 - DNA, 120 bp, Artificial Sequence
  ENSG00000147081_12 (sequence is synthesized)
agggacaaaggcaaaatgaaatcagacccatgcaagtcactgactagtgctgagaaagtcggtgaacacattctcaaagagggcctaaccatctggaaccaaaagcaaggaaactcatgc

SEQ ID NO: 403709 - DNA, 120 bp, Artificial Sequence
  ENSG00000147081_13 (sequence is synthesized)
aaggtggctaccaaagcatgcagcaataaagatgagaaaggagaaaagatcaatgcttccacagattcactggccaaggacctgattgtctctgcccttaagctgatccagtaccatctg

SEQ ID NO: 403710 - DNA, 120 bp, Artificial Sequence
  ENSG00000147081_14 (sequence is synthesized)
acccagcagactaagggcaaagatacatgtgaagaagactgtcctggttccaccatgggctatatggctcagagtactcaatatgaaaagtgtggaggtggccaaagtgccaaagcactt

SEQ ID NO: 403711 - DNA, 120 bp, Artificial Sequence
  ENSG00000147081_15 (sequence is synthesized)
tcagtgaaacaactagaatctcacagagcccctggaccatccacctgtcaaaaggagaaccaacacctggactcccagaaaatggatatgtcaaacatcgttctaatgctgattcagaaa

SEQ ID NO: 403712 - DNA, 120 bp, Artificial Sequence
  ENSG00000147081_16 (sequence is synthesized)
ctgcttaatgagaaccccttcaaatgtgaggatccatgcgaaggtgagaacaagtgttctgagcccagggcaagcaaagcagcttccatgtccaacagatctgacaaagcggaagaacaa

SEQ ID NO: 403713 - DNA, 120 bp, Artificial Sequence
  ENSG00000147081_17 (sequence is synthesized)
tgccaggagcatcaagaacttgactgtaccagtgggatgaagcaagcgaacgggcaatttatagataaactagtagaatctgtgatgaagctctgccttatcatggctaagtatagcaac

SEQ ID NO: 403714 - DNA, 120 bp, Artificial Sequence
  ENSG00000147081_18 (sequence is synthesized)
gatggggcagcccttgctgagttggaagaacaagcagcctcggcaaataagcccaatttcaggggcaccagatgcattcacagtggtgcaatgccacagaactatcaagactctcttgga

SEQ ID NO: 403715 - DNA, 120 bp, Artificial Sequence
  ENSG00000147081_19 (sequence is synthesized)
catgaagtaattgtcaataatcagtgctctacaaatagcttgcagaagcagctccaggctgtcctgcagtggattgcagcctcccagtttaacgtgcccatgctctacttcatgggagat

SEQ ID NO: 403716 - DNA, 120 bp, Artificial Sequence
  ENSG00000147081_20 (sequence is synthesized)
aaggatggacaactggaaaagcttcctcaggtttcagctaaagcagcagagaaggggtacagtgtaggaggtcttcttcaagaggtcatgaagtttgccaaggaacggcaaccagatgaa

SEQ ID NO: 403717 - DNA, 120 bp, Artificial Sequence
  ENSG00000147081_21 (sequence is synthesized)
gctgtgggaaaggtggccaggaaacagttgctggactggctgctcgctaacctgtgagctgatccttgactcctcttcatcttagcccccctagcagcattccatcccagccagagcacc

SEQ ID NO: 403718 - DNA, 120 bp, Artificial Sequence
  ENSG00000147081_22 (sequence is synthesized)
cccaccatcaggccagtcaactgcacaatacacaactgtatttcccaatacacttgagcagttgcctgtgaatgtaagaggtgtcaacaaactgggaaataaaataaaaaaaaataataa

SEQ ID NO: 403719 - DNA, 120 bp, Artificial Sequence
  ENSG00000147081_23 (sequence is synthesized)
agtctggtccaacagctgacaggggtggcagccaactgcaggtgcccaagaacttggcacttctcagttccatctaaaggggcacatctcccttctgggtgtcacgttttcagccaaaca

SEQ ID NO: 403720 - DNA, 120 bp, Artificial Sequence
  ENSG00000147081_24 (sequence is synthesized)
aaaacaccaacaataatcaaaatacatgtgaagaagactgtcctggttccaccatgggctatatggctcagagtactcaatatgaaaagtgtggaggtggccaaagtgccaaagcacttt

SEQ ID NO: 403721 - DNA, 120 bp, Artificial Sequence
  ENSG00000147082_0 (sequence is synthesized)
ttccaggtgtctggaactggattacagtttcttctgattgaacgcagcctttgaatactgcctggcctatcgcgaatacatccctgccttggacaagacgcagctgaatctctaagtgat

SEQ ID NO: 403722 - DNA, 120 bp, Artificial Sequence
  ENSG00000147082_1 (sequence is synthesized)
gctactgccactaccaccccagagctccaaacctgtgcctaagaaatctcagtccagcaaaattgtgcccagtcatcatgacccatctgaaaagacgggggagaattgccaaacgaagat

SEQ ID NO: 403723 - DNA, 120 bp, Artificial Sequence
  ENSG00000147082_2 (sequence is synthesized)
atctccatcttcacttcaggagtctccatcttcacttcagggagcactcaaaaagagatcagcttttgaagatctcactaatgcttctcaatgtcaacctgtccagcccaagaaagaagc

SEQ ID NO: 403724 - DNA, 120 bp, Artificial Sequence
  ENSG00000147082_3 (sequence is synthesized)
caataaagagtttgtaaaagttgtttccaagaagataaacaggaacacacatgctcttggactggccaaaaagaataagcggaatctaaaatggcataagctggaagtcacaccagtagt

SEQ ID NO: 403725 - DNA, 120 bp, Artificial Sequence
  ENSG00000147082_4 (sequence is synthesized)
agcctctactaccgtggtaccaaacattatggagaaaccactcattctagacatatccaccacctccaaaacacccaacactgaggaggcatctctcttcagaaagccattagttttaaa

SEQ ID NO: 403726 - DNA, 120 bp, Artificial Sequence
  ENSG00000147082_5 (sequence is synthesized)
ggaggaacccactattgaggatgaaacccttatcaataagtcattatctttaaaaaagtgctcaaatcatgaggaggtgtccttactggaaaagctacagcccctgcaggaggagagtga

SEQ ID NO: 403727 - DNA, 120 bp, Artificial Sequence
  ENSG00000147082_6 (sequence is synthesized)
cagtgatgatgcgtttgttatagagccaatgacttttaagaagacacataaaactgaggaggcagccatcaccaagaagacattatccttaaagaagaagatgtgtgcaagtcagcggaa

SEQ ID NO: 403728 - DNA, 120 bp, Artificial Sequence
  ENSG00000147082_7 (sequence is synthesized)
gcagtcctgccaggaagagtcgttggctgtgcaggatgtcaatatggaagaggattccttctttatggagtcaatgagttttaagaagaagcctaaaactgaggagtcaatccccaccca

SEQ ID NO: 403729 - DNA, 120 bp, Artificial Sequence
  ENSG00000147082_8 (sequence is synthesized)
taagttatcatctttaaagaagaaatgtaccatttatgggaagatatgccactttaggaagccaccagtattgcagacaaccatctgtggagcaatgtcctccattaagaagcctaccac

SEQ ID NO: 403730 - DNA, 120 bp, Artificial Sequence
  ENSG00000147082_9 (sequence is synthesized)
tgagaaggagacacttttccaagagctatctgtattgcaagagaaacacaccactgagcatgagatgtccatcttgaagaaatcattggccttgcagaagaccaactttaaagaggattc

SEQ ID NO: 403731 - DNA, 120 bp, Artificial Sequence
  ENSG00000147082_10 (sequence is synthesized)
ccttgttaaggagtcgttagcctttaagaagaagcctagcactgaggaggcaatcatgatgccagtaatattgaaggagcagtgcatgactgaggggaagaggtcccgtctgaagccatt

SEQ ID NO: 403732 - DNA, 120 bp, Artificial Sequence
  ENSG00000147082_11 (sequence is synthesized)
agtattgcaggagatcacctctggagagaagtcgctcattatgaagccattgtccattaaagaaaagccatctactgagaaggagtccttttcccaggaaccatctgcattgcaaaagaa

SEQ ID NO: 403733 - DNA, 120 bp, Artificial Sequence
  ENSG00000147082_12 (sequence is synthesized)
gcacaccactcaggaggaggtttccatcttaaaggagccctcgtccttgctaaagtctccaactgaggagtcaccttttgatgaggctttggcttttacaaagaagtgtaccattgagga

SEQ ID NO: 403734 - DNA, 120 bp, Artificial Sequence
  ENSG00000147082_13 (sequence is synthesized)
ggcaccccccaccaagaagcctttaattttaaagaggaagcatgccactcaggggacaatgtcccacttgaagaaaccactaatattacagaccacctctggagaaaagtcacttattaa

SEQ ID NO: 403735 - DNA, 120 bp, Artificial Sequence
  ENSG00000147082_14 (sequence is synthesized)
ggagccactgccctttaaagaagaaaaagtgtctttaaagaaaaagtgtaccacacaagagatgatgtccatctgtccagaactgttggactttcaggatatgattggtgaagataagaa

SEQ ID NO: 403736 - DNA, 120 bp, Artificial Sequence
  ENSG00000147082_15 (sequence is synthesized)
ttctttctttatggagccaatgtcatttaggaagaaccctacaactgaggagacagtacttaccaagacatcgttgtctttacaggaaaagaaaattactcaggggaagatgtcccactt

SEQ ID NO: 403737 - DNA, 120 bp, Artificial Sequence
  ENSG00000147082_16 (sequence is synthesized)
aaagaagccactggtcttgcagaagatcacttctgaggaggagtcattctataagaagctgttgccctttaagatgaaatctacaacggaagaaaagttcctctcccaggaaccatctgc

SEQ ID NO: 403738 - DNA, 120 bp, Artificial Sequence
  ENSG00000147082_17 (sequence is synthesized)
attgaaagagaagcataccaccttgcaggaagtgtccctctcaaaagagtcattggccatccaagagaaggctaccactgaggaggaattctctcaggaactattttcattgcatgttaa

SEQ ID NO: 403739 - DNA, 120 bp, Artificial Sequence
  ENSG00000147082_18 (sequence is synthesized)
tccttgaagaacttgttggctttgcaggagaaaagcaccatggaagaagagtcccttatcaataagctattggctctgaaggaggagctttctgctgaggcagccacaaacatacagaca

SEQ ID NO: 403740 - DNA, 120 bp, Artificial Sequence
  ENSG00000147082_19 (sequence is synthesized)
caattatctttaaagaagaagtccacttctcatggaaaagtgttcttcctgaagaagcagttggctttgaatgagaccatcaatgaagaggagttccttaataagcagccactggccttg

SEQ ID NO: 403741 - DNA, 120 bp, Artificial Sequence
  ENSG00000147082_20 (sequence is synthesized)
gaggggtatcccagcattgcggagggggagaccctcttcaagaagcttttggccatgcaggaggagcccagcattgagaaggaagctgtcctcaaggagcccactattgacacagaagct

SEQ ID NO: 403742 - DNA, 120 bp, Artificial Sequence
  ENSG00000147082_21 (sequence is synthesized)
cactttaaggaacctttggccttgcaggaggagcccagcactgagaaggaggctgtcctcaaggagcccagtgttgacacagaagctcactttaaggaaactttggccttgcaggagaag

SEQ ID NO: 403743 - DNA, 120 bp, Artificial Sequence
  ENSG00000147082_22 (sequence is synthesized)
cccagcattgagcaggaggccctctttaagcgacactcagctttgtgggagaagcccagcactgagaaggagaccatcttcaaggagtctttggacttgcaagagaagcccagcattaag

SEQ ID NO: 403744 - DNA, 120 bp, Artificial Sequence
  ENSG00000147082_23 (sequence is synthesized)
aaagagaccctcctcaaaaagccattagccttgaagatgtctaccatcaatgaggcagtcctcttcgaagatatgatagctctgaatgagaaacccaccactgggaaggagttgtccttc

SEQ ID NO: 403745 - DNA, 120 bp, Artificial Sequence
  ENSG00000147082_24 (sequence is synthesized)
aaggagccattagccttacaagagagtcccacctacaaggaagacacctttctcaaaacattgttggtcccccaagttggaaccagcccaaatgtgtctagcactgcccctgaatccata

SEQ ID NO: 403746 - DNA, 120 bp, Artificial Sequence
  ENSG00000147082_25 (sequence is synthesized)
accagcaagtccagcattgctaccatgaccagtgtgggcaaatctggtaccatcaatgaggcattcctcttcgaagatatgataactctgaatgagaaacccaccactgggaaggagttg

SEQ ID NO: 403747 - DNA, 120 bp, Artificial Sequence
  ENSG00000147082_26 (sequence is synthesized)
tccttcaaggagccattggccttacaagagagtcccacctgcaaggaagacacctttctggaaacattcttgatcccccaaattggaaccagcccatatgtgtttagcaccacccctgaa

SEQ ID NO: 403748 - DNA, 120 bp, Artificial Sequence
  ENSG00000147082_27 (sequence is synthesized)
tccataacagagaagtccagcattgcaaccatgaccagcgtgggcaagtccaggaccaccaccgagtccagtgcatgtgaatctgcttctgataaacctgtctcaccacaggccaaggga

SEQ ID NO: 403749 - DNA, 120 bp, Artificial Sequence
  ENSG00000147082_28 (sequence is synthesized)
acaccaaaggagataaccccacgggaagatattgatgaggacagcagtgatccaagtttcaacccaatgtatgccaaggaaatcttcagttacatgaaagagagagaggaacagtttata

SEQ ID NO: 403750 - DNA, 120 bp, Artificial Sequence
  ENSG00000147082_29 (sequence is synthesized)
cttacagattacatgaacaggcagattgaaatcaccagtgacatgagggccattcttgtggactggttggtggaggtgcaggtgtcctttgagatgacccatgagaccctgtacttggca

SEQ ID NO: 403751 - DNA, 120 bp, Artificial Sequence
  ENSG00000147082_30 (sequence is synthesized)
gtgaagctggtggatctctacctaatgaaggcagtatgcaagaaggataagttacaactccttggtgccactgcctttatgattgcagcaaaatttgaggagcacaactcacctcgtgtg

SEQ ID NO: 403752 - DNA, 120 bp, Artificial Sequence
  ENSG00000147082_31 (sequence is synthesized)
gatgactttgtgtacatctgtgatgataattatcagcgatctgaggtactcagcatggaaatcaacatcctgaacgtcctcaaatgtgacattaacattcccatcgcctaccattttctg

SEQ ID NO: 403753 - DNA, 120 bp, Artificial Sequence
  ENSG00000147082_32 (sequence is synthesized)
cgcagatatgctaggtgtatccacaccaacatgaagacactgaccttgtcccgctacatctgcgagatgaccctgcaggaataccactatgtccaggagaaggcttccaagctagctgct

SEQ ID NO: 403754 - DNA, 120 bp, Artificial Sequence
  ENSG00000147082_33 (sequence is synthesized)
gcctccttactcctggccctctacatgaagaagctcggatactgggttcccttcctggagcattacagtggctacagtatctctgagcttcaccccttggtcagacagctgaacaaactg

SEQ ID NO: 403755 - DNA, 120 bp, Artificial Sequence
  ENSG00000147082_34 (sequence is synthesized)
ctgactttcagttcttacgatagtctcaaggctgtgtattacaagtattctcacccggtcttctttgaagtcgccaaaatccctgccttggatatgttgaagctggaggagattttgaac

SEQ ID NO: 403756 - DNA, 120 bp, Artificial Sequence
  ENSG00000147082_35 (sequence is synthesized)
tgtgattgtgaggctcagggcctggtactctagcagcagccacagggctaagcatgcatgttaacagggtatatttattctatgttcgaatttgtcttttgatcgcttttattcattttt

SEQ ID NO: 403757 - DNA, 120 bp, Artificial Sequence
  ENSG00000147082_36 (sequence is synthesized)
cctttctttgtcttttcccaaactgataatgttataaatatttatgttgcttgtttttatgaaagaaaaaatattgtcatatttgactacaaatttaataaaaaattaatggttattgtt

SEQ ID NO: 403758 - DNA, 120 bp, Artificial Sequence
  ENSG00000147082_37 (sequence is synthesized)
gtggaagcatttccgtcattctgagacagttgggctgaggcggttggtcgcctctctctctctctctctctgttcctcatctacattttgattggtttatttttgtattgttttctttca

SEQ ID NO: 403759 - DNA, 120 bp, Artificial Sequence
  ENSG00000147082_38 (sequence is synthesized)
tctccagtcccttagctcacttccaaattgtgctattggtgtctgctcccaattgatatattctgatagcatatctagttgggaagagaaagtagtacatgaataaactccatatttcag

SEQ ID NO: 403760 - DNA, 120 bp, Artificial Sequence
  ENSG00000147082_39 (sequence is synthesized)
agctaaataaacatctcctttgggaggtcactgtacaagttggcagcaaatggagaaagcaagaacctaagtattagagatcaaagggagaggatgtgtccactcaaggctctcatagag

SEQ ID NO: 403761 - DNA, 120 bp, Artificial Sequence
  ENSG00000147082_40 (sequence is synthesized)
aaggcagagcatttctctctgatttgtaaggctggtcaactacccaaatgtgtaaggatagataatgccagtgtcctcaaaggcacaggagatatacacaggaacctagctgaagcagtt

SEQ ID NO: 403762 - DNA, 120 bp, Artificial Sequence
  ENSG00000147082_41 (sequence is synthesized)
tctgtattcgtagcagagtcccagctagtcaggactgttcttgatgttgcagatactccaggtagctagatctgtctggaggcgactttggagctggacaatatgcagatctgtgtcgtg

SEQ ID NO: 403763 - DNA, 120 bp, Artificial Sequence
  ENSG00000147082_42 (sequence is synthesized)
agtaatccccagatgacaaagagagaactactatggatgattagagcactctcccagggcacctgaatcctgtcatcctggaggctaaccaggagcagggtctggagatagaagagaaat

SEQ ID NO: 403764 - DNA, 120 bp, Artificial Sequence
  ENSG00000147099_0 (sequence is synthesized)
agaggagcaggaactggaaccctggccgagtccgaaaaaagccagatctggaaggtggctgcggaacggttttaagcggaagatggaggagccggaggaaccggcggacagtgggcagtc

SEQ ID NO: 403765 - DNA, 120 bp, Artificial Sequence
  ENSG00000147099_1 (sequence is synthesized)
gctggtcccggtttatatctatagtcccgagtatgtcagtatgtgtgactccctggccaagatccccaaacgggccagtatggtgcattctttgattgaagcatatgcactgcataagca

SEQ ID NO: 403766 - DNA, 120 bp, Artificial Sequence
  ENSG00000147099_2 (sequence is synthesized)
gatgaggatagttaagcctaaagtggcctccatggaggagatggccaccttccacactgatgcttatctgcagcatctccagaaggtcagccaagagggcgatgatgatcatccggactc

SEQ ID NO: 403767 - DNA, 120 bp, Artificial Sequence
  ENSG00000147099_3 (sequence is synthesized)
catagaatatgggctaggttatgactgcccagccactgaagggatatttgactatgcagcagctataggaggggctacgatcacagctgcccaatgcctgattgacggaatgtgcaaagt

SEQ ID NO: 403768 - DNA, 120 bp, Artificial Sequence
  ENSG00000147099_4 (sequence is synthesized)
agcaattaactggtctggagggtggcatcatgcaaagaaagatgaagcatctggtttttgttatctcaatgatgctgtcctgggaatattacgattgcgacggaaatttgagcgtattct

SEQ ID NO: 403769 - DNA, 120 bp, Artificial Sequence
  ENSG00000147099_5 (sequence is synthesized)
ctacgtggatttggatctgcaccatggagatggtgtagaagacgcattcagtttcacctccaaagtcatgaccgtgtccctgcacaaattctccccaggatttttcccaggaacaggtga

SEQ ID NO: 403770 - DNA, 120 bp, Artificial Sequence
  ENSG00000147099_6 (sequence is synthesized)
cgtgtctgatgttggcctagggaagggacggtactacagtgtaaatgtgcccattcaggatggcatacaagatgaaaaatattaccagatctgtgaaagtgtactaaaggaagtatacca

SEQ ID NO: 403771 - DNA, 120 bp, Artificial Sequence
  ENSG00000147099_7 (sequence is synthesized)
acatgactccagtgggaattggcaagtgtcttaagtacatccttcaatggcagttggcaacactcattttgggaggaggaggctataaccttgccaacacggctcgatgctggacatact

SEQ ID NO: 403772 - DNA, 120 bp, Artificial Sequence
  ENSG00000147099_8 (sequence is synthesized)
tgaccggggtcatcctagggaaaacactatcctctgagatcccagatcatgagtttttcacagcatatggtcctgattatgtgctggaaatcacgccaagctgccggccagaccgcaatg

SEQ ID NO: 403773 - DNA, 120 bp, Artificial Sequence
  ENSG00000147099_9 (sequence is synthesized)
agccccaccgaatccaacaaatcctcaactacatcaaagggaatctgaagcatgtggtctagttgacagaaagagatcaggtttccagagctgaggagtggtgcctataatgaagacagc

SEQ ID NO: 403774 - DNA, 120 bp, Artificial Sequence
  ENSG00000147099_10 (sequence is synthesized)
gtgtttatgcaagcagtttgtggaatttgtgactgcagggaaaatttgaaagaaattacttcctgaaaatttccaaggggcatcaagtggcagctggcttcctggggtgaagaggcaggc

SEQ ID NO: 403775 - DNA, 120 bp, Artificial Sequence
  ENSG00000147099_11 (sequence is synthesized)
accccagagtcctcaactggacctaggggaagaaggagatatcccacatttaaagttcttatttaaaaaaacacacacacacaaatgaaatttttaatctttgaaaattatttttaagcg

SEQ ID NO: 403776 - DNA, 120 bp, Artificial Sequence
  ENSG00000147099_12 (sequence is synthesized)
aattggggaggggagtattttaatcatcttaaatgaaacagatcagaagctggatgagagcagtcaccagtttgtagggcaggaggcagctgacaggcagggtttgggcctcaggaccat

SEQ ID NO: 403777 - DNA, 120 bp, Artificial Sequence
  ENSG00000147099_13 (sequence is synthesized)
ccaggtggagccctgggagagagggtactgatcagcagactgggaggtggggagaagtccgctggtgttgttttagtgttatatatctttggtttttttaataaaatctttgaaaaccta

SEQ ID NO: 403778 - DNA, 120 bp, Artificial Sequence
  ENSG00000147099_14 (sequence is synthesized)
taaataccatttgccttttggtaagctaatcatttcactgacttggaaaggaaacctcttcttggcctgacagcttgtagctggaattctacactggccactctggttgggattgtcatt

SEQ ID NO: 403779 - DNA, 120 bp, Artificial Sequence
  ENSG00000147099_15 (sequence is synthesized)
tggctggctaatgtcacctcagaaggacaaagggttcagcttttggcactgccaggggaaaatcagctctaaagtgttccctgagaccctttttctttcaaaaggccaatagtaaagcac

SEQ ID NO: 403780 - DNA, 90 bp, Artificial Sequence
  ENSG00000147099_16 (sequence is synthesized)
ctgagaccctttttctttcaaaaggccaatagtaaagcactctttaagatgagaaaagttggccgggcaccgttggctgaggcgggagga

SEQ ID NO: 403781 - DNA, 120 bp, Artificial Sequence
  ENSG00000147099_17 (sequence is synthesized)
gaggagatcacctcaagagatctggattccagagatctgagtcttgctgatggctcttgatggaactgaggagtttggattcctcaggaggctataaccttgccaacacggctcgatgct

SEQ ID NO: 403782 - DNA, 120 bp, Artificial Sequence
  ENSG00000147099_18 (sequence is synthesized)
agatgggattttttttttttcagacaaactaacataatcaaggcatagagaggaaaagaatattatatgtctgaagctagggtcagctccactgccaaaacagagaaagaaggatgaaat

SEQ ID NO: 403783 - DNA, 120 bp, Artificial Sequence
  ENSG00000147099_19 (sequence is synthesized)
ttaccagatctgtgaaaggtatggcagtaacactagccagtaataagtggattgcagttctgtaggatgaaatggcccccatctcacaatgtaaacaagaacaatgtaaaaaagaaaaca

SEQ ID NO: 403784 - DNA, 120 bp, Artificial Sequence
  ENSG00000147099_20 (sequence is synthesized)
tctatatacctataaagcttttgtatactggtcattatgcttatttgatcagtagctatccgctgtatggcagagccaagcagttggaccagagccatgctccaggttggatcttactca

SEQ ID NO: 403785 - DNA, 120 bp, Artificial Sequence
  ENSG00000147099_21 (sequence is synthesized)
atatgattaagcccatcccaagagcagagctttttttgctatcctgaagaatcccttatttgctactttcttagctaaataaacctacatgtgtcttatttcattaacctggcagggttc

SEQ ID NO: 403786 - DNA, 120 bp, Artificial Sequence
  ENSG00000147099_22 (sequence is synthesized)
atttcagttgtcagggttcattatggagacctgtgctttcttctactggtgtaaatattagagaattgactattattattcatcatgcattcttaccttctatccactgtgttaaaattg

SEQ ID NO: 403787 - DNA, 120 bp, Artificial Sequence
  ENSG00000147099_23 (sequence is synthesized)
gagtcagatacctgttctttctacaccatggctaaggattaagttacagacaatcgtagacagacagattggtgccaatgtgtggaccactagagttgaaaagccttatggaatgggggt

SEQ ID NO: 403788 - DNA, 120 bp, Artificial Sequence
  ENSG00000147099_24 (sequence is synthesized)
ggggggttgtgttaaactcatattcataaaaattgagattggtcaggcacaagtggtggcagagaaagcaaatccgaatagaagtcagccagtcaacattactgaaggtaagtaacgggg

SEQ ID NO: 403789 - DNA, 120 bp, Artificial Sequence
  ENSG00000147099_25 (sequence is synthesized)
attgaggtactcttgatccctccccaacttagctcgtatttctcccaacctctggtggaggttcttcccaaagaagcctgcctgcactggccatcatcactggcagttgtataaacaaag

SEQ ID NO: 403790 - DNA, 120 bp, Artificial Sequence
  ENSG00000147099_26 (sequence is synthesized)
cagaactattaaaaaataaaaactttatgcttcaaaagtgcttcttagctcaagagatttggtgagccaagtcatcattcagttattcagcagcataagcctcttcataattttgatcat

SEQ ID NO: 403791 - DNA, 120 bp, Artificial Sequence
  ENSG00000147099_27 (sequence is synthesized)
gtctcctggctacctctgtattatcatgctgaaaaaactttttttttttttttttggagcctgccatcaatggtttaattgcccttctttgttccccttaagctctcttctgtccttgag

SEQ ID NO: 403792 - DNA, 120 bp, Artificial Sequence
  ENSG00000147099_28 (sequence is synthesized)
atgtgcagatcagagctgcttatgtaactttaccaataaagatatcctgcagttctatgtaaaaggagaattattttgtttttcttttaatccctttcttaacagtgcctgattttgtta

SEQ ID NO: 403793 - DNA, 120 bp, Artificial Sequence
  ENSG00000147099_29 (sequence is synthesized)
cccttttttttttttttttaccataacagaaaactaggttgttctcttcagtgcactgtccacagtgtctcctcgagccctttcctgggtcttaattgaaaggtcagcactcatcatcca

SEQ ID NO: 403794 - DNA, 120 bp, Artificial Sequence
  ENSG00000147099_30 (sequence is synthesized)
gcaagtatagtttgtaatatctagtgctccctagatggatcaccctaaatggatcaccttacatgtaccccttacaaagccctaaatggatcactttacatgtgcccctattgaaggtta

SEQ ID NO: 403795 - DNA, 120 bp, Artificial Sequence
  ENSG00000147099_31 (sequence is synthesized)
tctgccaatcataaaacctcctgagatcttctttatctcccatcaacttggcatttcactgcctgggaaagctgagtattatctgtagacttgaggattttccagtgcccacccccaagg

SEQ ID NO: 403796 - DNA, 120 bp, Artificial Sequence
  ENSG00000147099_32 (sequence is synthesized)
agtcagaaaaaatatctgtttctaccctatattttctcttttttttctgtagaccagttcctactacatgataaaaaatattttaaatcccatggtaattcatgtttaaaaatagccttg

SEQ ID NO: 403797 - DNA, 120 bp, Artificial Sequence
  ENSG00000147099_33 (sequence is synthesized)
gtatcaaacctaatcagaagcatttttaaagtaagtttagccccaaggaaaagatctgtagaagattacacatgatttcgctttacaaaaagcatgatgccacccacatcccaatagatt

SEQ ID NO: 403798 - DNA, 120 bp, Artificial Sequence
  ENSG00000147099_34 (sequence is synthesized)
gatggcttttgtgtacaggaggctagcatttattaaaaattcttccagcttgcctactgaagaaccagacactcatcagtttatagttcccagggcccctttgcctgtggacccacattg

SEQ ID NO: 403799 - DNA, 120 bp, Artificial Sequence
  ENSG00000147099_35 (sequence is synthesized)
gcaatgcaagccacacagtgatcatccagaataacaggttccaggttttcattagaggtataataattttttttctttgctttccttcagaagtcaagtctggtcagggcattatgtgaa

SEQ ID NO: 403800 - DNA, 120 bp, Artificial Sequence
  ENSG00000147099_36 (sequence is synthesized)
ggcacctctgattccaagggtaccaaggaggcttcctggcccaaacatctctcctatctgttggattaatacctgaaattcctttaacaggaaacatacttttattctacaattagaaat

SEQ ID NO: 403801 - DNA, 120 bp, Artificial Sequence
  ENSG00000147099_37 (sequence is synthesized)
agtccttaaaacgaaattttggcacaacctctcatcctcacccctgctgtactatagaagtatagtttcacagaacctttcttttttggggttgtggacagggtcttcccctgttgccca

SEQ ID NO: 403802 - DNA, 120 bp, Artificial Sequence
  ENSG00000147099_38 (sequence is synthesized)
cagctcactgcagccttgacctcctggatccaagtgatccccttgcttcagcttcccaagtagctggggcaaacaggcacacgataccacatctggctaatttaaaaaaaagaaactttt

SEQ ID NO: 403803 - DNA, 120 bp, Artificial Sequence
  ENSG00000147099_39 (sequence is synthesized)
ctaatttaaaaaaaagaaacttttagtagagatgaggtgtagcttcacagtgccattcttgagaatgaattgtgaaagggtcagagcatgagctccttgagtattctgaggagcaggaat

SEQ ID NO: 403804 - DNA, 120 bp, Artificial Sequence
  ENSG00000147099_40 (sequence is synthesized)
tgcctagtggagcagtagagggaaaggggtaccaaaaaccacagcgatctttgccaagagttttgcagagggccagccctggtaactagatcactcagtcccaggcattatgcctttgaa

SEQ ID NO: 403805 - DNA, 120 bp, Artificial Sequence
  ENSG00000147099_41 (sequence is synthesized)
tacttctggtatgtggcttggaaacagtctcttacacatttgccattgttacctctgacccttctgcctacctcaaaagatatattacacagaggaatggcttaatctttttgtaaaaag

SEQ ID NO: 403806 - DNA, 89 bp, Artificial Sequence
  ENSG00000147099_42 (sequence is synthesized)
tatattacacagaggaatggcttaatctttttgtaaaaagtcatttagtttatctactatcttcttttcatccttttaggagatggtgt

SEQ ID NO: 403807 - DNA, 69 bp, Artificial Sequence
  ENSG00000147099_43 (sequence is synthesized)
ccttttcatcctttttatttcatgaccccactggttctctggctcactccttacttgtgatgtgtaaag

SEQ ID NO: 403808 - DNA, 120 bp, Artificial Sequence
  ENSG00000147099_44 (sequence is synthesized)
actggttctctggctcactccttacttgtgatgtgtaaaggacctcttattgctggttcacttataagatgctctcatttttatttgccacccaatttctagtttgctcataaattgctc

SEQ ID NO: 403809 - DNA, 120 bp, Artificial Sequence
  ENSG00000147099_45 (sequence is synthesized)
ctttttccttttccttctttctttcttctttcttttacttttcttccttccttccttttcttgtcttgtcttttccttttctccttttccttccttttcttcctttgttcttcccttcct

SEQ ID NO: 403810 - DNA, 120 bp, Artificial Sequence
  ENSG00000147099_46 (sequence is synthesized)
ccctttctttcctcctcttttcctttctaaaatggttttttcctctgctgtagccttttttactttgccagctagtcaggcaggaacttaatggttttagtttaagcttgaacatacccc

SEQ ID NO: 403811 - DNA, 120 bp, Artificial Sequence
  ENSG00000147099_47 (sequence is synthesized)
cttcagttaaaaattggcttagagtttttttgtaatagactagatatggaatctttacatgaacatttcctaacaccaaaagatctcaagctccattttatataaatgacagatttcaca

SEQ ID NO: 403812 - DNA, 120 bp, Artificial Sequence
  ENSG00000147099_48 (sequence is synthesized)
gtgagatctccctagatcattcaattctaagggcaagggccactaattcccaaaagcttcccataattttcatgagagctgctagagttggtatcacaagtagagccctgttttaaccag

SEQ ID NO: 403813 - DNA, 120 bp, Artificial Sequence
  ENSG00000147099_49 (sequence is synthesized)
cataaaggaacatcatcaacattgctctggtaagcatacctcctccttcaaatggaagcctatagtcctagtatagagatgatagaggtatactatattttttatgtatgtgaaggccta

SEQ ID NO: 403814 - DNA, 120 bp, Artificial Sequence
  ENSG00000147099_50 (sequence is synthesized)
aacctgaccccaccaccaccccatccccgggccacacacgcatatacccatgaaggttggtgggaaagggaggctgctttgcgaaaggaagggtttgctaattcccaagttttatcatct

SEQ ID NO: 403815 - DNA, 120 bp, Artificial Sequence
  ENSG00000147099_51 (sequence is synthesized)
gagacaggaaatattacgctgcctatgtttaacccatttgctctctaagtataatatatttgaatgcaatctgagatagtcttaataatgtttaatctattacctaaaactctgtgttga

SEQ ID NO: 403816 - DNA, 120 bp, Artificial Sequence
  ENSG00000147099_52 (sequence is synthesized)
gtctgaaaactagactgctgaatactgaaggatcaggtttctcatcaagaaaactgcattttaaatgaatatcttgtatgtttatagggaagttactaatgtagtataaagagatgcctg

SEQ ID NO: 403817 - DNA, 120 bp, Artificial Sequence
  ENSG00000147099_53 (sequence is synthesized)
gggacatagctccagagagtggtggcatcttgctattgaggaaatggaaatgacaagtgagagaagacataaggaaggtaatgcaaagggaagagaacgaggaaagccatttactgagca

SEQ ID NO: 403818 - DNA, 71 bp, Artificial Sequence
  ENSG00000147099_54 (sequence is synthesized)
ccaagtttcctacaaatgaaatgtattaacttttttttcacagcatatggtcctgattatgtgctggaaat

SEQ ID NO: 403819 - DNA, 120 bp, Artificial Sequence
  ENSG00000147099_55 (sequence is synthesized)
ctcttctttaaggggaagagctgagtcattccacctaatcaaaatcacgtcctcaccactcaataccgttttgttgagagacacttcaataacaataacacactgtcttggcagaatagt

SEQ ID NO: 403820 - DNA, 120 bp, Artificial Sequence
  ENSG00000147099_56 (sequence is synthesized)
atttctcaattaattacagagactgtgggaaggggtcacctgttcacacaaagaattctttggaatatgtgcatatttttatcccctagcctcaaaaaggaaggggctatttttaaaatg

SEQ ID NO: 403821 - DNA, 120 bp, Artificial Sequence
  ENSG00000147099_57 (sequence is synthesized)
tgtaagctggattctcatcttttttttaagaagtttcataggtggtacgtggcacatgttctttggtggtagtcctgatctctcaattttctttgactaatgtaaaattcaagaaaccca

SEQ ID NO: 403822 - DNA, 120 bp, Artificial Sequence
  ENSG00000147099_58 (sequence is synthesized)
caagcactacaaagaccattgctgatgtttttctagcaattagtggcacacagaggctggaataggaccatccaaaatgtgaaacgtcatttgagcccttgccattttctttagtcatac

SEQ ID NO: 403823 - DNA, 120 bp, Artificial Sequence
  ENSG00000147099_59 (sequence is synthesized)
aagatgggctttatgttttccaaagcaaagatgtctgttctagttttcccaaaacaagttcatggaaagctgtctgggacctgtgagtgtgctgataatccctaatccaaaggcatacct

SEQ ID NO: 403824 - DNA, 120 bp, Artificial Sequence
  ENSG00000147099_60 (sequence is synthesized)
ttgttcctacctatcaccccagttcccctgcaagtaggaaccatgttatagatcaagatgtataactacggaccttagactagatgacttaaaataacaaaccagtacatgcagccccac

SEQ ID NO: 403825 - DNA, 120 bp, Artificial Sequence
  ENSG00000147099_61 (sequence is synthesized)
cttctcaagctatttcccaaggattagggatgctgctttggttttaatgttatgatttctgccagatacagtagctgtacacttgggagcatgatgctttttaaagttgctattattttt

SEQ ID NO: 403826 - DNA, 120 bp, Artificial Sequence
  ENSG00000147099_62 (sequence is synthesized)
taaaaattagaaacaacttaaactaatttccttccaattttctcctaacctcaggtgaggtacaatatgtatctcacaaaaaccattcaatatgtctagaatacaaatagaaggtacact

SEQ ID NO: 403827 - DNA, 120 bp, Artificial Sequence
  ENSG00000147099_63 (sequence is synthesized)
ataatttgagacaatttgctgatgtcagggttaatagaagtctcttttcttggtttgtcttacctttattcagtatttggaagcttaatgaaatataaaggtaagtgctgtgaacaaatg

SEQ ID NO: 403828 - DNA, 120 bp, Artificial Sequence
  ENSG00000147099_64 (sequence is synthesized)
taatcgctgttattgctgtgggaatatctcagattgcattgtaatttaaagctctgggactttataaactgatcaagttatgtcagaaacaagttttaagctgtagaagcctgaactgag

SEQ ID NO: 403829 - DNA, 120 bp, Artificial Sequence
  ENSG00000147099_65 (sequence is synthesized)
aatgaatgctctattcctgagaagcaaaagcaaatccaaagtttcatctgtgttaaaagattgataaaattttaataaagatgaatatcgcctctggtacatggagaagctgtgggcctg

SEQ ID NO: 403830 - DNA, 120 bp, Artificial Sequence
  ENSG00000147099_66 (sequence is synthesized)
aatgggtgtaagctgggcctcataaataggtgttctgtctttatactgaaatattctgtaagattaaatgagatataatgtatgtcaagtgcctaacacgtagttccctggaatctaata

SEQ ID NO: 403831 - DNA, 85 bp, Artificial Sequence
  ENSG00000147099_67 (sequence is synthesized)
tatgtcaagtgcctaacacgtagttccctggaatctaataggcactttaaaaatgcaagttctcggccgggcatggtggcttaca

SEQ ID NO: 403832 - DNA, 120 bp, Artificial Sequence
  ENSG00000147099_68 (sequence is synthesized)
agattttatactttcacaaaacgaaaaattaatgatttgcagtgtagcaaacagtactgttacagtggttagggaaactttcccaaaagcaatctggagtgacatttcattcatgtattc

SEQ ID NO: 403833 - DNA, 120 bp, Artificial Sequence
  ENSG00000147099_69 (sequence is synthesized)
atttaatgactatttattgaatgcctactatgtataaagtattgattctaccctcgaggaagttagtggaaatttttaaatgttagataaataaatagagattgattttcatattcacac

SEQ ID NO: 403834 - DNA, 120 bp, Artificial Sequence
  ENSG00000147099_70 (sequence is synthesized)
acatttaaataaataaaacatagaaaattgtaagaaccataagagatagaatgctgtgggtattcaaagagagaaaatacttcagaaaaaggcgtaattgaggaggtaacatttgatctg

SEQ ID NO: 403835 - DNA, 120 bp, Artificial Sequence
  ENSG00000147099_71 (sequence is synthesized)
gtttctaaagggtagctaattactctatctttacaaagtgtgtgaatgtatatgagtgtttataaaatctgggtcaagtttgaatatacagagattgtagggaaggatgttctacacaca

SEQ ID NO: 403836 - DNA, 120 bp, Artificial Sequence
  ENSG00000147099_72 (sequence is synthesized)
gggtacagcaagatcaaagttgggagagactgagctatgtacaaagaatagcagtggttttagtttggctggactgtaaagtgcatggaggagaagttgcaaagaagattggaaacctgg

SEQ ID NO: 403837 - DNA, 120 bp, Artificial Sequence
  ENSG00000147099_73 (sequence is synthesized)
gtgggaaccacatcacggaagagctggaattcttagctatgaaaatttgtaccatattctgtaaacattttgggagccactgaaggttttagaatgagggaatcataagatcaaagcttg

SEQ ID NO: 403838 - DNA, 120 bp, Artificial Sequence
  ENSG00000147099_74 (sequence is synthesized)
cttgggaagattaacactcttcccagtaaagttttggcaacagcatctgctgttatattgacataatgtgggtaaagtggctgacatagtatctgatgcataggagctcagtaagtcatg

SEQ ID NO: 403839 - DNA, 120 bp, Artificial Sequence
  ENSG00000147099_75 (sequence is synthesized)
gaagcagatatactgtagtggtttagagcaaaaactctggtgcctggatgcctgggttcaaaaaccagctctgccacttaatagctgtgtgattttgtacagatttcttaacctctctgt

SEQ ID NO: 403840 - DNA, 120 bp, Artificial Sequence
  ENSG00000147099_76 (sequence is synthesized)
atggcagtttccccatctgtaaaataggattaaaaataatacctgttatgaattattatgagggtcaaatgagttaagacatgtaaaatacatagaacagtgctctattctgaataaagt

SEQ ID NO: 403841 - DNA, 120 bp, Artificial Sequence
  ENSG00000147099_77 (sequence is synthesized)
aaagagaagtggccagtagggtttggagcccagtgtttctacttggggaagtgtggcaaggcaaagactacggagggacaaaggaatctgaagcatgtggtctagttgacagaaagagat

SEQ ID NO: 403842 - DNA, 120 bp, Artificial Sequence
  ENSG00000147099_78 (sequence is synthesized)
tgagatcccagatcatgagctcctggcattcaaggatagcaattcactagaggcttcaggcacaagacagaatcagtgcacttggaagataggataattgaaatgaaccaatctgaggga

SEQ ID NO: 403843 - DNA, 120 bp, Artificial Sequence
  ENSG00000147099_79 (sequence is synthesized)
caggaaaaaaaagaacgaagaataattagcagagcctaagggacctgtgggacaccatcaagtggtccaacatacacattatgggagtaacagaaaaaagagaagaggttatgaaaggga

SEQ ID NO: 403844 - DNA, 120 bp, Artificial Sequence
  ENSG00000147099_80 (sequence is synthesized)
tagaaagaatttttaaataaataatgaccaaaaacttcccaaatttgatgaaaagcattgaacataaggatccaagaggcttaatgaactccaagtagaataataactccaagtagaata

SEQ ID NO: 403845 - DNA, 120 bp, Artificial Sequence
  ENSG00000147099_81 (sequence is synthesized)
gacccacatcaagagacattataatcaaactgttgacaaagacaaagagagaatcttgaaagcagcaagagagaaacaactcatcacatacaagggattctcaataaggttcataactga

SEQ ID NO: 403846 - DNA, 120 bp, Artificial Sequence
  ENSG00000147099_82 (sequence is synthesized)
tttcttatctgagaccatggaggccagaatacaatgggatgacatatttaaagttctgaaagaaaaacactgtaaaacaagaattctatatccagcaaaactgcacttcaaacttgagtg

SEQ ID NO: 403847 - DNA, 120 bp, Artificial Sequence
  ENSG00000147099_83 (sequence is synthesized)
aaaatgtaagacattctcagataaacaaaagctgagggagtctattaccactaatcctatcctagaagaagtactaaaaggagtccttctggttgaagtgaaaggacactagactgtaaa

SEQ ID NO: 403848 - DNA, 120 bp, Artificial Sequence
  ENSG00000147099_84 (sequence is synthesized)
tcgaagctatatgaaggaataaagatctccagtaaagaaatctacatgggcaaacataaaagcaagtcttattaatttttggtctgtaacttgactctttattttctgcatgattaaaaa

SEQ ID NO: 403849 - DNA, 120 bp, Artificial Sequence
  ENSG00000147099_85 (sequence is synthesized)
tttgatgctaaaagcagaaaaagaaacttacagaaaattaaatgtcttctgaatatgtccaagaggcacccatgttctccaacaaaatgacacatcatgctcactgcaaggcagcctccc

SEQ ID NO: 403850 - DNA, 120 bp, Artificial Sequence
  ENSG00000147099_86 (sequence is synthesized)
tcctcccaaatccctgcatccctgaaccatttgtaatagatattcagaagtcactgaggcatttaccatatgctgcatcccctggcaggttgagttgttgcagaatgagtcagcagtacc

SEQ ID NO: 403851 - DNA, 120 bp, Artificial Sequence
  ENSG00000147099_87 (sequence is synthesized)
tgagctcagataggattgagagaatttagagaaaacatacctatggaaagttgaacggctcccatttgggactgactagtaatactttgggtccttaacacagtctgcctctcaatccca

SEQ ID NO: 403852 - DNA, 120 bp, Artificial Sequence
  ENSG00000147099_88 (sequence is synthesized)
tcaaatgcaataggtttaaaatttatgtcttagaaaggggttttgctgctggcaataacttttctcaggctgacattgagaattcaaagcgttagtagcaaatatttttctcttctctcc

SEQ ID NO: 403853 - DNA, 120 bp, Artificial Sequence
  ENSG00000147099_89 (sequence is synthesized)
ttctgcatcctacccttcttggtttttcaactttgaatttctcattctttaatctctattgagggagtctctagagggtgctgagagtgtctgttggaaagcatgaagatgacaaggctg

SEQ ID NO: 403854 - DNA, 120 bp, Artificial Sequence
  ENSG00000147099_90 (sequence is synthesized)
gtttagactggtgcgcaatctagaaagtcaggagactaaaccttctgggagcatgaacccatcagaggtcttgctagagggacaagttagggttaccagaccccaccaccagtatcggtt

SEQ ID NO: 403855 - DNA, 120 bp, Artificial Sequence
  ENSG00000147099_91 (sequence is synthesized)
aagggtgactataacaccattgctctggcatcccattgccctgagatgaatcttttaggatattgattatctaaataacaaaaaaaccacaaaacatgttcagcccctgatattaaaggt

SEQ ID NO: 403856 - DNA, 120 bp, Artificial Sequence
  ENSG00000147099_92 (sequence is synthesized)
aaagaagcaccagtgaaagatctcaaaggcacacagtagaagctgtgttctaccctgatggaatcaaagaaaagggagtaactctacgattttgttcttgggcttttcttttatccaaaa

SEQ ID NO: 403857 - DNA, 120 bp, Artificial Sequence
  ENSG00000147099_93 (sequence is synthesized)
atggccccgtagggcaacaaggatggttagttttgaccctacttatttgtgccataaaaacaatcgatcctaattgacagctatttggacttttacatctgccaaacccttttccttgaa

SEQ ID NO: 403858 - DNA, 120 bp, Artificial Sequence
  ENSG00000147099_94 (sequence is synthesized)
ctgtggtcactaaatgaggggagtctggtctgggaagtcccatccattccttcaataggatggggagcggtgatagtgtctccggcgatctcaagaataggagggaatgttgaccaggga

SEQ ID NO: 403859 - DNA, 60 bp, Artificial Sequence
  ENSG00000147099_95 (sequence is synthesized)
tattccatggtgtatatataatttgcaaattgtgctgctataaacatgcgtgtgcaagta

SEQ ID NO: 403860 - DNA, 120 bp, Artificial Sequence
  ENSG00000147099_96 (sequence is synthesized)
gtccattggcactgaacttggaaaacttggctttcttgcattggataataccaacctacctgaggcccagaagcctgagtcaataaaatctgccacctccacagttcagaataagaaaat

SEQ ID NO: 403861 - DNA, 120 bp, Artificial Sequence
  ENSG00000147099_97 (sequence is synthesized)
actctgacacacttctcagcttagcatgtgcattgacttcttggcactctaaagtctaaatttcaattcctgaagcaaagatcctctggttaaaggttacctcgaatcttaaaaatagag

SEQ ID NO: 403862 - DNA, 120 bp, Artificial Sequence
  ENSG00000147099_98 (sequence is synthesized)
gatgttaaccccggtagactttgatccaccttctctcagtgtagtctttgattttcagttctaataatcatcttttgggaacatgtcactgaaattccaactctacttgtatgtaagtag

SEQ ID NO: 403863 - DNA, 120 bp, Artificial Sequence
  ENSG00000147099_99 (sequence is synthesized)
taaacacacagattaattaaataagctgaattcaagaatgcctcttcccccaaaaagcatggatttgttacagtgaagcaaaattgagagatctatagtctcttgggcattcttgccttt

SEQ ID NO: 403864 - DNA, 120 bp, Artificial Sequence
  ENSG00000147099_100 (sequence is synthesized)
aaacatttgagaaaagaacttgtcacaacatctaccacctttaaagatgccttgcttaaaatcttctgtctacctacctggcacaatctttatttcattggatgaatagattggtgtgtt

SEQ ID NO: 403865 - DNA, 120 bp, Artificial Sequence
  ENSG00000147099_101 (sequence is synthesized)
aaaataacatggtcaagcagattgagcttaaaatgcatatattatagaagagctaattgttggttgttttgtcaacctgttagaggaaattgtggggaggccttattaaatgagtgggca

SEQ ID NO: 403866 - DNA, 120 bp, Artificial Sequence
  ENSG00000147099_102 (sequence is synthesized)
ttcaacacaagtacacaagccttgtcctttggcagcctcaaactctagaaggctcaaaattaaaggtacttacaagagacaacctcttatgaaaagctggcaagaaatatattaacttca

SEQ ID NO: 403867 - DNA, 120 bp, Artificial Sequence
  ENSG00000147099_103 (sequence is synthesized)
actgaagaaaaagataaaattgataagtactgtgtgacatattacttttcttgacagcactaaggatggtgattatgatacaggtacagctaaggagggggaagagacctttctaccata

SEQ ID NO: 403868 - DNA, 120 bp, Artificial Sequence
  ENSG00000147099_104 (sequence is synthesized)
tacatcaggttagaacctgacttttgtttgaggctataatctttacattaaaagcctgttagcattctctaaagcctttttgttttctcagcccaaagttttgacatttgaatatataag

SEQ ID NO: 403869 - DNA, 120 bp, Artificial Sequence
  ENSG00000147099_105 (sequence is synthesized)
tcttcttaggaaatatgtgtattcctgaaaacgcttgtgcataaatggaatttttgcaaatcaaatcatattgtatatgtaccagagatagtttactacctaagcaaaacctatagtgac

SEQ ID NO: 403870 - DNA, 120 bp, Artificial Sequence
  ENSG00000147099_106 (sequence is synthesized)
ctttttttgaaattaaatactcatgccgaataagtctatcttataaagtcagatttttccgtgtcaggagtatttaaagtaatacctgtactatctaactgaaattctcagccctattaa

SEQ ID NO: 403871 - DNA, 120 bp, Artificial Sequence
  ENSG00000147099_107 (sequence is synthesized)
cacacaattcgtagagggagccacatccccaagcttcagtggaccccattgagacctaaaagacatagtcaaagcatccgtgacctttcaaatagtagaaaagcttaagaaaagagtgac

SEQ ID NO: 403872 - DNA, 120 bp, Artificial Sequence
  ENSG00000147099_108 (sequence is synthesized)
catatgtccgagtttatacatgttatcccagtgtaatgattaatagtgccctcttttacttttaaaagtataccattttgtatgataatttatatggtcaccctatctaaaatagaccag

SEQ ID NO: 403873 - DNA, 120 bp, Artificial Sequence
  ENSG00000147099_109 (sequence is synthesized)
atgcttgcatggcagagcacatctattcagcacaaaaatgtgctgattattagccagtataatatggccgttgggtgactgtgacaggacctgacgagatgggtcagagcatccatcaac

SEQ ID NO: 403874 - DNA, 120 bp, Artificial Sequence
  ENSG00000147099_110 (sequence is synthesized)
ggtcccttcctcatctcactctctttgatctctgccaccaggcctatgttttgtggcaaaaaggaatgctgacatcaaaagaaggaagtctgtttttgtcagcattttccttttctcttt

SEQ ID NO: 403875 - DNA, 120 bp, Artificial Sequence
  ENSG00000147099_111 (sequence is synthesized)
cctgggtttttagggctagatctgccaatagttttaaaaatacaaatcacattcagcagtcattttatagaattgttgcaaaattcatcacagaaatctttccattgggtagatcacctc

SEQ ID NO: 403876 - DNA, 120 bp, Artificial Sequence
  ENSG00000147099_112 (sequence is synthesized)
aagagatctggattccagagatctgagtcttgctgatggctcttgatggaactgaggagtttggattcctcaggtacatatttttggggagatgggagcctatttaatctttgcagacct

SEQ ID NO: 403877 - DNA, 120 bp, Artificial Sequence
  ENSG00000147099_113 (sequence is synthesized)
tggactgcccagttttacactgtgcatgatttgactggtccaccaaagtctgcctactaggtggtttaaaaatatcacaaaggggggattaggggaaattctgcaatttgaggttgtctt

SEQ ID NO: 403878 - DNA, 120 bp, Artificial Sequence
  ENSG00000147099_114 (sequence is synthesized)
ttcttaaaacatttttctctctttccttaccccccttccctctcctgctgttttatgactattctttcctaacttcacaattcttgatggagacaggaggctataaccttgccaacacgg

SEQ ID NO: 403879 - DNA, 120 bp, Artificial Sequence
  ENSG00000147099_115 (sequence is synthesized)
agccttgcagctactcgctcacacctccatatgtgcagatatgtgtatgcccttgcttccctgcacacatacccagggacatagctccagagagtggtggcatcttgctattgaggaaat

SEQ ID NO: 403880 - DNA, 120 bp, Artificial Sequence
  ENSG00000147099_116 (sequence is synthesized)
caactacatcaaagccatttactgagcacctactatgagtgaggcactgtgcaagactttggaaatcaaccaaaagtaagacagccaggccctgccctcagggagcattgtttctgtttc

SEQ ID NO: 403881 - DNA, 78 bp, Artificial Sequence
  ENSG00000147099_117 (sequence is synthesized)
attgctccagcctcttgagtagcttggactacaggggtgtgccatcacactcagctaatttttttattttgtagagac

SEQ ID NO: 403882 - DNA, 120 bp, Artificial Sequence
  ENSG00000147099_118 (sequence is synthesized)
ctcttgctccagcctcttgagtagcttggactacaggggtgtgccatcacactcagctaatttttttattttgtagagacagtttctcactattttgcccaggctagtcttgaactcctg

SEQ ID NO: 403883 - DNA, 88 bp, Artificial Sequence
  ENSG00000147099_119 (sequence is synthesized)
aatgtttatagcagctttattcagttgcaataggtgaatggataaacccgttgtacatccagacaatggactattattcagcactaag

SEQ ID NO: 403884 - DNA, 120 bp, Artificial Sequence
  ENSG00000147099_120 (sequence is synthesized)
cgttgtacatccagacaatggactattattcagcactaagaaaaaatgagctatcaaaccacaaaaagacatggaggaaacttaaatgcatcttgaaagaagccagtccaaaaaggttac

SEQ ID NO: 403885 - DNA, 120 bp, Artificial Sequence
  ENSG00000147099_121 (sequence is synthesized)
aacacaggtgattttgagggcagtgaaactattcctgcatgatactctaatggtggatacataacattatatacttttcaaaactcatagaactgtgcaagaccaaaagcgaatcttaac

SEQ ID NO: 403886 - DNA, 120 bp, Artificial Sequence
  ENSG00000147099_122 (sequence is synthesized)
gtaaacagtggacttaagttaatgataatgtatcagtatccattcactaactataataaatgtatcacactaatgcaagatgttaataataggggaaactgcctgtaggggaaggggaag

SEQ ID NO: 403887 - DNA, 120 bp, Artificial Sequence
  ENSG00000147099_123 (sequence is synthesized)
gaaatatatgagagctctctgtactttctcttcagtttttctataaacttaaaactgttctaaaagtaaaatatattaatttaaaaaagaaagactaaagagattgttcatcaacaccta

SEQ ID NO: 403888 - DNA, 120 bp, Artificial Sequence
  ENSG00000147099_124 (sequence is synthesized)
acaaaatacctggcacagagtagacacgccataaatgtttattgaataaattgataaacaaatgagtcaaccagtggttcagtagaacccaggccccctgagtcccagttcagtactcct

SEQ ID NO: 403889 - DNA, 120 bp, Artificial Sequence
  ENSG00000147099_125 (sequence is synthesized)
tcttgtacatcagagctagagtaacagtatagtttattgtccaaaccaggatatttgagagtgaaatggggtgccttaggtataaatcaagactgtttcagagataaccagaaatcacaa

SEQ ID NO: 403890 - DNA, 120 bp, Artificial Sequence
  ENSG00000147099_126 (sequence is synthesized)
actggcagtccataagctacatctcgcctccaaaattgttctgtttggccactcatcttaatgcctcatatgatattcttttaaaatgtcagtcatttgcccaaatttaacacagtggaa

SEQ ID NO: 403891 - DNA, 120 bp, Artificial Sequence
  ENSG00000147099_127 (sequence is synthesized)
actgcataaaaatgtgaaatttggacttctcttggaaaatggaaggactcggtcccatggggccgacaggactgcacagtggtgagtggctggagctgagcagcagctgcccacttttgc

SEQ ID NO: 403892 - DNA, 120 bp, Artificial Sequence
  ENSG00000147099_128 (sequence is synthesized)
cagcaggtaccttcctctttgccacaagccccaccagtcccttttgtatctcttactctaggccaagtgtgagtttccatttacactgtcttggttttgttttcttctgtggcagagtta

SEQ ID NO: 403893 - DNA, 120 bp, Artificial Sequence
  ENSG00000147099_129 (sequence is synthesized)
agaaaaaagggaaatatttcttacacttatgtcatgattcaaagtaagaaaatgaaaaaaggatcaagagggccccttgtgtcttgcccccagcctgctttacaaacagtatattcttgg

SEQ ID NO: 403894 - DNA, 120 bp, Artificial Sequence
  ENSG00000147099_130 (sequence is synthesized)
cctctctaggcagttgagtctgcccgctgtggtctgaacttcttgtctccctaggccccagcctgtgctagcctttagaattttctcaggctgccacccactgctggaaaagctagatgt

SEQ ID NO: 403895 - DNA, 120 bp, Artificial Sequence
  ENSG00000147099_131 (sequence is synthesized)
gaggggaaaacaatgggcattatttaagcttgcatttttattgttaccccaattcaacattgctcatcatcaacttcttggtgaaaattatttctgttgtttttcttaattgcctccaaa

SEQ ID NO: 403896 - DNA, 120 bp, Artificial Sequence
  ENSG00000147099_132 (sequence is synthesized)
tttaactggagagtgaggcagagcagcagaggagtacagcacccacctttcctccctgcgaacatgtcttgttggaatgctttgacatggaattttgttcatccttgcattcagtcattc

SEQ ID NO: 403897 - DNA, 120 bp, Artificial Sequence
  ENSG00000147099_133 (sequence is synthesized)
ccctagctctggctatacttacagatggaaggactctcacttcacaccagtgtcccctgtaggttgtcctcagctgaggcaacaacacaagcgaaggtgtggaaacaggaaagcatggat

SEQ ID NO: 403898 - DNA, 120 bp, Artificial Sequence
  ENSG00000147099_134 (sequence is synthesized)
ggatggggcccatttacgctaaggagttggacttcattcataggtggtaggtcgggaactgctaaagtcttttttttttttttttttttgaaatggtgtctcgctctgtcacccaggctg

SEQ ID NO: 403899 - DNA, 120 bp, Artificial Sequence
  ENSG00000147099_135 (sequence is synthesized)
ggcagtcatactggagtctctgtatccagtggcggggctctgcacagagtaactggactaggaagatcaaagagccaagccccatccactttgcaggtttttcacagcatatggtcctga

SEQ ID NO: 403900 - DNA, 87 bp, Artificial Sequence
  ENSG00000147099_136 (sequence is synthesized)
acacagcgagattccatctctacagaaaatttaaaaattagccaggcatagtggcatatgcctgtggtcccaaatacttagaggttg

SEQ ID NO: 403901 - DNA, 79 bp, Artificial Sequence
  ENSG00000147099_137 (sequence is synthesized)
aggttgcagtgtgacactccgtctcaaaaaaaagaaaaaaaaatgcaagttatctccttcttctttgcatgctgctcac

SEQ ID NO: 403902 - DNA, 120 bp, Artificial Sequence
  ENSG00000147099_138 (sequence is synthesized)
aaaatgcaagttatctccttcttctttgcatgctgctcacttcttatacccagacatttatgactatgtcattcataaatttgtccaaaccttttgtgaattccttctgtcatatccttc

SEQ ID NO: 403903 - DNA, 120 bp, Artificial Sequence
  ENSG00000147099_139 (sequence is synthesized)
tggtttaagagatgtgagtcatgcaagaaagaacaaagaataaaattgaaatgacagtcttacaggtacaataagataacattttaatgaaaattgccaaaactaggctacacagtgtga

SEQ ID NO: 403904 - DNA, 120 bp, Artificial Sequence
  ENSG00000147099_140 (sequence is synthesized)
agtcatataagttctgtggcacaatacacagttgcacacaaatatccttgtggtcctctgaaatcagattaacaaatggtagatcaaaaaatatttgctgagcacccattatgtgccaga

SEQ ID NO: 403905 - DNA, 120 bp, Artificial Sequence
  ENSG00000147099_141 (sequence is synthesized)
caccatgctaaatgtcttaggagatgcaaagagagaaattcatcccctacctcaagcagctagggagggagggtggtgtaagtgctggggagacatgcaaatgcacagatagttataata

SEQ ID NO: 403906 - DNA, 120 bp, Artificial Sequence
  ENSG00000147099_142 (sequence is synthesized)
cagagcagaaaaagaataagacagtaggaagagtgactgtggagatgtgcatcaaatataaaggggatacaaaggagtacataaaataccctgccctccatgagctgaaaatataatcaa

SEQ ID NO: 403907 - DNA, 120 bp, Artificial Sequence
  ENSG00000147099_143 (sequence is synthesized)
gaaatctagtaggtgaaaaggtcaagataatgcagtggtcagttgcagccgggctgacctcactctcttcgctctcagtcttgggctttagttctttcatctcctagggtaataatcctc

SEQ ID NO: 403908 - DNA, 120 bp, Artificial Sequence
  ENSG00000147099_144 (sequence is synthesized)
ctcctccaaatgcccgttccctacttctctattatcttcctaggtccagcttcaagtcctgtgcccttcaaaaacccttacctaaatacatcaatcccctttgagctcttccttcacgtt

SEQ ID NO: 403909 - DNA, 120 bp, Artificial Sequence
  ENSG00000147099_145 (sequence is synthesized)
catttattccttgtttcatttaacaattatgtgttgggcccctactatttgccaggccttattgagacctggattcagagatacaaagactaatgagataatcccagtgccctccaaaat

SEQ ID NO: 403910 - DNA, 120 bp, Artificial Sequence
  ENSG00000147099_146 (sequence is synthesized)
ctcacgatctaataaaggtgacagaacaatgtgctcacatccaggacagatgaggaccataggggatatgtttcaacaagactttgaactgactcttagaggctgattaggagttcgcta

SEQ ID NO: 403911 - DNA, 120 bp, Artificial Sequence
  ENSG00000147099_147 (sequence is synthesized)
ggtgaagaagaagaaaaaggcattctaggcagagggaacaaagatcagaaagggactggtgcctcatgggaccagtgaaaaatttgctatgtgtagattacagggtatatgagagacagt

SEQ ID NO: 403912 - DNA, 120 bp, Artificial Sequence
  ENSG00000147099_148 (sequence is synthesized)
aggaaggattaaggcttgaatggaagttaaggccagattatgaagagccctgaatgctacattaaagagcttacacttttttctgtgaaaacaaatgagctttaacttttaaaaagctca

SEQ ID NO: 403913 - DNA, 120 bp, Artificial Sequence
  ENSG00000147099_149 (sequence is synthesized)
gttggtagagatagattgcaaagaggagagacttgagaaacgcagacctgttaagagattcaaatatatacctataacacttacagtctgtgccattcatttggtcatcattgttttggt

SEQ ID NO: 403914 - DNA, 120 bp, Artificial Sequence
  ENSG00000147099_150 (sequence is synthesized)
tgtctgcaccacgcccccaaccctagtgcttagctgagtgttaagtagccaccacctagttgaataaatgagtgtttgagtaagtgtctcaatattcatattgggaaacttctatttttt

SEQ ID NO: 403915 - DNA, 120 bp, Artificial Sequence
  ENSG00000147099_151 (sequence is synthesized)
taagatgaaagaattggaagcgtaatctagcctttctctgggaacccaatttaaccttaatagcaactttccatcctttgcaagaggtatcaggtagcccagctataggaaacaggtgta

SEQ ID NO: 403916 - DNA, 120 bp, Artificial Sequence
  ENSG00000147099_152 (sequence is synthesized)
tccatgggagaacattatattaccaatgcagggaatggagttcagaaggcagaagcccagcacaaatattagaagtgataagggtaggacttcaagtatagcgctcataaaatataaaac

SEQ ID NO: 403917 - DNA, 120 bp, Artificial Sequence
  ENSG00000147099_153 (sequence is synthesized)
cggtgataccataaagccagtgatgccataaggccagtgatggcataaagccagtgatgaggaagttagtttcagccagagcactggggagccaggttggccagccaagcagtcccagct

SEQ ID NO: 403918 - DNA, 120 bp, Artificial Sequence
  ENSG00000147099_154 (sequence is synthesized)
gggaaagctgagaagaatggagcttgtatgtatgattggcccagatatctctaccatagggaaagcccaaaggtgtcatggtaccatgaaaagaccagtacatggcaaatttagcacaat

SEQ ID NO: 403919 - DNA, 120 bp, Artificial Sequence
  ENSG00000147099_155 (sequence is synthesized)
caatcacatggattattatgtataaaaatgttctatagtccagtactactatttagatcccgtgacttatctaggatagagtagggctggggtgtgtgtgtgtgtgtgtgtatgtatatg

SEQ ID NO: 403920 - DNA, 120 bp, Artificial Sequence
  ENSG00000147099_156 (sequence is synthesized)
tcatcacataggtttactaatggaaaatattaacactacttaaccagactgctttttatggactgattaaactgtacctcattcatattagggaacatatgtagccattaaaaagaatta

SEQ ID NO: 403921 - DNA, 120 bp, Artificial Sequence
  ENSG00000147099_157 (sequence is synthesized)
ggtcaatttatatacaagtatatgttactaataaaaaaacagccttcttgcactgtaacctgtagatggcactgaatctatagattgatttgtgcaggagtaacatcataacaatattta

SEQ ID NO: 403922 - DNA, 120 bp, Artificial Sequence
  ENSG00000147099_158 (sequence is synthesized)
atcttttaagccatgaatttatctttctatttacttgagtcttctttaattccaaattataatctgtactctccagtaaacacatcttacacaaatattattgaatttatccctaagtac

SEQ ID NO: 403923 - DNA, 120 bp, Artificial Sequence
  ENSG00000147099_159 (sequence is synthesized)
aaaaaagccagatctggaaggtggctgcggaacggttttaagcggaagatggaggagccggaggaaccggcggacagtgggcagtcgctggtcccggtttatatctatagtcccgagcca

SEQ ID NO: 403924 - DNA, 120 bp, Artificial Sequence
  ENSG00000147099_160 (sequence is synthesized)
acttttcatattgatcttgaataatgtaaccttgctaaatttacttattagctctagtaacttttttgtagattgcttagcataatccatgtatgcaaacatcatctgtgaataaagaga

SEQ ID NO: 403925 - DNA, 120 bp, Artificial Sequence
  ENSG00000147099_161 (sequence is synthesized)
ctggagggtggcatcatgcaaagaaagagacgtgtgtgtatgtggcactttacaaggcattctgaagaaatccaagtgaaatagaaaaaagattacctaatatagtggaaagcacactgc

SEQ ID NO: 403926 - DNA, 120 bp, Artificial Sequence
  ENSG00000147099_162 (sequence is synthesized)
tcaaagtcaggacacctgggctctacacctagtttttctaacttggctaactgacttggactgattaccctccctaggcctcagtttcttcatcaataaaatgaacaaaggatacaacta

SEQ ID NO: 403927 - DNA, 120 bp, Artificial Sequence
  ENSG00000147099_163 (sequence is synthesized)
ccatgggctttgggggtgggggtgggggcggtggacgaaagagcgttaggaagcggagaggacactgggctgggggaaatcttcagaaatttcgagtagctgtatcagatacctaaagct

SEQ ID NO: 403928 - DNA, 120 bp, Artificial Sequence
  ENSG00000147099_164 (sequence is synthesized)
ttgaggactcattttccctacctggctataatcaaaacaactactccagaaacacctgcctgcctttatcctttcctctctcctaaataccaaacactcataaatgttatatgtatatgc

SEQ ID NO: 403929 - DNA, 120 bp, Artificial Sequence
  ENSG00000147099_165 (sequence is synthesized)
tggatggttgcaaaagccctcatcaaccttcagggtatcctacaatagagcttgagtatctttaaaatggaaatctaattatgccttcaaagcacacacacacagatgcacacatgcacc

SEQ ID NO: 403930 - DNA, 120 bp, Artificial Sequence
  ENSG00000147099_166 (sequence is synthesized)
cacacaatgtttgagacattttgtaccctttaagcaaaagtccaaactcattagcctgccgggcatatatagcccacgtttacctctctagcctcatcccaccactcccgctgtcaagcc

SEQ ID NO: 403931 - DNA, 120 bp, Artificial Sequence
  ENSG00000147099_167 (sequence is synthesized)
ttcatgtttctgcatgcatacttccttctccggacttagtcccctaccagtaaccccacaatcatctctgcctccaacttccctatcgtcaccctacatacctataaatttctatacttt

SEQ ID NO: 403932 - DNA, 120 bp, Artificial Sequence
  ENSG00000147099_168 (sequence is synthesized)
taaaaaaacttttattgcacaataatcacagattcacagaaggttgcaaaaaaatgtacagggaagtcccatgtacccttcttccagcctcccccaatgttgacatcttatacaattata

SEQ ID NO: 403933 - DNA, 120 bp, Artificial Sequence
  ENSG00000147099_169 (sequence is synthesized)
atcttatacaattatattacggcatcaaaatgaagaagttgatattggacattggtacaagccatagagcttatttagatttcaccagctatatatgcacgtgtgtgtgtgtgtgtgtgt

SEQ ID NO: 403934 - DNA, 120 bp, Artificial Sequence
  ENSG00000147099_170 (sequence is synthesized)
ctctatgcaattttatcacacatgtagccttgcataactacaaccacaatcaagatacagatcagtaccatcaccacaaggttccctcatgctacgcctttatagctacatccatcccta

SEQ ID NO: 403935 - DNA, 120 bp, Artificial Sequence
  ENSG00000147099_171 (sequence is synthesized)
acccctggcaaccaactaatctattctccacctctgtaattattattttgcaaatgtaatatgaatgggctcatgcagcagataatcttttgagattggccttcttgacccagcacaatt

SEQ ID NO: 403936 - DNA, 120 bp, Artificial Sequence
  ENSG00000147099_172 (sequence is synthesized)
cccttgagagccacccagattttttgcatgtatcaatagtttgctcctttttattaatgagcaatattccagtggcatggttgtaccagtttgtttaaccatttatctgttgaaatacat

SEQ ID NO: 403937 - DNA, 120 bp, Artificial Sequence
  ENSG00000147099_173 (sequence is synthesized)
ctgggttgtttccaatgtttggctattacaaattgagctgctacgaacattcatgtacaagttcctacacaaaaataagtcttaaattatctgaaatacattgcccaagagtacaattac

SEQ ID NO: 403938 - DNA, 120 bp, Artificial Sequence
  ENSG00000147099_174 (sequence is synthesized)
aaatgatcacttttccctcaaagactcttaggcctgagatcagaggaaagcccccaatccgtgtttcacaggtactcacaagagaaaatgctaggagggttgtgccttgctaagggaagg

SEQ ID NO: 403939 - DNA, 120 bp, Artificial Sequence
  ENSG00000147099_175 (sequence is synthesized)
aagaaaagttgggggtggggagcatgagatttgatgcagttagtaaagaatgaactctgaaaagtgttacgagagagagagagagacttaaaacaaccatttgtttagctcatgactcta

SEQ ID NO: 403940 - DNA, 120 bp, Artificial Sequence
  ENSG00000147099_176 (sequence is synthesized)
tagattggcaattgagctgagttcagctgggtggctcttctggttctggctggatacacccagcatctgcagtcagctggctgtcaaaggcctcgatcacatgtccagtaattggctggt

SEQ ID NO: 403941 - DNA, 120 bp, Artificial Sequence
  ENSG00000147099_177 (sequence is synthesized)
ggttgcctgggtgacagggatctctgggccatttgtttctcatcatccagcaagctattctggtcttgttccttatggcgaggtcacagagttcccaagagcagcagagaataagcccca

SEQ ID NO: 403942 - DNA, 120 bp, Artificial Sequence
  ENSG00000147099_178 (sequence is synthesized)
aaatataagtgctttttaaaaaatagctctattggggtataattcacatacattacctgactttgaattttgttttctcccctgtttgcagggaatctgaagcatgtggtctagttgaca

SEQ ID NO: 403943 - DNA, 120 bp, Artificial Sequence
  ENSG00000147100_0 (sequence is synthesized)
ggccagctggggcgcggagcctggaggaggaggcagcggcagcggcagcagcagccctccgagcagcagcagctgcagcagcagaaacaagtaccagccacaaagcggctcctctggccc

SEQ ID NO: 403944 - DNA, 120 bp, Artificial Sequence
  ENSG00000147100_1 (sequence is synthesized)
aagcagccacagtccccccgccgcgatggcgctgcaaagccaggcgagcgaggaagcaaaggggccctggcaggaggcagaccaggaacagcaggagccggtgggtagcccagagccgga

SEQ ID NO: 403945 - DNA, 120 bp, Artificial Sequence
  ENSG00000147100_2 (sequence is synthesized)
gtctgagccggagcctgagcccgagcccgagcccgtgccagtgcccccgcccgagccccagccggagccccagcccctaccggaccccgcacccctgccggagctggagttcgagtccga

SEQ ID NO: 403946 - DNA, 120 bp, Artificial Sequence
  ENSG00000147100_3 (sequence is synthesized)
gcgggtgcacgaacccgagcccacgcctacggtagagacccgcggcaccgcgcgcggcttccagcctcccgaaggtggcttcggctgggtggtggtgttcgctgccacctggtgcaacgg

SEQ ID NO: 403947 - DNA, 120 bp, Artificial Sequence
  ENSG00000147100_4 (sequence is synthesized)
ctccatcttcggcatccataactctgtcgggatcctctactccatgctgctagaggaggaaaaggaaaaaaatcgccaagtggagttccaagcagcatgggtcggagccctcgcgatggg

SEQ ID NO: 403948 - DNA, 120 bp, Artificial Sequence
  ENSG00000147100_5 (sequence is synthesized)
tatgatcttcttctgttctcccattgtgagtatattcactgaccgtttgggctgccgaatcacagcaaccgcgggggctgccgttgctttcattggcctccataccagctccttcaccag

SEQ ID NO: 403949 - DNA, 120 bp, Artificial Sequence
  ENSG00000147100_6 (sequence is synthesized)
ctccctaagcctgcgctacttcacctacgggattctctttggttgtggctgttccttcgcctttcagccatccctcgtcatcctgggccactactttcaacgccgcctgggtctggccaa

SEQ ID NO: 403950 - DNA, 120 bp, Artificial Sequence
  ENSG00000147100_7 (sequence is synthesized)
tggtgtggtgtctgctgggagtagcattttctccatgtccttccccttcctcatcagaatgctgggggataagatcaagctggcccaaaccttccaggtgctgagtaccttcatgtttgt

SEQ ID NO: 403951 - DNA, 120 bp, Artificial Sequence
  ENSG00000147100_8 (sequence is synthesized)
tcttatgctgctttcactcacctaccggcccctcctgcccagctcccaggacaccccaagcaagagaggtgtccgcaccctgcaccagcgctttctggctcagctcaggaagtacttcaa

SEQ ID NO: 403952 - DNA, 120 bp, Artificial Sequence
  ENSG00000147100_9 (sequence is synthesized)
catgcgagtgttccgccaacgcacttaccgcatctgggccttcggaattgctgctgctgcccttggctactttgttccctatgtacacctgatgaagtatgtggaggaggagttctcaga

SEQ ID NO: 403953 - DNA, 120 bp, Artificial Sequence
  ENSG00000147100_10 (sequence is synthesized)
aatcaaggagacctgggtgctcttggtgtgtattggggctacctcaggccttgggcgtcttgtgtcaggccacatcagtgactccatccctggacttaagaagatctacttgcaggtcct

SEQ ID NO: 403954 - DNA, 120 bp, Artificial Sequence
  ENSG00000147100_11 (sequence is synthesized)
ttccttcctgctcctgggcctgatgtccatgatgattcccctgtgccgggacttcgggggccttatcgtcgtctgtcttttcctgggcctttgcgatggcttcttcatcaccatcatggc

SEQ ID NO: 403955 - DNA, 120 bp, Artificial Sequence
  ENSG00000147100_12 (sequence is synthesized)
ccccattgcatttgagctggtgggcccaatgcaggcctcacaggccattggctacctcctgggcatgatggccctgccaatgattgctgggccccccattgcaggcctactccgcaactg

SEQ ID NO: 403956 - DNA, 120 bp, Artificial Sequence
  ENSG00000147100_13 (sequence is synthesized)
ttttggggactaccatgtggccttctactttgccggtgtgccccccatcatcggggctgtaatcctcttcttcgtccctctgatgcatcaaaggatgttcaagaaagagcagagagattc

SEQ ID NO: 403957 - DNA, 120 bp, Artificial Sequence
  ENSG00000147100_14 (sequence is synthesized)
cagcaaggataagatgttggcccctgacccagaccccaatggggagctactgccgggctcccccaaccctgaggaaccaatctaatgcctttcttgccattgtgtgccctttcccagctc

SEQ ID NO: 403958 - DNA, 120 bp, Artificial Sequence
  ENSG00000147100_15 (sequence is synthesized)
ttccccttcatcccaccctgctcagcatttacatttttgccaccagcacacttgttcccagacctgcgcacacagcatttcagccacctgacaatctccttggagtcaaagctccaggtg

SEQ ID NO: 403959 - DNA, 120 bp, Artificial Sequence
  ENSG00000147100_16 (sequence is synthesized)
ttccaaactcattaactaaattctccccagaatgcttttaaattttccagggcctttctcctcccaggatctgggaaagcttgggaaccacccctggcctttggaacctctccatatact

SEQ ID NO: 403960 - DNA, 120 bp, Artificial Sequence
  ENSG00000147100_17 (sequence is synthesized)
gttagtcacccactataatcaactgccaaaggtgctactgtgtccccaggagcctaatagggtaggcccaaatctctgtttgctgaggaggtcattgccatccatatttgggagccactg

SEQ ID NO: 403961 - DNA, 120 bp, Artificial Sequence
  ENSG00000147100_18 (sequence is synthesized)
ggtggaggggcagggaggcaaaatgagacaagtagccttggttagtcttagagttgctgatgactgtggcttcccaagaactgggtacaagcagtgcccttattgtatggttggttaaca

SEQ ID NO: 403962 - DNA, 120 bp, Artificial Sequence
  ENSG00000147100_19 (sequence is synthesized)
gtctgctcccctcttcccttccttctttttttcctctactgacttctctccatactctttcccctctatttctttgtatgactgtcatagacacatgggtgcttgaagaaaggagggacc

SEQ ID NO: 403963 - DNA, 120 bp, Artificial Sequence
  ENSG00000147100_20 (sequence is synthesized)
cggaacttgggccaatcagcctcaccttgtcccagtccactcctaacactagcatcagtcccactcatctcaggctgagccacatctcactttttcgctcaagctatataatcctagact

SEQ ID NO: 403964 - DNA, 120 bp, Artificial Sequence
  ENSG00000147100_21 (sequence is synthesized)
ggaagagtagaatatcatatagggaagaaaccttaaacaccacagtgttccatgttccagtcactgatttttacaaatcttacagtccaaggcattaacctcaaggccctcccagcaccc

SEQ ID NO: 403965 - DNA, 120 bp, Artificial Sequence
  ENSG00000147100_22 (sequence is synthesized)
cattcttgtatacacatggcaaaatgtgaagaaactcctttcatctcagcaggtagaggaggactgatgacacgagctgccatggcgggaggaggggcagtagttattgatatggtgagc

SEQ ID NO: 403966 - DNA, 120 bp, Artificial Sequence
  ENSG00000147100_23 (sequence is synthesized)
cccatctctcagttttcatgacaggtctatatttctacctgggccaggccaggaaagagactatttaagaaaaaaaaaatcaattcctagcctggatcccaaaaaggtacaggcagcagt

SEQ ID NO: 403967 - DNA, 120 bp, Artificial Sequence
  ENSG00000147100_24 (sequence is synthesized)
tgcacatagggttggaaaatttcttttgggaaggggaagccatcccagcctttaccacccaatgtgtctcccatgctgggcatcctaggccactttgcttagagggcattaaaggtgcca

SEQ ID NO: 403968 - DNA, 120 bp, Artificial Sequence
  ENSG00000147100_25 (sequence is synthesized)
tgaaaggtagactctgaaccactttgatccctctgaagtaggtgactgatgcctccttatgcccaggctctggcaacagtcttactgaagaacattcccagtgcccctggctaggggcag

SEQ ID NO: 403969 - DNA, 120 bp, Artificial Sequence
  ENSG00000147100_26 (sequence is synthesized)
agggcactgccaggctgtgttcagttagcacagctcacctcattaggagctcagcctctctcctcactctgcctctttgtgtctctttttctcctctctgagcctttgtctattgtgttc

SEQ ID NO: 403970 - DNA, 120 bp, Artificial Sequence
  ENSG00000147100_27 (sequence is synthesized)
ctgtcacccaccctttcatcatctttttgccaggcattcctggctgtcacttggagccaacagtaacttgccaccttaaggcagggtcatccccgggccaggaggatgaggttgtcctga

SEQ ID NO: 403971 - DNA, 120 bp, Artificial Sequence
  ENSG00000147100_28 (sequence is synthesized)
ggggctccaaagaagacaatagttcccactcatgattttccgttacaaacaggcagctggggcatggttggcctccaatgatttcattcaaggccaaagtcctgagccccctccgctggt

SEQ ID NO: 403972 - DNA, 120 bp, Artificial Sequence
  ENSG00000147100_29 (sequence is synthesized)
cccagtccagctcttatcaactccccaaaggaaaacccactggttcttagctctgtgggtaggaaggggccctagaaagggcctagttactatcctgtcagttctaacagtagtggaaca

SEQ ID NO: 403973 - DNA, 120 bp, Artificial Sequence
  ENSG00000147100_30 (sequence is synthesized)
ggagaatctgggccctaggagccctgtaactcccaggagagaccactgaaaatactggagcaacaatgcccctgcttccatttctccccacctcactctcaccaagtcaccagagggtgg

SEQ ID NO: 403974 - DNA, 120 bp, Artificial Sequence
  ENSG00000147100_31 (sequence is synthesized)
ttctgtaggacctcttttgttgcttaagatgcagatggctcttaagaatcaggcagtcgcccacttctctccagatgaagggaagacattcataggtcccaaatctgcccattcagatgt

SEQ ID NO: 403975 - DNA, 120 bp, Artificial Sequence
  ENSG00000147100_32 (sequence is synthesized)
cacataatatggtgggatatcaatttacttcttccacacatgtggttgtgcacatgtgagcttgtgtgcttttggagagaatgttgattggcaaaagcagcacagtattaatatttagag

SEQ ID NO: 403976 - DNA, 120 bp, Artificial Sequence
  ENSG00000147100_33 (sequence is synthesized)
taggatgcagcctcttatgcaccacagttaaatctagaacgaacaaaatttcagagctcaagacatgggacatttaaatcctcaaggagtttggaacaaaataaacagatctaaaaattt

SEQ ID NO: 403977 - DNA, 67 bp, Artificial Sequence
  ENSG00000147100_34 (sequence is synthesized)
tggttgcatgggtcggagccctcgcgatgggtatgatcttcttctgttctcccattgtgagtatatt

SEQ ID NO: 403978 - DNA, 120 bp, Artificial Sequence
  ENSG00000147113_0 (sequence is synthesized)
acagcctcgagtggacagccagaggctgcagctggagcccagagcccaagatggagccccagctggggcctgaggctgccgccctccgccctggctggctggccctgctgctgtgggtct

SEQ ID NO: 403979 - DNA, 120 bp, Artificial Sequence
  ENSG00000147113_1 (sequence is synthesized)
cagccctgagctgttctttctccttgccagcttcttccctttcttctctggtgccccaagtcagaaccagctacaattttggaaggactttcctcggtcttgataaatgcaatgcctgca

SEQ ID NO: 403980 - DNA, 120 bp, Artificial Sequence
  ENSG00000147113_2 (sequence is synthesized)
tcgggacatctatttgcaagaagttctttaaagaagaaataagatctgacaactggctggcttcccaccttggactgcctcccgattccttgctttcttatcctgcaaattactcagatg

SEQ ID NO: 403981 - DNA, 120 bp, Artificial Sequence
  ENSG00000147113_3 (sequence is synthesized)
attccaaaatctggcgccctgtggagatctttagactggtcagcaaatatcaaaacgagatctcagacaggagaatctgtgcctctgcatcagccccaaagacctgcagcattgagcgtg

SEQ ID NO: 403982 - DNA, 120 bp, Artificial Sequence
  ENSG00000147113_4 (sequence is synthesized)
tcctgcggaaaacagagaggttccagaaatggctgcaggccaagcgcctcacgccggacctggtgcagggcctggccagcccgctcctgcgctgcccttcgcagcgactcctggatcgcg

SEQ ID NO: 403983 - DNA, 120 bp, Artificial Sequence
  ENSG00000147113_5 (sequence is synthesized)
tggtcaggcgctatgcagaggtggccgacgccggcagcatcttcatggaccacttcaccgaccgtgacaagctgcgcctgctctacacgctggctgtcaactcgcaccccatcctcctac

SEQ ID NO: 403984 - DNA, 120 bp, Artificial Sequence
  ENSG00000147113_6 (sequence is synthesized)
agatcttccctggggctgagggatggccgctgcccaagtacctgggctcctgtggcagattcctcgtcagcaccagcaccagaccgctgcaggaattctatgatgcacccccagatcagg

SEQ ID NO: 403985 - DNA, 120 bp, Artificial Sequence
  ENSG00000147113_7 (sequence is synthesized)
cagccgaccttgcctaccagctcctgggtgtcctggagtctttgaggagcaacgatttgaactatttcttctacttcacccacattgatgcaggcatgttcggcgtctttaacaacgggc

SEQ ID NO: 403986 - DNA, 120 bp, Artificial Sequence
  ENSG00000147113_8 (sequence is synthesized)
atctgttcatccgggatgccagtgcagtgggcgtcatcgacaagcaggaaggcagccaagaagccaacagggcaggagagaataaagacatttttagctgcctggtttccggctgccagg

SEQ ID NO: 403987 - DNA, 120 bp, Artificial Sequence
  ENSG00000147113_9 (sequence is synthesized)
cccagctgccctcctgcgaaagcatctctgagaagcagagcctggtgctggtgtgtcagaagttgctgcctcgacttctccaggggaggttcccctccccagtgcaagacgacatagact

SEQ ID NO: 403988 - DNA, 120 bp, Artificial Sequence
  ENSG00000147113_10 (sequence is synthesized)
ccatccttgttcagtgtggggacagcatccgcccagacccagaagtccttggggccgccagccagctgaaagacatcttgaggcccctgagaacgtgtgactccagatttgcctatcgtt

SEQ ID NO: 403989 - DNA, 120 bp, Artificial Sequence
  ENSG00000147113_11 (sequence is synthesized)
acccagattgcaaatataacgataagttctgaagggctggtgtctagctggccttggggacaacacgcttggctctccattctcccagtcgggttgctgcaaggtagaaagaagcagctc

SEQ ID NO: 403990 - DNA, 120 bp, Artificial Sequence
  ENSG00000147113_12 (sequence is synthesized)
ttttttaaagatgagaagaaaggcacactcatttcttagggactgagaggggagttgtgagataccacgtggctgtctctgctggctgggacgtcctggcaaagcccgcggtgggcatca

SEQ ID NO: 403991 - DNA, 120 bp, Artificial Sequence
  ENSG00000147113_13 (sequence is synthesized)
gaagacctgggtgtggacgctcactcaatgtctttgagcctcagtttcctctgttctccaccagactctcctgagggtgaaagaagacacagatggagccaccactgagcatatatccca

SEQ ID NO: 403992 - DNA, 120 bp, Artificial Sequence
  ENSG00000147113_14 (sequence is synthesized)
agcatgggtcttgggacacatgctcaccacctccatcccaggtggttacaaagtgtgttctggaaaagcacagaggcggggagcatgagaaagagctgctcaggtcaggaggctggagtg

SEQ ID NO: 403993 - DNA, 120 bp, Artificial Sequence
  ENSG00000147113_15 (sequence is synthesized)
gagggaaggcaggggaaggacaggctccctgccactaccactttagactcggacaagaggggcccccttcctgctccctatggccctgcgtcactccccacaccatcgcgggatgaggag

SEQ ID NO: 403994 - DNA, 120 bp, Artificial Sequence
  ENSG00000147113_16 (sequence is synthesized)
actgcaggccaaggggacatgcctgccaccacctagagcctggtacctgaggctccatacacctgcgcatggggcttctcgtggtgtgggaagaagccaggggtaagaagataaaggggg

SEQ ID NO: 403995 - DNA, 120 bp, Artificial Sequence
  ENSG00000147113_17 (sequence is synthesized)
gccggcgggggaccaatgtgttagcccaagtcttccaagaatatgtgtcaagatagagtgaatggaacaaagatttgttaggggaaatgattgtgtgtaaggaaagaaggagggagccgg

SEQ ID NO: 403996 - DNA, 120 bp, Artificial Sequence
  ENSG00000147113_18 (sequence is synthesized)
agaagattgggaggaccagtaagtcgagctgcaagctgagccccggtgaaggagagaatgtctggcaggagcttgctaagctcaaaatcaaagaaaggttcagcaaggctgtcagggtgt

SEQ ID NO: 403997 - DNA, 120 bp, Artificial Sequence
  ENSG00000147113_19 (sequence is synthesized)
cactcagtggttggcggaaacagcaaagatagatttcagagcacagcagcaggggtccctggtcagccccgctccctagagcaggagatcttgagtgggagaacattcttgttgtagcca

SEQ ID NO: 403998 - DNA, 120 bp, Artificial Sequence
  ENSG00000147113_20 (sequence is synthesized)
cagctgaggccctggaccagctctctccacaccgcatgctccgagttgggactctaaggagtctaggaattttcattcaaacttggccttacaggtcactcatcagaaaaatactttttt

SEQ ID NO: 403999 - DNA, 120 bp, Artificial Sequence
  ENSG00000147113_21 (sequence is synthesized)
caaggtcaaccaatagaacatactttattcaacagtttgttagtttgctttttaaatatttagccacatggtatgtaggcttccatgtacactcttgccctggcccctgaaacataagca

SEQ ID NO: 404000 - DNA, 120 bp, Artificial Sequence
  ENSG00000147113_22 (sequence is synthesized)
gggggctcttctgtacatttgcccagcttccctgccagcctttaaccccaggaacctctcagtctacctcctcttttctgcctctgaatccctacctttaaagtcagaacaggccaggcc

SEQ ID NO: 404001 - DNA, 120 bp, Artificial Sequence
  ENSG00000147113_23 (sequence is synthesized)
gagactccgtctcaaaataaataaataaaaataaagtcagaacacctggcttaataggcctcactgtgcagatgaggaaactgaggcccagggaggaagagcgatctgtggagatatttc

SEQ ID NO: 404002 - DNA, 120 bp, Artificial Sequence
  ENSG00000147113_24 (sequence is synthesized)
gcgatctgtggagatatttctagaacccctgcaagctgagccccagtgaaggagagaaggtccagtaggagcttgctaagctcaaaatcgaagaaaggttcagcaagactgtcagggtga

SEQ ID NO: 404003 - DNA, 120 bp, Artificial Sequence
  ENSG00000147113_25 (sequence is synthesized)
cctcaaagcaatggcagccatcagaggagccccattgctattaggaggctcctattgccctccccttcagcctctgactttcacctgtgctacccaattctggttccttcactcccattc

SEQ ID NO: 404004 - DNA, 120 bp, Artificial Sequence
  ENSG00000147113_26 (sequence is synthesized)
aaaaatggaccccagaaaagccttattttgtggagtacctagttcccttttgggtttgtctcttgactgctacgggcattgccccagggcaaccatgacagtgaagatgactggccaagc

SEQ ID NO: 404005 - DNA, 120 bp, Artificial Sequence
  ENSG00000147113_27 (sequence is synthesized)
ttgtggactggccagcaagcttgggctgcctgagacgctttgaaatggctgccttctgagttggtcttgagggtgaagactgaccacccttctcacctgcacagtcacagtccctctcct

SEQ ID NO: 404006 - DNA, 120 bp, Artificial Sequence
  ENSG00000147113_28 (sequence is synthesized)
gctggcctgactgcagctgtcctcccagctggccacctgaccagagaccaggagagaggccacagcctccagaccctccagagtcccacggaggaagaaggcttaccagagagaccctct

SEQ ID NO: 404007 - DNA, 120 bp, Artificial Sequence
  ENSG00000147113_29 (sequence is synthesized)
gatgcatgagccaggccccagcccttctccctgcatccaggtgtgtttccaccgcaaaatgcctccacacaatgagcgactttggccctgcgtgggtcagcatgtggtctgaggtaaccc

SEQ ID NO: 404008 - DNA, 120 bp, Artificial Sequence
  ENSG00000147113_30 (sequence is synthesized)
tcaaatgcctccaccacacatctgtccacctgcacgggttcaaggtaagcacttgcccccttctctcctccagaccagtcgcctgaaattctgagcaacattccttcaagactatcatgt

SEQ ID NO: 404009 - DNA, 120 bp, Artificial Sequence
  ENSG00000147113_31 (sequence is synthesized)
aacccttggtgatgctgagtccagacaggaaatgcagacttgggacccacctgtatcagcagaaagaggccttgtgccccgtttgtccgagtcccagaacggagcaaatgagaaaaccgg

SEQ ID NO: 404010 - DNA, 120 bp, Artificial Sequence
  ENSG00000147113_32 (sequence is synthesized)
cgagctgtcccccgaggagctgtagggagattggtttttagtataaattacaataaaattttgtgtatgtgtacagctgtgttcacatccacagtgtaagctgtgatatggtttggatgt

SEQ ID NO: 404011 - DNA, 120 bp, Artificial Sequence
  ENSG00000147113_33 (sequence is synthesized)
aatctcatgttgaaatgtgatccccagcattggaggtggggcctgatgggaggtgattgggtgatgggggaagttgcctcatgaatgacttggtgccctcctggaagtgatgagtgagtt

SEQ ID NO: 404012 - DNA, 120 bp, Artificial Sequence
  ENSG00000147113_34 (sequence is synthesized)
gatgagtgagttctcgctgagctcactcaagatgtggttgtttaaaagagtgtggcacgtccctcccccaactctccctctcactcccgctctcaccatgtgacacacctgctccccctt

SEQ ID NO: 404013 - DNA, 120 bp, Artificial Sequence
  ENSG00000147113_35 (sequence is synthesized)
cgccttccaccatgattggaagcttcctgaagcccttaccagaagcagatgccagccccacacttcctgtaccacctgcagaaccataaaccaaaataaagctcttttctttatcaatta

SEQ ID NO: 404014 - DNA, 120 bp, Artificial Sequence
  ENSG00000147113_36 (sequence is synthesized)
ggagaatctgtgcctctgcatcagccccaaagacctgcagcattgagcgtgtcctgcggaaaacagagaggttccagaaatggctgcaggccaagcgcctcacgccggacctggtgcagt

SEQ ID NO: 404015 - DNA, 120 bp, Artificial Sequence
  ENSG00000147113_37 (sequence is synthesized)
attcgagaaagttcctagctgcgacctctggcctgaagatctgacaggatgacccttgccagtccacccctctgccagggctcaactcacctgcatcattctctgacagctctttgccag

SEQ ID NO: 404016 - DNA, 120 bp, Artificial Sequence
  ENSG00000147113_38 (sequence is synthesized)
aagttcctgtgtatgctgagataacaccagtgaaaaagcctggcatggagcccagcactgagaacttccagaaagtgttagccttctcccaactgtgttataccaaccacattttcaaat

SEQ ID NO: 404017 - DNA, 120 bp, Artificial Sequence
  ENSG00000147113_39 (sequence is synthesized)
agtaatcattaaagaggcttctgcatcaaaccttcacatgcagctcccatgccaccctccagaattcaccaacacacaggcccaccagcaacaggctacctttgcacaatattctctgat

SEQ ID NO: 404018 - DNA, 120 bp, Artificial Sequence
  ENSG00000147113_40 (sequence is synthesized)
gacaactccaaagccccggctctttccaccacactgtggtcccctagatggggctgttgctgagcccaccccaatccagatgtgatccccctgtgatctacttctggcaagattctcagt

SEQ ID NO: 404019 - DNA, 120 bp, Artificial Sequence
  ENSG00000147113_41 (sequence is synthesized)
ctggacaggtcttccctatgagatagaacctgataaggagctagggcaattctgacaacattaccaaaggcccacataacttctaaattttggtctggtctgaaggaaaacctgttcttg

SEQ ID NO: 404020 - DNA, 120 bp, Artificial Sequence
  ENSG00000147113_42 (sequence is synthesized)
ccctagtgatggatgaactctcttatctctggcttctagagggaaaaaaaagcatacctcttttactttttaagtacctccatcagagtcatgaaatcacctgtcaagactatctatctt

SEQ ID NO: 404021 - DNA, 120 bp, Artificial Sequence
  ENSG00000147113_43 (sequence is synthesized)
ctccttggggaagctacttctcctctattcagatttcactaaaatcttccaagatgaaagcaaatctagatttcggtcttcattgctgtccatttttgtaatgaacgagtgtttttcctt

SEQ ID NO: 404022 - DNA, 120 bp, Artificial Sequence
  ENSG00000147113_44 (sequence is synthesized)
tagctagtgtatcaggcagggttctaccagagaaacagaaccagtaggagatacatatacatgtccagatttatttcaaagaattgatttacatgattgtggggattggcaagtccaaaa

SEQ ID NO: 404023 - DNA, 120 bp, Artificial Sequence
  ENSG00000147113_45 (sequence is synthesized)
tccatatggtaggcctgcaatctgtaaacctttgggcaggagctgatgctgtagtttgcagatagaattccttgttccttaaaaaaatctgtttttgttcttaagggctttgaatgattg

SEQ ID NO: 404024 - DNA, 120 bp, Artificial Sequence
  ENSG00000147113_46 (sequence is synthesized)
gatcaggcccacccagattacctagataatctcttttacttaaagtaaactgattgtaggtgctaatcacatctatgaaatgccttcacagcaacacctagattagcattcaattgaata

SEQ ID NO: 404025 - DNA, 120 bp, Artificial Sequence
  ENSG00000147113_47 (sequence is synthesized)
actggggaatacagcctagccaagttgacacataaaattaaccatcacagcaacatgcctgctaaattttatcgaccgtcttcagactgttaaggattgtggtagagaactgtgacagcc

SEQ ID NO: 404026 - DNA, 120 bp, Artificial Sequence
  ENSG00000147113_48 (sequence is synthesized)
actctcagcatcaccctgaaccaaaggcccctatcaagtaacaatatagccaagcaaaattccagtcaatagagacattgactggttggctggcttcccaagggatagcaccagacaaga

SEQ ID NO: 404027 - DNA, 120 bp, Artificial Sequence
  ENSG00000147113_49 (sequence is synthesized)
aatgcaaggatgaggaaaccaggcacgggagagagaggggcaacagaggtccagggtttggttatctttttatttttcactgggaggtggtaagttagccctgttgcccatgtatgcaga

SEQ ID NO: 404028 - DNA, 120 bp, Artificial Sequence
  ENSG00000147113_50 (sequence is synthesized)
tgggagaagtgatttagaaactccaaagcaattggtaatccccaaaatgggtgtatctggtttgaaatgaaaccttattttattggaaatggttggtttcccaattctgtttgccattgg

SEQ ID NO: 404029 - DNA, 120 bp, Artificial Sequence
  ENSG00000147113_51 (sequence is synthesized)
ccaatataattgtgggtttgcacatggccagcacatgccaaacagaagtagacaaaggtctcactctgtaagtgggaccttggggaggagctgcctccatcataaagggaggggttagta

SEQ ID NO: 404030 - DNA, 120 bp, Artificial Sequence
  ENSG00000147113_52 (sequence is synthesized)
aaaatggtctcttaagcctgttcctgctacagttatagaggttgctcagaaccttctcagcaaatatagcagttatctattgttgtgtattaaaccatttcaacacatagtggcttaaaa

SEQ ID NO: 404031 - DNA, 120 bp, Artificial Sequence
  ENSG00000147117_0 (sequence is synthesized)
agccttaccccttactggaggctgcaggaccctctacacacagacagctgtccagcacggaaggtgggctgaggcccagggtgaacatgccagctaatgggacatcaccccagagattcc

SEQ ID NO: 404032 - DNA, 120 bp, Artificial Sequence
  ENSG00000147117_1 (sequence is synthesized)
ctgccctgattccaggagaacctggcagatcttttgaggggtccgtgtcattcgaggatgtggctgtggatttcacccgacaggagtggcacagactggaccctgctcagaggaccatgc

SEQ ID NO: 404033 - DNA, 120 bp, Artificial Sequence
  ENSG00000147117_2 (sequence is synthesized)
acaaggatgtgatgctggagacctacagcaacctggcatctgtgggcctctgcgtggccaaaccagagatgatcttcaagttggagcgaggagaagagctgtggatattagaggaggaat

SEQ ID NO: 404034 - DNA, 120 bp, Artificial Sequence
  ENSG00000147117_3 (sequence is synthesized)
cctcaggccatggttactcaggatctctctcactgctgtgtggcaatggttctgttggggataatgccctcaggcatgataatgaccttcttcaccatcagaagattcaaacattggatc

SEQ ID NO: 404035 - DNA, 120 bp, Artificial Sequence
  ENSG00000147117_4 (sequence is synthesized)
aaaatgttgaatataatggatgcaggaaagccttccatgagaaaacaggctttgttagacgtaaaagaacacccagaggagataaaaactttgaatgtcatgaatgtgggaaagcttact

SEQ ID NO: 404036 - DNA, 120 bp, Artificial Sequence
  ENSG00000147117_5 (sequence is synthesized)
gtaggaagtcaaaccttgttgaacatctgagaatacacacaggagagagaccctatgaatgcggtgaatgtgcaaaaaccttcagtgcaagatcatacctcattgctcatcagaaaactc

SEQ ID NO: 404037 - DNA, 120 bp, Artificial Sequence
  ENSG00000147117_6 (sequence is synthesized)
acacaggggagaggccctttgaatgtaatgaatgtgggaaatcttttggcaggaagtcacaactcatcctacatacaagaacacacactggagagagaccctatgaatgtactgaatgtg

SEQ ID NO: 404038 - DNA, 120 bp, Artificial Sequence
  ENSG00000147117_7 (sequence is synthesized)
ggaaaaccttttctgagaaggcaaccctcacgattcatcagagaactcacacaggggagaaaccctatgaatgtagtgaatgtgggaaaacatttcgtgtaaagatatcccttacccaac

SEQ ID NO: 404039 - DNA, 120 bp, Artificial Sequence
  ENSG00000147117_8 (sequence is synthesized)
accacagaactcatacaggggagaaaccttatgaatgtggggagtgtgggaaaaacttccgtgcaaagaaatccctaaatcagcatcaaagaattcacacaggtgagaaaccctatgagt

SEQ ID NO: 404040 - DNA, 120 bp, Artificial Sequence
  ENSG00000147117_9 (sequence is synthesized)
ctcaataatcatcaaagaactcacacaggtgaaaagccctatcagtgtaatgaatgtgggaaatctttcagggtgcactcatctcttgggatccatcagagaattcacacaggagagaaa

SEQ ID NO: 404041 - DNA, 120 bp, Artificial Sequence
  ENSG00000147117_10 (sequence is synthesized)
ccttacgaatgtaatgagtgtggtaatgctttctatgtgaaagcacgcctaattgaacatcagaggatgcattcaggagagaaaccctacgaatgtagtgaatgtgggaaaatcttcagt

SEQ ID NO: 404042 - DNA, 120 bp, Artificial Sequence
  ENSG00000147117_11 (sequence is synthesized)
atgaagaaatccctttgtcaacaccggagaactcacacaggagagaaaccttatgaatgtagtgaatgtggaaatgccttctatgtgaaagtacgcctcattgaacatcagcgaattcac

SEQ ID NO: 404043 - DNA, 120 bp, Artificial Sequence
  ENSG00000147117_12 (sequence is synthesized)
acaggagagagaccctttgagtgtcaagaatgtgggaaagctttctgccggaaagcacacctcacagaacatcagagaactcacataggctggtcctggcgttgtacaatgaagaaagcc

SEQ ID NO: 404044 - DNA, 120 bp, Artificial Sequence
  ENSG00000147117_13 (sequence is synthesized)
tctcactgaagacttccctcaccattggatcaagctccttgggggcatatgatcaccagggcacacagtgtgcctgtgaaaatttggcacctacatttgtatcaaagtatgtcctgatcc

SEQ ID NO: 404045 - DNA, 120 bp, Artificial Sequence
  ENSG00000147117_14 (sequence is synthesized)
ccttaggggatagctcattgtttttattcagatttccctaattagtggtgtgtgaacatcttatctgttgattggctatttgggttttttcttctgtgcattgactgttcatgtcctctg

SEQ ID NO: 404046 - DNA, 120 bp, Artificial Sequence
  ENSG00000147117_15 (sequence is synthesized)
ctcattgttttcaaatgggctgttcatctcttgctttttggtttaaatgttgttttttaacatatgagaatataaaaatcctttttttttcagtcatatgtgttgcaaatatcttctccc

SEQ ID NO: 404047 - DNA, 120 bp, Artificial Sequence
  ENSG00000147117_16 (sequence is synthesized)
gtcatatgtgttgcaaatatcttctcccagactgtcgttggttttttaaattttgccatctgttttcttctgctgaagttttatattttatttatttattttttatttttttgagatgga

SEQ ID NO: 404048 - DNA, 120 bp, Artificial Sequence
  ENSG00000147118_0 (sequence is synthesized)
agtgcttgttggggccaggctttgtaacggtctcctgagcagcgagcagaaaatctgttatcgagagagagtgagcacagtgacctgcccctaaaggttcatgcgcatccctcagacccc

SEQ ID NO: 404049 - DNA, 120 bp, Artificial Sequence
  ENSG00000147118_1 (sequence is synthesized)
tctttagacgcgccccgcttctccctctgccctctccccttgcccaagccccgaggtgggggcctggtgtgaatgctccggccgaagtgaacctgcacccccgcacccgaaggcctcttt

SEQ ID NO: 404050 - DNA, 120 bp, Artificial Sequence
  ENSG00000147118_2 (sequence is synthesized)
ccggcttctgggcaaggcggccccggtgagctcggccgtcacacatctctgctttttcccaagaagagcaggaaatggccaaaccccagtcctgcaagctgtacaagaagcatgacacca

SEQ ID NO: 404051 - DNA, 120 bp, Artificial Sequence
  ENSG00000147118_3 (sequence is synthesized)
gcatctgcatctggtgaggactcaggaagcttctactcatggcagaaggcaaagagggaacaggggctagtgacatttgaagatgtagctgtggatttcacccaggaggagtggcagtac

SEQ ID NO: 404052 - DNA, 120 bp, Artificial Sequence
  ENSG00000147118_4 (sequence is synthesized)
ctgaacccaccacagaggaccctgtacagagacgtgatgctggagacctacagcaacttggtctttgtggggcagcaggttaccaaaccaaacctcatcctcaagttggaggtagaagaa

SEQ ID NO: 404053 - DNA, 120 bp, Artificial Sequence
  ENSG00000147118_5 (sequence is synthesized)
tgcccggcagaaggaaaaatcccattttggaactttccagaagtctgtcaagttgatgaacagattgagaggcaacatcaggatgaccaagataaatgtctgctgatgcaagttggattt

SEQ ID NO: 404054 - DNA, 120 bp, Artificial Sequence
  ENSG00000147118_6 (sequence is synthesized)
tctgacaagaaaacaattatcaccaagagtgctcgtgactgtcatgagtttggaaacatacttcatctgagtacaaaccttgttgcttcaatacaaagacccgataaacacgaatcattt

SEQ ID NO: 404055 - DNA, 120 bp, Artificial Sequence
  ENSG00000147118_7 (sequence is synthesized)
ggaaataatatggtagataatttagacttatttagtagaagttctgcagaaaataaatatgataatggatgtgcaaaattgttcttccatactgagtatgagaaaacaaatcctggaatg

SEQ ID NO: 404056 - DNA, 120 bp, Artificial Sequence
  ENSG00000147118_8 (sequence is synthesized)
aagccctatggctataaagagtgtgggaaaggtcttaggcgaaagaaaggccttagtctacatcagagaattaaaaatggagagaaaccctttgaatgtactgcatgtaggaaaaccttc

SEQ ID NO: 404057 - DNA, 120 bp, Artificial Sequence
  ENSG00000147118_9 (sequence is synthesized)
agcaagaagtcacacctcattgtacattggagaactcatacgggagagaaaccttttggatgtaccgaatgtggaaaagcttttagccaaaaatctcagctcattatacacttgcgaact

SEQ ID NO: 404058 - DNA, 120 bp, Artificial Sequence
  ENSG00000147118_10 (sequence is synthesized)
catacaggagagagaccctttgagtgtcctgaatgtggaaaagccttcagagaaaagtcaactgtcatcatacattacaggactcacacaggagaaaaaccttatgaatgtaatgaatgt

SEQ ID NO: 404059 - DNA, 120 bp, Artificial Sequence
  ENSG00000147118_11 (sequence is synthesized)
ggaaaagccttcactcagaagtccaacctcattgtccatcagaaaacccacactggagagaaaacctatgaatgcactaaatgtggagaatctttcatacagaagcttgatctaattata

SEQ ID NO: 404060 - DNA, 120 bp, Artificial Sequence
  ENSG00000147118_12 (sequence is synthesized)
catcatagtacccatacaggaaagaaaccccatgaatgtaatgagtgtaagaaaactttcagtgataagtcaactctcattatacaccagagaactcatacgggagagaaacctcataaa

SEQ ID NO: 404061 - DNA, 120 bp, Artificial Sequence
  ENSG00000147118_13 (sequence is synthesized)
tgtactgaatgtgggaagtctttcaatgagaagtcaaccctcattgtgcatcaaagaactcatacaggagagaaaccctatgaatgtgatgtgtgtggaaaaaccttcacgcaaaagtca

SEQ ID NO: 404062 - DNA, 120 bp, Artificial Sequence
  ENSG00000147118_14 (sequence is synthesized)
gtcatacaggagagaaaccttacgagtgcaatgaatgtgaaaaagcattttcacagaaatcatatctcattatacatcaaagaactcatacagaagaaaaaccctataaatgtaatgaat

SEQ ID NO: 404063 - DNA, 120 bp, Artificial Sequence
  ENSG00000147118_15 (sequence is synthesized)
gtggcaaagccttcagagaaaagtcaaagctcattatacatcagagaattcatacaggagagaaaccttatgaatgtcctgtgtgttggaaagcttttagccagaagtcacagctcataa

SEQ ID NO: 404064 - DNA, 120 bp, Artificial Sequence
  ENSG00000147118_16 (sequence is synthesized)
tacatcagagaacgcacacgggagagaaaccctatgcatgcactgagtgtggcaaagccttccgagaaaagtcaacattcactgtacatcaaagaactcatactggagagaaaccctata

SEQ ID NO: 404065 - DNA, 120 bp, Artificial Sequence
  ENSG00000147118_17 (sequence is synthesized)
aatgtacagaatgtgggaaagcctttacccaaaaatcaaaccttattgtacatcagcgaacccatgcaggaaagaaagcccatggaagaggccacactcggaagtcaaagttcatggcac

SEQ ID NO: 404066 - DNA, 120 bp, Artificial Sequence
  ENSG00000147118_18 (sequence is synthesized)
attagagagctaatcagcagtatctattatggacactgaaagaaagttgtgtcaattttactcacattttaaaagtatattttgacttgtggtttaaatatgggagtaaattcagccttt

SEQ ID NO: 404067 - DNA, 120 bp, Artificial Sequence
  ENSG00000147118_19 (sequence is synthesized)
cttcttttcatctcagtcataacccaaaagctacgggagaaaaagcagaagtgtaatctctgtatctgacaaaattaggagacagctgcaaccctaatgagagggctgccacaggcagag

SEQ ID NO: 404068 - DNA, 120 bp, Artificial Sequence
  ENSG00000147118_20 (sequence is synthesized)
gaaatgaagcactggtgcaggagatttcagagtgagagtgctcaaggctgcaggtgcaagacagcactggtaaggactcttagctgaggttcgggatataccccgaggcgcggaaccata

SEQ ID NO: 404069 - DNA, 120 bp, Artificial Sequence
  ENSG00000147118_21 (sequence is synthesized)
gatataacagtggtaacagtgcgtgggcaggtaggaggtaggatgtttcctagaccatttggggtctgaggagaaacaggctggggcctcgagaaggagtcactcagacaagccatattt

SEQ ID NO: 404070 - DNA, 120 bp, Artificial Sequence
  ENSG00000147118_22 (sequence is synthesized)
ttagaaagtagtctactgatgggagcaacagttatggcatgctgggggaagagaagggacttttccttgtgaagagccctacagctgcccctatttactgacttgggagaagtaaagtca

SEQ ID NO: 404071 - DNA, 120 bp, Artificial Sequence
  ENSG00000147118_23 (sequence is synthesized)
gaaagaacgaacagctgtggggggaaaaaattctcagttgtcaaaaaaaaaaaaaactgatctgcttagaatgtggccctggtttcttttcccacatgaacctccagcaaatagcaagtc

SEQ ID NO: 404072 - DNA, 120 bp, Artificial Sequence
  ENSG00000147118_24 (sequence is synthesized)
caggaaaaactcttctcattcaaagaggaattattcaaaagtaatcaaaaccacaaatgcatttggtttttgggccagcaattccacttctaggaatgtacatactcacacatgtacaaa

SEQ ID NO: 404073 - DNA, 120 bp, Artificial Sequence
  ENSG00000147118_25 (sequence is synthesized)
atgatgaacatacagtattcattaatgcagcgtttgtgaaaacaaaagattggaagctgtttaaatgacaccatatcagggttctggttccctaaattgtggtatattcatacagcctac

SEQ ID NO: 404074 - DNA, 120 bp, Artificial Sequence
  ENSG00000147118_26 (sequence is synthesized)
tcctgggtagacaacaatgaataaataaggagaacttggaaaccatttatgtagtgatgtgggataaccttcagtttatgttattaggtaggaaaaataaggttgaggacagtgactgcc

SEQ ID NO: 404075 - DNA, 120 bp, Artificial Sequence
  ENSG00000147118_27 (sequence is synthesized)
atttgtatataaaaaggagaaaaatggtaagtacataattgtgaattcataagttatctctggaaagagacatgagaacctggtaaccctgattaccttgggaggggaaggggcagtggt

SEQ ID NO: 404076 - DNA, 120 bp, Artificial Sequence
  ENSG00000147118_28 (sequence is synthesized)
ggctggggggatggaattgagagggagacaactgtatcctttcatagcttttgaaaatgtgggtgtactatgtactatgtggatgtactaccttttcaaaaataaaacatttaaaaagct

SEQ ID NO: 404077 - DNA, 120 bp, Artificial Sequence
  ENSG00000147119_0 (sequence is synthesized)
agtagcaccaccgccttccaagtttccccttgtggatgcgcggccccgcggctctgctcctcccggcgcagaggggccgggagaggccacaggagcggacctggcacgggatttctgagg

SEQ ID NO: 404078 - DNA, 120 bp, Artificial Sequence
  ENSG00000147119_1 (sequence is synthesized)
aacgggagaagactggcgcccgacccgctctggagggtcggtgaacgatgaagggccggcggcggcgacgccgagagtactgcaagttcgcgctgctgttggtgctgtacacgctggtgc

SEQ ID NO: 404079 - DNA, 120 bp, Artificial Sequence
  ENSG00000147119_2 (sequence is synthesized)
tgttgctcgtcccctccgtattggacggcggccgcgacggggacaagggcgccgagcactgccccggcctgcagcgcagcctgggagtgtggagcctggaggcggcggcggccggcgaac

SEQ ID NO: 404080 - DNA, 120 bp, Artificial Sequence
  ENSG00000147119_3 (sequence is synthesized)
gcgagcagggagcggaggcgcgggccgccgaggaagggggcgcgaaccagtctcctcggttcccaagcaacctcagcggcgctgtcggggaggcagtgtctcgcgagaagcagcacatct

SEQ ID NO: 404081 - DNA, 120 bp, Artificial Sequence
  ENSG00000147119_4 (sequence is synthesized)
acgtgcatgccacctggcgcaccggctcgtccttcctgggcgaactctttaaccagcacccggacgttttctacttgtatgagcccatgtggcatctatggcaggcgctgtatccgggcg

SEQ ID NO: 404082 - DNA, 120 bp, Artificial Sequence
  ENSG00000147119_5 (sequence is synthesized)
acgccgagagcttgcagggcgcgctgcgcgacatgctgcgttcgctcttccgctgcgacttctccgtgctgcggctgtacgcgccgccgggggaccccgctgcgcgcgccccggacacgg

SEQ ID NO: 404083 - DNA, 120 bp, Artificial Sequence
  ENSG00000147119_6 (sequence is synthesized)
ccaatcttaccacggccgccctcttccgctggcggactaacaaggtcatctgctcgccgccactgtgtcctggcgcaccccgtgcccgggccgaggtgggcctcgtcgaggacaccgcct

SEQ ID NO: 404084 - DNA, 120 bp, Artificial Sequence
  ENSG00000147119_7 (sequence is synthesized)
gcgagcgcagctgcccacccgtggcgatacgcgccctggaggccgagtgccgaaagtacccggtggtggtcatcaaggacgtgcgcctgctcgatctgggcgtgctggtgcccctgttgc

SEQ ID NO: 404085 - DNA, 120 bp, Artificial Sequence
  ENSG00000147119_8 (sequence is synthesized)
gtgatccaggcctcaacctgaaggtggtgcagcttttccgcgacccgagggcggtgcacaactcgcgcctcaagtctaggcagggactgctgcgcgagagcatccaggtgctgcgcaccc

SEQ ID NO: 404086 - DNA, 120 bp, Artificial Sequence
  ENSG00000147119_9 (sequence is synthesized)
gcgctcgaggtgatctgcgaagcctggctgcgcgatctgcttttcgcgcgcggcgcgcccgcctggctgcggcgccgctacctgaggctgcgctatgaggacctggtgcggcagccacgc

SEQ ID NO: 404087 - DNA, 120 bp, Artificial Sequence
  ENSG00000147119_10 (sequence is synthesized)
gcccagctgcgccgcctgctgcgcttctccgggctacgcgcgctcgcagcgctcgatgccttcgcgctcaacatgactcgcggcgcggcctacggcgccgaccggcccttccacctgtca

SEQ ID NO: 404088 - DNA, 120 bp, Artificial Sequence
  ENSG00000147119_11 (sequence is synthesized)
gcgcgcgacgcccgggaggcggtgcacgcctggcgcgagcgcctgagccgagagcaggtgcgccaggtggaggccgcctgcgctccagccatgcgtctgctcgcctaccctcgcagcgga

SEQ ID NO: 404089 - DNA, 120 bp, Artificial Sequence
  ENSG00000147119_12 (sequence is synthesized)
gaggagggcgacgcggagcagcccagggaaggggagacgccgctggagatggatgccgacggcgccacgtagcctcccatccctgtccccggcacggatccgggtcagtcaccacgaaca

SEQ ID NO: 404090 - DNA, 120 bp, Artificial Sequence
  ENSG00000147119_13 (sequence is synthesized)
ggggcactcggcatgctgccccagcactggagaagcagcgctgtgggggcaatctgtcacactctcagagtctgggacttgacttgctaccaacaactgctgtgcaattctgctgagcag

SEQ ID NO: 404091 - DNA, 120 bp, Artificial Sequence
  ENSG00000147119_14 (sequence is synthesized)
gaatatcatgagctgttcaataatgacggacgcattggttgagatgaagtttccagtaaggaagtgacagtgcaatgtggatatttatggctgtaaaataggaagagctttagttcccag

SEQ ID NO: 404092 - DNA, 120 bp, Artificial Sequence
  ENSG00000147119_15 (sequence is synthesized)
gctgaacctgccactgctggagccatttcaacaaggcatcctcacaacaaagaagagatgtgatttggtaccatttcacaccagcaggtgtctggacgaaaacatcaatgtgaataaggg

SEQ ID NO: 404093 - DNA, 120 bp, Artificial Sequence
  ENSG00000147119_16 (sequence is synthesized)
ccaagtgcagtcctgtcttgattaaattacttaataatattattaaataataataggtctgggcagtattgtttttaacctgactcatccagctgtccttcaaatagctccgtctccctc

SEQ ID NO: 404094 - DNA, 120 bp, Artificial Sequence
  ENSG00000147119_17 (sequence is synthesized)
tacccagaactgatttttaaaaagaagtaatttttctccctgggctgggaaaaccctaatgaactgaaacacacttttactttaaaatttttctgtctggcgtttttgtaatcatactat

SEQ ID NO: 404095 - DNA, 120 bp, Artificial Sequence
  ENSG00000147119_18 (sequence is synthesized)
taaatgactctggagtcatgttaatgacaggatttgttttgtttggatgcagttcaattgcatggtttgggtaaaagctagcctacatacaaaggaatatgaagactgtggaagaaactg

SEQ ID NO: 404096 - DNA, 120 bp, Artificial Sequence
  ENSG00000147121_0 (sequence is synthesized)
agttcacactggctgttgtcagcggcctctgaggtttcaggctcttggcggtgaaggtcagagtgcagacctgagaccactgctcaccgacttcagactccagtttatctgtgccccagc

SEQ ID NO: 404097 - DNA, 120 bp, Artificial Sequence
  ENSG00000147121_1 (sequence is synthesized)
ttcctcacttagtctcagaagacttaggctgaggcctcagaaggagatctccatcctttgtccagagcagaacaggatggccatgtcccaggaatcattgaccttcaaggacgtgtttgt

SEQ ID NO: 404098 - DNA, 120 bp, Artificial Sequence
  ENSG00000147121_2 (sequence is synthesized)
ggacttcaccctggaggagtggcagcaactggactctgcccagaagaacctctacagggatgtcatgcttgagaactacagccacctggtgtccgtggggtatctagttgcgaagccaga

SEQ ID NO: 404099 - DNA, 120 bp, Artificial Sequence
  ENSG00000147121_3 (sequence is synthesized)
tgtgatcttcaggttgggaccaggtgaagagtcctggatggcagatggggggaccccggtacggacctgtgcagaagtctggcaagttgatgagcagatagatcactacaaggaaagcca

SEQ ID NO: 404100 - DNA, 120 bp, Artificial Sequence
  ENSG00000147121_4 (sequence is synthesized)
agacaaacttccttggcaagctgcattcataggcaaggaaacactgaaggatgaaagcggtcaagaatccagaacatgtagaaaaagcatttatctgagcacagaatttgattctgtaag

SEQ ID NO: 404101 - DNA, 120 bp, Artificial Sequence
  ENSG00000147121_5 (sequence is synthesized)
gcattcaaaacatcatttaaactttcttggtcaaaatggaagctatgtaagaaagaaagatgatggatgtaaagcatattggaaagtatgcttccattataatcttcataaagctcaacc

SEQ ID NO: 404102 - DNA, 120 bp, Artificial Sequence
  ENSG00000147121_6 (sequence is synthesized)
tgcagagagattttttgaccctaatcaacgagggaaagccctccaccaaaagcaagcccttagaaaaagtcagagaagtcaaactggggagaaactctacaaatgtactgaatgtggaaa

SEQ ID NO: 404103 - DNA, 120 bp, Artificial Sequence
  ENSG00000147121_7 (sequence is synthesized)
agtgtttatccagaaagcaaacttagttgtacatcaaagaactcacaccggagagaaaccttatgaatgctgcgaatgtgcaaaagccttcagccagaagtcaaccctcatagcacacca

SEQ ID NO: 404104 - DNA, 120 bp, Artificial Sequence
  ENSG00000147121_8 (sequence is synthesized)
gagaactcacacaggggagaagccctatgaatgcagtgaatgtggaaaaacctttatccagaagtcaactctgattaaacataagaaaattcatatggagagagaccctataaatgcagt

SEQ ID NO: 404105 - DNA, 120 bp, Artificial Sequence
  ENSG00000147121_9 (sequence is synthesized)
gtctgtgagaaagccttcagtaggaagtcaactctcattaaacatcagataattcatatgggagaaaccttatgaatgtaataaatgtgggaaatcttttagtgttaaatcaactctcat

SEQ ID NO: 404106 - DNA, 120 bp, Artificial Sequence
  ENSG00000147121_10 (sequence is synthesized)
tgtatgtcacagaacataaatgcataagttgcatgctattgtgaatagtgtgatgaaattttgcactgtcctgctctttcctgctcaggatgcaaatcagtgaatctttttttttttttt

SEQ ID NO: 404107 - DNA, 84 bp, Artificial Sequence
  ENSG00000147121_11 (sequence is synthesized)
ccgattctcctgcctcaacctcccaaatagttgggattacaggcacatgccaccatacgcagctaatttgtatttttagtagag

SEQ ID NO: 404108 - DNA, 120 bp, Artificial Sequence
  ENSG00000147121_12 (sequence is synthesized)
caggcatgagccactgcacccggcttgaatcatccttttgtccagtattatatccatgctgtatatgctacccgcccactagtcccttagctgtctcagttgtcagattgactgtcatgg

SEQ ID NO: 404109 - DNA, 120 bp, Artificial Sequence
  ENSG00000147121_13 (sequence is synthesized)
tgtcatgggattgcagtgcttgcattaaagctacccttattgtataatgaccccaaagtgcaagagtagtgatgttggcaatttgcatacaccaaaaataagttataaagtgcttcctta

SEQ ID NO: 404110 - DNA, 120 bp, Artificial Sequence
  ENSG00000147121_14 (sequence is synthesized)
aagtgaaatggttaaagttcttgacttaataaagaaaaaaaatgtatgctgaggttgttaagatttacagtaagaatgaatcttctatccaagaaattgtgaaggaggaaaaagaaactt

SEQ ID NO: 404111 - DNA, 120 bp, Artificial Sequence
  ENSG00000147121_15 (sequence is synthesized)
gtgctagttttgctgtcacatctgaaactgcaaaagttgtggccacagtgcatcataagtgctaagacgaaaaagacattaaatttgcggatggaaggcgtgaatagaaatgggttctga

SEQ ID NO: 404112 - DNA, 120 bp, Artificial Sequence
  ENSG00000147121_16 (sequence is synthesized)
cagcaatcaggttcggtactattcacagtttcaggcatccgctagggatcttggaacatatcccccatggataagggaggggtactgtaccttgtcatattgtgcattaaagaattcatt

SEQ ID NO: 404113 - DNA, 120 bp, Artificial Sequence
  ENSG00000147121_17 (sequence is synthesized)
gagtgtaatcatgtaagtctaacacacatttaaaaagctctcagatatcatttcgccttcggttgatgtaagaaaattcaaaagctactcaaatcattcaataaatgataaaattattta

SEQ ID NO: 404114 - DNA, 120 bp, Artificial Sequence
  ENSG00000147121_18 (sequence is synthesized)
ttctgtgtaccctaagctatgaaagcatcactgcagaactatttggattgccactgctggggcccactggtttcactaatgcaggaacaatttataggtgaatttatcaacttcgggggt

SEQ ID NO: 404115 - DNA, 120 bp, Artificial Sequence
  ENSG00000147121_19 (sequence is synthesized)
tttgtattatacttcaaatgtccatttggaatgcactcctacatgtggtacaggactgtggttctgacttcttgtaagtaacccctgattcttcttaacattttcattagccagtgggtg

SEQ ID NO: 404116 - DNA, 120 bp, Artificial Sequence
  ENSG00000147121_20 (sequence is synthesized)
acatctttctagttcctattttacacacagagatgtcctttgtgactcccagctttaagcaggtagctcaattctaattctctgcacatttgtgccctgtggcctagaattcacctcaca

SEQ ID NO: 404117 - DNA, 120 bp, Artificial Sequence
  ENSG00000147121_21 (sequence is synthesized)
ctcatgattagagccttagtcccccaactgcaaagccacacagcttcaatttctgttcactccctcactttaaatttcttcttcatttttgtcacataataaatttattttctggtttga

SEQ ID NO: 404118 - DNA, 120 bp, Artificial Sequence
  ENSG00000147121_22 (sequence is synthesized)
ggtggaatctgaacttcaagtctgatttccttggcacataattttctactaaaagctctgcacctggctgctgtgaatttccaaatctatcccaagtccctgtgtgtcacagtacaatcc

SEQ ID NO: 404119 - DNA, 120 bp, Artificial Sequence
  ENSG00000147121_23 (sequence is synthesized)
tgtcacagtacaatccattaggatttggaagctgtattaatccattttcatgctgctgataaagacagacccgagactgagcaatttacaaaacaaagaggtttaatggacttacagttc

SEQ ID NO: 404120 - DNA, 120 bp, Artificial Sequence
  ENSG00000147121_24 (sequence is synthesized)
agaccaggttggttggtgagagcttggcctctgggatgtgctcaggagcccttctcagagcctcggacttgtggacatgcctaggctctgatgagcagaactgttgtcatgtccaaatga

SEQ ID NO: 404121 - DNA, 120 bp, Artificial Sequence
  ENSG00000147121_25 (sequence is synthesized)
cacttagtctcagaagacttaggctgaggcctcagaaggaggtgagttccctgggtcacaggcagagatctggtgctatagtgatggcctcaactggggcgtgtttgtctctgaatccct

SEQ ID NO: 404122 - DNA, 120 bp, Artificial Sequence
  ENSG00000147121_26 (sequence is synthesized)
tgaggcgagttggaggagaagcctcagcccagagcccagacccagatcctcagggcagagaaaggaggctcacaggatagcaggtcctagaagagctggacccatagtggcctttgtccc

SEQ ID NO: 404123 - DNA, 120 bp, Artificial Sequence
  ENSG00000147121_27 (sequence is synthesized)
tcacttcagctgagacaaagcaaagctggctcaacttccagatgccatcgaggaccgtgtgacagtgcagtttgattcctgctggaggagggacaggtgaaagtcacaggtggatggagg

SEQ ID NO: 404124 - DNA, 120 bp, Artificial Sequence
  ENSG00000147123_0 (sequence is synthesized)
gaccagcgtcgacgctcaccttctcggcccgggctgtcaaggaagggctcccagacatcacctctgcccgccgccacctcctccaactctcccagctcagccggagccggagcgcgcaac

SEQ ID NO: 404125 - DNA, 120 bp, Artificial Sequence
  ENSG00000147123_1 (sequence is synthesized)
aaccaagtccgagactggaggcagatcggggggaggggagaagcgccaagcgcgctgccctcccagggaaactcactgccgcctactcccagccggccacagtcaccagctcaaaatggc

SEQ ID NO: 404126 - DNA, 120 bp, Artificial Sequence
  ENSG00000147123_2 (sequence is synthesized)
gacgacgagaagggagtcggcgctccgaccaccatccacctactaaggaagcgcgctctggccggccccggcgattggtcaccgcccgctaggggacagccctggcctcctctgattggc

SEQ ID NO: 404127 - DNA, 120 bp, Artificial Sequence
  ENSG00000147123_3 (sequence is synthesized)
aagcgctggccacctccccacaccccttgcgaacgctcccctagtggagaaaaggagtagctattagccaattcggcagggcccgctttttagaagcttgatttcctttgaagatgaaag

SEQ ID NO: 404128 - DNA, 120 bp, Artificial Sequence
  ENSG00000147123_4 (sequence is synthesized)
actagcggaagctctgcctctttccccagtgggcgagggaactcggggcgattggctgggaactgtatccacccaaatgtcaccgatttcttcctatgcaggaaatgagcagacccatca

SEQ ID NO: 404129 - DNA, 120 bp, Artificial Sequence
  ENSG00000147123_5 (sequence is synthesized)
ggttgctcaacgccccgcctcattggaaaaccaaatcagatctgggacctatatagcgtggcggaggcggggcgatgattgtcgcgctcgcacccactgcagctgcgcacagtcgcattt

SEQ ID NO: 404130 - DNA, 120 bp, Artificial Sequence
  ENSG00000147123_6 (sequence is synthesized)
ctttccccgcccctgagaccctgcagcaccatctgtcatggcggctgggctgtttggtttgagcgctcgccgtcttttggcggcagcggcgacgcgagggctcccggccgcccgcgtccg

SEQ ID NO: 404131 - DNA, 120 bp, Artificial Sequence
  ENSG00000147123_7 (sequence is synthesized)
ctgggaatctagcttctccaggactgtggtcgccccgtccgctgtggcgggaaagcggcccccagaaccgaccacaccgtggcaagaggacccagaacccgaggacgaaaacttgtatga

SEQ ID NO: 404132 - DNA, 120 bp, Artificial Sequence
  ENSG00000147123_8 (sequence is synthesized)
gaagaacccagactcccatggttatgacaaggaccccgttttggacgtctggaacatgcgacttgtcttcttctttggcgtctccatcatcctggtccttggcagcacctttgtggccta

SEQ ID NO: 404133 - DNA, 120 bp, Artificial Sequence
  ENSG00000147123_9 (sequence is synthesized)
tctgcctgactacaggatgaaagagtggtcccgccgcgaagctgagaggcttgtgaaataccgagaggccaatggccttcccatcatggaatccaactgcttcgaccccagcaagatcca

SEQ ID NO: 404134 - DNA, 120 bp, Artificial Sequence
  ENSG00000147123_10 (sequence is synthesized)
gctgccagaggatgagtgaccagttgctaagtggggctcaagaagcaccgccttccccaccccctgcctgccattctgacctcttctcagagcacctaattaaaggggctgaaagtctga

SEQ ID NO: 404135 - DNA, 120 bp, Artificial Sequence
  ENSG00000147124_0 (sequence is synthesized)
gtaagggcacccaccaggtgtaattgtgggcgagcggccgcttcggagctgacactaagcatgtgcagatcaagtccagaagcgccggggttcctcgaagcagttttcaggacttaaggc

SEQ ID NO: 404136 - DNA, 120 bp, Artificial Sequence
  ENSG00000147124_1 (sequence is synthesized)
tctgggacatccagcacagtgagcggcccctgggcaccaccagaaaacatttgtgagtgaacgtggagtgatgaccatgtggacactgtctttccagggtttcttggagcctctgcagag

SEQ ID NO: 404137 - DNA, 120 bp, Artificial Sequence
  ENSG00000147124_2 (sequence is synthesized)
tctgggggccaggcttcttagtggaaactgcaggatcttccttctgacccctgcttgcctcgccccagcagctccggttgagtccacagatgccagctcagcttccagcttggggaagag

SEQ ID NO: 404138 - DNA, 120 bp, Artificial Sequence
  ENSG00000147124_3 (sequence is synthesized)
tggggttgtcagcaggagagcctgagggctgaggcccagcgtgaacatggcagctaatggggactctcccccatggtccccggccctggctgcagagggacgtggcagctcatgtgaggc

SEQ ID NO: 404139 - DNA, 120 bp, Artificial Sequence
  ENSG00000147124_4 (sequence is synthesized)
ttcagtgtcatttgaggacgtgactgtggacttcagcaaggaggagtggcagcacttggaccctgcccagagacgcctgtactgggatgtgacactagagaactacagccacctgctctc

SEQ ID NO: 404140 - DNA, 120 bp, Artificial Sequence
  ENSG00000147124_5 (sequence is synthesized)
agtggggtaccaaattcccaagtcagaggctgccttcaagttggagcaaggagaggggccatggatgctggagggggaagccccacatcagagctgttcaggtgaggctattgggaaaat

SEQ ID NO: 404141 - DNA, 120 bp, Artificial Sequence
  ENSG00000147124_6 (sequence is synthesized)
gcagcaacagggaattcctggaggaattttcttccactgtgagagatttgatcaacccataggagaagattcattatgttctattttagaagaactgtggcaagataatgaccagctaga

SEQ ID NO: 404142 - DNA, 120 bp, Artificial Sequence
  ENSG00000147124_7 (sequence is synthesized)
gcaacgtcaggaaaaccagaataaccttttaagtcatgtgaaagtattgattaaggagaggggctatgaacataaaaacattgaaaaaataattcatgtgactaccaagcttgttccttc

SEQ ID NO: 404143 - DNA, 120 bp, Artificial Sequence
  ENSG00000147124_8 (sequence is synthesized)
aattaaaagactccataactgtgacacaattttgaagcatactttaaactcacataatcataatagaaacagtgcaacaaagaaccttggcaagatttttggaaatggtaacaatttccc

SEQ ID NO: 404144 - DNA, 120 bp, Artificial Sequence
  ENSG00000147124_9 (sequence is synthesized)
ccatagcccttcctctactaagaatgagaatgctaaaacaggagcaaattcctgtgaacatgaccactatgaaaaacatctcagccacaaacaagctcccacccaccatcagaaaattca

SEQ ID NO: 404145 - DNA, 120 bp, Artificial Sequence
  ENSG00000147124_10 (sequence is synthesized)
tcctgaggagaagctttatgtgtgtactgaatgtgtaatgggcttcactcagaagtcacatctgtttgagcatcagagaattcatgctggagaaaagtcccgtgaatgtgacaaaagcaa

SEQ ID NO: 404146 - DNA, 120 bp, Artificial Sequence
  ENSG00000147124_11 (sequence is synthesized)
caaagtcttcccccagaaaccccaggttgatgtacatccaagtgtttatacaggagaaaaaccctatctgtgtactcaatgtgggaaagtctttaccctcaaatcaaacctcattacaca

SEQ ID NO: 404147 - DNA, 120 bp, Artificial Sequence
  ENSG00000147124_12 (sequence is synthesized)
tcaaaaaattcataccgggcagaaaccctacaaatgcagtgaatgtggaaaagcctttttccagagatcagacctctttagacatctgagaattcatacaggagaaaaaccttatgaatg

SEQ ID NO: 404148 - DNA, 120 bp, Artificial Sequence
  ENSG00000147124_13 (sequence is synthesized)
cagtgaatgtggaaaaggcttctcccagaactcagacctcagtatacatcagaaaactcataccggagagaaacactatgaatgcaatgaatgtgggaaggctttcacaagaaaatcagc

SEQ ID NO: 404149 - DNA, 120 bp, Artificial Sequence
  ENSG00000147124_14 (sequence is synthesized)
actcaggatgcatcagagaatccacacgggagagaaaccttatgtatgcgctgactgtgggaaggccttcatccagaaatcacatttcaacacacatcagagaattcatactggagaaaa

SEQ ID NO: 404150 - DNA, 120 bp, Artificial Sequence
  ENSG00000147124_15 (sequence is synthesized)
gccgtatgaatgcagtgactgtgggaaatccttcactaagaagtcacaactccatgtgcatcaaagaattcacaccggagagaaaccctatatatgtacagaatgtggaaaggtcttcac

SEQ ID NO: 404151 - DNA, 120 bp, Artificial Sequence
  ENSG00000147124_16 (sequence is synthesized)
tcacaggacaaacctcaccacacatcagaaaactcatactggggaaaaaccctatatgtgtgctgaatgtggaaaggcttttactgaccagtcaaatctcattaaacaccagaaaactca

SEQ ID NO: 404152 - DNA, 120 bp, Artificial Sequence
  ENSG00000147124_17 (sequence is synthesized)
cactatgaatgcaaggactgcgggaaagccttcatccagaaatcaacactaagcgtgcatcagagaatccatacaggagagaaaccgtacgtttgtcctgaatgcgggaaggcctttatc

SEQ ID NO: 404153 - DNA, 120 bp, Artificial Sequence
  ENSG00000147124_18 (sequence is synthesized)
cagaaatcgcacttcattgcgcatcatagaatccatactggagagaagccttatgaatgcagcgactgtgggaaatgcttcactaagaagtcacaactccgtgtgcatcagaaaatccac

SEQ ID NO: 404154 - DNA, 120 bp, Artificial Sequence
  ENSG00000147124_19 (sequence is synthesized)
acaggtgagaagcccaatatatgtgctgaatgtggaaaggccttcactgaccgatcaaatctcataacacatcagaaaatccacactagggagaaaccctatgaatgtggtgactgcggg

SEQ ID NO: 404155 - DNA, 120 bp, Artificial Sequence
  ENSG00000147124_20 (sequence is synthesized)
aaaaccttcacctggaagtcacgcctcaatatacatcagaagtctcatactggagaaagacactatgaatgtagtaaatgtgggaaagctttcatccagaaagccacactaagtatgcat

SEQ ID NO: 404156 - DNA, 120 bp, Artificial Sequence
  ENSG00000147124_21 (sequence is synthesized)
cagataattcatacaggaaagaaaccttatgcttgtacagaatgtcagaaggcctttactgacagatcgaatctcattaaacaccagaaaatgcatagtggagaaaaacgctataaagcc

SEQ ID NO: 404157 - DNA, 120 bp, Artificial Sequence
  ENSG00000147124_22 (sequence is synthesized)
agtgactgagaaagtcttcacctggaaatcacaactgggtatgcatcaggtatctaatagcagggaggaggaaggcctgttgctgcaatcattgtacagggggaaatgggtatgagagac

SEQ ID NO: 404158 - DNA, 120 bp, Artificial Sequence
  ENSG00000147124_23 (sequence is synthesized)
tgaggcttgagtgaactgaaggcaaacagagccaagtatccttcagtccactggaaagacaagttcctgcatcaccacagtgtatatgcaattctatgcataggaagagcctttagagaa

SEQ ID NO: 404159 - DNA, 120 bp, Artificial Sequence
  ENSG00000147124_24 (sequence is synthesized)
agcatttgagcgaaagtcatgtttggtgacatgattcatacagacctcttgagctcctggaaatagtagaattaagacctgaggagatgactcgtcatctcttatgcttcactttttgga

SEQ ID NO: 404160 - DNA, 120 bp, Artificial Sequence
  ENSG00000147124_25 (sequence is synthesized)
taaagaactttttaaattcagtactgattggttcagcatatcctgggacataaaaatactcactactgggaaaaactttttcaaatttctaggttgaggagaagagttttcattgtccaa

SEQ ID NO: 404161 - DNA, 120 bp, Artificial Sequence
  ENSG00000147124_26 (sequence is synthesized)
acactggcagggcactgacatcaaggcagaaaacctacttgggaatgcagatatctgtttttgtgatcattggcacttaagacatagaaaagatttccatgaaaaacttttttcttttcc

SEQ ID NO: 404162 - DNA, 120 bp, Artificial Sequence
  ENSG00000147124_27 (sequence is synthesized)
cttgggaagtcctcatggtatatatattttaagtgcaatggaatttttaaatttaaagatataactttatgaattgagaaattaggcctagctctaggctatgttacagaaatatagtca

SEQ ID NO: 404163 - DNA, 120 bp, Artificial Sequence
  ENSG00000147124_28 (sequence is synthesized)
ttgaatgatacagacatataaaggtagtagttgtctcattattaattccctgctgggagagcagatgagtcataccctataagaagtatgcatgccttctaacctatgtccccaaagctg

SEQ ID NO: 404164 - DNA, 120 bp, Artificial Sequence
  ENSG00000147124_29 (sequence is synthesized)
tcatttgcataagctgcaggccatagattcctgattccctcagtaactgaccctacgacaatggaactgatccacggcactctagattttcaggctaacccaccaacacccctgctttcc

SEQ ID NO: 404165 - DNA, 120 bp, Artificial Sequence
  ENSG00000147124_30 (sequence is synthesized)
ttgggatttcctgaaaaagaatggttgaaaaattgagtttcacttcctaatattttgtttttcttcctatttggttaaggtatattcatttcctacatgcacattaagggtagttttgtg

SEQ ID NO: 404166 - DNA, 120 bp, Artificial Sequence
  ENSG00000147124_31 (sequence is synthesized)
tagactgctatgtgataaagtcatgttgcattgcaattagttattctaagacataattacagtttatcatagttgaataactggaagacttctcaagaaagagcactgctcttttttaac

SEQ ID NO: 404167 - DNA, 120 bp, Artificial Sequence
  ENSG00000147124_32 (sequence is synthesized)
actgatatatagacacgttctcattttcccttaaacattttttacaatactcataaaaaggaactttctttctagcatgcaattgtatttttattttattttaaaatctttttattaaac

SEQ ID NO: 404168 - DNA, 120 bp, Artificial Sequence
  ENSG00000147124_33 (sequence is synthesized)
tataatgtatacagaaaatgcatatatcataaacatacagctcagtgcattctcaaaaactgaacatactcagatcaagaaacagaacatgaccagcaccccagaagccttccccacttt

SEQ ID NO: 404169 - DNA, 120 bp, Artificial Sequence
  ENSG00000147124_34 (sequence is synthesized)
cccttccaggcaagcccccaagggtatacattatcctggcttctcacagcatagattcattttgcctgttttgtattttatataaattgagtcaattatatatcatataattgagccata

SEQ ID NO: 404170 - DNA, 120 bp, Artificial Sequence
  ENSG00000147124_35 (sequence is synthesized)
cggaggctccccggtagggacggcctgaggccgagggcaccctgagggcggaagaggcaaagcgcctcgcccgccggggcctcggaggtgactaactcctagaggctgcggcggagggga

SEQ ID NO: 404171 - DNA, 120 bp, Artificial Sequence
  ENSG00000147124_36 (sequence is synthesized)
gaagcctggtggtacattccatggcccagtgcctcggccactggaaaatcccacaggggtatatcgagtaggggaccgcgggctccgcggcagaaatgaccgcccttccaagatggcggc

SEQ ID NO: 404172 - DNA, 120 bp, Artificial Sequence
  ENSG00000147124_37 (sequence is synthesized)
tcccgtagagacactcccaaggagacagccatgttccttgcctgagagtcactgaaggaaattggaaagcccgcctctccttcgacgcacacgcgcacgcgcacgcacgcaccggcgcgg

SEQ ID NO: 404173 - DNA, 120 bp, Artificial Sequence
  ENSG00000147127_0 (sequence is synthesized)
caggctgagcgttggaagccattttggctgcaacctacctgaagcgatgtctgcctttggtcacgacgaggcctggatggaggccggaggctttggtctggaggctgccgaaagaacgga

SEQ ID NO: 404174 - DNA, 120 bp, Artificial Sequence
  ENSG00000147127_1 (sequence is synthesized)
ataccagtctctgtgcaaatctaaactcttattcctgggagagcagagcgggaagacatccatcatcagccgcttcatgtacaacagcttcggctgcgcctgccaggcaactgttggaat

SEQ ID NO: 404175 - DNA, 120 bp, Artificial Sequence
  ENSG00000147127_2 (sequence is synthesized)
tgacttcttgtctaagaccatgtacttggaggaccaaatagttcagctgcagctatgggacacagctggccaggagcgctttcacagcctaattcctagctacattcgtgattcaactat

SEQ ID NO: 404176 - DNA, 120 bp, Artificial Sequence
  ENSG00000147127_3 (sequence is synthesized)
tgcagtggttgtctatgacattacaaacatcaattcttttaaggagacagataagtgggtagaacacgtgcgagcagaaagaggtgacgatgttgtcatcatgttgttgggtaacaagat

SEQ ID NO: 404177 - DNA, 120 bp, Artificial Sequence
  ENSG00000147127_4 (sequence is synthesized)
gctgttccggcgtgtggcttctgcccttctttccacaaggacttcacctccaccaaaagaggggacggttgaaatcgaactggaatccttcgaggagtcaggcaacagaagctattgttg

SEQ ID NO: 404178 - DNA, 120 bp, Artificial Sequence
  ENSG00000147127_5 (sequence is synthesized)
acagcttaggctttctctgcctcatttgatggatttcttacatttgggcttgccataccagttctcctccccacctcgttttatgatacatggccacttactctcttccaattcctaggc

SEQ ID NO: 404179 - DNA, 120 bp, Artificial Sequence
  ENSG00000147127_6 (sequence is synthesized)
ttggggtaaaaacagaacccctgaaagtgctatcattttttcctgaccgcatctcacagctactgggtggaagcttcttgcagcacctgggaattctaccttaccttctccgacagctaa

SEQ ID NO: 404180 - DNA, 120 bp, Artificial Sequence
  ENSG00000147127_7 (sequence is synthesized)
aagacatctgtagagaatacagttctacagcagctgacatacttcaaaggccaatacaattcattctccactgtttgttgttgtttacctacaccctcaataaatggttctttaacctaa

SEQ ID NO: 404181 - DNA, 120 bp, Artificial Sequence
  ENSG00000147127_8 (sequence is synthesized)
tcctcgttgggaaagattggagttggaggaggagggagggctcatagaaactttgaggggagaaagggcactgagggcgacgattggcctgcttatctccctcacagtagggaagacatc

SEQ ID NO: 404182 - DNA, 120 bp, Artificial Sequence
  ENSG00000147130_0 (sequence is synthesized)
aaaggggccgcgacccctgtcccggctgctagggagggaggtagagaaggagcgcggggccgtcgctgtctgcagttctaggcttgtagcctttgcactaaccctgccgcagtacatatc

SEQ ID NO: 404183 - DNA, 120 bp, Artificial Sequence
  ENSG00000147130_1 (sequence is synthesized)
cagccatactcatggaccccagtgatttccccagtccatttgacccattgaccctgccagagaagcccctggctggagacctaccagtagacatggaatttggagaggatctactggaat

SEQ ID NO: 404184 - DNA, 120 bp, Artificial Sequence
  ENSG00000147130_2 (sequence is synthesized)
cccagactgccccaactcgaggatgggccccccctggcccttctccatcctcgggagccctggacctgcttgatacccctgctggcctggaaaaagaccctggagtcctggatggagcca

SEQ ID NO: 404185 - DNA, 120 bp, Artificial Sequence
  ENSG00000147130_3 (sequence is synthesized)
ctgagttgctggggctgggggggctgctctataaagccccctctcccccggaggtggaccacggtcctgagggaaccctggcatgggatgcaggagatcagaccctagagcctggaccag

SEQ ID NO: 404186 - DNA, 120 bp, Artificial Sequence
  ENSG00000147130_4 (sequence is synthesized)
ggggccagacccctgaggtggtaccacctgatccaggggctggggcaaattcctgttcacctgaggggctactagagcctttggctccagattctccaataacactgcagtccccacata

SEQ ID NO: 404187 - DNA, 120 bp, Artificial Sequence
  ENSG00000147130_5 (sequence is synthesized)
ttgaagaggaggagaccacctccatagctactgcaagaaggggctcccctgggcaggaggaggagcttccccaagggcagccacagagcccaaatgccccgcctagcccttcagtgggag

SEQ ID NO: 404188 - DNA, 120 bp, Artificial Sequence
  ENSG00000147130_6 (sequence is synthesized)
agactctgggggatggaatcaacagttctcagaccaaacctgggggctctagcccccctgcacatccttccttgccaggagatggcctgactgcgaaggcgagtgagaagccgcctgaac

SEQ ID NO: 404189 - DNA, 120 bp, Artificial Sequence
  ENSG00000147130_7 (sequence is synthesized)
ggaagagaagcgagcgcgttaggagagcagaacctccaaaacctgaggttgtagattccactgagagcattccagtgtcagatgaggattctgatgccatggtagatgaccccaatgatg

SEQ ID NO: 404190 - DNA, 120 bp, Artificial Sequence
  ENSG00000147130_8 (sequence is synthesized)
aggactttgtgccattccggccccggcgctctcctcgcatgtccctacgctcaagtgtgtcacaaagggccgggcgctctgcagtgggcaccaagatgacttgtgcacattgccggacac

SEQ ID NO: 404191 - DNA, 120 bp, Artificial Sequence
  ENSG00000147130_9 (sequence is synthesized)
cactgcagaaggggcagactgcctatcagcgcaaggggctgcctcagctcttctgctcgtcatcctgcctcaccactttctccaagaagccctcgggcaaaaagacctgtaccttctgca

SEQ ID NO: 404192 - DNA, 120 bp, Artificial Sequence
  ENSG00000147130_10 (sequence is synthesized)
agaaggagatctggaacaccaaggactcggttgtggcgcagactggttctggaggctccttccatgagttctgcacatccgtctgtctctccctgtatgaggcccagcagcagcgcccga

SEQ ID NO: 404193 - DNA, 120 bp, Artificial Sequence
  ENSG00000147130_11 (sequence is synthesized)
tcccccagtctggggatcccgccgacgctactcgctgcagcatatgccagaagactggagaggtcctgcacgaggtcagcaatggcagcgtggtacaccggctctgcagcgattcttgct

SEQ ID NO: 404194 - DNA, 120 bp, Artificial Sequence
  ENSG00000147130_12 (sequence is synthesized)
tctccaaattccgggccaacaagggactgaaaaccaactgttgtgaccagtgtggggcttacatctacaccaagaccgggagtcctggccctgagctcctcttccacgagggccaacaaa

SEQ ID NO: 404195 - DNA, 120 bp, Artificial Sequence
  ENSG00000147130_13 (sequence is synthesized)
agcggttctgcaacacaacctgcttgggggcgtacaagaagaaaaacacacgtgtgtacccatgtgtctggtgcaagaccctgtgtaagaactttgagatgctatcacatgtggatcgta

SEQ ID NO: 404196 - DNA, 120 bp, Artificial Sequence
  ENSG00000147130_14 (sequence is synthesized)
atggcaagaccagcttgttctgttccctgtgctgtaccacttcttacaaagtgaagcaggcagggctcactggccctccccgaccctgcagcttctgccgccgcagcctctctgacccct

SEQ ID NO: 404197 - DNA, 120 bp, Artificial Sequence
  ENSG00000147130_15 (sequence is synthesized)
gttactacaacaaggttgaccgcacagtctaccagttctgcagccccagctgctggaccaagttccagcgcacaagccctgaggggggcattcacctgagctgtcactactgtcacagcc

SEQ ID NO: 404198 - DNA, 120 bp, Artificial Sequence
  ENSG00000147130_16 (sequence is synthesized)
tcttcagtggcaagcctgaggtcttggactggcaggaccaagtgttccagttctgctgccgtgattgctgtgaggacttcaagcggcttcggggtgtggtgtcccagtgtgagcactgtc

SEQ ID NO: 404199 - DNA, 120 bp, Artificial Sequence
  ENSG00000147130_17 (sequence is synthesized)
ggcaggagaaactcttgcatgagaaactccgattcagcggagtggagaaaagcttctgcagcgaaggctgtgtgctgctgtacaaacaggacttcactaagaagctgggcttgtgctgta

SEQ ID NO: 404200 - DNA, 120 bp, Artificial Sequence
  ENSG00000147130_18 (sequence is synthesized)
tcacttgtacttactgctcccagacctgccagcgcggagtcaccgagcaactggatggcagcacctgggacttctgcagtgaggactgtaagagcaagtacctgctgtggtactgcaagg

SEQ ID NO: 404201 - DNA, 120 bp, Artificial Sequence
  ENSG00000147130_19 (sequence is synthesized)
ctgcccggtgccatgcgtgtaagcgccaggggaagctgctggagaccatccactggcgtgggcagatccgtcatttctgcaaccagcagtgtcttctgcgtttctatagccagcagaacc

SEQ ID NO: 404202 - DNA, 120 bp, Artificial Sequence
  ENSG00000147130_20 (sequence is synthesized)
aacccaacctggatacccagagtgggcccgagagcctcctgaacagtcagtctcctgagtcaaaaccccagacaccctctcaaaccaaagtggagaacagcaacacagtgaggaccccag

SEQ ID NO: 404203 - DNA, 120 bp, Artificial Sequence
  ENSG00000147130_21 (sequence is synthesized)
aggaaaatgggaatttgggcaagatccctgtgaagacccgatcagctcccactgctcccacccctccacccccaccacccccagcaacaccccgcaaaaacaaggctgccatgtgtaagc

SEQ ID NO: 404204 - DNA, 120 bp, Artificial Sequence
  ENSG00000147130_22 (sequence is synthesized)
cactgatgcagaatcggggcgtctcctgcaaggtggagatgaagtccaaaggaagtcaaacagaagagtggaagccacaggtgatcgtgctgcccatcccagtgcccatcttcgtgccag

SEQ ID NO: 404205 - DNA, 120 bp, Artificial Sequence
  ENSG00000147130_23 (sequence is synthesized)
ctgccagaaagtcccggtgcctttctcgatgcctatcccggtgcctgtgcccatgttcttgcccactaccttggagagcacagacaagattgtagagaccattgaggagctgaaggtgaa

SEQ ID NO: 404206 - DNA, 120 bp, Artificial Sequence
  ENSG00000147130_24 (sequence is synthesized)
gatcccttccaaccccttggaggccgacatcctggctatggcagaaatgattgcagaggctgaggagttagacaaggcctcatctgacctttgtgatcttgtgagcaaccagagtgcaga

SEQ ID NO: 404207 - DNA, 120 bp, Artificial Sequence
  ENSG00000147130_25 (sequence is synthesized)
gggactcctggaagactgtgacctgtttgggcctgctcgagatgatgtcctggccatggcagtcaagatggccaatgtcttggatgagcctgggcaagacttggaggcagacttccctaa

SEQ ID NO: 404208 - DNA, 120 bp, Artificial Sequence
  ENSG00000147130_26 (sequence is synthesized)
gaatcctctggacattaatcccagtgtagacttcctctttgattgtggcctggtagggcctgaggatgtgtctactgaacaagaccttccccgaaccatgaggaagggtcaaaagcggct

SEQ ID NO: 404209 - DNA, 120 bp, Artificial Sequence
  ENSG00000147130_27 (sequence is synthesized)
ggtgctttccgaaagctgctcccgggactccatgagcagtcagcctagttgtaccgggctcaactattcatatggtgtcaatgcttggaagtgctgggtgcagtcaaaatatgccaatgg

SEQ ID NO: 404210 - DNA, 120 bp, Artificial Sequence
  ENSG00000147130_28 (sequence is synthesized)
agaaaccagcaagggtgatgagctgcgctttggccccaaacccatgcgtatcaaagaggatattctcgcctgctcagctgctgagctcaactacggtctggcccagtttgtgagagaaat

SEQ ID NO: 404211 - DNA, 120 bp, Artificial Sequence
  ENSG00000147130_29 (sequence is synthesized)
cactcggcccaatggtgaacgatatgaacctgacagtatctactatttgtgtcttggcatccagcagtacttgctggaaaataaccggatggtgaacattttcacggacctttactacct

SEQ ID NO: 404212 - DNA, 120 bp, Artificial Sequence
  ENSG00000147130_30 (sequence is synthesized)
gacttttgttcaagaactcaacaagtctctgagtacctggcagcccacactcctccccaacaatacggtgttctctcgagtggaggaggagcacctctgggagtgtaagcaactgggggt

SEQ ID NO: 404213 - DNA, 120 bp, Artificial Sequence
  ENSG00000147130_31 (sequence is synthesized)
ctactcgccctttgtcctcctcaacaccctcatgttcttcaacactaagttttttgggctgcagacagctgaggaacacatgcaactctccttcaccaatgtggtgcggcagtcccgcaa

SEQ ID NO: 404214 - DNA, 120 bp, Artificial Sequence
  ENSG00000147130_32 (sequence is synthesized)
gtgtaccacccctcggggcaccaccaaggtggtgagcatccgctactatgccccagtccgccagaggaaagggcgagacacgggtcctggaaaacggaagagagaagatgaagcccctat

SEQ ID NO: 404215 - DNA, 120 bp, Artificial Sequence
  ENSG00000147130_33 (sequence is synthesized)
cttagagcagcgtgagaaccgcatgaatcccctccgctgccctgtcaagttctatgaattctatctctcaaaatgtcctgaaagcctccggactcgcaacgatgtgttctacctgcaacc

SEQ ID NO: 404216 - DNA, 120 bp, Artificial Sequence
  ENSG00000147130_34 (sequence is synthesized)
tgaacggtcctgcatcgccgagtcacctctctggtattctgtgatccccatggaccgcagcatgttggagagcatgctcaatcgcatcctggctgtgcgcgagatttatgaggaactggg

SEQ ID NO: 404217 - DNA, 120 bp, Artificial Sequence
  ENSG00000147130_35 (sequence is synthesized)
tcgtcctggggaggaagacctggactgagctcgtgtgccatccatatccatctttcacatcaatgtctgtcctgtggccatgtccctcagggtgacaggcccaggaaccaatgctactca

SEQ ID NO: 404218 - DNA, 120 bp, Artificial Sequence
  ENSG00000147130_36 (sequence is synthesized)
ttctgaagggccctgactgctcctttccgctcacccattccctgccttctctaggaaccctggcttttatcttcttccgtaccacttgacaaccatggggccctggtcttctgtactcag

SEQ ID NO: 404219 - DNA, 120 bp, Artificial Sequence
  ENSG00000147130_37 (sequence is synthesized)
gggctggtctcccagtgatgggcaaaagccagcttgcccgttttctttatgcttcagagtaaacccctccttctgggtccagactctgggtggagtgttaatagctctggtgatcctgtt

SEQ ID NO: 404220 - DNA, 120 bp, Artificial Sequence
  ENSG00000147130_38 (sequence is synthesized)
ggctttgggtttcctgacccatcccgcataggtagagcctcttgttcctaggcatgacctagggaaaaacccagctgccttctctgccctgtgcccactcccttctctactcttccccag

SEQ ID NO: 404221 - DNA, 120 bp, Artificial Sequence
  ENSG00000147130_39 (sequence is synthesized)
caccatgccaaaaggtcttatctgaaaggtaagaaataaacaatgaaagcgatgaggggaccatttacataaaacacagagcttagacactcttcccctcctatgaaataattggttgtt

SEQ ID NO: 404222 - DNA, 120 bp, Artificial Sequence
  ENSG00000147130_40 (sequence is synthesized)
ggcaccatctcaccaccgcatatccctcaccccctcggcaagcaccaatccttggtgctgccgtttttaaaatcttccaaatgcctttttttcctcagaggcagagaatgactaagtacg

SEQ ID NO: 404223 - DNA, 120 bp, Artificial Sequence
  ENSG00000147130_41 (sequence is synthesized)
gggagcagactcctgttgtgcagactcctgtccccttggtttctgtgtttgtctctctgccatcttaggttgccatgagccatggtgtcaacatgcttagccccctctgtaactgcctcc

SEQ ID NO: 404224 - DNA, 120 bp, Artificial Sequence
  ENSG00000147130_42 (sequence is synthesized)
ctttagttcaatggacagacctcccaaggcaaaaactaccttctgacttgggttgaggctgggttcccctctattgttcccctatcataagagctaggccaagcctatgggaccttgagt

SEQ ID NO: 404225 - DNA, 120 bp, Artificial Sequence
  ENSG00000147130_43 (sequence is synthesized)
catgcaggatgggatctgtggtcaaaggacaggcgaggagctgtgggcgcagggcctgccgccactgcctacatcttctctcttccccatcttgcattggaggtcccagaaaacaattag

SEQ ID NO: 404226 - DNA, 120 bp, Artificial Sequence
  ENSG00000147130_44 (sequence is synthesized)
cttctggcaaagggggtacccacttctttccctgttgactttgctgtttcccaggctcctttttgtgtttttataactgtcaccagttagccactgtttaaattgtatatattgttctga

SEQ ID NO: 404227 - DNA, 120 bp, Artificial Sequence
  ENSG00000147130_45 (sequence is synthesized)
ggcgcctggcctgtcccttcagtgagccatgcccacccttgtgttgtagtgagaagctgttgtcacgactaaccttctgtctctgaaattgtttgtttcaaataaagagttaaaattgtc

SEQ ID NO: 404228 - DNA, 120 bp, Artificial Sequence
  ENSG00000147130_46 (sequence is synthesized)
tccatagataatacagggagctcctgcaggaagactcagggagaagatcccagaacttaccctaagactgttgagagagtagggggtagctttgcaggacctggtttgggggtcatcaag

SEQ ID NO: 404229 - DNA, 120 bp, Artificial Sequence
  ENSG00000147130_47 (sequence is synthesized)
cagtaacggttactgcacaggcgttgccactgagccagagccatttaacccgacctgtgtggctggggatcaagcttcagataccccataactctgactctcagactgttttgggggccc

SEQ ID NO: 404230 - DNA, 120 bp, Artificial Sequence
  ENSG00000147130_48 (sequence is synthesized)
cgtggctgcagacaagggaaggaggggcacgtgagggctgggtccctgcctccccccgtcctccgctgtcactcactaccccaacagtcgcccagggggcgggacccggagaggtgggga

SEQ ID NO: 404231 - DNA, 120 bp, Artificial Sequence
  ENSG00000147130_49 (sequence is synthesized)
tgggggagggtaatcttggcaggcgcctgctgcatggcgtaggtagggactattgaggggggcggacgccgagggggtgaacacgagtgggaagctaagagagacacggggagggggagg

SEQ ID NO: 404232 - DNA, 120 bp, Artificial Sequence
  ENSG00000147130_50 (sequence is synthesized)
ggaccgggaaccatttgaatgagaggaggggatcacgggtagagtgggctccaggaggtagggcgagcagggtgtgacgggggccagactcttgagccaggtaaggggagcagtacatat

SEQ ID NO: 404233 - DNA, 120 bp, Artificial Sequence
  ENSG00000147130_51 (sequence is synthesized)
gtgcattagagggctgtggaagggggtgtggttcttgggttataaataaaggtggctgatgggtcaagggctgggagaaataaaacaaataaagggggtttcaattgtatccgttatgtt

SEQ ID NO: 404234 - DNA, 120 bp, Artificial Sequence
  ENSG00000147130_52 (sequence is synthesized)
ttatttttgaagctggctggtggatacacaggtctttgttacatcatcatctatactttttttgtatgcctgaaatatttcatgtttaaaacatttaaaaaataaaagtgaagggacaaa

SEQ ID NO: 404235 - DNA, 120 bp, Artificial Sequence
  ENSG00000147130_53 (sequence is synthesized)
catgcgagcgaggcgggaaagagggcagtggggagcacgggctgtggtactgagctcggggtgtggacagatctccagggagggcagccagccttccatctctaagctggcccgatctcc

SEQ ID NO: 404236 - DNA, 120 bp, Artificial Sequence
  ENSG00000147130_54 (sequence is synthesized)
ctactatttgtgtcttggcatccagcaggtacctcttgtgcaccacctcacttcctgtcactcttaacacagcaggcagggtctaaacagaaatgattctgggttaggcacggtggctca

SEQ ID NO: 404237 - DNA, 120 bp, Artificial Sequence
  ENSG00000147133_0 (sequence is synthesized)
tttccggtctatgggacccggctgcgatttgctgctgcggacagcagctaccatcactgctgccgccatcatgtcagacacggacagcgacgaagattccgctggaggcggcccattttc

SEQ ID NO: 404238 - DNA, 120 bp, Artificial Sequence
  ENSG00000147133_1 (sequence is synthesized)
tttagcgggtttccttttcggcaacatcaatggagccgggcagctggagggggaaagcgtcttggatgatgaatgtaagaagcacttggcaggcttgggggctttggggctgggcagcct

SEQ ID NO: 404239 - DNA, 120 bp, Artificial Sequence
  ENSG00000147133_2 (sequence is synthesized)
gatcactgaactcacggcaaatgaagaattgaccgggactgacggtgccttggtaaatgatgaagggtgggttaggagtacagaagatgctgtggactattcagacatcaatgaggtggc

SEQ ID NO: 404240 - DNA, 120 bp, Artificial Sequence
  ENSG00000147133_3 (sequence is synthesized)
agaagatgaaagccgaagataccagcagacgatggggagcttgcagcccctttgccactcagattatgatgaagatgactatgatgctgattgtgaagacattgattgcaagttgatgcc

SEQ ID NO: 404241 - DNA, 120 bp, Artificial Sequence
  ENSG00000147133_4 (sequence is synthesized)
tcctccacctccacccccgggaccaatgaagaaggataaggaccaggattctattactggtgtgtctgaaaatggagaaggcatcatcttgccctccatcattgccccttcctctttggc

SEQ ID NO: 404242 - DNA, 120 bp, Artificial Sequence
  ENSG00000147133_5 (sequence is synthesized)
ctcagagaaagtggacttcagtagttcctctgactcagaatctgagatgggacctcaggaagcaacacaggcagaatctgaagatggaaagctgacccttccattggctgggattatgca

SEQ ID NO: 404243 - DNA, 120 bp, Artificial Sequence
  ENSG00000147133_6 (sequence is synthesized)
gcatgatgccaccaagctgttgccaagtgtcacagaactttttccagaatttcgacctggaaaggtgttacgttttctacgtctttttggaccagggaagaatgtcccatctgtttggcg

SEQ ID NO: 404244 - DNA, 120 bp, Artificial Sequence
  ENSG00000147133_7 (sequence is synthesized)
gagtgctcggagaaagaggaagaagaagcaccgtgagctgatacaggaagagcagatccaggaggtggagtgctcagtagaatcagaagtcagccagaagtctttgtggaactacgacta

SEQ ID NO: 404245 - DNA, 120 bp, Artificial Sequence
  ENSG00000147133_8 (sequence is synthesized)
cgctccaccaccacctccagagcagtgtctctctgatgatgaaatcacgatgatggctcctgtggagtccaaattttcccaatcaactggagatatagataaagtgacagataccaaacc

SEQ ID NO: 404246 - DNA, 120 bp, Artificial Sequence
  ENSG00000147133_9 (sequence is synthesized)
aagagtggctgagtggcgttatgggcctgcccgactgtggtatgatatgctgggtgtccctgaagatggcagtgggtttgactatggcttcaaactgagaaagacagaacatgaacctgt

SEQ ID NO: 404247 - DNA, 120 bp, Artificial Sequence
  ENSG00000147133_10 (sequence is synthesized)
gataaaatctagaatgatagaggaatttaggaaacttgaggaaaacaatggcactgatcttctggctgatgaaaacttcctgatggtgacacagctgcattgggaggatgatatcatctg

SEQ ID NO: 404248 - DNA, 120 bp, Artificial Sequence
  ENSG00000147133_11 (sequence is synthesized)
ggatggggaggatgtcaaacacaaagggacaaaacctcagcgtgcaagcctggcaggctggcttccttctagcatgactaggaatgcgatggcttacaatgttcagcaaggttttgcagc

SEQ ID NO: 404249 - DNA, 120 bp, Artificial Sequence
  ENSG00000147133_12 (sequence is synthesized)
cactcttgatgatgacaaaccttggtactccatttttcccattgacaatgaggatctggtatatggacgctgggaggacaatatcatttgggatgctcaggccatgccccggctgttgga

SEQ ID NO: 404250 - DNA, 120 bp, Artificial Sequence
  ENSG00000147133_13 (sequence is synthesized)
acctcctgttttgacacttgatcccaatgatgagaacctcattttggaaattcctgatgagaaggaagaggccacctctaactccccctccaaggagagtaagaaggaatcatctctgaa

SEQ ID NO: 404251 - DNA, 120 bp, Artificial Sequence
  ENSG00000147133_14 (sequence is synthesized)
gaagagtcgaattctcttagggaaaacaggagtcatcaaggaggaaccacagcagaacatgtctcagccagaagtgaaagatccatggaatctctccaatgatgagtattattatcccaa

SEQ ID NO: 404252 - DNA, 120 bp, Artificial Sequence
  ENSG00000147133_15 (sequence is synthesized)
gcaacagggtcttcgaggcacctttggagggaatattatccagcattcaattcctgctgtggaattacggcagcccttctttcccacccacatggggcccatcaaactccggcagttcca

SEQ ID NO: 404253 - DNA, 120 bp, Artificial Sequence
  ENSG00000147133_16 (sequence is synthesized)
tcgcccacctctgaaaaagtactcatttggtgcactttctcagccaggtccccactcagtccaacctttgctaaagcacatcaaaaaaaaggccaagatgagagaacaagagaggcaagc

SEQ ID NO: 404254 - DNA, 120 bp, Artificial Sequence
  ENSG00000147133_17 (sequence is synthesized)
ttcaggtggtggagagatgttttttatgcgcacacctcaggacctcacaggcaaagatggtgatcttattcttgcagaatatagtgaggaaaatggacccttaatgatgcaggttggcat

SEQ ID NO: 404255 - DNA, 120 bp, Artificial Sequence
  ENSG00000147133_18 (sequence is synthesized)
ggcaaccaagataaagaactattataaacggaaacctggaaaagatcctggagcaccagattgtaaatatggggaaactgtttactgccatacatctcctttcctgggttctctccatcc

SEQ ID NO: 404256 - DNA, 120 bp, Artificial Sequence
  ENSG00000147133_19 (sequence is synthesized)
tggccaattgctgcaagcatttgagaacaacctttttcgtgctccaatttatcttcataagatgccagaaactgatttcttgatcattcggacaagacagggttactatattcgggaatt

SEQ ID NO: 404257 - DNA, 120 bp, Artificial Sequence
  ENSG00000147133_20 (sequence is synthesized)
agtggatatttttgtggttggccagcagtgtcccttgtttgaagttcctgggcctaactccaaaagggccaatacgcatattcgagactttctacaggtttttatttaccgccttttctg

SEQ ID NO: 404258 - DNA, 120 bp, Artificial Sequence
  ENSG00000147133_21 (sequence is synthesized)
gaaaagtaaagatcggccacggaggatacgaatggaagatataaaaaaagcctttccttcccattcagaaagcagcatccggaagaggctaaagctctgcgctgacttcaaacgcacagg

SEQ ID NO: 404259 - DNA, 120 bp, Artificial Sequence
  ENSG00000147133_22 (sequence is synthesized)
gatggactcaaactggtgggtgcttaagtctgattttcgtttaccaacggaagaagagatcagagctatggtgtcaccagagcagtgctgtgcttattatagcatgatagctgcagagca

SEQ ID NO: 404260 - DNA, 120 bp, Artificial Sequence
  ENSG00000147133_23 (sequence is synthesized)
gaaaatgaggaagatttccagatgaagattgatgatgaagttcgcactgccccttggaacaccacaagggccttcattgctgccatgaagggcaagtgtctgctagaggtgactggggtg

SEQ ID NO: 404261 - DNA, 120 bp, Artificial Sequence
  ENSG00000147133_24 (sequence is synthesized)
gcagatcccacggggtgtggtgaaggattctcctatgtgaagattccaaacaaaccaacacagcagaaggatgataaagaaccgcagccagtgaagaagacagtgacaggaacagatgca

SEQ ID NO: 404262 - DNA, 120 bp, Artificial Sequence
  ENSG00000147133_25 (sequence is synthesized)
gaccttcgtcgcctttccctgaaaaatgccaagcaacttctacgtaaatttggtgtgcctgaggaagagattaaaaagttgtcccgctgggaagtgattgatgtggtgcgcacaatgtca

SEQ ID NO: 404263 - DNA, 120 bp, Artificial Sequence
  ENSG00000147133_26 (sequence is synthesized)
acagaacaggctcgttctggagaggggcccatgagtaaatttgcccgtggatcaaggttttctgtggctgagcatcaagagcgttacaaagaggaatgtcagcgcatctttgacctacag

SEQ ID NO: 404264 - DNA, 120 bp, Artificial Sequence
  ENSG00000147133_27 (sequence is synthesized)
aacaaggttctgtcatcaactgaagtcttatcaactgacacagacagcagctcagctgaagatagtgactttgaagaaatgggaaagaacattgagaacatgttgcagaacaagaaaacc

SEQ ID NO: 404265 - DNA, 120 bp, Artificial Sequence
  ENSG00000147133_28 (sequence is synthesized)
agctctcagctttcacgtgaacgggaggaacaggagcggaaggaactacagcgaatgctactggcagcaggctcagcagcatccggaaacaatcacagagatgatgacacagcttccgtg

SEQ ID NO: 404266 - DNA, 120 bp, Artificial Sequence
  ENSG00000147133_29 (sequence is synthesized)
actagccttaactcttctgccactggacgctgtctcaagatttatcgcacgtttcgagatgaagaggggaaagagtatgttcgctgtgagacagtccgaaaaccagctgtcattgatgcc

SEQ ID NO: 404267 - DNA, 120 bp, Artificial Sequence
  ENSG00000147133_30 (sequence is synthesized)
tatgtgcgcatacggactacaaaagatgaggaattcattcgaaaatttgccctttttgatgaacaacatcgggaagagatgcgaaaagaacggcggaggattcaagagcaactgaggcgg

SEQ ID NO: 404268 - DNA, 120 bp, Artificial Sequence
  ENSG00000147133_31 (sequence is synthesized)
cttaagaggaaccaggaaaaggagaagcttaagggtcctcctgagaagaagcccaagaaaatgaaggagcgtcctgacctaaaactgaaatgtggggcatgtggtgccattggacacatg

SEQ ID NO: 404269 - DNA, 120 bp, Artificial Sequence
  ENSG00000147133_32 (sequence is synthesized)
aggactaacaaattctgccccctctattatcaaacaaatgcgccaccttccaaccctgttgccatgacagaagaacaggaggaggagttggaaaagacagtcattcataatgataatgaa

SEQ ID NO: 404270 - DNA, 120 bp, Artificial Sequence
  ENSG00000147133_33 (sequence is synthesized)
gaacttatcaaggttgaagggaccaaaattgtcttggggaaacagctaattgagagtgcggatgaggttcgcagaaaatctctggttctcaagtttcctaaacagcagcttcctccaaag

SEQ ID NO: 404271 - DNA, 120 bp, Artificial Sequence
  ENSG00000147133_34 (sequence is synthesized)
aagaaacggcgagttggaaccactgttcactgtgactatttgaatagacctcataagtccatccaccggcgccgcacagaccctatggtgacgctgtcgtccatcttggagtctatcatc

SEQ ID NO: 404272 - DNA, 120 bp, Artificial Sequence
  ENSG00000147133_35 (sequence is synthesized)
aatgacatgagagatcttccaaatacataccctttccacactccagtcaatgcaaaggttgtaaaggactactacaaaatcatcactcggccaatggacctacaaacactccgcgaaaac

SEQ ID NO: 404273 - DNA, 120 bp, Artificial Sequence
  ENSG00000147133_36 (sequence is synthesized)
gtgcgtaaacgcctctacccatctcgggaagagttcagagagcatctggagctaattgtgaaaaatagtgcaacctacaatgggccaaaacactcattgactcagatctctcaatccatg

SEQ ID NO: 404274 - DNA, 120 bp, Artificial Sequence
  ENSG00000147133_37 (sequence is synthesized)
ctggatctctgtgatgaaaaactcaaagagaaagaagacaaattagctcgcttagagaaagctatcaaccccttgctggatgatgatgaccaagtggcgttttctttcattctggacaac

SEQ ID NO: 404275 - DNA, 120 bp, Artificial Sequence
  ENSG00000147133_38 (sequence is synthesized)
attgtcacccagaaaatgatggcagttccagattcttggccatttcatcacccagttaataagaaatttgttccagattattacaaagtgattgtcaatccaatggatttagagaccata

SEQ ID NO: 404276 - DNA, 120 bp, Artificial Sequence
  ENSG00000147133_39 (sequence is synthesized)
cgtaagaacatctccaagcacaagtatcagagtcgggagagctttctggatgatgtaaaccttattctggccaacagtgttaagtataatggacctgagagtcagtatactaagactgcc

SEQ ID NO: 404277 - DNA, 120 bp, Artificial Sequence
  ENSG00000147133_40 (sequence is synthesized)
caggagattgtgaacgtctgttaccagacattgactgagtatgatgaacatttgactcaacttgagaaggatatttgtactgctaaagaagcagctttggaggaagcagaattagaaagc

SEQ ID NO: 404278 - DNA, 120 bp, Artificial Sequence
  ENSG00000147133_41 (sequence is synthesized)
ctggacccaatgaccccagggccctacacgcctcagcctcctgatttgtatgataccaacacatccctcagtatgtctcgagatgcctctgtatttcaagatgagagcaatatgtctgtc

SEQ ID NO: 404279 - DNA, 120 bp, Artificial Sequence
  ENSG00000147133_42 (sequence is synthesized)
ttggatattcccagtgccactccagaaaagcaggtaacacaggaaggtgaagatggagatggtgatcttgcagatgaagaggaaggaactgtacaacagcctcaagccagtgtcctgtat

SEQ ID NO: 404280 - DNA, 120 bp, Artificial Sequence
  ENSG00000147133_43 (sequence is synthesized)
gaggatttgcttatgtctgaaggagaagatgatgaggaagatgctgggagtgatgaagaaggagacaatcctttctctgctatccagctgagtgaaagtggaagtgactctgatgtggga

SEQ ID NO: 404281 - DNA, 120 bp, Artificial Sequence
  ENSG00000147133_44 (sequence is synthesized)
tctggtggaataagacccaaacaaccccgcatgcttcaggagaacacaaggatggacatggaaaatgaagaaagcatgatgtcctatgagggagacggtggggaggcttcccatggtttg

SEQ ID NO: 404282 - DNA, 120 bp, Artificial Sequence
  ENSG00000147133_45 (sequence is synthesized)
gaggatagcaacatcagttatgggagctatgaggagcctgatcccaagtcgaacacccaagacacaagcttcagcagcatcggtgggtatgaggtatcagaggaggaagaagatgaggag

SEQ ID NO: 404283 - DNA, 120 bp, Artificial Sequence
  ENSG00000147133_46 (sequence is synthesized)
gaggaagagcagcgctctgggccgagcgtactaagccaggtccacctgtcagaggacgaggaggacagtgaggatttccactccattgctggggacagtgacttggactctgatgaatga

SEQ ID NO: 404284 - DNA, 120 bp, Artificial Sequence
  ENSG00000147133_47 (sequence is synthesized)
ccagcctaggtggttcacctttccccaatttgttcatatttgtacagtatctgatcctgaaatcatgaaattaactaacaccttagcctttttaaaagtagtaagtaaatgataataaat

SEQ ID NO: 404285 - DNA, 120 bp, Artificial Sequence
  ENSG00000147133_48 (sequence is synthesized)
cacctctcctaatcttcctggggcaatgtcaccctttgatttaaaacaaagcaaccccctttcccctaccactacggaaaagagcaagctcatttttccgtgtcctcctttatttaactc

SEQ ID NO: 404286 - DNA, 120 bp, Artificial Sequence
  ENSG00000147133_49 (sequence is synthesized)
catttattgcttttggtataatttttccctggggaaggaggggaaattatgaaagaactagtaactttatgtcctcttgatgtattaggaaatttccggccaggcgtggtggctcacacc

SEQ ID NO: 404287 - DNA, 120 bp, Artificial Sequence
  ENSG00000147133_50 (sequence is synthesized)
agtgagattcagtctcaaaaaaaaaaaaatttccaagcatggtatcatctcacttttctaatttacaggctggagcagatgagagccctcctgctgggacagagaattgggttctagtgg

SEQ ID NO: 404288 - DNA, 120 bp, Artificial Sequence
  ENSG00000147133_51 (sequence is synthesized)
gtggactctgtgctacacttaaacctgtgagacaaaccgcccattattttattatttaattatgcaatgcctagttcctaaatggattggaggcaaattaccgtaaattttgaaacagcc

SEQ ID NO: 404289 - DNA, 120 bp, Artificial Sequence
  ENSG00000147133_52 (sequence is synthesized)
tatatgtcagaaatgataatgttgccacctaaatgttttctgtcccccccaccctccccaggggaaatggtaggaaaatggtaagtttcttagggcaaagactgtgtcttctgtttcttt

SEQ ID NO: 404290 - DNA, 120 bp, Artificial Sequence
  ENSG00000147133_53 (sequence is synthesized)
tcatgcttaggatatggttctgtgcatagtaggtactcagtaaatgttcctagaatcataaaatcctcaacagatatgttactgagcatctgcttttcatgataagcactctatcagatc

SEQ ID NO: 404291 - DNA, 120 bp, Artificial Sequence
  ENSG00000147133_54 (sequence is synthesized)
cttgggatgcaaaggtaaataagacaaatcccttttacccaaagagctcaccatcaagttgggggagggaaagtggaattcaaaacatgttaataaatcatcatagtactgtgagataag

SEQ ID NO: 404292 - DNA, 120 bp, Artificial Sequence
  ENSG00000147133_55 (sequence is synthesized)
tgcaattaagaagctagttataaagtataggggaaatagaggagtaatcatgtctgaaaagtcaggaaagtcttcctagaggtaatttttaagctgattgttttagaattagtagaagct

SEQ ID NO: 404293 - DNA, 120 bp, Artificial Sequence
  ENSG00000147133_56 (sequence is synthesized)
tgccagatggaaaagtccaggcaaagtgtaacatgaatgggaaaggccacagtctagaaatggcagagtgtgttcctagtttgtttgtttgtttgtttgtacctgccttgttccaggaag

SEQ ID NO: 404294 - DNA, 120 bp, Artificial Sequence
  ENSG00000147133_57 (sequence is synthesized)
gatttaatgtggtttatattccagtcctttaatgctggaagggctgagatgagactgaaagatgggcaggaagtatatcatcacaagctttgtgtttgatgttaatgtgtatgattttta

SEQ ID NO: 404295 - DNA, 120 bp, Artificial Sequence
  ENSG00000147133_58 (sequence is synthesized)
tattatgggaaataagctcttagaggagtgatataatcaggtttgtgttttagaaatctgtgtaatgaatgaatgaagaaagaaattgaagaatcatgtaacatatgtgatcgcattttt

SEQ ID NO: 404296 - DNA, 120 bp, Artificial Sequence
  ENSG00000147133_59 (sequence is synthesized)
gtaaaagaaccatgtgtgtttatatgtgtttatatatatacttgtgtatgcaaaggtaaaagtctgaaaggatatatgctaactgttcacaatgataaccccccaggaatgggattggag

SEQ ID NO: 404297 - DNA, 120 bp, Artificial Sequence
  ENSG00000147133_60 (sequence is synthesized)
gggagggggcttctgtgtttgttatgtatgctgggtgggatattgtgcttttatttctatattgtttgaatttttttacagtatgtattatttttgtaataaaaattttaaaaaattcca

SEQ ID NO: 404298 - DNA, 120 bp, Artificial Sequence
  ENSG00000147133_61 (sequence is synthesized)
gtgcccagctatgatgttgaggggcccaacatcagattacttttcatccatcaaacatttcctgggcacctactagggccaggcactgtgctaggctctggggatacacagaggagcaaa

SEQ ID NO: 404299 - DNA, 120 bp, Artificial Sequence
  ENSG00000147133_62 (sequence is synthesized)
gaataggcataaggatcaaacacacaaggtcgatagaaaaggggcacagtcatcaccaccttcctcgagaatagccttctttgactttcctgatctggataaatgtatttcccctctgaa

SEQ ID NO: 404300 - DNA, 120 bp, Artificial Sequence
  ENSG00000147133_63 (sequence is synthesized)
gaaaccagctgctgtgttgttgtgagctcccctgtggagaagccaacatgtcaaggaactgagaccctcagtccaacagtccacaaggtaccaatgaacaagccattcagagatggatcc

SEQ ID NO: 404301 - DNA, 120 bp, Artificial Sequence
  ENSG00000147133_64 (sequence is synthesized)
atggatccacaaagatctctggagcaacgaccaggtcctgctctacccgattctcagctttggggatagaattcccagaaacatctgtgtccggagttggttccttccagtgggttcttg

SEQ ID NO: 404302 - DNA, 120 bp, Artificial Sequence
  ENSG00000147133_65 (sequence is synthesized)
gacttcaagaatgaagccgtggaccttcgcgcttcaggctgaagatagtgaaaatccgtgccagacttggattggaagaatgaaccaaggctttgagtctcttcgtctcatctccgtttt

SEQ ID NO: 404303 - DNA, 120 bp, Artificial Sequence
  ENSG00000147133_66 (sequence is synthesized)
agagaaaaagtatcctcatctggcagaactcccatagggtgtgctccccttgctgttctgcttttgttttgcagaaagctgcctttttcaatgtactcattaggctttcattgttttttc

SEQ ID NO: 404304 - DNA, 120 bp, Artificial Sequence
  ENSG00000147133_67 (sequence is synthesized)
cttttttacctttttcatctttcactgttgatatcacaggtggccatatctttaccagtgcagctaccaaataagaaatcatcttttccacattcactagttagtgatggttgttgtact

SEQ ID NO: 404305 - DNA, 120 bp, Artificial Sequence
  ENSG00000147133_68 (sequence is synthesized)
accatgaaatcagtttcttctttacttttattcaggttacaagatttctggaaggttttaagatcaattttaattagtctttgtgactggttacttcatccaggggaccaatttctctct

SEQ ID NO: 404306 - DNA, 120 bp, Artificial Sequence
  ENSG00000147133_69 (sequence is synthesized)
ctctggaatattagtcccgcacccctggagagcctgtgcggctgcatctccctccggaggtggttctggagttggttccttttggtgggttcctggtctcgctgacttcaagaatgaagc

SEQ ID NO: 404307 - DNA, 120 bp, Artificial Sequence
  ENSG00000147133_70 (sequence is synthesized)
gaccttcacgtggaatcgccgactgtgacaatgtgcagagctagctggtggaaatgaagtcacaactcgaggagagtcatggattttgacgaacgtgaatcacctttaacatttttatgg

SEQ ID NO: 404308 - DNA, 120 bp, Artificial Sequence
  ENSG00000147133_71 (sequence is synthesized)
ttggccatggagctctgcttcttcttagaggtctgggctttcttctccttgggcgtgcccgaggtgacgtcgtcgtggtcgcggttgctggacgcgttctcacggttctagttgttgcgc

SEQ ID NO: 404309 - DNA, 120 bp, Artificial Sequence
  ENSG00000147133_72 (sequence is synthesized)
tgccgccgagaacgctttgctgttggacttctccgcctgcgcgtccgcctcgcccctgggcctgtccgggccgaccttgccgccgtcgcgctgcgtcgccctgctcctgctgcgggtgga

SEQ ID NO: 404310 - DNA, 120 bp, Artificial Sequence
  ENSG00000147133_73 (sequence is synthesized)
acggctccacgtggctgtctacctgccgcgtgaggctctccaccagctccaccctctggctcttgatctggatcttctgatcgcccggctcctagctgcggatcagggcccgctgggcgc

SEQ ID NO: 404311 - DNA, 120 bp, Artificial Sequence
  ENSG00000147133_74 (sequence is synthesized)
agggtggcacccgcggcttctgcgcgcagtccgtgtcgcggcggaccttctcatagcacttgtccaggtccttcagggtctcctccaggaaagtctccgtgccgcaagcccggctaactc

SEQ ID NO: 404312 - DNA, 120 bp, Artificial Sequence
  ENSG00000147133_75 (sequence is synthesized)
acgcctccccagccatgtgcggccgcaccctccggtctgcagaggtgtggcatgtgacggtctgcgagccggtgtcgcgggacgccggggcggggcgggccgcccaagctgcagcccagg

SEQ ID NO: 404313 - DNA, 88 bp, Artificial Sequence
  ENSG00000147133_76 (sequence is synthesized)
tcaaagagtgagcagcagcaagattcattgtgaagacggaaagaacacagcttccacggtgtggaaagagacccgagtgggttgctac

SEQ ID NO: 404314 - DNA, 120 bp, Artificial Sequence
  ENSG00000147133_77 (sequence is synthesized)
aatgaattcaatgagttctccctaatttatgtctaaattgtaaataataccatagcagatagaatctgtgctaattttcaatgagtaatcatgggttcaatctcagtggctgccccttcc

SEQ ID NO: 404315 - DNA, 120 bp, Artificial Sequence
  ENSG00000147133_78 (sequence is synthesized)
attgatgatgaagtaaggctttatactagtttgtattagtcattaatacatctcatttatccttttaaaagagacagctttattgagataacataaaataaactgtacacatttaaagta

SEQ ID NO: 404316 - DNA, 120 bp, Artificial Sequence
  ENSG00000147133_79 (sequence is synthesized)
aacttagcagctggggttttcttggccagtcatgccaactgtggctaggcctgttacagttttggtttgctgtccctgttgctgtcaataaatatcagggcctttggaattcagaatggt

SEQ ID NO: 404317 - DNA, 120 bp, Artificial Sequence
  ENSG00000147133_80 (sequence is synthesized)
aaaaattgtttagtcacatttgataatctatattttaatttatttgtattactggatagaccttagatggcgtaattaagatggagagcaataagcttggtatttctttctcagcagttg

SEQ ID NO: 404318 - DNA, 120 bp, Artificial Sequence
  ENSG00000147138_0 (sequence is synthesized)
caccattaggcaaagatagtttctctagagagaatcatgcctgctaattacacgtgtaccaggccagatggagacaatacagattttcgatactttatttatgcagtgacatacactgtc

SEQ ID NO: 404319 - DNA, 120 bp, Artificial Sequence
  ENSG00000147138_1 (sequence is synthesized)
attcttgtgccaggtctcatagggaatatattagccctgtgggtattctatggttatatgaaagaaacaaaacgagctgtgatatttatgataaacttagccattgctgacttactacaa

SEQ ID NO: 404320 - DNA, 120 bp, Artificial Sequence
  ENSG00000147138_2 (sequence is synthesized)
gttctttccttgccactgaggatcttctactacttgaatcatgactggccatttgggcctggtctctgcatgttctgtttctacctgaagtatgtcaacatgtatgcaagcatctacttc

SEQ ID NO: 404321 - DNA, 120 bp, Artificial Sequence
  ENSG00000147138_3 (sequence is synthesized)
ttggtctgcatcagtgtgcgacgattttggtttctcatgtacccctttcgcttccatgactgcaaacagaaatatgacctgtacatcagcattgctggctggctgatcatctgccttgcc

SEQ ID NO: 404322 - DNA, 120 bp, Artificial Sequence
  ENSG00000147138_4 (sequence is synthesized)
tgtgtactctttccactcctcagaaccagtgatgatacctctggcaataggaccaaatgctttgtggatcttcctaccaggaatgtcaacctggcccagtccgttgttatgatgaccatt

SEQ ID NO: 404323 - DNA, 120 bp, Artificial Sequence
  ENSG00000147138_5 (sequence is synthesized)
cggttttatcactgcaagataaatatcccatggcccaagatcttggagagaaacagaaagccttgaagatgattctaacctgtgcaggggtattcctaatttgctttgcaccttatcatt

SEQ ID NO: 404324 - DNA, 120 bp, Artificial Sequence
  ENSG00000147138_6 (sequence is synthesized)
tcagttttcctttagatttcctggtgaagtccaatgaaattaaaagctgcctagccagaagggtgattctaatatttcattctgtggcattgtgtcttgctagtctgaattcatgtcttg

SEQ ID NO: 404325 - DNA, 120 bp, Artificial Sequence
  ENSG00000147138_7 (sequence is synthesized)
acccagtcatatactacttttccactaatgagttccgaagacggctttcaagacaagatttgcatgacagcatccaactccatgcaaaatcctttgtgagtaaccatacagcttccacca

SEQ ID NO: 404326 - DNA, 120 bp, Artificial Sequence
  ENSG00000147138_8 (sequence is synthesized)
tgacacctgaattatgctaaaacaaaaaaccaaactgaatgtgacctgaaatgcaagtacatcagaacatatctgcaatacccaagccacagggaagaacttgcaaaacaacacagcttt

SEQ ID NO: 404327 - DNA, 120 bp, Artificial Sequence
  ENSG00000147138_9 (sequence is synthesized)
tcagttctgctctatcttactgctatggggaattcacttcttcaaagcaggacctatttggagcattacgatccacgattattgatgttgacatgtccatgtagtaatttttcttcaagt

SEQ ID NO: 404328 - DNA, 120 bp, Artificial Sequence
  ENSG00000147138_10 (sequence is synthesized)
tgccccctggaaaacggaaatgttcagtgtacacagagagtggcttgcatatttcactctgacatcttactactatgcttttcaacatgatagtggttagatattcctgataattttaat

SEQ ID NO: 404329 - DNA, 120 bp, Artificial Sequence
  ENSG00000147138_11 (sequence is synthesized)
tttttttccttttgctttcataatttttcttttggctttcttttattttgtattatttttacttttatttattttcttccctccctccttctctcctgtattcattccttccttccttcc

SEQ ID NO: 404330 - DNA, 73 bp, Artificial Sequence
  ENSG00000147138_12 (sequence is synthesized)
ctccctccttctctcctgtattcattccttccttccttccttcttccttccttccctccttcctctcctttcc

SEQ ID NO: 404331 - DNA, 120 bp, Artificial Sequence
  ENSG00000147138_13 (sequence is synthesized)
tttctttctttctttcttttttttctccttttgctagtgaaggagaattggattggttattttcagaacaggcagcctaaattgatgcacaaatcagtagcatcctttttggagtggcca

SEQ ID NO: 404332 - DNA, 120 bp, Artificial Sequence
  ENSG00000147138_14 (sequence is synthesized)
gtagcatcctttttggagtggccatcacatgaattctttggagatctctgaagaaaacagaaagaaactgaaatggcatgaatgaattaatcgtgccagattctccaacacttcctcagg

SEQ ID NO: 404333 - DNA, 120 bp, Artificial Sequence
  ENSG00000147138_15 (sequence is synthesized)
agaccctattgctctgatcaagaagttccatcagcaccgaagaaaacagcagctctgcctttgtttcctactttttagcttttgacctatagctgaaaaagtcccagaaagctgatcttt

SEQ ID NO: 404334 - DNA, 120 bp, Artificial Sequence
  ENSG00000147138_16 (sequence is synthesized)
ccaagttaatcatccctgaagagtggcggactcattgtgcactaaagcaatcctttcttctatgtgagccaaaaaaagaaaaacggcctgccagacacctgtaaagagaaggctatcgtc

SEQ ID NO: 404335 - DNA, 120 bp, Artificial Sequence
  ENSG00000147138_17 (sequence is synthesized)
atataggaatttgaggaactgctatatggtacattccttttccaaatgggagagaataagctctcatgatgtcccagagggccttaaaataaacaagaggggaaattgtaacagcttgtc

SEQ ID NO: 404336 - DNA, 120 bp, Artificial Sequence
  ENSG00000147138_18 (sequence is synthesized)
atctgtgcttgtacactagacttccatgtagttactctagagaaatctaaatcaaaaatgcagatcattctttgaaaaatccccaaatcatacgtagagactcagacagatgtggtaaaa

SEQ ID NO: 404337 - DNA, 120 bp, Artificial Sequence
  ENSG00000147138_19 (sequence is synthesized)
caaaaagattattagcttggagtcaccataaacatttagttttgttgcaacagatactgagtctttatgttcagaggaaatgtaagtgtctttttatattagtaatcacagtttacatgc

SEQ ID NO: 404338 - DNA, 120 bp, Artificial Sequence
  ENSG00000147138_20 (sequence is synthesized)
aagattaaaatagctattttcttcatttttgtgtcaacatgaaacatcatttgtcacacctgttcacagaatgaaaatctgaactcaggcctctggcatatttaaactaagaacaatata

SEQ ID NO: 404339 - DNA, 120 bp, Artificial Sequence
  ENSG00000147138_21 (sequence is synthesized)
catatttacatacgacaaccctctgtgactggaaaagatgccgtgttgcatctacctaggacaggtagtttgtcaaagtccatacaaggtgactcaattgggctctaggcctaggagaaa

SEQ ID NO: 404340 - DNA, 120 bp, Artificial Sequence
  ENSG00000147138_22 (sequence is synthesized)
gcagaaaggtgacaatcacaattctgctctcttacactttttctaaagaacacttctggagatgtatggacccgcctagtagaggaagtttttatcatgtttctagagatacattgaggt

SEQ ID NO: 404341 - DNA, 120 bp, Artificial Sequence
  ENSG00000147138_23 (sequence is synthesized)
aatgttgacaggttcctgcactttctgagcctgtggaagaagtagtgcactaatgaatcattaaacctgggccagagtgaaaagatgaagcaaagttgggtaatctttttaaaattctca

SEQ ID NO: 404342 - DNA, 120 bp, Artificial Sequence
  ENSG00000147138_24 (sequence is synthesized)
tcacattgtatttcttactctaatacaaggacacttacttagcttagactgccaagttacttacacaagccagagtaagtctctctgccccatcattgcatacatattacagtcagtcac

SEQ ID NO: 404343 - DNA, 120 bp, Artificial Sequence
  ENSG00000147138_25 (sequence is synthesized)
atggaccctagaatccacattgattttttttggtctagctttgccccagacataccattctaaagcctacaaagcctagctcttagcagctggggaaggcaattatttcacctcttgaaa

SEQ ID NO: 404344 - DNA, 120 bp, Artificial Sequence
  ENSG00000147138_26 (sequence is synthesized)
aatgcatagaagattaatttggtcagcctttggcaaccaatggccaatgacttgcctactacctgtttggtactattgtgtgggaaacagacccaggatattagtcgtaattaaacctta

SEQ ID NO: 404345 - DNA, 120 bp, Artificial Sequence
  ENSG00000147138_27 (sequence is synthesized)
ggttgtaagtattagaatattttgaaacatgttttagcaaaaagctctaactttaagaaagttctacttaaaatctgtgtgctatataatgaagataccttctacgtctcacagaaggaa

SEQ ID NO: 404346 - DNA, 120 bp, Artificial Sequence
  ENSG00000147138_28 (sequence is synthesized)
tgtagaacccaatcaaaggctttatcatatttagaggaaaggggttgttttaggcatacagttatgatactaatacattaggggaaaactggtgacatcaaaatgaattctaatatctag

SEQ ID NO: 404347 - DNA, 120 bp, Artificial Sequence
  ENSG00000147138_29 (sequence is synthesized)
actgatggaaagttttctaaagttttctttggacaagtgttgattttacacatatgttgttattaagataataccctattagaaaactgactttgtgctgctagcaagtgtatctatgtg

SEQ ID NO: 404348 - DNA, 120 bp, Artificial Sequence
  ENSG00000147138_30 (sequence is synthesized)
tctcctaactaatcattgtaaggtatatgttttgatgtgttaaataagttttcaataagtgttaaactgtattttaaatagggcatctataactgtgtcttgtctctttgctttaaagtg

SEQ ID NO: 404349 - DNA, 120 bp, Artificial Sequence
  ENSG00000147138_31 (sequence is synthesized)
tcttttgtttgactataatttagtgttgcaataggattgcaagtaataattttgtggaattgtgaaataactgtgggtacttttaatgtgagagtcttatctatagtatttgtgcttagt

SEQ ID NO: 404350 - DNA, 120 bp, Artificial Sequence
  ENSG00000147138_32 (sequence is synthesized)
attttctagattagcatgaattacacttcctaaggtcactttggaagatgattgatttgatttaattaacatattgatttcactttgactatatttttcttaaagaggaagggaaatatt

SEQ ID NO: 404351 - DNA, 120 bp, Artificial Sequence
  ENSG00000147138_33 (sequence is synthesized)
ttcaggagatgtttgaccttcttagatgaatggttgagggtagggcccatttgttaggcagcccatttacatcattccaaaaaaggaccagtattcagtgttatgctgcttagctgagga

SEQ ID NO: 404352 - DNA, 120 bp, Artificial Sequence
  ENSG00000147138_34 (sequence is synthesized)
caccctttttccccaggcctgcccatctacgtttgtattcagtgctctgatttactttattcaccccttatcccatcaatatgttttgtcttctgcttgattcccttgctctcccaggca

SEQ ID NO: 404353 - DNA, 120 bp, Artificial Sequence
  ENSG00000147138_35 (sequence is synthesized)
gcaacctgatcaattcattcacaccatggtgctaatagctaatgttaggttcatattaatttacccaggaatatctgaattccaggctttaggactaggcattaaaccaaagtggtgact

SEQ ID NO: 404354 - DNA, 120 bp, Artificial Sequence
  ENSG00000147138_36 (sequence is synthesized)
ttcaatggagggctaatacatactgaagcagacagactggagggaaagaaattttggataaagtgggtcccacagcactgcctttcatattgcatacagtaagcaaacacctactttggt

SEQ ID NO: 404355 - DNA, 120 bp, Artificial Sequence
  ENSG00000147138_37 (sequence is synthesized)
taccataatgggaatgctgacttttaagaaattaagaaatgtatccatgaacatggctatcagtttctcagatgtctgctcaccttcttttcattttgcctctctcctttcctacgttgg

SEQ ID NO: 404356 - DNA, 120 bp, Artificial Sequence
  ENSG00000147138_38 (sequence is synthesized)
gcctgattttcaggggaaagtctaaactagtagcttactaatttaggagtactggtgcagctacgatccagacagcagcctgttctctgagcttctccattccatggcttatccagactt

SEQ ID NO: 404357 - DNA, 120 bp, Artificial Sequence
  ENSG00000147138_39 (sequence is synthesized)
ctcatttatcactctctgggttctatgaaattgtggtgcaaagagtaaacaccctcaaccatagtaatgtatacttcaagataaataattccacatttcctatataaagttgttgaattt

SEQ ID NO: 404358 - DNA, 120 bp, Artificial Sequence
  ENSG00000147138_40 (sequence is synthesized)
tgattcaaaaatgcgtaagtattccaataagaaaaactttgtatgtagtgatttctatgtaaaaatattgttattattattatattcaaatggtttatatgttttcattgtcactcagtt

SEQ ID NO: 404359 - DNA, 120 bp, Artificial Sequence
  ENSG00000147138_41 (sequence is synthesized)
aagcagccaattctgttagctggtaattccacaaagagaagccatctgccccaggagcaacagaccaagctgccttggtctgagagggtgcatctgtggaactcttgcgcaacttacatt

SEQ ID NO: 404360 - DNA, 120 bp, Artificial Sequence
  ENSG00000147138_42 (sequence is synthesized)
ttatgtcaccttttgattttactcccaagatactgtgaaaatgttgcacttggaatttatttatggctataacttataatattcattttaataataaagattgtctttgtaattacatag

SEQ ID NO: 404361 - DNA, 120 bp, Artificial Sequence
  ENSG00000147140_0 (sequence is synthesized)
gtttccggcggtcgcgcgctcttttctcgggacgggagaggccgtgtagcgtcgccgttactccgaggagataccagtcggtagaggagaagtcgaggttagagggaactgggaggcact

SEQ ID NO: 404362 - DNA, 120 bp, Artificial Sequence
  ENSG00000147140_1 (sequence is synthesized)
ttgctgtctgcaatcgaagttgagggtgcaaaaatgcagagtaataaaacttttaacttggagaagcaaaaccatactccaagaaagcatcatcaacatcaccaccagcagcagcaccac

SEQ ID NO: 404363 - DNA, 120 bp, Artificial Sequence
  ENSG00000147140_2 (sequence is synthesized)
cagcagcaacagcagcagccgccaccaccgccaatacctgcaaatgggcaacaggccagcagccaaaatgaaggcttgactattgacctgaagaattttagaaaaccaggagagaagacc

SEQ ID NO: 404364 - DNA, 120 bp, Artificial Sequence
  ENSG00000147140_3 (sequence is synthesized)
ttcacccaacgaagccgtctttttgtgggaaatcttcctcccgacatcactgaggaagaaatgaggaaactatttgagaaatatggaaaggcaggcgaagtcttcattcataaggataaa

SEQ ID NO: 404365 - DNA, 120 bp, Artificial Sequence
  ENSG00000147140_4 (sequence is synthesized)
ggatttggctttatccgcttggaaacccgaaccctagcggagattgccaaagtggagctggacaatatgccactccgtggaaagcagctgcgtgtgcgctttgcctgccatagtgcatcc

SEQ ID NO: 404366 - DNA, 120 bp, Artificial Sequence
  ENSG00000147140_5 (sequence is synthesized)
cttacagttcgaaaccttcctcagtatgtgtccaacgaactgctggaagaagccttttctgtgtttggccaggtagagagggctgtagtcattgtggatgatcgaggaaggccctcagga

SEQ ID NO: 404367 - DNA, 120 bp, Artificial Sequence
  ENSG00000147140_6 (sequence is synthesized)
aaaggcattgttgagttctcagggaagccagctgctcggaaagctctggacagatgcagtgaaggctccttcctgctaaccacatttcctcgtcctgtgactgtggagcccatggaccag

SEQ ID NO: 404368 - DNA, 120 bp, Artificial Sequence
  ENSG00000147140_7 (sequence is synthesized)
ttagatgatgaagagggacttccagagaagctggttataaaaaaccagcaatttcacaaggaacgagagcagccacccagatttgcacagcctggctcctttgagtatgaatatgccatg

SEQ ID NO: 404369 - DNA, 120 bp, Artificial Sequence
  ENSG00000147140_8 (sequence is synthesized)
cgctggaaggcactcattgagatggagaagcagcagcaggaccaagtggaccgcaacatcaaggaggctcgtgagaagctggagatggagatggaagctgcacgccatgagcaccaggtc

SEQ ID NO: 404370 - DNA, 120 bp, Artificial Sequence
  ENSG00000147140_9 (sequence is synthesized)
atgctaatgagacaggatttgatgaggcgccaagaagaacttcggaggatggaagagctgcacaaccaagaggtgcaaaaacgaaagcaactggagctcaggcaggaggaagagcgcagg

SEQ ID NO: 404371 - DNA, 120 bp, Artificial Sequence
  ENSG00000147140_10 (sequence is synthesized)
cgccgtgaagaagagatgcggcggcagcaagaagaaatgatgcggcgacagcaggaaggattcaagggaaccttccctgatgcgagagagcaggagattcggatgggtcagatggctatg

SEQ ID NO: 404372 - DNA, 120 bp, Artificial Sequence
  ENSG00000147140_11 (sequence is synthesized)
aacagaggtgccatgccccctgctcctgtgccagctggtaccccagctcctccaggacctgccactatgatgccggatggaactttgggattgaccccaccaacaactgaacgctttggt

SEQ ID NO: 404373 - DNA, 120 bp, Artificial Sequence
  ENSG00000147140_12 (sequence is synthesized)
caggctgctacaatggaaggaattggggcaattggtggaactcctcctgcattcaaccgtgcagctcctggagctgaatttgccccaaacaaacgtcgccgatactaataagttgcagtg

SEQ ID NO: 404374 - DNA, 120 bp, Artificial Sequence
  ENSG00000147140_13 (sequence is synthesized)
tctagtttctcaaaacccttaaaagaaggaccctttttggactagccagaattctaccctggaaaagtgttagggattccttccaatagttagatctaccctgcctgtactactctaggg

SEQ ID NO: 404375 - DNA, 120 bp, Artificial Sequence
  ENSG00000147140_14 (sequence is synthesized)
agtatgctggaggcagagggcaagggaggggtggtattaaacaagtcaattctgtgtggtatattgtttaatcagttctgtgtggtgcattcctgaagtctctaatgtgactgttgaggg

SEQ ID NO: 404376 - DNA, 120 bp, Artificial Sequence
  ENSG00000147140_15 (sequence is synthesized)
cctggggaaaccatggcaaagtggatccagttagagcccattaatcttgatcattccggttttttttttttttgtccatcttgtttcatttgcttgccccgcccccgagacggagtctta

SEQ ID NO: 404377 - DNA, 120 bp, Artificial Sequence
  ENSG00000147140_16 (sequence is synthesized)
gattacaggggtgagccaccgtgcccaacctcacttgcttcttatccttacactcccccagccccagagaaactgccacatacaccacaaaaaccaaacatcccccaatgaccttagccc

SEQ ID NO: 404378 - DNA, 120 bp, Artificial Sequence
  ENSG00000147140_17 (sequence is synthesized)
ccaatgaccttagccccattgctccattcactcccaggtgagaattcaggcaaacgtccacaaaggtcacaggcagcgtacatacggttctgttataccccatatattaccccttcatgt

SEQ ID NO: 404379 - DNA, 120 bp, Artificial Sequence
  ENSG00000147140_18 (sequence is synthesized)
cctaaagaagacattttctcttagagattttcattttagtgtatctttaaaaaaaaatcttgtgttaacttgcctccatctttttcttgggtgaggacacccaggaatgacccttttgtg

SEQ ID NO: 404380 - DNA, 120 bp, Artificial Sequence
  ENSG00000147140_19 (sequence is synthesized)
tctatgatgttgctgttcacagcttttcttgataggcctagtacaatcttgggaacagggttactgtatactgaaggtctgacagtagctcttagactcgcctatcttaggtagtcatgc

SEQ ID NO: 404381 - DNA, 120 bp, Artificial Sequence
  ENSG00000147140_20 (sequence is synthesized)
tgtgcattttttttttcattggtgtactgtgtttgatttgtctcatatatttggagtttttctgaaaaatggagcagtaatgcagcatcaacctattaaaatacattttaagccttttaa

SEQ ID NO: 404382 - DNA, 120 bp, Artificial Sequence
  ENSG00000147140_21 (sequence is synthesized)
ccgcttgaactacatgtgatttattgcaaggccatcagaagcaaactagggtggccaaagagctgaagcacacagttaagttctttcacttctgtttctttgtatggttgtttagttttt

SEQ ID NO: 404383 - DNA, 120 bp, Artificial Sequence
  ENSG00000147140_22 (sequence is synthesized)
gtgggatttcttggaacaatcagcgaaggaagaggctagggcgaagctaggtttggagggtggatggcgcttccgaggccccttgaggccttgtctctgccgccacactgccttctcagc

SEQ ID NO: 404384 - DNA, 120 bp, Artificial Sequence
  ENSG00000147140_23 (sequence is synthesized)
ccacccgcggggggccacctttctcaactcgcttcgcttcgggctttccccattttcgttcctgccctgtttctttgtgcaactcatctccgaatcttacccgtgtcaagaagtcgaggt

SEQ ID NO: 404385 - DNA, 120 bp, Artificial Sequence
  ENSG00000147140_24 (sequence is synthesized)
tggagctcaggtaacttttctcgaacactttttccctaacaactctaaaaggtaatgtctcactcctctttcctactgccatgctacctcgtgtatttataaatgtgttggcaaatattt

SEQ ID NO: 404386 - DNA, 120 bp, Artificial Sequence
  ENSG00000147140_25 (sequence is synthesized)
gttgagaggcccagtatttaggcgacagtgaatttattactctgaagagggttctgcacatatttccaaattatattggtggtcatcagaagtaggtgataggaagaaatacttctcaag

SEQ ID NO: 404387 - DNA, 120 bp, Artificial Sequence
  ENSG00000147140_26 (sequence is synthesized)
ctcccgacatcactgaggaagaaatgaggaaactatttgagaaatatggaaaggcaggcgaagtcttcattcataaggataaaggatttggctttatccgcttggtagagagggctgtag

SEQ ID NO: 404388 - DNA, 120 bp, Artificial Sequence
  ENSG00000147140_27 (sequence is synthesized)
caggcgcagtgcaggactgctccgagcacgcctacgcgcgcattttctccccttcctctccctctttccactttcctctccctttttctcctctcctttccccctcccaccacttggtct

SEQ ID NO: 404389 - DNA, 120 bp, Artificial Sequence
  ENSG00000147140_28 (sequence is synthesized)
ttcagtctttcagtcagttcgtttaggtctctccttccgacccccacccccagctcctctccctttccttttccccctccccctttcctttcccgtctcacgcgccaggccgcttgcaca

SEQ ID NO: 404390 - DNA, 120 bp, Artificial Sequence
  ENSG00000147140_29 (sequence is synthesized)
tgcgcattaggtacaaagcctcgctctttgtccccatctgtcgttcacacgaactcaagcctttggcattcggcagccaatagaatctaagaaatggcggaaaaatgattccgcctcggg

SEQ ID NO: 404391 - DNA, 120 bp, Artificial Sequence
  ENSG00000147140_30 (sequence is synthesized)
ggcatgtgctctaaaggtggggaagctggagaataatagatgtgcaaaaataggcagtggaaataattctcagatgatgtgttccttgaaagcttgatgaaacagaaccacaaaaatggc

SEQ ID NO: 404392 - DNA, 120 bp, Artificial Sequence
  ENSG00000147140_31 (sequence is synthesized)
acattttaatttttcctcataagttttgtttcaaggataacaagttttttgcctaggatactggagctaaagtatgccctttggaactttttttttttttgagacggagtatcactcttg

SEQ ID NO: 404393 - DNA, 120 bp, Artificial Sequence
  ENSG00000147140_32 (sequence is synthesized)
gatgtgagccactgcacctggctggaacttttttgttttaattaggaaatttcaaacatatagaagtagacagaataataatgaacctgcacatatgcattgcatagcttcagtaattat

SEQ ID NO: 404394 - DNA, 120 bp, Artificial Sequence
  ENSG00000147140_33 (sequence is synthesized)
caagttgtggttaattttgttttatctgtaccctttccctattttgtccccccatgatcaagagatgggtatctcaccatgttgccttggctagacttgaattcctgagcttaagcaatt

SEQ ID NO: 404395 - DNA, 120 bp, Artificial Sequence
  ENSG00000147140_34 (sequence is synthesized)
ctctgtcctcagcctcctgagtagctgggacaaaggcaacgcaccacggtgcctggtttatttgtatctttaaaaaactattttaaattgaattaaccaggcatggtatacgtctgtagt

SEQ ID NO: 404396 - DNA, 120 bp, Artificial Sequence
  ENSG00000147140_35 (sequence is synthesized)
ctaactactcaactaggctaagctgatagggctgattgagcctaggagtttgaggttacagtgagctatgctcatagcactgcacttcagcctgggtgatagagtgagacccagtctctt

SEQ ID NO: 404397 - DNA, 120 bp, Artificial Sequence
  ENSG00000147140_36 (sequence is synthesized)
accttccctgatgcggtatatctcccatgtgcccgtgatgtaccagaccagtcctgataaactcaccatgaattgtctgctaggttaccggttatgaccaattttcccgtgttgtgaaat

SEQ ID NO: 404398 - DNA, 120 bp, Artificial Sequence
  ENSG00000147140_37 (sequence is synthesized)
aaccctttagaaaaaagaattcataagaaggagaggtaaggtttgaagaggagatcttgcctcacaagcaatataggatgaaaaactgggtctgctgtattctgtttagactcagtgact

SEQ ID NO: 404399 - DNA, 120 bp, Artificial Sequence
  ENSG00000147140_38 (sequence is synthesized)
ggctctggcttacgtcctagtagctctgtgaccttgaatttgttgcacaactagcaagggttgtgctcctcagctttctcagtgctgtttggacgtgttatcactctatctacttccctt

SEQ ID NO: 404400 - DNA, 120 bp, Artificial Sequence
  ENSG00000147140_39 (sequence is synthesized)
agtgtgtggtccttgatggattgtggtagaatgcactgctgtcttggactgtcttgagtattttttgtttttcagagagagcaggagattcggatgggtcagatggctatgggaggtgct

SEQ ID NO: 404401 - DNA, 120 bp, Artificial Sequence
  ENSG00000147144_0 (sequence is synthesized)
attacctagtgggaggtggccaaggcatctgccactgctgctgactgccactaccagccggagccagggcctggtcgagacaactatttttgaggcaagactcgtggctgtgacccatgg

SEQ ID NO: 404402 - DNA, 120 bp, Artificial Sequence
  ENSG00000147144_1 (sequence is synthesized)
gcctctgaggaggcgttgtaagtccgcccagctccccacttgctgtgctctcactcaatgcgaagggaaccaaggtaccagggccaagtgggtccagacatccacacggattctgaaagg

SEQ ID NO: 404403 - DNA, 120 bp, Artificial Sequence
  ENSG00000147144_2 (sequence is synthesized)
gcaggtcaagcagactttgtccagccatcagccacggcctctcgacagcaccaagatggaagtcaaaggtcagctgatcagctctcctaccttcaatgccccagctgccctgttcggaga

SEQ ID NO: 404404 - DNA, 120 bp, Artificial Sequence
  ENSG00000147144_3 (sequence is synthesized)
ggctgccccccaggtgaagtcagagcgtctgcgggggctgcttgaccggcagcggaccctgcaggaggccctgagcctgaaacttcaggagctccgcaaagtgtgtctccaggaggcgga

SEQ ID NO: 404405 - DNA, 120 bp, Artificial Sequence
  ENSG00000147144_4 (sequence is synthesized)
gctgactggccagctgccccctgagtgcccactagagcctggtgaacggccccagttggtccgccggcggccccccacagcccgcgcctaccctccaccgcaccccaaccaagcacacca

SEQ ID NO: 404406 - DNA, 120 bp, Artificial Sequence
  ENSG00000147144_5 (sequence is synthesized)
ctccttgtgccctgctgaggagctggctcttgaggccctggaacgcgaggtgtcagtgcaacagcagatcgcggcggccgcccgccgcctggccttggcccctgatctgagcaccgagca

SEQ ID NO: 404407 - DNA, 120 bp, Artificial Sequence
  ENSG00000147144_6 (sequence is synthesized)
gcgccggcgccggcgccaggtccaggcagatgcactgaggaggctgcatgagctagaggagcagctcagggatgtccgggcccgccttggcctcccagtgctcccgctgccccagccact

SEQ ID NO: 404408 - DNA, 120 bp, Artificial Sequence
  ENSG00000147144_7 (sequence is synthesized)
gccactgtccacggggtcagtgatcaccacccagggagtctgcctgggcatgcgtcttgctcagctcagccaagaggacgtagttctgcactcagagagcagctccctctcagagtctgg

SEQ ID NO: 404409 - DNA, 120 bp, Artificial Sequence
  ENSG00000147144_8 (sequence is synthesized)
ggccagccatgacaacgaggagccccatggctgcttctctctggccgagcgcccctcaccacccaaggcttgggaccagctgcgggcagtatctggggggagccctgagcggcgaacccc

SEQ ID NO: 404410 - DNA, 120 bp, Artificial Sequence
  ENSG00000147144_9 (sequence is synthesized)
atggaaaccacctccatcagatctttatggggatctgaagagccggcggaactctgtggccagccccaccagccccacacgctcgctgcccaggagtgcctccagttttgaggggcgaag

SEQ ID NO: 404411 - DNA, 120 bp, Artificial Sequence
  ENSG00000147144_10 (sequence is synthesized)
tgtcctcacccggggcgctggcccccagctctgcaaacctgaaggccttcattctcgtcagtggtccggcagccaggactcccagatgggcttcccccgggcggaccctgcctccgatcg

SEQ ID NO: 404412 - DNA, 120 bp, Artificial Sequence
  ENSG00000147144_11 (sequence is synthesized)
cgcctccctcttcgtagctcgcacccgccgcagcaacagttctgaggccctgctggtggaccgggccgctggtgggggagctggctccccgcctgcccctctggctccctctgcctctgg

SEQ ID NO: 404413 - DNA, 120 bp, Artificial Sequence
  ENSG00000147144_12 (sequence is synthesized)
ccccccagtctgcaagagcagtgaggtgctgtatgagcgcccccaaccaacccctgccttctcctcccgcacagcaggccccccagaccctccccgggccgcccggcctagctcagctgc

SEQ ID NO: 404414 - DNA, 120 bp, Artificial Sequence
  ENSG00000147144_13 (sequence is synthesized)
ccctgcctcccgaggtgccccccggctcccacctgtgtgtggagacttcctcttggactattccttggaccggggcctgccccgcagtggcggtggaacaggctggggggagctgccgcc

SEQ ID NO: 404415 - DNA, 120 bp, Artificial Sequence
  ENSG00000147144_14 (sequence is synthesized)
tgcagctgaggtcccaggacccctctcccgccgggatgggctcctcaccatgctccccggcccaccacctgtgtatgcagctgacagcaacagccccctcctccgcaccaaggaccccca

SEQ ID NO: 404416 - DNA, 120 bp, Artificial Sequence
  ENSG00000147144_15 (sequence is synthesized)
cacccgtgccacccgcactaagccctgtggcctgcccccagaggctgccgaaggccctgaggtgcatccaaaccctctgctgtggatgcccccacccacccgtatcccctcggctggtga

SEQ ID NO: 404417 - DNA, 120 bp, Artificial Sequence
  ENSG00000147144_16 (sequence is synthesized)
acgcagtggccacaagaacctggctctggaggggctgcgggactggtacatccggaactcgggactggctgcggggccccagcgccggcctgtgctcccttccgtgggcccgccacaccc

SEQ ID NO: 404418 - DNA, 120 bp, Artificial Sequence
  ENSG00000147144_17 (sequence is synthesized)
acccttcctccatgcccgctgctatgaggtgggccaggcgctgtacggggcccccagccaggcgccactcccacactcgaggagtttcacggcgccccctgtctctggcaggtatggggg

SEQ ID NO: 404419 - DNA, 120 bp, Artificial Sequence
  ENSG00000147144_18 (sequence is synthesized)
gtgcttttactgatgggtaggggtctcgtaaggcagatggcgaagatatccaggccagggagtggctagtcatgatagctaatgaattggaccatgaggaaactagctgctgtgatggca

SEQ ID NO: 404420 - DNA, 120 bp, Artificial Sequence
  ENSG00000147144_19 (sequence is synthesized)
cagggtcactctactgcacatgacctgcattagtccatggggtcctggtggaggggatcttgggcactggtagcagcaattctttatcaagttataggctgaagatgagccttgaagcca

SEQ ID NO: 404421 - DNA, 120 bp, Artificial Sequence
  ENSG00000147144_20 (sequence is synthesized)
accctctaggctaggctgagcggcggaggtggccgtgccgctggaagcggacagacccgagttagaggtgggggcgggggtccatcgcccgcggccgggccggcgctcccctcctaccct

SEQ ID NO: 404422 - DNA, 120 bp, Artificial Sequence
  ENSG00000147144_21 (sequence is synthesized)
ccccgcgacccccgtctggcccccacggctaacggtagcgcagccgaacacggcccacgggcagggcgccgaagaggagcaggcgcgcgcccggggacgagcagggcgcagtgagggagg

SEQ ID NO: 404423 - DNA, 120 bp, Artificial Sequence
  ENSG00000147144_22 (sequence is synthesized)
ccgggaggaagggacatctcatgccccttgctgttttcttccttttttctccatgccccagagcctgaaagtgctgtcctgtgcctgcctccacctctttaacgagcctcttttcctttc

SEQ ID NO: 404424 - DNA, 120 bp, Artificial Sequence
  ENSG00000147144_23 (sequence is synthesized)
ctaaagatactacgcggacttcctgtatcccccggagctgagcgctcgtttaagtgacctgacgctagagggggagcagtcctccagttctgacacccagaccccggggacactggtctg

SEQ ID NO: 404425 - DNA, 120 bp, Artificial Sequence
  ENSG00000147144_24 (sequence is synthesized)
accccttctgatatgtcccttgttggcctgggcacgattccaatctggggagcacacagctgacctcgctgggccctggggtgtggttgctctcagtcctgagcagagtgcgccaaccta

SEQ ID NO: 404426 - DNA, 120 bp, Artificial Sequence
  ENSG00000147144_25 (sequence is synthesized)
atcttccaaggcccctggctccccgtaggcccaggaaggtgtctgacaccctgcttcttctctcacactgtgctggggactgggggccctcagctagcttaaaagaggggggatgatgtc

SEQ ID NO: 404427 - DNA, 120 bp, Artificial Sequence
  ENSG00000147144_26 (sequence is synthesized)
atggggaccccaagccccttcctccatttatgtttacagttgtgacttaggtattcactgtcttcctccaacactaggcgttttacaaaagggaaactgtgatctcatctggttgggttc

SEQ ID NO: 404428 - DNA, 120 bp, Artificial Sequence
  ENSG00000147144_27 (sequence is synthesized)
attcctgttcccatgcccaaccaggttccattcaggaaccccctccataaaatggaccatatcgggtctcagggccatttagggcagccaggagactccggtgtgaacagaaatccctgc

SEQ ID NO: 404429 - DNA, 120 bp, Artificial Sequence
  ENSG00000147144_28 (sequence is synthesized)
cacgcatcgccagggcagttggggcagtgggctctctgcccacacttggaaggactgcagtctgggtgggatgcctgaaagagcccaaccccctctgtgcccatggcctctgccctgacc

SEQ ID NO: 404430 - DNA, 120 bp, Artificial Sequence
  ENSG00000147144_29 (sequence is synthesized)
acccccagtcaggaggccccacaggaggggcacccggtagatgccagtgaaatcctcaggtgaggtctgcctacgggccacgggccactcaccactcacaccttccttggctttccttcc

SEQ ID NO: 404431 - DNA, 120 bp, Artificial Sequence
  ENSG00000147144_30 (sequence is synthesized)
tacagccgtgagccactgcacccagccccaatccaccactttttaagcaaacccacacaagttgtgttttctatgatacctgtctgtgattttcggagctgggggttcccctaccccctt

SEQ ID NO: 404432 - DNA, 120 bp, Artificial Sequence
  ENSG00000147144_31 (sequence is synthesized)
gggggttcccctacccccttttcctggcgttaagcttttctttttataccagtggatctggacccaagacattacccacactggaaggggatttgtataataaatgtgtaaactgaaccc

SEQ ID NO: 404433 - DNA, 120 bp, Artificial Sequence
  ENSG00000147144_32 (sequence is synthesized)
actgctgctgactgccactaccagccggagccagggcctggtcgagacaactatttttgaggtatctgaggctaccccacagcactctctggcattggcaagactcgtggctgtgaccca

SEQ ID NO: 404434 - DNA, 120 bp, Artificial Sequence
  ENSG00000147144_33 (sequence is synthesized)
atactgagtgcctgccatctgctaggaattagtgttttacgtggcatcaactcatttaatcataatcagatccctgtgaggtgggtgctattgttattcccattttatagatgaggcaag

SEQ ID NO: 404435 - DNA, 120 bp, Artificial Sequence
  ENSG00000147144_34 (sequence is synthesized)
tgaggcacagaaaggttaagtaacttgttagtaaactgaagtcctggagtttgagcccaggcaagttttactctagagtccatgcttttaaccactgtcctcttctgcttcttaaacaga

SEQ ID NO: 404436 - DNA, 120 bp, Artificial Sequence
  ENSG00000147144_35 (sequence is synthesized)
gtgcctactttccccaggctctgaacaaaaccaagtccccttccttgtggggcttgcattctgtgaacggtggctgttgggatggtagctttgggtggttcatacgtatggtcggataga

SEQ ID NO: 404437 - DNA, 120 bp, Artificial Sequence
  ENSG00000147144_36 (sequence is synthesized)
gaattcaggcagggttttacatgtgagccctaaggcctaggacttaatcctggaggccgtgcgagccatgagaacggccttagcagggggaggggtcagctggattaggaacagccccct

SEQ ID NO: 404438 - DNA, 120 bp, Artificial Sequence
  ENSG00000147144_37 (sequence is synthesized)
gcccggcatctactctgctagcctttcctctgagtccctacacagatttacacctcccttggagctaacagtgccaggcctcccccacgcatttctacccctgaccgcctagcctaggat

SEQ ID NO: 404439 - DNA, 120 bp, Artificial Sequence
  ENSG00000147144_38 (sequence is synthesized)
agaacctcagctgccctttacatgtcactacctgccacctttatacacacagcttccaaccttgggcccatttggagatgtgaaagtgaaggcttagaaagggctggggtagggagggca

SEQ ID NO: 404440 - DNA, 120 bp, Artificial Sequence
  ENSG00000147145_0 (sequence is synthesized)
gtcctgtttgctaaaggcatgcgggctacagcattcaagagagggagtcgttaacaaagggaaagagataaatgtaaataagctcacatttacagaatgagcggtttgcagtaaaaagct

SEQ ID NO: 404441 - DNA, 83 bp, Artificial Sequence
  ENSG00000147145_1 (sequence is synthesized)
agctcacatttacagaatgagcggtttgcagtaaaaagctgcggcagcccagagtctgctactttaggctgggctaacctttc

SEQ ID NO: 404442 - DNA, 120 bp, Artificial Sequence
  ENSG00000147145_2 (sequence is synthesized)
acatgtttattagctaattatctacaggcatcagcacattctctcatctagcacactctttcttggggaggaaaatatttcctaccggtccatagtgtcagagtggtgaacccctgcagc

SEQ ID NO: 404443 - DNA, 120 bp, Artificial Sequence
  ENSG00000147145_3 (sequence is synthesized)
cagcaggcctcctgaaaaaaaagtccatgggtgacagaagattcattgacttccaattccaagattcaaattcaagcctcagacccaggttgggcaatgctactgccaataatacttgca

SEQ ID NO: 404444 - DNA, 120 bp, Artificial Sequence
  ENSG00000147145_4 (sequence is synthesized)
ttgttgatgattccttcaagtataatctcaatggtgctgtctacagtgttgtattcatcttgggtctgataaccaacagtgtctctctgtttgtcttctgtttccgcatgaaaatgagaa

SEQ ID NO: 404445 - DNA, 120 bp, Artificial Sequence
  ENSG00000147145_5 (sequence is synthesized)
gtgagactgctatttttatcaccaatctagctgtctctgatttgctttttgtctgtacactaccttttaaaatattttacaacttcaaccgccactggccttttggtgacaccctctgca

SEQ ID NO: 404446 - DNA, 120 bp, Artificial Sequence
  ENSG00000147145_6 (sequence is synthesized)
agatctctggaactgcattccttaccaacatctatgggagcatgctctttctcacctgtattagtgtggatcgtttcctggccattgtctatccttttcgatctcgtactattaggacta

SEQ ID NO: 404447 - DNA, 120 bp, Artificial Sequence
  ENSG00000147145_7 (sequence is synthesized)
ggaggaattctgccattgtgtgtgctggtgtctggatcctagtcctcagtggcggtatttcagcctctttgttttccaccactaatgtcaacaatgcaaccaccacctgctttgaaggct

SEQ ID NO: 404448 - DNA, 120 bp, Artificial Sequence
  ENSG00000147145_8 (sequence is synthesized)
tctccaaacgtgtctggaagacttatttatccaagatcacaatatttattgaagttgttgggtttatcattcctctaatattgaatgtctcttgctcttctgtggtgctgagaactcttc

SEQ ID NO: 404449 - DNA, 120 bp, Artificial Sequence
  ENSG00000147145_9 (sequence is synthesized)
gcaagcctgctactctgtctcaaattgggaccaataagaaaaaagtactgaaaatgatcacagtacatatggcagtctttgtggtatgctttgtaccctacaactctgtcctcttcttgt

SEQ ID NO: 404450 - DNA, 120 bp, Artificial Sequence
  ENSG00000147145_10 (sequence is synthesized)
gaactgttgttttgaccctttcatctattacttcacccttgaatcctttcagaagtccttctacatcaatgcccacatcagaatggagtccctgtttaagactgaaacacctttgaccac

SEQ ID NO: 404451 - DNA, 120 bp, Artificial Sequence
  ENSG00000147145_11 (sequence is synthesized)
aaagccttcccttccagctattcaagaggaagtgagtgatcaaacaacaaataatggtggtgaattaatgctagaatccaccttttaggtatgagaaatgtgttcaggtccagatatggt

SEQ ID NO: 404452 - DNA, 120 bp, Artificial Sequence
  ENSG00000147145_12 (sequence is synthesized)
ttctcctataatttttcctatgctataaactaaagatttgaagctaatgatactgagaataatgcaccaaatccagtcagatacatttgtttgaaggtatactgtagagtttttattgct

SEQ ID NO: 404453 - DNA, 120 bp, Artificial Sequence
  ENSG00000147145_13 (sequence is synthesized)
gttttgttcagtaattataggtcaaatctaattacaacaaccaagatggattgccaaactcttctgcttggttggaatttcattgtatcgcattatccaggtggctagtggcatttgata

SEQ ID NO: 404454 - DNA, 120 bp, Artificial Sequence
  ENSG00000147145_14 (sequence is synthesized)
atatagagatgactttgaaactttcaaaaaggtatttctattccaatgatatttggtaattaggttgggcctataaatatagaacaaattcagggatttttaaaaaattgtgttactact

SEQ ID NO: 404455 - DNA, 120 bp, Artificial Sequence
  ENSG00000147145_15 (sequence is synthesized)
tactgatatatgctagttttattttatttttttgaactgtcattgagtttattttagcacaagaatatttttagcctaacattattaataagaaatgtgtcaaatttttaacattggtaa

SEQ ID NO: 404456 - DNA, 120 bp, Artificial Sequence
  ENSG00000147145_16 (sequence is synthesized)
tgttatgtgcattttgaaaacagaaaacaaattgcgttggcatgtacgtgggtgggaagaaaaagaaaattaacaggatttacacaattataatcaccagcagtgtgagtttaaaaaact

SEQ ID NO: 404457 - DNA, 120 bp, Artificial Sequence
  ENSG00000147145_17 (sequence is synthesized)
tcgttgtttttacaccaaattaaaattttcatgtcaaacttcaaagccagaaagctgctaaatacgtgtctggcaggtaaaagctggaaaattacttaaaacaggaaagtgtcaataaaa

SEQ ID NO: 404458 - DNA, 120 bp, Artificial Sequence
  ENSG00000147145_18 (sequence is synthesized)
aaacttgagcaacaccaacatattttttcttaaaatgtcacgttatcttcattttgggaaactaggttctataaaatatttatcctccctgttatactttggagcacagcacagccagaa

SEQ ID NO: 404459 - DNA, 120 bp, Artificial Sequence
  ENSG00000147145_19 (sequence is synthesized)
aggggctgcatttgtgcccaggtcaggagcaaattgaaaaaaaaaataaagtaatacaaaaaaatcaaactataaagcaaaaacatttattaaaacctgaattaatcctttttggaggga

SEQ ID NO: 404460 - DNA, 120 bp, Artificial Sequence
  ENSG00000147145_20 (sequence is synthesized)
ggagtagagatatataacctgaaaatacttattctttcttatcgaattttggagcctaatatagccaggagctgctgaatttgtgcccctggattggaagcaaataaaaaaaaaaaacaa

SEQ ID NO: 404461 - DNA, 120 bp, Artificial Sequence
  ENSG00000147145_21 (sequence is synthesized)
tctccttaatattaaggaccctgcccaatggtaacagttgttgccaagaaaagaaaaaaagaaaaaaaaaagacccaatcacccattggaggaaatctctaactacagtgcctccaggaa

SEQ ID NO: 404462 - DNA, 120 bp, Artificial Sequence
  ENSG00000147145_22 (sequence is synthesized)
attggaacaatcaggccagtctttcagaatgtgtgctctctgcaagttaaagggagaaccaggaagatgcctcacagaaacattcaggccaagcttagctaaagcttgatctattcaatt

SEQ ID NO: 404463 - DNA, 120 bp, Artificial Sequence
  ENSG00000147145_23 (sequence is synthesized)
atttctggaggagtgtgaaaatcaactctccttaatattaagcacccattggaggaaatctctaactacagtgcctccaggaaactcattggttattccagtcttagataaaattggtgc

SEQ ID NO: 404464 - DNA, 120 bp, Artificial Sequence
  ENSG00000147155_0 (sequence is synthesized)
actaggggatgagcccgaactagggatgtgacagagcgcgagacccagcctaaagagagcccggagccagcgtgggaggccgctgccgtcgcgcgccttggtttttctgttccttttttt

SEQ ID NO: 404465 - DNA, 120 bp, Artificial Sequence
  ENSG00000147155_1 (sequence is synthesized)
tttttttttttaacttcctgcctatacacacgcagccatcagcccacaaagacatgactaccaacgcgggccccttgcacccatactggcctcagcacctaagactggacaactttgtac

SEQ ID NO: 404466 - DNA, 120 bp, Artificial Sequence
  ENSG00000147155_2 (sequence is synthesized)
ctaatgaccgccccacctggcatatactggctggcctcttctctgtcacaggggtcttagtcgtgaccacatggctgttgtcaggtcgtgctgcggttgtcccattggggacttggcggc

SEQ ID NO: 404467 - DNA, 120 bp, Artificial Sequence
  ENSG00000147155_3 (sequence is synthesized)
gactgtccctgtgctggtttgcagtgtgtgggttcattcacctggtgatcgagggctggttcgttctctactacgaagacctgcttggagaccaagccttcttatctcaactctggaaag

SEQ ID NO: 404468 - DNA, 120 bp, Artificial Sequence
  ENSG00000147155_4 (sequence is synthesized)
cagtgtgcatggaaaccatcacagcttgcctgtggggaccactcagcctgtgggtggtgatcgcctttctccgccagcatcccctccgcttcattctacagcttgtggtctctgtgggcc

SEQ ID NO: 404469 - DNA, 120 bp, Artificial Sequence
  ENSG00000147155_5 (sequence is synthesized)
agatctatggggatgtgctctacttcctgacagagcaccgcgacggattccagcacggagagctgggccaccctctctacttctggttttactttgtcttcatgaatgccctgtggctgg

SEQ ID NO: 404470 - DNA, 120 bp, Artificial Sequence
  ENSG00000147155_6 (sequence is synthesized)
tgctgcctggagtccttgtgcttgatgctgtgaagcacctcactcatgcccagagcacgctggatgccaaggccacaaaagccaagagcaagaagaactgaggagtggtggaccaggctc

SEQ ID NO: 404471 - DNA, 120 bp, Artificial Sequence
  ENSG00000147155_7 (sequence is synthesized)
gaacactggccgaggaggagctctctgcctgccagaagagtctagtcctgctcccacagtttggagggacaaagctaattgatctgtcacactcaggctcatgggcaggcacaagaaggg

SEQ ID NO: 404472 - DNA, 120 bp, Artificial Sequence
  ENSG00000147155_8 (sequence is synthesized)
gaataaaggggctgtgtgaaggcactgctgggagccattagaacacagatacaagagaagccaggaggtctatgatggtgacgatttttaaaatcaggaaataaaagatcttgactctaa

SEQ ID NO: 404473 - DNA, 120 bp, Artificial Sequence
  ENSG00000147155_9 (sequence is synthesized)
agagaacccactaggggatgagcccgaactagggatgtgacagagcgcgagacccagcctaaagagagcccggagccagcgtgggaggccgctgccgtcgcgcgccttggtcgtgctgcg

SEQ ID NO: 404474 - DNA, 120 bp, Artificial Sequence
  ENSG00000147155_10 (sequence is synthesized)
cccactaggggatgagcccgaactagggatgtgacagagcgcgagacccagcctaaagagagcccggagccagcgtgggaggccgctgccgtcgcgcgccttgccatcagcccacaaaga

SEQ ID NO: 404475 - DNA, 120 bp, Artificial Sequence
  ENSG00000147155_11 (sequence is synthesized)
agttaccccatttcacggatgaggaagcagacgcatgggaaggttatgaagtctgtcttcttgcagggacccccagctctcacaagtgtgtgttcctttcactgcctttattcttcatat

SEQ ID NO: 404476 - DNA, 120 bp, Artificial Sequence
  ENSG00000147155_12 (sequence is synthesized)
tgggcactagaggggttgatgggggatccacagacacagatgtatccctgtgggtgggatctctcaacggtgcccttccaggggtaagtcagactgaatgacaaaccccctgaggctctg

SEQ ID NO: 404477 - DNA, 120 bp, Artificial Sequence
  ENSG00000147155_13 (sequence is synthesized)
gaaaggtcatgcccttctctgagcctgcactctcaggtggggagggttcatttttcttcctcctcctccttctccatcacaaagtctcctgtgaaggttacatgaggtggcccagggtgg

SEQ ID NO: 404478 - DNA, 120 bp, Artificial Sequence
  ENSG00000147155_14 (sequence is synthesized)
caagaagcccctggaacctccaggatcagggctctgagatcccttcatgtaagattctgtcatattttttttaaaacagggtctggctctgtcacccaggccagagtgctatggtgtgat

SEQ ID NO: 404479 - DNA, 120 bp, Artificial Sequence
  ENSG00000147155_15 (sequence is synthesized)
cctaaagagagcccggagccagcgtgggaggccgctgccgtcgcgcgccttgcgctgcacgccagacaccggcctttcaatatccgtctcttccctgcaggttgacggcgttgcacgctc

SEQ ID NO: 404480 - DNA, 120 bp, Artificial Sequence
  ENSG00000147160_0 (sequence is synthesized)
ggcacaatgctcttgccctctaagaaggacctcaagactgccctggatgtctttgctgttttccagtggtccttcagtgccttgcttatcacaaccactgtgattgctgtcaacctctac

SEQ ID NO: 404481 - DNA, 120 bp, Artificial Sequence
  ENSG00000147160_1 (sequence is synthesized)
ctggtggtgttcacaccatactggcctgtcactgtgcttattcttacctggctggcttttgactggaagacccctcagcgaggcggccgccggtttacctgtgtgaggcactggcgcctg

SEQ ID NO: 404482 - DNA, 120 bp, Artificial Sequence
  ENSG00000147160_2 (sequence is synthesized)
tggaaacactacagcgattatttccctctcaagcttctgaagactcatgacatctgccccagccgcaactacatcctcgtctgccaccctcatgggctctttgcccatggatggtttggc

SEQ ID NO: 404483 - DNA, 120 bp, Artificial Sequence
  ENSG00000147160_3 (sequence is synthesized)
cactttgccacagaggcctcaggcttctccaagatatttcctggcatcaccccttacatactcacactgggagcctttttctggatgcctttcctcagagaatatgtaatgtctacaggg

SEQ ID NO: 404484 - DNA, 120 bp, Artificial Sequence
  ENSG00000147160_4 (sequence is synthesized)
gcctgctctgtgagtcgatcctccattgactttctgctgactcataaaggcacaggcaacatggtcattgtggtgattggtggactggctgagtgcagatacagcctgccaggttcttct

SEQ ID NO: 404485 - DNA, 120 bp, Artificial Sequence
  ENSG00000147160_5 (sequence is synthesized)
accctggtgttgaagaaccggtctggctttgtgcgcatggcccttcagcatggggtgcctctaatacctgcctatgcctttggggagacggacctctatgatcagcacattttcactcct

SEQ ID NO: 404486 - DNA, 120 bp, Artificial Sequence
  ENSG00000147160_6 (sequence is synthesized)
ggtggctttgtcaaccgcttccagaagtggttccagagcatggtacacatctacccttgtgctttctatggacgtggcttcaccaagaactcctggggccttctgccctatagtcggcct

SEQ ID NO: 404487 - DNA, 120 bp, Artificial Sequence
  ENSG00000147160_7 (sequence is synthesized)
gtaaccaccatcgtcggggagcctctaccaatgcccaagattgagaatccaagccaggagatcgtggctaaatatcacacactctatattgatgccctacgtaaactgtttgaccagcat

SEQ ID NO: 404488 - DNA, 120 bp, Artificial Sequence
  ENSG00000147160_8 (sequence is synthesized)
tcttttctgccctttctttgcagctactggtgagatagtcccaagaaacagggaagagcctaggggagaggtgccctgacggcactttggtgccagcattgaggaaaacaatggacaaaa

SEQ ID NO: 404489 - DNA, 120 bp, Artificial Sequence
  ENSG00000147160_9 (sequence is synthesized)
taaaaagcccatcttctgataactgcgtgtgcaccaactactctgttttgaaggctctgggatgcatgtctctccttctctagctgtcaaacagccccatctcccggcattgagccccat

SEQ ID NO: 404490 - DNA, 120 bp, Artificial Sequence
  ENSG00000147160_10 (sequence is synthesized)
cttctggcattgagtcctgcttcctacaggagtaggactggggccttgagagccagtgggctttgagtttaagctccaccaacttcaagccatgtgactttggggcaatcagtcacctct

SEQ ID NO: 404491 - DNA, 120 bp, Artificial Sequence
  ENSG00000147160_11 (sequence is synthesized)
gagcctcctttcttcttctataaaatgagactaacaatctgtctcttgcttacctcaaaggccgttgggaagatcaaacaatattggatgtgattgaactttataaactggagagctaca

SEQ ID NO: 404492 - DNA, 120 bp, Artificial Sequence
  ENSG00000147160_12 (sequence is synthesized)
ccattttcttctccaaccattttacccatttcctgtccctgagcaaacaacgcccgaaataccctctgctacccactagccctcactcagtttctgcctcacaaagctgtaacagaatgg

SEQ ID NO: 404493 - DNA, 120 bp, Artificial Sequence
  ENSG00000147160_13 (sequence is synthesized)
gttgggctcaggcctaattttctctgtcattccctcagcaacttgcctatacttgtgtggccctataattctggcctttgtttgagagtcagccagcctgctcaggatgaaaatgaggcg

SEQ ID NO: 404494 - DNA, 120 bp, Artificial Sequence
  ENSG00000147160_14 (sequence is synthesized)
cctggcttttagcagccataaagaactctccttctgaatggcaagtctctcagactcttggtctaatggctgttgcaatgacaggctacaaaatttggctcacatccctctcattccatc

SEQ ID NO: 404495 - DNA, 120 bp, Artificial Sequence
  ENSG00000147160_15 (sequence is synthesized)
cctcttgggtgggtgccatttggtccagtgatttacctgcattacgttggtcaatttggtctacaacatcctgcgtgtttactgcagtgtgagctgctgcctctatcctgggtgcctgcc

SEQ ID NO: 404496 - DNA, 120 bp, Artificial Sequence
  ENSG00000147160_16 (sequence is synthesized)
tcatgtgatgatttgtatacagtggccaaagacatgcttctgcttttctgctgtctttgttacttcttgtgccagagattacgttttccctgagcttccataaagtgtttttaaacagtc

SEQ ID NO: 404497 - DNA, 120 bp, Artificial Sequence
  ENSG00000147160_17 (sequence is synthesized)
aagaaccggtctggctttgtgcgcatggcccttcagcatgggcagccaggggtaggccatggagcccccacactcaacttggacctaggcacagctggactggggtctgagaagcctgta

SEQ ID NO: 404498 - DNA, 120 bp, Artificial Sequence
  ENSG00000147160_18 (sequence is synthesized)
ggcagacccagggatcatgcgccgtcagcgtgtctggcattcgacaaggtccctacctttctgggcttcagaagatatgcttttgctctgcagggtgcctctaatacctgcctatgcctt

SEQ ID NO: 404499 - DNA, 120 bp, Artificial Sequence
  ENSG00000147160_19 (sequence is synthesized)
caaaagtgttgcagggaaagaagaagagggggttttgatgaaaggacatccacagagagaggaggaagtatacaatacattcttacgaactatggtcatcagaaagataagttttatttg

SEQ ID NO: 404500 - DNA, 120 bp, Artificial Sequence
  ENSG00000147162_0 (sequence is synthesized)
atttcaagaccgtactaggtagatggtcaattagagttcccagggtttgaagcctgtaactgctgccgccgctcaagccctccagagcattgctacggctgctgcccttgtactactacc

SEQ ID NO: 404501 - DNA, 120 bp, Artificial Sequence
  ENSG00000147162_1 (sequence is synthesized)
tccaaatacgttcttgctggtagtggcggcagcaggaccaattacctcttttttgctctccctcgagaagctccagatggcgtcttccgtgggcaacgtggccgacagcacagaaccaac

SEQ ID NO: 404502 - DNA, 120 bp, Artificial Sequence
  ENSG00000147162_2 (sequence is synthesized)
gaaacgtatgctttccttccaagggttagctgagttggcacatcgagaatatcaggcaggagattttgaggcagctgagagacactgcatgcagctctggagacaagagccagacaatac

SEQ ID NO: 404503 - DNA, 120 bp, Artificial Sequence
  ENSG00000147162_3 (sequence is synthesized)
tggtgtgcttttattactttcatctatacacttccagtgtcgaaggctggacagatctgctcactttagcactctggcaattaaacagaacccccttctggcagaagcttattcgaattt

SEQ ID NO: 404504 - DNA, 120 bp, Artificial Sequence
  ENSG00000147162_4 (sequence is synthesized)
ggggaatgtgtacaaggaaagagggcagttgcaggaggcaattgagcattatcgacatgcattgcgtctcaaacctgatttcatcgatggttatattaacctggcagccgccttggtagc

SEQ ID NO: 404505 - DNA, 120 bp, Artificial Sequence
  ENSG00000147162_5 (sequence is synthesized)
agcgggtgacatggaaggggcagtacaagcttacgtctctgctcttcagtacaatcctgatttgtactgtgttcgcagtgacctggggaacctgctcaaagccctgggtcgcttggaaga

SEQ ID NO: 404506 - DNA, 120 bp, Artificial Sequence
  ENSG00000147162_6 (sequence is synthesized)
agccaaggcatgttatttgaaagcaattgagacgcaaccgaactttgcagtagcttggagtaatcttggctgtgttttcaatgcacaaggggaaatttggcttgcaattcatcactttga

SEQ ID NO: 404507 - DNA, 120 bp, Artificial Sequence
  ENSG00000147162_7 (sequence is synthesized)
aaaggctgtcacccttgacccaaactttctggatgcttatatcaatttaggaaatgtcttgaaagaggcacgcatttttgacagagctgtggcagcttatcttcgtgccctaagtttgag

SEQ ID NO: 404508 - DNA, 120 bp, Artificial Sequence
  ENSG00000147162_8 (sequence is synthesized)
tccaaatcacgcagtggtgcacggcaacctggcttgtgtatactatgagcaaggcctgatagatctggcaatagacacctacaggcgggctatcgaactacaaccacatttccctgatgc

SEQ ID NO: 404509 - DNA, 120 bp, Artificial Sequence
  ENSG00000147162_9 (sequence is synthesized)
ttactgcaacctagccaatgctctcaaagagaagggcagtgttgctgaagcagaagattgttataatacagctctccgtctgtgtcccacccatgcagactctctgaataacctagccaa

SEQ ID NO: 404510 - DNA, 120 bp, Artificial Sequence
  ENSG00000147162_10 (sequence is synthesized)
tatcaaacgagaacagggaaacattgaagaggcagttcgcttgtatcgtaaagcattagaagtcttcccagagtttgctgctgcccattcaaatttagcaagtgtactgcagcagcaggg

SEQ ID NO: 404511 - DNA, 120 bp, Artificial Sequence
  ENSG00000147162_11 (sequence is synthesized)
aaaactgcaggaagctctgatgcattataaggaggctattcgaatcagtcctacctttgctgatgcctactctaatatgggaaacactctaaaggagatgcaggatgttcagggagcctt

SEQ ID NO: 404512 - DNA, 120 bp, Artificial Sequence
  ENSG00000147162_12 (sequence is synthesized)
gcagtgttatacgcgtgccatccaaattaatcctgcatttgcagatgcacatagcaatctggcttccattcataaggattcagggaatattccagaagccatagcttcttaccgcacggc

SEQ ID NO: 404513 - DNA, 120 bp, Artificial Sequence
  ENSG00000147162_13 (sequence is synthesized)
tctgaaacttaagcctgattttcctgatgcttattgtaacttggctcattgcctgcagattgtctgtgattggacagactatgatgagcgaatgaagaagttggtcagtattgtggctga

SEQ ID NO: 404514 - DNA, 120 bp, Artificial Sequence
  ENSG00000147162_14 (sequence is synthesized)
ccagttagagaagaataggttgccttctgtgcatcctcatcatagtatgctatatcctctttctcatggcttcaggaaggctattgctgagaggcacggcaacctgtgcttagataagat

SEQ ID NO: 404515 - DNA, 120 bp, Artificial Sequence
  ENSG00000147162_15 (sequence is synthesized)
taatgttcttcataaaccaccatatgaacatccaaaagacttgaagctcagtgatggtcggctgcgtgtaggatatgtgagttccgactttgggaatcatcctacttctcaccttatgca

SEQ ID NO: 404516 - DNA, 120 bp, Artificial Sequence
  ENSG00000147162_16 (sequence is synthesized)
gtctattccaggcatgcacaatcctgataaatttgaggtgttctgttatgccctgagcccagacgatggcacaaacttccgagtgaaggtgatggcagaagccaatcatttcattgatct

SEQ ID NO: 404517 - DNA, 120 bp, Artificial Sequence
  ENSG00000147162_17 (sequence is synthesized)
ttctcagattccatgcaatggaaaagcagctgatcgcatccatcaggatggaattcatatccttgtaaatatgaatggctatactaagggcgctcgaaatgagctttttgctctcaggcc

SEQ ID NO: 404518 - DNA, 120 bp, Artificial Sequence
  ENSG00000147162_18 (sequence is synthesized)
agctcctattcaggcaatgtggctgggataccctgggacgagtggtgcgcttttcatggattatattatcactgatcaggaaacttcgccagctgaagttgctgagcagtattccgagaa

SEQ ID NO: 404519 - DNA, 120 bp, Artificial Sequence
  ENSG00000147162_19 (sequence is synthesized)
attggcttatatgccccacactttttttattggtgatcatgctaatatgttccctcacctgaagaaaaaagcagtcatcgattttaagtccaatgggcacatttatgacaatcggatagt

SEQ ID NO: 404520 - DNA, 120 bp, Artificial Sequence
  ENSG00000147162_20 (sequence is synthesized)
tctgaatggcatcgacctcaaagcatttcttgatagtctaccagatgtgaaaattgtcaagatgaagtgtcctgatggaggagacaatgcagatagcagtaacacagctcttaatatgcc

SEQ ID NO: 404521 - DNA, 120 bp, Artificial Sequence
  ENSG00000147162_21 (sequence is synthesized)
tgttattcctatgaatactattgcagaagcagttattgaaatgattaaccgaggacagattcaaataacaattaatggattcagtattagcaatggactggcaactactcagatcaacaa

SEQ ID NO: 404522 - DNA, 120 bp, Artificial Sequence
  ENSG00000147162_22 (sequence is synthesized)
ttattgtaaccacccgttctcagtacgggttaccagaagatgccatcgtatactgtaactttaatcagttgtataaaattgacccttctactttgcagatgtgggcaaacattctgaagc

SEQ ID NO: 404523 - DNA, 120 bp, Artificial Sequence
  ENSG00000147162_23 (sequence is synthesized)
gtgttcccaatagtgtactctggctgttgcgttttccagcagtaggagaacctaatattcaacagtatgcacaaaacatgggcctgccccagaaccgtatcattttttcacctgttgctc

SEQ ID NO: 404524 - DNA, 120 bp, Artificial Sequence
  ENSG00000147162_24 (sequence is synthesized)
ctaaagaggaacacgtcaggagaggccagctggctgatgtctgcttggacactccactctgtaatgggcacaccacagggatggatgtcctctgggcagggacccccatggtgactatgc

SEQ ID NO: 404525 - DNA, 120 bp, Artificial Sequence
  ENSG00000147162_25 (sequence is synthesized)
caggagagactcttgcttctcgagttgcagcatcccagctcacttgcttaggttgtcttgagcttattgctaaaaacagacaagaatatgaagacatagctgtgaagctgggaactgatc

SEQ ID NO: 404526 - DNA, 120 bp, Artificial Sequence
  ENSG00000147162_26 (sequence is synthesized)
tagaatacctgaagaaagttcgtggcaaagtctggaagcaaagaatatctagccctctgttcaacaccaaacaatacacaatggaactagagcggctctatctacagatgtgggagcatt

SEQ ID NO: 404527 - DNA, 120 bp, Artificial Sequence
  ENSG00000147162_27 (sequence is synthesized)
atgcagctggcaacaaacctgaccacatgattaagcctgttgaagtcactgagtcagcataaataaagactgcacaggagaattacccctatacctgagcctcaaccttctgggggaaag

SEQ ID NO: 404528 - DNA, 120 bp, Artificial Sequence
  ENSG00000147162_28 (sequence is synthesized)
ggaactagataacatacttcttacttgtctgtacagtaccttgttgcagatgggtgatatataatggtaatagaatagcacagccagacttgcttcctgcatggtagggagagacacaaa

SEQ ID NO: 404529 - DNA, 120 bp, Artificial Sequence
  ENSG00000147162_29 (sequence is synthesized)
agatgggaaactgcttttccacaaggaatctccgtagaattttgcggcgaccagatggtgcataggtctggaaggtctgatctcccttggtcttccatgggatggttagtgtggagggga

SEQ ID NO: 404530 - DNA, 120 bp, Artificial Sequence
  ENSG00000147162_30 (sequence is synthesized)
gatatagattgtccggccgctttgtgattccatggattgattcagtcttctggatttttttttctttatattttgggtactggagcttttaaaaatgtttggtttcaggtatttttattc

SEQ ID NO: 404531 - DNA, 120 bp, Artificial Sequence
  ENSG00000147162_31 (sequence is synthesized)
atgtgaagtgtatatgattctcttgagataaggttttaagctaaaatgttactccctgttttagtttctgaactctgacagattgacagggactttgctggtgtagtctttttataggtt

SEQ ID NO: 404532 - DNA, 120 bp, Artificial Sequence
  ENSG00000147162_32 (sequence is synthesized)
ttataaaccacttgagcctatatcagtcgttttagtgtctgacctaatatttggagctatcagtgctttgttgatttagatgatgactcaagattttttctggtccatttcccatttcct

SEQ ID NO: 404533 - DNA, 120 bp, Artificial Sequence
  ENSG00000147162_33 (sequence is synthesized)
tttcttccctgacccccataccctcacccttaaaattctcctgtaactcaactaacaaaatcaagcctgattcaaaacatcctagggtgttttaaacacaccatctggtgccaaatgaag

SEQ ID NO: 404534 - DNA, 120 bp, Artificial Sequence
  ENSG00000147162_34 (sequence is synthesized)
atttttaggagtgattactaattatcaagggcacagttgtggtactgtcattgataataatatagtttttttttttttcctaattttgacctgtttcaccagtgttttacccttgactgc

SEQ ID NO: 404535 - DNA, 120 bp, Artificial Sequence
  ENSG00000147162_35 (sequence is synthesized)
cccttctatgctgcttccaaaagtgatagtgtgtgtaagatttttaccttcctttctaaagttttttttttttttttttaagtgagtcctgttcttcctatttctttcagcagaaatgaa

SEQ ID NO: 404536 - DNA, 120 bp, Artificial Sequence
  ENSG00000147162_36 (sequence is synthesized)
atcccaggtaagtataagtattcaagtatttgatcagtaagtcacagttatctccagtgcattaaataaccttcatcaagaaataggttataggtaaaatctctgaaggatcatctatgt

SEQ ID NO: 404537 - DNA, 120 bp, Artificial Sequence
  ENSG00000147162_37 (sequence is synthesized)
attcaagtaattattttttagataataactgtcttctggacttggtcttgaagtctgtacagattcagcctcagtagtagcgaactgcactgctgtttggtttggagtacaaattagact

SEQ ID NO: 404538 - DNA, 120 bp, Artificial Sequence
  ENSG00000147162_38 (sequence is synthesized)
tatagtcctcctggaacttgagttattaaaatcataggaataaaattatgggatctcaacaaagggtcgagggtttgaggcttaaacaagccaacatatgaatatatgttttgtctcgct

SEQ ID NO: 404539 - DNA, 120 bp, Artificial Sequence
  ENSG00000147162_39 (sequence is synthesized)
atactgcacttacgctatccagttgcaggtaattttttgtctgctagtagtgttctagattatgtctttccaaagcgctgaggctgtgcacctattctgtagttgcagctgatgcctgaa

SEQ ID NO: 404540 - DNA, 120 bp, Artificial Sequence
  ENSG00000147162_40 (sequence is synthesized)
tgtatcctagctgacaaattattgattaataagaacttgaatttctggaagattcttactgttaaccaaattttgagcaaggagtctcaaaggtaattctgaaccagaattacatgttaa

SEQ ID NO: 404541 - DNA, 120 bp, Artificial Sequence
  ENSG00000147162_41 (sequence is synthesized)
tgaacagtgtaccttttaacagtgtaaatcacggaatatccgtgaagggatttcttaatttattttttaccggttgattgaaatatcagttaaaggttgccagcatggttgcagataaac

SEQ ID NO: 404542 - DNA, 120 bp, Artificial Sequence
  ENSG00000147162_42 (sequence is synthesized)
tgatgtttgaaattcgctgaaatacttaatgtggaataggataatatacttccaatgccctcaaggctgtgaccttacagccattttacatagcacatcattcctcctatagggatgaac

SEQ ID NO: 404543 - DNA, 120 bp, Artificial Sequence
  ENSG00000147162_43 (sequence is synthesized)
tttttcctggcacgaaaagtagccgctctggttgaagctttgcttattgtaacaggcttttatttccaggtaatatgtcttggaagacttaattctgattagagatatagatattactgg

SEQ ID NO: 404544 - DNA, 120 bp, Artificial Sequence
  ENSG00000147162_44 (sequence is synthesized)
aaactaattgttttttttctattgtactctgctttatcaaagaagtaaaacatttaaatcgtactacagaaattaagatgttgtcttgcgatccttaataaatgaatgatttccctttaa

SEQ ID NO: 404545 - DNA, 120 bp, Artificial Sequence
  ENSG00000147162_45 (sequence is synthesized)
tcaggataaactaagaggagaagaggtgtacctcattatgtttgaaacaagaagaggtataaaatagaggaagaggtagaatttgagaatgaatagacttggaaaaagtagagacaaatt

SEQ ID NO: 404546 - DNA, 120 bp, Artificial Sequence
  ENSG00000147162_46 (sequence is synthesized)
taaacatcagtattatgaaaacttgtactttttgccaagtcttcaactcttcattgagctatcttcacaaaacagtcctttgaaactgaggaaaactgacggcacgaatcgcctcagaat

SEQ ID NO: 404547 - DNA, 120 bp, Artificial Sequence
  ENSG00000147162_47 (sequence is synthesized)
agagcagggccaggctttggcatatctgttctaaatctgggggtaaagcaagaacctgaacattttggagcctttctgctgagctagaccatctttataacactgggctccgtcatgatc

SEQ ID NO: 404548 - DNA, 120 bp, Artificial Sequence
  ENSG00000147162_48 (sequence is synthesized)
ttatgtgggaataaataacattccttcaaatctgaggcttgcctgctggtgacaagcagagcgcctgtgatttggctcaagactcctatatgatgcaggtgccattgaaaatgctgctct

SEQ ID NO: 404549 - DNA, 120 bp, Artificial Sequence
  ENSG00000147162_49 (sequence is synthesized)
tctaagtcctttgtggcttgtaagtggagaagaatttcatccaaatgttaccctgtaatactggcatttaaaattcttatttaaccttcctcccttcatcttcctcaccctttttacagt

SEQ ID NO: 404550 - DNA, 120 bp, Artificial Sequence
  ENSG00000147162_50 (sequence is synthesized)
ggaagaaaggctgttaaaatgattacaaattaataattggaacatcctgtcccttgtccccactcccttcccaagttcctttttcctcttttccaatcctagttgtctaccttcttttct

SEQ ID NO: 404551 - DNA, 120 bp, Artificial Sequence
  ENSG00000147162_51 (sequence is synthesized)
tcctcatttccttcttttattcctccccaccccaaccccttaaaaaaaaggtcagaaggacaaagctggtttgtttgggaaatggactgatcgaaagaaaacttgccaaagtggaaaggt

SEQ ID NO: 404552 - DNA, 120 bp, Artificial Sequence
  ENSG00000147162_52 (sequence is synthesized)
ggcttttagcattctgtgtttccaaataatgaatttgaacaccaggttgggttaattaaagcttttggtataatttaaaattaaatttataaatgcagttgtcttgttacaagccacctt

SEQ ID NO: 404553 - DNA, 120 bp, Artificial Sequence
  ENSG00000147162_53 (sequence is synthesized)
acgcaaccgcgctgcaggggtgaggagtggggagaaaccagaatgcttctgaaactcccacctgttgctctgagccccacgcgcatgctaatgcgtggagtgtatgcgcagagtagctgt

SEQ ID NO: 404554 - DNA, 120 bp, Artificial Sequence
  ENSG00000147162_54 (sequence is synthesized)
ctgtttgactgcttcatccagggagggagaaggcttttcagcaccatctaatgttttaaaaggcactagttttaagtgcacagctcataaattctgctgacattttggattaaccttatg

SEQ ID NO: 404555 - DNA, 120 bp, Artificial Sequence
  ENSG00000147162_55 (sequence is synthesized)
taggttgccagctaatgaattgtaattgatttcaatcttagctgataaatctaattggtaatttatagaacaaatatttgataagctcctattaattgtcaccccaccaagcggacagct

SEQ ID NO: 404556 - DNA, 120 bp, Artificial Sequence
  ENSG00000147162_56 (sequence is synthesized)
aacatgaattgcacttcactgcagctttagagatcggtttaggctgagacattgcgcctgccttaggttgctgacttctttatttcagagctctggagacacctagtttgaaaaatgtta

SEQ ID NO: 404557 - DNA, 120 bp, Artificial Sequence
  ENSG00000147162_57 (sequence is synthesized)
ttctgtttttttgtgagaacttagtaaacaagaaaatactcttgagtgaaatgcaatgtatttcttttgtaatcagtgcatttgaaaattcaagccagcatattcctagtagatggaagc

SEQ ID NO: 404558 - DNA, 120 bp, Artificial Sequence
  ENSG00000147162_58 (sequence is synthesized)
aaaattaagttgtctttgtagaaaatgaagagcctttcttccagcaaaaatccctgctgtatgcaatagccctgattaaccctctcccttctgcatgtttcccatattacagacttgaga

SEQ ID NO: 404559 - DNA, 120 bp, Artificial Sequence
  ENSG00000147162_59 (sequence is synthesized)
ctgtcctcattcccatatgtaatagacatccaaagaatttcaattgctttgttgaacttttactaatgatcttgtttttattttctctcttgtttttggtttttcaccattgatattgta

SEQ ID NO: 404560 - DNA, 120 bp, Artificial Sequence
  ENSG00000147162_60 (sequence is synthesized)
tttagaaggtttcaggtgggtgaaacctcctattccatgcgtaaggtgcctcgctgaagggagctcgaggcctggatctagggcagacacacaacctcctcctcctcttccagcaaggaa

SEQ ID NO: 404561 - DNA, 120 bp, Artificial Sequence
  ENSG00000147162_61 (sequence is synthesized)
cgcaccgaaaagtcacatgatgagaaatatggtaacgggtttgtaactgccacagcaaaacaatttgcctccatgcctgaatcttctgtcttgtggcttcagaaacagcttaaaataatt

SEQ ID NO: 404562 - DNA, 120 bp, Artificial Sequence
  ENSG00000147162_62 (sequence is synthesized)
ttacaagcaagttatgtaagagaatgttttatactatagccacaattctgtcaaagataagtaaaagttaattgatattaaaaattattagagataatttacttagtaaaagcttctaac

SEQ ID NO: 404563 - DNA, 120 bp, Artificial Sequence
  ENSG00000147162_63 (sequence is synthesized)
taactcttcttgttgttcattttttttccttttttcttctttgtttggattgcagcattctgctcttctgatgatgcgctgtgaccctgcagtagcgcaaaggctgcgcagcgttaatgc

SEQ ID NO: 404564 - DNA, 120 bp, Artificial Sequence
  ENSG00000147162_64 (sequence is synthesized)
gcattgcgtgcgaatgaacccctgtgaacggttgactagatgagtaatctgattgactggctccctcagtcctattctgtagcctttttggataaaattgggttttaacatacctcgagt

SEQ ID NO: 404565 - DNA, 120 bp, Artificial Sequence
  ENSG00000147162_65 (sequence is synthesized)
ccaactaatctcattaaacaaatattctccatgggcctgtctagtagattaatggatctggttggccgtttgctgcgtctaggggtgttctatgtagcgcagcagttcgcagcgattgcg

SEQ ID NO: 404566 - DNA, 120 bp, Artificial Sequence
  ENSG00000147162_66 (sequence is synthesized)
cagtgcgatgctgttaggttgcgcaagcgatgtttgcgctcgcattacagggacctcaacctaggtgcaatcctgtcatgtgaggtttcagcttcagtcctccttgggagacggggcatt

SEQ ID NO: 404567 - DNA, 120 bp, Artificial Sequence
  ENSG00000147162_67 (sequence is synthesized)
gtgagaatgtaacttaaagcctggctttatgatatcctacttggcagaaagacatttttctcctcagtagcatagttttgatgttagtgaggaacattgttgaagagcagcatttcccaa

SEQ ID NO: 404568 - DNA, 120 bp, Artificial Sequence
  ENSG00000147162_68 (sequence is synthesized)
aatgtgtttcatagtattctaataaaatgcccaatgaaagaagagttccatggtcaactaagttcagggaaccctgttacactattaaaggcttagggaagtccagtaaagaaacctatt

SEQ ID NO: 404569 - DNA, 120 bp, Artificial Sequence
  ENSG00000147162_69 (sequence is synthesized)
ttccgaatttatttgatcatgaactcctttttttttcagccatacctcttaacacctcatagaacacactttgggaaacagtgggggtaggaaaactcggcctcaagttgcgccctctag

SEQ ID NO: 404570 - DNA, 120 bp, Artificial Sequence
  ENSG00000147162_70 (sequence is synthesized)
agagaactccagcatagagccttatagcaactgacttcccagttaagtcccagtgtaagggttggtctttggttggcagaactgaacatggtggtttgcacttgggttctggtggcgcag

SEQ ID NO: 404571 - DNA, 120 bp, Artificial Sequence
  ENSG00000147162_71 (sequence is synthesized)
gcgcaggagcagccagctgtggcagcgcattagttttggcgcaagcgagcctatgctgcagggtcacttttggctggtcagagaaggaataatgatatcaccttcttccccccctccccc

SEQ ID NO: 404572 - DNA, 120 bp, Artificial Sequence
  ENSG00000147162_72 (sequence is synthesized)
aaaggaaaggtgatagaaagtgagacttgttctcacttcattctcttcatctgcgttgtgtggaggcttaacataaataacattaactctgtgctgttttacgttctcagatgtgcagtt

SEQ ID NO: 404573 - DNA, 120 bp, Artificial Sequence
  ENSG00000147162_73 (sequence is synthesized)
tgatacttaaatatttgaacttgaaatttttccagtaccgggtttcaactgagccgccaacgcacatctgctctcttgcccacttgtgacatgcccagctgccagtttttctccttcctt

SEQ ID NO: 404574 - DNA, 120 bp, Artificial Sequence
  ENSG00000147162_74 (sequence is synthesized)
ttgtggtggtggttatattatcagtatgactagggaccttttctagatttttctatctgggtctgctgctttctagactctgttcaggtaataaattattatcaatgtatatctgagcat

SEQ ID NO: 404575 - DNA, 61 bp, Artificial Sequence
  ENSG00000147162_75 (sequence is synthesized)
ctgctcactttagcactctggcaattaaacagaacccccttctggcagaagcttattcgaa

SEQ ID NO: 404576 - DNA, 120 bp, Artificial Sequence
  ENSG00000147162_76 (sequence is synthesized)
ggttgagggtaagaataccaaaaaatatcaattttctgtagcattaccagccattaggcttaattaaacaattattagaacagtatcagtggaggctttatgattctgtacagtttttga

SEQ ID NO: 404577 - DNA, 120 bp, Artificial Sequence
  ENSG00000147164_0 (sequence is synthesized)
ccccggtcccaggctctccttcggaaagatgtcggacacggcagtagctgatacccggcgccttaactcgaagccgcaggacctgaccgacgcttacgggccgccaagtaacttcctgga

SEQ ID NO: 404578 - DNA, 120 bp, Artificial Sequence
  ENSG00000147164_1 (sequence is synthesized)
gatcgacatctttaatcctcagacggtgggcgtgggacgcgcgcgcttcaccacctatgaggttcgcatgcggacaaacctacctatcttcaagctaaaggagtcctgcgtacggcggcg

SEQ ID NO: 404579 - DNA, 120 bp, Artificial Sequence
  ENSG00000147164_2 (sequence is synthesized)
ctacagtgactttgagtggctgaaaaatgagctggagagagatagcaagattgtagtaccaccactgcctgggaaagccttgaagcggcagctccctttccgaggagatgaagggatctt

SEQ ID NO: 404580 - DNA, 120 bp, Artificial Sequence
  ENSG00000147164_3 (sequence is synthesized)
tgaggagtctttcatcgaagaaaggaggcagggcctcgagcagtttattaacaaaattgctgggcacccactggctcagaatgaacgctgcctacacatgttcctgcaagaggaggcaat

SEQ ID NO: 404581 - DNA, 120 bp, Artificial Sequence
  ENSG00000147164_4 (sequence is synthesized)
tgacaggaactacgtcccggggaaggtgcgccagtaggagcccctctcaccacctgccctctactttcctgctgaaatgacattggtttttacactaagcctctctctgtctttgatctg

SEQ ID NO: 404582 - DNA, 120 bp, Artificial Sequence
  ENSG00000147164_5 (sequence is synthesized)
aagttggctgcccatctcctggcctgatagactgtctggcattgtgctccctggtacctgactacaccatgtgggcactctgctaggatcctcttctctgaggagaggtgggaacccaca

SEQ ID NO: 404583 - DNA, 120 bp, Artificial Sequence
  ENSG00000147164_6 (sequence is synthesized)
ggcagatgccctttgcttggggttggggtgggtgggtggggggattagactggaaggcaatttcttgggcatttacccatgccagaaggctaacctggggggaggggggcgcttgtgctg

SEQ ID NO: 404584 - DNA, 120 bp, Artificial Sequence
  ENSG00000147164_7 (sequence is synthesized)
gtgaggcacttggatacatactgatgctgcaagttcaggggatttttcttactcttaggtttaaccaagaacactgagcagggaaaaaccctgcctttcctaactgcatgtattttttcc

SEQ ID NO: 404585 - DNA, 120 bp, Artificial Sequence
  ENSG00000147164_8 (sequence is synthesized)
tttttggaaaggtggtagagactcagaagctttccttgttttcttcaggcctgctcccagttttcttaacagtttcttttgttgctttctctctcccttgttgctttccatggcagtaat

SEQ ID NO: 404586 - DNA, 120 bp, Artificial Sequence
  ENSG00000147164_9 (sequence is synthesized)
agagtccaagcagtctgttgtatggagcagggtgtgtgggttttctgggcccatcattatggctgcttcagagtcagaagaaagccatagggcagtaggggagctcctattgcctagccc

SEQ ID NO: 404587 - DNA, 120 bp, Artificial Sequence
  ENSG00000147164_10 (sequence is synthesized)
ctctccctttgtggctcccactctagctgcctatttttgctcatcagctggtgagtcagtatgggccagcagttctccctccctaagcccttgctactttatgggttagctttgcaggtt

SEQ ID NO: 404588 - DNA, 120 bp, Artificial Sequence
  ENSG00000147164_11 (sequence is synthesized)
tggtggcttgaggggtgggggcaactcaccactgccaggtaactccctgaagggtgggagtggattatcttctaggctcttacccgcggtagggaagggcatcaacactgtcttccttcc

SEQ ID NO: 404589 - DNA, 120 bp, Artificial Sequence
  ENSG00000147164_12 (sequence is synthesized)
attctcctttcccccatcccatttagtgctgccacagggcagaagcacacaaaccaaccacacagtctctgacttctcctaagcactttgagttgttgaatggggctcaggggcaagagt

SEQ ID NO: 404590 - DNA, 120 bp, Artificial Sequence
  ENSG00000147164_13 (sequence is synthesized)
ttttgctgccctccccagcgtggtcacagggttattgaactgcctgcacttgtttctcatgcaactccagcattttccccagaagttgaactatggatagcagcttggtatggatttcct

SEQ ID NO: 404591 - DNA, 120 bp, Artificial Sequence
  ENSG00000147164_14 (sequence is synthesized)
aaatcttaacatttgaagcagcttcttgaggctggcaactatcctggtttctgtcttggagggggtggtttgtttgctggggcccaacgtctgtcccaagtggtggggtgagagtaagtt

SEQ ID NO: 404592 - DNA, 120 bp, Artificial Sequence
  ENSG00000147164_15 (sequence is synthesized)
aactttggtgccaggtgagaggtgggggctctttgcttagactccctatcatggaaagattggagttttctatgcagggcactgtggaaaaggattgctgattctgactgaccctgatca

SEQ ID NO: 404593 - DNA, 120 bp, Artificial Sequence
  ENSG00000147164_16 (sequence is synthesized)
gagagattaggattgtattttgacataggatttggaacccatctaaatgttgaagttccctgagacagctctccagctgctgagcctgcgccaggggctaagcagcccctaatgagaggc

SEQ ID NO: 404594 - DNA, 120 bp, Artificial Sequence
  ENSG00000147164_17 (sequence is synthesized)
tctgctccctttcccacctcgccaatgttgttgttgctgcctttttgatttgtatcctctgttatagacattttttaaaaacgatttcctctttcattgtgcacaagtgctgagagtctg

SEQ ID NO: 404595 - DNA, 120 bp, Artificial Sequence
  ENSG00000147164_18 (sequence is synthesized)
aggccccatttctgctgtgtatatatatcctgactcggggcttttattcagcaaactgttcattcttctgtcagacaatgtcatattcaactctgttcatattaaaccactgtgaagcaa

SEQ ID NO: 404596 - DNA, 120 bp, Artificial Sequence
  ENSG00000147164_19 (sequence is synthesized)
ttttgattgccatttccttgggacagcctgaagagagaatcgaaagaagttcttttcagtatggttgcataacatcgagtcggagattgtgaaatgtcctttgagaaaaatgtacgggca

SEQ ID NO: 404597 - DNA, 120 bp, Artificial Sequence
  ENSG00000147166_0 (sequence is synthesized)
attcggcagccagactccttgaaataccctttcagtaatcattcaaccaacgcttccatgtctctactctgtcgtaacaaaggctgtgggcagcactttgaccctaataccaaccttcct

SEQ ID NO: 404598 - DNA, 120 bp, Artificial Sequence
  ENSG00000147166_1 (sequence is synthesized)
gattcctgttgccatcaccctggggtcccaatcttccatgatgcacttaagggttggtcctgctgccgaaagcgaactgtagatttctctgagttcttaaacatcaagggctgtactatg

SEQ ID NO: 404599 - DNA, 120 bp, Artificial Sequence
  ENSG00000147166_2 (sequence is synthesized)
ggaccacactgtgctgagaagcttcctgaggcccctcaacctgaaggccctgctacaagcagttcacttcaggagcaaaaacctctgaatgtgattccaaagtcagcagagaccttgcgc

SEQ ID NO: 404600 - DNA, 120 bp, Artificial Sequence
  ENSG00000147166_3 (sequence is synthesized)
cgggagaggcccaagtcagagttgcctctgaagctgctgccgctaaatatatcccaagccctggaaatggcattggaacagaaggaattagaccaggaacctggggcaggacttgacagt

SEQ ID NO: 404601 - DNA, 120 bp, Artificial Sequence
  ENSG00000147166_4 (sequence is synthesized)
ctgatccggactggttccagctgccagaacccaggatgtgatgctgtttaccaaggccctgagagtgatgctactccatgtacctaccacccaggagcaccccgattccatgaggggatg

SEQ ID NO: 404602 - DNA, 120 bp, Artificial Sequence
  ENSG00000147166_5 (sequence is synthesized)
tgactgggggaagcagctcccagcatcttgccgccatgattggcaccagacagattccttagtagtggtgactgtatatggccagattccacttcctgcgtttaactgggtgaaggccag

SEQ ID NO: 404603 - DNA, 120 bp, Artificial Sequence
  ENSG00000147166_6 (sequence is synthesized)
tcaaactgagcttcatgtccacattgtctttgatggtaaccgtgtgttccaagcacagatgaagctctggggggtcataaacgtggagcagagctctgtcttcttgatgccatctcgggt

SEQ ID NO: 404604 - DNA, 120 bp, Artificial Sequence
  ENSG00000147166_7 (sequence is synthesized)
tgaaatctccctggtcaaggctgacccaggatcctgggcccagctggagcaccctgatgcactagctaagaaggctagggcaggggttgtgttagagatggatgaggaagaatctgacga

SEQ ID NO: 404605 - DNA, 120 bp, Artificial Sequence
  ENSG00000147166_8 (sequence is synthesized)
ttcagatgatgatctgagctggacagaggaggaggaagaggaggaagcaatgggggaatagtgacaccagacagttgatgtctagataggacctcaatgattcccttagaatcttagata

SEQ ID NO: 404606 - DNA, 120 bp, Artificial Sequence
  ENSG00000147166_9 (sequence is synthesized)
ccaggatattgttggccatgtggcatcattgagcagcaggaggctgaaggaggggagaacaaaattgtccaaaccatgctgtttttttcccttaaataaatcttgtattcttcagtttca

SEQ ID NO: 404607 - DNA, 120 bp, Artificial Sequence
  ENSG00000147166_10 (sequence is synthesized)
atcattcaaccaacgcttccatgtctctactctgtcgtaacaaaggctgtgggcagcactttgaccctaataccaaccttcctggtgagtaaagaatcctgacctggccaggggctctgt

SEQ ID NO: 404608 - DNA, 120 bp, Artificial Sequence
  ENSG00000147166_11 (sequence is synthesized)
gtgggtgttggggactggtcagctggggggcagtgtgtttgaggagcggggaaagaaactacctgccctagtttaattggtctgagtgatcttacagcctttgctggctttttttttttt

SEQ ID NO: 404609 - DNA, 120 bp, Artificial Sequence
  ENSG00000147166_12 (sequence is synthesized)
gatgggtgaaagagcggctagactggaatagagggtgtcttgagggaaggagttgtactaggaaaatggaggttttctcttcatttgctttcattttctctctctctcctactcttccta

SEQ ID NO: 404610 - DNA, 120 bp, Artificial Sequence
  ENSG00000147166_13 (sequence is synthesized)
tttccctctttccctcccctcttccttctcccttttcatctctcatttctttcctctctctcccttattgtcttattcctcccttaccttttttcttaccttattaaaaatttctctctc

SEQ ID NO: 404611 - DNA, 120 bp, Artificial Sequence
  ENSG00000147166_14 (sequence is synthesized)
agactccttgaaataccctttcagtaatcattcaaccaacgcttccatgtctctactctgtcgtaacaaaggctgtgggcagcactttgaccctaataccaaccttcctggtcagagttg

SEQ ID NO: 404612 - DNA, 120 bp, Artificial Sequence
  ENSG00000147166_15 (sequence is synthesized)
cttcttaggtttaccaaggccctgagagtgatgctactccatgtacctaccacccaggagcaccccgattccatgaggggtgagggaggggactgggtgggctatgaggctatgagacag

SEQ ID NO: 404613 - DNA, 120 bp, Artificial Sequence
  ENSG00000147166_16 (sequence is synthesized)
gtttctcctaatatttggtcataagataatattgggggtgagagaattcagttgaattatcttcctacttcaggatgaagtcttggagctgttgtggcatccagaccctggattttgggg

SEQ ID NO: 404614 - DNA, 120 bp, Artificial Sequence
  ENSG00000147166_17 (sequence is synthesized)
tgagcaatgatctgatgttggatgggaggatagtcaattgggtgatactacaatctcacaggcagagttgccatttgctgttaacctgtaggctccatagtacccttagaggaaaggaga

SEQ ID NO: 404615 - DNA, 120 bp, Artificial Sequence
  ENSG00000147166_18 (sequence is synthesized)
gttattaggtcagggctgtctggccaacctgtggatcatacctctgacctggttatctgtcgtaatgacctattctgaccttctgggtttgttactacccctgtaattcttttctctcag

SEQ ID NO: 404616 - DNA, 120 bp, Artificial Sequence
  ENSG00000147168_0 (sequence is synthesized)
agaggaaacgtgtgggtggggaggggtagtgggtgagggacccaggttcctgacacagacagactacacccagggaatgaagagcaagcgccatgttgaagccatcattaccattcacat

SEQ ID NO: 404617 - DNA, 120 bp, Artificial Sequence
  ENSG00000147168_1 (sequence is synthesized)
ccctcttattcctgcagctgcccctgctgggagtggggctgaacacgacaattctgacgcccaatgggaatgaagacaccacagctgatttcttcctgaccactatgcccactgactccc

SEQ ID NO: 404618 - DNA, 120 bp, Artificial Sequence
  ENSG00000147168_2 (sequence is synthesized)
tcagtgtttccactctgcccctcccagaggttcagtgttttgtgttcaatgtcgagtacatgaattgcacttggaacagcagctctgagccccagcctaccaacctcactctgcattatt

SEQ ID NO: 404619 - DNA, 120 bp, Artificial Sequence
  ENSG00000147168_3 (sequence is synthesized)
ggtacaagaactcggataatgataaagtccagaagtgcagccactatctattctctgaagaaatcacttctggctgtcagttgcaaaaaaaggagatccacctctaccaaacatttgttg

SEQ ID NO: 404620 - DNA, 120 bp, Artificial Sequence
  ENSG00000147168_4 (sequence is synthesized)
ttcagctccaggacccacgggaacccaggagacaggccacacagatgctaaaactgcagaatctggtgatcccctgggctccagagaacctaacacttcacaaactgagtgaatcccagc

SEQ ID NO: 404621 - DNA, 120 bp, Artificial Sequence
  ENSG00000147168_5 (sequence is synthesized)
tagaactgaactggaacaacagattcttgaaccactgtttggagcacttggtgcagtaccggactgactgggaccacagctggactgaacaatcagtggattatagacataagttctcct

SEQ ID NO: 404622 - DNA, 120 bp, Artificial Sequence
  ENSG00000147168_6 (sequence is synthesized)
ccacccaatccactgggggagcaatacttcaaaagagaatcctttcctgtttgcattggaagccgtggttatctctgttggctccatgggattgattatcagccttctctgtgtgtattt

SEQ ID NO: 404623 - DNA, 120 bp, Artificial Sequence
  ENSG00000147168_7 (sequence is synthesized)
ctggctggaacggacgatgccccgaattcccaccctgaagaacctagaggatcttgttactgaataccacgggaacttttcggcctggagtggtgtgtctaagggactggctgagagtct

SEQ ID NO: 404624 - DNA, 120 bp, Artificial Sequence
  ENSG00000147168_8 (sequence is synthesized)
gcagccagactacagtgaacgactctgcctcgtcagtgagattcccccaaaaggaggggcccttggggaggggcctggggcctccccatgcaaccagcatagcccctactgggccccccc

SEQ ID NO: 404625 - DNA, 120 bp, Artificial Sequence
  ENSG00000147168_9 (sequence is synthesized)
atgttacaccctaaagcctgaaacctgaaccccaatcctctgacagaagaaccccagggtcctgtagccctaagtggtactaactttccttcattcaacccacctgcgtctcatactcac

SEQ ID NO: 404626 - DNA, 120 bp, Artificial Sequence
  ENSG00000147168_10 (sequence is synthesized)
ctcaccccactgtggctgatttggaattttgtgcccccatgtaagcaccccttcatttggcattccccacttgagaattacccttttgccccgaacatgtttttcttctccctcagtctg

SEQ ID NO: 404627 - DNA, 120 bp, Artificial Sequence
  ENSG00000147168_11 (sequence is synthesized)
gcccttccttttcgcaggattcttcctccctccctctttccctcccttcctctttccatctaccctccgattgttcctgaaccgatgagaaataaagtttctgttgataatcatcaaaaa

SEQ ID NO: 404628 - DNA, 120 bp, Artificial Sequence
  ENSG00000147168_12 (sequence is synthesized)
cagctggtgggaaatctgggactggagggggctggtgagaagggtggctgtgggaaggggccgtacagagatctggtgcctgccactggccattacaatcatgtgggcagaattgaaaag

SEQ ID NO: 404629 - DNA, 120 bp, Artificial Sequence
  ENSG00000147168_13 (sequence is synthesized)
aaagtggagtgggaagggcaagggggagggttccctgcctcacgctacttcttctttctttcttgtttgtttgtttctttctttcttttgaggcagggtctcactatgttgcctaggctg

SEQ ID NO: 404630 - DNA, 120 bp, Artificial Sequence
  ENSG00000147168_14 (sequence is synthesized)
caaactcctggcctctagtgatcctcctgcctcagcctttcaaagcaccaggattacagacatgagccaccgtgcttggcctcctccttctgaccatcatttctctttccctccctgcct

SEQ ID NO: 404631 - DNA, 120 bp, Artificial Sequence
  ENSG00000147168_15 (sequence is synthesized)
taatttggaaagaaagggtcaagagaccagggatactgtgggacattggagtctacagagtagtgttcttttatcataagggtacatgggcagaaaagaggaggtaggggatcatgatgg

SEQ ID NO: 404632 - DNA, 120 bp, Artificial Sequence
  ENSG00000147168_16 (sequence is synthesized)
caggagacaggccacacagatgctaaaactgcagaatctgggaacaatcagtggattatagacataagttctccttgcctagtgtggatgggcagaaacgctacacgtttcgtgttcgga

SEQ ID NO: 404633 - DNA, 120 bp, Artificial Sequence
  ENSG00000147168_17 (sequence is synthesized)
ggttttgcagggtctttaggagtaaaggatgagacagtaagtaatgagagattacccaagagggtttggtgatggaaggaagccacaggcacagagaacacagaatcactttatttcata

SEQ ID NO: 404634 - DNA, 120 bp, Artificial Sequence
  ENSG00000147168_18 (sequence is synthesized)
ctccctctttctcccctgtcaggacgatgccccgaattcccaccctgaagaacctagaggatcttgttactgaataccacgggaacttttcggtgagaacgctgtcataagcatgctgca

SEQ ID NO: 404635 - DNA, 120 bp, Artificial Sequence
  ENSG00000147168_19 (sequence is synthesized)
gtctatcaactgccaactgcctgccagcaagacagacagagtgtgggggtgggggcagagaggagagggaaggaggccctgcactaactgtcaggatgtggccgaccaaatggggcatgg

SEQ ID NO: 404636 - DNA, 120 bp, Artificial Sequence
  ENSG00000147168_20 (sequence is synthesized)
actatacagagagagacacacacagaagtgcagattatagattgaatgaggcagatggcaactggtattgggggcccaggagcctgtgtatcccttctgtaatcaattacagtggttgca

SEQ ID NO: 404637 - DNA, 120 bp, Artificial Sequence
  ENSG00000147168_21 (sequence is synthesized)
gacatcatgagtactcctttggcacagagctcggtcttttacttcctgcccctaattgacccctgacctggacatatctgtctttaggcctggagtggtgtgtctaagggactggctgag

SEQ ID NO: 404638 - DNA, 120 bp, Artificial Sequence
  ENSG00000147174_0 (sequence is synthesized)
gattggggtggtagaggcctgagtgggaaaagtttgcaacaaaacaaatttaaatccttttcattttgcagagcaaagtttcggctttaaggtggggaagatacccaaagataaatgcag

SEQ ID NO: 404639 - DNA, 78 bp, Artificial Sequence
  ENSG00000147174_1 (sequence is synthesized)
tcggctttaaggtggggaagatacccaaagataaatgcagaatgtaaatgtagagatgtctctgcttttgagttctgg

SEQ ID NO: 404640 - DNA, 120 bp, Artificial Sequence
  ENSG00000147174_2 (sequence is synthesized)
cgcccggccgagttctggctttcttaagaaagtgtatctttgtctttcactacagacatggatgggtgcaaaaaagagctgccccgcttgcaagagccggaggaggacgaggattgttac

SEQ ID NO: 404641 - DNA, 120 bp, Artificial Sequence
  ENSG00000147174_3 (sequence is synthesized)
atccttaatgttcagtcaagcagtgatgacaccagtgggtcttctgtggccagaagagctccgaagagacaggcgagttgcatccttaatgtccagtcaaggagtggtgacaccagtggg

SEQ ID NO: 404642 - DNA, 120 bp, Artificial Sequence
  ENSG00000147174_4 (sequence is synthesized)
tcttctgtggccagaagagctccgaagagacaggcgagctccgtggtagtgattgactctgattctgatgaggaatgtcacacccatgaagagaagaaagctaagttattggaaataaac

SEQ ID NO: 404643 - DNA, 120 bp, Artificial Sequence
  ENSG00000147174_5 (sequence is synthesized)
agcgacgatgagagtccggagtgttgtcatgtgaagcctgccatccaggaacctccaatagttattagtgatgatgacaatgacgatgacaacggtaatgatttggaagttcccgacgac

SEQ ID NO: 404644 - DNA, 120 bp, Artificial Sequence
  ENSG00000147174_6 (sequence is synthesized)
aacagtgatgattcagaagctcccgacgacaacagtgatgattcggaagctcctgacgacaacagtgatgattcggaagctcccgacgacaacagtgatgattcggaagctcccgacgac

SEQ ID NO: 404645 - DNA, 120 bp, Artificial Sequence
  ENSG00000147174_7 (sequence is synthesized)
aatagtgatgattcggatgttcccgacgacaacagtgatgattcatccgacgacaacagtgatgattcatccgacgacaacagtgatgattcggatgttcccgacgacaagagtgatgat

SEQ ID NO: 404646 - DNA, 120 bp, Artificial Sequence
  ENSG00000147174_8 (sequence is synthesized)
tcggatgttcccgacgacagcagtgatgattcggatgttcccgacgacagcagtgatgattcggaagctcccgacgacagcagtgatgattcggaagctcccgacgacagcagtgatgat

SEQ ID NO: 404647 - DNA, 120 bp, Artificial Sequence
  ENSG00000147174_9 (sequence is synthesized)
tcggaagctcccgacgacagcagtgatgattcggaagctcccgacgacagcagtgatgattcggaagcttccgacgacagcagtgatgattcggaagcttccgacgacagcagtgatgat

SEQ ID NO: 404648 - DNA, 120 bp, Artificial Sequence
  ENSG00000147174_10 (sequence is synthesized)
tcggaagctcccgacgacaagagtgatgattcggatgttcccgaagacaagagtgatgattcggatgttcccgatgacaatagtgatgatttggaagttcctgtgccagcagaagatttg

SEQ ID NO: 404649 - DNA, 120 bp, Artificial Sequence
  ENSG00000147174_11 (sequence is synthesized)
caggatcttggtgagaatctcagcaaaccaccaagtgatcctgaggctaaccctgaagtttcagagagaaagctgccaactgaggaagagcctgcacctgtggtggaacaatcagggaaa

SEQ ID NO: 404650 - DNA, 120 bp, Artificial Sequence
  ENSG00000147174_12 (sequence is synthesized)
aggaagtcaaaaaccaaaactattgtggagccaccgaggaaaaggcagacaaagaccaaaaatatagtggagccaccaaggaaaaggcagacaaagaccaaaaatatagtggagccactg

SEQ ID NO: 404651 - DNA, 120 bp, Artificial Sequence
  ENSG00000147174_13 (sequence is synthesized)
aggaagaggaaggcgaaaaccaaaaatgtatctgtgacacctggacataagaagcgtgggccttcaaagaagaaacccggtgcagcaaaagttgaaaaacgcaagactaggactcctaaa

SEQ ID NO: 404652 - DNA, 120 bp, Artificial Sequence
  ENSG00000147174_14 (sequence is synthesized)
tgcaaagtccctggatgtttcttgcaagaccttgaaaagtcaaagaaatactctggaaaaaatttaaagcgaaataaggatgaattggttcagagaatctacgacctgtttaacagatcc

SEQ ID NO: 404653 - DNA, 120 bp, Artificial Sequence
  ENSG00000147174_15 (sequence is synthesized)
gtctgtgataaaaagctgccagagaaactacgcataggctggaataacaagatggtgaaaactgctggcttatgcagcactggtgagatgtggtacccaaagtggcggcgctttgccaag

SEQ ID NO: 404654 - DNA, 120 bp, Artificial Sequence
  ENSG00000147174_16 (sequence is synthesized)
atccagattggcttgaaagtctgcgactctgcagaccgaatccgggataccttgatccatgaaatgtgccatgctgcctcctggctgattgatggtatccatgattctcatggtgacgca

SEQ ID NO: 404655 - DNA, 120 bp, Artificial Sequence
  ENSG00000147174_17 (sequence is synthesized)
tggaagtattatgccaggaaatccaacaggatacacccggagctgcccagggtcacccgttgccataactataagattaactacaaggtccattatgaatgtactggatgcaaaacgagg

SEQ ID NO: 404656 - DNA, 120 bp, Artificial Sequence
  ENSG00000147174_18 (sequence is synthesized)
attggctgctacaccaaatcgttggacaccagccgcttcatctgtgccaaatgcaaggggtctctggtcatggtgccattaactcagaaagatgggacccgtattgtgccccacgtgtga

SEQ ID NO: 404657 - DNA, 120 bp, Artificial Sequence
  ENSG00000147174_19 (sequence is synthesized)
ccatttgctgtgtatgtgcagaagtattatagaaaaattatgcaggagatggctaggattagccttggggatgtgatgaaaacacttggcaggaattacaaggcaatgaagaattcttaa

SEQ ID NO: 404658 - DNA, 120 bp, Artificial Sequence
  ENSG00000147174_20 (sequence is synthesized)
ggttatcttagagtatattaatgtgagctatatcctttactggtaagaagttttagaaaagtttgttttgtgaagttaggaatattagaatttaggtactgttaagtaagtaatgttaga

SEQ ID NO: 404659 - DNA, 120 bp, Artificial Sequence
  ENSG00000147174_21 (sequence is synthesized)
atttaagattcatgttattaacgatgattgaccttaaatagggactctattgctaaccattctgtgcccttgacagggtatttctgaagcccttgggatctaccttgggtcttacttgag

SEQ ID NO: 404660 - DNA, 120 bp, Artificial Sequence
  ENSG00000147174_22 (sequence is synthesized)
ttccatatttttcacatgtagaacaaaatgcaaaagaaaagtgagttttcaagagtggcaggttgagagaggagaatgctggaaagaggacaagtttgagaggcaacacttaaacactag

SEQ ID NO: 404661 - DNA, 120 bp, Artificial Sequence
  ENSG00000147174_23 (sequence is synthesized)
ggctactgtggcatctatgtagacaggaaagacaaacgtgtttcataaaattcgttgttgatggtattgattgaaactatctgagccatgtaatcaaaaaataaaagttttctgcatctt

SEQ ID NO: 404662 - DNA, 120 bp, Artificial Sequence
  ENSG00000147174_24 (sequence is synthesized)
aaaggggcctgcgcctggcgttgttcatcgcagttgctccggatctttgcacacactccacgggcagttggaggtgagctgctgccggccacgccagaggctgcaacaccagacatggat

SEQ ID NO: 404663 - DNA, 120 bp, Artificial Sequence
  ENSG00000147174_25 (sequence is synthesized)
tcttcagtgattttataagtagatggctgtctgaactgaagaggagaacctctctcctcctttccacgttctctttctcctttctcttccgtaatttgagccggcctgaccactgctgcc

SEQ ID NO: 404664 - DNA, 120 bp, Artificial Sequence
  ENSG00000147174_26 (sequence is synthesized)
gcttggtgcccgggtctctgacaacccagagaaaagtattgctttgggcccaaggctaacatctcagagctgatgctgaggtgcagtgactgattcttttgttgtgtgttgttccattcc

SEQ ID NO: 404665 - DNA, 120 bp, Artificial Sequence
  ENSG00000147180_0 (sequence is synthesized)
gccatccagagcgcggtcacagtccgactggcggcacggaggcggcggcggcggcggcggcggcagcggcggcggcagcggcggcggcagctgtagctgcagcagcaggtaaagagagcg

SEQ ID NO: 404666 - DNA, 120 bp, Artificial Sequence
  ENSG00000147180_1 (sequence is synthesized)
ttttcccaaagaaaataacatagcacagaaggaaaaataaaaagaaattgctgcagattttactttatgtgagaaaatctacaatttcttcgagacactcatataaaggaagcagtcatg

SEQ ID NO: 404667 - DNA, 120 bp, Artificial Sequence
  ENSG00000147180_2 (sequence is synthesized)
tttcatgagtcctcaaaactgagacaagagaatgtagtagagtgaggccagaagtccttactggttcaaagaactccggggaaactgggatagaacattttacattataagtagaaccct

SEQ ID NO: 404668 - DNA, 120 bp, Artificial Sequence
  ENSG00000147180_3 (sequence is synthesized)
gggagccagaggtgaatacaagtttatctgcagagctccgctgcagggctgatctgggtctggaagaaatggatgagagccagtggatgaaattcactaatactagacatctgagtcctc

SEQ ID NO: 404669 - DNA, 120 bp, Artificial Sequence
  ENSG00000147180_4 (sequence is synthesized)
taatattggtgaatgaactttgctaagtatggattcaggcggtggaagtcttggattgcacacgccagactctagaatggcccataccatgattatgcaagattttgtggctggaatggc

SEQ ID NO: 404670 - DNA, 120 bp, Artificial Sequence
  ENSG00000147180_5 (sequence is synthesized)
tggtactgcacatatcgatggagaccatattgttgtttcagttcctgaagctgttttagtttctgatgttgtcacagatgatgggataactcttgatcatggccttgcagctgaagttgt

SEQ ID NO: 404671 - DNA, 120 bp, Artificial Sequence
  ENSG00000147180_6 (sequence is synthesized)
ccatggacctgatatcatcacagagactgatgtagtaacagaaggtgtgattgttcctgaagcggtacttgaagctgatgttgccattgaagaggatttagaggaagatgatggtgatca

SEQ ID NO: 404672 - DNA, 120 bp, Artificial Sequence
  ENSG00000147180_7 (sequence is synthesized)
catcttgacttctgaactaattacagaaaccgttagggtaccagagcaggttttcgtggctgaccttgttactggtcctaatggacacttagaacatgtggtccaagattgtgtttcagg

SEQ ID NO: 404673 - DNA, 120 bp, Artificial Sequence
  ENSG00000147180_8 (sequence is synthesized)
agtcgactctcccacaatggtatcagaggaggttcttgtaactaattcagatacagaaactgtgattcaagcagctggaggtgttcctggttctacagttactataaaaaccgaagatga

SEQ ID NO: 404674 - DNA, 120 bp, Artificial Sequence
  ENSG00000147180_9 (sequence is synthesized)
tgatgatgatgatgtcaagagcacttctgaagactacttaatgatatctttggatgatgttggagaaaaattagagcatatggggaatacaccattaaaaattggcagtgatggttcaca

SEQ ID NO: 404675 - DNA, 120 bp, Artificial Sequence
  ENSG00000147180_10 (sequence is synthesized)
agaagatgctaaagaagatgggtttggttctgaagttataaaagtgtatatatttaaagcggaggctgaagatgatgttgaaataggtggaacagaaattgtcacagagagtgagtacac

SEQ ID NO: 404676 - DNA, 120 bp, Artificial Sequence
  ENSG00000147180_11 (sequence is synthesized)
cagtggacattcagtagctggagtgcttgaccagagccgaatgcagcgggagaagatggtttacatggcagttaaagattcttctcaagaagaagatgatatcagagatgaaagaagagt

SEQ ID NO: 404677 - DNA, 120 bp, Artificial Sequence
  ENSG00000147180_12 (sequence is synthesized)
aggtatgaagattgtcaagcatcaggaaatactttggactcagcattagaaagcagaagtagtacagcagcacagtaccttcaaatttgtgacggcattaatacaaataaagtacttaaa

SEQ ID NO: 404678 - DNA, 120 bp, Artificial Sequence
  ENSG00000147180_13 (sequence is synthesized)
caaaaagccaaaaagaggagaaggggagaaaccaggcagtggcaaacagctgttataataggtcctgatggacagcccctcacagtgtacccttgccatatttgcacaaaaaagtttaaa

SEQ ID NO: 404679 - DNA, 120 bp, Artificial Sequence
  ENSG00000147180_14 (sequence is synthesized)
tccaggggattcttaaaaagacacatgaagaatcatcctgatcatttaatgagaaaaaaatatcagtgtacagattgtgactttacaactaacaagaaagtgagtttccataaccactta

SEQ ID NO: 404680 - DNA, 120 bp, Artificial Sequence
  ENSG00000147180_15 (sequence is synthesized)
gaaagccataagctcataaacaaagtcgacaaaacccatgaatttacagaatacacacgaagatacagagaggctagtccactgagttccaataaacttattttaagagacaaggagccg

SEQ ID NO: 404681 - DNA, 120 bp, Artificial Sequence
  ENSG00000147180_16 (sequence is synthesized)
aagatgcacaagtgcaaatactgtgactatgaaactgcagaacaaggactgttaaacaggcatttgttggccgttcacagcaagaattttcctcatgtttgtgttgagtgtgggaagggt

SEQ ID NO: 404682 - DNA, 120 bp, Artificial Sequence
  ENSG00000147180_17 (sequence is synthesized)
tttcgacatccttctgaactcaagaaacatatgagaacccatactggtgagaagccatatcagtgtcagtattgtattttcaggtgtgcagatcaatcaaatctgaaaactcacattaag

SEQ ID NO: 404683 - DNA, 120 bp, Artificial Sequence
  ENSG00000147180_18 (sequence is synthesized)
tctaaacatggtaacaatttgccatataaatgtgagcattgtccccaagcatttggtgatgagagggagcttcaacgccatctggatttgtttcaaggacataagacacaccagtgtcct

SEQ ID NO: 404684 - DNA, 120 bp, Artificial Sequence
  ENSG00000147180_19 (sequence is synthesized)
cattgtgaccataagagcaccaattcaagtgaccttaagcggcacatcatatctgtccatactaaggattttcctcacaaatgtgaggtctgtgataaaggttttcatcgtccttctgag

SEQ ID NO: 404685 - DNA, 120 bp, Artificial Sequence
  ENSG00000147180_20 (sequence is synthesized)
ctcaaaaagcatagtgatatccataagggtaggaagattcatcagtgcaggcactgtgactttaaaacatccgatccatttattcttagtggccatatcctttcagttcatactaaagat

SEQ ID NO: 404686 - DNA, 120 bp, Artificial Sequence
  ENSG00000147180_21 (sequence is synthesized)
cagccattgaaatgtaaaaggtgcaagagaggattcagacaacaaaatgagctaaaaaaacatatgaagacccatactggaaggaagatttaccaatgtgagtattgtgaatacagcact

SEQ ID NO: 404687 - DNA, 120 bp, Artificial Sequence
  ENSG00000147180_22 (sequence is synthesized)
acagatgcatctggctttaaacgacatgtgatatcaatacatacaaaagactatccacacaggtgtgaattctgcaagaagggattccgaagaccatcagaaaaaaatcagcatattatg

SEQ ID NO: 404688 - DNA, 120 bp, Artificial Sequence
  ENSG00000147180_23 (sequence is synthesized)
aggcaccacaaagaggctcttatgtaataagatcaatataaagaaagaagctatttaggagatatgatatgctacttgggagaaaactctcactaactgtctcaccgggtttcaaagctt

SEQ ID NO: 404689 - DNA, 120 bp, Artificial Sequence
  ENSG00000147180_24 (sequence is synthesized)
tacagaaaaacttcttaagtatctgtgtaatagtattatatgcatacttaaactacagaggggaaaagcaaagacaaatactttatttggctgattatgttagatacaaatgtttctgag

SEQ ID NO: 404690 - DNA, 120 bp, Artificial Sequence
  ENSG00000147180_25 (sequence is synthesized)
aagagaatacataattgagtttagtgatgctttgctatagcaagcaaacccacttttatgcaattttagaaatggggcagggaaacaaaatgtggtcattcatcagtcacttagtcattg

SEQ ID NO: 404691 - DNA, 120 bp, Artificial Sequence
  ENSG00000147180_26 (sequence is synthesized)
agccttttatattgtacctggaaattaaattccagcaatgacaaaagttttgtgtattcattaaaagaaaactaactggaaaacaggttagattaattcagtactattaaaaaagaattc

SEQ ID NO: 404692 - DNA, 120 bp, Artificial Sequence
  ENSG00000147180_27 (sequence is synthesized)
agagctgttaatattttatcacaggataggatacttaaaatatagcattctgtgctgagatctaaggtgaagtctataaagattaaagttcccttttttctgatgttcaagttgattgtt

SEQ ID NO: 404693 - DNA, 120 bp, Artificial Sequence
  ENSG00000147180_28 (sequence is synthesized)
gttcagtatggcatatatgacaaaagtatatttgagtcaaatgtggctttctaaaatggatgcaacattagcgttgcaaacaaaatcagcactatatttcttaatgatctaaagattaat

SEQ ID NO: 404694 - DNA, 120 bp, Artificial Sequence
  ENSG00000147180_29 (sequence is synthesized)
ttgagagaacacagttttcttaaatattataatgtctagagtttttttaggacagtcttagcaagtatgattgttctagtcttacttgctctaatgtttaaaggtgcaattttatgccat

SEQ ID NO: 404695 - DNA, 120 bp, Artificial Sequence
  ENSG00000147180_30 (sequence is synthesized)
tattgaaattgatttttaaaatctatataccatatgattaacatgcattttcaatatgaggcagtgtttatgcagtatttaacagagcaatctgctgccaatagagtttggaggtggata

SEQ ID NO: 404696 - DNA, 120 bp, Artificial Sequence
  ENSG00000147180_31 (sequence is synthesized)
tttagtttacagtgtataaacttaaaatatgcatccctttaacaacgctttgtgttagcatgctgcaaatcaaaatggcacttaatattaaaagctggtttagggaaattttatgaaaat

SEQ ID NO: 404697 - DNA, 120 bp, Artificial Sequence
  ENSG00000147180_32 (sequence is synthesized)
cctgttcataaatgtaatgcatatgatatgtacttttaagttttagttgcttcatgtttacattcagctgttcaacataattaaaatgtaattttacttcatgctatattgtggctttgt

SEQ ID NO: 404698 - DNA, 120 bp, Artificial Sequence
  ENSG00000147180_33 (sequence is synthesized)
gtttcaaataatgttcacctttctgtttttgcaccagataagaatcagttccttgagaataaattttttatctttcttaacttcagaatattaaatttggaatatctactaaaattgtgt

SEQ ID NO: 404699 - DNA, 120 bp, Artificial Sequence
  ENSG00000147180_34 (sequence is synthesized)
gttatgtggctgtaaatgatgtacacgctgtaaaataagatcgctactgttatgtgggattattatttctaaatgttactcattgaaatgagcatacaataaaaagcatttattgcactt

SEQ ID NO: 404700 - DNA, 120 bp, Artificial Sequence
  ENSG00000147180_35 (sequence is synthesized)
acactaaaacaccaccattttggttcccaaccgtctcccacgtagcggggcagaggaagctggaggaggctgaggggctgggcagcacggcgtgggtagcagcggtggcgaccgctgcac

SEQ ID NO: 404701 - DNA, 120 bp, Artificial Sequence
  ENSG00000147180_36 (sequence is synthesized)
ttcttctaccacttccctatggctcatcagcttgactgtgcctttgtctccattatttttggtttacttccacttggcacttcttttatttatggttgtcacataaagcatctaaccatg

SEQ ID NO: 404702 - DNA, 120 bp, Artificial Sequence
  ENSG00000147180_37 (sequence is synthesized)
gtttttctttgttttgctttcttttgtaataagctttccacacttggttgaaaggcatattgtcaattgcatttttttctcaaaacaactaactttggactaaatatattaaactatttt

SEQ ID NO: 404703 - DNA, 120 bp, Artificial Sequence
  ENSG00000147180_38 (sequence is synthesized)
cagttgcgctgaaatagcagatgaagtttacatggaagtcattgtaggggaagaggaaggaacttctctccctgagattcagcttgaggactctgatgttaataaaacagttgtccctgt

SEQ ID NO: 404704 - DNA, 120 bp, Artificial Sequence
  ENSG00000147183_0 (sequence is synthesized)
aggagtaagtggagaggtagagggcagaagaaaaggggtcaagaaggcaggaccccgtgaagcacacctttcctaaggattttgacgaatgagaatgaagataaactgtgagttgaaagt

SEQ ID NO: 404705 - DNA, 120 bp, Artificial Sequence
  ENSG00000147183_1 (sequence is synthesized)
gaaagagaaagcataagggatcttaggtgcatctgacaagccttagatgacctccagcaacttcagttctcaccgaattactgcatttcagccttactgagaagcagccagtcatactat

SEQ ID NO: 404706 - DNA, 120 bp, Artificial Sequence
  ENSG00000147183_2 (sequence is synthesized)
cctcaaattttaacccaggatgagttatcctactaaagaaggaagtgatacagctggaaatgctcacaaaaattctgaaaatgagcctcctaatgactgtagtacagacatagagtctcc

SEQ ID NO: 404707 - DNA, 120 bp, Artificial Sequence
  ENSG00000147183_3 (sequence is synthesized)
atctgctgatcccaatatgatctatcaggtagaaaccaacccaataaacagggagccaggcacagcaacctcccaggaagatgttgttcctcaagcagcagaaaacagcgagctcgaaac

SEQ ID NO: 404708 - DNA, 120 bp, Artificial Sequence
  ENSG00000147183_4 (sequence is synthesized)
agagatccaaaaagatcaacgagaagaagatctaaaagaagagcttcttctacttcagacccccattcccagaaaattggtctctcacaagcccttaaatgatagatcaagatcccactc

SEQ ID NO: 404709 - DNA, 120 bp, Artificial Sequence
  ENSG00000147183_5 (sequence is synthesized)
agggaaagttgagatgaaagcaaacaatttccccataaatcacaaaactcgttttcgactttcaacttcatggagagtcccatttattaacagtcatgagataagaagtatgattctcca

SEQ ID NO: 404710 - DNA, 120 bp, Artificial Sequence
  ENSG00000147183_6 (sequence is synthesized)
atatatagcatgtctttaccatccaaatagtttcacccatcacgagagagccataacatttagaaggccttcgagggtgcactactaccgtcccctcactgagagaatgacatcaggaaa

SEQ ID NO: 404711 - DNA, 120 bp, Artificial Sequence
  ENSG00000147183_7 (sequence is synthesized)
attttgcaaatcaactgacactaaagggaaatgtagattccgtgctattgtgaggtctgtgctctttgtgtcacagatacaaattgaaagtatttttaatataaaaggttttgtggatat

SEQ ID NO: 404712 - DNA, 120 bp, Artificial Sequence
  ENSG00000147183_8 (sequence is synthesized)
attgacatatatccataccatgaatgttatgatcacaaacaccaataatggttggaaatacttttgtcccatctgtggaaggctttttaacacttactctgaattaagacaacattcatg

SEQ ID NO: 404713 - DNA, 120 bp, Artificial Sequence
  ENSG00000147183_9 (sequence is synthesized)
cagctcttctgggaattaaattaaattggggtaaattcattttaaaatataacttctaaaattcataatttgactactaaagtaagacaaaattgcatgaacataaattttagtattatt

SEQ ID NO: 404714 - DNA, 120 bp, Artificial Sequence
  ENSG00000147183_10 (sequence is synthesized)
agagggagtagcagaaaggaacacaaactaatagtacctctcagtaagaaatacctatggggagtgaggaaacatctgtttatactttgcttttacaagtacatcattgaaatatcagac

SEQ ID NO: 404715 - DNA, 120 bp, Artificial Sequence
  ENSG00000147183_11 (sequence is synthesized)
ctgtcatctatattgagtcagcatttgaaccaagtaaatgttttcactgtcttaacatctatttctgtagatgtaaatattgttaacataaaagaatccaagttaacaggatcctgacta

SEQ ID NO: 404716 - DNA, 120 bp, Artificial Sequence
  ENSG00000147183_12 (sequence is synthesized)
agatagcaaacatatattggaaggccagacaaagttctaccaagtgtttccagagattctgctacatgtattatctgaaatgttctccatatattcaataaaaaccaatttgaagacata

SEQ ID NO: 404717 - DNA, 120 bp, Artificial Sequence
  ENSG00000147183_13 (sequence is synthesized)
ggagaggtagagggcagaagaaaaggggtcaagaaggcaggaccccgtgaagcacacctttcctaaggattttgacgaatgagaatgaagataaactggtgcatctgacaagccttagat

SEQ ID NO: 404718 - DNA, 120 bp, Artificial Sequence
  ENSG00000147202_0 (sequence is synthesized)
gccccagcgccgagtagtggcaacggcgtggttgcgtcgggggtgcctgggagcctggagtcccgggggcctgaaatcggcagcttcccgggcagacactctctccctcaggaagaggtg

SEQ ID NO: 404719 - DNA, 120 bp, Artificial Sequence
  ENSG00000147202_1 (sequence is synthesized)
ccgccgagtcagcgcggggcagtgtgagcgccccgaggtgctttctcagttgaggagaggtggggttacagggcacaggtgacagggccggagaaagatggagcagcccggggcggcggc

SEQ ID NO: 404720 - DNA, 120 bp, Artificial Sequence
  ENSG00000147202_2 (sequence is synthesized)
gtcgggagcgggaggcggcagcgaggaacccggtgggggccggagcaacaagcggagcgcggggaaccgggccgccaatgaagaggaaacgaaaaacaaacccaaattgaacattcaaat

SEQ ID NO: 404721 - DNA, 120 bp, Artificial Sequence
  ENSG00000147202_3 (sequence is synthesized)
aaaaactttggcagatgatgtgcgtgaccgaattacaagttttagaaaatctactgtcaaaaaagaaaaacctcttattcaacatcctattgattctcaagtcgcgatgagtgagtttcc

SEQ ID NO: 404722 - DNA, 120 bp, Artificial Sequence
  ENSG00000147202_4 (sequence is synthesized)
tgcagctcagccattatatgatgaacgatctttgaatttgtcagaaaaggaagtattggatctctttgaaaaaatgatggaggacatgaaccttaacgaagagaaaaaagctcctttacg

SEQ ID NO: 404723 - DNA, 120 bp, Artificial Sequence
  ENSG00000147202_5 (sequence is synthesized)
aaacaaagactttaccaccaaacgtgagatggttgtccagtatatttctgccactgccaaatctggtgggctgaaaaacagcaaacatgaatgcaccctgtcttcacaagaatatgttca

SEQ ID NO: 404724 - DNA, 120 bp, Artificial Sequence
  ENSG00000147202_6 (sequence is synthesized)
tgaattacgatcgggtatatcagatgagaaacttcttaattgcctagaatccctcagggtttctttaaccagcaatccggtcagctgggttaacaactttggccatgaaggtcttggact

SEQ ID NO: 404725 - DNA, 120 bp, Artificial Sequence
  ENSG00000147202_7 (sequence is synthesized)
cttattggatgagctggaaaagcttctggacaaaaaacagcaagaaaatattgacaagaagaatcagtataaacttattcaatgcctcaaagcatttatgaataataagtttggattaca

SEQ ID NO: 404726 - DNA, 120 bp, Artificial Sequence
  ENSG00000147202_8 (sequence is synthesized)
aaggattctaggagatgaaagaagtcttttactattggcaagagcaattgaccccaaacaacccaacatgatgactgaaatagtaaaaatactttctgctatttgcattgttggagaaga

SEQ ID NO: 404727 - DNA, 120 bp, Artificial Sequence
  ENSG00000147202_9 (sequence is synthesized)
gaacattctagataaacttttaggggctataacaacagcagcagaaagaaataacagggaacgattttcaccaattgtggaaggtttagaaaatcaggaagccttgcaattacaggtggc

SEQ ID NO: 404728 - DNA, 120 bp, Artificial Sequence
  ENSG00000147202_10 (sequence is synthesized)
ctgcatgcagtttataaatgcccttgtcacttctccttatgagcttgattttcgaatacatttaaggaatgaattcctccgttcaggactaaaaacaatgttaccagatctaaaagaaaa

SEQ ID NO: 404729 - DNA, 120 bp, Artificial Sequence
  ENSG00000147202_11 (sequence is synthesized)
agagaatgatgagcttgatattcagttgaaagtatttgatgaaaacaaagaagatgacctaactgaattatcacaccgtctcaatgacattcgagcagaaatggatgatatgaatgaagt

SEQ ID NO: 404730 - DNA, 120 bp, Artificial Sequence
  ENSG00000147202_12 (sequence is synthesized)
ctaccatcttctatataatatgctgaaggacactgctgctgaaaattacttcttatctattctacaacattttttgcttatcagaaatgattattatatcaggccacaatattataaaat

SEQ ID NO: 404731 - DNA, 120 bp, Artificial Sequence
  ENSG00000147202_13 (sequence is synthesized)
aattgaggaatgtgtttcacagatagtgctacactgcagtggtatggatccagacttcaaatacaggcaaagattagacatcgatttaactcatctgatagattcttgtgtgaacaaggc

SEQ ID NO: 404732 - DNA, 120 bp, Artificial Sequence
  ENSG00000147202_14 (sequence is synthesized)
gaaagttgaagaaagtgaacaaaaagctgcagagttttcaaagaagttcgatgaagaattcacagctcgacaggaagctcaagcagagcttcaaaaaagagatgagaaaatcaaagaact

SEQ ID NO: 404733 - DNA, 120 bp, Artificial Sequence
  ENSG00000147202_15 (sequence is synthesized)
tgaagcagaaatccagcaacttcgaacccaggcacaagtactctcaagttcatcaggaattccaggtcctcctgcagcacctccattgccaggtgtagggccgcctccaccaccacccgc

SEQ ID NO: 404734 - DNA, 120 bp, Artificial Sequence
  ENSG00000147202_16 (sequence is synthesized)
gccacctctacccggaggagctcctcttcctcctccaccacctcctttacctggaatgatggggataccaccaccacccccaccaccacttttatttgggggacctcctccaccaccacc

SEQ ID NO: 404735 - DNA, 120 bp, Artificial Sequence
  ENSG00000147202_17 (sequence is synthesized)
ccttggaggagttcctcctcccccaggaatatcacttaatctaccttatggaatgaagcagaaaaaaatgtataaacctgaagtgtccatgaagagaatcaattggtcaaagattgaacc

SEQ ID NO: 404736 - DNA, 120 bp, Artificial Sequence
  ENSG00000147202_18 (sequence is synthesized)
cacagaattatctgagaactgtttctggttaagagtcaaagaagacaagtttgagaatccagatctctttgccaaattggcattgaattttgctactcagataaaagttcaaaagaacgc

SEQ ID NO: 404737 - DNA, 120 bp, Artificial Sequence
  ENSG00000147202_19 (sequence is synthesized)
agaagcattagaagaaaagaagactgggcctacaaagaagaaagtgaaagaactgagaattttggatcccaaaacagctcagaatctgtccatctttctgggatcatatcgcatgccata

SEQ ID NO: 404738 - DNA, 120 bp, Artificial Sequence
  ENSG00000147202_20 (sequence is synthesized)
tgaagacataagaaacgttattctggaggttaatgaagacatgctgagtgaggctttaattcagaaccttgtgaaacatcttcctgagcagaagatactcaacgaattagcagagcttaa

SEQ ID NO: 404739 - DNA, 120 bp, Artificial Sequence
  ENSG00000147202_21 (sequence is synthesized)
gaatgaatatgatgacctctgtgagcctgaacaatttggagttgtgatgagctctgtgaaaatgttacagcctcgtctcagtagtatcctgttcaagctcacatttgaagaacacataaa

SEQ ID NO: 404740 - DNA, 120 bp, Artificial Sequence
  ENSG00000147202_22 (sequence is synthesized)
caacatcaaaccaagcatcatagcagtaactcttgcctgtgaagaactgaagaaaagtgaaagctttaacagacttttagagttagttcttcttgttggaaactacatgaactcaggctc

SEQ ID NO: 404741 - DNA, 120 bp, Artificial Sequence
  ENSG00000147202_23 (sequence is synthesized)
aagaaatgcccagtctttgggatttaagatcaacttcctttgtaagatcagagatactaaatcagcggatcaaaaaacaacccttttgcattttattgccgacatttgtgaggaaaaata

SEQ ID NO: 404742 - DNA, 120 bp, Artificial Sequence
  ENSG00000147202_24 (sequence is synthesized)
tcgagatatcctaaaatttcctgaagaactggaacacgtagaaagtgcaagcaaagtttcagctcaaattctcaagagcaaccttgcatcaatggaacaacaaattgttcatctggaacg

SEQ ID NO: 404743 - DNA, 120 bp, Artificial Sequence
  ENSG00000147202_25 (sequence is synthesized)
tgacatcaagaaattcccccaagcagaaaatcaacacgataagtttgtggaaaagatgaccagctttacaaagactgcccgagaacagtatgaaaaactctccaccatgcacaacaacat

SEQ ID NO: 404744 - DNA, 120 bp, Artificial Sequence
  ENSG00000147202_26 (sequence is synthesized)
gatgaagctctatgagaatcttggagaatacttcatttttgactcaaagacagtgagcatagaagagttctttggtgatctcaacaacttccgaactttgtttttggaagcagtgagaga

SEQ ID NO: 404745 - DNA, 120 bp, Artificial Sequence
  ENSG00000147202_27 (sequence is synthesized)
aaacaataagagaagagaaatggaagagaagaccaggagggcaaaacttgcaaaagagaaagctgaacaagaaaagttagaacgccagaagaaaaagaaacaactcattgatataaacaa

SEQ ID NO: 404746 - DNA, 120 bp, Artificial Sequence
  ENSG00000147202_28 (sequence is synthesized)
agagggtgatgagactggtgtgatggataatcttctagaagccctacaatcaggtgcagcattcagagaccgtcgaaagcggattccaaggaatccagataacagacgagtacctttgga

SEQ ID NO: 404747 - DNA, 120 bp, Artificial Sequence
  ENSG00000147202_29 (sequence is synthesized)
aaggtcacgctctcgccacaatggagctatctcatctaagtgattcctgatgccaaagaatatgaaaatatttaagtaaaaacaaaatgatgcattttgagaagaacaaagtgtgcactc

SEQ ID NO: 404748 - DNA, 120 bp, Artificial Sequence
  ENSG00000147202_30 (sequence is synthesized)
agcggctggaaaggaaataagtgcatttctgcaaagatcaagataagctggatgaagtagtgtgcatttgtaatactattgcaagactcctcccacaattattctaatctgaacacagtt

SEQ ID NO: 404749 - DNA, 120 bp, Artificial Sequence
  ENSG00000147202_31 (sequence is synthesized)
atcaggattacaaaatgtgttccattttagtgtaaagatgtgtatcatttgtaattgtgtgtgacctgactgtgatgatggaagtgtaagaaattgaagagttctaaggctttcaaaaac

SEQ ID NO: 404750 - DNA, 120 bp, Artificial Sequence
  ENSG00000147202_32 (sequence is synthesized)
actcagtcaaaaatttaaaatcttaaatgtgtaagtcacccccaccaaaaacaaaagagaagaaaaagaatagaaagaattatccagtgtcagcttccaatccctagtacatatataata

SEQ ID NO: 404751 - DNA, 120 bp, Artificial Sequence
  ENSG00000147202_33 (sequence is synthesized)
gaaaagggccaagaaaaatatgcatcttgatttggagagaggctaatattatgcacactgtaagagaagccattttggaaattcacgaaagtactgctccaccccagttgagttatttag

SEQ ID NO: 404752 - DNA, 120 bp, Artificial Sequence
  ENSG00000147202_34 (sequence is synthesized)
aattttatctcaagtgaaagctgatggattcatctgctttggctgaaattaaacttatcattagtctagctagcatttcagcatgatattgcaagcacttctcattgctaaaaataaata

SEQ ID NO: 404753 - DNA, 120 bp, Artificial Sequence
  ENSG00000147202_35 (sequence is synthesized)
aaccaaagtttaaccgaatcagttagggaaagtgatttaaactttatttaaagaggtattttctaattatgcacagatatctactttatacaaatactttatatggctatttttgagaaa

SEQ ID NO: 404754 - DNA, 120 bp, Artificial Sequence
  ENSG00000147202_36 (sequence is synthesized)
accctcacattttaatgtttatgctagggatgaacctgaaaattctattacgtttatttagatttcaaaggcaaatattgattcctatgctctgtggtttatttcttttttctattgctt

SEQ ID NO: 404755 - DNA, 120 bp, Artificial Sequence
  ENSG00000147202_37 (sequence is synthesized)
ctttctcccttgagtcccttgaaggcagggaatagacttctagaaaacctgagaggaaaaagaattctttttacaggaggcagcagaaaactgtctgaaaggtcaattgttttatctccc

SEQ ID NO: 404756 - DNA, 120 bp, Artificial Sequence
  ENSG00000147202_38 (sequence is synthesized)
atttctatctcttgctacaataattccaactaagtgaacttctcaattatcatcatacttacttaccttatattaacaaattaagatgatgctgccaaaacaagtctagcagggaaaaca

SEQ ID NO: 404757 - DNA, 120 bp, Artificial Sequence
  ENSG00000147202_39 (sequence is synthesized)
ggttctacatttttcttaaataaattagggagtaaaagttatacttaacttgtctgtctattattttaaaatatgcattgaaataatgtggtataacttctctggagtgcaattttaagt

SEQ ID NO: 404758 - DNA, 120 bp, Artificial Sequence
  ENSG00000147202_40 (sequence is synthesized)
ctaattcatgcagatgattgattgtgattattgtaagaaatttcttacatgtatatttcttatgtagaaaatactgtttctactcattcaaagcacattgtagatattcagagagaagaa

SEQ ID NO: 404759 - DNA, 120 bp, Artificial Sequence
  ENSG00000147202_41 (sequence is synthesized)
caaatggctggcttggcaaatccccatctgagataaagtaaacaagtgaccagcagcccacagatgattcctttatatagatgtataatgattcaaactgctgcctttgcctccagtgca

SEQ ID NO: 404760 - DNA, 120 bp, Artificial Sequence
  ENSG00000147202_42 (sequence is synthesized)
tccttacttaggtattatacttctttaaaaagctctgaagctgctacaatagaaaaatcaaaaagggtaacagtatctgaaatttcacagtcctatccgatctgaaaacacacatacaca

SEQ ID NO: 404761 - DNA, 120 bp, Artificial Sequence
  ENSG00000147202_43 (sequence is synthesized)
aatgcacacacatgcacacacacatttaagggacatagcagtaacactgttttttaacaacaacaaaagtttaggttctaatttatgtaaatacctagtatgtgtatttttgactttaca

SEQ ID NO: 404762 - DNA, 120 bp, Artificial Sequence
  ENSG00000147202_44 (sequence is synthesized)
aagtctttcttttctgaaatcttcgtggtatggcttttttaattcttttgacagcttatcagtctgtaggagaatgatcttgaaatgttaaccctgactaaaatttgggagcatatgcct

SEQ ID NO: 404763 - DNA, 120 bp, Artificial Sequence
  ENSG00000147202_45 (sequence is synthesized)
tgctatattatcaagctggtcaaggtagaaatactgatatgtatcatcaccttttccagatacaaacttgccttattttctagtttgtgaacaagaacgaatgaagtactattattgata

SEQ ID NO: 404764 - DNA, 120 bp, Artificial Sequence
  ENSG00000147202_46 (sequence is synthesized)
acttatatatttttatttagagcaatcccacatgcttttcacaaacattaaaaaaaaaaacctttcagggtctttcatgaagttccaatagttgagtgagttaaaaggtttgtttcccag

SEQ ID NO: 404765 - DNA, 120 bp, Artificial Sequence
  ENSG00000147202_47 (sequence is synthesized)
atttgtaatggtcctgctctagccatttgcagttttgttttagatgattggaaagtatatcaccaaaaaaagtatatagtgacatttttagtatgaaaccaaattacactaaggtctttt

SEQ ID NO: 404766 - DNA, 120 bp, Artificial Sequence
  ENSG00000147202_48 (sequence is synthesized)
gttggccatattactgccacacatgagaagcaccatttatgcagattttcttcagaatatttttaaaaggtacagaatccttaaaatattaacaactaattgcatccatcatctcctttg

SEQ ID NO: 404767 - DNA, 120 bp, Artificial Sequence
  ENSG00000147202_49 (sequence is synthesized)
gctgctgtaacaaattaccaccaataatatgatggcttaacacaacagaaacttatttgcttacatttttgaagggcagcaaagccatgctccctccagaggctctagaggagaatcttt

SEQ ID NO: 404768 - DNA, 120 bp, Artificial Sequence
  ENSG00000147202_50 (sequence is synthesized)
ccttgccacgtccaccttttggtggctattggcattttttggcttatggccacatttctctttctgctgtgtcttcacatcaccctcctctgtatacctaatctgcctctgcctctgttt

SEQ ID NO: 404769 - DNA, 120 bp, Artificial Sequence
  ENSG00000147202_51 (sequence is synthesized)
aataaggatccttatgatgacttttagggactacccagattactccaggataatctcctcacctcatgagtcttaacttaattacatctgcaaggcccccttctccaaataagataaatt

SEQ ID NO: 404770 - DNA, 120 bp, Artificial Sequence
  ENSG00000147202_52 (sequence is synthesized)
catggttttggggattaggatgtggctatgtcttttaggaagccactcttagcccaccagagtctgccctttggcccaaaatttatgtctgtctcatgtgtaaaagacattcatcccatc

SEQ ID NO: 404771 - DNA, 120 bp, Artificial Sequence
  ENSG00000147202_53 (sequence is synthesized)
ctaacattaccaaaagtctcaacccattatatcaatcctaagtccaaaatttcattcaaatatcatcggttcaaaagttccaaagcttatcatttagatcatctaaatcaggtatgagtg

SEQ ID NO: 404772 - DNA, 120 bp, Artificial Sequence
  ENSG00000147202_54 (sequence is synthesized)
aaactctgggtatggtctttcctgaggccaaattcctcttcctctgagaaccagtgaaacagaaaagttaatctgctttcaaattacaatggtgggaacaggcataggataacagttaca

SEQ ID NO: 404773 - DNA, 120 bp, Artificial Sequence
  ENSG00000147202_55 (sequence is synthesized)
gacatttctgtctcaaaaaggagagaatggaaattggaatggagtctcctgtcccaatcattttcaaaatctagccaggcaaatttctgttatatttcaaggcctggcagtaatcctctt

SEQ ID NO: 404774 - DNA, 120 bp, Artificial Sequence
  ENSG00000147202_56 (sequence is synthesized)
tctcagggctccaccctttgggcctgtagctcttctttcttggactatggattgggcctctgcctctgtgcctatgggttgcacttcttcctctgttcccacacttgggcctctgcctct

SEQ ID NO: 404775 - DNA, 120 bp, Artificial Sequence
  ENSG00000147202_57 (sequence is synthesized)
gtacctgcagctctgctctcgggatggtgcttcctttatcttgaagggtggcacatgtttgcagctgagaagttttatcaacgggtttcctacctgtagaattctggcagtctcacaatc

SEQ ID NO: 404776 - DNA, 120 bp, Artificial Sequence
  ENSG00000147202_58 (sequence is synthesized)
ttctttcatttttttctgtctctgtcccttttaggcccagttggaagtgtttctgatggtagaacattctcaaaaatcttgtgggtcttctacgtatgtcacattgattcacacattcag

SEQ ID NO: 404777 - DNA, 120 bp, Artificial Sequence
  ENSG00000147202_59 (sequence is synthesized)
aaaagagggtcctcacagatttttcctgaacaaccccatctctattcttggcttctgttgaaacagtcaaataaatccacaagttaatgcctaacctcttcagcactagccaaaggttgt

SEQ ID NO: 404778 - DNA, 120 bp, Artificial Sequence
  ENSG00000147202_60 (sequence is synthesized)
caagacacacccttgggcttatctacagagcacacttttctaacagtgaatctcctaattttagcatctttttttttttttacaatcattcagattgtgaattcaggctcagaatttacc

SEQ ID NO: 404779 - DNA, 120 bp, Artificial Sequence
  ENSG00000147202_61 (sequence is synthesized)
aggctcagaatttacccagtcatcagatactgattccttttgtccacttatatagttattttctctttaaaaaaaaattttttttaatgtattagagatgaggtctcactctgtcaccca

SEQ ID NO: 404780 - DNA, 120 bp, Artificial Sequence
  ENSG00000147202_62 (sequence is synthesized)
ggctgcagtgtagtggtgcaaacatagctccctgtaacctcaaactcccaggctcaagggatcctcctgcatcagccttccaagtagctgggtctacaggtgcatgccaccatgcctggc

SEQ ID NO: 404781 - DNA, 120 bp, Artificial Sequence
  ENSG00000147202_63 (sequence is synthesized)
tttgtagagacttgatcttgctatgttgtccaggctgctctcgaactcctagcctcaagcaatccacccatcttggcctcctaaagtgccggattacaggtgtaagccaccatgcccagc

SEQ ID NO: 404782 - DNA, 120 bp, Artificial Sequence
  ENSG00000147202_64 (sequence is synthesized)
ctgttttgtcaatgtatctgttttctgtcttattttactataagcactaagaagaaactaagctatatctctaacactagacttgaaaatttcctcagctaaacatccaagttcatcatt

SEQ ID NO: 404783 - DNA, 120 bp, Artificial Sequence
  ENSG00000147202_65 (sequence is synthesized)
tattcaacttttcacactactgtagtagacaatttagatagataaactttttgccactatatgacaaggattccctttcttccattttccaataaaatcttcatttccttctaaaccatc

SEQ ID NO: 404784 - DNA, 120 bp, Artificial Sequence
  ENSG00000147202_66 (sequence is synthesized)
actagaaatgcctttaacattcatactactaccatctggtaaaggcaatctagttttttctatcacagccaccaaaattcttctagtctctacccattatccaattccaaagcctttttc

SEQ ID NO: 404785 - DNA, 120 bp, Artificial Sequence
  ENSG00000147202_67 (sequence is synthesized)
acattttaagacatttgttacagaagtacccaatccgtcccagttccacaatctgcattagattcccatggctgctgtaacaaattaccctctagcccagtggcttaaaacaatagaaat

SEQ ID NO: 404786 - DNA, 120 bp, Artificial Sequence
  ENSG00000147202_68 (sequence is synthesized)
ttattatcttgttgttttggaggccaaaagtccaaaattgaggggttggcagggctgaacgtcttctggagactctaagggaaacactcttcccgtgtcttccagtttcttgtggctgcc

SEQ ID NO: 404787 - DNA, 120 bp, Artificial Sequence
  ENSG00000147202_69 (sequence is synthesized)
atcattccttggtttgtgactgcatctccctctcctctgtcttcacatcacttcccctctgtatatataatctacctctgcctctctcttataaggacacttgtgacgggacttagggcc

SEQ ID NO: 404788 - DNA, 120 bp, Artificial Sequence
  ENSG00000147202_70 (sequence is synthesized)
catccagattacccatgataattcccttattccaagattcttaattatatctgaaaggaccttttttccaaataaggtactatcacaggttccagggagtaggatattgaatatcttttt

SEQ ID NO: 404789 - DNA, 120 bp, Artificial Sequence
  ENSG00000147202_71 (sequence is synthesized)
tggggagggggcaccatgcagctcactacactattcattgcacacaaatgaatttttcactttttaagatgcattcttggtgctcaaaccagatcgaagtttgtctctaaaagctattgt

SEQ ID NO: 404790 - DNA, 120 bp, Artificial Sequence
  ENSG00000147202_72 (sequence is synthesized)
ctgcacaggctgctgcatgctctgttgttaaatggatggacaggctattctaaattttggttgatacttttgctactatgggcaattaacttgaaaaaaataatcgatcccaactctgtg

SEQ ID NO: 404791 - DNA, 120 bp, Artificial Sequence
  ENSG00000147202_73 (sequence is synthesized)
ctctgatgtacctcttctgccccttttatgacacctttgaccaaatgccttctatggttcacagtgcaggcacaaaactacctctgatacagaagggttctttacaagcttattttacat

SEQ ID NO: 404792 - DNA, 120 bp, Artificial Sequence
  ENSG00000147202_74 (sequence is synthesized)
accgtgaatccctcacctaaagggagaggtgaaagcaaagactgctttgaatgggtattgagggagattgtgtccataccaagccaccctgaagaagtatttcacttgcagtagaactgt

SEQ ID NO: 404793 - DNA, 120 bp, Artificial Sequence
  ENSG00000147202_75 (sequence is synthesized)
ggatttgtgctgtcatttcaccttggaataaacacctatctctaagcaggaccaagaatgacttgcaatctatatgtaatggctacttacttattcaataaagttaagatatacgttaaa

SEQ ID NO: 404794 - DNA, 120 bp, Artificial Sequence
  ENSG00000147202_76 (sequence is synthesized)
ctcggctgcgggagtaggaagcagctttgcgcgcccgggcggccgatgcgggcactttgaagaatcacgtgtgttgaggccctcttaaagagataggcacctacttttccctccacccta

SEQ ID NO: 404795 - DNA, 120 bp, Artificial Sequence
  ENSG00000147202_77 (sequence is synthesized)
ggctaatccaagatcagctacataaacggcctgagtgctgttttaaacaggattgggtgatggtacaacatgactttttaagataatcaagtagtaaaagtttctagtggaaacatgata

SEQ ID NO: 404796 - DNA, 120 bp, Artificial Sequence
  ENSG00000147206_0 (sequence is synthesized)
gtaagcaaggcttgaggcttgctctcgccttcgtcagcagccctcctcaatcttctccaaactcccgtccccaggccacacagattctcctcaagagagccctataaggacattggtaaa

SEQ ID NO: 404797 - DNA, 120 bp, Artificial Sequence
  ENSG00000147206_1 (sequence is synthesized)
atgtcactgccttcaggacacactacgggtcacactgatcaagttgttcaaagaagagcaagatgttgggatatttaccaaaggagatttagcagtaggtctgaacctgtcaatcctggc

SEQ ID NO: 404798 - DNA, 120 bp, Artificial Sequence
  ENSG00000147206_2 (sequence is synthesized)
atgcattcttcatcccatcagcagcaagatggagatgcagcaatgcatggtgcccacatggactctccagtaagatacactccctatactatttcaccctataatcggaaaggcagtttt

SEQ ID NO: 404799 - DNA, 120 bp, Artificial Sequence
  ENSG00000147206_3 (sequence is synthesized)
cgtaaacaagaccaaacccacgttaacatggagagagagcaaaaacctccagagagaagaatggaggggaacatgccggatgggaccttagggagctggttcaagatcacagttcccttt

SEQ ID NO: 404800 - DNA, 120 bp, Artificial Sequence
  ENSG00000147206_4 (sequence is synthesized)
ggcataaaatacaatgagaagtggctgctgaatttgattcagaatgaatgcagtgtacccttcgtcccagttgagtttcactatgaaaacatgcatgccagcttctttgtggagaatgcc

SEQ ID NO: 404801 - DNA, 120 bp, Artificial Sequence
  ENSG00000147206_5 (sequence is synthesized)
agcatcgcctatgcactgaagaatgtcagtggcaagatttgggatgaggataatgaaaagatatcaatctttgtcaaccctgctggcataccccactttgtgcacagggagctgaagtca

SEQ ID NO: 404802 - DNA, 120 bp, Artificial Sequence
  ENSG00000147206_6 (sequence is synthesized)
gaaaaggtggagcagataaagctggccatgaaccaacagtgtgatgtctcccaggaagctcttgatatccagagactcccattttacccagacatggtgaaccgtgatactaagatggca

SEQ ID NO: 404803 - DNA, 120 bp, Artificial Sequence
  ENSG00000147206_7 (sequence is synthesized)
tcgaatcctagaaagtgcatggctgcctccctggacgtccatgaagagaacatacctacagtgatgtctgcaggggagatggacaagtggaaagggatagagccaggagagaagtgtgcg

SEQ ID NO: 404804 - DNA, 120 bp, Artificial Sequence
  ENSG00000147206_8 (sequence is synthesized)
tccagcaacataaactccatcctggaattgttccccaaattattatgcctggatggccagcagtcacccagagcaactttatgtggtactgaagcccacaagaggttaccaacctgtaag

SEQ ID NO: 404805 - DNA, 120 bp, Artificial Sequence
  ENSG00000147206_9 (sequence is synthesized)
ggaagcttctttggatctgagatgttgaagaatctggtcctgcaattcctgcagcagtattacttgatctatgactctggagatcgacagggtctccttagtgcttaccacgatgaggcc

SEQ ID NO: 404806 - DNA, 120 bp, Artificial Sequence
  ENSG00000147206_10 (sequence is synthesized)
tgcttctccctgagcattcccttcaatcctgaggactcagccccgagcagcttctgcaagttcttcaaggatagcaggaatataaaaattctcaaggacccctaccttcggggggagctg

SEQ ID NO: 404807 - DNA, 120 bp, Artificial Sequence
  ENSG00000147206_11 (sequence is synthesized)
ctgaagcacacaaaacttgatattgtggactccctcagtgcgttgcctaaaactcagcatgacctcagctccttcctggtggacatgtggtaccagacggaatggatgctctgcttttct

SEQ ID NO: 404808 - DNA, 120 bp, Artificial Sequence
  ENSG00000147206_12 (sequence is synthesized)
gtcaacggggtgttcaaggaagtggaaggacagtctcagggttctgttctcgccttcacccggaccttcattgctacccctggcagcagttccagtctgtgcatcgtgaatgacaagctc

SEQ ID NO: 404809 - DNA, 120 bp, Artificial Sequence
  ENSG00000147206_13 (sequence is synthesized)
tttgtgcgggataccagccaccaagggacccagagtgccttgttcaccctagtgcccacagccttctccagctccgtgcctgccttctcccaggagcagcagaaaatgctgccttcgtaa

SEQ ID NO: 404810 - DNA, 120 bp, Artificial Sequence
  ENSG00000147206_14 (sequence is synthesized)
caaccagtgtgactacgtcagagctcctcatgttcttgcatggcccaagatgtatttccctgtgactgaaccaggagatctggctggggctaagaagccgaagcccaactcacagggctg

SEQ ID NO: 404811 - DNA, 120 bp, Artificial Sequence
  ENSG00000147206_15 (sequence is synthesized)
actctcatccttccaaaggggccagttgttctgtgcacttgtccacccctgttacccccaggatctctgttccttttcacaataaagtatggtgtcttgttatgtcaaatccctgcaaaa

SEQ ID NO: 404812 - DNA, 120 bp, Artificial Sequence
  ENSG00000147206_16 (sequence is synthesized)
tgtcatgccatctcttcctctggccaatgctaggagctgggccctccttggggagaaacctgggtttcctgagtcaagggaccagaagcgggccacattcctgaggcaggagtggaaggc

SEQ ID NO: 404813 - DNA, 120 bp, Artificial Sequence
  ENSG00000147206_17 (sequence is synthesized)
agagggcagaggaggttgaggagacagaaggacaggcctctcagggcactgcccctccttccctccttctccacctcacatcatcctgcctgggtcctcagaggagccctgggtagcccg

SEQ ID NO: 404814 - DNA, 120 bp, Artificial Sequence
  ENSG00000147206_18 (sequence is synthesized)
agatgggtagcattcctcggtcaaggcatcagcacagaggggcacaggagtctgggaccatcagaagagaatgcagtggtcgggagagggggtccccagactctgaaccccatgctgagc

SEQ ID NO: 404815 - DNA, 120 bp, Artificial Sequence
  ENSG00000147206_19 (sequence is synthesized)
tggggcttgacccttcacttctcccgggagaaggtctcctgtccccgtggctgctctgtttcccatgcccagctcagactgagctcacacaggtgagaaaggctccagctgcatccagtg

SEQ ID NO: 404816 - DNA, 120 bp, Artificial Sequence
  ENSG00000147206_20 (sequence is synthesized)
ggccccagcccaacaggcgcatgttttcctttcttgcctcggtccccagggccagctggggccagtgagggaaagggctgcagcaggggagcccttttcttctctcttcctccctgaact

SEQ ID NO: 404817 - DNA, 120 bp, Artificial Sequence
  ENSG00000147206_21 (sequence is synthesized)
ccaccaccacggtagagcatctttcccttccctttgctttgcatcctgtttctccattgtctctcctctcatatgtctcacctgtctctccctcccctaccttcaccccgtttctgccat

SEQ ID NO: 404818 - DNA, 120 bp, Artificial Sequence
  ENSG00000147206_22 (sequence is synthesized)
cattcccctgccttccccttctgcctcctgagcctgcgtcactcacctccctgtcccagcatcctgggccatccctaagagctgacctggtcttggccagggccaggacaggcagactga

SEQ ID NO: 404819 - DNA, 120 bp, Artificial Sequence
  ENSG00000147206_23 (sequence is synthesized)
cggacatccagtgaggtagcagagccctgggctcccaccccatttcctactccctgcagagccttcagtggggacttggacaaaggtgagagagggatggagggaggggaagaaagtcct

SEQ ID NO: 404820 - DNA, 120 bp, Artificial Sequence
  ENSG00000147206_24 (sequence is synthesized)
gaagcctgggctcccaatgctgcccagggctgcagaggcaggaacttcggagtgtaggtggacacactgcactgtgtctctgacgtaggtgtgattgctcccatgaggaggacagctcca

SEQ ID NO: 404821 - DNA, 120 bp, Artificial Sequence
  ENSG00000147206_25 (sequence is synthesized)
ctttggatctgagatgttgaagaatctggtcctgcaattcctgcagcagtaagtatccctgggaatctgaggcaagagaaggctaggtcagatgaatttacccaagtacaagtctgccta

SEQ ID NO: 404822 - DNA, 120 bp, Artificial Sequence
  ENSG00000147206_26 (sequence is synthesized)
cagtcagactttcaagactcatttggcacccaggccacagagatagcctgtcctcactggtctccaacaggtattacttgatctatgactctggagatcgacagggtctccttagtgctt

SEQ ID NO: 404823 - DNA, 120 bp, Artificial Sequence
  ENSG00000147206_27 (sequence is synthesized)
gtgtttgatagcgcccttctgcaggaggaggcagcactagtcttctgggaggaccacagaccctctccttccccctcgccccactcctctctctgtgtcactcattcatctgtgcttaga

SEQ ID NO: 404824 - DNA, 120 bp, Artificial Sequence
  ENSG00000147206_28 (sequence is synthesized)
tgtgactcccctgcagaaagacaccagctcctggagatgcctgcactggccagaccacccactcctgctcctctttttcttctaggagcagcttctgcaagttcttcaaggatagcagga

SEQ ID NO: 404825 - DNA, 120 bp, Artificial Sequence
  ENSG00000147223_0 (sequence is synthesized)
gagtgcagaaggttctgggaagtaggagaccccactggctttggtcccctaagaatggactctgctgcctgtgctgctgctgccacccctgttccagccctggctttggccctagctcca

SEQ ID NO: 404826 - DNA, 120 bp, Artificial Sequence
  ENSG00000147223_1 (sequence is synthesized)
gacctagcacaagccccactggcactccctggcctgttaagcccatcttgccttctctcctctggacaagaagtaaatgggagtgaaagaggaacttgtctctggaggccctggctgtct

SEQ ID NO: 404827 - DNA, 120 bp, Artificial Sequence
  ENSG00000147223_2 (sequence is synthesized)
tccacaaatgactccccaaggcagatgaggaagctggtggatttggctgctggtggggcaacggctgctgaggtcaccaaggctgaatccaagttccatcaccctgtcaggctcttctgg

SEQ ID NO: 404828 - DNA, 120 bp, Artificial Sequence
  ENSG00000147223_3 (sequence is synthesized)
cctaaatcccgctccttcgactatctgtacagtgctggggagattttactgcagaactttcctgtccaggcaaccatcaacctatacgaggactcagacagcgaagaagaagaggaagat

SEQ ID NO: 404829 - DNA, 120 bp, Artificial Sequence
  ENSG00000147223_4 (sequence is synthesized)
cctaacctatccaaatggaggcagccagagtctgattggggttcagtttgtctggcaagttttcacagacatcagttagccggaagtattagtccagcagatagagctttctggactgaa

SEQ ID NO: 404830 - DNA, 120 bp, Artificial Sequence
  ENSG00000147223_5 (sequence is synthesized)
aattgggtcatctagctgcccagctcaccctggcttacctgaatggcctgtgagctcaggcctcttgcatctcattgtctgggctgctgttgtgttgaccatgggagggttctaggagct

SEQ ID NO: 404831 - DNA, 120 bp, Artificial Sequence
  ENSG00000147223_6 (sequence is synthesized)
ctagaaggaaggcttgctgaagcccccaggaagcagagcagggcagggaatgcccttgtggagggaagtagtcattcctcaggccctttgactccctagccttcccaggtggccatgtag

SEQ ID NO: 404832 - DNA, 120 bp, Artificial Sequence
  ENSG00000147223_7 (sequence is synthesized)
tcccgtctctctgtggaaagcctgacttctggcttcaccccaaggaataccaacagcagatccatgcaaggttggggtgcctttttgatgagtcttacaggaagggaaggcagtgtgtag

SEQ ID NO: 404833 - DNA, 120 bp, Artificial Sequence
  ENSG00000147223_8 (sequence is synthesized)
agaatcggcttgctctggggatgcctccccattttgcctgctgtccattgaagtctgtgtgttggcatgagatgaatcaggagaaaaataaactggatggtgttttcctttttcttggaa

SEQ ID NO: 404834 - DNA, 120 bp, Artificial Sequence
  ENSG00000147224_0 (sequence is synthesized)
aatcgttgccagcggggtgtggacttcgccgctgaccccacctccgccgctttgggtaatttagagccgcgcgccgggcgggaatgtaagatggcggagtagcaacgcaaagcgcttggt

SEQ ID NO: 404835 - DNA, 120 bp, Artificial Sequence
  ENSG00000147224_1 (sequence is synthesized)
attgagtctgtggccgacttcggttccggtctctgcagcagccgtgatcgcttagtggagtgcttagggtagttggccaggatgccgaatatcaaaatcttcagcggcagctcccaccag

SEQ ID NO: 404836 - DNA, 120 bp, Artificial Sequence
  ENSG00000147224_2 (sequence is synthesized)
gacttatctcagaaaattgctgaccgcctgggcctggagctaggcaaggtggtgactaagaaattcagcaaccaggagacctgtgtggaaattggtgaaagtgtacgtggagaggatgtc

SEQ ID NO: 404837 - DNA, 120 bp, Artificial Sequence
  ENSG00000147224_3 (sequence is synthesized)
tacattgttcagagtggttgtggcgaaatcaatgacaatttaatggagcttttgatcatgattaatgcctgcaagattgcttcagccagccgggttactgcagtcatcccatgcttccct

SEQ ID NO: 404838 - DNA, 120 bp, Artificial Sequence
  ENSG00000147224_4 (sequence is synthesized)
tatgcccggcaggataagaaagataagagccgggcgccaatctcagccaagcttgttgcaaatatgctatctgtagcaggtgcagatcatattatcaccatggacctacatgcttctcaa

SEQ ID NO: 404839 - DNA, 120 bp, Artificial Sequence
  ENSG00000147224_5 (sequence is synthesized)
attcagggcttttttgatatcccagtagacaatttgtatgcagagccggctgtcctaaagtggataagggagaatatctctgagtggaggaactgcactattgtctcacctgatgctggt

SEQ ID NO: 404840 - DNA, 120 bp, Artificial Sequence
  ENSG00000147224_6 (sequence is synthesized)
ggagctaagagagtgacctccattgcagacaggctgaatgtggactttgccttgattcacaaagaacggaagaaggccaatgaagtggaccgcatggtgcttgtgggagatgtgaaggat

SEQ ID NO: 404841 - DNA, 120 bp, Artificial Sequence
  ENSG00000147224_7 (sequence is synthesized)
cgggtggccatccttgtggatgacatggctgacacttgtggcacaatctgccatgcagctgacaaacttctctcagctggcgccaccagagtttatgccatcttgactcatggaatcttc

SEQ ID NO: 404842 - DNA, 120 bp, Artificial Sequence
  ENSG00000147224_8 (sequence is synthesized)
acatctctatgatccttgcagaagccatcaggagaactcacaatggagaatccgtttcttacctattcagccatgtccctttataatagagtaacttctgaggctttttgagaataaaat

SEQ ID NO: 404843 - DNA, 120 bp, Artificial Sequence
  ENSG00000147224_9 (sequence is synthesized)
ccaccccacccttgtttccccttggtatttgatgacaaattcagcagaagacccggcttgctccagtgtagctttctacatcccacatcaggtatattagagcttatccgaactggggaa

SEQ ID NO: 404844 - DNA, 120 bp, Artificial Sequence
  ENSG00000147224_10 (sequence is synthesized)
agacggattgagattaactgctgggacctcctacctgcattatctcattctggcttccttgataattctgtgggccttgcagctttaactatagctcagctgctgcaagatttcagactt

SEQ ID NO: 404845 - DNA, 120 bp, Artificial Sequence
  ENSG00000147224_11 (sequence is synthesized)
ttgaggatgttgtgtgagggtgtttgactgtgactggggaagctcagactactttgtatgtgaatgcttcagggttttctttgttgagaacaactagcaacaaaggcaacccatgtgtga

SEQ ID NO: 404846 - DNA, 120 bp, Artificial Sequence
  ENSG00000147224_12 (sequence is synthesized)
ccagttctccccaaggtctatgctaaattatagcaagagccctgggcaaccccaaacctagtcctggtagctgagcaccctgtaaggcaggagcaggcagctcagcttgagcagacattg

SEQ ID NO: 404847 - DNA, 120 bp, Artificial Sequence
  ENSG00000147224_13 (sequence is synthesized)
ggtggggggtggggggtggttgaggggggaggcagcacagtgcagcaaatgtttcttgggaggaagaagcctgatccatcaccatctgcttgactatgtagcttggattctcctttgtac

SEQ ID NO: 404848 - DNA, 120 bp, Artificial Sequence
  ENSG00000147224_14 (sequence is synthesized)
ctatccctttcgatttggctttaccttcatctatcttgatcctttcctggccaaatatcctcttgggcccaaatgaacattgtaccatagtcttctggaaagcaaacatgcttcctgcta

SEQ ID NO: 404849 - DNA, 120 bp, Artificial Sequence
  ENSG00000147224_15 (sequence is synthesized)
tgtaattgctaacattcatattagatgatgtgctgtagcttgatcttccttagcctactgccactgaggcagtaggttttaggtggtatcgtagtgccttttgattaatttaagtattta

SEQ ID NO: 404850 - DNA, 120 bp, Artificial Sequence
  ENSG00000147224_16 (sequence is synthesized)
attttcatcttccttctttggatctatttggcctctcaaatgaactgagattcctgttaaaaaagattgatgttattgtctcttgtagaggaaactaataaagtgtgtgtacctgtgtga

SEQ ID NO: 404851 - DNA, 120 bp, Artificial Sequence
  ENSG00000147224_17 (sequence is synthesized)
aggtggtgactaagaaattcagcaaccaggagacctgacccagctgataaagtaatgtcaccgataatggacagcttcttcccgaattattgtgctactgattgtgatgcaaatgatagt

SEQ ID NO: 404852 - DNA, 120 bp, Artificial Sequence
  ENSG00000147224_18 (sequence is synthesized)
gtaaacattgccatctgtaaccaggcaataccttagttaaaagaggcttacaaactgctgtctttagatttttccaaaccattatggctcatgggccttaataaagaatacaaaacagga

SEQ ID NO: 404853 - DNA, 120 bp, Artificial Sequence
  ENSG00000147224_19 (sequence is synthesized)
cagtggaagctaaatattggtgtttgaaaggtgggaggaaaggactgatgatgctgaagactgcagagaagccaaaaattatgcccaagtacatctgaaataaactagatatcaacaaca

SEQ ID NO: 404854 - DNA, 120 bp, Artificial Sequence
  ENSG00000147231_0 (sequence is synthesized)
ggcagagtagcgatcgtcgccaaagcgcgcggttttatttctctccgctttggacggggcaaactagcttttgggagtgaagcgggtacgcagttatccaacaatgtctggtgagtcagg

SEQ ID NO: 404855 - DNA, 120 bp, Artificial Sequence
  ENSG00000147231_1 (sequence is synthesized)
acagcctgaggctggtccctcacatgcagggctagattggccgaaccctgagaggaatcgggctggggtcccgggaggggtgatccgaagagctggttcccaagggcccaggtcctggat

SEQ ID NO: 404856 - DNA, 120 bp, Artificial Sequence
  ENSG00000147231_2 (sequence is synthesized)
ccaaaaggttcttgagcagattatggactcacctcgccagtgtgtcaccccctcggaggtggtgcctgtaactgtgctggccgtccagaggtacctgttagaggatgagccacgcgacac

SEQ ID NO: 404857 - DNA, 120 bp, Artificial Sequence
  ENSG00000147231_3 (sequence is synthesized)
ggtgcccaagcctcccctttattgctatgatgtgacgatctcagatggggtgtaccaggagaagtgctacctggaccccagcttgaactctctcgtatatcaaaatattcttaaagttgg

SEQ ID NO: 404858 - DNA, 120 bp, Artificial Sequence
  ENSG00000147231_4 (sequence is synthesized)
cattcaaatgagaatttccagggtctcatgtctttacaatgagaaaaggataggccaggggatcctgtgcatagataacgtccactgtggggagacttcagacagtatttctttagaaac

SEQ ID NO: 404859 - DNA, 120 bp, Artificial Sequence
  ENSG00000147231_5 (sequence is synthesized)
tcccttcagaaatagagcgcaccaggagaaaccagagaggcctttaagaggcgggaagagtcattacctggcgctgtggaataacgaagatccctatggagatatctggttaacagacaa

SEQ ID NO: 404860 - DNA, 120 bp, Artificial Sequence
  ENSG00000147231_6 (sequence is synthesized)
gcaacctgaggaacacaactttagcgataccaaaataatttccctttctcatcttgaaatgacctggactaacagaagaaattttcctgcattgcttgtgaggatcttacataaatcaaa

SEQ ID NO: 404861 - DNA, 120 bp, Artificial Sequence
  ENSG00000147231_7 (sequence is synthesized)
actgcgatactatggaaaacctgataaaaagatgattgaaccatatcagacctttttggaagttgctgacagttcaggcacagtgtcagtgattatgtggaatgccctgtgtcctgagtg

SEQ ID NO: 404862 - DNA, 120 bp, Artificial Sequence
  ENSG00000147231_8 (sequence is synthesized)
gtataaaagtttgcgggttggtttagttcttctgcttcaagactattctgttaaaaagagttatccattcagaatacagcctgtccccgtggatccacagatcaaactaatttctacaat

SEQ ID NO: 404863 - DNA, 120 bp, Artificial Sequence
  ENSG00000147231_9 (sequence is synthesized)
ggaaatctgcctgaatcttcgagatcccccaacaaatataattatcattccagaaaagcaggtgaaaccagaatggagactgccaaagctaaatcaccgatttaccacaaggtcagaact

SEQ ID NO: 404864 - DNA, 120 bp, Artificial Sequence
  ENSG00000147231_10 (sequence is synthesized)
ggatgatatgccagaaaattgcatctgtgatgttattggccttttagtttttgtaggaagggtccagcggtcaaaaaagaaagaaaaccgtgaagatttttggtcatatcgctggattca

SEQ ID NO: 404865 - DNA, 120 bp, Artificial Sequence
  ENSG00000147231_11 (sequence is synthesized)
cattgctgacggtacttcagaacaaccatttatagtggaactgttttcaacatcgcagccagaaatctttgaaaatatttacccaatggcatattttgtgtgtacacagttgaaagttgt

SEQ ID NO: 404866 - DNA, 120 bp, Artificial Sequence
  ENSG00000147231_12 (sequence is synthesized)
cagaaatgacaatcaagtacctaagctgctttacctcaccactacaaatgagagtggagtgtttattactggtcatagaggccagccgtatacgtatgatgccaaggtaaaaaactttat

SEQ ID NO: 404867 - DNA, 120 bp, Artificial Sequence
  ENSG00000147231_13 (sequence is synthesized)
tcaatggattagaacaaagtctgattccggggaacagaagaatatggttattggtggatattacccctatccaccagtgccagagacattttccaagtatagtagttctattaaagttga

SEQ ID NO: 404868 - DNA, 120 bp, Artificial Sequence
  ENSG00000147231_14 (sequence is synthesized)
gtcgctcttgacagctataagtgaagtcaggaaggagattgaagacttgcagtatagggaacaaaagcgcattgcaattcaggggataattactgctataaagtatatcccccatagcag

SEQ ID NO: 404869 - DNA, 120 bp, Artificial Sequence
  ENSG00000147231_15 (sequence is synthesized)
tgcgactgaaagtgcctcagcatcagaaacacttcggaatgctaacagaccctcgacctctcaagcagctagagtagaaattcaagaaagaaatggtaaacggcatcaagatgatgagcc

SEQ ID NO: 404870 - DNA, 120 bp, Artificial Sequence
  ENSG00000147231_16 (sequence is synthesized)
gtatttccaaactacatctacaaatttaagtctgagcaataaaataagaattcttcaaggcccacacgctaatccagttgctgtacctcaaccaggagcttctgtacaaacaaagggaat

SEQ ID NO: 404871 - DNA, 120 bp, Artificial Sequence
  ENSG00000147231_17 (sequence is synthesized)
taaaccgggcatgccaagcatcttcaaccgtcgagcaaatataaatgctaatctgcaagggaaagccagaaaaactataagtgataggtgggagagtcagctgtggagagagaaaaagtt

SEQ ID NO: 404872 - DNA, 120 bp, Artificial Sequence
  ENSG00000147231_18 (sequence is synthesized)
tggcttaatagatcacctacactacagccgtgtttatcctgaaagtattccacggaaatttatgtttgaacacagaaagtttcttagtgaccagtataattctcagcctgcgaaatatgt

SEQ ID NO: 404873 - DNA, 120 bp, Artificial Sequence
  ENSG00000147231_19 (sequence is synthesized)
accaccagaaggaaggcccccaaaacttgatgattttaagagcgcccgaagccttggacattttgaagtaaccatactaggtctgaaccatgagatagcaatcgatgttgctttcctacc

SEQ ID NO: 404874 - DNA, 120 bp, Artificial Sequence
  ENSG00000147231_20 (sequence is synthesized)
catgtattgtccagaagatattcgaacatctcaaatagacacactgttgacctccatgaattacagctgtgcatatccacaggacacaactggaaatgaccgattgccaggtccaagagc

SEQ ID NO: 404875 - DNA, 120 bp, Artificial Sequence
  ENSG00000147231_21 (sequence is synthesized)
ggttgcaggtgatattataaaagcagcaactgaactggatagagtgcatatcgtcggtatcttggatatctgtaatttgggtaataataaagtggaagtctatttgcacaagatttatag

SEQ ID NO: 404876 - DNA, 120 bp, Artificial Sequence
  ENSG00000147231_22 (sequence is synthesized)
tccagagaatacttcttaaaagttagcaaatgaaattattacagattatacgagtgtactgctttaaagatattccatcattttgctggtaatttcagtaactgttttcagcaagaatat

SEQ ID NO: 404877 - DNA, 120 bp, Artificial Sequence
  ENSG00000147231_23 (sequence is synthesized)
tacatgagctctaaagttattaagcagttttatgttcgttttgtgtttagggagctttttaaaacacttcatttcagattcattattgaaaaaggtcatcaaaataatttttgtgtataa

SEQ ID NO: 404878 - DNA, 120 bp, Artificial Sequence
  ENSG00000147231_24 (sequence is synthesized)
gggaatttaccttgcttaccttactagtatgactattatcttgacttctggtaatttatgttcactattccatttgtgaagtgtactttcattctaaagcctcagtataaggcatcctaa

SEQ ID NO: 404879 - DNA, 120 bp, Artificial Sequence
  ENSG00000147231_25 (sequence is synthesized)
cttacaagagtaactttccatggacatttaacatccttccaattttattcacatataatgggaaattttgaattgccagtttgaagactgttctcctaaagtgttcaacctgcacttctt

SEQ ID NO: 404880 - DNA, 120 bp, Artificial Sequence
  ENSG00000147231_26 (sequence is synthesized)
acaaccaaggtagtttgtatcattttcaaaagtacacattattagggtctagttgcccctggtccttagcttgctcagctgcaaaataagcgtgctaaattaaattgtcttaaggttttt

SEQ ID NO: 404881 - DNA, 120 bp, Artificial Sequence
  ENSG00000147231_27 (sequence is synthesized)
ccacttcattttgtgactttgtgtggttcgaatttctcagtattttaaccagtgtgttgatgttaaagtcaaaggctgcagtatgtctatattcttgctgtactcattggtagtttcagt

SEQ ID NO: 404882 - DNA, 120 bp, Artificial Sequence
  ENSG00000147231_28 (sequence is synthesized)
atatgtaatgtgagtttaaatagtgaaattgtatctcatattaacatttcaaatgctcatattgaaaatggaaaatagtaaacacgggaattgattttattctggttgtctataatactt

SEQ ID NO: 404883 - DNA, 120 bp, Artificial Sequence
  ENSG00000147231_29 (sequence is synthesized)
cattttaaatgtaaatggccactctgcatttgcaaggcccggtggttgacatctgtgtggtttgttagatgagacaaaatgaccattaaatgagtttatagattattctgtatcaagata

SEQ ID NO: 404884 - DNA, 120 bp, Artificial Sequence
  ENSG00000147231_30 (sequence is synthesized)
aatctgattccagttaagctataaacttgtgggattttcttgtagccctatagttctgtgacttcatttgctatacgctttaaatgtgttgagcagcctatgaacctaaagacatactgc

SEQ ID NO: 404885 - DNA, 120 bp, Artificial Sequence
  ENSG00000147231_31 (sequence is synthesized)
agtttgttcataaatgtattcagtcttttattctttataattgtgtgtaaatgttaactaaacagtggattcctctcgtgttacagttttgagtgaattattaaagaagttaaaatgcaa

SEQ ID NO: 404886 - DNA, 120 bp, Artificial Sequence
  ENSG00000147231_32 (sequence is synthesized)
ccttctaaatatgtttatattttatatgtatggcttatgctatttcaattagtcatctttattcttttcttttatgggagtgatctaaagtttagcaacattcaccgataatagctttgt

SEQ ID NO: 404887 - DNA, 120 bp, Artificial Sequence
  ENSG00000147231_33 (sequence is synthesized)
cttaatgcagatctaaaaatatatgtcacgtattttctatatagttttccctatatctcgcatggtgctctaaagattaatactttgatttttatcagactggaagaaaagagaaaacac

SEQ ID NO: 404888 - DNA, 120 bp, Artificial Sequence
  ENSG00000147231_34 (sequence is synthesized)
aagagaaaacacagatgataaccaactggagatataggttgagtattcctaatccaaaaatccgaaatctgaaatgttccaaaacctgaaacttctttttttttttttgagacggagtct

SEQ ID NO: 404889 - DNA, 120 bp, Artificial Sequence
  ENSG00000147231_35 (sequence is synthesized)
gcctaacctgaaacttcttgagtactgaagtgacactcaaagaactactcattggagcagttcagattttggaattttgcattagggaagctgaactgataagtataatacaaatattcc

SEQ ID NO: 404890 - DNA, 120 bp, Artificial Sequence
  ENSG00000147231_36 (sequence is synthesized)
tttattttgcaaatgaggggtacagagtggaagcctgtattcaaatttaactgataaaagtattttgcctatttcacaaaattatatagaaggatgccagatataaacacagtgtctcac

SEQ ID NO: 404891 - DNA, 120 bp, Artificial Sequence
  ENSG00000147231_37 (sequence is synthesized)
ttgattatgaaaaatgaatacactaaaattgtagtcttttatgagattaataattgtgaattagcctaaagtgttttctctaaattattggttttagaatgctaacagaccctcgacctc

SEQ ID NO: 404892 - DNA, 120 bp, Artificial Sequence
  ENSG00000147234_0 (sequence is synthesized)
atggagactctggatagccagagggtccaggaccgcctgctggcagccccaggatgcagctccccttctggccaacaggaactcttttccagtcatgtgatgcaggaagagagcgcaaat

SEQ ID NO: 404893 - DNA, 120 bp, Artificial Sequence
  ENSG00000147234_1 (sequence is synthesized)
gatatggaatgtgagcagctgccagcagagatactgcgacaagtgaccgttcaccgagaccctatatatggctttggcttcgtggctggcagtgagaggcctgtggtggttcgatctgtg

SEQ ID NO: 404894 - DNA, 120 bp, Artificial Sequence
  ENSG00000147234_2 (sequence is synthesized)
aggccaggaggcccctctgagaacaagctcctggctggtgaccagattgtggctattaatgaggaagacgtgagtgaagccccgagggagagactcatagaacttatcaggagcgctaag

SEQ ID NO: 404895 - DNA, 120 bp, Artificial Sequence
  ENSG00000147234_3 (sequence is synthesized)
gaattcatcgttcttacagttctgcacactcatcagtcccccaaatctgctttcatcagtgctgcgaagaaggccaagttgaggtccaatcctgtgaaggttcgattttctgagcaggtg

SEQ ID NO: 404896 - DNA, 120 bp, Artificial Sequence
  ENSG00000147234_4 (sequence is synthesized)
gcagttggagaaacagatgcaaaaatgatgaagaaggaagctctcctcctcatccctaatgtcctgaaggttttcttagaaaatgggcagatcaagtcattcacatttgatggtcggacc

SEQ ID NO: 404897 - DNA, 120 bp, Artificial Sequence
  ENSG00000147234_5 (sequence is synthesized)
actgttaaggatgtgatgttgacattacaggaccgcctttccctgaggttcattgagcactttgctcttgtccttgagtatgccgggccagaacagaatcacaagtttctgcttcttcag

SEQ ID NO: 404898 - DNA, 120 bp, Artificial Sequence
  ENSG00000147234_6 (sequence is synthesized)
gacaagcaacccctggcttatgtggtacagcggacacactatcatggaatgaaatgcctcttccgaataagcttctttcccaaagaccctgtggagctgctgcgtcgggatcctgctgct

SEQ ID NO: 404899 - DNA, 120 bp, Artificial Sequence
  ENSG00000147234_7 (sequence is synthesized)
tttgagtacctatacatccagagtcggaatgatgttattcgagaacgctttggaatggatcccaagccagagatgcttttgggccttgctgcgctccacatctatatcactgtctcagcc

SEQ ID NO: 404900 - DNA, 120 bp, Artificial Sequence
  ENSG00000147234_8 (sequence is synthesized)
actcgacctagtcagaagatctcgctcaagaatgtggagaaggagtggggcctggaaccctttcttcccccctccctcctgcaggtcatcaaagagaagaacctccggaaatctctctct

SEQ ID NO: 404901 - DNA, 120 bp, Artificial Sequence
  ENSG00000147234_9 (sequence is synthesized)
cagcaactgaaggctcaccaaacacatccttcctgcggcaccaagggctctgcaattcaggcaaagctccagtatctacgaattctgaatgaacttcctaccttcacgggcgttttgttc

SEQ ID NO: 404902 - DNA, 120 bp, Artificial Sequence
  ENSG00000147234_10 (sequence is synthesized)
aacactgtaggcctggatgagaagcagtcggccaccacgctcctggtgggaccccgtcatggcatcagccatgttattgacctcaaaaccaacctcaccactgtgctgtccgagttcagc

SEQ ID NO: 404903 - DNA, 120 bp, Artificial Sequence
  ENSG00000147234_11 (sequence is synthesized)
aagatcagcaagatccagctgttccgggagaaccagggcgtggcccgggtggagaccagcatcatggatgccaagcctctggtgctgttgatggagtggcctgaagccaccaactttgcc

SEQ ID NO: 404904 - DNA, 120 bp, Artificial Sequence
  ENSG00000147234_12 (sequence is synthesized)
tgcctgatcgcggggtactgccgcctcttgctggattccaggaagatggtcttctccaggcctgccagccagccacttccacctccaatgatcaaggcagattacatgcacagcgcccac

SEQ ID NO: 404905 - DNA, 120 bp, Artificial Sequence
  ENSG00000147234_13 (sequence is synthesized)
cgccctgtcactgggggccacctggggaaaaaggagagtagttatgtgggcagcgtgggcaccagccccaggaaatcgagccgctgcacgcccccacctgccgactctgagcttgtcagc

SEQ ID NO: 404906 - DNA, 120 bp, Artificial Sequence
  ENSG00000147234_14 (sequence is synthesized)
ttctgctacctccatatgcgggaacaaaggaaggagcaggaaagccggacagatgtcaacgagaacctaatcttctttgaggagaccaggccccgaaccaagtctgaccccacatccaaa

SEQ ID NO: 404907 - DNA, 120 bp, Artificial Sequence
  ENSG00000147234_15 (sequence is synthesized)
agctctggccaaggttatgaggtagtccctgatgactttgatgcagctagcctagaccacgagccttgtgccagcagggcccggtcctacaccttggacaattcccttggggctgaagcc

SEQ ID NO: 404908 - DNA, 120 bp, Artificial Sequence
  ENSG00000147234_16 (sequence is synthesized)
ctgaatttctactgtgactcttgcaaagccaaacttcaggagcagctgggccctcgcaaaggtgggaagcctggctcctctcgtgacaatatagtagatttgatgtccctcccaccacct

SEQ ID NO: 404909 - DNA, 120 bp, Artificial Sequence
  ENSG00000147234_17 (sequence is synthesized)
gggagtgaggaggaggaggaggaggaagatgagacaacttctctgttgccagccattgctgccccaccccctggtttccgagacaacagctctgatgaggatgaccccaagcgccgggct

SEQ ID NO: 404910 - DNA, 120 bp, Artificial Sequence
  ENSG00000147234_18 (sequence is synthesized)
gtccagagccaggaacaaggacgccacctgcgtgggcttctgtacgatgagattccagtgacattgattgacagtgtgcagacccggacagttcgagatcatgcccaggagctagatgat

SEQ ID NO: 404911 - DNA, 120 bp, Artificial Sequence
  ENSG00000147234_19 (sequence is synthesized)
gccctggtgtccactctgcaggctctagaagccctggctgcatccgaggatggaccacacccaccacccccacagactgcaggtctgattgtgctggccacaatcactcctgaatcatcg

SEQ ID NO: 404912 - DNA, 120 bp, Artificial Sequence
  ENSG00000147234_20 (sequence is synthesized)
ctggactcaggtcatgaaaccaactcttcagagctcacagacatgtcagagatgatgtcggccatgaagcagcaccagaacaccacctacttcctggcccagcacctcaacaaggacagc

SEQ ID NO: 404913 - DNA, 120 bp, Artificial Sequence
  ENSG00000147234_21 (sequence is synthesized)
ctccttgcccgcaaggacctgcccttccggatccagagctgtgcagcccaggccgttcttacggccccttactctcttgggcgcccggatcccaacccatctctccaacccattgccaca

SEQ ID NO: 404914 - DNA, 120 bp, Artificial Sequence
  ENSG00000147234_22 (sequence is synthesized)
ggccagagtcctggcccccctggcgctcggaggaagctgccccagtcagagggccaggtacagggagaacgaacatactccttggcagtgcacccagcactgtccccacagcttagtgaa

SEQ ID NO: 404915 - DNA, 120 bp, Artificial Sequence
  ENSG00000147234_23 (sequence is synthesized)
cagaagaatctgagtctgctgtccccagttcctgaggacaaagggcctggccacactagggcaggcctagaaatgtcactgagggcagccacatcatccctcagtgaagagcaggtctct

SEQ ID NO: 404916 - DNA, 120 bp, Artificial Sequence
  ENSG00000147234_24 (sequence is synthesized)
gagctgagggacaacctgcccaaggaggtcaggttgagccccaagcttatcctcgacccaaagagcagtgtgacccctgccatcatctcggccgccctacagcaagtggttcacaataag

SEQ ID NO: 404917 - DNA, 120 bp, Artificial Sequence
  ENSG00000147234_25 (sequence is synthesized)
agtctagtcactgctggtggggctttggggaacccccccagcaggggtgagagaaggctggaggccagcatggggaggccagaggttagcatgatgagcagcagtgccagtaagaatctg

SEQ ID NO: 404918 - DNA, 120 bp, Artificial Sequence
  ENSG00000147234_26 (sequence is synthesized)
aagttcaaaattagccccagtgctccagagacctcatggaattctcaacatcagctgggtgcagaggtctcttccagccccagagcacccacaggcagccgggctgacagcctgcacctc

SEQ ID NO: 404919 - DNA, 120 bp, Artificial Sequence
  ENSG00000147234_27 (sequence is synthesized)
tcccaacaagaggacagtctgcctgttcaaaatttccctcccaaaagctatcttttgcgaacaagccgagagtcagtgggcaagcaagctacaggggaggtggcaggcaaaggcgggcca

SEQ ID NO: 404920 - DNA, 120 bp, Artificial Sequence
  ENSG00000147234_28 (sequence is synthesized)
gtgggtggtaagcccaccctgcagaagcagggcaccatctccagccaaggggagaaggcgcagctggagagcacacccaaaagaagcaagctcgaagagaccagcctggttccccgagct

SEQ ID NO: 404921 - DNA, 120 bp, Artificial Sequence
  ENSG00000147234_29 (sequence is synthesized)
acctaccccatggctctgcagagccccagctgccagtcaagaagccacagccccagctgccagcctcatggccacagccccagcagccagtctcgaggtcagagccccagctgccaacct

SEQ ID NO: 404922 - DNA, 120 bp, Artificial Sequence
  ENSG00000147234_30 (sequence is synthesized)
aggccctgccaaacccaagtcatcccgaggtcctttccggctacgcaatttattctctgccaccttcccaacccgccagaagaaggagacagatgagcggcaggcccaactgcagaaggt

SEQ ID NO: 404923 - DNA, 120 bp, Artificial Sequence
  ENSG00000147234_31 (sequence is synthesized)
aaagcagtatgaactggagttccttgaggaacttctaaagccaccaagccagggggagctgccaggcaccgagtacctgcaacctccagcacctggccgctgcagctgccagctccgcag

SEQ ID NO: 404924 - DNA, 120 bp, Artificial Sequence
  ENSG00000147234_32 (sequence is synthesized)
cagccctgtgcagcaggggcctggcatgtcccgtgagcagaggcgcagctgtgactgcaagcgcatctgccgggggggccggccacaagccacccagacaccagtgcccagcctccgggg

SEQ ID NO: 404925 - DNA, 120 bp, Artificial Sequence
  ENSG00000147234_33 (sequence is synthesized)
gagggaaagggacagagtcctccctagccagaggcagccagaggctggcccaggcgtgagcctcagcagccccatcaatgtccagcgcattcgttctaccagcctggagtcccgagagtg

SEQ ID NO: 404926 - DNA, 120 bp, Artificial Sequence
  ENSG00000147234_34 (sequence is synthesized)
ccgatcggaccctgagagtggtgtttcgtgcctgaccacgtgtgcctcggggggcgagtgtctgggagctcccaattacaggaaactgatgcgccgctacagtatcagtgagctggacca

SEQ ID NO: 404927 - DNA, 120 bp, Artificial Sequence
  ENSG00000147234_35 (sequence is synthesized)
gggtgacagggcctcgctgacctcggatgtctacccacatcctcccctgggcatgctgcccagggaggccaaggaggtagaggcaagcctccccatagccttgggtcccaaaagcaggtc

SEQ ID NO: 404928 - DNA, 120 bp, Artificial Sequence
  ENSG00000147234_36 (sequence is synthesized)
tctggagtcaccgacgctgggagacccctcctacgtccaggttgccccagagaccaaaggccccagacagatggccgtgttctcactgcccgaggaggtgtaccggaagcctgccgagct

SEQ ID NO: 404929 - DNA, 120 bp, Artificial Sequence
  ENSG00000147234_37 (sequence is synthesized)
agacgaggacagtgagagcagcaagtgctgctccatccgctactgcttctactaccgcaagtgtgacatggcagatgatgccagtgatggcaaggatgagctctcctactctatccccat

SEQ ID NO: 404930 - DNA, 120 bp, Artificial Sequence
  ENSG00000147234_38 (sequence is synthesized)
gaagatcctgcctggcatgaagctggacgagcaggtggtgcctgtggtgagcaggaccctgcaggtgctggatgctgctacctgcagcagcagcagccctgaggcctcccgcactcagga

SEQ ID NO: 404931 - DNA, 120 bp, Artificial Sequence
  ENSG00000147234_39 (sequence is synthesized)
gattgacctccgtgtgtccaccttcgaggggagcctggccaagatcaatgccctgcgggcccatgcctatggcctccctgatggcttcctggctgcccggctggacaccaacgagctgct

SEQ ID NO: 404932 - DNA, 120 bp, Artificial Sequence
  ENSG00000147234_40 (sequence is synthesized)
gacagtcctgcggcagtgtgtggccagccccgaggcccgtgcccccaagccctatgtgtctcagatctccgagtataagcttgagctagctctcaagttcaaggagctccgggcctcctg

SEQ ID NO: 404933 - DNA, 120 bp, Artificial Sequence
  ENSG00000147234_41 (sequence is synthesized)
ccgccgtgtggccaatgtggacaagagcccaactcacatgctggcagccatcacgggcagcttccaggtgctgagcagcctcattgagaccttcgtgcggctggtgttcattgtgcgctc

SEQ ID NO: 404934 - DNA, 120 bp, Artificial Sequence
  ENSG00000147234_42 (sequence is synthesized)
cgaggcccagcgccaagagctgctggccaaggtagaagaggtggtgaggaactacaccttcctgctgcgtgcagctgaggagtccacagcccgtaaccttaaccagcagcagcagcaaca

SEQ ID NO: 404935 - DNA, 120 bp, Artificial Sequence
  ENSG00000147234_43 (sequence is synthesized)
acaacagcagcagcagcaacaacaacagcagcagcaacaacaacagcagcagcagcagcagcaggtggcagcagctgcaggggcagccacagagcatccaccaggctccccaacttcggc

SEQ ID NO: 404936 - DNA, 120 bp, Artificial Sequence
  ENSG00000147234_44 (sequence is synthesized)
gactgttatgagcacattcacccactccttaaaaacccttattaagtagggcatctgcccacacctgtcccccttccccaaccatggccccaggtttgagctttgtggtccttgcatctt

SEQ ID NO: 404937 - DNA, 120 bp, Artificial Sequence
  ENSG00000147234_45 (sequence is synthesized)
gtggtgagtgtgtgtgtgtctgctgggccagtcagggtccaagagcccatcagtctccggggagtggaaactctcttgattgaggctctctcttaagggctgcaggcttagctgccgccc

SEQ ID NO: 404938 - DNA, 120 bp, Artificial Sequence
  ENSG00000147234_46 (sequence is synthesized)
tgggtgtcctcaccccttccctggcctctgggcctcactgtgagggcaaaggcccctcttcactctgctcacagcagagctgtattttatctcttctctggggctgagaggtgacatcag

SEQ ID NO: 404939 - DNA, 120 bp, Artificial Sequence
  ENSG00000147234_47 (sequence is synthesized)
gctcacttcctgctcaatccgtgttgggcgctgggggagccagggcctgaagcaagcggaccctcaggctttgagctcctcgtggcatcggctcccctgctgggagcagtggcagtagca

SEQ ID NO: 404940 - DNA, 120 bp, Artificial Sequence
  ENSG00000147234_48 (sequence is synthesized)
gcaggccacattgccgtgccgaggggagagggcgctcagtccagatgtccccatccaccttgggctcacactcacctggtagatgccaccctgagggcctgtgcctgggtgagatgtctg

SEQ ID NO: 404941 - DNA, 120 bp, Artificial Sequence
  ENSG00000147234_49 (sequence is synthesized)
cagaaaacagccacactaggctgtttgcagcggcccaactggccggcagcctggtgagccctcacctccaggtccagtagctccacaccagccatccccaaagtgccctgcccctcactg

SEQ ID NO: 404942 - DNA, 120 bp, Artificial Sequence
  ENSG00000147234_50 (sequence is synthesized)
atgggcagggcagctcagtccactagggagcaagcatctgggatcaccccactcattttgggtaaggtacctgatgaaaacgtctgcctggggagacccagtgcaggcctaggagcccgc

SEQ ID NO: 404943 - DNA, 120 bp, Artificial Sequence
  ENSG00000147234_51 (sequence is synthesized)
ctagcccggcccagcccagctcaggggctgttgctgcaggcatgaggcttctctctcaacatctctctaccagacagactgtccttgggagtttgacttagctgtggatcggggaggggg

SEQ ID NO: 404944 - DNA, 120 bp, Artificial Sequence
  ENSG00000147234_52 (sequence is synthesized)
gtggggggaggggggaaaggggtaggggtggggggtgttgatgactatatcttaaacttctggaagctagcgtgatatgttaatcctgagtatatgcttttggctgtgtattgaccctgt

SEQ ID NO: 404945 - DNA, 120 bp, Artificial Sequence
  ENSG00000147234_53 (sequence is synthesized)
ggatttgtctctctaagaaaagaagctgagcgccttacccggtgcagtcctgcacctttctccctctctggagccatctggaagggaattcacactgtttaacatccaccttgacacaca

SEQ ID NO: 404946 - DNA, 120 bp, Artificial Sequence
  ENSG00000147234_54 (sequence is synthesized)
cctcctattgccaccaccgctgccaccaccaccgccaccaccgctgccaaccctccccccacgccccccacccccgcaaccttcctgggagtgaagacacggagtccctaccaactgtcc

SEQ ID NO: 404947 - DNA, 120 bp, Artificial Sequence
  ENSG00000147234_55 (sequence is synthesized)
cactgtagggaacaaagaaagccaatgtttcttctgtatagattgcttctcgtccgcctctccatatctccccatttcccacacccttgtgccctgtgtctgcctctgtttcatcactgt

SEQ ID NO: 404948 - DNA, 120 bp, Artificial Sequence
  ENSG00000147234_56 (sequence is synthesized)
gtcagaggcccatgtgaaatctttcattctgatgtgagttttataaagatgtacactgtgcttaatccctgcccatccttggtagcccctagtgcaataaagtctccctgagtggtgagt

SEQ ID NO: 404949 - DNA, 120 bp, Artificial Sequence
  ENSG00000147234_57 (sequence is synthesized)
tctcccggcaaggaggaggggagtttcttctgcagaatccagcccctcacttccttgcttctcctcccccaggaccaagttgttgaatgggccagagatgcagccagtggggaatccttt

SEQ ID NO: 404950 - DNA, 120 bp, Artificial Sequence
  ENSG00000147234_58 (sequence is synthesized)
tcccctcagccactgcaagctggagtgctgatatggtcttctttttctcccaacttcgccactcagcccctgcctgtgtcattccaccgccatccttcacctctccctcagcctcatgga

SEQ ID NO: 404951 - DNA, 120 bp, Artificial Sequence
  ENSG00000147234_59 (sequence is synthesized)
ccctcagcctcatggagaggaaacattttctaatgtctgtatatagtatatatactacataaaatatataaattatatatatactaatttatgtcttgtttttcaaacaagaatgattaa

SEQ ID NO: 404952 - DNA, 120 bp, Artificial Sequence
  ENSG00000147234_60 (sequence is synthesized)
atgtagtaggcccttgctaaatttgtcaaaagaatgaataaacgcccccccaaagacaatgaggatgcccctcagcacgactcctgtattcctaattgctgggccttacagagctcagca

SEQ ID NO: 404953 - DNA, 120 bp, Artificial Sequence
  ENSG00000147234_61 (sequence is synthesized)
gggagctagaatccaaggggcacccaggaaaggcttagtttccagtgtttgctaatcatgcttctgataaaattgtgggagagttttcaagaactaaaaagccagccaggcatggtggcc

SEQ ID NO: 404954 - DNA, 71 bp, Artificial Sequence
  ENSG00000147234_62 (sequence is synthesized)
ggctggagaatcgcttgaacccagggagacaagagtgaaactccgtctaaaaataaataaataaatacaag

SEQ ID NO: 404955 - DNA, 120 bp, Artificial Sequence
  ENSG00000147234_63 (sequence is synthesized)
agagtgaaactccgtctaaaaataaataaataaatacaagcctggctgattttttgggcatttcttacagaattggataaacaaagtggtgcagagcccaaaactagaaagccagaagac

SEQ ID NO: 404956 - DNA, 120 bp, Artificial Sequence
  ENSG00000147234_64 (sequence is synthesized)
ttgggttaaatctctcacatctctattccccaatagtgtagtaactgtggataaatccttttggagtgctaggtctcctttctcccacatctaaaatagtatttattatgcaactccttc

SEQ ID NO: 404957 - DNA, 120 bp, Artificial Sequence
  ENSG00000147234_65 (sequence is synthesized)
ctaggggcaggacatgtctgtgaggtgaacaagatcatttctgtaaattatttgggatgcttatattcagatataataataataataaaaagacaccctttaggtctatctcactgtaag

SEQ ID NO: 404958 - DNA, 120 bp, Artificial Sequence
  ENSG00000147234_66 (sequence is synthesized)
aaaaccaaatatataaaaactcaatgtatgttattactaaagaacttttgcaaactcccctaggcctagagtattaataatggggttcaatctacccaaattcaattcatgcccagctgt

SEQ ID NO: 404959 - DNA, 120 bp, Artificial Sequence
  ENSG00000147234_67 (sequence is synthesized)
ttcagaacacaccaattacatagggaagcatttagcacattgccttgcaactaataggtaattaatatttgtttattgactccttgatcagtaatgcaaagtgtacctgtactgggacat

SEQ ID NO: 404960 - DNA, 120 bp, Artificial Sequence
  ENSG00000147234_68 (sequence is synthesized)
tccaacctccaggtagccctgaaggccctttccttccttttctgctaccatcgtaggccatggccaagttggctggcctggtgacctgagctggctgtggctcaaagtcctgtctatttg

SEQ ID NO: 404961 - DNA, 120 bp, Artificial Sequence
  ENSG00000147234_69 (sequence is synthesized)
tccactcagatctcatcagttttcagaaacaagcaatcccagtaactctggcatcctcacaggatcctaaagtttaacaagcccatttcggtttcaacgggtcccaacccccaataccta

SEQ ID NO: 404962 - DNA, 120 bp, Artificial Sequence
  ENSG00000147234_70 (sequence is synthesized)
gctccagtatgagatgattcccaattcagtttatccagaaacatttactagacacttactctgggttaagccctatgctaggtactagcaatcagaagtgaatgaagaactgtcctggct

SEQ ID NO: 404963 - DNA, 120 bp, Artificial Sequence
  ENSG00000147234_71 (sequence is synthesized)
cactagagcttatatgtgcctgaataaatatgacagcagcagggtgcaatgaagatgagggcactcaggaagcatttttccaactctacacaagagagatggtgcaggcttcatggaaaa

SEQ ID NO: 404964 - DNA, 120 bp, Artificial Sequence
  ENSG00000147234_72 (sequence is synthesized)
agtgatatatgcatgctcttagccttgaagaatgaatgagagtttgttgtgtagagagatggaatggagggggcatactctaagcaaagggccttgcatttacaaagccatggtggcatg

SEQ ID NO: 404965 - DNA, 120 bp, Artificial Sequence
  ENSG00000147246_0 (sequence is synthesized)
gaggtaggcgctctggtgcttgccgaggacgcttccttcctcagatgcaccgatcttcccgatactgcctttggagcggctagattgctagccttggctgctccattggcctgccttgcc

SEQ ID NO: 404966 - DNA, 120 bp, Artificial Sequence
  ENSG00000147246_1 (sequence is synthesized)
ccttacctgccgattgcatatgaactcttcttctgtctgtacatcgttgtcgtcggagtcgtcgcgatcgtcgtggcgctcgtgtgatggccttcgtccgtttagagtagtgtagttagt

SEQ ID NO: 404967 - DNA, 120 bp, Artificial Sequence
  ENSG00000147246_2 (sequence is synthesized)
taggggccaacgaagaagaaagaagacgcgattagtgcagagatgctggaggtggtcagttactaagctagagtaagatagcggagcgaaaagagccaaacctagccggggggcgcacgg

SEQ ID NO: 404968 - DNA, 120 bp, Artificial Sequence
  ENSG00000147246_3 (sequence is synthesized)
tcacccaaaggaggtcgactcgccggcgcttcctatcgcgccgagctccctccattcctctccctccgccgaggcgcgaggttgcggcgcgcagcgcagcgcagctcagcgcaccgactg

SEQ ID NO: 404969 - DNA, 120 bp, Artificial Sequence
  ENSG00000147246_4 (sequence is synthesized)
ccgcgggctccgctgggcgattgcagccgagtccgtttctcgtctagctgccgccgcggcgaccgctgcctggtcttcctcccggacgctagtgggttatcagctaacacccgcgagcat

SEQ ID NO: 404970 - DNA, 120 bp, Artificial Sequence
  ENSG00000147246_5 (sequence is synthesized)
ctataacataggccaactgacgccatccttcaaaaacaactaaaggatgatatgatgaacctagcctgttaatttcgtcttctcaattttaaactttggttgcttaagactgaagcaatc

SEQ ID NO: 404971 - DNA, 120 bp, Artificial Sequence
  ENSG00000147246_6 (sequence is synthesized)
atggtgaacctgaggaatgcggtgcattcattccttgtgcacctaattggcctattggtttggcaatctgatatttctgtgagcccagtagcagctatagtaactgacattttcaatacc

SEQ ID NO: 404972 - DNA, 120 bp, Artificial Sequence
  ENSG00000147246_7 (sequence is synthesized)
tccgatggtggacgcttcaaattcccagacggggtacaaaactggccagcactttcaatcgtcatcataataatcatgacaataggtggcaacatccttgtgatcatggcagtaagcatg

SEQ ID NO: 404973 - DNA, 120 bp, Artificial Sequence
  ENSG00000147246_8 (sequence is synthesized)
gaaaagaaactgcacaatgccaccaattacttcttaatgtccctagccattgctgatatgctagtgggactacttgtcatgcccctgtctctcctggcaatcctttatgattatgtctgg

SEQ ID NO: 404974 - DNA, 120 bp, Artificial Sequence
  ENSG00000147246_9 (sequence is synthesized)
ccactacctagatatttgtgccccgtctggatttctttagatgttttattttcaacagcgtccatcatgcacctctgcgctatatcgctggatcggtatgtagcaatacgtaatcctatt

SEQ ID NO: 404975 - DNA, 120 bp, Artificial Sequence
  ENSG00000147246_10 (sequence is synthesized)
gagcatagccgtttcaattcgcggactaaggccatcatgaagattgctattgtttgggcaatttctataggtgtatcagttcctatccctgtgattggactgagggacgaagaaaaggtg

SEQ ID NO: 404976 - DNA, 120 bp, Artificial Sequence
  ENSG00000147246_11 (sequence is synthesized)
ttcgtgaacaacacgacgtgcgtgctcaacgacccaaatttcgttcttattgggtccttcgtagctttcttcataccgctgacgattatggtgattacgtattgcctgaccatctacgtt

SEQ ID NO: 404977 - DNA, 120 bp, Artificial Sequence
  ENSG00000147246_12 (sequence is synthesized)
ctgcgccgacaagctttgatgttactgcacggccacaccgaggaaccgcctggactaagtctggatttcctgaagtgctgcaagaggaatacggccgaggaagagaactctgcaaaccct

SEQ ID NO: 404978 - DNA, 120 bp, Artificial Sequence
  ENSG00000147246_13 (sequence is synthesized)
aaccaagaccagaacgcacgccgaagaaagaagaaggagagacgtcctaggggcaccatgcaggctatcaacaatgaaagaaaagcttcgaaagtccttgggattgttttctttgtgttt

SEQ ID NO: 404979 - DNA, 120 bp, Artificial Sequence
  ENSG00000147246_14 (sequence is synthesized)
ctgatcatgtggtgcccatttttcattaccaatattctgtctgttctttgtgagaagtcctgtaaccaaaagctcatggaaaagcttctgaatgtgtttgtttggattggctatgtttgt

SEQ ID NO: 404980 - DNA, 120 bp, Artificial Sequence
  ENSG00000147246_15 (sequence is synthesized)
tcaggaatcaatcctctggtgtatactctgttcaacaaaatttaccgaagggcattctccaactatttgcgttgcaattataaggtagagaaaaagcctcctgtcaggcagattccaaga

SEQ ID NO: 404981 - DNA, 120 bp, Artificial Sequence
  ENSG00000147246_16 (sequence is synthesized)
gttgccgccactgctttgtctgggagggagcttaatgttaacatttatcggcataccaatgaaccggtgatcgagaaagccagtgacaatgagcccggtatagagatgcaagttgagaat

SEQ ID NO: 404982 - DNA, 120 bp, Artificial Sequence
  ENSG00000147246_17 (sequence is synthesized)
ttagagttaccagtaaatccctccagtgtggttagcgaaaggattagcagtgtgtgagaaagaacagcacagtcttttcctacggtacaagctacatatgtaggaaaattttcttcttta

SEQ ID NO: 404983 - DNA, 120 bp, Artificial Sequence
  ENSG00000147246_18 (sequence is synthesized)
atttttctgttggtcttaactaatgtaaatattgctgtctgaaaaagtgtttttacatatagctttgcaaccttgtactttacaatcatgcctacattagtgagatttagggttctatat

SEQ ID NO: 404984 - DNA, 120 bp, Artificial Sequence
  ENSG00000147246_19 (sequence is synthesized)
ttgctctccctcccttctttccttccttttttcctttcttccttcctttctctctttcttttgtgcatatggcaacgttcatgttcatctcaggtggcatttgcaggtgaccagaatgag

SEQ ID NO: 404985 - DNA, 120 bp, Artificial Sequence
  ENSG00000147246_20 (sequence is synthesized)
gcacatgacagtggttatatttcaaccacacctaaattaacaaattcagtggacatttgttctgggttaacagtaaatatacactttacattcttgctctgctcatctacacatataaac

SEQ ID NO: 404986 - DNA, 120 bp, Artificial Sequence
  ENSG00000147246_21 (sequence is synthesized)
acagtaagataggttctgctttctgatacatctgtcagtgagtcagaggcagaacctagtcttgttgttcatataggggcaaaaatttgacattgtcagaatgttgtgttggtatttact

SEQ ID NO: 404987 - DNA, 120 bp, Artificial Sequence
  ENSG00000147246_22 (sequence is synthesized)
gcaatgtctgtccctaaacatagtggtattttaacatagcagctggttaaccgggactacagaagtggaaggataatgagatgtaatacaccaaatagcttttcacttcttaaggacagt

SEQ ID NO: 404988 - DNA, 120 bp, Artificial Sequence
  ENSG00000147246_23 (sequence is synthesized)
gttcaaattctgattattacaacaagcaaactgaaattagtgttttcattctggtccttagtaaattcctaattctatgattaaactgggaaatgagatcccagagttatttcccaaccc

SEQ ID NO: 404989 - DNA, 120 bp, Artificial Sequence
  ENSG00000147246_24 (sequence is synthesized)
aggattcaacatcaattgggttttgatctcagcatcctggaaatttgtgtgcttcacacaaagtgaaattagtattttgagccttattaaaatattttcttaattatggtacctctgtct

SEQ ID NO: 404990 - DNA, 120 bp, Artificial Sequence
  ENSG00000147246_25 (sequence is synthesized)
ataggacttaatttagcagtccatttttgagtaaaacttgtattggaagtatagatggtagaaactttggaagttttacttgattaaggactacagaattgggcccttagaatgtgaaaa

SEQ ID NO: 404991 - DNA, 120 bp, Artificial Sequence
  ENSG00000147246_26 (sequence is synthesized)
aaaaaagtaattaaaaagacacttttaccgaactcgggattacagaaacacggagtttccatttggattttaaacaaaatttatgtcattttcagatccttccaaactctctagtgcagg

SEQ ID NO: 404992 - DNA, 120 bp, Artificial Sequence
  ENSG00000147246_27 (sequence is synthesized)
aaaaggctgcagctaatttgtgaaagtggcaagctcttcattgcactgcagttatttaccagaagtttaaatctttgttaaaatatagtgttgtgttacaataagtgttggccatcattt

SEQ ID NO: 404993 - DNA, 120 bp, Artificial Sequence
  ENSG00000147246_28 (sequence is synthesized)
cattcgtgggcctgctgctctctaagaattcagtagcattttaatagtttctaaaccatgaaaagttttcaagcattgctaaagtcaggccattcagtctatgctgtgtgcagagtatac

SEQ ID NO: 404994 - DNA, 120 bp, Artificial Sequence
  ENSG00000147246_29 (sequence is synthesized)
aagtgtttctagtaacagtatttccatacgtgcccatttcacacaactgtggataaattttggaagaattcatgatgctagttcttacgcttgacagttacttacacacctgagaatgtg

SEQ ID NO: 404995 - DNA, 120 bp, Artificial Sequence
  ENSG00000147246_30 (sequence is synthesized)
cctctcagtatcttaaaattggttaatgaaaaatctgaatttctaaaacccttggtctgtgttctcaacacacagtatagataaatccaatagtctgccacaagggcagtggaagagctg

SEQ ID NO: 404996 - DNA, 120 bp, Artificial Sequence
  ENSG00000147246_31 (sequence is synthesized)
ctgtatttgaggaaactcatacagtctctatttgatttgcaacactgccaaacatcagtcaattgcttgagcatgcccaaatataacatgaaagtcaagtctacctgccttgcctgttag

SEQ ID NO: 404997 - DNA, 120 bp, Artificial Sequence
  ENSG00000147246_32 (sequence is synthesized)
gtctgttgaagtgcatgttaaaataattatatgaagcagaatgagatgatttaattcttaccgaaatgaaaatggctgaagaaacacagcatgcatttagcatgagttctgcacatacag

SEQ ID NO: 404998 - DNA, 120 bp, Artificial Sequence
  ENSG00000147246_33 (sequence is synthesized)
atggtgtcctgcatgtatgccatgtatgttgcatgaatccatcgatttgtattaatgtagggcagaatagctgatagaagaaggactgaagaaaatccttcagcaatccttaaaaagacc

SEQ ID NO: 404999 - DNA, 120 bp, Artificial Sequence
  ENSG00000147246_34 (sequence is synthesized)
atgcattcagatctgaagtagtgtgagtgttagaaaaaactggaaacatctgatttctgaactatcagggcaagctcatagcacatgttttacaaagaaacaaaatataaatcacagatt

SEQ ID NO: 405000 - DNA, 120 bp, Artificial Sequence
  ENSG00000147246_35 (sequence is synthesized)
tccaaaagtactagcaataagttgaatgataatagctcacagcacatttgttaatgattcttgtgtcatcaagtagtagtacttaatagtacccaacctggtaattatcctcaagttgtg

SEQ ID NO: 405001 - DNA, 120 bp, Artificial Sequence
  ENSG00000147246_36 (sequence is synthesized)
tgctattcgtaagttctgtgcagtttggtatgaaacaaatatactcatttggatataaatcttacccttcaatgttaaatctacaaacttttataaatgttttaaagaagtccatgtgat

SEQ ID NO: 405002 - DNA, 120 bp, Artificial Sequence
  ENSG00000147246_37 (sequence is synthesized)
aattgtaaaggtgatgaatttaccatcaaacaaatcattttgatgtattattatatatgtatatctgtgtaagacacgtgcaacagactgccttatattattttctgtaattcttctcct

SEQ ID NO: 405003 - DNA, 120 bp, Artificial Sequence
  ENSG00000147246_38 (sequence is synthesized)
ttgtcaaatggtattttttgtgaatggttgcaaagtgttgtcttattcctaattcctgtatgttatccactacaggttttatgagacttcctattaatttattaaatttattaaatgttg

SEQ ID NO: 405004 - DNA, 120 bp, Artificial Sequence
  ENSG00000147251_0 (sequence is synthesized)
gcagtgagtccacccgcccgccgaggtccgcccgcccgccgagacccgcccgccgccgctgccatggccgaagtgcgcaaattcaccaaacggctcagcaagcctggcacggcggctgag

SEQ ID NO: 405005 - DNA, 120 bp, Artificial Sequence
  ENSG00000147251_1 (sequence is synthesized)
ctccggcagagcgtgtctgaggccgtgcggggctccgtggtgctggaaaaggccaaagttgttgagcccctggactatgagaatgttattgcccaaagaaaaacccagatttacagcgac

SEQ ID NO: 405006 - DNA, 120 bp, Artificial Sequence
  ENSG00000147251_2 (sequence is synthesized)
cccctccgagatctgcttatgttcccaatggaagatatatctatctcggtgataggtcgtcaacgcagaacggtgcagtctactgtaccagaagatgctgaaaagagggcccagagttta

SEQ ID NO: 405007 - DNA, 120 bp, Artificial Sequence
  ENSG00000147251_3 (sequence is synthesized)
tttgttaaagagtgtattaaaacctatagcacagattggcacgtggtaaactacaagtatgaggacttctctggggactttcgaatgttgccatgtaaatctttgagaccagaaaagatt

SEQ ID NO: 405008 - DNA, 120 bp, Artificial Sequence
  ENSG00000147251_4 (sequence is synthesized)
cctaatcatgtatttgagatagatgaagactgtgagaaagatgaggactcatcttctttatgttctcagaagggtggtgtgataaaacaaggctggttgcataaagcaaatgtaaatagt

SEQ ID NO: 405009 - DNA, 120 bp, Artificial Sequence
  ENSG00000147251_5 (sequence is synthesized)
accatcacagtaaccatgaaggtattcaagagacgatatttttacttgacccaacttcctgacggttcatatattctcaattcctataaagatgagaaaaattcaaaagaatcgaaaggt

SEQ ID NO: 405010 - DNA, 120 bp, Artificial Sequence
  ENSG00000147251_6 (sequence is synthesized)
tgcatctacttggacgcctgcattgatgttgttcagtgccccaaaatgcgccgtcatgcttttgaactcaagatgttagataaatatagccattatctggctgctgaaactgagcaggaa

SEQ ID NO: 405011 - DNA, 120 bp, Artificial Sequence
  ENSG00000147251_7 (sequence is synthesized)
atggaggaatggttgataactttgaaaaagattattcagatcaacaccgacagtttagttcaagaaaaaaaggagacggtagaaacagcacaagatgatgaaactagcagccaaggaaaa

SEQ ID NO: 405012 - DNA, 120 bp, Artificial Sequence
  ENSG00000147251_8 (sequence is synthesized)
gccgagaacatcatggcaagtttggaaaggagcatgcatccggaactgatgaagtatggaagagaaactgaacaactaaacaaactcagtagaggagatggaagacagaatctcttttct

SEQ ID NO: 405013 - DNA, 120 bp, Artificial Sequence
  ENSG00000147251_9 (sequence is synthesized)
tttgattcagaagttcagaggttggacttttcaggaattgaacctgatataaagccatttgaagaaaaatgcaataaacgtttcctggtgaattgccatgatttaactttcaatatcttg

SEQ ID NO: 405014 - DNA, 120 bp, Artificial Sequence
  ENSG00000147251_10 (sequence is synthesized)
ggccaaattggagacaatgcaaaaggaccacccacaaatgttgagcccttttttatcaatcttgccttatttgatgtaaagaacaattgtaagatttcagcagactttcatgtagacctg

SEQ ID NO: 405015 - DNA, 120 bp, Artificial Sequence
  ENSG00000147251_11 (sequence is synthesized)
aatcccccatctgtccgtgaaatgctgtggggctcttcaacccaactggccagtgacggtagcccaaagggctcttcacccgaatcttacattcatggaattgccgaatctcagttacgc

SEQ ID NO: 405016 - DNA, 120 bp, Artificial Sequence
  ENSG00000147251_12 (sequence is synthesized)
tacatacaacagggaattttctcagtgacgaatccacatcctgaaatttttctagttgccagaattgaaaaggtactacagggaaacattacacactgtgcagaaccctatatcaaaaat

SEQ ID NO: 405017 - DNA, 120 bp, Artificial Sequence
  ENSG00000147251_13 (sequence is synthesized)
tctgatccagtaaagacggcccagaaggtgcacaggacagctaaacaagtgtgtagccgccttggacaatacagaatgcccttcgcttgggctgccagacccattttcaaagatactcaa

SEQ ID NO: 405018 - DNA, 120 bp, Artificial Sequence
  ENSG00000147251_14 (sequence is synthesized)
ggctctcttgatctggatgggagattttctcctctgtataaacaagacagtagcaagctttcaagtgaagacattctcaagttgctctcagaatataagaagccagaaaagaccaaactg

SEQ ID NO: 405019 - DNA, 120 bp, Artificial Sequence
  ENSG00000147251_15 (sequence is synthesized)
cagattattcctgggcagctaaacatcacagtagaatgtgttcctgtggatttatcaaattgtattacttcttcatatgtgcccttgaagccttttgaaaagaattgccaaaatattact

SEQ ID NO: 405020 - DNA, 120 bp, Artificial Sequence
  ENSG00000147251_16 (sequence is synthesized)
gtggaggttgaagagtttgttccagaaatgacaaaatattgttatccatttactatttacaaaaaccatctgtatgtatatcccctgcaattaaaatacgatagccagaaaacatttgcc

SEQ ID NO: 405021 - DNA, 120 bp, Artificial Sequence
  ENSG00000147251_17 (sequence is synthesized)
aaggcaaggaacattgcagtctgtgtggaattccgggattcagatgaaagtgacgctagtgccctaaagtgtatttatggaaaacctgcagggtctgtttttaccacaaatgcttatgct

SEQ ID NO: 405022 - DNA, 120 bp, Artificial Sequence
  ENSG00000147251_18 (sequence is synthesized)
gttgtctcgcatcacaaccaaaatccagagttctatgatgagattaaaattgagcttcccattcacctacatcaaaaacatcatttgcttttcactttttatcatgtaagttgtgaaatt

SEQ ID NO: 405023 - DNA, 120 bp, Artificial Sequence
  ENSG00000147251_19 (sequence is synthesized)
aacacaaagggaacaaccaaaaagcaagacacagttgaaactccagttgggtttgcctgggtacctttgctgaaagatggtagaatcatcacatttgagcagcagctgccagtttccgcc

SEQ ID NO: 405024 - DNA, 120 bp, Artificial Sequence
  ENSG00000147251_20 (sequence is synthesized)
aatcttcccccaggctacttgaatctgaatgatgcagaatcaagaaggcaatgtaacgtggatattaaatgggtagatggtgcaaagcctttgttgaagattaaaagccacttagaatct

SEQ ID NO: 405025 - DNA, 120 bp, Artificial Sequence
  ENSG00000147251_21 (sequence is synthesized)
accatttacactcaagatctgcatgtgcacaaattcttccatcattgccagctgattcagtcaggctcgaaagaagttccaggggagctcattaaatatttaaagtgtttgcatgccatg

SEQ ID NO: 405026 - DNA, 120 bp, Artificial Sequence
  ENSG00000147251_22 (sequence is synthesized)
gagatccaagtcatgatacagtttctacctgtaattcttatgcaactcttccgagttctcacaaatatgacccatgaagatgacgttcctatcaactgcaccatggttctcttacatatt

SEQ ID NO: 405027 - DNA, 120 bp, Artificial Sequence
  ENSG00000147251_23 (sequence is synthesized)
gtatcaaagtgccatgaagaaggcttggatagttatctaagatcattcataaagtatagcttccgacctgaaaaaccgagtgctcctcaggcccagctgatacatgaaaccctggctact

SEQ ID NO: 405028 - DNA, 120 bp, Artificial Sequence
  ENSG00000147251_24 (sequence is synthesized)
acgatgatagcaatattgaaacagtctgcagattttttatcaataaacaaattgctaaagtactcatggtttttctttgaaataattgcaaagtcaatggccacatacttgttggaagag

SEQ ID NO: 405029 - DNA, 120 bp, Artificial Sequence
  ENSG00000147251_25 (sequence is synthesized)
aataagattaagcttccccgaggccagagatttcccgagacatatcatcatgtcttacattcactgcttcttgcaataattccccatgtgactattcggtatgcggagattcccgatgag

SEQ ID NO: 405030 - DNA, 120 bp, Artificial Sequence
  ENSG00000147251_26 (sequence is synthesized)
tccagaaatgtgaactatagtttggctagcttcctgaagcgctgtttgacactaatggatagaggatttattttcaatttaataaatgactatatatctggattcagccccaaagatcct

SEQ ID NO: 405031 - DNA, 120 bp, Artificial Sequence
  ENSG00000147251_27 (sequence is synthesized)
aatttctgcaaacaatttgcaatcacgaacattacattcctctgaacttgccaatggcatttgcaaaacctaaactgcagcgggttcaagattcaaatcttgaatacagtttatcagatg

SEQ ID NO: 405032 - DNA, 120 bp, Artificial Sequence
  ENSG00000147251_28 (sequence is synthesized)
agtattgcaagcatcacttcttggttggtctacttctgagggaaacttccattgctcttcaggacaattatgagatcagatatacagctatctctgttataaagaatcttttgataaaac

SEQ ID NO: 405033 - DNA, 120 bp, Artificial Sequence
  ENSG00000147251_29 (sequence is synthesized)
atgcatttgacacaagataccagcacaagaaccaacaagccaaaatagcacaattgtacctcccctttgttggactacttttggaaaatatacagcgattagcaggtcgagataccttgt

SEQ ID NO: 405034 - DNA, 120 bp, Artificial Sequence
  ENSG00000147251_30 (sequence is synthesized)
attcttgtgcagccatgcctaattctgcatccagagatgagtttccatgtggctttacttcacctgccaatagagggagtctgagcactgacaaagacaccgcttatgggtcttttcaaa

SEQ ID NO: 405035 - DNA, 120 bp, Artificial Sequence
  ENSG00000147251_31 (sequence is synthesized)
atggacatggaattaagagagaagattcaagaggttccctcatcccagaaggagcaacaggatttccagatcagggcaacactggtgaaaatacccgacagagttctacaaggagtagtg

SEQ ID NO: 405036 - DNA, 120 bp, Artificial Sequence
  ENSG00000147251_32 (sequence is synthesized)
tatcccagtataaccgcctggatcagtatgaaatcagaagcctcctgatgtgctacctgtatatagtaaaaatgatttcagaagatactctcttaacttactggaataaagtatcacctc

SEQ ID NO: 405037 - DNA, 120 bp, Artificial Sequence
  ENSG00000147251_33 (sequence is synthesized)
aggagctcataaacattcttatacttttagaagtatgcttgtttcactttagatatatggggaaaagaaacatagcaagggtgcatgatgcctggctgtcaaaacacttcggaatagacc

SEQ ID NO: 405038 - DNA, 120 bp, Artificial Sequence
  ENSG00000147251_34 (sequence is synthesized)
gaaaatcgcaaaccatgcctgctcttcgaaacagatcaggagtaatgcaggcccggcttcagcatcttagtagcctagaaagttcatttacacttaatcacagttctacaacaactgaag

SEQ ID NO: 405039 - DNA, 120 bp, Artificial Sequence
  ENSG00000147251_35 (sequence is synthesized)
cagacattttccaccaggcacttcttgaaggcaatacagctactgaagtttccctaacagtactagacaccatatcatttttcactcagtgcttcaagacccaacttttaaataatgatg

SEQ ID NO: 405040 - DNA, 120 bp, Artificial Sequence
  ENSG00000147251_36 (sequence is synthesized)
gccataacccattaatgaaaaaagtgtttgatatacatcttgcttttcttaaaaatggacaatctgaagtgtcgctgaaacatgtatttgcctcactgagagctttcatcagtaagtttc

SEQ ID NO: 405041 - DNA, 120 bp, Artificial Sequence
  ENSG00000147251_37 (sequence is synthesized)
cttcagcatttttcaaaggaagagtaaacatgtgtgctgcattttgctatgaggttttaaagtgctgcacatcgaagattagctcaaccaggaatgaagcatctgcacttttgtatcttt

SEQ ID NO: 405042 - DNA, 120 bp, Artificial Sequence
  ENSG00000147251_38 (sequence is synthesized)
tgatgagaaacaactttgagtataccaaaaggaaaacctttttgaggacacatctacagataataattgctgtaagccaactgatagctgatgtagcactaagcggaggatcaagatttc

SEQ ID NO: 405043 - DNA, 120 bp, Artificial Sequence
  ENSG00000147251_39 (sequence is synthesized)
aggagtctttattcattatcaataattttgcaaatagtgacagacctatgaaggcaactgcctttcccgcagaagtcaaagacttgaccaagagaatccgcactgttcttatggccactg

SEQ ID NO: 405044 - DNA, 120 bp, Artificial Sequence
  ENSG00000147251_40 (sequence is synthesized)
cccaaatgaaggagcatgagaaagaccctgaaatgctaattgatctccagtatagcttagccaagtcctatgcaagcaccccagagctcaggaaaacctggcttgatagcatggccaaga

SEQ ID NO: 405045 - DNA, 120 bp, Artificial Sequence
  ENSG00000147251_41 (sequence is synthesized)
ttcatgtaaaaaatggagatttttcagaggctgcgatgtgttatgtccatgtagcagctctagttgcagagtttcttcatcgaaaaaaattatttcctaacggatgttcagcgttcaaga

SEQ ID NO: 405046 - DNA, 120 bp, Artificial Sequence
  ENSG00000147251_42 (sequence is synthesized)
aaattactcccaatatagatgaagaaggagcaatgaaagaagatgctgggatgatggatgtccattatagtgaagaggtcttgctggagttgctagaacaatgtgtggatggcttatgga

SEQ ID NO: 405047 - DNA, 120 bp, Artificial Sequence
  ENSG00000147251_43 (sequence is synthesized)
aggcagaacgttatgaaataatttctgagatttccaagttgatcgttccaatttatgagaaacgtcgtgagtttgagaaacttactcaagtttatagaactcttcatggagcttacacaa

SEQ ID NO: 405048 - DNA, 120 bp, Artificial Sequence
  ENSG00000147251_44 (sequence is synthesized)
aaattctggaagttatgcatacaaaaaagagacttttaggcactttcttcagagttgccttttatggccaatctttttttgaagaagaagatggaaaggagtacatctataaagaaccaa

SEQ ID NO: 405049 - DNA, 120 bp, Artificial Sequence
  ENSG00000147251_45 (sequence is synthesized)
agctcactggcctctcagaaatttccttgagacttgttaaactttatggtgaaaagtttggtacggagaatgtcaaaataattcaggattcagacaaggtaaatgccaaagagcttgatc

SEQ ID NO: 405050 - DNA, 120 bp, Artificial Sequence
  ENSG00000147251_46 (sequence is synthesized)
caaaatatgctcatatacaagttacttatgtgaagccttactttgatgacaaagaactcacagaaaggaagaccgagtttgaaagaaatcataatatcagcagatttgtttttgaggccc

SEQ ID NO: 405051 - DNA, 120 bp, Artificial Sequence
  ENSG00000147251_47 (sequence is synthesized)
cttacactttatcaggcaaaaaacagggctgtatagaagaacagtgcaaacgccgtacaatcttgacaacttcaaactcgtttccttacgtgaagaagaggattcctattaactgtgaac

SEQ ID NO: 405052 - DNA, 120 bp, Artificial Sequence
  ENSG00000147251_48 (sequence is synthesized)
agcagattaatttaaaaccaattgatgttgccactgatgaaataaaagataaaactgcagagctgcaaaagctttgctcctctactgacgtggacatgattcagctccaacttaaattgc

SEQ ID NO: 405053 - DNA, 120 bp, Artificial Sequence
  ENSG00000147251_49 (sequence is synthesized)
agggctgtgtttctgtgcaggtcaatgctggtccattagcatatgcaagagctttcttaaatgacagccaagctagcaagtatccacctaagaaagtgagtgagttgaaagacatgttta

SEQ ID NO: 405054 - DNA, 120 bp, Artificial Sequence
  ENSG00000147251_50 (sequence is synthesized)
ggaaatttatacaagcatgcagcattgcacttgaactaaatgagcggctaattaaagaagatcaagttgagtaccatgaagggctaaagtcaaatttcagagacatggtaaaagaattat

SEQ ID NO: 405055 - DNA, 120 bp, Artificial Sequence
  ENSG00000147251_51 (sequence is synthesized)
ctgacattatccatgagcagatattacaagaagacacaatgcattctccctggatgagcaacacattacatgtattttgtgcaattagtggtacatcaagtgaccgaggttatggttccc

SEQ ID NO: 405056 - DNA, 120 bp, Artificial Sequence
  ENSG00000147251_52 (sequence is synthesized)
caagatacgctgaagtgtgaggaaatgcagatgtacgtgacaatgagactgacctttctcaggaatatttggagctgtgcaaatgttaaaatttaaagatttgatatacatggagtgttt

SEQ ID NO: 405057 - DNA, 120 bp, Artificial Sequence
  ENSG00000147251_53 (sequence is synthesized)
cttctcgacaccaaaattttcatgtgttccaacagggtgcttacatatttgtaaataagcaacttgaaagtgcctggaaaattgcaccactgtgcttggtttgtacttttttaggtaaat

SEQ ID NO: 405058 - DNA, 120 bp, Artificial Sequence
  ENSG00000147251_54 (sequence is synthesized)
ctatatgctgaaaagtagagctcaaaaacagtagttcaatttgcttaattattgcttaaaataatggtactatgtaaaattgtataatggaatacaataaaaggtaaaacttatttgtaa

SEQ ID NO: 405059 - DNA, 120 bp, Artificial Sequence
  ENSG00000147251_55 (sequence is synthesized)
tgcacttgaactaaatgagcggctaattaaagaagatcaagttgagtaccatgaagggctaaagtcaaatttcagagacatggtaaaagaattatctgacattatccatgagcagctttg

SEQ ID NO: 405060 - DNA, 120 bp, Artificial Sequence
  ENSG00000147255_0 (sequence is synthesized)
gtccttagacagctcttctcatgccgggcagtttgctgcatctggaggagctcactggagaatctccaacatcggagcgggccttcaactaccatcccaccacctgctgaggagaaaaat

SEQ ID NO: 405061 - DNA, 120 bp, Artificial Sequence
  ENSG00000147255_1 (sequence is synthesized)
tcttcaagactcagagcacacagccagcaccagaggccccatgaccctggacagaccaggggagggggccaccatgctgaagacattcactgttttgctcttttgcattcggatgagtct

SEQ ID NO: 405062 - DNA, 120 bp, Artificial Sequence
  ENSG00000147255_2 (sequence is synthesized)
gggtatgacatcaatagtgatggaccctcaaccagagttgtggatagagtccaactacccccaggccccttgggagaacatcacgctttggtgccgaagcccctctcggatatcaagcaa

SEQ ID NO: 405063 - DNA, 120 bp, Artificial Sequence
  ENSG00000147255_3 (sequence is synthesized)
gttcctgctgctgaaggataagacacagatgacctggatccgcccttcccacaagaccttccaagtttcattccttataggtgcccttactgagtccaatgcaggtctttaccggtgctg

SEQ ID NO: 405064 - DNA, 120 bp, Artificial Sequence
  ENSG00000147255_4 (sequence is synthesized)
ctactggaaggagacaggctggtcaaagcccagtaaagttctagagttggaggcaccaggccaactgcccaagcccatcttctggattcaggctgagacccccgctcttcctgggtgtaa

SEQ ID NO: 405065 - DNA, 120 bp, Artificial Sequence
  ENSG00000147255_5 (sequence is synthesized)
tgttaacatcctctgccatggctggctgcaggatttggtattcatgctgtttaaagagggatatgcagagcctgtggattaccaagtcccaactgggacaatggccatattctccattga

SEQ ID NO: 405066 - DNA, 120 bp, Artificial Sequence
  ENSG00000147255_6 (sequence is synthesized)
caacctgacacctgaggatgaaggggtttacatctgccgcactcatatccagatgctccccaccctgtggtcagagcccagcaaccccctgaagctggttgtagcaggactctaccccaa

SEQ ID NO: 405067 - DNA, 120 bp, Artificial Sequence
  ENSG00000147255_7 (sequence is synthesized)
accaactttgacagcccatcctgggcccatcatggcacctggagaaagcctgaatctcaggtgccaagggccaatctatggaatgacctttgctctaatgagggttgaagacttggagaa

SEQ ID NO: 405068 - DNA, 120 bp, Artificial Sequence
  ENSG00000147255_8 (sequence is synthesized)
gtccttttaccacaagaagacaataaaaaatgaggcaaatttcttcttccagtctttgaagatccaagatactggacattacctctgtttttactatgacgcatcatatagaggttcact

SEQ ID NO: 405069 - DNA, 120 bp, Artificial Sequence
  ENSG00000147255_9 (sequence is synthesized)
ccttagtgatgtcctgaaaatctgggtgactgacactttccccaagacctggctacttgctcggcccagtgctgtggtccaaatgggtcagaatgtgagcctacggtgtcgaggaccagt

SEQ ID NO: 405070 - DNA, 120 bp, Artificial Sequence
  ENSG00000147255_10 (sequence is synthesized)
ggatggagtgggtcttgcactctataagaaaggagaagacaaaccacttcaatttttggatgccaccagcatcgatgacaacacatcattcttcctcaacaatgtaacctacagtgatac

SEQ ID NO: 405071 - DNA, 120 bp, Artificial Sequence
  ENSG00000147255_11 (sequence is synthesized)
tggcatctatagctgccactatcttctcacctggaagacctccattaggatgccatcacacaacactgtggagcttatggttgtagataagccccccaaaccctccctgtcagcttggcc

SEQ ID NO: 405072 - DNA, 120 bp, Artificial Sequence
  ENSG00000147255_12 (sequence is synthesized)
aagcactgtgttcaagctaggaaaggccatcacccttcagtgccgagtatctcatccagtactggaattttctctggaatgggaagaaagagaaacattccaaaaattctcagtaaacgg

SEQ ID NO: 405073 - DNA, 120 bp, Artificial Sequence
  ENSG00000147255_13 (sequence is synthesized)
agacttcatcatcagtaatgttgacgggaaaggcacagggacctacagttgcagctatcgcgtagagacacatcctaacatctggtcacatcgcagtgagcccctgaagctgatggggcc

SEQ ID NO: 405074 - DNA, 120 bp, Artificial Sequence
  ENSG00000147255_14 (sequence is synthesized)
agcaggctatctcacctggaattacgttctgaatgaagctatcaggttgtctctaatcatgcagcttgttgccttgctgttggtagtgctgtggataaggtggaagtgtcggagactcag

SEQ ID NO: 405075 - DNA, 120 bp, Artificial Sequence
  ENSG00000147255_15 (sequence is synthesized)
aatcagagaagcctggttgctgggaacagctcaaggggtcaccatgctcttcatagtcacggcccttctctgctgtggactgtgcaatggggtattgatagaagagactgaaatagtcat

SEQ ID NO: 405076 - DNA, 120 bp, Artificial Sequence
  ENSG00000147255_16 (sequence is synthesized)
gccaacccctaagcctgagctgtgggcagagaccaactttcctctggccccgtggaagaacttaaccctctggtgcagaagcccttctggctcaactaaggagtttgtgttgctgaagga

SEQ ID NO: 405077 - DNA, 120 bp, Artificial Sequence
  ENSG00000147255_17 (sequence is synthesized)
tgggaccgggtggatcgccactcgcccggcctcagagcaggtccgggctgccttcccccttggcgccctgacccagagccacaccgggagctaccactgccattcatgggaggagatggc

SEQ ID NO: 405078 - DNA, 120 bp, Artificial Sequence
  ENSG00000147255_18 (sequence is synthesized)
acttgagctggtggggacagacatcctccccaaacctgtcatttctgcttcccccacaatccggggccaggaactacaactccggtgcaaaggatggctggcaggcatggggtttgctct

SEQ ID NO: 405079 - DNA, 120 bp, Artificial Sequence
  ENSG00000147255_19 (sequence is synthesized)
gtataaggagggagagcaagaacctgtccagcaacttggtgctgttggaagagaagccttctttacaatccagagaatggaggataaagacgaaggcaattacagctgccgcactcacac

SEQ ID NO: 405080 - DNA, 120 bp, Artificial Sequence
  ENSG00000147255_20 (sequence is synthesized)
tgaaaaacgccccttcaagtggtctgagcccagtgagccgctggagcttgtcataaaagaaatgtaccctaagcccttcttcaagacatgggccagccctgtggtcacccctggtgcccg

SEQ ID NO: 405081 - DNA, 120 bp, Artificial Sequence
  ENSG00000147255_21 (sequence is synthesized)
agtgactttcaattgctccaccccccaccagcatatgagctttattctttacaaagatggaagtgaaatagcatccagtgacaggtcctgggcaagtccgggggccagtgcagctcactt

SEQ ID NO: 405082 - DNA, 120 bp, Artificial Sequence
  ENSG00000147255_22 (sequence is synthesized)
tctaatcatttcggtgggcattggtgatggagggaattacagctgccgatattatgacttttctatctggtctgagcccagcgaccctgtggagctcgtggtgacagaattctaccccaa

SEQ ID NO: 405083 - DNA, 120 bp, Artificial Sequence
  ENSG00000147255_23 (sequence is synthesized)
acccactctcctggcacagccaggtcctgtggtgtttcctgggaagagtgtgatcctgcgctgccaagggactttccagggcatgaggttcgccctcttgcaggagggagcccatgttcc

SEQ ID NO: 405084 - DNA, 120 bp, Artificial Sequence
  ENSG00000147255_24 (sequence is synthesized)
cttacagtttcggagtgtctcagggaactcagctgacttccttctccacactgttggagcagaggactctgggaactatagctgtatctactatgagacaaccatgtcaaacagggggtc

SEQ ID NO: 405085 - DNA, 120 bp, Artificial Sequence
  ENSG00000147255_25 (sequence is synthesized)
atatctcagtatgccccttatgatctgggtgactgacacattccctaagccatggttgtttgctgagcccagttctgtggttcccatggggcagaatgttactctctggtgccgagggcc

SEQ ID NO: 405086 - DNA, 120 bp, Artificial Sequence
  ENSG00000147255_26 (sequence is synthesized)
ggtccatggagtaggatacattctgcacaaagaaggagaagccacttcaatgcagctctggggatccaccagtaatgacggggcattccccatcaccaatatatctggtactagcatggg

SEQ ID NO: 405087 - DNA, 120 bp, Artificial Sequence
  ENSG00000147255_27 (sequence is synthesized)
gcgttacagctgctgctaccaccctgactggaccagttctatcaagatacaacctagcaacaccctggaactcctagtcacaggcttactccccaaacccagcctattagcccagcctgg

SEQ ID NO: 405088 - DNA, 120 bp, Artificial Sequence
  ENSG00000147255_28 (sequence is synthesized)
tcccatggtggcccctggcgaaaatatgactcttcagtgtcaaggggaactgccagactcaacatttgtcctgttgaaggagggggctcaggagcctttagagcaacagaggccaagtgg

SEQ ID NO: 405089 - DNA, 120 bp, Artificial Sequence
  ENSG00000147255_29 (sequence is synthesized)
gtacagggctgacttctggatgccagcagtgagaggtgaagactctgggatctatagctgtgtttattatttggactctactccctttgcagcttcaaatcacagtgactccctggagat

SEQ ID NO: 405090 - DNA, 120 bp, Artificial Sequence
  ENSG00000147255_30 (sequence is synthesized)
ctgggtgactgataagccccctaaaccctctctgtcagcctggcccagcaccatgttcaagttagggaaggacatcacccttcagtgccgaggacccctgccaggtgttgaatttgtcct

SEQ ID NO: 405091 - DNA, 120 bp, Artificial Sequence
  ENSG00000147255_31 (sequence is synthesized)
agaacatgatggagaagaagcacctcagcagttttcagaggatggagactttgtcatcaacaacgtagaaggaaaaggcattggaaactacagctgcagctaccgcctccaggcctaccc

SEQ ID NO: 405092 - DNA, 120 bp, Artificial Sequence
  ENSG00000147255_32 (sequence is synthesized)
tgatatctggtcagagcctagtgatcccctggagctggtgggggcagcagggcctgttgctcaggagtgcactgtagggaacattgtccgaagtagcctaatcgtggtggttgttgtagc

SEQ ID NO: 405093 - DNA, 120 bp, Artificial Sequence
  ENSG00000147255_33 (sequence is synthesized)
cttgggggtagtgctagccatagagtggaagaagtggcctcgactgcgaaccagaggctcagagacagacggaagagaccagaccattgcccttgaagagtgtaaccaagaaggagaacc

SEQ ID NO: 405094 - DNA, 120 bp, Artificial Sequence
  ENSG00000147255_34 (sequence is synthesized)
aggcacccctgccaattctccttcatcaacctctcagagaatctctgtggaactgcccgttccaatataataatctcctcctttacaagagctttcctctcctctctcttgctctcagag

SEQ ID NO: 405095 - DNA, 120 bp, Artificial Sequence
  ENSG00000147255_35 (sequence is synthesized)
acctataaatccaaccagttaccctgcaagtcagccccatctgctgttccttggtctctaatcacctgagctgggtaaaggggattctgggagttgagagctctgccagggtgagatgtt

SEQ ID NO: 405096 - DNA, 120 bp, Artificial Sequence
  ENSG00000147255_36 (sequence is synthesized)
tcctgaagagaggttccccacccctgtaactcctcactgtactgatttactggcgcatgaaattctattaaaaatgcattcttctgaataaaaagagtattcactatttaacttcaaaaa

SEQ ID NO: 405097 - DNA, 87 bp, Artificial Sequence
  ENSG00000147255_37 (sequence is synthesized)
tcgctcacgctgggagctgtagatcgcttctgcttttaagatacaagtgatgccttcaaatttgagctcagtttcttatggtcgttt

SEQ ID NO: 405098 - DNA, 120 bp, Artificial Sequence
  ENSG00000147255_38 (sequence is synthesized)
tgatgccttcaaatttgagctcagtttcttatggtcgtttaggagcatgagggtttctgcaataatctaccagtgaaatgatgatcaagatcttggaaagcactctactggtcaagcaga

SEQ ID NO: 405099 - DNA, 71 bp, Artificial Sequence
  ENSG00000147255_39 (sequence is synthesized)
atgatcaagatcttggaaagcactctactggtcaagcagaatagttcctgtcatctccattaagaatcagc

SEQ ID NO: 405100 - DNA, 120 bp, Artificial Sequence
  ENSG00000147255_40 (sequence is synthesized)
atcctgtctaacaaggaatcctttctggcactcaagagttttcaattcaatcctgatgaatgaatcattatttgataccagcctaagtgaagactctgcctggtgacttttgcaaggtgg

SEQ ID NO: 405101 - DNA, 120 bp, Artificial Sequence
  ENSG00000147255_41 (sequence is synthesized)
tttctggctgcaacatgggaagatttgggatcagtgagatggaagagatttttctggctactagcgttcctaagaaagagctttagtgtttatccagctattggtatgcagacaactata

SEQ ID NO: 405102 - DNA, 120 bp, Artificial Sequence
  ENSG00000147255_42 (sequence is synthesized)
cccttatgagaaacactagcagagaagaagagttcttgactgggtctgggccatgaaactgaccggataaaagtgggagaagaagagatgttgaaggaggagtttgctgttttctcagtc

SEQ ID NO: 405103 - DNA, 120 bp, Artificial Sequence
  ENSG00000147255_43 (sequence is synthesized)
tcctgagaaattccagatatcttctttctacacacatcctggagaggggaaagaaagcctctctctgtcacccaggctggaatgcactggtgccatctccactcactgcagcttcaacct

SEQ ID NO: 405104 - DNA, 120 bp, Artificial Sequence
  ENSG00000147255_44 (sequence is synthesized)
gagaatcagcagaaccccaagaaaaattctacctttttactagcctccattgcctgccctgatcacactgaggactcatctggaggtagtgaggggtggggttgaagggtccctgtgtga

SEQ ID NO: 405105 - DNA, 120 bp, Artificial Sequence
  ENSG00000147255_45 (sequence is synthesized)
gaagtccatctgcaaagtggatttaccttactttttaaatgcacttacttaaaagcaaagaagcctccgagaaccaatatttgctatatttgctttctctctttcttgttcttaatttgg

SEQ ID NO: 405106 - DNA, 120 bp, Artificial Sequence
  ENSG00000147255_46 (sequence is synthesized)
acttgctaaagctgctggcaaaattcagcctccaactttgcctttctgcctgcaaaatttcctccaagcttctgcacttttctgaggctcagctataagacaccagcttcccctttcccc

SEQ ID NO: 405107 - DNA, 120 bp, Artificial Sequence
  ENSG00000147255_47 (sequence is synthesized)
aggtgccaggcagagttggtgtaggtgggctccccgagcccggcgcagggaggggaggaggttggggcgggccggcaggcgggcgggggagagaggaaggcggggctcagagccgaagag

SEQ ID NO: 405108 - DNA, 120 bp, Artificial Sequence
  ENSG00000147255_48 (sequence is synthesized)
ggcgtgtctccatgaccttggacataatgccttgagattccagagatagattgggctgattgggaatcagaggacttggtttcctatggcatggtgaaaaagctttatctcagatggaaa

SEQ ID NO: 405109 - DNA, 120 bp, Artificial Sequence
  ENSG00000147255_49 (sequence is synthesized)
agagaccatcagactttattctccaattcatttggaccccttgacaaaatatcttggggttcttatacgatgccccacaggagcacactcctgtccccaagggaagacaaaatgagggat

SEQ ID NO: 405110 - DNA, 120 bp, Artificial Sequence
  ENSG00000147255_50 (sequence is synthesized)
caaggcagatgtatgggagccaatcatttggctagtaaaggagcccagccaactggccagcagcttcagctcatcacagctttgttgttctcaacttgttgaatatcatgcattcattca

SEQ ID NO: 405111 - DNA, 120 bp, Artificial Sequence
  ENSG00000147255_51 (sequence is synthesized)
ttaattcaaccagtatttattgagcacctaatatgtgccaggcactgccactgcaatcttataaatggagttttaaatttgcaaatgtattttatttgtaattgttatttttatgtgtgg

SEQ ID NO: 405112 - DNA, 120 bp, Artificial Sequence
  ENSG00000147255_52 (sequence is synthesized)
aaaacagaatggattgctagtgttggtgagtaaaaacaaaaaaaaacaaatgacaaagaatgtgatagctcatattttagaaatggctttataaatcaccttggttccctatcagtagag

SEQ ID NO: 405113 - DNA, 120 bp, Artificial Sequence
  ENSG00000147255_53 (sequence is synthesized)
ctagtaaggcagcaccaatctctaaatatagaagaaatttccccaaaatgtaaaatgccagacatgtcccagcccgaactcccccaccccatggcctggaggtttctagatggaattggc

SEQ ID NO: 405114 - DNA, 120 bp, Artificial Sequence
  ENSG00000147255_54 (sequence is synthesized)
cacatttgctttagtctctctatccagctaaataggcttggggaaagctgtggtgctacagaaagtaccctagacttagaagcagtaatactggtttctagttctatttctgacactgcc

SEQ ID NO: 405115 - DNA, 120 bp, Artificial Sequence
  ENSG00000147255_55 (sequence is synthesized)
tccctgtgtggtcttgagcaagtcacttcacttttctgtgctttggcttcctctactctaaaaatgggataacagtatctatctgatctactgtgtaatgcttctctctgtgcctcagct

SEQ ID NO: 405116 - DNA, 120 bp, Artificial Sequence
  ENSG00000147255_56 (sequence is synthesized)
tcctgatctgcaaaattggtttaataataatgcctacctcacagggttgttgtgaggatttgcctaaatatatatgtacagtgcctggcatataagttctcaataaatggtagatattaa

SEQ ID NO: 405117 - DNA, 120 bp, Artificial Sequence
  ENSG00000147255_57 (sequence is synthesized)
gctggctgagctagggtttctgattttactttcctcagccagtttctaggccctgcaaggccccatgagctacagtcgtttgaagttttactgagatataaattagaatggcatgtgctg

SEQ ID NO: 405118 - DNA, 120 bp, Artificial Sequence
  ENSG00000147256_0 (sequence is synthesized)
gcaaaggttaactgcgagctgccgggcactcagcgcgggtcatggcgtggatactggactgccttttcgcctcggcctttgagccccgcccccgccgtgcaaaaacaaccagaggctgct

SEQ ID NO: 405119 - DNA, 120 bp, Artificial Sequence
  ENSG00000147256_1 (sequence is synthesized)
ctgcttgagggtgaagccgcctcccagttttccctccccctctacccccacccccatagttctctccaccaggtccagtgacaattggatgatgcagccttgataatcatccgattccag

SEQ ID NO: 405120 - DNA, 120 bp, Artificial Sequence
  ENSG00000147256_2 (sequence is synthesized)
aatgggtggctgcattccttttctgaaggcagcaagggcactgtgccccagaatcatgccccctttgctgttgttgtccgccttcatttttttagtgagtgtcttgggaggagccccagg

SEQ ID NO: 405121 - DNA, 120 bp, Artificial Sequence
  ENSG00000147256_3 (sequence is synthesized)
acacaaccccgaccgcaggacgaagatggtatcgatacacagcctctctgagctggagcgtctgaagctgcaagagactgcttaccacgaactcgtggccagacatttcctctccgaatt

SEQ ID NO: 405122 - DNA, 120 bp, Artificial Sequence
  ENSG00000147256_4 (sequence is synthesized)
caaacctgacagagctctgcctattgaccgtccgaacaccttggataagtggtttctgattttgagaggacagcagagggctgtatcacacaagacatttggcattagcctggaagaggt

SEQ ID NO: 405123 - DNA, 120 bp, Artificial Sequence
  ENSG00000147256_5 (sequence is synthesized)
cctggtgaacgagtttacccgccgcaagcatcttgaactgacagccacgatgcaggttgaagaagccaccggtcaggctgcgggccgtcgtcggggaaacgtggtgcgaagggtgtttgg

SEQ ID NO: 405124 - DNA, 120 bp, Artificial Sequence
  ENSG00000147256_6 (sequence is synthesized)
ccgcatccggcgctttttcagtcgcaggcggaatgagcccaccttgccccgggagttcactcgccgtgggcgtcgaggtgcagtgtctgtggatagtctggctgagctggaagacggagc

SEQ ID NO: 405125 - DNA, 120 bp, Artificial Sequence
  ENSG00000147256_7 (sequence is synthesized)
cctgctgctgcagaccctgcagctttcaaaaatttcctttccaattggccaacgacttctgggatccaaaaggaagatgagtctcaatccgattgcgaaacaaatcccccaggttgttga

SEQ ID NO: 405126 - DNA, 120 bp, Artificial Sequence
  ENSG00000147256_8 (sequence is synthesized)
ggcttgctgccaattcattgaaaaacatggcttaagcgcagtggggatttttacccttgaatactccgtgcagcgagtgcgtcagctccgtgaagaatttgatcaaggtctggatgtagt

SEQ ID NO: 405127 - DNA, 120 bp, Artificial Sequence
  ENSG00000147256_9 (sequence is synthesized)
gctggatgacaatcagaatgtgcatgatgtggctgcactcctcaaggagtttttccgtgacatgaaggattctctgctgccagatgatctgtacatgtcattcctcctgacagcaacttt

SEQ ID NO: 405128 - DNA, 120 bp, Artificial Sequence
  ENSG00000147256_10 (sequence is synthesized)
aaagccccaggatcagctttctgccctgcagttgctggtctacctgatgccaccctgccacagtgataccctggagcgtctgctgaaggccctgcataaaatcactgagaactgcgagga

SEQ ID NO: 405129 - DNA, 120 bp, Artificial Sequence
  ENSG00000147256_11 (sequence is synthesized)
ctcaattggcattgatggacagttggtcccaggcaaccgtatgacttccactaacttggccttggtgtttggatctgctctcctgaaaaaaggaaagtttggcaagagagagtccaggaa

SEQ ID NO: 405130 - DNA, 120 bp, Artificial Sequence
  ENSG00000147256_12 (sequence is synthesized)
ggttgctaagcgcgtgtggaagtccagcccggaagcacttgattttatcagacgcaggaacttgaggaagatccagagtgcacgcataaagatggaagaggatgcactactttctgatcc

SEQ ID NO: 405131 - DNA, 120 bp, Artificial Sequence
  ENSG00000147256_13 (sequence is synthesized)
agtggaaacctctgctgaagcccgggctgctgtccttgctcaaagcaagccttctgatgaaggttcctctgaggagccagctgtgccttccggcactgcccgttcccatgacgatgagga

SEQ ID NO: 405132 - DNA, 120 bp, Artificial Sequence
  ENSG00000147256_14 (sequence is synthesized)
aggagcgggtaaccctcccattccggagcaagaccgcccattgctccgtgtgccccgggagaaggaggccaaaactggcgtcagctacttctttccttagatgtttttccttctataagg

SEQ ID NO: 405133 - DNA, 120 bp, Artificial Sequence
  ENSG00000147256_15 (sequence is synthesized)
tgccagacaggggaaaagggtgggggtacatctgggatgtcacaggaaacattaaggagagagttgaaggtaaagatctgaaggtaagaaggagttccacctgatgctcgggtcaggatg

SEQ ID NO: 405134 - DNA, 120 bp, Artificial Sequence
  ENSG00000147256_16 (sequence is synthesized)
agaattccaaacacactgccagccccttcactggggatgcttggtctcttctgctggtaaaagcagagatgtttctgtgtcatgcccaagctccccggtgctaccttgcctttctctttt

SEQ ID NO: 405135 - DNA, 120 bp, Artificial Sequence
  ENSG00000147256_17 (sequence is synthesized)
acccctgatcttggctttctctctctctctgcagactttcctttaattgatgtgacatttgtggtaaacacctttcccagggaacctcacaaatcttgagatgctttcccttccccagat

SEQ ID NO: 405136 - DNA, 120 bp, Artificial Sequence
  ENSG00000147256_18 (sequence is synthesized)
gggattgcatgatttccctgactttcctaccctcctccagagagctcagttggaaaggccctcaagaggcatgctagaacgttaggtcagcctactgacagctgacaaacaattaatgcg

SEQ ID NO: 405137 - DNA, 120 bp, Artificial Sequence
  ENSG00000147256_19 (sequence is synthesized)
aaatcatgtcacaccaacccatagccgtgtccacgcagcaactccaccaccttaggatttccccctccaaattattcagaccaatggcttgccaaatggcctctcccaaaattctgtaca

SEQ ID NO: 405138 - DNA, 120 bp, Artificial Sequence
  ENSG00000147256_20 (sequence is synthesized)
gttttgctcaggtcacgccaacagggaaacctcaagtgtaggtctaattagtgtttctgggatccaaagttagaggaaaatttagattttattgcctggatctgctttaaagacaattgg

SEQ ID NO: 405139 - DNA, 120 bp, Artificial Sequence
  ENSG00000147256_21 (sequence is synthesized)
tgtttacaccctcttgtcagcaaaacagctagttaggtaaggacatatagttccaagtaggtaaagtcacttgattacaaatgttcttaactatcgtctctgtaattcctttatacagga

SEQ ID NO: 405140 - DNA, 120 bp, Artificial Sequence
  ENSG00000147256_22 (sequence is synthesized)
cagtacaaaattgtgggacatgctctggtaacacacagatatgggttgcatatgatccagaattacagctgatattatggatgacaactgctaaggtccataaaatgaagactgtattgt

SEQ ID NO: 405141 - DNA, 120 bp, Artificial Sequence
  ENSG00000147256_23 (sequence is synthesized)
attgagggatagaaattgatcatttaatgggtaacaactgctgagctcaaagatttgtgattgttaaaacttctctggcatttaatcattaataaacatctgtattgtgacagcagcata

SEQ ID NO: 405142 - DNA, 80 bp, Artificial Sequence
  ENSG00000147257_0 (sequence is synthesized)
cgccctgtgtagagcggctgcgagcgggcagctgggctcggctgccgggagccaccgcgcgggctccgcaccctcctctc

SEQ ID NO: 405143 - DNA, 120 bp, Artificial Sequence
  ENSG00000147257_1 (sequence is synthesized)
accccagtcagccccgccctgccccgcgccgccaagcggttcccgccctcgcccagcgcccaggtagctgcgaggaaacttttgcagcggctgggtagcagcacgtctcttgctcctcag

SEQ ID NO: 405144 - DNA, 120 bp, Artificial Sequence
  ENSG00000147257_2 (sequence is synthesized)
ggccactgccaggcttgccgagtcctgggactgctctcgctccggctgccactctcccgcgctctcctagctccctgcgaagcaggatggccgggaccgtgcgcaccgcgtgcttggtgg

SEQ ID NO: 405145 - DNA, 120 bp, Artificial Sequence
  ENSG00000147257_3 (sequence is synthesized)
tggcgatgctgctcagcttggacttcccgggacaggcgcagcccccgccgccgccgccggacgccacctgtcaccaagtccgctccttcttccagagactgcagcccggactcaagtggg

SEQ ID NO: 405146 - DNA, 120 bp, Artificial Sequence
  ENSG00000147257_4 (sequence is synthesized)
tgccagaaactcccgtgccaggatcagatttgcaagtatgtctccctaagggcccaacatgctgctcaagaaagatggaagaaaaataccaactaacagcacgattgaacatggaacagc

SEQ ID NO: 405147 - DNA, 120 bp, Artificial Sequence
  ENSG00000147257_5 (sequence is synthesized)
tgcttcagtctgcaagtatggagctcaagttcttaattattcagaatgctgcggttttccaagaggcctttgaaattgttgttcgccatgccaagaactacaccaatgccatgttcaaga

SEQ ID NO: 405148 - DNA, 120 bp, Artificial Sequence
  ENSG00000147257_6 (sequence is synthesized)
acaactacccaagcctgactccacaagcttttgagtttgtgggtgaatttttcacagatgtgtctctctacatcttgggttctgacatcaatgtagatgacatggtcaatgaattgtttg

SEQ ID NO: 405149 - DNA, 120 bp, Artificial Sequence
  ENSG00000147257_7 (sequence is synthesized)
acagcctgtttccagtcatctatacccagctaatgaacccaggcctgcctgattcagccttggacatcaatgagtgcctccgaggagcaagacgtgacctgaaagtatttgggaatttcc

SEQ ID NO: 405150 - DNA, 120 bp, Artificial Sequence
  ENSG00000147257_8 (sequence is synthesized)
ccaagcttattatgacccaggtttccaagtcactgcaagtcactaggatcttccttcaggctctgaatcttggaattgaagtgatcaacacaactgatcacctgaagttcagtaaggact

SEQ ID NO: 405151 - DNA, 120 bp, Artificial Sequence
  ENSG00000147257_9 (sequence is synthesized)
tgatgatggttaaaccctgtggcggttactgcaatgtggtcatgcaaggctgtatggcaggtgtggtggagattgacaagtactggagagaatacattctgtcccttgaagaacttgtga

SEQ ID NO: 405152 - DNA, 120 bp, Artificial Sequence
  ENSG00000147257_10 (sequence is synthesized)
atggcatgtacagaatctatgacatggagaacgtactgcttggtctcttttcaacaatccatgattctatccagtatgtccagaagaatgcaggaaagctgaccaccactattggcaagt

SEQ ID NO: 405153 - DNA, 120 bp, Artificial Sequence
  ENSG00000147257_11 (sequence is synthesized)
tatgtgcccattctcaacaacgccaatatagatctgcttattatcctgaagatctctttattgacaagaaagtattaaaagttgctcatgtagaacatgaagaaaccttatccagccgaa

SEQ ID NO: 405154 - DNA, 120 bp, Artificial Sequence
  ENSG00000147257_12 (sequence is synthesized)
gaagggaactaattcagaagttgaagtctttcatcagcttctatagtgctttgcctggctacatctgcagccatagccctgtggcggaaaacgacaccctttgctggaatggacaagaac

SEQ ID NO: 405155 - DNA, 120 bp, Artificial Sequence
  ENSG00000147257_13 (sequence is synthesized)
tcgtggagagatacagccaaaaggcagcaaggaatggaatgaaaaaccagttcaatctccatgagctgaaaatgaagggccctgagccagtggtcagtcaaattattgacaaactgaagc

SEQ ID NO: 405156 - DNA, 120 bp, Artificial Sequence
  ENSG00000147257_14 (sequence is synthesized)
acattaaccagctcctgagaaccatgtctatgcccaaaggtagagttctggataaaaacctggatgaggaagggtttgaaagtggagactgcggtgatgatgaagatgagtgcattggag

SEQ ID NO: 405157 - DNA, 120 bp, Artificial Sequence
  ENSG00000147257_15 (sequence is synthesized)
gctctggtgatggaatgataaaagtgaagaatcagctccgcttccttgcagaactggcctatgatctggatgtggatgatgcgcctggaaacagtcagcaggcaactccgaaggacaacg

SEQ ID NO: 405158 - DNA, 120 bp, Artificial Sequence
  ENSG00000147257_16 (sequence is synthesized)
agataagcacctttcacaacctcgggaacgttcattccccgctgaagcttctcaccagcatggccatctcggtggtgtgcttcttcttcctggtgcactgactgcctggtgcccagcaca

SEQ ID NO: 405159 - DNA, 87 bp, Artificial Sequence
  ENSG00000147257_17 (sequence is synthesized)
ttcttcttcctggtgcactgactgcctggtgcccagcacatgtgctgccctacagcaccctgtggtcttcctcgataaagggaacca

SEQ ID NO: 405160 - DNA, 120 bp, Artificial Sequence
  ENSG00000147257_18 (sequence is synthesized)
ccatgtgttatgttttcgaaaatcaaatggtatcttttggaggaagatacattttagtggtagcatatagattgtccttttgcaaagaaagaaaaaaaaccatcaagttgtgccaaatta

SEQ ID NO: 405161 - DNA, 120 bp, Artificial Sequence
  ENSG00000147257_19 (sequence is synthesized)
ttctcctatgtttggctgctagaacatggttaccatgtctttctctctcactccctccctttctatcgttctctctttgcatggatttctttgaaaaaaaataaattgctcaaataaaaa

SEQ ID NO: 405162 - DNA, 120 bp, Artificial Sequence
  ENSG00000147257_20 (sequence is synthesized)
ggtgatggaatgataaaagtgaagaatcagctccgcttccttgcaggtaactgattagtgctgacccaaatgtaatctaaaaatggtgatgctcaggaattaaaaataaattgaacccgc

SEQ ID NO: 405163 - DNA, 120 bp, Artificial Sequence
  ENSG00000147257_21 (sequence is synthesized)
agggcacacagaccttgtctgtcttgttcattgttgtattcccaacatctaggggaaaaaaagcatgttgtatatatttgttgattgttgaacgaatttttttttactgtaaatagacac

SEQ ID NO: 405164 - DNA, 120 bp, Artificial Sequence
  ENSG00000147262_0 (sequence is synthesized)
ggagaggcaggaggctgaggactgaaaagagagggtgagtaattcttcatgacctgtaggatcccaaagatggcgacctgccagcctggactgccagcgaaggccagaatcgtgctgtag

SEQ ID NO: 405165 - DNA, 120 bp, Artificial Sequence
  ENSG00000147262_1 (sequence is synthesized)
ctctgaacccacagctcctctgcccctggcccatgagaatttcagctggagagatagcatgccctggtaagtgaagtcctgccacttcgagacatggaatcatctttctcatttggagtg

SEQ ID NO: 405166 - DNA, 120 bp, Artificial Sequence
  ENSG00000147262_2 (sequence is synthesized)
atccttgctgtcctggcctccctcatcattgctactaacacactagtggctgtggctgtgctgctgttgatccacaagaatgatggtgtcagtctctgcttcaccttgaatctggctgtg

SEQ ID NO: 405167 - DNA, 120 bp, Artificial Sequence
  ENSG00000147262_3 (sequence is synthesized)
gctgacaccttgattggtgtggccatctctggcctactcacagaccagctctccagcccttctcggcccacacagaagaccctgtgcagcctgcggatggcatttgtcacttcctccgca

SEQ ID NO: 405168 - DNA, 120 bp, Artificial Sequence
  ENSG00000147262_4 (sequence is synthesized)
gctgcctctgtcctcacggtcatgctgatcacctttgacaggtaccttgccatcaagcagcccttccgctacttgaagatcatgagtgggttcgtggccggggcctgcattgccgggctg

SEQ ID NO: 405169 - DNA, 120 bp, Artificial Sequence
  ENSG00000147262_5 (sequence is synthesized)
cctctcctgcgttggcttcttcccagccatgctcctctttgtcttcttctactgcgacatgctcaagattgcctccatgcacagccagcagattcgaaagatggaacatgcaggagccat

SEQ ID NO: 405170 - DNA, 120 bp, Artificial Sequence
  ENSG00000147262_6 (sequence is synthesized)
ggctggaggttatcgatccccacggactcccagcgacttcaaagctctccgtactgtgtctgttctcattgggagctttgctctatcctggacccccttccttatcactggcattgtgca

SEQ ID NO: 405171 - DNA, 120 bp, Artificial Sequence
  ENSG00000147262_7 (sequence is synthesized)
ggtggcctgccaggagtgtcacctctacctagtgctggaacggtacctgtggctgctcggcgtgggcaactccctgctcaacccactcatctatgcctattggcagaaggaggtgcgact

SEQ ID NO: 405172 - DNA, 120 bp, Artificial Sequence
  ENSG00000147262_8 (sequence is synthesized)
gcagctctaccacatggccctaggagtgaagaaggtgctcacctcattcctcctctttctctcggccaggaattgtggcccagagaggcccagggaaagttcctgtcacatcgtcactat

SEQ ID NO: 405173 - DNA, 120 bp, Artificial Sequence
  ENSG00000147262_9 (sequence is synthesized)
ctccagctcagagtttgatggctaagacggtaagggcagagaagtttcaaagtgcctttctcctccccactctggagccccaactagatcagcaggagctagggggatgagagcacttgc

SEQ ID NO: 405174 - DNA, 120 bp, Artificial Sequence
  ENSG00000147274_0 (sequence is synthesized)
ctcgttgcgcagtagtgctagcggcttcgcggttcggtcctcgcacccggcagccgccactggtgctgagctgctaggaagcccctatcgccgagctcgttggagcttgaacccattgtc

SEQ ID NO: 405175 - DNA, 120 bp, Artificial Sequence
  ENSG00000147274_1 (sequence is synthesized)
acccctccgactcaccggcccaaaaaaaaaaaaacatggttgaagcagatcgcccaggaaagctcttcattggtgggcttaatacggaaacaaatgagaaagctcttgaagcagtatttg

SEQ ID NO: 405176 - DNA, 120 bp, Artificial Sequence
  ENSG00000147274_2 (sequence is synthesized)
gcaaatatggacgaatagtggaagtactcttgatgaaagaccgtgaaaccaacaaatcaagaggatttgcttttgtcacctttgaaagcccagcagacgctaaggatgcagccagagaca

SEQ ID NO: 405177 - DNA, 120 bp, Artificial Sequence
  ENSG00000147274_3 (sequence is synthesized)
tgaatggaaagtcattagatggaaaagccatcaaggtggaacaagccaccaaaccatcatttgaaagtggtagacgtggaccgcctccacctccaagaagtagaggccctccaagaggtc

SEQ ID NO: 405178 - DNA, 120 bp, Artificial Sequence
  ENSG00000147274_4 (sequence is synthesized)
ttagaggtggaagaggaggaagtggaggaaccaggggacctccctcacggggaggacacatggatgacggtggatattccatgaattttaacatgagttcttccaggggaccactcccag

SEQ ID NO: 405179 - DNA, 120 bp, Artificial Sequence
  ENSG00000147274_5 (sequence is synthesized)
taaaaagaggaccaccaccaagaagtgggggtcctcctcctaagagatctgcaccttcaggaccagttcgcagtagcagtggaatgggaggaagagctcctgtatcacgtggaagagata

SEQ ID NO: 405180 - DNA, 120 bp, Artificial Sequence
  ENSG00000147274_6 (sequence is synthesized)
gttatggaggtccacctcgaagggaaccgctgccctctcgtagagatgtttatttgtccccaagagatgatgggtattctactaaagacagctattcaagcagagattacccaagttctc

SEQ ID NO: 405181 - DNA, 120 bp, Artificial Sequence
  ENSG00000147274_7 (sequence is synthesized)
gtgatactagagattatgcaccaccaccacgagattatacttaccgtgattatggtcattccagttcacgtgatgactatccatcaagaggatatagcgatagagatggatatggtcgtg

SEQ ID NO: 405182 - DNA, 120 bp, Artificial Sequence
  ENSG00000147274_8 (sequence is synthesized)
cccccgccatcttatggtggaagcagtcgctatgatgattacagcagctcacgtgacggatatggtggaagtcgagacagttactcaagcagccgaagtgatctctactcaagtggtcgt

SEQ ID NO: 405183 - DNA, 120 bp, Artificial Sequence
  ENSG00000147274_9 (sequence is synthesized)
gatcgggttggcagacaagaaagagggcttcccccttctatggaaagggggtaccctcctccacgtgattcctacagcagttcaagccgcggagcaccaagaggtggtggccgtggagga

SEQ ID NO: 405184 - DNA, 120 bp, Artificial Sequence
  ENSG00000147274_10 (sequence is synthesized)
agccgatctgatagagggggaggcagaagcagatactagaaacaaacaaaactttggaccaaaatcccagttcaaagaaacaaaaagtggaaactattctatcataactacccaaggact

SEQ ID NO: 405185 - DNA, 120 bp, Artificial Sequence
  ENSG00000147274_11 (sequence is synthesized)
actaaaaggaaaaattgtgttactttttttaaattccctgttaagttcccctccataatttttatgttcttgtgaggaaaaaagtaaaacatgtttaattttatttgactttcgcattgc

SEQ ID NO: 405186 - DNA, 120 bp, Artificial Sequence
  ENSG00000147274_12 (sequence is synthesized)
ttttcaacaagcaaatgttaaatgtgttaagacttgtactagtgttgtaactttccaagtaaaagtatcccctaaaggccacttcctatctgatttttcccagcaaatgaggcaggcaat

SEQ ID NO: 405187 - DNA, 120 bp, Artificial Sequence
  ENSG00000147274_13 (sequence is synthesized)
tctaagatcttccacaaaacatctagccatctaaaatggagagatgaatcattctacctatacaaacaagctagctattagagggtggttggggtatgctactcataagatttcagggtg

SEQ ID NO: 405188 - DNA, 120 bp, Artificial Sequence
  ENSG00000147274_14 (sequence is synthesized)
tcttccaactgaaatctcaatgttctcagtacgaaaaacctgaaatcacatgcctatgtaaggaaagtgctattcacccagtaaacccaaaaaagcaaatggataatgctggccattttg

SEQ ID NO: 405189 - DNA, 120 bp, Artificial Sequence
  ENSG00000147274_15 (sequence is synthesized)
cctttctgacatttccttgggaatctgcaagaacctcccctttcccttcccccaataagaccatttaagtgtgtgttaaacaactacagaatactaaataaaaagtttggccaaaaccaa

SEQ ID NO: 405190 - DNA, 120 bp, Artificial Sequence
  ENSG00000147274_16 (sequence is synthesized)
caaatttttgcaactctgtagtgtctcacttttaaaggaacagcttgattgcaaaggagaaaatagataagcaatgaagttatctccaacttcctaaaggcttatgacttctaaaaagtg

SEQ ID NO: 405191 - DNA, 120 bp, Artificial Sequence
  ENSG00000147274_17 (sequence is synthesized)
aatctatcagcattccacatcagatttaaagcatcaaatgcctgtgaaacagcaaagatggttggtgattttgctcattatggtcgtggagtgctgattgattcacagtagataaagctg

SEQ ID NO: 405192 - DNA, 61 bp, Artificial Sequence
  ENSG00000147274_18 (sequence is synthesized)
tggtcgtggagtgctgattgattcacagtagataaagctggcagtaagaaatggctgcaac

SEQ ID NO: 405193 - DNA, 120 bp, Artificial Sequence
  ENSG00000147274_19 (sequence is synthesized)
acaggcatgagccaccgcgcccggccggacaccattctttttcaatgaaacagtctaattccagagaatgagacttccagtttgaatgcaaagtgtgtggtcccaaagttgaattctttt

SEQ ID NO: 405194 - DNA, 120 bp, Artificial Sequence
  ENSG00000147274_20 (sequence is synthesized)
aatgcaaagtgtgtggtcccaaagttgaattcttttgaacccaagtacatgcctgcggttgggaggaacacttaaagatgaagcaagttcggaggaaagtgttaactgaactacagagat

SEQ ID NO: 405195 - DNA, 120 bp, Artificial Sequence
  ENSG00000147274_21 (sequence is synthesized)
ggtcactgataaaacaagttcttagaagttctcagacacacccagaggtgaagggcagccaaaactatcaacacaatggaaaaatgagctcacccaactgcacacacagagcttctagaa

SEQ ID NO: 405196 - DNA, 120 bp, Artificial Sequence
  ENSG00000147274_22 (sequence is synthesized)
ttgtcaataagtcactacagttgcataagcagtgctgtcagaattggtttggtgcaggcaatagattttgccttcaggggttcctgtggatctgaggaaggcatcagtgttgattaacac

SEQ ID NO: 405197 - DNA, 120 bp, Artificial Sequence
  ENSG00000147274_23 (sequence is synthesized)
cataactagggagtgactggtagttacttaaagcaagtaattgaccaaatggaaaaggggaagtaattaaggaaattggtaagtggaggtagtcaggaagttcttgtggttcttcacata

SEQ ID NO: 405198 - DNA, 120 bp, Artificial Sequence
  ENSG00000147274_24 (sequence is synthesized)
gattttacagctttggctttcattttgtttagctaaagtcatggggacaactcttcaatttagaacttaagttgaattataaaaatgatggatataagtggtagctgtatctagtgaagt

SEQ ID NO: 405199 - DNA, 120 bp, Artificial Sequence
  ENSG00000147274_25 (sequence is synthesized)
gtctgtcagtaagtgaaacattttttggtggtggcttatccacaaacagtttagttgtagaataaaacttatgagtgacatctggaaagtaaccatgctaagatggcaagcacactggaa

SEQ ID NO: 405200 - DNA, 120 bp, Artificial Sequence
  ENSG00000147274_26 (sequence is synthesized)
acaattaggccacttggctttcttttgctgtattgttttataagcctactttacctcccagtcttggaaacaagttttagttttttattggtttggagactagagccaatagtataatgt

SEQ ID NO: 405201 - DNA, 120 bp, Artificial Sequence
  ENSG00000147274_27 (sequence is synthesized)
tctcaaaggaaacagacttgagttgttggattagaggaactaacccaacttatatgattttttttttgtttttgtcgtgtagttatggcactgtcttatttggaacatttgcaactaggg

SEQ ID NO: 405202 - DNA, 120 bp, Artificial Sequence
  ENSG00000147274_28 (sequence is synthesized)
ataatacaacatttttaactctcatttgacaacctactactaatcacagaccacaagggtaatgaccaaatttatgtggtttttgcactccatagttgtcttagcccaatctttctatac

SEQ ID NO: 405203 - DNA, 120 bp, Artificial Sequence
  ENSG00000147274_29 (sequence is synthesized)
tcttacgattacttgggttaacgcttctgtgaggaccttctggctcttgagataccctaaatatttaagatatttagatatcttgaagatagtataggatatagagattgtaccaaatag

SEQ ID NO: 405204 - DNA, 120 bp, Artificial Sequence
  ENSG00000147274_30 (sequence is synthesized)
gaatataaggagtatgttaaaatgaccagatacctgtttgatagtttactgacctagcagatgtgtggaaaaggaatcagatcttgattcttctgggtttatactggttgtaaaacagaa

SEQ ID NO: 405205 - DNA, 120 bp, Artificial Sequence
  ENSG00000147274_31 (sequence is synthesized)
tgatacagaaaatgttttccttgtttaactggtagttgaacatagaacttgggtattatagatcacttttcactttttggaatgttttgtattgaaacttaataaaactttaacatggca

SEQ ID NO: 405206 - DNA, 120 bp, Artificial Sequence
  ENSG00000147274_32 (sequence is synthesized)
gttcgtgagccagtttattaggctgtgtggtgcttgcttttaaagggatgtttgcttgcttttaaaggggtaactttatcagctgggcttttcctagttttgtgaggggctttttttgtt

SEQ ID NO: 405207 - DNA, 120 bp, Artificial Sequence
  ENSG00000147274_33 (sequence is synthesized)
tttctaagtttcttttgaggctgtttgcttgctttggaggggattttgcttgcttaaattggcagccttatgtgttttcccccaacagtgaaaatacaatttaaaaattttattaacaag

SEQ ID NO: 405208 - DNA, 120 bp, Artificial Sequence
  ENSG00000147274_34 (sequence is synthesized)
atcaaatatttaccattgcaatatgaaggcaagttctacagttcaaaattgcaacttatcactggaaagtggctgagtgtctactataaaataacaagctctctggaatatcctcttgaa

SEQ ID NO: 405209 - DNA, 120 bp, Artificial Sequence
  ENSG00000147274_35 (sequence is synthesized)
atacacaccgtcttcagtcttttcaaacaaacattaaaatgaatccaattccatatctcagcagatgagcaaatccctgttatggccagcaatggcagagtttaaaacctcccacccagt

SEQ ID NO: 405210 - DNA, 120 bp, Artificial Sequence
  ENSG00000147274_36 (sequence is synthesized)
tgagaaagtaaacttttaatacaagaattctgtaaattcagatttaaaatgttgtatatatacaatttatagtgttgccatattacctgaccattgaccctgcaggtaactcacgtagtg

SEQ ID NO: 405211 - DNA, 120 bp, Artificial Sequence
  ENSG00000147274_37 (sequence is synthesized)
acacttaccttcctcatagtacagtgaaacatactgtacctcaaggcaatggaaatgccttctagattaaaaaaaacttttggaaaaaagaaatattcaatagcgtattagaagtcctcc

SEQ ID NO: 405212 - DNA, 120 bp, Artificial Sequence
  ENSG00000147274_38 (sequence is synthesized)
aaattcaacacttggattttttttttttttttttaaagcatgtgtgacacttaaaggctttattaatagagctgttgtttaccaatggcgatctggggcttgggagggggtatttttttc

SEQ ID NO: 405213 - DNA, 120 bp, Artificial Sequence
  ENSG00000147274_39 (sequence is synthesized)
aaagtccatttttgatgaagacctttaaacatgcttcgtatgtttttaacatttttttcaaattagtcttttagtcaatataggaaatggcttaagtttggggtccccctttttacccct

SEQ ID NO: 405214 - DNA, 120 bp, Artificial Sequence
  ENSG00000147274_40 (sequence is synthesized)
gtaagccattgcaaacttgacatttagttggatgcctgacttgtttttagttctatgaaactacactgtatggagaaaatctattgcaagtggtctttaaaaagcaaaacctgaggcagc

SEQ ID NO: 405215 - DNA, 120 bp, Artificial Sequence
  ENSG00000147274_41 (sequence is synthesized)
atgacccaggtccagccatgaagttgaaaaagatgctcttgaatatagtaaacttgaagacctccaactaaaaatccttatactgcacttattccttcaaataagttttgttcgttcaac

SEQ ID NO: 405216 - DNA, 120 bp, Artificial Sequence
  ENSG00000147274_42 (sequence is synthesized)
ttatggatttaacgtggcagtgcaccattggaacagaatgacaatccataagccatgcaacttaacaatttaagccattccagtccatcccgagccagtgaatcttccaccacttaagac

SEQ ID NO: 405217 - DNA, 120 bp, Artificial Sequence
  ENSG00000147274_43 (sequence is synthesized)
aaatagtagaacatgaaatatattaagctgcaagtctgaacttgccttttctttctggaaaagagggcagtaataggcaagttttaaaagaatttccttaagagagataactagttttca

SEQ ID NO: 405218 - DNA, 120 bp, Artificial Sequence
  ENSG00000147274_44 (sequence is synthesized)
attgcattgatcgtctgacatgataatgtatttttgtcctctaagaagttctgagctttctgtttacacatttactttggttatttcatttgacctagggtaacactttatttttctgaa

SEQ ID NO: 405219 - DNA, 120 bp, Artificial Sequence
  ENSG00000147316_0 (sequence is synthesized)
aagcaccgcgtaggccagctggccggatcccgccgtctgtcatggcggcccccatcctgaaagatgtagtggcctatgttgaagtgtggtcatccaatggaacagaaaattattcaaaga

SEQ ID NO: 405220 - DNA, 120 bp, Artificial Sequence
  ENSG00000147316_1 (sequence is synthesized)
catttacaacacagcttgtggatatgggggcaaaggtttcaaaaacttttaacaaacaagtaactcacgttatcttcaaagatggctaccagagcacttgggacaaagctcagaagagag

SEQ ID NO: 405221 - DNA, 120 bp, Artificial Sequence
  ENSG00000147316_2 (sequence is synthesized)
gcgtaaagctcgtttcggtgctctgggtggaaaaatgcaggacagctggagcacacattgatgaatcattgttccctgcagctaatatgaatgaacacttatcaagcctaattaaaaaaa

SEQ ID NO: 405222 - DNA, 120 bp, Artificial Sequence
  ENSG00000147316_3 (sequence is synthesized)
aacgtaaatgtatgcagcccaaagattttaattttaaaacaccagaaaatgataagagatttcagaagaaatttgagaaaatggctaaagagctacaaaggcaaaaaacaaatctagatg

SEQ ID NO: 405223 - DNA, 120 bp, Artificial Sequence
  ENSG00000147316_4 (sequence is synthesized)
atgatgtacctattctcttatttgaatctaatggttcattaatatatactcccacaattgaaattaatagtaggcaccacagcgcaatggagaagagattacaagagatgaaggagaaaa

SEQ ID NO: 405224 - DNA, 120 bp, Artificial Sequence
  ENSG00000147316_5 (sequence is synthesized)
gggaaaatctttcccccacctcttcccaaatgattcagcagtctcatgataatccaagtaactctctgtgtgaagcacctttgaacatttcacgtgatactttgtgttcagatgaatact

SEQ ID NO: 405225 - DNA, 120 bp, Artificial Sequence
  ENSG00000147316_6 (sequence is synthesized)
ttgctggtggcttacactcatcttttgatgatctttgtggaaactcaggatgtggaaatcaggaaaggaagttggaaggatccattaatgacattaaaagtgatgtgtgtatttcttcac

SEQ ID NO: 405226 - DNA, 120 bp, Artificial Sequence
  ENSG00000147316_7 (sequence is synthesized)
ttgtattgaaagcaaataatattcattcatcaccatctttcactcacctcgataaatcaagtcctcagaaatttctgagtaatctttcaaaggaagaaataaacttgcaaagaaatattg

SEQ ID NO: 405227 - DNA, 120 bp, Artificial Sequence
  ENSG00000147316_8 (sequence is synthesized)
caggtaaagtagtcacccctgaccaaaagcaggctgcaggtatgtctcaggagacgtttgaagagaagtatcgtttgtctcctaccttatcttcaacaaaaggccaccttttgatacatt

SEQ ID NO: 405228 - DNA, 120 bp, Artificial Sequence
  ENSG00000147316_9 (sequence is synthesized)
caagacccaggagttcctcagtaaagagaaaaagagtatcacatggctcccattcacctccgaaggaaaaatgcaagagaaagaggagcaccaggagatctatcatgccgaggctgcagc

SEQ ID NO: 405229 - DNA, 120 bp, Artificial Sequence
  ENSG00000147316_10 (sequence is synthesized)
tgtgcaggtcggaagacaggctgcagcacgtggcgggacctgccctggaggctcttagctgtggggagtcttcatatgatgactatttttcacctgataatcttaaggaaaggtattcag

SEQ ID NO: 405230 - DNA, 120 bp, Artificial Sequence
  ENSG00000147316_11 (sequence is synthesized)
agaatcttcctcctgaatctcagctgccatcaagccctgctcagttgagctgcagaagtctttctaagaaggagagaacaagcatatttgaaatgtctgatttttcctgcgttggcaaaa

SEQ ID NO: 405231 - DNA, 120 bp, Artificial Sequence
  ENSG00000147316_12 (sequence is synthesized)
aaaccagaacagttgacattaccaatttcacagcaaaaaccatctccagtcctcggaaaactggaaatggtgaaggccgtgcaacttcgagttgcgtgacttctgcccctgaagaagccc

SEQ ID NO: 405232 - DNA, 120 bp, Artificial Sequence
  ENSG00000147316_13 (sequence is synthesized)
taaggtgttgtagacaggctgggaaagaagacgcatgcccagagggaaatggcttttcttacaccattgaggaccctgctcttccaaaaggacatgatgatgatttaactcctttggaag

SEQ ID NO: 405233 - DNA, 120 bp, Artificial Sequence
  ENSG00000147316_14 (sequence is synthesized)
gaagccttgaagaaatgaaagaagcggttggtctgaaaagcacacagaacaaaggtaccacttccaaaatatcaaactcctctgaaggcgaagcccagagtgaacatgagccatgtttta

SEQ ID NO: 405234 - DNA, 120 bp, Artificial Sequence
  ENSG00000147316_15 (sequence is synthesized)
tagttgactgtaacatggagacgtctacagaagagaaggaaaacttacccggaggatacagtggaagtgttaaaaatagaccaacaaggcatgatgttttagatgactcatgtgacggct

SEQ ID NO: 405235 - DNA, 120 bp, Artificial Sequence
  ENSG00000147316_16 (sequence is synthesized)
ttaaggacctcatcaaacctcatgaggaattgaagaaaagtgggagaggcaaaaagccaacaagaacattagtcatgacaagcatgccatctgaaaagcagaatgtcgtcatccaggttg

SEQ ID NO: 405236 - DNA, 120 bp, Artificial Sequence
  ENSG00000147316_17 (sequence is synthesized)
tggataaattgaaaggcttttcaattgcaccagacgtctgtgagaccacgactcacgtgctttccgggaagccacttcgcaccctgaatgtgctgctgggaattgcgcgtggctgctggg

SEQ ID NO: 405237 - DNA, 120 bp, Artificial Sequence
  ENSG00000147316_18 (sequence is synthesized)
ttctctcttatgattgggtgctatggtctttagaattgggtcactggatttctgaggagccgttcgaactgtctcaccacttccctgcagctcccctgtgccgaagcgagtgccacttgt

SEQ ID NO: 405238 - DNA, 120 bp, Artificial Sequence
  ENSG00000147316_19 (sequence is synthesized)
ctgcagggccgtaccgcggaaccctctttgccgaccagccagcgatgtttgtctcgcctgccagcagccccccagtggccaagctctgtgaactagtccacctgtgcggaggccgggtca

SEQ ID NO: 405239 - DNA, 120 bp, Artificial Sequence
  ENSG00000147316_20 (sequence is synthesized)
gccaagtcccccgccaggccagcatcgtcatcgggccctacagcggaaagaagaaagccacagtcaagtatctgtctgagaaatgggtcttagattccatcacccagcacaaggtctgtg

SEQ ID NO: 405240 - DNA, 120 bp, Artificial Sequence
  ENSG00000147316_21 (sequence is synthesized)
cccctgaaaactacctattgtcacaatgacagtgacctcactggcctgtggtgactgcacacagctcgcaaaactgtctttggatgttcaaatgagaaacaaaactgtgaagagaaggaa

SEQ ID NO: 405241 - DNA, 120 bp, Artificial Sequence
  ENSG00000147316_22 (sequence is synthesized)
ctggcgtatacaagatgacttctgatatcatgtttgccatgtgttgtggttcttaagaactcataggtgactttctgatgactgaatgtctgtttcagagacgcttcgggcctttttatt

SEQ ID NO: 405242 - DNA, 120 bp, Artificial Sequence
  ENSG00000147316_23 (sequence is synthesized)
gtgatctgtcaggcctcttctatagaattccagtctttgtgtcttagtcatgatcataattgaaaggtcacagaacctttgtcattagagcacagtactgccaaataaagaatggaaatt

SEQ ID NO: 405243 - DNA, 120 bp, Artificial Sequence
  ENSG00000147316_24 (sequence is synthesized)
caatgacattgttttattactgagaacaactagagaactctgcaagtttcttggcttagactcgatctttattaatacattatctattaggtaggaaagacatttgtcagctattaaggt

SEQ ID NO: 405244 - DNA, 120 bp, Artificial Sequence
  ENSG00000147316_25 (sequence is synthesized)
gacttttatctagcggagattcctctcttaaagtaatgaaaggagataggtatggggggtgttatacaggataattggtgacatctgagtgtcttacttctgcaagcctgctttatggtg

SEQ ID NO: 405245 - DNA, 120 bp, Artificial Sequence
  ENSG00000147316_26 (sequence is synthesized)
agcaaagcatcaccagcaagtgatcacaatgtccactggccgctttttgcctgccgtcctcgagatgaaattggcagttggggctgattcacagaaacaccgatttgtggctgagcacgg

SEQ ID NO: 405246 - DNA, 63 bp, Artificial Sequence
  ENSG00000147316_27 (sequence is synthesized)
gggctgattcacagaaacaccgatttgtggctgagcacggtggctcacacctgtcatcccagc

SEQ ID NO: 405247 - DNA, 120 bp, Artificial Sequence
  ENSG00000147316_28 (sequence is synthesized)
gcactccagcctgggcaacagagtaactctccttctcaaataaataaataaataaataagaaacactgatgtgtctgtcaccttctaaagaaatgaaatgctaggaagtcctagccagag

SEQ ID NO: 405248 - DNA, 120 bp, Artificial Sequence
  ENSG00000147316_29 (sequence is synthesized)
agccagagtgatcaggcaagaataagccataaaaggcatccaaataggaaaagaagtcaaactgtctctcttcactgccgatatgattctatacctagaaaaccctaaagactctgccaa

SEQ ID NO: 405249 - DNA, 120 bp, Artificial Sequence
  ENSG00000147316_30 (sequence is synthesized)
ttcaagctgagcaccaaatcaagaacgcaatcccatttccaatagccacggaatgaaatacctaggaacacgtataaccaaggaggcaaaggatctctacaaggagaaccataaacgaga

SEQ ID NO: 405250 - DNA, 120 bp, Artificial Sequence
  ENSG00000147316_31 (sequence is synthesized)
tgctgagtcccagcgaggtcggaggtgccactgagccctcatcgtggtgccgttcccgctctgggttatttatctgttgctcatctcagctgttgttcctacctcaaatttcaagtccct

SEQ ID NO: 405251 - DNA, 120 bp, Artificial Sequence
  ENSG00000147316_32 (sequence is synthesized)
caacaaatataacagaaccacttctagaatgaacctttgagaagggaggtagcagtgcattgtataggaattggcattctatagaaaaccacagaaactggaaataatgaagggttgtct

SEQ ID NO: 405252 - DNA, 120 bp, Artificial Sequence
  ENSG00000147316_33 (sequence is synthesized)
cttggttttaaaataatgtatacacctaaatcatccccttatgatactcatcctctaacagcaattgaacttcaatacaatgagtcattcctgagttcactcgcttcacattacatatgt

SEQ ID NO: 405253 - DNA, 120 bp, Artificial Sequence
  ENSG00000147316_34 (sequence is synthesized)
ttctctataaccacaagcatcctggcttggtagtgctcccacagcaccaaaaatccctgaggaggctgacaaacattgtgctgactcatgctggagacaagccacagagaacttccatcc

SEQ ID NO: 405254 - DNA, 120 bp, Artificial Sequence
  ENSG00000147316_35 (sequence is synthesized)
cccaccacatcagccacggagccagcccagcctctgcccacccaggcctcagtccccagtgttaagttctgatccctgatgctggcctgccagtggccagtcaagattctctttctgaaa

SEQ ID NO: 405255 - DNA, 120 bp, Artificial Sequence
  ENSG00000147316_36 (sequence is synthesized)
gctagtattttatgaggactgactgttgctagacattacactaagcacattatatgttgtacttcattttaccctttcaacaatcctattagtagcttactgtgggtctgcaaagcctta

SEQ ID NO: 405256 - DNA, 120 bp, Artificial Sequence
  ENSG00000147316_37 (sequence is synthesized)
ctcaaaacatatagggctagaggttctcaggattctgaattttaaaaaaaatttgtaaaggcttatggctctcaccactgttattcaacgttgcattaaagtttctacccagagaaggca

SEQ ID NO: 405257 - DNA, 120 bp, Artificial Sequence
  ENSG00000147316_38 (sequence is synthesized)
ataaaaggaaattaaagctatacagattggaagtgaagaaataaaagtctttattctcaagaatacaagacactatgtatagaaattgtaaggaatgcaaaaaaaaaaaaaaaaaaaagc

SEQ ID NO: 405258 - DNA, 120 bp, Artificial Sequence
  ENSG00000147316_39 (sequence is synthesized)
cctacaagaacttataacaagtttagcaagattgcaatatacaatcttgcaatcttcctaaagattatatacaaacctaacagaattgtatttatatatactgtcaataagcaattcaaa

SEQ ID NO: 405259 - DNA, 120 bp, Artificial Sequence
  ENSG00000147316_40 (sequence is synthesized)
atgaaattaagaccacgattccatttaaaattgcatctaaaaataaacaaaataggaatagacttggcaacagttgtaacatctgtatactgaaacctgtaaaacattgctgaaagaagt

SEQ ID NO: 405260 - DNA, 120 bp, Artificial Sequence
  ENSG00000147316_41 (sequence is synthesized)
taaagacttctttaaatagagacatatacaaagttcatagattagaagatgcaatattgttaagatgatagtcctcaaattgacgtatagattcaatgcaatccattaaaatctcagatg

SEQ ID NO: 405261 - DNA, 120 bp, Artificial Sequence
  ENSG00000147316_42 (sequence is synthesized)
gctttttatagaatttgaaaagctgatgctaaatcttttatgaaaatgcaaagaacctctagtagacaaaacaatttttttaagagcaaagttggaggatttatagaacctgattccaaa

SEQ ID NO: 405262 - DNA, 120 bp, Artificial Sequence
  ENSG00000147316_43 (sequence is synthesized)
ttatagaacctgattccaaaactgtcagtaaaactacaataattacaaagtatcagccaggtgccgtggctcacatctgtaataccagctctctgggaggctgaggcgggtggatcactt

SEQ ID NO: 405263 - DNA, 120 bp, Artificial Sequence
  ENSG00000147316_44 (sequence is synthesized)
tctactagaaatacaaaaaattagccaggcatgatggcacacacctgtaatctcagttactcaggaggctgaagcagaatagcttgaacccaagagagtccagctcaaaaacaacaacaa

SEQ ID NO: 405264 - DNA, 120 bp, Artificial Sequence
  ENSG00000147316_45 (sequence is synthesized)
agagagtccagctcaaaaacaacaacaagaacaaaagtatcacattggcataagaatagacatgtaaatcaaataacaaaatagagaattcaggtataaatcttcatatttatggctgat

SEQ ID NO: 405265 - DNA, 120 bp, Artificial Sequence
  ENSG00000147316_46 (sequence is synthesized)
tgactttgaacaaaggtgacgaggcaagtcagtatagcagcatattcttttcaacaaatggtgctggcagaagaaaaaaaaagtacttggatccttacctcacaccatgcacaaaaatta

SEQ ID NO: 405266 - DNA, 120 bp, Artificial Sequence
  ENSG00000147316_47 (sequence is synthesized)
gctcaacgtggactatatcagggtttctcaacatcagcagtgttggcgtttgctggggtggataattctttcctgtggagagctgtcctgtgcactgtagaatgtttagctgcatcctgg

SEQ ID NO: 405267 - DNA, 120 bp, Artificial Sequence
  ENSG00000147316_48 (sequence is synthesized)
cctctgcctattagatgccagtggcatccctcccctgacacacacctagttttgacaatctctgtctccagatattcccaaatgtgccctggagagcaaaactgtttccagttgagaacc

SEQ ID NO: 405268 - DNA, 120 bp, Artificial Sequence
  ENSG00000147316_49 (sequence is synthesized)
attgacctaatgtaaaaaataaaatgtacagaagaaagcatagcaggaaatcattctgacctcaggttaggcaaagctttcttagatatgacactaaaggcataattcattaaaaaaata

SEQ ID NO: 405269 - DNA, 120 bp, Artificial Sequence
  ENSG00000147316_50 (sequence is synthesized)
agttgggctttgtcaaaattttaagttttgctcttctgaagaaaccattaaaaaaaaatgaaaagacaagccacagactatgaaaaaatacttgcaaatcatatatctgataaaggactt

SEQ ID NO: 405270 - DNA, 120 bp, Artificial Sequence
  ENSG00000147316_51 (sequence is synthesized)
gtacccagaccatgtaaagaactcataactcattaataaaaggataaagaaaaagctgaagacaattcatgcaagaagatatacaaatattaagcacattaaaatgctcaatattattag

SEQ ID NO: 405271 - DNA, 120 bp, Artificial Sequence
  ENSG00000147316_52 (sequence is synthesized)
tcactagggaaatacaaattaaaggcccaatgaaatacctattacacacccattagaatgactgtaaacaacaagactgataattccaacatctgaccaagatatggagaaactagaact

SEQ ID NO: 405272 - DNA, 120 bp, Artificial Sequence
  ENSG00000147316_53 (sequence is synthesized)
ctcctacattgctggcatgagtgcaaaatgatacagccactttgaaacaccatttggcagttgcttaaaaaattgaacattcaactaccatatgacccagcaatttcactctcaggtata

SEQ ID NO: 405273 - DNA, 120 bp, Artificial Sequence
  ENSG00000147316_54 (sequence is synthesized)
taaccaaaatacatgaaaacatggatctgcacaaggtcttgtatacaaatgttcatagcaacattattcataataaccaaaaattagcccatcaactgaaaagtagataaacaaaatgta

SEQ ID NO: 405274 - DNA, 120 bp, Artificial Sequence
  ENSG00000147316_55 (sequence is synthesized)
tatccacaccatggaacgctactcagcaaacttctaaaaagcaacaaactactaaacacgtgcaacaacatgaatgagcctcagaaacataagtgaaagaggtcagacacaaaagactac

SEQ ID NO: 405275 - DNA, 120 bp, Artificial Sequence
  ENSG00000147316_56 (sequence is synthesized)
aaattgtaagattccatttagataccatttctacaaaccgcaaaactgtagaggcacgaaacagattcatggtctgctgcagctggggatgggagtgggaacagagagcaaacattttgg

SEQ ID NO: 405276 - DNA, 120 bp, Artificial Sequence
  ENSG00000147316_57 (sequence is synthesized)
gatgatggaaacattctaaaactggattgtgattttggttacacaactgtatacatttactaaaatcaatgaacagaacacttttaatgggtaagccttaaggcatgtgaattatacacc

SEQ ID NO: 405277 - DNA, 120 bp, Artificial Sequence
  ENSG00000147316_58 (sequence is synthesized)
aataaagctattttttttaaaaaaaagagagagagagaacgagagctacatggcagccccagggcaatagctctcagatctcccttagagaaagaactttctcttccacagcaatgagtg

SEQ ID NO: 405278 - DNA, 120 bp, Artificial Sequence
  ENSG00000147316_59 (sequence is synthesized)
caggtagctaacactgaccaacctgcatctggtagttcatttaaggtcggccttggctttcaagttaaggccatggtctttctctgcagtccccagccaatacgtgggcacagaaaggca

SEQ ID NO: 405279 - DNA, 120 bp, Artificial Sequence
  ENSG00000147316_60 (sequence is synthesized)
cagggcatggctgattcagcccaacatgaggctccacaccctagaactccctgtggagttggccgatactgcctgtgacctgcaatgtggtctaagctgtcagacctccacagtggccag

SEQ ID NO: 405280 - DNA, 120 bp, Artificial Sequence
  ENSG00000147316_61 (sequence is synthesized)
aaggttttccatacctgagcctgcttctacccacttttatttttcccaggagtcacgcttagtcatctcttgctctttgaactccatgtctgtatcagctacccagaggacccatcagac

SEQ ID NO: 405281 - DNA, 120 bp, Artificial Sequence
  ENSG00000147316_62 (sequence is synthesized)
agaaagtaatatgcagataacagcccaggggaatctgggcagcactgtgaaaccaacatttcttcagtgaaacctagaacaaaagtggaataaataaaaactaactgtctcatttcagca

SEQ ID NO: 405282 - DNA, 120 bp, Artificial Sequence
  ENSG00000147316_63 (sequence is synthesized)
cggaggatacagtggaagtatgtgaatctccttttccaagtcaccttcgctaaataaacatgtaacagtgcatccatattttaaatttatcacaactttttcataacttatttccccatt

SEQ ID NO: 405283 - DNA, 120 bp, Artificial Sequence
  ENSG00000147316_64 (sequence is synthesized)
tactcctctttttacttaaagaatgtgcatttgatcattccaatgataaactctttaggaatagatgacttgctgtcttgtggaacttctagacttattggttaagtctgttaggaatct

SEQ ID NO: 405284 - DNA, 120 bp, Artificial Sequence
  ENSG00000147316_65 (sequence is synthesized)
atttctccaagacttttccttcttataggtcaaaaggataagtagtccatagtatgaataactgaggggagtgaagtctttttccttattccattggagtcttggcgctgcagcgtgtgt

SEQ ID NO: 405285 - DNA, 120 bp, Artificial Sequence
  ENSG00000147316_66 (sequence is synthesized)
gattaagccatcgattgtatcatagagaaagtgtgaaaaactacttttagaaatctgttgtcaatattgatttttgaagaaactttggtcagtgttaactatgaagaaacatttaaacat

SEQ ID NO: 405286 - DNA, 120 bp, Artificial Sequence
  ENSG00000147316_67 (sequence is synthesized)
ttttgatcatttgtaacaagccttgtttaacttgtacttattttgcttgaagcatcacttgaaaaggtttactcctattcataatttaattgtaattataataaaccatatcattttatt

SEQ ID NO: 405287 - DNA, 120 bp, Artificial Sequence
  ENSG00000147316_68 (sequence is synthesized)
aaaagtcaaaacaataaaaaattttgcacttcacagttataagcacaaataggttccagcaaccaaaattgaagaaatcttgaactttgaccgtctttacctaaagattaggttaaaatt

SEQ ID NO: 405288 - DNA, 120 bp, Artificial Sequence
  ENSG00000147316_69 (sequence is synthesized)
tgagtgagaacgcattctctctgcatgatttctctgctctacaaatgttttaactgcctctttgaaggtggagaagtcatggtagcgtttgaaatcatcacagacatgttacataccttt

SEQ ID NO: 405289 - DNA, 120 bp, Artificial Sequence
  ENSG00000147316_70 (sequence is synthesized)
tccttgagtatacgctccccaaaattgtttcacaaaaagaatgaaaataattttatgtttttggcctgctatttatatcttggctttctgaacatatattaaatttgacaagaaactgta

SEQ ID NO: 405290 - DNA, 120 bp, Artificial Sequence
  ENSG00000147316_71 (sequence is synthesized)
actggcaagcttcccaccctgcccactgagtgtcctgacacaacgggaacgtgccctgcatctaatgggacatgtggctaccaagcacttgaactggccagtgtgactgagaactgaatg

SEQ ID NO: 405291 - DNA, 120 bp, Artificial Sequence
  ENSG00000147316_72 (sequence is synthesized)
gctcttgtacctcatgtctggattattttggattgctttggggacagtatctgagtttctatctcttggcctgttttttccaggaatataaagccaacaagaacattagtcatgacaagc

SEQ ID NO: 405292 - DNA, 73 bp, Artificial Sequence
  ENSG00000147316_73 (sequence is synthesized)
gacctcatcaaacctcatgaggaattgaagaaaagtgggagaggcaaaaagagacagagtttcaccaccttgg

SEQ ID NO: 405293 - DNA, 120 bp, Artificial Sequence
  ENSG00000147316_74 (sequence is synthesized)
catctacttccaaagatagcctagagagtattttttatcttctatagctgtaaaccttgatatgggcattctctgatggcctgtgtgttttgaaaagattaatggataaggcagtggatt

SEQ ID NO: 405294 - DNA, 120 bp, Artificial Sequence
  ENSG00000147316_75 (sequence is synthesized)
tcactgctaaccttgctacaccgtagctgtgtaaccttgggtaaggcagtttctttatctgtaaaagaatggaaagatcacctaaataaagtactcagtaaacactcaataaatattaaa

SEQ ID NO: 405295 - DNA, 80 bp, Artificial Sequence
  ENSG00000147324_0 (sequence is synthesized)
gccgcttcccaatcgcgccctcccagcgccggggacgcggcgcccgcgctcccgcccgagcccggggaaacggagacaag

SEQ ID NO: 405296 - DNA, 80 bp, Artificial Sequence
  ENSG00000147324_1 (sequence is synthesized)
gccctcccccaggagctcgaggaggcgacgccgctgccggccgcgggaccgcggctgcgagggtagcggggccggagccg

SEQ ID NO: 405297 - DNA, 80 bp, Artificial Sequence
  ENSG00000147324_2 (sequence is synthesized)
gagcaggcatcctccgcggcgcgcgggcggcggccctgctgcccggcgcgcccatggcccggccgcagggagaatgcaag

SEQ ID NO: 405298 - DNA, 120 bp, Artificial Sequence
  ENSG00000147324_3 (sequence is synthesized)
catggcccggccgcagggagaatgcaagctgctctccacgcgctcggcgtcccccggagccgctcgcgtcgccgccgccccctagccgccagcgctcggccgctggctgcgctaggaccc

SEQ ID NO: 405299 - DNA, 120 bp, Artificial Sequence
  ENSG00000147324_4 (sequence is synthesized)
gggcaggagccggagggcccggggcgcggcgcggcatgtagctgcgggctcccgcgtccgcgtgaggctgtcggcccggggccccgccatggctgggatggacagtggcaacctgaagac

SEQ ID NO: 405300 - DNA, 120 bp, Artificial Sequence
  ENSG00000147324_5 (sequence is synthesized)
ctgaagaccgcgaggctgtggcgggacgccgccctgcgtgccaggaagctgcggagcaacctgcgccagctcacgcttaccgccgccggggcctgccccggggccggggccgacgcgctc

SEQ ID NO: 405301 - DNA, 120 bp, Artificial Sequence
  ENSG00000147324_6 (sequence is synthesized)
cccccgcctccccccagctcgtgctgccggccaacctcggggacattgaggcactgaacctggggaacaacggcctggaggaggtacccgaggggctggggtcggcgctgggcagcctgc

SEQ ID NO: 405302 - DNA, 120 bp, Artificial Sequence
  ENSG00000147324_7 (sequence is synthesized)
gcgtcctggtcctgcgcaggaaccgcttcgcccggctgcccccggcggtggccgagctcggccaccacctcaccgagctggacgtgagccacaaccggctgaccgccctgggcgcggagg

SEQ ID NO: 405303 - DNA, 120 bp, Artificial Sequence
  ENSG00000147324_8 (sequence is synthesized)
tggtgagtgctctgagggagctgcggaagctcaacctcagccacaaccagctgcccgccctgcccgcccagctgggcgctctcgctcacctggaggagctggatgtcagctttaaccggc

SEQ ID NO: 405304 - DNA, 120 bp, Artificial Sequence
  ENSG00000147324_9 (sequence is synthesized)
tggcgcacctgcctgactccctctcctgcctctcccgcctgcgcaccctggacgtggatcacaaccagctcactgccttcccccggcagctgctgcagctggtggccctggaggagctgg

SEQ ID NO: 405305 - DNA, 120 bp, Artificial Sequence
  ENSG00000147324_10 (sequence is synthesized)
acgtgtccagcaaccggctgcggggcctgcctgaggatatcagtgccctgcgtgccctcaagatcctctggctgagtggggccgagcttggcacgctgcccgccggcttctgcgagctgg

SEQ ID NO: 405306 - DNA, 120 bp, Artificial Sequence
  ENSG00000147324_11 (sequence is synthesized)
ccagtttggagagcctcatgctagacaacaacgggctgcaggctctgcccgcccagttcagctgcctgcagcggctcaaaatgctcaacctctcctccaacctcttcgaggagttccctg

SEQ ID NO: 405307 - DNA, 120 bp, Artificial Sequence
  ENSG00000147324_12 (sequence is synthesized)
ccgcgctgctgcccctggctggtctggaggagctctaccttagtcgcaaccagctcacctcggtgccatcccttatctcgggcctgggccggcttctcaccttgtggctggataataacc

SEQ ID NO: 405308 - DNA, 120 bp, Artificial Sequence
  ENSG00000147324_13 (sequence is synthesized)
gcatccgctacctgccggactccatcgtggagctgaccggcctggaggagctcgtgctgcaggggaaccagatcgcggtgctgcccgaccactttggccagctctcccgggtgggtttgt

SEQ ID NO: 405309 - DNA, 120 bp, Artificial Sequence
  ENSG00000147324_14 (sequence is synthesized)
ggaagatcaaagacaacccactgatccagcccccctacgaggtctgcatgaaggggatcccctacatcgcagcctaccagaaggaactggctcattcccagccggcggtgcagccccggc

SEQ ID NO: 405310 - DNA, 120 bp, Artificial Sequence
  ENSG00000147324_15 (sequence is synthesized)
tcaagctgctcctgatggggcataaggctgcaggaaagactttgctgcgccactgcctcaccgaggagagagtggagggatgcccaggaggaggggacaaggagaagtgctacccaccgt

SEQ ID NO: 405311 - DNA, 120 bp, Artificial Sequence
  ENSG00000147324_16 (sequence is synthesized)
cacctccccctgtgagcaagggcatcgaggtgaccagctggacggccgatgcctcccggggcctgcggttcatcgtgtatgacttagctggggatgaaagttatgaggtgatccagccct

SEQ ID NO: 405312 - DNA, 120 bp, Artificial Sequence
  ENSG00000147324_17 (sequence is synthesized)
tcttcctgtccccaggggccctatacgtgctggtggtcaacttggccacctatgagcctcgccactttcctaccaccgtgggctccttcttgcatcgggtcggggcgagagtgccccacg

SEQ ID NO: 405313 - DNA, 120 bp, Artificial Sequence
  ENSG00000147324_18 (sequence is synthesized)
cggtggtgtgcatcgtgggcacccacgcagacctgtgcggagagcgtgagctggaggagaaatgtctggacattcaccgccagatcgccctgcaggagaagcacgacgcggagggactga

SEQ ID NO: 405314 - DNA, 120 bp, Artificial Sequence
  ENSG00000147324_19 (sequence is synthesized)
gccgcttggccaaggtggtggacgaggcactggcccgggacttcgagctgcgctctgccagcccccacgcagcctactatggcgtttcggacaagaaccttcgacggcgcaaggcccatt

SEQ ID NO: 405315 - DNA, 120 bp, Artificial Sequence
  ENSG00000147324_20 (sequence is synthesized)
ttcaatacctgctcaaccaccggctgcagatcctctcccccgtgttgcctgttagctgcagggacccgcgccacttacgacgccttcgggacaagttgctgtcagttgctgagcaccgag

SEQ ID NO: 405316 - DNA, 120 bp, Artificial Sequence
  ENSG00000147324_21 (sequence is synthesized)
agatcttccccaacttacacagagtactgcctcgatcctggcaggtgctggaggaactgcatttccagccacctcaggcccagcgactgtggctaagctggtgggactcggcgcgcttgg

SEQ ID NO: 405317 - DNA, 120 bp, Artificial Sequence
  ENSG00000147324_22 (sequence is synthesized)
gcctgcaggcgggtctgaccgaggaccgactgcagagtgccctctcctacctgcatgagagcggcaagctactctactttgaggacagtccggctctcaaggagcacgtcttccacaacc

SEQ ID NO: 405318 - DNA, 120 bp, Artificial Sequence
  ENSG00000147324_23 (sequence is synthesized)
tcacccgcctcatcgacatcctcaatgtcttcttccagagggatccctctttgctgctgcataagctgctcctagggaccagtggagagggcaaggcggagggggaaagctccccgccca

SEQ ID NO: 405319 - DNA, 120 bp, Artificial Sequence
  ENSG00000147324_24 (sequence is synthesized)
tggcgcggtccacccccagccaggaactgctccgggccacccagctccatcagtatgtggagggctttctgttgcatgggctcttgccagctcatgtcattcggttgctgcttaagcctc

SEQ ID NO: 405320 - DNA, 120 bp, Artificial Sequence
  ENSG00000147324_25 (sequence is synthesized)
atgtccaggcccagcaggacttgcagctgttgctggagctgctggagaagatgggactctgttactgcctcaataaacccaagggcaagcctttgaatgggtccacagcttggtacaagt

SEQ ID NO: 405321 - DNA, 120 bp, Artificial Sequence
  ENSG00000147324_26 (sequence is synthesized)
cctggattaatgggaccaacctagctgggcagtcttttgtggctgagcagttgcagattgaatatagctttccttttacttttccacttgggttgtttgcacgctacagtgtccagatca

SEQ ID NO: 405322 - DNA, 120 bp, Artificial Sequence
  ENSG00000147324_27 (sequence is synthesized)
acagccatgtggtgcacaggtcggatggtaaatttcagatctttgcctatagagggaaagttcctgtggttgtgagttacagacctgccaggggagtcctgcagccagacaccctgtcca

SEQ ID NO: 405323 - DNA, 120 bp, Artificial Sequence
  ENSG00000147324_28 (sequence is synthesized)
ttgctagccatgcatcattaccaaatatatggaccgcatggcaagccataacccccttggtggaggaactgaatgtcctacttcaggaatggcctggactgcactacaccgtgcacattc

SEQ ID NO: 405324 - DNA, 120 bp, Artificial Sequence
  ENSG00000147324_29 (sequence is synthesized)
tctgttctaagtgccttaagagaggatcgcccaatccacatgcttttccaggggagttgctgagtcagcccagaccggaaggagtggcagagatcatttgccccaagaacggcagcgagc

SEQ ID NO: 405325 - DNA, 120 bp, Artificial Sequence
  ENSG00000147324_30 (sequence is synthesized)
gagtaaatgttgccttggtttacccacccacgccgactgtgatcagcccctgttccaagaagaatgttggtgaaaagcacagaaaccagtgacgtttgtggctgtggaatttccatggag

SEQ ID NO: 405326 - DNA, 120 bp, Artificial Sequence
  ENSG00000147324_31 (sequence is synthesized)
aaaagagagcatctgaacacctggaccatcttttgcacctggcagaccctctgcactcaccccagcgtgttctgtgaacttgagtgacaacgcgtgcttgcagggtgctttttggacgac

SEQ ID NO: 405327 - DNA, 120 bp, Artificial Sequence
  ENSG00000147324_32 (sequence is synthesized)
tggggaagaggtggggagggggtggtggggggaagcatggacgagaacatggagcaaatgttttacaacctgaacctcagaactgtgatcctccaaggagcgcgctacttgaagaaaaga

SEQ ID NO: 405328 - DNA, 120 bp, Artificial Sequence
  ENSG00000147324_33 (sequence is synthesized)
aaaaaaaaaaaaaaaagtcgaatggcttctcagggattttgttttccgtgcacatataagccatagttacagtacaggtggcagtatttagagcactcagatttcagttctgttaaatgt

SEQ ID NO: 405329 - DNA, 120 bp, Artificial Sequence
  ENSG00000147324_34 (sequence is synthesized)
gaaagagggatcgactgacgttcattgctgttccataactagtgtaaaatatgtatatgtttatctttatttttataatatgcaaatacatttaaatttatacagtttgaagcttctagc

SEQ ID NO: 405330 - DNA, 120 bp, Artificial Sequence
  ENSG00000147324_35 (sequence is synthesized)
gttagttcacactgggtgcaatattctgcatgagaactgtgccaagatggggctgatttcttattttagtataagacttttttgttttttctttattctttaatcctcttcacattaaaa

SEQ ID NO: 405331 - DNA, 120 bp, Artificial Sequence
  ENSG00000147324_36 (sequence is synthesized)
aaaaaatctctctgttagcccatggattaagtgttggttcatagagattgccaataatcagaaagaaccttaaatgtgcatttaagacagtgtcccttcccttcttttcaatgaaggtcc

SEQ ID NO: 405332 - DNA, 120 bp, Artificial Sequence
  ENSG00000147324_37 (sequence is synthesized)
ctgcctatataaatcatctggcacgctggtgggaaatcctttgctcttccaacgtgttattagtgctgggcagagatggggcacactcaggggccaaagaggacaaaaagtccatgcaaa

SEQ ID NO: 405333 - DNA, 120 bp, Artificial Sequence
  ENSG00000147324_38 (sequence is synthesized)
acttgagtcttttaatggcttaagataatcaggagtcagttctgaatcttacaaagtgctctgcttaataagtaccttacttagcagagcactttgcaaacatattacttattagcagag

SEQ ID NO: 405334 - DNA, 120 bp, Artificial Sequence
  ENSG00000147324_39 (sequence is synthesized)
ctctttgtagaccttccacatctggctgtcagatcttaaggttgtgaatttaggctccagttacattcactggagagcataatcccacacgggttatttataaatacagagcctctgatt

SEQ ID NO: 405335 - DNA, 120 bp, Artificial Sequence
  ENSG00000147324_40 (sequence is synthesized)
ggacggtctcctgccaagaactagtaatacccttgttttaaaatcttcacaaggtaaaacttaaaaagccaaccaaacaaattgctctccattctacttttaattgggccaaacagcata

SEQ ID NO: 405336 - DNA, 120 bp, Artificial Sequence
  ENSG00000147324_41 (sequence is synthesized)
tgctacagtagtaacatgtttttcggagagtgtaaaaaactctgtttacatttgcctcctccgtgggttgatcgaaaatgtataaaactgactgcttctcgccagcctcagacaagaaga

SEQ ID NO: 405337 - DNA, 120 bp, Artificial Sequence
  ENSG00000147324_42 (sequence is synthesized)
gtgagttgctggtactcgctactcttttacttcttttgtaaagtattgactcttggaaggctacagtatacaaagtctcaacatgttttttaaaagaaataaggagcaagcgactgccct

SEQ ID NO: 405338 - DNA, 120 bp, Artificial Sequence
  ENSG00000147324_43 (sequence is synthesized)
gctagaaatcacaaaccgatttttgtagaatattttgtgccccaggcattaatttcactgactccagaacctgcagttcagagaatgatttcttatgatgataaaaatcgaatgggatca

SEQ ID NO: 405339 - DNA, 120 bp, Artificial Sequence
  ENSG00000147324_44 (sequence is synthesized)
gacgatgtttgcatttttttaatacttgaataggacacctcaagtttgagatttcattttcttttagaacacagtcacaagattaatctggtgaatccttttgtcacagttctcgtgtgt

SEQ ID NO: 405340 - DNA, 120 bp, Artificial Sequence
  ENSG00000147324_45 (sequence is synthesized)
gtgtgcgcgtctccgtgtgtgtgtgtgtgcatgtgtgtaaaactgaatggtcacatttaattgctttttggaccattgaatagttgggaagtaagaattttttaattggcatgagacggt

SEQ ID NO: 405341 - DNA, 120 bp, Artificial Sequence
  ENSG00000147324_46 (sequence is synthesized)
tcctcaactgttaaattaaccaactttgacctgtctttagaaaaaggcttatttgtatgattttgggctaactccccggggaccatattaaatgacaaaaatgctcctttgggtgacaca

SEQ ID NO: 405342 - DNA, 120 bp, Artificial Sequence
  ENSG00000147324_47 (sequence is synthesized)
ccctacaaagtatttgctgttacgaacataaacgcccacattcttaatatctaatatttttgaccagtgatgttttatgctgtcatctgaaccctagagaagcagtgtcagaggaaacct

SEQ ID NO: 405343 - DNA, 120 bp, Artificial Sequence
  ENSG00000147324_48 (sequence is synthesized)
tggtgtcacatgtgtcttagcaaaagggttaccatgatcgagggtcatgtgaccaaaagatgctccagagaagcttgagaatttgtttcaagttgggaggagggttggagatacaaaaat

SEQ ID NO: 405344 - DNA, 120 bp, Artificial Sequence
  ENSG00000147324_49 (sequence is synthesized)
cactctgctctacaggactcttcagctgtctatgcaagaaattccgttttctctttcagcacctggaaagacacagcagcccaccgaggcgataggtgattcactaagcacaagaggaat

SEQ ID NO: 405345 - DNA, 120 bp, Artificial Sequence
  ENSG00000147324_50 (sequence is synthesized)
gttttctaagcaaggcgtcccttgcctctcaaacaaatgccctccaagtttgttagggtttctattcctgcaacttgtggtatcaaaaccacttcctggaattgtcaaagcactgccaaa

SEQ ID NO: 405346 - DNA, 120 bp, Artificial Sequence
  ENSG00000147324_51 (sequence is synthesized)
ataaatgtttttcccccttctaagaaaaaaaaaatgacagtgctcatatttgacacttgtgtattggactctcttttgaatgaataaaaaggaaaaggggtttggtgtaattcctgatgg

SEQ ID NO: 405347 - DNA, 120 bp, Artificial Sequence
  ENSG00000147324_52 (sequence is synthesized)
ggtgcgtgttgtttttcatgccatggtttgtgaattttaattgtggtttcccatttcgttgttgtaactgggcagaaattaaaaaagaaaaatcaataaaaatacaaagaaatggttaaa

SEQ ID NO: 405348 - DNA, 120 bp, Artificial Sequence
  ENSG00000147324_53 (sequence is synthesized)
ttgccttggtttacccacccacgccgactgtgatcagcccctgttccaagtatcttcatactttcttggaaaattaagtggaaaagatagtgcttcttttccttatgccatcatttttac

SEQ ID NO: 405349 - DNA, 120 bp, Artificial Sequence
  ENSG00000147324_54 (sequence is synthesized)
agaggaattggctgcccgtggccgggtggagagtcctcgtcttgtgtgtggccagggtctcaaggcctcatgctacacacttgcgtatagcatctcgtgcaggcttcaccacagtcttac

SEQ ID NO: 405350 - DNA, 120 bp, Artificial Sequence
  ENSG00000147324_55 (sequence is synthesized)
gaggcatgcggtgaccttgcccttagacgtgtgcactcaggcctagagctgtcagagccatttgtcgagcgacccgctgctaggagatggcagagctggagccagaccccaaagccagcg

SEQ ID NO: 405351 - DNA, 120 bp, Artificial Sequence
  ENSG00000147364_0 (sequence is synthesized)
ggcaataaccgcctggtcgccgtcaggtgcgggcccaggtggccggcgcgcccgttgggcactgggggacgcgggcgcgtcaggtgaagactgggggccgcaggcgcgctaggagaacta

SEQ ID NO: 405352 - DNA, 120 bp, Artificial Sequence
  ENSG00000147364_1 (sequence is synthesized)
tgccatttttgggtcaggactggagatctcctggatggagttggattaagacagaagatggctggaagagatgtgaatcttgtagtcagaaacttgaaagagagaataaccgttgtaaca

SEQ ID NO: 405353 - DNA, 120 bp, Artificial Sequence
  ENSG00000147364_2 (sequence is synthesized)
tcagtcacagcattatcttaaatagtgaagatggagaaatattcaataatgaagagcatgaatatgcatcgaaaaaaaggaaaaaggaccattttagaaatgacacaaatactcaaagtt

SEQ ID NO: 405354 - DNA, 120 bp, Artificial Sequence
  ENSG00000147364_3 (sequence is synthesized)
tttatcgtgaaaaatggatctatgtccataaagaaagcacaaaggaaaggcatggctattgcaccttgggagaagcctttaatcggttagacttctcaagtgcaattcaagatatccgaa

SEQ ID NO: 405355 - DNA, 120 bp, Artificial Sequence
  ENSG00000147364_4 (sequence is synthesized)
ggttcaattatgtggtcaaactgttgcagctaattgcaaaatcccagttaacttcattgagtggcgtggcacagaagaattacttcaacattttggataaaatcgttcaaaaggttcttg

SEQ ID NO: 405356 - DNA, 120 bp, Artificial Sequence
  ENSG00000147364_5 (sequence is synthesized)
atgaccaccacaatcctcgcttaatcaaagatcttctgcaagacctaagctctaccctctgcattcttattagaggagtagggaagtctgtattagtgggaaacatcaatatttggattt

SEQ ID NO: 405357 - DNA, 120 bp, Artificial Sequence
  ENSG00000147364_6 (sequence is synthesized)
gccgattagaaactattctcgcctggcaacaacagctacaggatcttcagatgactaagcaagtgaacaatggcctcaccctcagtgaccttcctctgcacatgctgaacaacatcctat

SEQ ID NO: 405358 - DNA, 120 bp, Artificial Sequence
  ENSG00000147364_7 (sequence is synthesized)
accggttctcagacggatgggacatcatcaccttaggccaggtgacccccacgttgtatatgcttagtgaagacagacagctgtggaagaagctttgtcagtaccattttgctgaaaagc

SEQ ID NO: 405359 - DNA, 120 bp, Artificial Sequence
  ENSG00000147364_8 (sequence is synthesized)
agttttgtagacatttgatcctttcagaaaaaggtcatattgaatggaagttgatgtactttgcacttcagaaacattacccagcgaaggagcagtacggagacacactgcatttctgtc

SEQ ID NO: 405360 - DNA, 120 bp, Artificial Sequence
  ENSG00000147364_9 (sequence is synthesized)
ggcactgcagcattctcttttggaaggactaccatcttgctttactattcaaggactcaggacacccctgcacggcggccgaccctgacagctgcttcacgcctgtgtctccgcagcact

SEQ ID NO: 405361 - DNA, 120 bp, Artificial Sequence
  ENSG00000147364_10 (sequence is synthesized)
tcatcgacctcttcaagttttaagggctgcccctgccatccctattggagattgtgaatcctgctgtctgtgcagggctcatagtgagtgttctgtgaggtgggtggagactcctcggaa

SEQ ID NO: 405362 - DNA, 120 bp, Artificial Sequence
  ENSG00000147364_11 (sequence is synthesized)
gcccctgcttccagaaagcctgggaagaactgcccttctgcaaaggggggactgcatggttgcattttcatcactgaaagtcagaggccaaggaaatcatttctacttctttaaaaactc

SEQ ID NO: 405363 - DNA, 120 bp, Artificial Sequence
  ENSG00000147364_12 (sequence is synthesized)
cttctaagcatattaaaatgtgaaattttgcgtactctctctctctatatatatagttcaaaaatactttaggtggtcagctccacattctttgttgacgtgacactaacggccaataat

SEQ ID NO: 405364 - DNA, 120 bp, Artificial Sequence
  ENSG00000147364_13 (sequence is synthesized)
atgcttcttaattatcaaattatagtttcccaattgggaaactaattgggggtgggttacaaaacatttgatccttgtaaatacattgtacagaatatttattttttctcaaaatgcatt

SEQ ID NO: 405365 - DNA, 120 bp, Artificial Sequence
  ENSG00000147364_14 (sequence is synthesized)
ttaactactacattggctgtgcccaaatgagtcctctttgaatagaaagtgaacccagggcaatgacagccattcttgtcttagggattatggatcggggtatgaagtgtgcacacgcag

SEQ ID NO: 405366 - DNA, 120 bp, Artificial Sequence
  ENSG00000147364_15 (sequence is synthesized)
cccaacaacgggcagtggtctctgtgctcctaggcatccagcacaggttctggcagggcacccctgctggggttgggggctggtctgtgcataatcctggactgtgatgggaacagccca

SEQ ID NO: 405367 - DNA, 120 bp, Artificial Sequence
  ENSG00000147364_16 (sequence is synthesized)
gtgcagtctaaacttcaattgtgttgaaactactttaatagacaaagtaataaatcatgtttatctattgatttaaacttcatcagttttgcatcctactgagaaatgttagtgattttg

SEQ ID NO: 405368 - DNA, 120 bp, Artificial Sequence
  ENSG00000147364_17 (sequence is synthesized)
atacttaaatccttaaaagattgcttcgtttttaaaataacgcatgtccattttagaaaattagaaaatcagtcccaccacccaaagattattgtgcatgctgaaaagagtatgaaaaat

SEQ ID NO: 405369 - DNA, 120 bp, Artificial Sequence
  ENSG00000147364_18 (sequence is synthesized)
cccctcagcaggcataggatagaaacgtattgttgtatatttccatttttgaatagggtcaaggagcccaagcaaatcatttctactttttcctttaagcataataataaaagtatactt

SEQ ID NO: 405370 - DNA, 120 bp, Artificial Sequence
  ENSG00000147364_19 (sequence is synthesized)
ttatggcgttataaataggactaaaaaaagattctggatttttcagccccacttctgtgaactgacacaaatggccaagaatgcatttatttgtcaaattatagtttctcctgaggcgat

SEQ ID NO: 405371 - DNA, 120 bp, Artificial Sequence
  ENSG00000147364_20 (sequence is synthesized)
gcaaatacctggggcctctgcgaatatatgttagtttttcataagaccataaatgtcccgtataccactgttacttcacaacgccccccgtcccgaccctgcctttttttagaaacgtag

SEQ ID NO: 405372 - DNA, 120 bp, Artificial Sequence
  ENSG00000147364_21 (sequence is synthesized)
aaccatatcctaaatgttatttggaaacttggcttttattagctccacagaatcacccagatggaacaggctttttcatcacaacatattggggttcctgagtgtctcgccgttagcatc

SEQ ID NO: 405373 - DNA, 120 bp, Artificial Sequence
  ENSG00000147364_22 (sequence is synthesized)
aataactatgataagcatcgtcacacaacaatgtggccgtctccttacaaccactggtagtacagccaacatcatgagtcaaacatattttaaggcttttaaatatatttctagattgtt

SEQ ID NO: 405374 - DNA, 85 bp, Artificial Sequence
  ENSG00000147364_23 (sequence is synthesized)
atgatgtcggcttactgcaacctctgtcccccaggctcaagtgatcctcccacctcaccctccagtgatcctcccacctcagcct

SEQ ID NO: 405375 - DNA, 85 bp, Artificial Sequence
  ENSG00000147364_24 (sequence is synthesized)
ggctcaagtgatcctcccacctcacctcaggaccacaggcatataccaccatgctcagctgtttttttgtatttttagtagagat

SEQ ID NO: 405376 - DNA, 62 bp, Artificial Sequence
  ENSG00000147364_25 (sequence is synthesized)
tgagaaaagaaattgttctaatctaggaaagggagtaagtacattgagtttccattatccct

SEQ ID NO: 405377 - DNA, 120 bp, Artificial Sequence
  ENSG00000147364_26 (sequence is synthesized)
ctaggaaagggagtaagtacattgagtttccattatccctgaagcacaggtatttctttttctgttggtgctgttttaataagtgaagaatttgatgtatgataaattgtgagcttgaat

SEQ ID NO: 405378 - DNA, 120 bp, Artificial Sequence
  ENSG00000147364_27 (sequence is synthesized)
atttccatatatttattatccatttgcttttcttgtttttggtaaattacttaatgtggtatttgcctgttttttggggtggatgtcagtcttttttcatgttagtttcttcttaaaagg

SEQ ID NO: 405379 - DNA, 120 bp, Artificial Sequence
  ENSG00000147364_28 (sequence is synthesized)
aaactatccttttgaagttgtggttctttcccctaatttgtcatatactgttactgtcatttaattgttagatgttataacagttctcagctgtgctatcaaatcacagatgtgcattta

SEQ ID NO: 405380 - DNA, 120 bp, Artificial Sequence
  ENSG00000147364_29 (sequence is synthesized)
acttgtataaattgagcagtacttgcttggaaaacataaccatattaatagtgtaggattccagctgttctgctgggctggcatatttccacaggccatggacacagctagccgcattgc

SEQ ID NO: 405381 - DNA, 120 bp, Artificial Sequence
  ENSG00000147364_30 (sequence is synthesized)
cactgcatgggtcacagcctcctgcaggtgcgttcgagggacaagctgtgggagctgggcaggtaagcagggatggcttacattgctggggagagattgaaaggttaatggagggtataa

SEQ ID NO: 405382 - DNA, 120 bp, Artificial Sequence
  ENSG00000147364_31 (sequence is synthesized)
ggacagaataaagacaattttgaggcactgatcagttatttacagaagatcggacaacaccaaacagagatgagaagagaaatcatagatctccactttggaatggtatttttgaataca

SEQ ID NO: 405383 - DNA, 120 bp, Artificial Sequence
  ENSG00000147364_32 (sequence is synthesized)
gtttctatcagggggccttccaaaagtagggatgccactcctgtgagattaagttacattctgatgccttcattacaatgaagtagataattcaggaccccaggagcctaaagccaggta

SEQ ID NO: 405384 - DNA, 120 bp, Artificial Sequence
  ENSG00000147364_33 (sequence is synthesized)
gtaagtttcacttgcccatcgctcctgtgaaaggcaatgccagacactctcaagatagaatctccagtcattctcggacctgttctcagtctgcgctgctcactcagggctggtgtctct

SEQ ID NO: 405385 - DNA, 120 bp, Artificial Sequence
  ENSG00000147364_34 (sequence is synthesized)
tgacacccagttacaacttccttttgcctattttgagtcaaaaagtcacattcctcacctaatttatgaatacacacaaattggaaagccatgcagtagcctctcaggagcagaccgatt

SEQ ID NO: 405386 - DNA, 120 bp, Artificial Sequence
  ENSG00000147364_35 (sequence is synthesized)
tgtagctgtcgtggtttactgcatgacgtacaggctctctgtatgcactgtgtgtgcgtactgtacagggctgtacacagcaaactgtgtctactttatggaaaaaatttaaccatctgt

SEQ ID NO: 405387 - DNA, 120 bp, Artificial Sequence
  ENSG00000147364_36 (sequence is synthesized)
gaacagttttttgccttaagtgctgcttttagaaccaaactgtcatataagatttatcagctcttttaacacctttgtagattcctgatgctgtgtacaaaatcatgtcatctatgaata

SEQ ID NO: 405388 - DNA, 120 bp, Artificial Sequence
  ENSG00000147364_37 (sequence is synthesized)
gacagtttcacttcttcctctcagtctagatgtcctttattctttcttaccccgtttcgctggctagaatctctagtacaatgttgaatagcagtgcgagagtgaacatccttgtcttgt

SEQ ID NO: 405389 - DNA, 120 bp, Artificial Sequence
  ENSG00000147364_38 (sequence is synthesized)
tcctcatcttaggggaaagctttcagtctcaccattaactatgatgttaaccctgggttttccatacataccctctattaggttggggaggttcccttctattcctagtttgtttttatc

SEQ ID NO: 405390 - DNA, 120 bp, Artificial Sequence
  ENSG00000147364_39 (sequence is synthesized)
gtgaaagggtgtggattttgtcaaatgctttttctgcatctcttaagataatgtagtttttggccttcataagatcatgtgctgttattacattgactgatttctatatcttgaaccaac

SEQ ID NO: 405391 - DNA, 120 bp, Artificial Sequence
  ENSG00000147364_40 (sequence is synthesized)
cttgcattcttgggtcaaagcccactaagtcatggtttatgataccttttatacatagctgttagatttggtgtgctggaacagccagccctctgtatccacgggggattggttccaaga

SEQ ID NO: 405392 - DNA, 120 bp, Artificial Sequence
  ENSG00000147364_41 (sequence is synthesized)
cccccacccccaccccacctgccacccaccaccttgtgatctcttgggttttggtgtccatctcataggataagcttagaaagtgttccctcttctgtgttttggaagtgtttgtggtgg

SEQ ID NO: 405393 - DNA, 120 bp, Artificial Sequence
  ENSG00000147364_42 (sequence is synthesized)
tttcttgttaattcttctttaaatgtttgagagaactccatataagatttgaagtcactgagaagcttcaattatcctttaagaggataagaccattttctccagagatgccttttaatg

SEQ ID NO: 405394 - DNA, 120 bp, Artificial Sequence
  ENSG00000147364_43 (sequence is synthesized)
cttatcttcagaattatcaaaaggaaggggtgctgccctctgagaaaagtcagaagcaagcctgccttatgaaactcgactttttaatctccctctcttcattatgatgtgtgcacgtga

SEQ ID NO: 405395 - DNA, 120 bp, Artificial Sequence
  ENSG00000147364_44 (sequence is synthesized)
tggacaccactcacctccctttagtccctatcaaatgctacccaatggcaaagccaagggattagcaacaggtaggaggaaaaagaaggacctgcatacatgactaaccagcaccagcca

SEQ ID NO: 405396 - DNA, 120 bp, Artificial Sequence
  ENSG00000147364_45 (sequence is synthesized)
ttggggccctctatggctgacaccagcatccaccctgcactcatatgtatctcaacagaattgctgcttctgtcttcactcaagccccactccttatcccttcctgttgtttctgcatag

SEQ ID NO: 405397 - DNA, 120 bp, Artificial Sequence
  ENSG00000147364_46 (sequence is synthesized)
aggaggcagaccctcaactttggaaagcagtgtccccccgcgtcccatgggctaaatgccactgagccggtaggagctgctcaggtgtagcctctgccttcagaatttcagcaggaactg

SEQ ID NO: 405398 - DNA, 120 bp, Artificial Sequence
  ENSG00000147364_47 (sequence is synthesized)
catcattgtgtgcctaaaaagccctggctcacagcatgagacagtgtgttctaggtggtaacgtggcacctgcacatgcacccccagcagtcctctctaaactcaggcagtgtatggctg

SEQ ID NO: 405399 - DNA, 120 bp, Artificial Sequence
  ENSG00000147364_48 (sequence is synthesized)
ctgccattctcgccctcagcatctgtgagatgaaggagttgctccccagggcacctgccccaatacaggccacgtggatctgccattgcttttcacgtgaatgcctaggagaggctgtta

SEQ ID NO: 405400 - DNA, 120 bp, Artificial Sequence
  ENSG00000147364_49 (sequence is synthesized)
accctcctagttgtcctttttgtacttggtcctcttccttccaatcctcactggctcaaatccacagagtgacaaagaacagagatgcccagagcaccagctggaggggcaagcaggaga

SEQ ID NO: 405401 - DNA, 120 bp, Artificial Sequence
  ENSG00000147364_50 (sequence is synthesized)
aggcactgctggtgccacaggggtcctgggctggctcttggaccataaccagcgttcactgaggatgcggtttctttgaaatgctcttgttcttcctaagtaagggagagcaaaaaaaat

SEQ ID NO: 405402 - DNA, 120 bp, Artificial Sequence
  ENSG00000147364_51 (sequence is synthesized)
gaggacatctgtgtcaaatagaagagacacctcaactgtctcgtttttgcatggaaatttcatttttatttgataatcatttgagaaacttgcacagatgaaggcaagttggtttttatt

SEQ ID NO: 405403 - DNA, 120 bp, Artificial Sequence
  ENSG00000147364_52 (sequence is synthesized)
atctaacctatgtagtcaattctaatgtcatttaaaagaatttgacatgttaaaatacacgtgaaatttaccatcttacctattttaagtgtgcaatttagtggcattaaatacattcat

SEQ ID NO: 405404 - DNA, 120 bp, Artificial Sequence
  ENSG00000147364_53 (sequence is synthesized)
actgtgcaaccttctctaccacgtatccacaagttcaactttacaagatgaacttttgtcatcttgtaaaactgaagctctgtacccattaagcaccaactccctattccccatccacca

SEQ ID NO: 405405 - DNA, 120 bp, Artificial Sequence
  ENSG00000147364_54 (sequence is synthesized)
gcccctggcagcctctgttctcctttgtctcttttaatttgacttctgtagggacctcgtatgagtggaaccagaagggatttgtccttttgtgactggcttatttcacttagcgtaatg

SEQ ID NO: 405406 - DNA, 120 bp, Artificial Sequence
  ENSG00000147364_55 (sequence is synthesized)
tcctcaaggtttattcaagttgtaggatatgtcaagatttctttttaaggctgattctatggatggaccacattttgtttgtgtactcatctgttgaggacacttgagttgcttccacct

SEQ ID NO: 405407 - DNA, 120 bp, Artificial Sequence
  ENSG00000147364_56 (sequence is synthesized)
tttagctattgtgaatattgctgccgtaaacatgggtgtgcaaatatctgagtctctgctttcaatcatatggcaatcctatgtttaatttcttagggcactgccataagtgttttacac

SEQ ID NO: 405408 - DNA, 120 bp, Artificial Sequence
  ENSG00000147364_57 (sequence is synthesized)
ggtggctgcaccattttacattcccactgaaggttccagttttgccacatccttgccaacacctgtttttaataattgccatcctaatgagtgtgaagtggtatcctgctgagattttga

SEQ ID NO: 405409 - DNA, 120 bp, Artificial Sequence
  ENSG00000147364_58 (sequence is synthesized)
tttgcatttccgtaatgactggtgatgctgagtatctgtttgttggccgtttatatgtcgtctttggagaaatgtctatttgggctctttgtccatttttcaatcaggtgtgtgttttta

SEQ ID NO: 405410 - DNA, 120 bp, Artificial Sequence
  ENSG00000147364_59 (sequence is synthesized)
tatgttctgggtattcacccttttcagatatatcattttaaaatactttgtcccattccgtggattgcctttcactctgttttgttctttgatgtacagaagttgtttctttcttttagt

SEQ ID NO: 405411 - DNA, 120 bp, Artificial Sequence
  ENSG00000147364_60 (sequence is synthesized)
tacctgtgtgtgcctctggtgtcatatctaagaaatcactgcctcacccttttcagatatatcattttaaaatactttgtcccattccgtggattgcctttcactctgttttgttctttg

SEQ ID NO: 405412 - DNA, 120 bp, Artificial Sequence
  ENSG00000147364_61 (sequence is synthesized)
atgtacagaagttgtttctttcttttagttacctgtgtgtgcctctggtgtcatatctaagaaatcactgccaaatccaatgttgttaaaagtttcccttatgtttctcctaaatgtttt

SEQ ID NO: 405413 - DNA, 120 bp, Artificial Sequence
  ENSG00000147364_62 (sequence is synthesized)
agttttagctcttagtttaggcctttgatctattttaatttttatatatggtgtgaggtagatctagcttcatgtggatgtccacttgtctagcaccatttgttgaaaagactgtccttt

SEQ ID NO: 405414 - DNA, 120 bp, Artificial Sequence
  ENSG00000147364_63 (sequence is synthesized)
ctcccttgaatggtcttggcaccatcaaaaatcatttgacccatatgtgcaagggtttatttggggatttgctattctgttccattggtctacatgactgtctttgtttcaatacaacac

SEQ ID NO: 405415 - DNA, 120 bp, Artificial Sequence
  ENSG00000147364_64 (sequence is synthesized)
cattttgattattgtagctttgtcgtaagttatgaaataaggaagtgagagacctcctacttggttccctttcaagatgattttggctgtgtgaggtctcttgagattccatatgagttt

SEQ ID NO: 405416 - DNA, 120 bp, Artificial Sequence
  ENSG00000147364_65 (sequence is synthesized)
caggatggaaaaaaaaaagccactgggatattctgatagagattgcatgaaatctatagattgctttggactatggacatcttaaggtatccaatccataaacacgggattgctttctat

SEQ ID NO: 405417 - DNA, 120 bp, Artificial Sequence
  ENSG00000147364_66 (sequence is synthesized)
ttatttgtgttgaccttactttctttaagcagtgttttatggttttcaagtacaagtcttttgcttccttaagtttattcctaaatatttcagtttttttgttactattataatggaatt

SEQ ID NO: 405418 - DNA, 120 bp, Artificial Sequence
  ENSG00000147364_67 (sequence is synthesized)
ttcttaaatttccttttgagattgcttgttattgtatagaaatatcatggatttgttgtgttgattttgtaaactgcagtgttactgaaatttttttttgtatatgtatggacactagga

SEQ ID NO: 405419 - DNA, 120 bp, Artificial Sequence
  ENSG00000147364_68 (sequence is synthesized)
ttttctacatataagatcatgtcatctgcaaacagataattttgcttcttcctttccagtctggatgccttttatttctttttcttgcctaactgctctaagactccagtactgtgttaa

SEQ ID NO: 405420 - DNA, 120 bp, Artificial Sequence
  ENSG00000147364_69 (sequence is synthesized)
acagaagtggtgagacagggtatttctgtgttgttcttgatcttaaagtcctttcagtcttattgaatatgatgtttacagtgggatgttcatatggcctctattttaggttgtttcctt

SEQ ID NO: 405421 - DNA, 120 bp, Artificial Sequence
  ENSG00000147364_70 (sequence is synthesized)
ctattcccaattgttgagtttttatcatgaaagggcatgacattgtctcaaatgctttttctccatcaatggagatcacatttttttccttcattctattaatgtaatagacattacatt

SEQ ID NO: 405422 - DNA, 120 bp, Artificial Sequence
  ENSG00000147364_71 (sequence is synthesized)
tattgacttgagcatgttgaaacatctttgcataccagctgtaaatcttacttggccatgatgtgtaatcctttcaatgtcccactgaatcctgttggccagtattttgttgaatattga

SEQ ID NO: 405423 - DNA, 120 bp, Artificial Sequence
  ENSG00000147364_72 (sequence is synthesized)
tttaaaaaaatcttgatcaggaatactgatgtgtggtgtttttttcttatagtgtctttgtctggttttggtatcagaataatgatggcctcatagaatgcatttggaagtgtcctttcc

SEQ ID NO: 405424 - DNA, 120 bp, Artificial Sequence
  ENSG00000147364_73 (sequence is synthesized)
tcttcagttttttggaagagtttgaggagaattgatttaattcttcagatgtttgccagaattcccatatgaccctgggcttttctttcttgggaggcttttctttactacttcatgctc

SEQ ID NO: 405425 - DNA, 120 bp, Artificial Sequence
  ENSG00000147364_74 (sequence is synthesized)
ttgactagcataggtctgttcagattttccatttcttcatgattcaatcttgataggctgtgtgtttctaagaatttgtccagttcatctaggttatccaattctttgatatgtaattgc

SEQ ID NO: 405426 - DNA, 120 bp, Artificial Sequence
  ENSG00000147364_75 (sequence is synthesized)
tcatagtactcttaatcctttttatttctgtaaaatcagttgtaatgtctcctcctggtttttagttgtttttcttagtcactcttagctatcaacaaactcttggtttcatttattttt

SEQ ID NO: 405427 - DNA, 120 bp, Artificial Sequence
  ENSG00000147364_76 (sequence is synthesized)
ctctattgcttttctgttctctattttgtctctgctctaatctttattattattataatcatctccattctgctggctttgggttgattgctcttctttttctagttctttcagatgtaa

SEQ ID NO: 405428 - DNA, 120 bp, Artificial Sequence
  ENSG00000147364_77 (sequence is synthesized)
atttagggttgacttgagatcttaatttgtttaataggtgtatttacagttacaaatttccctcctaccactgctttgactgtacctgtttttttgtatattacatttttcatttaccac

SEQ ID NO: 405429 - DNA, 120 bp, Artificial Sequence
  ENSG00000147364_78 (sequence is synthesized)
aagatattttctaatttcccttgtgagttccccattaatctgctggttgagagcgttgtttaattttcacataattgtgtacttttcagttttttgtctgttactgatttctagtttcat

SEQ ID NO: 405430 - DNA, 120 bp, Artificial Sequence
  ENSG00000147364_79 (sequence is synthesized)
cccactgtggccagaaaagatattttatttcctcagtcttttgaaatttgttgacttgtttagtcatctaacatactgtctatcctagagaaaggtccatttgcacttgagaaaaacgtg

SEQ ID NO: 405431 - DNA, 120 bp, Artificial Sequence
  ENSG00000147364_80 (sequence is synthesized)
tgtactgctgttgtgtctgttaggtccagctggtatgatgctgttcaagttctgtcttgcgactgatcttctgtctggttgtcctatccgttactgaaagtgggctactgcagtctccta

SEQ ID NO: 405432 - DNA, 120 bp, Artificial Sequence
  ENSG00000147364_81 (sequence is synthesized)
ctcttactgtagaactatccatttcttcctttgattctgtcaatgtttgtttcatatattttgggctctgatgtttggtgcatatatattacatcttggtgaattttcaaactttttaaa

SEQ ID NO: 405433 - DNA, 120 bp, Artificial Sequence
  ENSG00000147364_82 (sequence is synthesized)
tttcaacatgaagatgaaattataggatgtctgggatttcctttgaatccgtggggctgggagtaactataaatgaaacaagattggccgggaatttgaggctgcaaggataggtacaca

SEQ ID NO: 405434 - DNA, 120 bp, Artificial Sequence
  ENSG00000147364_83 (sequence is synthesized)
caggggagtgaagcagggcttggagcagatggtaaagattgttggcttttccagccatggggctctcttgccacttggcagtagtggcatgaagccgccaccagggggccacgcaccagt

SEQ ID NO: 405435 - DNA, 120 bp, Artificial Sequence
  ENSG00000147364_84 (sequence is synthesized)
gcatgtggctgtgttccaaactttttggacaataaaatctgaatttcacatacttttcttatgtcattagatattacccttttacatcttttcactatttaaaaatgtaaaaatcattct

SEQ ID NO: 405436 - DNA, 120 bp, Artificial Sequence
  ENSG00000147364_85 (sequence is synthesized)
taacatttgggctgtgcaaaaacagctggtgggcccaattttggcctgtatttcacttgccaacctgatttatacttttgtatctatttgacattttccattaaaagttatataacacta

SEQ ID NO: 405437 - DNA, 120 bp, Artificial Sequence
  ENSG00000147364_86 (sequence is synthesized)
gacggaggggcagtgcctactacgcaggcgcacgctgcgggcgacaggaccaggcagcaacattgccacgcggatccgcgccggccaatcagcatggccaggggcggggcttccctgagg

SEQ ID NO: 405438 - DNA, 120 bp, Artificial Sequence
  ENSG00000147364_87 (sequence is synthesized)
gcattgctataattttactatactctcatctaaatctaaaatcagtcttcaaaataaaaacaaattgtcctttgccaaaaatttttttaatcgcacaattaattgacattaactgccaat

SEQ ID NO: 405439 - DNA, 120 bp, Artificial Sequence
  ENSG00000147364_88 (sequence is synthesized)
tcttggccactgcccggctcgattccagctctcgctgacttgagctttctcaggaccctgagcagggctgagtggccactttgatcaaacacctcagcaaggacgagagtgttgatgaaa

SEQ ID NO: 405440 - DNA, 120 bp, Artificial Sequence
  ENSG00000147364_89 (sequence is synthesized)
tattttgcagaacaacacctgagtgctgagggaggctgctagatgtgcgcataaacacttcaccacacagcacctggtttggcagcactgccagggcatgccatggagagatccagcact

SEQ ID NO: 405441 - DNA, 120 bp, Artificial Sequence
  ENSG00000147364_90 (sequence is synthesized)
gaccccagagcctctggtcccgtttacctgcgttcctcctaagagtctgccagtcttcatccacaaaattaatttttctgtcgtcacttctcatattaaatataattctggatccttagg

SEQ ID NO: 405442 - DNA, 120 bp, Artificial Sequence
  ENSG00000147364_91 (sequence is synthesized)
gtgtgagcgcgcagtgatgccctagagtgcagtcatcccgggcttggcgcccagcgggtggaaatacggccgcagggtggaaatgcggcggcggggctgcccaggctcctgtgggacccg

SEQ ID NO: 405443 - DNA, 120 bp, Artificial Sequence
  ENSG00000147364_92 (sequence is synthesized)
cgcggcgcgggcacgcacattctcagggacgcgcgtcctcaggccacgagaacacctgaaggccccggccagcgtcctcccgtgaagacccggaccggcgtcgtcacccgccgcgcaggc

SEQ ID NO: 405444 - DNA, 120 bp, Artificial Sequence
  ENSG00000147378_0 (sequence is synthesized)
agaggtgattttctgagtgtgactcctctgttcctggcaccctgtgcatccttagccatagcttacaagagaacagctggttgtgatggcaggaggccctcccaacaccaaggcggagat

SEQ ID NO: 405445 - DNA, 120 bp, Artificial Sequence
  ENSG00000147378_1 (sequence is synthesized)
ggaaatgtccctggcagaagaactgaatcatggacgccaaggggaaaaccaagagcacctggtgatagcagaaatgatggagcttggatctcggtcccggggtgcctcccagaagaagca

SEQ ID NO: 405446 - DNA, 120 bp, Artificial Sequence
  ENSG00000147378_2 (sequence is synthesized)
gaagttggaacaaaaagctgctggctctgcttcagccaaacgagtttggaatatgactgccacccgacccaagaaaatggggtcccagctgccaaagcccagaatgctgagagaatcagg

SEQ ID NO: 405447 - DNA, 120 bp, Artificial Sequence
  ENSG00000147378_3 (sequence is synthesized)
ccatggggatgcccatctccaggagtacgctggcaatttccaaggcatacgtttccattatgatcgcaacccagggacagatgcagtggcgcagactagcctggaagagttcaatgtact

SEQ ID NO: 405448 - DNA, 120 bp, Artificial Sequence
  ENSG00000147378_4 (sequence is synthesized)
gtgtcggccagcattgccaacctgtggctgtggatgaaccagtgatcgccccagcgcggcctccgtattggagccctccctgcttccccttctttctttcctctttccccaggccgccac

SEQ ID NO: 405449 - DNA, 120 bp, Artificial Sequence
  ENSG00000147378_5 (sequence is synthesized)
tgcccttgcccctttcatctcccagcagccctcaggagcgtcaggatcattttcaactctggttaggcctcctacctggggaggccaggtcactgcactgggaggtcctggctgctgcga

SEQ ID NO: 405450 - DNA, 120 bp, Artificial Sequence
  ENSG00000147378_6 (sequence is synthesized)
agctggaggaggactgcgtgggctgagatgccaccctttgaagggtgaacagcatggcggcatctgggccccacagtaacacctagtggcaaccttgccttcctgacctcagcggccctt

SEQ ID NO: 405451 - DNA, 120 bp, Artificial Sequence
  ENSG00000147378_7 (sequence is synthesized)
ctgttccatcctctgtgggcaggggtgtggctttgttttcctccctcgtttgcttccacctcgtgcacagcgctctgcacagacaacacgctcaataaaagttcagccatagcagcaaaa

SEQ ID NO: 405452 - DNA, 80 bp, Artificial Sequence
  ENSG00000147381_0 (sequence is synthesized)
agagacaagcgagcttctgcgtctgactcgcagcttgagactggcggagggaagcccgcccaggctctataaggagacct

SEQ ID NO: 405453 - DNA, 120 bp, Artificial Sequence
  ENSG00000147381_1 (sequence is synthesized)
ggaggccacagaggagcaccaaggagaagatctgcctgtgggtccccattgcccagcttttgcctgcactcttgcctgctgccctgaccagagtcatcatgtcttctgagcagaagagtc

SEQ ID NO: 405454 - DNA, 120 bp, Artificial Sequence
  ENSG00000147381_2 (sequence is synthesized)
agcactgcaagcctgaggaaggcgttgaggcccaagaagaggccctgggcctggtgggtgcacaggctcctactactgaggagcaggaggctgctgtctcctcctcctctcctctggtcc

SEQ ID NO: 405455 - DNA, 120 bp, Artificial Sequence
  ENSG00000147381_3 (sequence is synthesized)
ctggcaccctggaggaagtgcctgctgctgagtcagcaggtcctccccagagtcctcagggagcctctgccttacccactaccatcagcttcacttgctggaggcaacccaatgagggtt

SEQ ID NO: 405456 - DNA, 120 bp, Artificial Sequence
  ENSG00000147381_4 (sequence is synthesized)
ccagcagccaagaagaggaggggccaagcacctcgcctgacgcagagtccttgttccgagaagcactcagtaacaaggtggatgagttggctcattttctgctccgcaagtatcgagcca

SEQ ID NO: 405457 - DNA, 120 bp, Artificial Sequence
  ENSG00000147381_5 (sequence is synthesized)
aggagctggtcacaaaggcagaaatgctggagagagtcatcaaaaattacaagcgctgctttcctgtgatcttcggcaaagcctccgagtccctgaagatgatctttggcattgacgtga

SEQ ID NO: 405458 - DNA, 120 bp, Artificial Sequence
  ENSG00000147381_6 (sequence is synthesized)
aggaagtggaccccgccagcaacacctacacccttgtcacctgcctgggcctttcctatgatggcctgctgggtaataatcagatctttcccaagacaggccttctgataatcgtcctgg

SEQ ID NO: 405459 - DNA, 120 bp, Artificial Sequence
  ENSG00000147381_7 (sequence is synthesized)
tgggaggagctgggtgtgatgggggtgtatgatgggagggagcacactgtctatggggagcccaggaaactgctcacccaagattgggtgcaggaaaactacctggagtaccggcaggta

SEQ ID NO: 405460 - DNA, 120 bp, Artificial Sequence
  ENSG00000147381_8 (sequence is synthesized)
cccggcagtaatcctgcgcgctatgagttcctgtggggtccaagggctctggctgaaaccagctatgtgaaagtcctggagcatgtggtcagggtcaatgcaagagttcgcattgcctac

SEQ ID NO: 405461 - DNA, 120 bp, Artificial Sequence
  ENSG00000147381_9 (sequence is synthesized)
ccatccctgcgtgaagcagctttgttagaggaggaagagggagtctgagcatgagttgcagccagggctgtggggaaggggcagggctgggccagtgcatctaacagccctgtgcagcag

SEQ ID NO: 405462 - DNA, 120 bp, Artificial Sequence
  ENSG00000147381_10 (sequence is synthesized)
cttcccttgcctcgtgtaacatgaggcccattcttcactctgtttgaagaaaatagtcagtgttcttagtagtgggtttctattttgttggatgacttggagatttatctctgtttcctt

SEQ ID NO: 405463 - DNA, 120 bp, Artificial Sequence
  ENSG00000147381_11 (sequence is synthesized)
ttacaattgttgaaatgttccttttaatggatggttgaattaacttcagcatccaagtttatgaatcgtagttaacgtatattgctgttaatatagtttaggagtaagagtcttgttttt

SEQ ID NO: 405464 - DNA, 120 bp, Artificial Sequence
  ENSG00000147381_12 (sequence is synthesized)
tattcagattgggaaatccgttctattttgtgaatttgggacataataacagcagtggagtaagtatttagaagtgtgaattcaccgtgaaataggtgagataaattaaaagatacttaa

SEQ ID NO: 405465 - DNA, 120 bp, Artificial Sequence
  ENSG00000147381_13 (sequence is synthesized)
ttcccgccttatgcctcagtctattctgtaaaatttaaaaaatatatatgcatacctggatttccttggcttcgtgaatgtaagagaaattaaatctgaataaataattctttctgttaa

SEQ ID NO: 405466 - DNA, 120 bp, Artificial Sequence
  ENSG00000147381_14 (sequence is synthesized)
agaaagcctcaggggcccggatgtgatgccactgacttgcgcattgggggttagagagaagcgagctgctgtctgaccagcagcttgggattggtggaaggaagcaggccaggccctgtg

SEQ ID NO: 405467 - DNA, 81 bp, Artificial Sequence
  ENSG00000147381_15 (sequence is synthesized)
ggttagagagaagcgagctgctctgtctgaccagcagcttgggattggcggagggaagcgggccaggccctgtgaggagtc

SEQ ID NO: 405468 - DNA, 120 bp, Artificial Sequence
  ENSG00000147381_16 (sequence is synthesized)
aacccaagaaagccccaggggcccggatgtgatgccactgacttgcgcattcggggttagagagaagcgagctgctctgtgaccagccgcttgggattggtggagggaagcgggccaggc

SEQ ID NO: 405469 - DNA, 120 bp, Artificial Sequence
  ENSG00000147381_17 (sequence is synthesized)
agggaagcaggcgcaggctctgtgaggaggcaaggcaggatccccggttccgcccccgctttcaaccaaggaaagccccagctgcccggatgtgatgccactgacttgcgcactgggggt

SEQ ID NO: 405470 - DNA, 120 bp, Artificial Sequence
  ENSG00000147383_0 (sequence is synthesized)
agtgggtgcagcctgcttgcgagctgaggccagacaggggggcgcctacggacggaaaagaaaagttgattacaaacgggaccatattttgcttcgaaatggaaccagcagttagcgagc

SEQ ID NO: 405471 - DNA, 120 bp, Artificial Sequence
  ENSG00000147383_1 (sequence is synthesized)
caatgagagaccaagtcgcacggactcatttgacagaggacactcccaaagtgaatgctgacatagaaaaggttaaccagaatcaggccaagagatgcacagtgatcggtggctctggat

SEQ ID NO: 405472 - DNA, 120 bp, Artificial Sequence
  ENSG00000147383_2 (sequence is synthesized)
tcctggggcagcacatggtggagcagttgctggcaagaggatatgctgtcaatgtatttgatatccagcaagggtttgataatccccaggtgcggttctttctgggtgacctctgcagcc

SEQ ID NO: 405473 - DNA, 120 bp, Artificial Sequence
  ENSG00000147383_3 (sequence is synthesized)
gacaggatctgtacccagctctgaaaggtgtaaacacagttttccactgtgcgtcacccccaccatccagtaacaacaaggagctcttttatagagtgaattacattggcaccaagaatg

SEQ ID NO: 405474 - DNA, 120 bp, Artificial Sequence
  ENSG00000147383_4 (sequence is synthesized)
tcattgaaacttgcaaagaggctggggttcagaaactcattttaaccagcagtgccagtgtcatctttgagggcgtcgatatcaagaatggaactgaagaccttccctatgccatgaaac

SEQ ID NO: 405475 - DNA, 120 bp, Artificial Sequence
  ENSG00000147383_5 (sequence is synthesized)
ccattgactactacacagagactaagatcttacaggagagggcagttctgggcgccaacgatcctgagaagaatttcttaaccacagccatccgccctcatggcattttcggcccaaggg

SEQ ID NO: 405476 - DNA, 120 bp, Artificial Sequence
  ENSG00000147383_6 (sequence is synthesized)
acccgcagttggtacccatcctcatcgaggcagccaggaacggcaagatgaagttcgtgattggaaatgggaagaacttggtggacttcacctttgtggagaacgtggtccatggacaca

SEQ ID NO: 405477 - DNA, 120 bp, Artificial Sequence
  ENSG00000147383_7 (sequence is synthesized)
cactgggtgggaaggcatttcacatcaccaatgatgagcccatccctttctggacattcctgtctcgcatcctgacaggcctcaattatgaggcccccaagtaccacatcccctactggg

SEQ ID NO: 405478 - DNA, 120 bp, Artificial Sequence
  ENSG00000147383_8 (sequence is synthesized)
tggcctactacctggccctcctgctatccctgctggtgatggtgatcagtcctgtcatccagctgcagcccaccttcacacccatgcgggtcgcactggctggcacattccactactaca

SEQ ID NO: 405479 - DNA, 120 bp, Artificial Sequence
  ENSG00000147383_9 (sequence is synthesized)
gctgcgagagagccaaaaaggccatgggctaccagccactagtgaccatggatgatgctatggagaggaccgtgcagagctttcgccacctgcggagggtcaagtgagggacactggagg

SEQ ID NO: 405480 - DNA, 120 bp, Artificial Sequence
  ENSG00000147383_10 (sequence is synthesized)
ctgggctctctcgacacgttgctcagccagtcactccttcccctgtggattgatgaaataacatcctttgaatgagtttgctctgagcctgtgactccttctgctaggcagagagcgcac

SEQ ID NO: 405481 - DNA, 120 bp, Artificial Sequence
  ENSG00000147383_11 (sequence is synthesized)
cctactctttccgtgacgatgagggcggcaaaaacagacatttcttccttcatggaactggatttggatttcttgaagcaggcagcttcatattataccgatttgttctctgtctttttg

SEQ ID NO: 405482 - DNA, 120 bp, Artificial Sequence
  ENSG00000147383_12 (sequence is synthesized)
tgtctctctgtttaccccctcccttgccccctcttctggtttatacatttcattccagtgtccttgtacataatcaaggaagctgtaggaagctacaacccatttgttagttctgatgga

SEQ ID NO: 405483 - DNA, 120 bp, Artificial Sequence
  ENSG00000147383_13 (sequence is synthesized)
gaaccatttccatgcagaccaatactagagtgaagcctctagactttgttcaagatactctatcttcaaaatatcccagaagaaaaacagaagctgttaacacacaggtgagactttaca

SEQ ID NO: 405484 - DNA, 120 bp, Artificial Sequence
  ENSG00000147383_14 (sequence is synthesized)
tatacatttcatactgacagtgagcttagagcaaaagctgaaagctgaaatgactgtaattcctccccagtctctgttgcttgttcaactccttacatgttccacattctctttcaggta

SEQ ID NO: 405485 - DNA, 120 bp, Artificial Sequence
  ENSG00000147383_15 (sequence is synthesized)
cgccgagctgggccaatcctcttggtggaggaagctcggctgattctcggctcacgcgggaggggagtaaagggtggcggtccgggcctggagttcagtgggtgcagcctgcttgcgagc

SEQ ID NO: 405486 - DNA, 120 bp, Artificial Sequence
  ENSG00000147383_16 (sequence is synthesized)
tgaggccagacaggggggcgcctacggacggataaggaggagcattccaggccgagacgccctcatcagcagagtcacaggagttttggaagtgagagaaaagaaaagttgattacaaac

SEQ ID NO: 405487 - DNA, 120 bp, Artificial Sequence
  ENSG00000147394_0 (sequence is synthesized)
ctgaatcaagtgagaggagagctgcggagcaatcaccatgagtatctcagctcttggaggccgcaccaaagggaagcctctgccaccaggcgaggaggagcgcaataacgttctcaagca

SEQ ID NO: 405488 - DNA, 120 bp, Artificial Sequence
  ENSG00000147394_1 (sequence is synthesized)
gatgaaagtgcgaaccacgctgaagggggacaagagctggattaccaagcaggatgaatcggagggtcgcaccatagagctgccctcaggccggagtcgcgccacatccttttcatcagc

SEQ ID NO: 405489 - DNA, 120 bp, Artificial Sequence
  ENSG00000147394_2 (sequence is synthesized)
tggggaggttccgaagcctaggcctccgagcacaagggctcccactggctacatcatccggggagtgttcaccaagcccatagacagctcttcccagccccagcagcagttccccaaggc

SEQ ID NO: 405490 - DNA, 120 bp, Artificial Sequence
  ENSG00000147394_3 (sequence is synthesized)
caacgggactccaaaaagtgctgccagtctggtgagaacagctaacgctggtcctccccgcccctcctcctctggctacaagatgaccactgaggattacaagaagctggcaccctacaa

SEQ ID NO: 405491 - DNA, 120 bp, Artificial Sequence
  ENSG00000147394_4 (sequence is synthesized)
tatcaggcgcagctctacatcaggggacaccgaggaggaggaggaggaggaggtggtgccattctcctcagatgaacagaaacggaggtcagaggctgcaagcggtgttctgaggaggac

SEQ ID NO: 405492 - DNA, 120 bp, Artificial Sequence
  ENSG00000147394_5 (sequence is synthesized)
agctccccgggagcactcctacgtcctgtcagcggccaagaagagcactggtcctacccaggagacacaggcaccgtttatcgcgaagagggtggaggtggtggaagaggacgggccttc

SEQ ID NO: 405493 - DNA, 120 bp, Artificial Sequence
  ENSG00000147394_6 (sequence is synthesized)
tgagaagagccaggacccacctgctctggcaagatccactcctggctcaaacagtgcggatggaggcaggaccaaagcgtctcgggcaatttggatcgagtgcctgccaagtatgcctag

SEQ ID NO: 405494 - DNA, 120 bp, Artificial Sequence
  ENSG00000147394_7 (sequence is synthesized)
ccccgctgggagccaggagctcagctcaagaggtgaggaaattgtccgcctgcagatcctgacacccagggcaggactccgcctggtggccccagacgtggaaggcatgaggtcttcccc

SEQ ID NO: 405495 - DNA, 120 bp, Artificial Sequence
  ENSG00000147394_8 (sequence is synthesized)
aggcaacaaagacaaggaggccccctgctccagagagctccagagggacttggctggtgaggaggctttcagggcccccaacacagatgctgcaaggtcaagtgcacagttgagtgatgg

SEQ ID NO: 405496 - DNA, 120 bp, Artificial Sequence
  ENSG00000147394_9 (sequence is synthesized)
caatgtgggatccggagccacgggctcccggcctgaaggcttggctgcagtagacatcggctccgagagaggaagctccagtgccacttcagtctctgctgtccctgctgataggaagag

SEQ ID NO: 405497 - DNA, 120 bp, Artificial Sequence
  ENSG00000147394_10 (sequence is synthesized)
caacagcacagcagcccaggaggatgcaaaggcagacccaaagggggccttggctgattatgaggggaaggatgtggccaccagggtcggagaggcctggcaggagaggcctggagctcc

SEQ ID NO: 405498 - DNA, 120 bp, Artificial Sequence
  ENSG00000147394_11 (sequence is synthesized)
aagaggtggccaaggagacccagctgtacccgctcagcaacctgcagatcccagcaccccagagcggcagagcagccccagcggatctgagcaacttgtcagacgagagagttgtggcag

SEQ ID NO: 405499 - DNA, 120 bp, Artificial Sequence
  ENSG00000147394_12 (sequence is synthesized)
cagcgtgttgactgattttgaggggaaggatgtggccaccaaggtcggagaggcctggcaggacaggcctggagccccaagaggtggccaaggagacccagctgtacccactcagcaacc

SEQ ID NO: 405500 - DNA, 120 bp, Artificial Sequence
  ENSG00000147394_13 (sequence is synthesized)
tgcagatcccagtaccccagaacagcagaacagccccagcggatctgagcaattcgtcagacgagagagctgcaccagcagggtgaggagcccctcgagctgcatggtcactgttactgt

SEQ ID NO: 405501 - DNA, 120 bp, Artificial Sequence
  ENSG00000147394_14 (sequence is synthesized)
cactgccacatctgagcagcctcacatttatattccagcccccgcaagtgaattggactccagctctaccaccaaagggattctcttcgtgaaggagtacgtgaatgctagtgaagtgtc

SEQ ID NO: 405502 - DNA, 120 bp, Artificial Sequence
  ENSG00000147394_15 (sequence is synthesized)
ttctgggaagccagtatctgcacgctatagcaacgtcagcagcattgaggactcattcgccatggagaagaagcctccatgtggcagcactccatactctgagaggacaactggagggat

SEQ ID NO: 405503 - DNA, 120 bp, Artificial Sequence
  ENSG00000147394_16 (sequence is synthesized)
ctgtacttactgcaaccgtgagatccgagactgtccaaagattaccctagaacatcttggtatctgctgccatgaatattgctttaagtgtgggatttgcagtaaaccgatgggcgatct

SEQ ID NO: 405504 - DNA, 120 bp, Artificial Sequence
  ENSG00000147394_17 (sequence is synthesized)
cgtggacaaatttggctgtccccagttttgccccaagttgctgtctccccttccctcacctcctccctccctgtttgatttcttcatgcttttgcccttctcaagttgaagttgcataca

SEQ ID NO: 405505 - DNA, 120 bp, Artificial Sequence
  ENSG00000147394_18 (sequence is synthesized)
tccaatatcgtatcttaatgatgctatgataattgcttgtgtgtgtagcttcttgtagcttagaaagcgctttatgcccatgatgtcatttcaggctcaaccaaagaggatcaaacagga

SEQ ID NO: 405506 - DNA, 120 bp, Artificial Sequence
  ENSG00000147394_19 (sequence is synthesized)
attccatcttggcttccctaagacagattggctttctaatgagtttaagtgggcagaagtgtagggttcagtgtgtcctgactcccttgaggcttataatgggccaagttgaagactgtt

SEQ ID NO: 405507 - DNA, 120 bp, Artificial Sequence
  ENSG00000147394_20 (sequence is synthesized)
gatgatccctggtgggtaaattgcagacatcaaatgctagggattggcataggctagtgtttagcttgtctatttgccatatctattttttttaaatttccatacacttgtaaaagtagt

SEQ ID NO: 405508 - DNA, 120 bp, Artificial Sequence
  ENSG00000147394_21 (sequence is synthesized)
tagttgcttttgattgagttatatagcagtttttcatttggtcttccactcacctttcactatatttgagtgttcccttacaggtatgttggcatgtgttggaaaatttacacaattagg

SEQ ID NO: 405509 - DNA, 120 bp, Artificial Sequence
  ENSG00000147394_22 (sequence is synthesized)
tttaaattcagtaggatgtgattttaggatgctactgatcaaagtgatatctgtgtctgttggaatcttgatagctgattaatttgccctcaattctgctccctgaacttcacacataaa

SEQ ID NO: 405510 - DNA, 120 bp, Artificial Sequence
  ENSG00000147394_23 (sequence is synthesized)
tcttcccaagtgggttttagggtgtatagatcccagcaggattaaggaggtggaaaagcagctaacatttcttgaggctctaccacatagcaggcactgtcacagagtaatggcattaat

SEQ ID NO: 405511 - DNA, 120 bp, Artificial Sequence
  ENSG00000147394_24 (sequence is synthesized)
ccccataataatcctgtgaaggtgatattctcatcccatcttagacatgaggatattggaactcagagaggtggctattgcattgcgcagaacgctacagagcccatgctcttcccagag

SEQ ID NO: 405512 - DNA, 120 bp, Artificial Sequence
  ENSG00000147394_25 (sequence is synthesized)
cagcacccacaaaagcaagcattgattttgtgctcagtgtgtgccaagcactgtgcagagggtacacagttcctgccaggttaacaccctcccttcaggcctcccaaaggcataggcttg

SEQ ID NO: 405513 - DNA, 120 bp, Artificial Sequence
  ENSG00000147394_26 (sequence is synthesized)
caaagagcagaaggtgtgaaatcacactcttcctctgggcatcctggatccctgaattatccccccccccatgaagtacttcaagggccaagctgcccctttccctcctctccgcccatg

SEQ ID NO: 405514 - DNA, 120 bp, Artificial Sequence
  ENSG00000147394_27 (sequence is synthesized)
aaaatgcctccaaactgagatgctttcagctgagaacagatttgactcacagacattaccaaagaggagcttgtgaatccaggaaaagctccagggggctagctgatctgagcagagagc

SEQ ID NO: 405515 - DNA, 120 bp, Artificial Sequence
  ENSG00000147394_28 (sequence is synthesized)
tttcagtgacccattttcctgtctagactctgccttaagctagtggcaactgctggggccccaggtacttgggacatggaaactcgttggatggctgggcagatgtaagcctgtccatgc

SEQ ID NO: 405516 - DNA, 120 bp, Artificial Sequence
  ENSG00000147394_29 (sequence is synthesized)
agtcagccgatcctctgctcaggttcagctggactctgccatctgtgggcccagcatcactctgtaagttccttgaaaggaagaacaaccttagagtatttctgatacaaaatgagggcc

SEQ ID NO: 405517 - DNA, 120 bp, Artificial Sequence
  ENSG00000147394_30 (sequence is synthesized)
tctgctcttgatttaattataaaatgtctacgtctttctccagtttctgagccctatgcacattggcttgtgggcttgttcttcctgccaaatgatcagagaggaacattccatttattt

SEQ ID NO: 405518 - DNA, 120 bp, Artificial Sequence
  ENSG00000147394_31 (sequence is synthesized)
gtagtggatttcctctggagggcatgtacccacactaaataccaactgctcttcctcagctgtagtccccaacatcagacttggcacgtggtggacactaacacacaggcactcaatgaa

SEQ ID NO: 405519 - DNA, 120 bp, Artificial Sequence
  ENSG00000147394_32 (sequence is synthesized)
tgagtgaaggaaataaaagtcaccccgttggtgagaggtgctatccctgagtctcagtgcaggaccagtggatgaaaggcaaggtaaagaggcccaagataggctggcttcccccgttca

SEQ ID NO: 405520 - DNA, 120 bp, Artificial Sequence
  ENSG00000147394_33 (sequence is synthesized)
aggtatagtctgcctttaagggagttttagaaccaacatgcaagacattgaaagaaatcttgcaagagccattattgacttagatccaaaacagcctctctcatgtctaaaaaggcacag

SEQ ID NO: 405521 - DNA, 120 bp, Artificial Sequence
  ENSG00000147394_34 (sequence is synthesized)
aattttgcagatctgaggaagagggatgcattacctttttgcttcttttcaattgcttagtgtttctaatcatacttaatccacactaatgtgcgcaattataataaatggtaagatatc

SEQ ID NO: 405522 - DNA, 120 bp, Artificial Sequence
  ENSG00000147394_35 (sequence is synthesized)
gttccctgaagctcggtggggtttgcctacacagctgctctgagtggcgcagttccgggtgtctgtcagggccaaaagcaaagaggaaaggctcccaggcagctcctggtccacctctca

SEQ ID NO: 405523 - DNA, 120 bp, Artificial Sequence
  ENSG00000147394_36 (sequence is synthesized)
ctcaagaggtgaggaaattgtccgcctgcagatcctgacacccagggcaggactccgcctggtggccccagacgtggaaggcatgagctccagtgccacttcagtctctgctgtccctgc

SEQ ID NO: 405524 - DNA, 120 bp, Artificial Sequence
  ENSG00000147394_37 (sequence is synthesized)
gctgcagtagacatcggctccgagagaggaaggctgtgtgcagctgctagctttgcctctttcctggaagaccaggatgggcacagtgccaactctcagtcctgcaagcctagaccagca

SEQ ID NO: 405525 - DNA, 120 bp, Artificial Sequence
  ENSG00000147394_38 (sequence is synthesized)
aaagtgaaatggccgcccgggacgagctcggcctcggcggggattctcttgaggccatgcccgtgccggccgccagaggtcgcccgaggatcacgaatgggcccgaggagctggctgccc

SEQ ID NO: 405526 - DNA, 120 bp, Artificial Sequence
  ENSG00000147400_0 (sequence is synthesized)
agtgtacacgtcggttgcctaacaaccggcagcggactcctttggctatggcctccaactttaagaaggcaaacatggcatcaagttctcagcgaaaaagaatgagccctaagcctgagc

SEQ ID NO: 405527 - DNA, 120 bp, Artificial Sequence
  ENSG00000147400_1 (sequence is synthesized)
ttactgaagagcaaaagcaggagatccgggaagcttttgatcttttcgatgcggatggaactggcaccatagatgttaaagaactgaaggtggcaatgagggccctgggctttgaaccca

SEQ ID NO: 405528 - DNA, 120 bp, Artificial Sequence
  ENSG00000147400_2 (sequence is synthesized)
agaaagaagaaattaagaaaatgataagtgaaattgataaggaagggacaggaaaaatgaactttggtgactttttaactgtgatgacccagaaaatgtctgagaaagatactaaagaag

SEQ ID NO: 405529 - DNA, 120 bp, Artificial Sequence
  ENSG00000147400_3 (sequence is synthesized)
aaatcctgaaagctttcaagctctttgatgatgatgaaactgggaagatttcgttcaaaaatctgaaacgcgtggccaaggagttgggtgagaacctgactgatgaggagctgcaggaaa

SEQ ID NO: 405530 - DNA, 120 bp, Artificial Sequence
  ENSG00000147400_4 (sequence is synthesized)
tgattgatgaagctgatcgagatggagatggagaggtcagtgagcaagagttcctgcgcatcatgaaaaagaccagcctctattaagatcagtgtcttctttttctactgcaagcacatg

SEQ ID NO: 405531 - DNA, 120 bp, Artificial Sequence
  ENSG00000147400_5 (sequence is synthesized)
agccgtttggaagtgttctttgatattacagttctttgtaaaatgacctgcgaattaccctaattctcaaaagcaaaacaagagcacacaagcgtgaagaaaaggatcttaaagctttga

SEQ ID NO: 405532 - DNA, 120 bp, Artificial Sequence
  ENSG00000147400_6 (sequence is synthesized)
gcacctgccattttgccttgcatcgtttccctcgtcatgcatttccacatatccacaaacacagaacgactttagacaagcacatgttacacctgtgttgccacaagcagtcattcttga

SEQ ID NO: 405533 - DNA, 120 bp, Artificial Sequence
  ENSG00000147400_7 (sequence is synthesized)
cggctccagtttttatttgacacttgagtttagttttctcttttataaacccagtgaactcctgcactggcatttggatgtgtgttaatgctatttgttttgtcttaaaagtaaaacctt

SEQ ID NO: 405534 - DNA, 120 bp, Artificial Sequence
  ENSG00000147400_8 (sequence is synthesized)
tctcagtttgaacttgtattctctaaggatgagttctttagctttgcttatgagttcctcttctcaattattgtgttgaaggcagcctattagatacaaaactccttaccagcctatgga

SEQ ID NO: 405535 - DNA, 120 bp, Artificial Sequence
  ENSG00000147400_9 (sequence is synthesized)
cagaaaatgaataatcctttgctactttcctggcatgaattgctttttgccttggaaggctgctggtttgtaaaactagcagaatttttatatcacctaagcctaaatgatgctctaaaa

SEQ ID NO: 405536 - DNA, 120 bp, Artificial Sequence
  ENSG00000147400_10 (sequence is synthesized)
atagttttggcaaagctaagactggaaaagagtcttgttagtaatttgtgcttgaataaaatggggagagccaggctaacgcaacactaggatggattcagccaacctctcgtgaattta

SEQ ID NO: 405537 - DNA, 120 bp, Artificial Sequence
  ENSG00000147400_11 (sequence is synthesized)
aattatcatggtatggagccccagtcatctgcagaggtccatggcgtcttcctgttaaaacagtcatgtgaccacagagcagtccaggtagcaactgcatcaggaggcctgccctcccat

SEQ ID NO: 405538 - DNA, 120 bp, Artificial Sequence
  ENSG00000147400_12 (sequence is synthesized)
tatagcgataggtagcaaacgtcaccttggatggagtgcctggcttgcctggtgtttctttgaggccaaaatgggcttcctgacacttgccgcaagtctagactcgagttacattgttaa

SEQ ID NO: 405539 - DNA, 120 bp, Artificial Sequence
  ENSG00000147400_13 (sequence is synthesized)
aaaggaaagggtgacctgaccaggcagtggcagggctacaggacagtagtaaccaaccgtggtgtccccctactcatgtgttttatgttctacttgttaagtctgagaaagatactaaag

SEQ ID NO: 405540 - DNA, 120 bp, Artificial Sequence
  ENSG00000147403_0 (sequence is synthesized)
agcgcctctttcccttcggtgtggtgagtaagcgcagttgtcgtctcttgcggtgccgttgctggttctcacaccttttaggtctgttctcgtcttccgttccgactctctctttttcgt

SEQ ID NO: 405541 - DNA, 120 bp, Artificial Sequence
  ENSG00000147403_1 (sequence is synthesized)
tgcagccactgaagatcctggtgtcgccatgggccgccgccccgcccgttgttaccggtattgtaagaacaagccgtacccaaagtctcgcttctgccgaggtgtccctgatgccaagat

SEQ ID NO: 405542 - DNA, 120 bp, Artificial Sequence
  ENSG00000147403_2 (sequence is synthesized)
tcgcatttttgacctggggcggaaaaaggcaaaagtggatgagtttccgctttgtggccacatggtgtcagatgaatatgagcagctgtcctctgaagccctggaggctgcccgaatttg

SEQ ID NO: 405543 - DNA, 120 bp, Artificial Sequence
  ENSG00000147403_3 (sequence is synthesized)
tgccaataagtacatggtaaaaagttgtggcaaagatggcttccatatccgggtgcggctccaccccttccacgtcatccgcatcaacaagatgttgtcctgtgctggggctgacaggct

SEQ ID NO: 405544 - DNA, 120 bp, Artificial Sequence
  ENSG00000147403_4 (sequence is synthesized)
gacaggctccaaacaggcatgcgaggtgcctttggaaagccccagggcactgtggccagggttcacattggccaagttatcatgtccatccgcaccaagctgcagaacaaggagcatgtg

SEQ ID NO: 405545 - DNA, 120 bp, Artificial Sequence
  ENSG00000147403_5 (sequence is synthesized)
cctgcgcagggccaagttcaagtttcctggccgccagaagatccacatctcaaagaagtggggcttcaccaagttcaatgctgatgaatttgaagacatggtggctgaaaagcggctcat

SEQ ID NO: 405546 - DNA, 120 bp, Artificial Sequence
  ENSG00000147403_6 (sequence is synthesized)
cccagatggctgtggggtcaagtacatccccagtcgtggccctctggacaagtggcgggccctgcactcatgagggcttccaatgtgctgcccccctcttaatactcaccaataaattct

SEQ ID NO: 405547 - DNA, 120 bp, Artificial Sequence
  ENSG00000147403_7 (sequence is synthesized)
acttcctgtccacctatgtctttgtatctacattcttgacggggaaggaacttcctctgggaacctttgggtcattgccctttcacttcagaaacaggttgacaactcagccctgctcat

SEQ ID NO: 405548 - DNA, 120 bp, Artificial Sequence
  ENSG00000147403_8 (sequence is synthesized)
gaggcagcaaaccctgcaaagggctgggactggtggccttatgtcagttgtctactctggagcttgacttggacctccccaggtcctaggcagtaggttgaaaaacactgaagtgctttt

SEQ ID NO: 405549 - DNA, 120 bp, Artificial Sequence
  ENSG00000147403_9 (sequence is synthesized)
gcgtttatttagcaagggtaggtgtgcatcacattgggcttgttctcacccatctggtttggccattcctccttggtgggaatcatccaggtactgctgaggtcacctgcgatttgcccc

SEQ ID NO: 405550 - DNA, 120 bp, Artificial Sequence
  ENSG00000147403_10 (sequence is synthesized)
atttcctatctctagcaacctcctgggccccatgcccccaccccttctagaacctgcattcccagggccttcaccacctgaccaaaggtctaggctaacctttggtcatttgtaacaaga

SEQ ID NO: 405551 - DNA, 120 bp, Artificial Sequence
  ENSG00000147403_11 (sequence is synthesized)
cctcggaacagacacgtgtgtggcatggtttggcctggggatcttagatgtctgacctgaactattgtagaacagcgctggcttttgggggagcagcaaaaatgagaggagtgctaggtg

SEQ ID NO: 405552 - DNA, 120 bp, Artificial Sequence
  ENSG00000147403_12 (sequence is synthesized)
ggtggcctgagcatctgtatccagggacaggactccaaaggcttttggtcccagagctggggtatgttggccccagcccccagcctgtggctcccaaaaggcctctggttttttgtaatc

SEQ ID NO: 405553 - DNA, 120 bp, Artificial Sequence
  ENSG00000147403_13 (sequence is synthesized)
tcagtttacagccatttcttaggtttttaattacctttattttattttgccaaacatacctgggaataccttttattttttttttaccttggggtgatggttccaaaccataaatgtgat

SEQ ID NO: 405554 - DNA, 120 bp, Artificial Sequence
  ENSG00000147403_14 (sequence is synthesized)
tatagttaacacatgacccttctagcgtcccagccagtgtttttcctgacctctcttctttggagaggaggatggaagggaggggtccggcatgctgctggcattttgctgtgtcctgca

SEQ ID NO: 405555 - DNA, 120 bp, Artificial Sequence
  ENSG00000147403_15 (sequence is synthesized)
gcccctttccgggacacctgggttcacacagctttttagcttacataactggtgcagattttctgtgtggagatgttgccttgaccagccttggctggactttaccaggcatgcagaagc

SEQ ID NO: 405556 - DNA, 120 bp, Artificial Sequence
  ENSG00000147403_16 (sequence is synthesized)
ctgtaccaacacagactacagcacccaggaggtgcgagtgtggctgctcagcggttataacaggcctgactgcattgttcaccggattataatgagccaaaatgtttcccggtgtttgct

SEQ ID NO: 405557 - DNA, 120 bp, Artificial Sequence
  ENSG00000147403_17 (sequence is synthesized)
ggtttcagggaaggagtttgatatagcagattaaccaccctccttgtagctattggggcttaatggtttcctggtgattcttaccaatccacaataaacatggcccattggcatatctgc

SEQ ID NO: 405558 - DNA, 120 bp, Artificial Sequence
  ENSG00000147403_18 (sequence is synthesized)
gcaattcctgacttgtactgccccagtggtgttacagcctcgaacccagtttccagacctaagtcaccgccggcatccagagtcccatgatggaaagggaggctaggttcccctgggaag

SEQ ID NO: 405559 - DNA, 120 bp, Artificial Sequence
  ENSG00000147403_19 (sequence is synthesized)
gaccttgcaccactgctgcaagtgcaccccagaaatcgtcccaagcttttctcaaagggacctgcagccatttataaaagcgacatatcatcctggaaaacagaaatatacgtctgtcac

SEQ ID NO: 405560 - DNA, 120 bp, Artificial Sequence
  ENSG00000147403_20 (sequence is synthesized)
agttaacggcaaagcctagggcaagagttctacgcccaagatggccagccggaagcgggcttctcgcgaccatgtggcgaagccccattcgtcagctggccgcccgcggccctggtaccc

SEQ ID NO: 405561 - DNA, 120 bp, Artificial Sequence
  ENSG00000147403_21 (sequence is synthesized)
ggtcacctctctgatctgcgcatgtgctgggctacgcccgggcgcaagcgccaagagcggctgcgtctatggtcatgacgtctgacagagcgtccacccgtcttcgacaggactctatgg

SEQ ID NO: 405562 - DNA, 120 bp, Artificial Sequence
  ENSG00000147403_22 (sequence is synthesized)
ggtctgggccttttaaggcagttggagtctctacattattaggcttgcattattttatcagagcatagaggtggccccagtgactcagccactatggctactagaaaagccaggctggca

SEQ ID NO: 405563 - DNA, 120 bp, Artificial Sequence
  ENSG00000147403_23 (sequence is synthesized)
gcatgagtaagtcttagcaagctcttccccacaggttaggggaaacactggtgatgggagtagctcttcttgcttttagctgaatgacaaccatcttgccagcaggtagctgaagctggc

SEQ ID NO: 405564 - DNA, 120 bp, Artificial Sequence
  ENSG00000147403_24 (sequence is synthesized)
agaggagcccagtggcgccttttcagtggttcttgggatgctccgcagccaattaagccgactgagttcctttcctcatggggacccagtgtgcgatggctgcacacagcagcttccttg

SEQ ID NO: 405565 - DNA, 120 bp, Artificial Sequence
  ENSG00000147403_25 (sequence is synthesized)
cgggaaaaacgggtgcggccgcctcctgtgtcctacagggggcgccagacgcatttccactcggcttggagttaccggtattgtaagaacaagccgtacccaaagtctcgcttctgccga

SEQ ID NO: 405566 - DNA, 120 bp, Artificial Sequence
  ENSG00000147403_26 (sequence is synthesized)
ctccaccccttccacgtcatccgcatcaacaagatgttgtcctgtgctggggctgacagccccatcccttcacctcctcctcggtgagctggaagctcgtggggaagtcaaaggcagccg

SEQ ID NO: 405567 - DNA, 120 bp, Artificial Sequence
  ENSG00000147403_27 (sequence is synthesized)
cagtgtgcagcagactccggcagcgctccccgtgcagcacgacgcggtcataggtgcagtgggtgctggcccgcactgtggtgtcctccccatcggcaatcacccagtggaagcctggct

SEQ ID NO: 405568 - DNA, 120 bp, Artificial Sequence
  ENSG00000147403_28 (sequence is synthesized)
caggcgctttttggtcagtgaagcgcagtcagcattgaagtccccaagcaggatcacgtcctagagacacagcagccatcaggctggccgctgggccaccctatccttgtccctcctgta

SEQ ID NO: 405569 - DNA, 120 bp, Artificial Sequence
  ENSG00000147403_29 (sequence is synthesized)
caaactgcccaggcctaccttgctctgccagtgctgggagacctccagaaacacatcgtagagggcgttcagctccttctctacggccttaggagtggtgtgcagcgggaccaacaccag

SEQ ID NO: 405570 - DNA, 120 bp, Artificial Sequence
  ENSG00000147403_30 (sequence is synthesized)
gctgggaaggactgcaaggcccagggaccgagggctgccatccactcctggaccttctccccctagcccgtctgggtgaggaagcccccagtggagccagccagaactccccttctgctc

SEQ ID NO: 405571 - DNA, 120 bp, Artificial Sequence
  ENSG00000147403_31 (sequence is synthesized)
tcatcgttgtacacgtaggaactcaggacctgtgttttgtgtgacctgggaggacaaagggatgggcagcagtggccccacgtctttgattttggcttgcaagtgccaaacggcgctcag

SEQ ID NO: 405572 - DNA, 120 bp, Artificial Sequence
  ENSG00000147403_32 (sequence is synthesized)
agtctccgtggagatttctcctcgacctcttccccgcggcaatgtgcgaaccctgggtctccaggaaacggggatacggggcatggctcccagcaaggcctggtccagcctctccgaaat

SEQ ID NO: 405573 - DNA, 120 bp, Artificial Sequence
  ENSG00000147403_33 (sequence is synthesized)
ctgaagatcctggtgtcgccatgggccgccgccccgcccgttggtgagtcttgaatccgtgtactttcactgctgggaaacgggcggggaaagaagtgcctatggccgctgaaaacaatt

SEQ ID NO: 405574 - DNA, 120 bp, Artificial Sequence
  ENSG00000147403_34 (sequence is synthesized)
cactgcactggaattgggagttgatgaaacatgagccttacaaaactcagccaacacagttcccctgagctggagatagtcgtggtgaatgtttctctattatcttctctcactttgctg

SEQ ID NO: 405575 - DNA, 120 bp, Artificial Sequence
  ENSG00000147408_0 (sequence is synthesized)
ctccttaggtggaaaccctgggagtagagtactgacagcaaagaccgggaaagaccatacgtccccgggcaggggtgacaacaggtgtcatctttttgatctcgtgtgtggctgccttcc

SEQ ID NO: 405576 - DNA, 120 bp, Artificial Sequence
  ENSG00000147408_1 (sequence is synthesized)
tatttcaaggaaagacgccaaggtaattttgacccagaggagcaatgatgtagccacctcctaaccttcccttcttgaacccccagttatgccaggatttactagagagtgtcaactcaa

SEQ ID NO: 405577 - DNA, 120 bp, Artificial Sequence
  ENSG00000147408_2 (sequence is synthesized)
ccagcaagcggctccttcggcttaacttgtggttggaggagagaacctttgtggggctgcgttctcttagcagtgctcagaagtgacttgcctgagggtggaccagaagaaaggaaaggt

SEQ ID NO: 405578 - DNA, 120 bp, Artificial Sequence
  ENSG00000147408_3 (sequence is synthesized)
cccctcttgctgttggctgcacatcaggaaggctgtgatgggaatgaaggtgaaaacttggagatttcacttcagtcattgcttctgcctgcaagatcatcctttaaaagtagagaagct

SEQ ID NO: 405579 - DNA, 120 bp, Artificial Sequence
  ENSG00000147408_4 (sequence is synthesized)
gctctgtgtggtggttaactccaagaggcagaactcgttctagaaggaaatggatgcaagcagctccgggggccccaaacgcatgcttcctgtggtctagcccagggaagcccttccgtg

SEQ ID NO: 405580 - DNA, 120 bp, Artificial Sequence
  ENSG00000147408_5 (sequence is synthesized)
ggggccccggctttgagggatgccaccggttctggacgcatggctgattcctgaatgatgatggttcgccgggggctgcttgcgtggatttcccgggtggtggttttgctggtgctcctc

SEQ ID NO: 405581 - DNA, 120 bp, Artificial Sequence
  ENSG00000147408_6 (sequence is synthesized)
tgctgtgctatctctgtcctgtacatgttggcctgcaccccaaaaggtgacgaggagcagctggcactgcccagggccaacagccccacggggaaggaggggtaccaggccgtccttcag

SEQ ID NO: 405582 - DNA, 120 bp, Artificial Sequence
  ENSG00000147408_7 (sequence is synthesized)
gagtgggaggagcagcaccgcaactacgtgagcagcctgaagcggcagatcgcacagctcaaggaggagctgcaggagaggagtgagcagctcaggaatgggcagtaccaagccagcgat

SEQ ID NO: 405583 - DNA, 120 bp, Artificial Sequence
  ENSG00000147408_8 (sequence is synthesized)
gctgctggcctgggtctggacaggagccccccagagaaaacccaggccgacctcctggccttcctgcactcgcaggtggacaaggcagaggtgaatgctggcgtcaagctggccacagag

SEQ ID NO: 405584 - DNA, 120 bp, Artificial Sequence
  ENSG00000147408_9 (sequence is synthesized)
tatgcagcagtgcctttcgatagctttactctacagaaggtgtaccagctggagactggccttacccgccaccccgaggagaagcctgtgaggaaggacaagcgggatgagttggtggaa

SEQ ID NO: 405585 - DNA, 120 bp, Artificial Sequence
  ENSG00000147408_10 (sequence is synthesized)
gccattgaatcagccttggagaccctgaacagtcctgcagagaacagccccaatcaccgtccttacacggcctctgatttcatagaagggatctaccgaacagaaagggacaaagggaca

SEQ ID NO: 405586 - DNA, 120 bp, Artificial Sequence
  ENSG00000147408_11 (sequence is synthesized)
ttgtatgagctcaccttcaaaggggaccacaaacacgaattcaaacggctcatcttatttcgaccattcggccccatcatgaaagtgaaaaatgaaaagctcaacatggccaacacgctt

SEQ ID NO: 405587 - DNA, 120 bp, Artificial Sequence
  ENSG00000147408_12 (sequence is synthesized)
atcaatgttatcgtgcctctagcaaaaagggtggacaagttccggcagttcatgcagaatttcagggagatgtgcattgagcaggatgggagagtccatctcactgttgtttactttggg

SEQ ID NO: 405588 - DNA, 120 bp, Artificial Sequence
  ENSG00000147408_13 (sequence is synthesized)
aaagaagaaataaatgaagtcaaaggaatacttgaaaacacttccaaagctgccaacttcaggaactttaccttcatccagctgaatggagaattttctcggggaaagggacttgatgtt

SEQ ID NO: 405589 - DNA, 120 bp, Artificial Sequence
  ENSG00000147408_14 (sequence is synthesized)
ggagcccgcttctggaagggaagcaacgtccttctctttttctgtgatgtggacatctacttcacatctgaattcctcaatacgtgtaggctgaatacacagccagggaagaaggtattt

SEQ ID NO: 405590 - DNA, 120 bp, Artificial Sequence
  ENSG00000147408_15 (sequence is synthesized)
tatccagttcttttcagtcagtacaatcctggcataatatacggccaccatgatgcagtccctcccttggaacagcagctggtcataaagaaggaaactggattttggagagactttgga

SEQ ID NO: 405591 - DNA, 120 bp, Artificial Sequence
  ENSG00000147408_16 (sequence is synthesized)
catcaatataggtgggtttgatctggacatcaaaggctggggcggagaggatgtgcacctttatcgcaagtatctccacagcaacctcatagtggtacggacgcctgtgcgaggactctt

SEQ ID NO: 405592 - DNA, 120 bp, Artificial Sequence
  ENSG00000147408_17 (sequence is synthesized)
ccacctctggcatgagaagcgctgcatggacgagctgacccccgagcagtacaagatgtgcatgcagtccaaggccatgaacgaggcatcccacggccagctgggcatgctggtgttcag

SEQ ID NO: 405593 - DNA, 120 bp, Artificial Sequence
  ENSG00000147408_18 (sequence is synthesized)
gcacgagatagaggctcaccttcgcaaacagaaacagaagacaagtagcaaaaaaacatgaactcccagagaaggattgtgggagacactttttctttccttttgcaattactgaaagtg

SEQ ID NO: 405594 - DNA, 120 bp, Artificial Sequence
  ENSG00000147408_19 (sequence is synthesized)
gctgcaacagagaaaagacttccataaaggacgacaaaagaattggactgatgggtcagagatgagaaagcctccgatttctctctgttgggctttttacaacagaaatcaaaatctccg

SEQ ID NO: 405595 - DNA, 120 bp, Artificial Sequence
  ENSG00000147408_20 (sequence is synthesized)
ctttgcctgcaaaagtaacccagttgcaccctgtgaagtgtctgacaaaggcagaatgcttgtgagattataagcctaatggtgtggaggttttgatggtgtttacaacacactgagacc

SEQ ID NO: 405596 - DNA, 120 bp, Artificial Sequence
  ENSG00000147408_21 (sequence is synthesized)
tgttgttttgtgtgctcattgaaatattcatgatttaagagcagttttgtaaaaaattcattagcatgaaaggcaagcatatttctcctcatatgaatgagcctatcagcagggctctag

SEQ ID NO: 405597 - DNA, 120 bp, Artificial Sequence
  ENSG00000147408_22 (sequence is synthesized)
tttctaggaatgctaaaatatcagaaggcaggagaggagataggcttattatgatactagtgagtacattaagtaaaataaaatggaccagaaaagaaaagaaaccataaatatcgtgtc

SEQ ID NO: 405598 - DNA, 120 bp, Artificial Sequence
  ENSG00000147408_23 (sequence is synthesized)
atattttccccaagattaaccaaaaataatctgcttatctttttggttgtccttttaactgtctccgtttttttcttttatttaaaaatgcactttttttcccttgtgagttatagtctg

SEQ ID NO: 405599 - DNA, 120 bp, Artificial Sequence
  ENSG00000147408_24 (sequence is synthesized)
cttatttaattaccactttgcaagccttacaagagagcacaagttggcctacatttttatattttttaagaagatactttgagatgcattatgagaactttcagttcaaagcatcaaatt

SEQ ID NO: 405600 - DNA, 120 bp, Artificial Sequence
  ENSG00000147408_25 (sequence is synthesized)
gatgccatatccaaggacatgccaaatgctgattctgtcaggcactgaatgtcaggcattgagacatagggaaggaatggtttgtactaatacagacgtacagatactttctctgaagag

SEQ ID NO: 405601 - DNA, 120 bp, Artificial Sequence
  ENSG00000147408_26 (sequence is synthesized)
tattttcgaagaggagcaactgaacactggaggaaaagaaaatgacactttctgctttacagaaaaggaaactcattcagactggtgatatcgtgatgtacctaaaagtcagaaaccaca

SEQ ID NO: 405602 - DNA, 120 bp, Artificial Sequence
  ENSG00000147408_27 (sequence is synthesized)
ttttctcctcagaagtagggaccgctttcttacctgtttaaataaaccaaagtataccgtgtgaaccaaacaatctcttttcaaaacagggtgctcctcctggcttctggcttccataag

SEQ ID NO: 405603 - DNA, 120 bp, Artificial Sequence
  ENSG00000147408_28 (sequence is synthesized)
aagaaatggagaaaaaaatatatatatatatattgtgaaagatcaatccatctgccagaatctagtgggatggaagtttttgctacatgttatccaccccaggccaggtggaagtaactg

SEQ ID NO: 405604 - DNA, 120 bp, Artificial Sequence
  ENSG00000147408_29 (sequence is synthesized)
aattattttttaaattaagcagttctactcgatcaccaagatgcttctgaaaattgcattttattaccatttcaaactattttttaaaaataaatacagttaacatagagtggtttcttc

SEQ ID NO: 405605 - DNA, 120 bp, Artificial Sequence
  ENSG00000147408_30 (sequence is synthesized)
attcatgtgaaaattattagccagcaccagatgcatgagctaattatctctttgagtccttgcttctgtttgctcacagtaaactcattgtttaaaagcttcaagaacattcaagctgtt

SEQ ID NO: 405606 - DNA, 120 bp, Artificial Sequence
  ENSG00000147408_31 (sequence is synthesized)
ggtgtgttaaaaaatgcattgtattgatttgtactggtagtttatgaaatttaattaaaacacaggccatgaatggaaggtggtattgcacagctaataaaatatgatttgtggatatga

SEQ ID NO: 405607 - DNA, 120 bp, Artificial Sequence
  ENSG00000147408_32 (sequence is synthesized)
agatgcgctcggtcctcaccagcggcgttgtgcggcgaaccctgcggtgcttcgggaaggcggtcgttcctccctgctcccaccgttttccagcgtgtgcgctcttaccttctctgggga

SEQ ID NO: 405608 - DNA, 120 bp, Artificial Sequence
  ENSG00000147408_33 (sequence is synthesized)
aaaaaggaaattttttattttttaacatttcatttcatgaaaccgttttttttaagtggtggcgctgaacacagtccttgcagaggggggcagcactttccctcctgaccccaacctgga

SEQ ID NO: 405609 - DNA, 120 bp, Artificial Sequence
  ENSG00000147408_34 (sequence is synthesized)
aaccccagtgtgacttcagcgctgtcagagcattggaagcagagctgcgagttaggaagcggctcgctggcagctgggcacgtttctttcctgcgagatcggcttttttgatttgctctt

SEQ ID NO: 405610 - DNA, 120 bp, Artificial Sequence
  ENSG00000147408_35 (sequence is synthesized)
tttcacatgaaaatgttcagcttcatttttagacacctttagacatggttatcactgtttaaagccttgatttttttttaaacaaatagtttgcattttattcattgaaacagggagaga

SEQ ID NO: 405611 - DNA, 120 bp, Artificial Sequence
  ENSG00000147408_36 (sequence is synthesized)
acaaataccatcctgctttttgggctgccttcctatttcaaggaaagacgccaaggtaattttgacccagaggagcaatgatgtagccacctcctaaccttcccttcttgaacccccaga

SEQ ID NO: 405612 - DNA, 120 bp, Artificial Sequence
  ENSG00000147408_37 (sequence is synthesized)
cataaagggagcagtaggcataaaatgtggggagctgaccatctgccggtccggtcctgaccttccactagtagtgagaccaatccagctcttgctgctgctgtggctttgtgaggaggt

SEQ ID NO: 405613 - DNA, 120 bp, Artificial Sequence
  ENSG00000147408_38 (sequence is synthesized)
gacacagacatcaggcgttgcccaaatatctcccaaggaagaggtgattggactacatggtttttacacctataaagggttgtaaaataaaccaaagaggaagatgaggcagaaacctca

SEQ ID NO: 405614 - DNA, 120 bp, Artificial Sequence
  ENSG00000147408_39 (sequence is synthesized)
tggagcccacaaagctgaaaatatttaagtatctgtcccttcgcagaaaaaaattgctgaggacactgtgtagcaaagccccggccaacaaccagaaggcatttgggggtcacctgctgc

SEQ ID NO: 405615 - DNA, 120 bp, Artificial Sequence
  ENSG00000147408_40 (sequence is synthesized)
attctgcttttatctagttgacacatcggtttcctccattgatattcctaaaaggaagggacggctggggcccgttgtcactccctgcaaggcgcaatctccaggcaggggcagggcagg

SEQ ID NO: 405616 - DNA, 120 bp, Artificial Sequence
  ENSG00000147408_41 (sequence is synthesized)
tctgggggcttcacgccccccagggagcgggtcacccggtgggactcgcgcccgccctctccttgggtgtcgtgttccctgggacgcgcccaccgttctccctggggagcgggaggctcc

SEQ ID NO: 405617 - DNA, 120 bp, Artificial Sequence
  ENSG00000147408_42 (sequence is synthesized)
gttcatgcagaatttcaggcctgctgatgaagtttttagatgtgtgcctttaagcccttgattgtgcggtgttggatcttagaagctgtgatggctcagatgcacatattggctgaggat

SEQ ID NO: 405618 - DNA, 120 bp, Artificial Sequence
  ENSG00000147408_43 (sequence is synthesized)
aaccagctaagtgatttcaccagcttgttttaaacatagaaaatcctactgtctaattataaatcttgaaagatcaagctgattttttatttctttttttttgagatggagtcttactct

SEQ ID NO: 405619 - DNA, 89 bp, Artificial Sequence
  ENSG00000147408_44 (sequence is synthesized)
gtcacccaggctggagtgcagtggcacgaactctggagatgtgcattgagcaggatgggagagtccatctcactgttgtttactttggg

SEQ ID NO: 405620 - DNA, 120 bp, Artificial Sequence
  ENSG00000147408_45 (sequence is synthesized)
agccgggccgggcagctagcagggcgcttcgggtgctgtgctggtgatatggggtgaaagtcccatgaagacacatatatggctgctttttattctattttcaggatcagggaagacaat

SEQ ID NO: 405621 - DNA, 120 bp, Artificial Sequence
  ENSG00000147408_46 (sequence is synthesized)
gggaacatgtggatggccctgatgaggttattttgattgcaagcaagagatagggtctaggacgcattcttcctccctctccacctgtttccattgagattgcttatcagaagtcaacat

SEQ ID NO: 405622 - DNA, 120 bp, Artificial Sequence
  ENSG00000147408_47 (sequence is synthesized)
agatgcgctcggtcctcaccagcggcgttgtgcggcgaaccctgcggtgcttcgggaaggcggtcgttcctccctgctcccaccgttttccagcctgccttcctatttcaaggaaagacg

SEQ ID NO: 405623 - DNA, 120 bp, Artificial Sequence
  ENSG00000147408_48 (sequence is synthesized)
cggctgccggagcgggaggtggagccgagtccgcggcggccgcgcaggagggaaagttcagcgacggcggcagcggccggagccgggccgggcagctagcagggcgcttcggctgccttc

SEQ ID NO: 405624 - DNA, 120 bp, Artificial Sequence
  ENSG00000147408_49 (sequence is synthesized)
gcctgcctgtgtgtgctggaggtggcggtggatcttttattacccaacactccacttgcctttttagcctttcctctccctcttctctcctggcctcccagtggccgtcaggggtccctg

SEQ ID NO: 405625 - DNA, 120 bp, Artificial Sequence
  ENSG00000147408_50 (sequence is synthesized)
aggaaagaaaaactcaaccagcaggcaggaagtagagagattcagaagggccaggctcctcttttcccttccagaagcccaagcatccagggaaaagggaaggggcaggcaggagaaacc

SEQ ID NO: 405626 - DNA, 120 bp, Artificial Sequence
  ENSG00000147408_51 (sequence is synthesized)
tggccaaaaggaaccactggatcacagtcccctcttgctgttggctgcacatcaggaaggctgtgatgggaatgaaggtgaaaacttggagatttcacttcagtcattgcttctgcctgc

SEQ ID NO: 405627 - DNA, 120 bp, Artificial Sequence
  ENSG00000147408_52 (sequence is synthesized)
agagtaaaggtgatgccgcacagaccttgtagaattttacacatcgtggaaaagcctgaccaagtgtgaactctgtagcacagattgaaccatagcacagatcaaatcctaacacctgat

SEQ ID NO: 405628 - DNA, 120 bp, Artificial Sequence
  ENSG00000147408_53 (sequence is synthesized)
ctgacatttcattccattatgtcctgtgatcgcacacagttgcctatctgttcccgtccatcctgtctggcaatggcaaatcacggtctccagggtcatttaaagggatgctgtgttcag

SEQ ID NO: 405629 - DNA, 120 bp, Artificial Sequence
  ENSG00000147416_0 (sequence is synthesized)
gggccagtcgggacagaggagacaagatggcgctgcgggcgatgcgggggattgtcaacggggccgcacccgagctacccgtgcccaccggtgggccggcggtgggagctcgggagcagg

SEQ ID NO: 405630 - DNA, 120 bp, Artificial Sequence
  ENSG00000147416_1 (sequence is synthesized)
cgctggcagtcagtcggaactacctctcccagcctcgcctcacatacaagacagtatctggagtcaatggtccactagtgatcttagatcatgttaagtttcccaggtatgctgaaattg

SEQ ID NO: 405631 - DNA, 120 bp, Artificial Sequence
  ENSG00000147416_2 (sequence is synthesized)
tccatttgaccttaccggatggcacaaagagaagtgggcaagttctggaagttagtggttccaaggcagtagttcaggtatttgaagggacttcaggtatagatgctaagaaaacgtcct

SEQ ID NO: 405632 - DNA, 120 bp, Artificial Sequence
  ENSG00000147416_3 (sequence is synthesized)
gtgagtttactggggatattctccgaacaccggtgtctgaggatatgcttggtcgggtattcaatggatcgggaaaacccattgacagaggtcctgttgtactggccgaagacttccttg

SEQ ID NO: 405633 - DNA, 120 bp, Artificial Sequence
  ENSG00000147416_4 (sequence is synthesized)
atatcatgggtcagccaatcaaccctcaatgtcgaatctacccagaggaaatgattcagactggcatttcggccatcgatgggatgaacagtattgctagggggcagaaaattcctatct

SEQ ID NO: 405634 - DNA, 120 bp, Artificial Sequence
  ENSG00000147416_5 (sequence is synthesized)
tctctgctgctgggctaccacacaatgagattgcagctcagatctgtcgccaggctggtttggtaaagaaatccaaagatgtagtagactacagtgaggaaaattttgcaattgtatttg

SEQ ID NO: 405635 - DNA, 120 bp, Artificial Sequence
  ENSG00000147416_6 (sequence is synthesized)
ctgctatgggtgtaaacatggaaactgcccggttcttcaaatctgactttgaagaaaatggctcaatggacaatgtctgcctctttttgaacttggctaatgacccaaccattgagcgaa

SEQ ID NO: 405636 - DNA, 120 bp, Artificial Sequence
  ENSG00000147416_7 (sequence is synthesized)
ttatcactcctcgcctggctctaaccacagctgaatttctggcgtaccaatgtgagaaacatgtattggttattctaacagacatgagttcttatgctgaagcacttcgagaggtttcag

SEQ ID NO: 405637 - DNA, 120 bp, Artificial Sequence
  ENSG00000147416_8 (sequence is synthesized)
cagccagggaagaggtacctggtcgacgaggttttccaggttacatgtatacagatttagccacgatatatgaacgcgctgggcgagtggaagggagaaacggctcgattactcaaatcc

SEQ ID NO: 405638 - DNA, 120 bp, Artificial Sequence
  ENSG00000147416_9 (sequence is synthesized)
ctattctaaccatgcctaatgatgatatcactcaccccatcccagacttgactggctacattacagaggggcagatctatgtggacagacagctgcacaacagacagatttatccaccta

SEQ ID NO: 405639 - DNA, 120 bp, Artificial Sequence
  ENSG00000147416_10 (sequence is synthesized)
tcaatgtgctgccctcactatcacggttaatgaagtctgctattggagaagggatgaccaggaaggatcatgccgatgtatctaaccagctatatgcgtgctatgctattggaaaggatg

SEQ ID NO: 405640 - DNA, 120 bp, Artificial Sequence
  ENSG00000147416_11 (sequence is synthesized)
ctcagggtccttacgaaaatcgcactgtctttgagactttggacattggctggcagctactccgaatcttccccaaagaaatgctgaagagaatccctcagagcaccctcagcgaatttt

SEQ ID NO: 405641 - DNA, 120 bp, Artificial Sequence
  ENSG00000147416_12 (sequence is synthesized)
accctcgagactctgcaaagcattagctgctgcttctgcattgctccgcgctcttgtgaaatactggttctgttttctttattccttttgcactctcggttcccacctttgtgttggagt

SEQ ID NO: 405642 - DNA, 120 bp, Artificial Sequence
  ENSG00000147416_13 (sequence is synthesized)
ttaccatgttaccctgtaattaaaaacaaagaataggtaacatattgtgccagtgttgcaacgttttaaactgctaacagaccttaaaatatccccctacctgggtcctcagtgctatgt

SEQ ID NO: 405643 - DNA, 120 bp, Artificial Sequence
  ENSG00000147416_14 (sequence is synthesized)
ttaaagtgctgcagggatggagtggcgttttcttattgctgtatgtattgtacatagtggagtagttagttacctgataacagtcttgttatttgggtctcttagaccttacctctcaac

SEQ ID NO: 405644 - DNA, 120 bp, Artificial Sequence
  ENSG00000147416_15 (sequence is synthesized)
tccctcaagagtaccagtctctgaagttataatgctttggtctctacattaggggcaagatccagtctgagagaagtctcctttgagaagggccaagaggctctttcctgagtgtttgct

SEQ ID NO: 405645 - DNA, 120 bp, Artificial Sequence
  ENSG00000147416_16 (sequence is synthesized)
ttcggtttgttggtatgcctgtattgctgggctgtgctgctgctcgaagcagatggttttgactgtctttttgctctttcctatataatgaatagatgagtgaaaggagttttctttttc

SEQ ID NO: 405646 - DNA, 120 bp, Artificial Sequence
  ENSG00000147416_17 (sequence is synthesized)
tctttagtacttacgtattgggattcctgtgtcttacagctctccctctccaaataatacacagaatcctgcaactttttgcacagctggtatctgtctggtagcagtgagaccccttgt

SEQ ID NO: 405647 - DNA, 120 bp, Artificial Sequence
  ENSG00000147416_18 (sequence is synthesized)
cttggtgatccttactgggtttccaagcagaggagtcacatgattacaattgccagtagagttgttgtttggggtacaagatgagaagaaagaaaaacctacagcctttctacattctga

SEQ ID NO: 405648 - DNA, 120 bp, Artificial Sequence
  ENSG00000147416_19 (sequence is synthesized)
catgctaacagtggtttaagtttctaaagtgtttaccagatgctgaaggcaaggggagggagcagaagcacttatgtttacggatattttaaactctgttagagagcagcctttgaaaat

SEQ ID NO: 405649 - DNA, 120 bp, Artificial Sequence
  ENSG00000147416_20 (sequence is synthesized)
ccccaatttggttctgctttttgacctctctctaccttttcagggtaatctttgtggcacaaacgatagcatttccaagctttagagttttctgaattcctgcgccttcctgacgtgagc

SEQ ID NO: 405650 - DNA, 120 bp, Artificial Sequence
  ENSG00000147416_21 (sequence is synthesized)
cctgagcgatcttctatgcagttctgccatgcgtcctgttggtctctctgtgttctttgttacttgggtgcaatagcaacttccctaccccgtgcattccatctttcatgttgtgtaaag

SEQ ID NO: 405651 - DNA, 120 bp, Artificial Sequence
  ENSG00000147416_22 (sequence is synthesized)
ttcttcacttttttctctgagggctgggggttgggggagtcagcatgattatattttaatgtagaaaatgtgacatctggatataaaatgaaaataaatgttaaattaaatggaccttaa

SEQ ID NO: 405652 - DNA, 120 bp, Artificial Sequence
  ENSG00000147416_23 (sequence is synthesized)
gctgggctaccacacaatgaggtgaggactgggatcggtttgctatgaagtttagcagacaagaatttctataatgcatcactgttactgagaaaccgaataaagggttttcaaaataaa

SEQ ID NO: 405653 - DNA, 120 bp, Artificial Sequence
  ENSG00000147416_24 (sequence is synthesized)
aacaaaattggttaattttcagggttaacttgtcactttgcaagttttcattctttatggttttttaattccactgttcatatattaatagaatgccttaataaatcagaaaggaaacta

SEQ ID NO: 405654 - DNA, 120 bp, Artificial Sequence
  ENSG00000147416_25 (sequence is synthesized)
cttcgtttttgtcaacttggtagaagtgattagaggttaagatttaaatggttagcctgtttatcatactgtcactatctccatggattaagaaatgattgtaaaagggagtaaataatt

SEQ ID NO: 405655 - DNA, 120 bp, Artificial Sequence
  ENSG00000147416_26 (sequence is synthesized)
caagctgtttattcagttactctctcgggaagttctgtttctgtccagactattaatttttaaacctttttgtaattccatttttaatgatgttaatattttataaagaccctactctca

SEQ ID NO: 405656 - DNA, 120 bp, Artificial Sequence
  ENSG00000147416_27 (sequence is synthesized)
tactctcacagtactctcttcagcacttttttcttcagaaaacccagtgtttatttaggaaaaatattaagattctagcaggctgggcacggtagctcattcctgtaatcccagcacttt

SEQ ID NO: 405657 - DNA, 120 bp, Artificial Sequence
  ENSG00000147416_28 (sequence is synthesized)
ccagcctgggtaacatagcaagaccctttctccacaaaaaaattaagatattggctgggcgtagtggcacacacacttgtaatcctagttgctcaggaggctgaggtgggaggatagctt

SEQ ID NO: 405658 - DNA, 120 bp, Artificial Sequence
  ENSG00000147416_29 (sequence is synthesized)
ctagttgctcaggaggctgaggtgggaggatagcttgagtccagtaatttgaggctgcggtgggctatgattgtgccactgccctccagtctgggtgacagatcgagacctgcttcttaa

SEQ ID NO: 405659 - DNA, 120 bp, Artificial Sequence
  ENSG00000147416_30 (sequence is synthesized)
agaaagattataacagttacccctagaagttttggggtatttgttcagtaatacaaattactgaaattttgagtaagttacttttttaagcacataaaaagattctgaagagacaggctt

SEQ ID NO: 405660 - DNA, 120 bp, Artificial Sequence
  ENSG00000147416_31 (sequence is synthesized)
cttaaaattccttcagtgccctcaccatatcttactctgctatattgctgtttcagactaactctagtcaaggactagtttttctcccccatccatcacagaccaatacttttgtaaaat

SEQ ID NO: 405661 - DNA, 120 bp, Artificial Sequence
  ENSG00000147416_32 (sequence is synthesized)
gcaataaaattgagttattagaaaagtgaaattttaactatatatataatttacaaatgcagattttagaattgttagattcaacaggcataaaattattctgccaaattgccctgaaag

SEQ ID NO: 405662 - DNA, 120 bp, Artificial Sequence
  ENSG00000147416_33 (sequence is synthesized)
tttctaaatgcttatcttgctttctgtgtgatcattgcatgttgataacagttggtctgcagaccgtgctgtgaggagcaccgctgtagcacgctcctttgaagatgtcagagtagcact

SEQ ID NO: 405663 - DNA, 120 bp, Artificial Sequence
  ENSG00000147416_34 (sequence is synthesized)
tagaagttggatttcataatgctttagggttctagttgattgtaggtgaacatgcacacctatagtctggtatccatgtctctaagggaaagatcgtttatcaccattcttattttgtgc

SEQ ID NO: 405664 - DNA, 120 bp, Artificial Sequence
  ENSG00000147416_35 (sequence is synthesized)
agtgcaatggactcctgactttgtgaccttcagaaattgtttaatttttctgacccttgattccaactgttaattggaggtagcaccttcctcatagggttgctgtgaggattaagttaa

SEQ ID NO: 405665 - DNA, 120 bp, Artificial Sequence
  ENSG00000147416_36 (sequence is synthesized)
ataatgttgtaaagcgcagcagatgattcctcgtgtacatttccttcccttttgacctttttgggattaggttagataaatatggctagttccaccacgtggaataaatcttgtgaacca

SEQ ID NO: 405666 - DNA, 120 bp, Artificial Sequence
  ENSG00000147416_37 (sequence is synthesized)
agaatcttttctgttttaaaattaacttcctttgatttataaaattgcaaacagattttcttctagcaaactatttgaaaacttacattatggcaatacgattttagcaaaaaccttctg

SEQ ID NO: 405667 - DNA, 120 bp, Artificial Sequence
  ENSG00000147416_38 (sequence is synthesized)
gtgccccattgtcaacatttttgttacagaatactttgaatttatgttgccgggagatttttctaaatcattcttaaggacagtatttaaaatgaacatgatgggattttcaactttgta

SEQ ID NO: 405668 - DNA, 120 bp, Artificial Sequence
  ENSG00000147416_39 (sequence is synthesized)
tttggtatttggattataacacacctaatcattttaaagagagagaagacccatctaccttttcgagttgaagttattttgagaacacatcccctaagagtttatcttggttatttgcct

SEQ ID NO: 405669 - DNA, 120 bp, Artificial Sequence
  ENSG00000147416_40 (sequence is synthesized)
aaataaaacatttttcatttgaaaattacccacagttattatcctattgtggaggaaaagcaattttcttcataatttaagtttttaactttattaggtactattgagtgcctgctgttt

SEQ ID NO: 405670 - DNA, 120 bp, Artificial Sequence
  ENSG00000147416_41 (sequence is synthesized)
gcaggacactgttctaaatgtaaagaatttttgaaaagaatttatggtctctacttaatgtaagttactcagtctaattggggatgttttttatgtgtgtgcaccggtaatttaacatgg

SEQ ID NO: 405671 - DNA, 120 bp, Artificial Sequence
  ENSG00000147416_42 (sequence is synthesized)
accaagggctggttaaaaatgactttccaatgcctgtctgtgtgtgtgcccaggatggggtacgactattcagaattcctctcctgtgttgcctctttgtccttatttcagtttttgaac

SEQ ID NO: 405672 - DNA, 120 bp, Artificial Sequence
  ENSG00000147416_43 (sequence is synthesized)
aacactttgacaaaatatggtaagttattacttactgtaattgagcactgttctgagtgctttataaatattcactcatttgctcctcatagcaactttgaggcagatgctgtttgaggc

SEQ ID NO: 405673 - DNA, 120 bp, Artificial Sequence
  ENSG00000147416_44 (sequence is synthesized)
acagggaggtcaaatgatttgttgagattagcaagtgatagatttaggacccagtttgagttcataactcacactgttactctgtactgcctctgacgtgaaaatgatttgttccaaggg

SEQ ID NO: 405674 - DNA, 120 bp, Artificial Sequence
  ENSG00000147416_45 (sequence is synthesized)
agtagctacaaaatgatgtaatttaacagatttggaaatgtgttgctttgtgtgacctttttggtgcagcctgtgtagtgttgtttacttgtctatatgcctgcgttttgcatggtgaaa

SEQ ID NO: 405675 - DNA, 120 bp, Artificial Sequence
  ENSG00000147416_46 (sequence is synthesized)
tgttgtgtatccatccgacatagcttatgaactaagaatgttcttagtatacatcaggttggcaaatttctataagggaactttgggtttaaaatgaaactttacttatattgagagggg

SEQ ID NO: 405676 - DNA, 120 bp, Artificial Sequence
  ENSG00000147416_47 (sequence is synthesized)
agagcgcttacctaggggagagagtatttttaatgaatgcagccagtttacctcatagagccaacacatgtctaactgctgcaaccaaactaaactggccagtatggttgccgctagcca

SEQ ID NO: 405677 - DNA, 120 bp, Artificial Sequence
  ENSG00000147416_48 (sequence is synthesized)
catttggctgtttaagttcaagttaactgaaataattgaaattaagtttttcagttttgttagccacgtttcaagtgttagatagccacatttggctaatggctaccgtactgcacagca

SEQ ID NO: 405678 - DNA, 120 bp, Artificial Sequence
  ENSG00000147416_49 (sequence is synthesized)
cagacacagaacattggcagcatcacagaaaatgactctaagaacactcttctaagtaatgttacaggtagtacagagggactttttgtgggtttggttctgagagatggccgctttaaa

SEQ ID NO: 405679 - DNA, 120 bp, Artificial Sequence
  ENSG00000147416_50 (sequence is synthesized)
actcataacctaaagatgccatgcttaatgccaactgtcttcctctggtagatatcactcaccccatcccagacttgactggctacattacagaggggcagatctatgtggacagacagc

SEQ ID NO: 405680 - DNA, 120 bp, Artificial Sequence
  ENSG00000147416_51 (sequence is synthesized)
tgcacaacagacaggtactggacgggagcagtgctgggaagcttgcagacctgctcatccgttattctttagtgacttggattttgctcttaggaattgctttgcttagaaagtatcaac

SEQ ID NO: 405681 - DNA, 120 bp, Artificial Sequence
  ENSG00000147416_52 (sequence is synthesized)
ttgaattgtttttaatatggttataaaattgtcatttctattatcttaaattctggtgtcggcagagcgccagaattaagaatcttcttaacactttcctttattgtgtcttaaaacaga

SEQ ID NO: 405682 - DNA, 120 bp, Artificial Sequence
  ENSG00000147416_53 (sequence is synthesized)
gtcacttgtctccaagaacttttttgggaattctgttccataatggtatcatctaccaatcttgttattgatagaaaaaaatgacttttccatgcctctctagtagatgctgacttctaa

SEQ ID NO: 405683 - DNA, 120 bp, Artificial Sequence
  ENSG00000147416_54 (sequence is synthesized)
aatcagcttttaggaattattgttaattttttttattttgtgtataattttttgagtcagttcagaagaccattttgactcgataatgtggtagtacttatcaaacagatgttgaaagtt

SEQ ID NO: 405684 - DNA, 120 bp, Artificial Sequence
  ENSG00000147416_55 (sequence is synthesized)
gagttttttaaaatagtcttgtacagtgttatagatgacacttttttggatttgattctcgaaagaaatgctatgctataaagtgtttcttactaccttttcttgccaggaagagacagt

SEQ ID NO: 405685 - DNA, 120 bp, Artificial Sequence
  ENSG00000147416_56 (sequence is synthesized)
aggattcatctaggagacaaatgcagcggttgtctttgatttaagttgtaataatgagtttcaaatgtttttttattaccagtaaaacttgagttttgtacttaaatatagtattttttc

SEQ ID NO: 405686 - DNA, 120 bp, Artificial Sequence
  ENSG00000147416_57 (sequence is synthesized)
gcaagccatgaaagctgtcgttggagaagaagcccttacctcagatgatcttctctacttggaatttctgcagaagtttgagaggaacttcattgctcagggtgtctcactttgtcgccc

SEQ ID NO: 405687 - DNA, 76 bp, Artificial Sequence
  ENSG00000147416_58 (sequence is synthesized)
ttcattgctcagggtactgactgcaacctgcaacctctgcctccggactcaagcgattctcttgccttagcctcct

SEQ ID NO: 405688 - DNA, 120 bp, Artificial Sequence
  ENSG00000147416_59 (sequence is synthesized)
tgaagtggcaagggtgaatcctgtgagacgatgaggaatgagaccaggctgaagtgtgagatgcagtagccctcctccacctccaccagaaggcaggggtggaataagagctgaaagacg

SEQ ID NO: 405689 - DNA, 120 bp, Artificial Sequence
  ENSG00000147416_60 (sequence is synthesized)
agccaccgcgcccggcctgttctggatatttcttataaatggaatcatacagtgcttctttcagttagcataatgtttcccaggttcatccaggtcataacacataatcaggcttcattt

SEQ ID NO: 405690 - DNA, 120 bp, Artificial Sequence
  ENSG00000147416_61 (sequence is synthesized)
gcgggggattgtcaacggggccgcacccgagctacccgtgcccaccggtgggccggcggtgggagctcgggagcaggcgctggcagtcagtcggaactacctctcccagcctcgcctcag

SEQ ID NO: 405691 - DNA, 120 bp, Artificial Sequence
  ENSG00000147416_62 (sequence is synthesized)
ctatacaatttctccaatttcctttgtgacttttgtcacttctgcgtaacattaaggattccctttcctcatctacttagctaaatgctgcgtcctctataaagtttttacttttctccc

SEQ ID NO: 405692 - DNA, 120 bp, Artificial Sequence
  ENSG00000147419_0 (sequence is synthesized)
agttccgggggccaggcggccgccgcgagtctggtatcctgagcttcgtgagttgagcgctgctgctccgcggtggagtcaccgcaccgctcccgggatcatggtgttctacttcaccag

SEQ ID NO: 405693 - DNA, 120 bp, Artificial Sequence
  ENSG00000147419_1 (sequence is synthesized)
cagcagcgttaattcatctgcctacactatttacatgggaaaagataaatatgaaaatgaagatctgatcaagcatggctggcctgaagatatctggtttcatgtggacaaactctcttc

SEQ ID NO: 405694 - DNA, 120 bp, Artificial Sequence
  ENSG00000147419_2 (sequence is synthesized)
ggctcatgtataccttcgattacataagggagagaatatagaagacatcccaaaggaagtgctgatggactgtgcccaccttgtgaaggccaatagcattcaaggctgcaagatgaacaa

SEQ ID NO: 405695 - DNA, 120 bp, Artificial Sequence
  ENSG00000147419_3 (sequence is synthesized)
cgttaatgtggtatatacgccgtggtctaacctgaagaaaacagctgacatggatgtggggcagataggctttcacaggcagaaggatgtaaaaattgtgacagtggagaagaaagtaaa

SEQ ID NO: 405696 - DNA, 120 bp, Artificial Sequence
  ENSG00000147419_4 (sequence is synthesized)
tgagatcctgaaccgattagaaaagaccaaagtcgagcggttcccagacctagcagcagagaaagaatgcagagatcgtgaagagaggaatgagaaaaaagcccaaattcaggaaatgaa

SEQ ID NO: 405697 - DNA, 120 bp, Artificial Sequence
  ENSG00000147419_5 (sequence is synthesized)
aaagagagaaaaagaagaaatgaagaagaagagggaaatggatgaacttaggagctattcatcactaatgaaagttgaaaatatgtcttcaaatcaggatggcaatgattcagatgaatt

SEQ ID NO: 405698 - DNA, 120 bp, Artificial Sequence
  ENSG00000147419_6 (sequence is synthesized)
catgtaaaaggagaaaaggagaaaaggacctttgaaagatgtgaatgtagagacaattgcagaccttttggtttcatctgtgttctgaaatataaaatacaaccaaaattctaccttcat

SEQ ID NO: 405699 - DNA, 120 bp, Artificial Sequence
  ENSG00000147419_7 (sequence is synthesized)
cctacccagaaattattgattttcaagttttaaaaaaattgtaccttttttgctgacagaaaaggatcagatatgtataaaatagttgaacttgacagcatataacttaaagtgaaaatg

SEQ ID NO: 405700 - DNA, 120 bp, Artificial Sequence
  ENSG00000147419_8 (sequence is synthesized)
tttttgccagaacatgtcttggtaccttgtgaaagcaggctgcccttgttcttgagatagactttaaaatgaaccagctctgaaaagtacttctgctgctctggtctatccctgaaaaca

SEQ ID NO: 405701 - DNA, 120 bp, Artificial Sequence
  ENSG00000147419_9 (sequence is synthesized)
gatgtcttgaaacacttttcatattcttaaaataatcttcacttctgttaagaagaacatgttggtgggtaattatgcgaatgtttccctgtccctgatttctcgattaggcgtatgggt

SEQ ID NO: 405702 - DNA, 120 bp, Artificial Sequence
  ENSG00000147419_10 (sequence is synthesized)
tttgaaaaagagatttttcagaagattgtcagcttcagtattcatgttccatcgtgtcatctgggtctgttagtgtagtgaccctcagtgcagtctgtcccagcgtttacgtccttgctt

SEQ ID NO: 405703 - DNA, 120 bp, Artificial Sequence
  ENSG00000147419_11 (sequence is synthesized)
cctctgagcagaggcctccatcttagtatcaacatatttaaagaaattgatggtgttcatcaagctggggcctgtggcagttgttgcctgagcaccaagtaacccaagccacctatgtga

SEQ ID NO: 405704 - DNA, 120 bp, Artificial Sequence
  ENSG00000147419_12 (sequence is synthesized)
caacttctgggcccaggagtaatttctcagcattgagggtaaaataggatggagtgctctgttgatcatttgggagatgtaggttacctgatttgtgccttaggatgcagcgtgaagcag

SEQ ID NO: 405705 - DNA, 120 bp, Artificial Sequence
  ENSG00000147419_13 (sequence is synthesized)
aagtccatattgcaattatgattttagaaggaactaagcattttactcacacccacagcagcaagaatgacctcctgcagcagatattccacctgtaatagcactttggaactgtgggca

SEQ ID NO: 405706 - DNA, 120 bp, Artificial Sequence
  ENSG00000147419_14 (sequence is synthesized)
aaaccaaaaggctagtgtttccatttattccatgttggtgtatggggttgaactggaaaattccctgaggcaaaactcactggccaaattttgagagggtatagaaaatgactttagaga

SEQ ID NO: 405707 - DNA, 120 bp, Artificial Sequence
  ENSG00000147419_15 (sequence is synthesized)
atattcagtctgatgttccgcaattttaaaagttataataaaataccatttttttaatctggaaggacattgatatatgaattcttagaatttgctattaaaaagggtagcccccattcc

SEQ ID NO: 405708 - DNA, 120 bp, Artificial Sequence
  ENSG00000147419_16 (sequence is synthesized)
acaagctggttttgagggtgatcttgctctaaaaaacctcattcatcataggctcagtctgacaggttctgtacggggctatcatctttctcctcctctgctaaatgcctctttcttcca

SEQ ID NO: 405709 - DNA, 120 bp, Artificial Sequence
  ENSG00000147419_17 (sequence is synthesized)
gctgctcactgggtcaaagggatgtcctttctcagatgtattcttgatacatctcagatgtattcgtagctgtgctccttccatacttccaaggagtccggcttctacagaattcctctg

SEQ ID NO: 405710 - DNA, 120 bp, Artificial Sequence
  ENSG00000147419_18 (sequence is synthesized)
tacctcacactgcaacacatgtagatagcgcttttgaaaaatacatatatttttactatagtatgagaggtcctggggctcaaactttaaacatttcctaactcagcttacactggttta

SEQ ID NO: 405711 - DNA, 120 bp, Artificial Sequence
  ENSG00000147419_19 (sequence is synthesized)
aaatgtccaggtctctgctgaattctcttgttgaattcatagctctgtgttgattcctatgcccctaaccctgcagcctctttgttttatttttttccccatctctgttggtcccaggga

SEQ ID NO: 405712 - DNA, 120 bp, Artificial Sequence
  ENSG00000147419_20 (sequence is synthesized)
aagcaaggaaattttcttttgaggacttataggttgattgcccacaggtcaaactgttggcattgaactcctctcatttcttgccattggattgtttcctaaacgttggataggagaatt

SEQ ID NO: 405713 - DNA, 120 bp, Artificial Sequence
  ENSG00000147419_21 (sequence is synthesized)
cgaaattgttgctatttttatgagctgtgcccttgatcaaatctgtgctgtgggtctgagtcactttgccaatgtcgtcttcagtttcaacactctgatcagcatgcaggcgaggggcat

SEQ ID NO: 405714 - DNA, 120 bp, Artificial Sequence
  ENSG00000147419_22 (sequence is synthesized)
gtttaatttacttcactaactgctatattctatagctttagacttcatatttcttatccacctttgtctaggctcacgatctttgggcaagggagctttgtcaccgtggttgggctagaa

SEQ ID NO: 405715 - DNA, 120 bp, Artificial Sequence
  ENSG00000147419_23 (sequence is synthesized)
caaatattgagaagtttaccaacacagatgttgagaagtttattgaaaggcactgacattagcagaataagtgatggacattagttgaaccccttcagtgtctatgtgttttattgtatt

SEQ ID NO: 405716 - DNA, 120 bp, Artificial Sequence
  ENSG00000147419_24 (sequence is synthesized)
gtctttaactcgttcttgaagcacagatttcagcgagcctttcagctattcagtgccagcggttttccccactcaggaaagatggtgtgagccatacacacagcaggattagacggggag

SEQ ID NO: 405717 - DNA, 120 bp, Artificial Sequence
  ENSG00000147419_25 (sequence is synthesized)
agtttcagctgcagcttctagtttaagaccaaagcccttcctcccgctgctgcatctgtctgagaggggaagctcttgttttccaagctggaaccgtttatgaggaaaactgagcagggt

SEQ ID NO: 405718 - DNA, 120 bp, Artificial Sequence
  ENSG00000147419_26 (sequence is synthesized)
ggcaaaatggaaaaggaacaattttctagtttttcctacgcgtgatattgacgcgtgctttttctttgatttgaggtacagcatgtaaataacaaatttccatattcaaaatgatcatat

SEQ ID NO: 405719 - DNA, 120 bp, Artificial Sequence
  ENSG00000147419_27 (sequence is synthesized)
tagagtgactgagtgaccttttgattttgaagcagactaaaatctgaccagaccacaatgaaaagtataaaattagaaacttaaattccaagctaaatttcagctttgacccacctaact

SEQ ID NO: 405720 - DNA, 120 bp, Artificial Sequence
  ENSG00000147419_28 (sequence is synthesized)
ccagtgaataggtggcagctcagaaacaaggacagcactgctgctgccagagcaagctcacatccagctggcacttcgtgagagctccttcctgccgggcacgtgtgagttcagcgtggg

SEQ ID NO: 405721 - DNA, 120 bp, Artificial Sequence
  ENSG00000147419_29 (sequence is synthesized)
caagagacttttatgcacattctgtcattcaaaagggaaatgatgccaaccccagatgcagcatgtcctgaatgaatgatctgtaaaatacaataataaaagcttatagtttgagtagaa

SEQ ID NO: 405722 - DNA, 120 bp, Artificial Sequence
  ENSG00000147419_30 (sequence is synthesized)
tattggtggaaggagggacatgtaacaagctcagcttaagctcaaccttaaatcagttttttaaaaaaaggcatttatattaatgtgttggttaaaagaattgcttgtttatggcagcag

SEQ ID NO: 405723 - DNA, 120 bp, Artificial Sequence
  ENSG00000147419_31 (sequence is synthesized)
gatatgaaagtggatgaaataaaataactaattttattcatagagaaaccttcataggttatccctagtttggtttggtttgtaaagttcttctggaaaggaaaaggtgctgtgggaggt

SEQ ID NO: 405724 - DNA, 89 bp, Artificial Sequence
  ENSG00000147419_32 (sequence is synthesized)
tctacttcaccagcagcagcgttaattcatctgcctacactatttacatgggaaaagataaatatgaaagctgaggcgatgcctgagca

SEQ ID NO: 405725 - DNA, 90 bp, Artificial Sequence
  ENSG00000147419_33 (sequence is synthesized)
acatagggagaccctgtctctacaaaaaacaacaataaaagaaaatattagctgggcatagtgacacacacctgttgtccttgctactct

SEQ ID NO: 405726 - DNA, 120 bp, Artificial Sequence
  ENSG00000147419_34 (sequence is synthesized)
aagaagaaatgaagaagaagagggaaatggatgaacttaggtatgtcggagctgtggcattgagactgacctcaaagattattccctgatgattttaatcatgtattagccattaagaac

SEQ ID NO: 405727 - DNA, 120 bp, Artificial Sequence
  ENSG00000147419_35 (sequence is synthesized)
gaaggaggcggagccctgatactgaatggagtatcctatcttttctgtctgacaccattgttgttgagggctgagcatgatatatgttttctaaagggaattaaactgggttgctaaacc

SEQ ID NO: 405728 - DNA, 120 bp, Artificial Sequence
  ENSG00000147421_0 (sequence is synthesized)
gttgatatcaatatggcggttgtcagccagacaaagacagtcagtctgatgtgattgagacaagggaggtttttcagggggagactgggagataggggcctcccctcccccttctcctct

SEQ ID NO: 405729 - DNA, 120 bp, Artificial Sequence
  ENSG00000147421_1 (sequence is synthesized)
tcctgcgccggcctcaacccctccccagtcccctcccgacgggcgccccacgcggaagacacccctccccctcccgccttccctcctccctatctcagcccttcgtactgggacgttggg

SEQ ID NO: 405730 - DNA, 120 bp, Artificial Sequence
  ENSG00000147421_2 (sequence is synthesized)
gagggggctgtgccgggcggagagaactcagcgaggattctgagaatggtagataacgcagatcatctctggaaaggatattgatccgcctcatgtaaagtatgcttagttcctttccag

SEQ ID NO: 405731 - DNA, 120 bp, Artificial Sequence
  ENSG00000147421_3 (sequence is synthesized)
tggttttgctggaaaccatgtctcattatacagatgaacccagatttaccatagagcagatagatctgcttcagcgacttcggcgtactggaatgactaaacatgaaattctccatgcct

SEQ ID NO: 405732 - DNA, 120 bp, Artificial Sequence
  ENSG00000147421_4 (sequence is synthesized)
tggaaactttggaccgtcttgatcaagagcatagtgacaagtttggaagaaggtccagctatggaggaagttcatatgggaatagtactaacaatgtcccagcatcttcctctacagcta

SEQ ID NO: 405733 - DNA, 120 bp, Artificial Sequence
  ENSG00000147421_5 (sequence is synthesized)
cagcttccacacagacgcagcattcgggaatgtccccgtcacctagcaacagttatgatacttccccacagccttgcactaccaatcaaaatgggagggagaataatgagcgattatcta

SEQ ID NO: 405734 - DNA, 120 bp, Artificial Sequence
  ENSG00000147421_6 (sequence is synthesized)
catccaatggaaagatgtcaccaactcgctaccatgcaaacagcatgggtcagaggtcatacagttttgaagcctcagaagaggacctagatgtagatgataaagtggaagaattaatga

SEQ ID NO: 405735 - DNA, 120 bp, Artificial Sequence
  ENSG00000147421_7 (sequence is synthesized)
ggagggacagcagtgtgataaaagaggaaatcaaagcctttcttgccaatcggaggatttcccaagcagttgttgcacaggtaacaggtatcagtcagagccggatctctcattggctgt

SEQ ID NO: 405736 - DNA, 120 bp, Artificial Sequence
  ENSG00000147421_8 (sequence is synthesized)
tgcagcagggatcagacctgagtgaacagaagaaaagagcattttaccgatggtatcaacttgagaagacaaaccctggcgctacactaagtatgagaccagcccccattccaatagagg

SEQ ID NO: 405737 - DNA, 120 bp, Artificial Sequence
  ENSG00000147421_9 (sequence is synthesized)
accctgaatggagacaaacgcctcccccagtctctgccacatctggtactttccgactgcgacgagggagtcgatttacctggagaaaggagtgcctggctgttatggaaagttacttca

SEQ ID NO: 405738 - DNA, 120 bp, Artificial Sequence
  ENSG00000147421_10 (sequence is synthesized)
atgagaatcaatacccagatgaagcaaagagggaagaaattgcaaacgcttgcaatgcagttatacagaagccaggcaaaaagctgtcagatctggaaagagttacctccctgaaagtat

SEQ ID NO: 405739 - DNA, 120 bp, Artificial Sequence
  ENSG00000147421_11 (sequence is synthesized)
ataattggtttgctaacagaaggaaggagatcaagaggagagccaatattgaagcagcaatcctggagagtcatgggatagatgtgcagagtccaggaggccactcaaacagtgatgatg

SEQ ID NO: 405740 - DNA, 120 bp, Artificial Sequence
  ENSG00000147421_12 (sequence is synthesized)
tcgacgggaatgactactctgagcaggatgacagtacgagccatagtgaccaccaagaccccatctcattagctgtggaaatggcagcagtcaaccacactatcttggcattggcccgac

SEQ ID NO: 405741 - DNA, 120 bp, Artificial Sequence
  ENSG00000147421_13 (sequence is synthesized)
aaggagccaacgaaatcaagacagaggccctggatgatgactgatcagggaggttaaacatgacaagttaacttagtttagacgtagcaccttagcagactttcctcggtccttaacatg

SEQ ID NO: 405742 - DNA, 120 bp, Artificial Sequence
  ENSG00000147421_14 (sequence is synthesized)
tgttcttacagtataacttgcagtttcttgtatgtcaggtagctgttagggtcttgttctgtgaagatggcatggtgccctcagcctttgcatatactctctcagtattaactcccagta

SEQ ID NO: 405743 - DNA, 120 bp, Artificial Sequence
  ENSG00000147421_15 (sequence is synthesized)
ctcagttctcaaatattagactacgtgtaaaatcttgggtacctttagattcttgtaacactagtctgtactcccttttccttccccaagactgataggatgcaagctgaggtcgtggca

SEQ ID NO: 405744 - DNA, 120 bp, Artificial Sequence
  ENSG00000147421_16 (sequence is synthesized)
caggaatgacagacaccatttggggagtatccacagagtcaaaggaacactagaatccccacctcagcgtgaggataattgatttccagctgcaataagccgtgcctcattatagccaca

SEQ ID NO: 405745 - DNA, 120 bp, Artificial Sequence
  ENSG00000147421_17 (sequence is synthesized)
ctgtggctagattatacttctttgggtgctgtgctaagaatgtcaatggaaaaagccgatctcagattttgtttgaagttaacatgcctgacacagacatcctttcctctcacaagctgt

SEQ ID NO: 405746 - DNA, 120 bp, Artificial Sequence
  ENSG00000147421_18 (sequence is synthesized)
acagacatcctttcctctcacaagctgtgtgacttagtagataaaatactgccttctgcctttgggaccatgattaaaaacaaagacaaaaaccaaaagtcattaaaaaaaaaaaaaaaa

SEQ ID NO: 405747 - DNA, 120 bp, Artificial Sequence
  ENSG00000147421_19 (sequence is synthesized)
aaaaatatgagctgaatgtctaatggatgctaagtccagttttcagaaccactgtacattccacggcacagttagcagtgcctgcctggaaaagttttggaggtcatcgtggaagttgct

SEQ ID NO: 405748 - DNA, 120 bp, Artificial Sequence
  ENSG00000147421_20 (sequence is synthesized)
ttgcctcctgtcagtgtcccctttccctgctaccaaaaaagtctttcaaggatggagctaaggtcaaaaatgagtgaaaaaacttgcagtgtttgtatccattaaacggaagccccctca

SEQ ID NO: 405749 - DNA, 120 bp, Artificial Sequence
  ENSG00000147421_21 (sequence is synthesized)
ctctgagaggtcactagaggacttcatagtggggttgtgctgcttatcacagatgcagacacttgcccagataggagcagagaaaagcaggggacgtttcctactcacattgtggctgta

SEQ ID NO: 405750 - DNA, 120 bp, Artificial Sequence
  ENSG00000147421_22 (sequence is synthesized)
tgagaacacgatgggactgctttgctgttctctttactctgtccttggagaggtgtgaaaagctgtattgctacaggcaatttatttaataattggaagccatattgataatggatgtgg

SEQ ID NO: 405751 - DNA, 120 bp, Artificial Sequence
  ENSG00000147421_23 (sequence is synthesized)
taatatttgtaaagtttaatctactttaagcggcagtaactaatggaatttttttccttgatcacatatgtagcacttttgttactttttaaagatatttatatttgataaatctttttt

SEQ ID NO: 405752 - DNA, 120 bp, Artificial Sequence
  ENSG00000147421_24 (sequence is synthesized)
tcattttgagaactcaaaataccaaacagtgaacttgcattctaaagtcaccctgtgatcaccttgtcatctagtagcaaaatgatgaactattcatgcatcaaagaaaattacatctgc

SEQ ID NO: 405753 - DNA, 120 bp, Artificial Sequence
  ENSG00000147421_25 (sequence is synthesized)
tggccttgtatgaaaatgatctcttggcatcccgattaaatgacacactgtcactgtgggtaagaggaaagagccttcaatgtagcagcacagggtgcgcctgaaagaggcacaactgct

SEQ ID NO: 405754 - DNA, 120 bp, Artificial Sequence
  ENSG00000147421_26 (sequence is synthesized)
gtggattttctgcctcgctccatctctcctatgtataatgaagccttgtttaaaggggcatgtggggctggatgttaagcacggcttctttttgtccgttacctgaaaacaatttctaag

SEQ ID NO: 405755 - DNA, 120 bp, Artificial Sequence
  ENSG00000147421_27 (sequence is synthesized)
ataaaaggaaggtgccatttccttacctcttcacccatcctcctccaccaaatgtattcaacttaaaactgtgagagagagagactgaatgaccttcctcagttttccctttctcattca

SEQ ID NO: 405756 - DNA, 120 bp, Artificial Sequence
  ENSG00000147421_28 (sequence is synthesized)
ggagatactgaatatccgccagtttgtagttggtttccttccacttaaggcacacgctgactgcatcatttccttatctgttaatcctgcttatgtgagtgtgaggaaagtctttgagag

SEQ ID NO: 405757 - DNA, 120 bp, Artificial Sequence
  ENSG00000147421_29 (sequence is synthesized)
ggcatgaaagtgccaccttatatatgtctgtgactttaaagagctatatgcagggcctggtcccacttttgtccatggatttcagggggaaaaaatatatgtacttttttcagcttccaa

SEQ ID NO: 405758 - DNA, 120 bp, Artificial Sequence
  ENSG00000147421_30 (sequence is synthesized)
gtgccgggcggagagaactcagcgaggattctgaggtgagtcgagcggttttgaagccggactacctcaagtctctttcctcacttctttctcttcacttaaaacaatttttttggaggg

SEQ ID NO: 405759 - DNA, 120 bp, Artificial Sequence
  ENSG00000147421_31 (sequence is synthesized)
gttttggggaggaagtgagcggacgctggggatgggtctcgtaagcggccggattgagaggagggaggaagcagggggcttccgagtgggtgacccagacgcgggctgtggggtggggca

SEQ ID NO: 405760 - DNA, 120 bp, Artificial Sequence
  ENSG00000147421_32 (sequence is synthesized)
gttcgtggggtccggtcctggaaaggcgtcgactgccccccaactcttctggtttcctctacgatgagcggaaggtttgaatcctggaggtggggtctccggtgtggagttctggaaact

SEQ ID NO: 405761 - DNA, 120 bp, Artificial Sequence
  ENSG00000147421_33 (sequence is synthesized)
agatcaagaggagagccaatattgcagcaatcctggagagtcatgggatagatgtgcagagtccaggaggccactcaaacagtgatgatgtcgacgggaatgactactctgagcaggata

SEQ ID NO: 405762 - DNA, 120 bp, Artificial Sequence
  ENSG00000147421_34 (sequence is synthesized)
agcagagaaggtagaagaagagaggaggatctgatccaaacaagcaagttacaccattcacgacacacactcagtgtttgagaaatactaggggcagctggaccccatgcctaaacacgt

SEQ ID NO: 405763 - DNA, 120 bp, Artificial Sequence
  ENSG00000147421_35 (sequence is synthesized)
accgacgcagggcacgatggaaggccccactcactctggccccactgcagtgggaaccctcctgcccaaaggagtggttcttccagagtctctggcacactgacacatgcatcctctcat

SEQ ID NO: 405764 - DNA, 120 bp, Artificial Sequence
  ENSG00000147421_36 (sequence is synthesized)
gagaactgtagagatggtgtgatgtggagatggattttttgcatcctcaagtcggtagataggtgggaaaggaaaagtgtttcttaatattttattccggaaccgtgttttggttacact

SEQ ID NO: 405765 - DNA, 120 bp, Artificial Sequence
  ENSG00000147421_37 (sequence is synthesized)
tgggacgttggggagggggctgtgccgggcggagagaactcagcgaggattctgagagtttcgctcttgtccatgctggagtgcaatggtgtaatctcagctcaccacaacctccgcctc

SEQ ID NO: 405766 - DNA, 120 bp, Artificial Sequence
  ENSG00000147421_38 (sequence is synthesized)
gacacactgtcactgtggactgactcaaactgttaagacagctgcagtttctaaagaaatacaaagattgccgtggatgcactcaaaggtttcattgttttaacacctttaagggagaaa

SEQ ID NO: 405767 - DNA, 120 bp, Artificial Sequence
  ENSG00000147421_39 (sequence is synthesized)
gccctggatgatgactgatcagggagctgcagtatctctcttcctgaggtccagaggccattaaagaataaacatggggcttagaggtgtcttggccaccaaacacaggaagggacacag

SEQ ID NO: 405768 - DNA, 120 bp, Artificial Sequence
  ENSG00000147421_40 (sequence is synthesized)
gatctctctgaactttggaacagaccctcatattctggggccagaagtttgcccagaaagcagcaggtggctctgcctggctgtagagcccagctcattggctgtccctgggcttcgtct

SEQ ID NO: 405769 - DNA, 120 bp, Artificial Sequence
  ENSG00000147421_41 (sequence is synthesized)
ctggagcttctcagaacccactttgccggtgctaaaacacaagagggggtgaaagtggctgccagtaatggccagaaaccaaccaccagaggccaggctgaaagacaagctccgggtgtc

SEQ ID NO: 405770 - DNA, 120 bp, Artificial Sequence
  ENSG00000147421_42 (sequence is synthesized)
caggggctgacgggccaaccatgtggcaggtcccaggccccacccactgcgccatccgcctctgagctccacagtggtcccactaatgggaacctcctctagggagagtgatactgcacc

SEQ ID NO: 405771 - DNA, 120 bp, Artificial Sequence
  ENSG00000147421_43 (sequence is synthesized)
ttcacccgtaggactcatatttataacaatgtgtaatggctgtagcaaaaagcccttgtttctagatgtaaatggtcaaagaaacaagcgctctattgttttgaataaaatagttcaaat

SEQ ID NO: 405772 - DNA, 120 bp, Artificial Sequence
  ENSG00000147421_44 (sequence is synthesized)
atgtctgtattcttagattgtttttaagtagtatgctgcgtttcagctacttagctataagaactgtaacttcctctagctataagaactgtaacttcctcctcccacctttggagatga

SEQ ID NO: 405773 - DNA, 120 bp, Artificial Sequence
  ENSG00000147421_45 (sequence is synthesized)
caactcttctggtttcctctacgatgagcggaaggtttgaatcctggaggtggggtctccggtgtggagttctggaaactgtgaggtgatttgcagaatggtagataacgcagatcatct

SEQ ID NO: 405774 - DNA, 120 bp, Artificial Sequence
  ENSG00000147421_46 (sequence is synthesized)
tgcagaaacttgaactctccctggaacattttgcccccgtatcatcaaggccctaacaaacctgctttctggtttcttcacccactgtggattaatagccgaaaaacaaaaggaaaggca

SEQ ID NO: 405775 - DNA, 120 bp, Artificial Sequence
  ENSG00000147421_47 (sequence is synthesized)
ctgacgtacatcctgcaatgccagcttccttcacagctttattgtttaacacattgagctgcgcggggaggacagcttcacactagttctaggtaagacgcctgccgctccccttgcaca

SEQ ID NO: 405776 - DNA, 120 bp, Artificial Sequence
  ENSG00000147421_48 (sequence is synthesized)
gctgcctgcagcaggagagctcgacaccttcctcccctttctcccgtagccgtttctggcagtgacatgtgtcctgttgtaatggagaattctttttttctttttttacaaaaatgcatt

SEQ ID NO: 405777 - DNA, 120 bp, Artificial Sequence
  ENSG00000147421_49 (sequence is synthesized)
ttttatctgtaagatgtaattgtaagttctgtctagttttctcagttcagagagggaccatgaattctaataatctatttgtaagagcagcaatctggaatttaatagctcactagtatg

SEQ ID NO: 405778 - DNA, 120 bp, Artificial Sequence
  ENSG00000147421_50 (sequence is synthesized)
attgggaaagcagaatgaaatcttaagaaaactaagatgacaaaaaaatttatgtctagagttggaagaagtaggcaagatctattcaagatactaacaggcgctacactaagtatgaga

SEQ ID NO: 405779 - DNA, 120 bp, Artificial Sequence
  ENSG00000147421_51 (sequence is synthesized)
tgcctgagcagggggtatagtgggacagcttagttccttgggtgtggctgatggggtgggggaggggaaacagtcactgtccctccactctgctcctgtgtctagttagatttcatgtaa

SEQ ID NO: 405780 - DNA, 120 bp, Artificial Sequence
  ENSG00000147421_52 (sequence is synthesized)
tttgaaaggaatgtggtaagattcagttgtcctgttgaatttgtgagagatcgttattcacccacatggatttattgtcatacaacaggatacttggcaagtacgcaatggggaggagga

SEQ ID NO: 405781 - DNA, 120 bp, Artificial Sequence
  ENSG00000147432_0 (sequence is synthesized)
gagaagcggcacactcggcgagaggggttgagattgttttattccactccaggtgttgctgtcctcttgggttccacttcggattttgaacccctgtattttcttttcaaaacccccttt

SEQ ID NO: 405782 - DNA, 120 bp, Artificial Sequence
  ENSG00000147432_1 (sequence is synthesized)
tccagtggaaatgctctgttgttaaaaaggaagaaactgtctttctgaaactgacatcacgatgctcccagattttatgctggttctcatcgtccttggcatcccttcctcagccaccac

SEQ ID NO: 405783 - DNA, 120 bp, Artificial Sequence
  ENSG00000147432_2 (sequence is synthesized)
aggtttcaactcaatcgccgaaaatgaagatgccctcctcagacatttgttccaaggttatcagaaatgggtccgccctgtattacattctaatgacaccataaaagtatattttggatt

SEQ ID NO: 405784 - DNA, 120 bp, Artificial Sequence
  ENSG00000147432_3 (sequence is synthesized)
gaaaatatcccagcttgtagatgtggatgaaaagaatcagctgatgacaaccaatgtgtggctcaaacaggaatggacagaccacaagttacgctggaatcctgatgattatggtgggat

SEQ ID NO: 405785 - DNA, 120 bp, Artificial Sequence
  ENSG00000147432_4 (sequence is synthesized)
ccattccattaaagttccatcagaatctctgtggcttcctgacatagttctctttgaaaatgctgacggccgcttcgaaggctccctgatgaccaaggtcatcgtgaaatcaaacggaac

SEQ ID NO: 405786 - DNA, 120 bp, Artificial Sequence
  ENSG00000147432_5 (sequence is synthesized)
tgttgtctggacccctcccgccagctacaaaagctcctgcaccatggacgtcacgtttttcccgttcgaccgacagaactgctccatgaagtttggatcctggacttatgatggcaccat

SEQ ID NO: 405787 - DNA, 120 bp, Artificial Sequence
  ENSG00000147432_6 (sequence is synthesized)
ggttgacctcattttgatcaatgaaaatgtcgacagaaaagacttcttcgataacggagaatgggaaatactgaacgcaaaggggatgaaggggaacagaagggacggcgtgtactccta

SEQ ID NO: 405788 - DNA, 120 bp, Artificial Sequence
  ENSG00000147432_7 (sequence is synthesized)
tccctttatcacgtattccttcgtcctgagacgcctgcctttattctataccctctttctcatcatcccctgcctggggctgtctttcctaacagttcttgtgttctatttaccttcgga

SEQ ID NO: 405789 - DNA, 120 bp, Artificial Sequence
  ENSG00000147432_8 (sequence is synthesized)
tgaaggagaaaaactttcattatccacatcggtcttggtttctctgacagttttccttttagtgattgaagaaatcatcccatcgtcttccaaagtcattcctctcattggagagtacct

SEQ ID NO: 405790 - DNA, 120 bp, Artificial Sequence
  ENSG00000147432_9 (sequence is synthesized)
agatcttcttccacgtaccaccccatggccccctgggttaagaggctctttctgcagaaacttccaaaattactttgcatgaaagatcatgtggatcgctactcatccccagagaaagag

SEQ ID NO: 405791 - DNA, 120 bp, Artificial Sequence
  ENSG00000147432_10 (sequence is synthesized)
gagagtcaaccagtagtgaaaggcaaagtcctcgaaaaaaagaaacagaaacagcttagtgatggagaaaaagttctagttgcttttttggaaaaagctgctgattccattagatacatt

SEQ ID NO: 405792 - DNA, 120 bp, Artificial Sequence
  ENSG00000147432_11 (sequence is synthesized)
tcgagacatgtgaagaaagaacattttatcagccaggtagtacaagactggaaatttgtagctcaagttcttgaccgaatcttcctgtggctctttctgatagtgtcagtaacaggctcg

SEQ ID NO: 405793 - DNA, 120 bp, Artificial Sequence
  ENSG00000147432_12 (sequence is synthesized)
gttctgatttttacccctgctttgaagatgtggctacatagttaccattaggaatttaaaagacataagactaaattacaccttagacctgacatctggctatcacacagacagaatcca

SEQ ID NO: 405794 - DNA, 120 bp, Artificial Sequence
  ENSG00000147432_13 (sequence is synthesized)
aatgcatgtgcttgttctacgaaccccgaatgcgttgtctttgtggaaatggaacatctcctcatgggagaaactctggtaaatgtgctcatttgtggttgccatgagagtgagctgctt

SEQ ID NO: 405795 - DNA, 120 bp, Artificial Sequence
  ENSG00000147432_14 (sequence is synthesized)
ttaaagaaagtggagcctcctcagacccctgccttggctttcccagacattcagggagggatcataggtccaggcttgagctcacatgtggccagagtgcacaaaaagctgttgctactt

SEQ ID NO: 405796 - DNA, 120 bp, Artificial Sequence
  ENSG00000147432_15 (sequence is synthesized)
ggtggaggaacacctcctagaagcagcaggcctcggtggtgggggaggggggattcacctggaattaaggaagtctcggtgtcgagctatctgtgtgggcagagcctggatctcccaccc

SEQ ID NO: 405797 - DNA, 120 bp, Artificial Sequence
  ENSG00000147432_16 (sequence is synthesized)
tgcactggcctccttggtggttttgtctgagctgcaaactggggccgtgttatgcttgttagcaatgggccaggcaaatctcaacaagggtttggggattacactggcaggatagctggc

SEQ ID NO: 405798 - DNA, 120 bp, Artificial Sequence
  ENSG00000147432_17 (sequence is synthesized)
actgcacacttaacaataacacagattccaagttgcctggcctaccgaagcaggtgttattcatggtttattcccagcatgataaggctttcagatggtgaaactggagcccactgtgag

SEQ ID NO: 405799 - DNA, 120 bp, Artificial Sequence
  ENSG00000147432_18 (sequence is synthesized)
ctgtgacttcctttaaggtcatgcataccaaaataactcacaatagaaacaaagccctttgctaccagaagtggattcattaatacccattatcttttcctagtaaactagtgtacagaa

SEQ ID NO: 405800 - DNA, 120 bp, Artificial Sequence
  ENSG00000147432_19 (sequence is synthesized)
aatcccaacactttgggaggccaagacggaaagtgcaccttctgacagtggtaacacaggtggagatgtatgctgtgcgtgaaagagcagagctgcttgctgcccctggatcttggtgag

SEQ ID NO: 405801 - DNA, 120 bp, Artificial Sequence
  ENSG00000147434_0 (sequence is synthesized)
agaaagatctcagccactcacaggtgttcatcctcccggggtcctgtctgccccagcatttcttttctgcttttcttcccctttcttgcatgaagagacatctaggctgtcaggaaatgt

SEQ ID NO: 405802 - DNA, 120 bp, Artificial Sequence
  ENSG00000147434_1 (sequence is synthesized)
gatgactcatctgacatcagatcgaatcttttttattcgcccttcatgtctgcctcagtctctgatcctggtaataaccgtgtgaagtcccggggatgttttgatttctgagaagacaca

SEQ ID NO: 405803 - DNA, 120 bp, Artificial Sequence
  ENSG00000147434_2 (sequence is synthesized)
cacggattgcagtgggcttctgatgatgtcaaggttggatgcatgtggctgactgatagctctttgttttccacaatcctttgcctaggaaaaaggaatccaagtgtgttttaaccatgc

SEQ ID NO: 405804 - DNA, 120 bp, Artificial Sequence
  ENSG00000147434_3 (sequence is synthesized)
tgaccagcaaggggcagggattccttcatgggggcttgtgtctctggctgtgtgtgttcacacctttctttaaaggctgtgtgggctgtgcaactgaggagaggctcttccacaaactgt

SEQ ID NO: 405805 - DNA, 120 bp, Artificial Sequence
  ENSG00000147434_4 (sequence is synthesized)
tttctcattacaaccagttcatcaggcctgtggaaaacgtttccgaccctgtcacggtacactttgaagtggccatcacccagctggccaacgtggatgaagtaaaccagatcatggaaa

SEQ ID NO: 405806 - DNA, 120 bp, Artificial Sequence
  ENSG00000147434_5 (sequence is synthesized)
ccaatttgtggctgcgtcacatctggaatgattataaattgcgctgggatccaatggaatatgatggcattgagactcttcgcgttcctgcagataagatttggaagcccgacattgttc

SEQ ID NO: 405807 - DNA, 120 bp, Artificial Sequence
  ENSG00000147434_6 (sequence is synthesized)
tctataacaatgctgttggtgacttccaagtagaaggcaaaacaaaagctcttcttaaatacaatggcatgataacctggactccaccagctatttttaagagttcctgccctatggata

SEQ ID NO: 405808 - DNA, 120 bp, Artificial Sequence
  ENSG00000147434_7 (sequence is synthesized)
tcacctttttcccttttgatcatcaaaactgttccctaaaatttggttcctggacgtatgacaaagctgaaattgatcttctaatcattggatcaaaagtggatatgaatgatttttggg

SEQ ID NO: 405809 - DNA, 120 bp, Artificial Sequence
  ENSG00000147434_8 (sequence is synthesized)
aaaacagtgaatgggaaatcattgatgcctctggctacaaacatgacatcaaatacaactgttgtgaagagatatacacagatataacctattctttctacattagaagattgccgatgt

SEQ ID NO: 405810 - DNA, 120 bp, Artificial Sequence
  ENSG00000147434_9 (sequence is synthesized)
tttacacgattaatctgatcatcccttgtctctttatttcatttctaaccgtgttggtcttttaccttccttcggactgtggtgaaaaagtgacgctttgtatttcagtcctgctttctc

SEQ ID NO: 405811 - DNA, 120 bp, Artificial Sequence
  ENSG00000147434_10 (sequence is synthesized)
tgactgtgtttttgctggtcatcacagaaaccatcccatccacatctctggtggtcccactggtgggtgagtacctgctgttcaccatgatctttgtcacactgtccatcgtggtgactg

SEQ ID NO: 405812 - DNA, 120 bp, Artificial Sequence
  ENSG00000147434_11 (sequence is synthesized)
tgtttgtgttgaacatacactaccgcaccccaaccacgcacacaatgcccaggtgggtgaagacagttttcctgaagctgctgccccaggtcctgctgatgaggtggcctctggacaaga

SEQ ID NO: 405813 - DNA, 120 bp, Artificial Sequence
  ENSG00000147434_12 (sequence is synthesized)
caaggggcacaggctctgatgcagtgcccagaggccttgccaggaggcctgccaaaggcaagcttgcaagccatggggaacccagacatcttaaagaatgcttccattgtcacaaatcaa

SEQ ID NO: 405814 - DNA, 120 bp, Artificial Sequence
  ENSG00000147434_13 (sequence is synthesized)
atgagcttgccacaagcaagagaagattaagtcatcagccattacagtgggtggtggaaaattcggagcactcgcctgaagttgaagatgtgattaacagtgttcagttcatagcagaaa

SEQ ID NO: 405815 - DNA, 120 bp, Artificial Sequence
  ENSG00000147434_14 (sequence is synthesized)
acatgaagagccacaatgaaaccaaggaggtagaagatgactggaaatacgtggccatggtggtggacagagtatttctttgggtatttataattgtctgtgtatttggaactgcagggc

SEQ ID NO: 405816 - DNA, 120 bp, Artificial Sequence
  ENSG00000147434_15 (sequence is synthesized)
tatttctacagccactacttgggaacacaggaaaatcttaaaatgtattttcttttatgttcagaaatttacagacaccatatttgttctgcattccctgccacaaggaaaggaaagcaa

SEQ ID NO: 405817 - DNA, 120 bp, Artificial Sequence
  ENSG00000147434_16 (sequence is synthesized)
aggcttcccacccaagtcccccatctgctaaaactgatggctacatggaaaaagaggactttcttgcacattaggaagcagaatatcctccagtgtagcacagggggagaagtgagaagt

SEQ ID NO: 405818 - DNA, 120 bp, Artificial Sequence
  ENSG00000147434_17 (sequence is synthesized)
gttatgacattagtgccctgattgggcagcacccacggctacagtatcaggtcaggtttctcgtgtctgtgtgtttggcttctaaagacaagaatgacttacaatacagcctaattatgt

SEQ ID NO: 405819 - DNA, 120 bp, Artificial Sequence
  ENSG00000147434_18 (sequence is synthesized)
aattaacatcaagccacactaaaaagttctgctgtacctccagtggatgctgtttctcagtattatgacatgtgacaggtgaactctgggaattggaccatgcaacatttgtgaactgtt

SEQ ID NO: 405820 - DNA, 120 bp, Artificial Sequence
  ENSG00000147434_19 (sequence is synthesized)
tgcaacactttgtgaactattgcatccttgatttcttgtgcatgtctctgtaatgtaactcaccctcctcagcattatttgatacactgattgttagttttaaaaaaaaaaaaaaaaaaa

SEQ ID NO: 405821 - DNA, 120 bp, Artificial Sequence
  ENSG00000147437_0 (sequence is synthesized)
gtcctatatttgttgtatagcctcctttgtggaagttatgtatgcatttgacttcacttaatctaagacatctattttccttgaactcttgataggtctgctggtttcctcaagggaatc

SEQ ID NO: 405822 - DNA, 120 bp, Artificial Sequence
  ENSG00000147437_1 (sequence is synthesized)
caatctagctggattttaatctctttgaattgtgtcctcagctataaaagttttagctgaggttttaatggctgcacttaagtaaatctaacagatataccagggggtgttccaattaca

SEQ ID NO: 405823 - DNA, 120 bp, Artificial Sequence
  ENSG00000147437_2 (sequence is synthesized)
tacaccattaaagggctttatgtgaggatttttaaaaattaccattaaaaaaaaaaaagcatagtccatttgcagtataatttaccagcaggaaagatttcaatgtcctggaaaaattcc

SEQ ID NO: 405824 - DNA, 120 bp, Artificial Sequence
  ENSG00000147437_3 (sequence is synthesized)
ctataaaaaggaagataggaaaacagaaaagtcacagtactcaacctacttcaagggaagattgggatctttttggctctctgcctctaaacaggtaaaaggctttgtattatttctagc

SEQ ID NO: 405825 - DNA, 120 bp, Artificial Sequence
  ENSG00000147437_4 (sequence is synthesized)
acgagtttttcttctttagattgcatgctattgtatgtctacagggcatttgacagcccaagggctaaatccaggtgtgacggtatctaatgatgtcctgtccttcactgtccttgccat

SEQ ID NO: 405826 - DNA, 120 bp, Artificial Sequence
  ENSG00000147437_5 (sequence is synthesized)
caccagccacagagatccaggctttggggactcccacagcttatcgaccagtgtttgatttagtttttagcctctttcccatcaaatgaaaattaacttggagacacatttcattagaaa

SEQ ID NO: 405827 - DNA, 120 bp, Artificial Sequence
  ENSG00000147437_6 (sequence is synthesized)
attagaggcccccttggctaggaaggcatctggtctgggactaactactttgaacagtgttgagtcctctctcccacagatggttcagccagcagtaatgctaggaagactgaaggataa

SEQ ID NO: 405828 - DNA, 120 bp, Artificial Sequence
  ENSG00000147437_7 (sequence is synthesized)
ctacttttcttaacagatgactcagttctctttatctcaggaatgaaagagttgaagaccaatccacaacaggggaaatgttaaggcaaaatgatgaacttgataagggatgaattatgg

SEQ ID NO: 405829 - DNA, 120 bp, Artificial Sequence
  ENSG00000147437_8 (sequence is synthesized)
ggtttggataaccaaacaataaaaataaaagtatagactattttagtactaaaaaggtcctgaacatgtgagcttaagtactcattttgtccccagtggctaagaaactaaaggcaagcc

SEQ ID NO: 405830 - DNA, 120 bp, Artificial Sequence
  ENSG00000147437_9 (sequence is synthesized)
agcaagtgtctctgagtttcagtgtctgtatgtaaaaactgactctgacttccatcttctgcagggttagtgatacagatgctagctttttcactaaagaggtcttttagtttatactca

SEQ ID NO: 405831 - DNA, 120 bp, Artificial Sequence
  ENSG00000147437_10 (sequence is synthesized)
accttgtctggatctaatttgattgtgcattcatgtgccttagaatgaagccaattcaaaaactcctagctggccttattctactgacttggtgcgtggaaggctgctccagccagcact

SEQ ID NO: 405832 - DNA, 120 bp, Artificial Sequence
  ENSG00000147437_11 (sequence is synthesized)
ggtcctatggactgcgccctggaggaaagagagatgccgaaaatttgattgattctttccaagagatagtcaaagaggttggtcaactggcagaaacccaacgcttcgaatgcaccacgc

SEQ ID NO: 405833 - DNA, 120 bp, Artificial Sequence
  ENSG00000147437_12 (sequence is synthesized)
accagccacgttctcccctccgagacctgaaaggagctctggaaagtctgattgaagaggaaactgggcagaagaagatttaaatccattgggccagaaggaatgaccattactaacatg

SEQ ID NO: 405834 - DNA, 120 bp, Artificial Sequence
  ENSG00000147437_13 (sequence is synthesized)
acttaagtataattctgacattgaaaatttataacccattaaatacctgtaaatggtatgaatttcagaaatccttacaccaagttgcacatattccataataaagtgctgtgttgtgaa

SEQ ID NO: 405835 - DNA, 120 bp, Artificial Sequence
  ENSG00000147439_0 (sequence is synthesized)
gaatccggaagtgaccctagagaaacgagttgtggctgaggaccccggcggcagacgcaggttcgggaccatgagctggattccttttaagattgggcagcccaagaaacagattgtgcc

SEQ ID NO: 405836 - DNA, 120 bp, Artificial Sequence
  ENSG00000147439_1 (sequence is synthesized)
caaaacagtggagagagactttgaaagggagtatggaaaacttcagcagctggaagagcagacccggaggctgcagaaagacatgaagaagagcaccgacgcagacctggccatgtcaaa

SEQ ID NO: 405837 - DNA, 120 bp, Artificial Sequence
  ENSG00000147439_2 (sequence is synthesized)
atctgccgtgaagatatccttggacttactctccaatcccctctgtgagcaagaccaggaccttctgaacatggtgacggccctggacacggccatgaagcggatggatgccttcaatca

SEQ ID NO: 405838 - DNA, 120 bp, Artificial Sequence
  ENSG00000147439_3 (sequence is synthesized)
ggaaaaggtgaaccagatccagaagactgtgatcgagcccttaaaaaagttcggcagtgtcttcccgagcctcaacatggctgtgaagaggcgggaacaggccttgcaggactacaggag

SEQ ID NO: 405839 - DNA, 120 bp, Artificial Sequence
  ENSG00000147439_4 (sequence is synthesized)
gctgcaggccaaggtggagaagtatgaggaaaaggagaagacggggccagtgctggccaagctccaccaggcacgagaggagctgcggcctgtgcgggaggactttgaagccaagaacag

SEQ ID NO: 405840 - DNA, 120 bp, Artificial Sequence
  ENSG00000147439_5 (sequence is synthesized)
gcagctgctggaggagatgccgcgcttctacggcagccgcctcgactacttccagcccagctttgagtccctcatccgagctcaggttgtgtactactcggaaatgcacaagatctttgg

SEQ ID NO: 405841 - DNA, 120 bp, Artificial Sequence
  ENSG00000147439_6 (sequence is synthesized)
agacctgtcccatcagcttgaccagccaggccactccgatgagcagcgggagcgggagaacgaggccaaactcagtgagctccgggccctctccattgtggccgatgactgaatccccgt

SEQ ID NO: 405842 - DNA, 120 bp, Artificial Sequence
  ENSG00000147439_7 (sequence is synthesized)
ttcatccttgcccttctcagggctagctgctcctctcacaggctggggacagaggtggccctggttcacttgccggccctttgcaatgaatgactcttcctgagcctggcaccaggagcc

SEQ ID NO: 405843 - DNA, 120 bp, Artificial Sequence
  ENSG00000147439_8 (sequence is synthesized)
ctaggcaggccgccgtctccccactcacagccccagcaggtaagcagtgtagacaaacccttggggcttttttatttggagaaccgtccagcatgcatcctggcccacggcctgagcaag

SEQ ID NO: 405844 - DNA, 120 bp, Artificial Sequence
  ENSG00000147439_9 (sequence is synthesized)
ctgcagcccttctgaggccatgggcttcgttggctaagttgggggtcttagccttgcatgcgttgtgggcatcaaatctacctccaaaagacccatcctggggagccctctggcccctcg

SEQ ID NO: 405845 - DNA, 120 bp, Artificial Sequence
  ENSG00000147439_10 (sequence is synthesized)
ttgccttttcacttcaaaacctcttttttctgggagaggccctgaaccctgtgcgggagagctggtcctccagccctggcaggccctcagccagcttcccagcaagacaaagggcaccct

SEQ ID NO: 405846 - DNA, 120 bp, Artificial Sequence
  ENSG00000147439_11 (sequence is synthesized)
tgtggctttgggacctaagtggttggggttcccgaggtcactgaggactggtacctcgggaacgcaagctgtcagtggaactgtcccacaagaattcacaggtctcaaagcaggaacagt

SEQ ID NO: 405847 - DNA, 120 bp, Artificial Sequence
  ENSG00000147439_12 (sequence is synthesized)
gggtttgtgtctcacctgagtatctggaattttattttttcaagtaaaattttcaatgaaacgtccacatagtattgtgctgtaacttaggcgagcagaggaaaccccttcctgggcctg

SEQ ID NO: 405848 - DNA, 120 bp, Artificial Sequence
  ENSG00000147439_13 (sequence is synthesized)
ctgccctccacggagcagcagcaccctccagcaggcagcccagcatgccaggggtgtgtgcgcacctccccggccctggcccaccttctggagcgaactgcaccgtggtccagcagaggc

SEQ ID NO: 405849 - DNA, 120 bp, Artificial Sequence
  ENSG00000147439_14 (sequence is synthesized)
aggcgctgggtgggagggcacgcgggcaagcctaggagagtaggaagagctgtggaggacacactctcagtttgtttttgactttggtttatttaaaaaacaagccaaaaaaaaaaaaaa

SEQ ID NO: 405850 - DNA, 120 bp, Artificial Sequence
  ENSG00000147439_15 (sequence is synthesized)
ccaactcttctggtcctgggtcacctccgaatggccacagagtcatgagctccctgggctgcgcagcctgatcctggacactgcagggctctggcttgcctggtagacgccccctgccat

SEQ ID NO: 405851 - DNA, 120 bp, Artificial Sequence
  ENSG00000147439_16 (sequence is synthesized)
tgcaccgagggccagccctccagcagcagcagcgagagcctcaggagagcactgctcctggtcactagaggacacatgatccacaaagacgaggccggtgtggacctgcagcgttgcatc

SEQ ID NO: 405852 - DNA, 120 bp, Artificial Sequence
  ENSG00000147439_17 (sequence is synthesized)
gtccactgctgctctctctgagggccactcctctgagtctcccacgcggtcccttctagtcacagtggaggtcctcagggcattttcctgaagcagctggttggaactttggcggttcca

SEQ ID NO: 405853 - DNA, 120 bp, Artificial Sequence
  ENSG00000147439_18 (sequence is synthesized)
ggcagcattgctgggggctgttgactgcctcttgggccccagcctccccctcgcccgcccggctgccattagtcatggagaagttgtgtactactcggaaatgcacaagatctttggaga

SEQ ID NO: 405854 - DNA, 120 bp, Artificial Sequence
  ENSG00000147439_19 (sequence is synthesized)
ggcctcggggcacttatgggagaggcaggtcagcagccacttggggactgaagaggatttctagctgcgtgtccccagattcccatggggcctgacgggaaactcagtggggacgtcagc

SEQ ID NO: 405855 - DNA, 120 bp, Artificial Sequence
  ENSG00000147439_20 (sequence is synthesized)
tctgtgacctgtggcctaagcgtccatgctcctgggggctccagagtacccacatggcccaggcgagctcagggtacccctgccaccacccccttcccaccccacccagcaaccgccgct

SEQ ID NO: 405856 - DNA, 120 bp, Artificial Sequence
  ENSG00000147439_21 (sequence is synthesized)
tgagcaccctggaagctgagggcagctcaggtcaccaggctgctggaactgttccctggcaatggccatgtgagagtcattcactcatagcctttgggtgtagtggcacttcagtcagcg

SEQ ID NO: 405857 - DNA, 120 bp, Artificial Sequence
  ENSG00000147439_22 (sequence is synthesized)
ggaaaagtccccgtggagaagatccctttctcctcctccttggcaggccctccagagcacctgggcttcgctcaggtagggggaaggaaggggaccccaagcagcccgtcccctgccttg

SEQ ID NO: 405858 - DNA, 120 bp, Artificial Sequence
  ENSG00000147439_23 (sequence is synthesized)
aagtgaccctagagaaacgagttgtggctgaggaccccggcggcagacgcaggttcgggaccatgagctggattccttttaagattgggcagcccaagaaacagattgtgcccaaaacac

SEQ ID NO: 405859 - DNA, 120 bp, Artificial Sequence
  ENSG00000147439_24 (sequence is synthesized)
ggcctttgcataagaatcaaagctttgaatcaacacatcttggggctgggaagacagcaacctgggccttcttcctgcttatgcggatctagaacctcacatagactgaggcttagaggg

SEQ ID NO: 405860 - DNA, 120 bp, Artificial Sequence
  ENSG00000147439_25 (sequence is synthesized)
ctaacacaaggatcagggcgaggaccagggtagctgccggtggtcccttggccatttggggctgagggagaggtggcctggtagcctctcaggcccagctgcacctgctgcctgaacacg

SEQ ID NO: 405861 - DNA, 120 bp, Artificial Sequence
  ENSG00000147439_26 (sequence is synthesized)
tgcctctcagctgcccaggaagggggcagggctccccagcagctgcagctccaccacgcagccgccctgggcaaagcatcaagtctagctcctcccagcagtctcaccccagcccacgcc

SEQ ID NO: 405862 - DNA, 120 bp, Artificial Sequence
  ENSG00000147439_27 (sequence is synthesized)
atgggcgactatgcatcctggtggtgtctgcttcccaccctcagttccgtagtgctgaggggcccgcgttctctgtgcacagtcctgggaggcccatggcttctgcccggcaagtcggtc

SEQ ID NO: 405863 - DNA, 120 bp, Artificial Sequence
  ENSG00000147439_28 (sequence is synthesized)
agatgctggtttgattactatgtctaagggcacgggtgagcattcagggtgctttggtggcttcacccacttagcaccttgttaagacagggagccccttatggacactgttgaggtaga

SEQ ID NO: 405864 - DNA, 120 bp, Artificial Sequence
  ENSG00000147439_29 (sequence is synthesized)
ggattcctgtcttggggataagccctttgtttcatcaaaatctactccctgggtctgacttagtttgggggcatttaatgctttggtaaagttaatatcctcttactccctggcaaaact

SEQ ID NO: 405865 - DNA, 120 bp, Artificial Sequence
  ENSG00000147439_30 (sequence is synthesized)
aagttaatatcctcttactccctggcaaaactgttcattactcttacctcaaatgtacacttgatttgctgaggctttttaaaaacaggccggccacggtggcttacgcctgtaatccca

SEQ ID NO: 405866 - DNA, 89 bp, Artificial Sequence
  ENSG00000147439_31 (sequence is synthesized)
gaaaattagctgggcgtagtggcacacgtctgtaatcctagctcttcgggaggctgaggcatgagaattgctggaacccaggaggtgga

SEQ ID NO: 405867 - DNA, 66 bp, Artificial Sequence
  ENSG00000147439_32 (sequence is synthesized)
tgagcagccaaattcctggtcatgtcctttgagaggcacatctgggagtcctgctctgtgtggtag

SEQ ID NO: 405868 - DNA, 120 bp, Artificial Sequence
  ENSG00000147439_33 (sequence is synthesized)
ctttgagaggcacatctgggagtcctgctctgtgtggtagctgagctcctggaacctgacagtgagtctgccagcatcctctcaactctgagtgcctatgatcccagtctcagtaactgc

SEQ ID NO: 405869 - DNA, 120 bp, Artificial Sequence
  ENSG00000147439_34 (sequence is synthesized)
cctggggcaggggtgagtttagatttcagttctgccacctgccagtggcactgtgagggctggaaagggtgccagacagagaatgtggacacctgtgttctcttctagaccttctctgcc

SEQ ID NO: 405870 - DNA, 120 bp, Artificial Sequence
  ENSG00000147439_35 (sequence is synthesized)
ccctagtccgttgtgtgataaagctcacaggaggtgggggtcagggcacccttcattcctgggccaccctgtgccacccagctccctggacctggcccacaaccccacctcctctcatct

SEQ ID NO: 405871 - DNA, 120 bp, Artificial Sequence
  ENSG00000147439_36 (sequence is synthesized)
gccctcaccccatgacattgtccacgttcgcacaagctccaggggacagggcctcatctgtcttgttcacagtgaactccccaagacctagagcagggtctggcgcttggtaggtgctca

SEQ ID NO: 405872 - DNA, 120 bp, Artificial Sequence
  ENSG00000147439_37 (sequence is synthesized)
gggcacatttttggacaagtgagtgctggccaggacgcccctccaagagcggacccatctccagccaggccacccctccaagagcagacccatctccagccaggccaccccttcaagaac

SEQ ID NO: 405873 - DNA, 120 bp, Artificial Sequence
  ENSG00000147443_0 (sequence is synthesized)
agagaagggaaacacacggctaagaagagagaggcaagggcaggagtgaaggagagagctgaagcctggggctccgagatggtcagaggatgggagacggggcagtgaaacaaggcttct

SEQ ID NO: 405874 - DNA, 120 bp, Artificial Sequence
  ENSG00000147443_1 (sequence is synthesized)
tgtatcttcagcagcagcagacgtttggaaagaaatggcgccgcttcggcgcctcactgtatggagggtcggactgcgccttggcccggctggagctgcaggagggcccggagaagcctc

SEQ ID NO: 405875 - DNA, 120 bp, Artificial Sequence
  ENSG00000147443_2 (sequence is synthesized)
gtcggtgtgaggctgcccggaaggtcatccgcctcagtgactgcctgcgggtggccgaggccggcggagaggccagcagcccccgggacaccagtgccttcttcctggagaccaaggagc

SEQ ID NO: 405876 - DNA, 120 bp, Artificial Sequence
  ENSG00000147443_3 (sequence is synthesized)
gcctgtacctcctggcggcccctgcagcggagcgcggcgactgggtgcaggccatctgcctcctggccttccccgggcagaggaaggagctctcggggccagagggaaagcagagccggc

SEQ ID NO: 405877 - DNA, 120 bp, Artificial Sequence
  ENSG00000147443_4 (sequence is synthesized)
cctgcatggaggaaaatgaattgtacagcagcgcagtcacagtcggcccccacaaggaatttgctgtgaccatgagacctacagaagccagtgagaggtgccacctgcgggggtcctata

SEQ ID NO: 405878 - DNA, 120 bp, Artificial Sequence
  ENSG00000147443_5 (sequence is synthesized)
ccctccgggctggggagagtgccctggagctgtggggtgggcccgagccagggacccagctgtacgactggccctacaggtttctgcggcgctttgggcgggacaaggtaaccttttcct

SEQ ID NO: 405879 - DNA, 120 bp, Artificial Sequence
  ENSG00000147443_6 (sequence is synthesized)
ttgaggcaggccgtcgctgcgtctctggagagggcaactttgagttcgaaacccggcaaggcaatgagatcttcttggccctggaagaggccatctctgcccagaagaatgctgcacccg

SEQ ID NO: 405880 - DNA, 120 bp, Artificial Sequence
  ENSG00000147443_7 (sequence is synthesized)
ccgccttcacccaccacaccggtgcctgctccacggcctcggggccaggagggggagtatgccgtgcccttcgatgcggtggcccgttccttggggaagaacttcaggggcatcttggca

SEQ ID NO: 405881 - DNA, 120 bp, Artificial Sequence
  ENSG00000147443_8 (sequence is synthesized)
gtccctcctcagctcctggccgaccctctgtacgacagcattgaggagaccctgccccctcgacctgaccacatatacgatgagcccgagggagtggctgccctgtccctctatgacagc

SEQ ID NO: 405882 - DNA, 120 bp, Artificial Sequence
  ENSG00000147443_9 (sequence is synthesized)
ccgcaggagccccggggtgaggcatggaggaggcaggcgacagctgacagggaccctgctggcctccagcatgtccagccagccgggcaggatttctctgcttctggctggcagccagga

SEQ ID NO: 405883 - DNA, 120 bp, Artificial Sequence
  ENSG00000147443_10 (sequence is synthesized)
actgagtatgacaatgttgtactaaagaaaggcccaaagtgacagaggcagcagagggatggtccaccgccccttggcttctgctggtgactcctcctggccactgcatcagaagaacct

SEQ ID NO: 405884 - DNA, 120 bp, Artificial Sequence
  ENSG00000147443_11 (sequence is synthesized)
cctctgccccttctggagcccgaggcctggcctgtcttcgttggggctgataaattgcctctcccagggcctgctgggtgagtcaccatcccaaagcaggaagggtgccctggagagaac

SEQ ID NO: 405885 - DNA, 120 bp, Artificial Sequence
  ENSG00000147443_12 (sequence is synthesized)
caccctcctcctactctttttccacttcctcctctttctttccccagctgaggaggaacctggggcatttagggcagaggacaaaaggatgtcagcaattgcttgggctgcttggctatg

SEQ ID NO: 405886 - DNA, 120 bp, Artificial Sequence
  ENSG00000147443_13 (sequence is synthesized)
caagcctcctgcctgctgatggccacttcagggacagcctgggcccaggcacccagggggatggcggcagcttcctgcacctttcagatttcttggtggcattaaagcattttcagaaca

SEQ ID NO: 405887 - DNA, 120 bp, Artificial Sequence
  ENSG00000147443_14 (sequence is synthesized)
gatgcctactagggtagggggtggaggtacctggccttttggggagtatgacctggcacagagcagctcagcctccaagacccaggcagggggccataagtgtgtggataatactttcta

SEQ ID NO: 405888 - DNA, 120 bp, Artificial Sequence
  ENSG00000147443_15 (sequence is synthesized)
gaaaagttctggtacgctcatttagaactgggcagtggtgaggcaggccagctgtttcccattaactgccttcgccttctctctcttcttctccccagtcggcccccacaaggaatttgc

SEQ ID NO: 405889 - DNA, 120 bp, Artificial Sequence
  ENSG00000147454_0 (sequence is synthesized)
ctccctgcccacctcctgcagcctcctgcgccccgccgagctggcggatggagctgcgcagcgggagcgtgggcagccaggcggtggcgcggaggatggatggggacagccgagatggcg

SEQ ID NO: 405890 - DNA, 120 bp, Artificial Sequence
  ENSG00000147454_1 (sequence is synthesized)
gcggcggcaaggacgccaccgggtcggaggactacgagaacctgccgactagcgcctccgtgtccacccacatgacagcaggagcgatggccgggatcctggagcactcggtcatgtacc

SEQ ID NO: 405891 - DNA, 120 bp, Artificial Sequence
  ENSG00000147454_2 (sequence is synthesized)
cggtggactcggtgaagacacgaatgcagagtttgagtccagatcccaaagcccagtacacaagtatctacggagccctcaagaaaatcatgcggaccgaaggcttctggaggcccttgc

SEQ ID NO: 405892 - DNA, 120 bp, Artificial Sequence
  ENSG00000147454_3 (sequence is synthesized)
gaggcgtcaacgtcatgatcatgggtgcagggccggcccatgccatgtattttgcctgctatgaaaacatgaaaaggactttaaatgacgttttccaccaccaaggaaacagccacctag

SEQ ID NO: 405893 - DNA, 120 bp, Artificial Sequence
  ENSG00000147454_4 (sequence is synthesized)
ccaacgggatagctgggagtatggccaccctgctccacgatgcggtaatgaatccagcagaagtggtgaagcagcgcttgcagatgtacaactcgcagcaccggtcagcaatcagctgca

SEQ ID NO: 405894 - DNA, 120 bp, Artificial Sequence
  ENSG00000147454_5 (sequence is synthesized)
tccggacggtgtggaggaccgaggggttgggggccttctaccggagctacaccacgcagctgaccatgaacatccccttccagtccatccacttcatcacctatgagttcctgcaggagc

SEQ ID NO: 405895 - DNA, 120 bp, Artificial Sequence
  ENSG00000147454_6 (sequence is synthesized)
aggtcaacccccaccggacctacaacccgcagtcccacatcatctcaggcgggctggccggggccctcgccgcggccgccacgacccccctggacgtctgtaagacccttctgaacactc

SEQ ID NO: 405896 - DNA, 120 bp, Artificial Sequence
  ENSG00000147454_7 (sequence is synthesized)
aggagaacgtggccctctcgctggccaacatcagcggccggctgtcgggtatggccaatgccttccggacggtgtaccagctcaacggcctggccggctacttcaaaggcatccaggcgc

SEQ ID NO: 405897 - DNA, 120 bp, Artificial Sequence
  ENSG00000147454_8 (sequence is synthesized)
gtgtcatctaccagatgccctccaccgccatttcttggtctgtctatgagttcttcaagtactttctcaccaagcgccagctggaaaatcgagctccatactaaaggaagggatcataga

SEQ ID NO: 405898 - DNA, 120 bp, Artificial Sequence
  ENSG00000147454_9 (sequence is synthesized)
atcttttcttaaagtcattctctgcctgcatccagccccttgccctctcctcacacgtagatcattttttttttgcagggtgctgcctatgggccctctgctccccaatgccttagagag

SEQ ID NO: 405899 - DNA, 120 bp, Artificial Sequence
  ENSG00000147454_10 (sequence is synthesized)
aggaggggacggcacggccgctcaccggaaggctgtgtgcggggacatccgaggtggtggtggacaggaaggacttgggaaggggagcgagaaattgctttttctcttcctccctgggca

SEQ ID NO: 405900 - DNA, 120 bp, Artificial Sequence
  ENSG00000147454_11 (sequence is synthesized)
cctccctgggcagaatgtagcttttctgcttcactgtggcagcctcctccctggatccttagatcccagaggagggaagaaaatttgcagtgactgaaaacagtaaaaaaaaaaaaaaaa

SEQ ID NO: 405901 - DNA, 120 bp, Artificial Sequence
  ENSG00000147454_12 (sequence is synthesized)
aaaaaaaaaaaaaaaaatttatgtatataaaagttgcattacacagtacaaaatagatggataatgtttatcctttatttttctatgtagaagtttttgaatttgtgtgtgtgcttgtgc

SEQ ID NO: 405902 - DNA, 120 bp, Artificial Sequence
  ENSG00000147454_13 (sequence is synthesized)
gtgtctacacctagtattacggctgggactctccagctgtttttgttgttgttatgtttttaagagggttgaattcttccatcaggtgaacgaaaaaggcaacaaagtaataaatcagtg

SEQ ID NO: 405903 - DNA, 120 bp, Artificial Sequence
  ENSG00000147454_14 (sequence is synthesized)
aatgtggccggcagctgtgtttagcccctccagatggaagtttcacttgaatgtaaaataataaagtttatattttgaatttctcttttcatgggggaaaaaaggtacgttaaaaaaatc

SEQ ID NO: 405904 - DNA, 120 bp, Artificial Sequence
  ENSG00000147454_15 (sequence is synthesized)
aaaataatgatatgtcacttgcagctacctttttttttcttttaaattcaatcagccaccttcatgtgcctttttcctttgtctttccccaaaattccaggaccagagatctggccctgg

SEQ ID NO: 405905 - DNA, 120 bp, Artificial Sequence
  ENSG00000147454_16 (sequence is synthesized)
cctattttctcttgctgtgtacacacacgcacacatgctgggtggcaggatctcgcccgctggagggtggtggagcccagtagaattggggtgactgggcataaacctgctgagactgct

SEQ ID NO: 405906 - DNA, 120 bp, Artificial Sequence
  ENSG00000147454_17 (sequence is synthesized)
tccttccctggttgtgagtgatgtgaatgcctgccttccccggtcagcacttagaagcccttgataggcagcatttggcgacttgtggggcaggtgtttgggataaatcctaccttcatc

SEQ ID NO: 405907 - DNA, 120 bp, Artificial Sequence
  ENSG00000147454_18 (sequence is synthesized)
ctaggacttatttctgcatcagccttttaactcaggcacttcaggtaacgtgatctatgtgtgttttgactgaatctcatctcctgtgtttccctgtgcagtctagggaagcatgtctcc

SEQ ID NO: 405908 - DNA, 120 bp, Artificial Sequence
  ENSG00000147454_19 (sequence is synthesized)
accctcatgcccgagtcggaagacccctctccagaagccattctgcatccttgtctgctctgcgtcacccgagaacacaggcttcgcagcctcgctttctgaaatggtgtgtgccgagtc

SEQ ID NO: 405909 - DNA, 120 bp, Artificial Sequence
  ENSG00000147454_20 (sequence is synthesized)
agattgccgctcagagaaaatacaagcccgttttccctagctgtgccatttggtgctctgccaggctgccgtgcaagggaataccgacgagacgagctgcactgtctctgatttggagcc

SEQ ID NO: 405910 - DNA, 120 bp, Artificial Sequence
  ENSG00000147454_21 (sequence is synthesized)
ctcaccggagcttgtctttaaaaatgagcaggaagctcatgtatgtttgcatttcagtgagccgggtcctgacctgccgccacccatcacggtcagcgtggtgcatcttaccgaggaggc

SEQ ID NO: 405911 - DNA, 120 bp, Artificial Sequence
  ENSG00000147454_22 (sequence is synthesized)
gcaggcctggattcttttgagtggtgctactgcctaggaagtaacacgtggagaatttccatcttgggaccatgcacacagtgccttggggagtagattttgccctaatagcgatgaaga

SEQ ID NO: 405912 - DNA, 120 bp, Artificial Sequence
  ENSG00000147454_23 (sequence is synthesized)
attttatcagtcagtggagttcctttttcagatcagggatgggaaagagccaaactgggtacctcccacgtgtgccccgtgaacagccctttgcagctgggctgtggggcttggctgctg

SEQ ID NO: 405913 - DNA, 120 bp, Artificial Sequence
  ENSG00000147454_24 (sequence is synthesized)
ccctgtcccatctggcagttaacgccttctccctgctctgccccccactccccaaaaccagttgcagcctcaacccacatggggatgtagaaagccgtaaagtccacgctactgttgaaa

SEQ ID NO: 405914 - DNA, 120 bp, Artificial Sequence
  ENSG00000147454_25 (sequence is synthesized)
atgtttacatctccgctctcaacctgccttgggttcgtgttaaatggtgttaaattctgcaaatggaggggaaaaaaatcaaattctaaatttcaaagtagaatttaaagcaaatttgta

SEQ ID NO: 405915 - DNA, 120 bp, Artificial Sequence
  ENSG00000147454_26 (sequence is synthesized)
aaaaaattatcctaccaccccttttggtccacttaagatatgccacgctgaagcaaggtatttcctactggattttgctttcactggtgtttagaaaataaacttgatttctctaggagc

SEQ ID NO: 405916 - DNA, 81 bp, Artificial Sequence
  ENSG00000147454_27 (sequence is synthesized)
tcactggtgtttagaaaataaacttgatttctctaggagcactcctttggttagagggatgcaagaaggagaggtgaaggt

SEQ ID NO: 405917 - DNA, 89 bp, Artificial Sequence
  ENSG00000147454_28 (sequence is synthesized)
ctctgtcaaaaaggaaaggcaaaaaccggaccctggagctctgtgggccctgattgcaggcccctccctgtgtgatgagggatgagtca

SEQ ID NO: 405918 - DNA, 120 bp, Artificial Sequence
  ENSG00000147454_29 (sequence is synthesized)
ctgattgcaggcccctccctgtgtgatgagggatgagtcagcttggggagccacttggccagcctgcatgcctggtcatcaggaggttgagaaaagccttgaaagttgtgaagcactgag

SEQ ID NO: 405919 - DNA, 120 bp, Artificial Sequence
  ENSG00000147454_30 (sequence is synthesized)
cagatacaagtgtttgttaattttgtagaaattaactttcccatctggcctttatctccaaagttggtattgttgctccacgcagactgcagtccggtttcttattgtgactttgacaat

SEQ ID NO: 405920 - DNA, 120 bp, Artificial Sequence
  ENSG00000147454_31 (sequence is synthesized)
gcaaagtgcaaaataggaagaggcctccccaccccactatcccaccctggtgaccaattcagtgtaacctttgcacgtactcagtcattggtgtctttggagtgacatctgcagccagtt

SEQ ID NO: 405921 - DNA, 120 bp, Artificial Sequence
  ENSG00000147454_32 (sequence is synthesized)
agtgccacctgagtacagcactcgtacttttacatgatgtgtgtgtgagtagctcttctgtccaaaccatgatttgaggttcaactacctgtagatcaaagctttattttagaacgataa

SEQ ID NO: 405922 - DNA, 120 bp, Artificial Sequence
  ENSG00000147454_33 (sequence is synthesized)
actgattttttccaaatgggtgaaatcttctccccatgactatgttttcttaactttgcattgaatctatttactgggttacattctatgtgtagtttgctttcttcatttttttttctt

SEQ ID NO: 405923 - DNA, 120 bp, Artificial Sequence
  ENSG00000147454_34 (sequence is synthesized)
ttaaaatgctcatgtcttattccaagcaccttcctccaaagtccccataaagctgcatctccaacacattgttatgccaataaggttttatttaactttatttaaggatgattgtgtctt

SEQ ID NO: 405924 - DNA, 120 bp, Artificial Sequence
  ENSG00000147454_35 (sequence is synthesized)
tgaatgacaaatgtactgctgcttcctacctgcaagacgaacaatgtatgtttcaagggtgagcaagtgttatttcttaaatttctcaaatgcctgtagtaactattgtttctgcctctc

SEQ ID NO: 405925 - DNA, 120 bp, Artificial Sequence
  ENSG00000147454_36 (sequence is synthesized)
aattgttgccagctctttgaagaaggggagaattgtgtgtttttgtgtggggatgtttctgatatgctgctacagttgcaaaacactggagctagagaaaataaagtactgatcttcgaa

SEQ ID NO: 405926 - DNA, 120 bp, Artificial Sequence
  ENSG00000147454_37 (sequence is synthesized)
ccaacggtattttgaaagcgtttgtctggagttagaaagttctcttcttcaacacgtccctccccagggtgttcctccctgtgacccagccgcctcgacttcggcccgcttgctcacgaa

SEQ ID NO: 405927 - DNA, 120 bp, Artificial Sequence
  ENSG00000147454_38 (sequence is synthesized)
taaagaactcagagttgtgtgtgcaatgcacacccagacacacgcacgcacacacacgcgcgcgcacacacatgcttttttctgttcccctccgctttctgaagcctggggagaaatcag

SEQ ID NO: 405928 - DNA, 90 bp, Artificial Sequence
  ENSG00000147454_39 (sequence is synthesized)
aaacattcaaaagcaattaatgatcagacataggagaaaccctgaatagaaacaaaacttttgaatgctggattcaaaaaaaaaaaaaag

SEQ ID NO: 405929 - DNA, 120 bp, Artificial Sequence
  ENSG00000147454_40 (sequence is synthesized)
gccaagatctaactaagctttaaaaggtcaagaagttttatggctgacaaaggactcgcgcaacgcagaaggcctttcccaccttaagcttccggggatctgggaattttacccccattc

SEQ ID NO: 405930 - DNA, 120 bp, Artificial Sequence
  ENSG00000147454_41 (sequence is synthesized)
tcttctgtttgtctgagtctcatctctctgcaagcaagggctgaaatcattttgtttggttgttttgagggagagaggcggggtgggggggtgcaaatctgccagcagctcttacgtaag

SEQ ID NO: 405931 - DNA, 120 bp, Artificial Sequence
  ENSG00000147454_42 (sequence is synthesized)
gcatgttttattggggagggctgagcttttattttctcctctccagtggggttggcttttattgtttcttgtttgggtttggaatggaaatatggatagcagcataaagtacttttattt

SEQ ID NO: 405932 - DNA, 120 bp, Artificial Sequence
  ENSG00000147454_43 (sequence is synthesized)
tgacaaaattcatttttttcaacaatggagacatagatttgacccacaataacttctccccctctctttttactctgctcaaaaagcatctctcctcccattacccaaccttggtcataa

SEQ ID NO: 405933 - DNA, 120 bp, Artificial Sequence
  ENSG00000147454_44 (sequence is synthesized)
gtgtgcctggctggtttgcagatatttgttctgctttgtaaaaattggccattagtgcatttattgagatgatctctaaagagctatgccctgacctacccctgattctatgacattggg

SEQ ID NO: 405934 - DNA, 120 bp, Artificial Sequence
  ENSG00000147454_45 (sequence is synthesized)
ctgccttacgtaatggttttactccttgaaagagatttgacggaatccattttatgccaagtgctgccctgcactgtttctgcaatatgtggtgtatgctgtggtgatcttgctgggaat

SEQ ID NO: 405935 - DNA, 120 bp, Artificial Sequence
  ENSG00000147454_46 (sequence is synthesized)
gattataagtgtgtgtgtggtgggggagtgggtattacatgcattgctgaagagtcatcctggtgttcctcattcctcccaccttcccgtggtcattttaattacggggcagtgtcaccg

SEQ ID NO: 405936 - DNA, 120 bp, Artificial Sequence
  ENSG00000147454_47 (sequence is synthesized)
caaagggaggaaactcaaagccgaaagcaaaattccaggcctgattctggcttttgaggttcctggttcttgaagccaggcctgacccgactctcagatggggtcagtcccgtcgctttg

SEQ ID NO: 405937 - DNA, 120 bp, Artificial Sequence
  ENSG00000147454_48 (sequence is synthesized)
acccgactctcagatggggtcagtcccgtcgctttgcagactgaccctggaaatctacaaaatgcagattttcctgatttcctcttctcttgcccagttttttttttttttttttttttt

SEQ ID NO: 405938 - DNA, 120 bp, Artificial Sequence
  ENSG00000147454_49 (sequence is synthesized)
tttcccccttctcagctgtagatatgatatctcctttcagggccccagcttaagggcaaagtgagttaatgtgtagacaaaggcgagggacaagagagagttaacatctagacagtggaa

SEQ ID NO: 405939 - DNA, 120 bp, Artificial Sequence
  ENSG00000147454_50 (sequence is synthesized)
aaagccatggtgtgtggtttctgggaaccaccaacacttgcaggtttagctttttcccagggttgactacaagaaagaaaaccatgtttttgcaagattaaaatgtggttgagtgtgcct

SEQ ID NO: 405940 - DNA, 120 bp, Artificial Sequence
  ENSG00000147454_51 (sequence is synthesized)
aaattaaccatccccatttttatcatatttccaccatcacttcagggttttaagagtcagtgctcacctgggcggagctggtagtacattttgcttcttagaaagctaagtcctgggttc

SEQ ID NO: 405941 - DNA, 120 bp, Artificial Sequence
  ENSG00000147454_52 (sequence is synthesized)
aatccagcagaaggtaatgtttcatggtcccagggaggggcagtaggggatgtgcaaaggggcacaaaaaatggttgtgggagagtggagaggactgaaggtgggcagagcggctcctag

SEQ ID NO: 405942 - DNA, 120 bp, Artificial Sequence
  ENSG00000147454_53 (sequence is synthesized)
tctccagtcagagcagacaggagaattgaattttttactacgttatcaaaggcctcaagaaaggacgtgaacataagagtttttggtattcctgtgctcggagctactcaaagtgtgttc

SEQ ID NO: 405943 - DNA, 89 bp, Artificial Sequence
  ENSG00000147454_54 (sequence is synthesized)
ttttggtattcctgtgctcggagctactcaaagtgtgttctacagaccagcagcatcagacatcttgaggggtgttggaaatgctaatt

SEQ ID NO: 405944 - DNA, 76 bp, Artificial Sequence
  ENSG00000147454_55 (sequence is synthesized)
gtgtgcacctgtaatcccagctactggggtggccgaggtgggagaatcgcttgaacccagcaggcagaggttgcag

SEQ ID NO: 405945 - DNA, 90 bp, Artificial Sequence
  ENSG00000147454_56 (sequence is synthesized)
ggtgggagaatccaccgagagtacgccactgtactccagcctgggccacagagccagactccatctcaaaaggaaaaaaaaaaaaaaaaa

SEQ ID NO: 405946 - DNA, 120 bp, Artificial Sequence
  ENSG00000147454_57 (sequence is synthesized)
attgcctaaggcctggctttagaagcagaacatggagagagaggtttgcagcctgcaggaagctggccagccagacctgccgggcagcgggacccgcgggcagtgcctctgactcacggc

SEQ ID NO: 405947 - DNA, 120 bp, Artificial Sequence
  ENSG00000147454_58 (sequence is synthesized)
acgtccttgatacgcagtgctcccctccccactttctctgccctcctgtggatcacgggtgtcctagggctgttgggagcctggattaaagttgctgagtggccggctgatgatcagatc

SEQ ID NO: 405948 - DNA, 120 bp, Artificial Sequence
  ENSG00000147454_59 (sequence is synthesized)
cttttcaaaggcaagaagatgctgccaagacagggtcttgccttgtcgcctaggctggagtgcagtgttgagatcatagtttactgcagcctcgaactcctgggtacaaggaatcctccc

SEQ ID NO: 405949 - DNA, 120 bp, Artificial Sequence
  ENSG00000147454_60 (sequence is synthesized)
taatgtggactgtggagctctgtgctggtcactttcaaccctgaacctgatgctacttattttgcagttctaagtgcaaagtcggcctggtggatgcttcccattataatattaaatttg

SEQ ID NO: 405950 - DNA, 120 bp, Artificial Sequence
  ENSG00000147454_61 (sequence is synthesized)
cttcttcgtgaggtcacacctcacatccccagtgtcactttaataactagtgttttttacatggtgggccatgacccattagtggactctgcatttaaaaataaataaataaataaaaga

SEQ ID NO: 405951 - DNA, 120 bp, Artificial Sequence
  ENSG00000147457_0 (sequence is synthesized)
tcaatttcattgatttctgctctttttattattttttctcttctgtttaatttgatcttaatttgttcttcttttatagattcccaaggtggaatcttaggttattttagatctttcttc

SEQ ID NO: 405952 - DNA, 120 bp, Artificial Sequence
  ENSG00000147457_1 (sequence is synthesized)
ttttctggtttgtgcattcattgatataaatttccctctatacagagattcacggatccatccgggtggtccgggcaccactggcgcccctctgcggctattccccagttccattttctg

SEQ ID NO: 405953 - DNA, 120 bp, Artificial Sequence
  ENSG00000147457_2 (sequence is synthesized)
aagccacaggtcagaagccgctgtacaacgctttgccgaactccagaatcttgaaggagacgtaaggtgcagccacctgccgcgcaggcgcaagcctttctttcggcacaaagaccgtgg

SEQ ID NO: 405954 - DNA, 120 bp, Artificial Sequence
  ENSG00000147457_3 (sequence is synthesized)
gaggaggggtcggcgcaagcgctcggtgtctctctgaaaagaacttcatcatactgcctcctggctgacggagcgcagcgcaacgcatgcgccttgaagacttatggaacttatttcacg

SEQ ID NO: 405955 - DNA, 120 bp, Artificial Sequence
  ENSG00000147457_4 (sequence is synthesized)
ctcagggcggcggtgacgtgtgaacgagaaggaggtggtcaaggaacggaagccgggagggaacgagggcggaagcggaccagggccaggcttgtgttcgcagccttgccggggctgggg

SEQ ID NO: 405956 - DNA, 120 bp, Artificial Sequence
  ENSG00000147457_5 (sequence is synthesized)
ttccgatgtggtccccggagcgggaggccgaggccccagccgggggagacccggcgggccttctgccccccgagtgggaggaggacgaggagcgcatgtccttcctgttctccgctttca

SEQ ID NO: 405957 - DNA, 120 bp, Artificial Sequence
  ENSG00000147457_6 (sequence is synthesized)
agaggagtcgcgaggtgaacagcaccgactgggacagcaagatgggcttctgggcgccgttggtgctgagccacagccgccgccagggggtggtgcgcctgcgtctgcgggacttgcagg

SEQ ID NO: 405958 - DNA, 120 bp, Artificial Sequence
  ENSG00000147457_7 (sequence is synthesized)
aggcctttcagcgcaaggggagcgtcccgctggggctggccacggtgctgcaggacctgctgcgtcgaggggagctgcagcgggagtcagacttcatggccagtgtagacagcagctgga

SEQ ID NO: 405959 - DNA, 120 bp, Artificial Sequence
  ENSG00000147457_8 (sequence is synthesized)
tctcctggggggttggggtcttcctgctgaagcctctcaagtggactctttctaacatgctgggagataataaggttccagctgaggaggtccttgtcgctgtggagctgttgaaggaaa

SEQ ID NO: 405960 - DNA, 120 bp, Artificial Sequence
  ENSG00000147457_9 (sequence is synthesized)
aggctgaggaggtgtatcgtctgtatcagaactcgcccctctcctcccaccccgtggtggccctgtcagagctcagcaccctctgtgctaactcctgcccagatgagaggaccttctact

SEQ ID NO: 405961 - DNA, 120 bp, Artificial Sequence
  ENSG00000147457_10 (sequence is synthesized)
tggtgttgctgcagctgcagaaggagaagagggtcacagtcctcgagcagaacggggagaagattgtgaagtttgcccgagggccacgtgccaaggtctctccagtcaatgacgtagatg

SEQ ID NO: 405962 - DNA, 120 bp, Artificial Sequence
  ENSG00000147457_11 (sequence is synthesized)
ttggggtgtaccagctgatgcagagtgaacagcttctctcacgcaaagtggagtccttatcccaggaagcagagaggtgtaaagaagaagcccgccgggcatgccgagcaggaaagaagc

SEQ ID NO: 405963 - DNA, 120 bp, Artificial Sequence
  ENSG00000147457_12 (sequence is synthesized)
agctggcactgaggtctctcaaggccaagcaacggacagagaagcgcatcgaggccttgcatgccaagctggacactgttcaaggcatcctggaccggatctatgcctcccagacagatc

SEQ ID NO: 405964 - DNA, 120 bp, Artificial Sequence
  ENSG00000147457_13 (sequence is synthesized)
agatggtttttaacgcctaccaggctggggtaggagcactcaaactctccatgaaggatgtcacagtggagaaggcagagagcctcgtggatcagatccaagagctctgtgacacccagg

SEQ ID NO: 405965 - DNA, 120 bp, Artificial Sequence
  ENSG00000147457_14 (sequence is synthesized)
ttctcagactctggctggtggggtaacaaatggcttagattttgacagtgaagaactggagaaggaattggacatcctccttcaggataccaccaaagaacctttggatctgcctgacaa

SEQ ID NO: 405966 - DNA, 120 bp, Artificial Sequence
  ENSG00000147457_15 (sequence is synthesized)
cccccgcaataggcattttaccaacagcgtgcctaaccctaggatctcagatgctgaacttgaagctgaacttgagaaactgtccttatcagagggaggtttggtcccaagcagtaaatc

SEQ ID NO: 405967 - DNA, 120 bp, Artificial Sequence
  ENSG00000147457_16 (sequence is synthesized)
tccaaaaaggcaattggaaccgactctaaagccattgtaggaccctcaagtgaaggaccctcatgtaaaagagagaccaggcttgctgggtgtgtacatagttatttaaacaagaaactc

SEQ ID NO: 405968 - DNA, 120 bp, Artificial Sequence
  ENSG00000147457_17 (sequence is synthesized)
tcagaatgtgtttggaagaggagaaaggagaaccactgattttatctggatgctactacttactacaggacagatagaatttctggaagcgatgctccaaaggcttgctcccagctgtat

SEQ ID NO: 405969 - DNA, 120 bp, Artificial Sequence
  ENSG00000147457_18 (sequence is synthesized)
catggacctgccttctcatctttatagtgccacgatttatacagtcctgtgtctgacctgtcatttcatagcctgcagttcttgccattggcacacttagatttgtcttcacccaccagc

SEQ ID NO: 405970 - DNA, 120 bp, Artificial Sequence
  ENSG00000147457_19 (sequence is synthesized)
ttcgttccagcccatgaaggggaaagatttgcagctttgccaaatctgaatcagttcccactcccccctgcggttttttagaggggtttatcctgtcgctaatgtcagttaaatagctta

SEQ ID NO: 405971 - DNA, 120 bp, Artificial Sequence
  ENSG00000147457_20 (sequence is synthesized)
ttcctgtcccacttgatttcactggtaagaatgagaatgaaatacttaaaggttttatttgaggggacttagctgccattttatggaaaaacatgtagtataaaaggtttttctccaggg

SEQ ID NO: 405972 - DNA, 120 bp, Artificial Sequence
  ENSG00000147457_21 (sequence is synthesized)
tcatttgacagaattctccaggtgttcagagaaagaggtcgccccaagtggcccagagtcgtgacagtccggaggggctggtgtggccggtgggcgctgcctcttcatctgatggagcca

SEQ ID NO: 405973 - DNA, 120 bp, Artificial Sequence
  ENSG00000147457_22 (sequence is synthesized)
ggaggtccgccggtgggggaaaggcttcttccgaggcttctgcactcgcctgggaagaggcccagtcactacaggaccctgagatgtccagaccccttatgcaaagaggcaaaattgttg

SEQ ID NO: 405974 - DNA, 120 bp, Artificial Sequence
  ENSG00000147457_23 (sequence is synthesized)
ccttggccccatcatggagtaacttaaaaatacatatctatcttccagaacaagccacacaacaacacacctcccctccttgagcctggcacacagcaccgggctctctgaatttggaaa

SEQ ID NO: 405975 - DNA, 120 bp, Artificial Sequence
  ENSG00000147457_24 (sequence is synthesized)
gtgtttcattttgtggcctactgctcggggcaggggggctgagccaggatgtgcaatagaagcaggggttgtcccctctgccagatctgtggggagctgcccaggccacccgtgcacctg

SEQ ID NO: 405976 - DNA, 120 bp, Artificial Sequence
  ENSG00000147457_25 (sequence is synthesized)
tcctgcttcctgcagtccccactccctgcctcctttgagggactgggggacttggggtagggggacagacgggaaagggtctgaatgctctggcaatggcgagaagaagcgatcgccaca

SEQ ID NO: 405977 - DNA, 120 bp, Artificial Sequence
  ENSG00000147457_26 (sequence is synthesized)
ctgccactctgctgcccagccaccaggatttctgcctggagccctttgccctgtccctgctgcctgaggtggcgtagagcagaggagaagaatttgctccaggccaggagcacaaatcgt

SEQ ID NO: 405978 - DNA, 120 bp, Artificial Sequence
  ENSG00000147457_27 (sequence is synthesized)
tgttcaatgaatttctctccaactcgaccttggtaaacggaaatgttgggggtgaagagaaacaatcactatttttttcttttttatctggtaaataattaaaagaaaaaccgaacactt

SEQ ID NO: 405979 - DNA, 120 bp, Artificial Sequence
  ENSG00000147457_28 (sequence is synthesized)
gctgcctcctctgactgttatgcagcaggccggcaggtcaataaacttgcttgcctgactttgagtatactcgtcttttctcttggccaaccttacggtagctgtaccagtttgcatttc

SEQ ID NO: 405980 - DNA, 120 bp, Artificial Sequence
  ENSG00000147457_29 (sequence is synthesized)
caccagcaatgaatgagagttcctgttgctctgcatcctcaccagcatttggtgtggtcagtattttggattttcaccattctaatagagattcacggatccatccgggtggtccgggca

SEQ ID NO: 405981 - DNA, 120 bp, Artificial Sequence
  ENSG00000147457_30 (sequence is synthesized)
tcaagggcagtgggaatcagggtcaggtccatggtgttaacagaatacacctccttggtgacttagcttggagtgtggaagaatcatctctgcttgaagctaccctcctgacttccggga

SEQ ID NO: 405982 - DNA, 120 bp, Artificial Sequence
  ENSG00000147457_31 (sequence is synthesized)
tttttttttaatctgcaaggaggcctggcatcttttgtaaagctaagcgggttttggtaacctcagtcctgtactcattaatgcatttctcccttgagtttatgcatctttatgttgtct

SEQ ID NO: 405983 - DNA, 120 bp, Artificial Sequence
  ENSG00000147457_32 (sequence is synthesized)
tgtcatttcatccaccctcttcagagagtgatactgaggactagtgaggctgtgactggcccaaggtcacccaggctaggctggaaatcaggcctcagctctcgttcacagctgttctac

SEQ ID NO: 405984 - DNA, 120 bp, Artificial Sequence
  ENSG00000147457_33 (sequence is synthesized)
ctcacctcacctcctcagtcttcccttgggaaaccacaggccagtgagaggcaggagtgtaaaatccccgatgggcgtgcagcgcagagctggctcccagcatctcatgtgcctcatttc

SEQ ID NO: 405985 - DNA, 120 bp, Artificial Sequence
  ENSG00000147457_34 (sequence is synthesized)
atgtggagtcaccaaactttcctccaaggcttaaaaacacagatccttcctcctttttgaaaagccgctactttggggaggatggggttgggattcccgggtgcttgccttgtgtgatca

SEQ ID NO: 405986 - DNA, 120 bp, Artificial Sequence
  ENSG00000147457_35 (sequence is synthesized)
ccgctggggctggccacggtgctgcaggacctgctgcgtaccttcccattggactggacattgatattgcccaggatggtctcgaactcctgcactcaagcgatcctcccacctcagcct

SEQ ID NO: 405987 - DNA, 120 bp, Artificial Sequence
  ENSG00000147457_36 (sequence is synthesized)
gttaagattacaggcgttgagccactgcacctggccaacgaggctttctgagatggcatacagtggaaaccgttttcgttcatgcctgaagcagggaacaggagaaacagtagttgaaga

SEQ ID NO: 405988 - DNA, 120 bp, Artificial Sequence
  ENSG00000147457_37 (sequence is synthesized)
agaaaaggctgaggaggtgtatcgtctgtatcagaactcgcccctctcctcccaccccgtggtggccctgtcagagctcagcaccctctgtgctaactcctgcccagatgagaggacctt

SEQ ID NO: 405989 - DNA, 120 bp, Artificial Sequence
  ENSG00000147457_38 (sequence is synthesized)
aaccctgaactgagcctcctccccactgttgctggcccccagagccagcaaaatgttagtatatgtgggcttttaaaaaataggtgtaaagaagaagcccgccgggcatgccgagcagga

SEQ ID NO: 405990 - DNA, 80 bp, Artificial Sequence
  ENSG00000147459_0 (sequence is synthesized)
ggcgcgggcacgggcacgggcgcgggcggcgcggcgaggaggcggcccgcggagtccagcgaagtttggcggaacatggc

SEQ ID NO: 405991 - DNA, 120 bp, Artificial Sequence
  ENSG00000147459_1 (sequence is synthesized)
ggaagcgtctggggcacgcaggagcgcggggcggcggcggccggagcccgaggagctgtagcagccttagtcgccgccgccgcggggcgaggtcgccgccatggcccgctggatcccgac

SEQ ID NO: 405992 - DNA, 120 bp, Artificial Sequence
  ENSG00000147459_2 (sequence is synthesized)
caagaggcagaagtacggggttgcgatctataactacaatgcttctcaagatgtggagctctccttgcagatcggtgacacagttcacatcctggagatgtacgagggttggtacagagg

SEQ ID NO: 405993 - DNA, 120 bp, Artificial Sequence
  ENSG00000147459_3 (sequence is synthesized)
atataccctccaaaataaatctaaaaagggcattttccctgaaacatatatccatttgaaagaggcaactgtggaagacctggggcagcatgaaaccgtgattcctggcgagctccccct

SEQ ID NO: 405994 - DNA, 120 bp, Artificial Sequence
  ENSG00000147459_4 (sequence is synthesized)
ggtgcaggagctcacgtccactctgcgagaatgggctgtcatctggcgaaagctctacgtgaacaacaagctcaccctcttccgccagctgcagcagatgacgtacagcctgatcgagtg

SEQ ID NO: 405995 - DNA, 120 bp, Artificial Sequence
  ENSG00000147459_5 (sequence is synthesized)
gcggtcccagatcctgtctgggacgctccccaaggatgaactggcagagctcaagaagaaagtcacagccaaaattgatcatgggaacagaatgctggggttagatctggtggtgcgaga

SEQ ID NO: 405996 - DNA, 120 bp, Artificial Sequence
  ENSG00000147459_6 (sequence is synthesized)
tgacaatgggaacatcctagaccctgacgaaaccagcaccattgccctcttcaaggcccatgaggtggcctccaaaaggattgaggaaaagatccaagaagagaagtcaatcctgcagaa

SEQ ID NO: 405997 - DNA, 120 bp, Artificial Sequence
  ENSG00000147459_7 (sequence is synthesized)
cctcgatttgcggggccagtccatcttcagtaccatccacacctatggcctctatgtgaacttcaagaactttgtctgcaacatcggggaagatgcagagttgtttatggccctctacga

SEQ ID NO: 405998 - DNA, 120 bp, Artificial Sequence
  ENSG00000147459_8 (sequence is synthesized)
cccagaccagtccacttttatcagtgagaactatctaattcgttggggcagtaacgggatgcccaaggaaatagagaagctcaataacctccaagcagtgtttacagaccttagcagcat

SEQ ID NO: 405999 - DNA, 120 bp, Artificial Sequence
  ENSG00000147459_9 (sequence is synthesized)
ggacctcatccggccccgcgtcagccttgtgtgccagattgtccgcgtgggccatatggagctgaaggaaggcaagaagcacacctgtggactccgaagaccttttggagtggcagtgat

SEQ ID NO: 406000 - DNA, 120 bp, Artificial Sequence
  ENSG00000147459_10 (sequence is synthesized)
ggatattactgatatcatacatgggaaggtggatgatgaagaaaagcagcattttattccctttcagcaaattgcgatggaaacctacatccgccagaggcagctcatcatgtcgccttt

SEQ ID NO: 406001 - DNA, 120 bp, Artificial Sequence
  ENSG00000147459_11 (sequence is synthesized)
gataacatcacacgtgattggggagaatgagccactcacttcagtcttgaataaagtgattgcagcaaaggaagtgaatcacaaagggcaaggcctttgggtatccttgaagctcttgcc

SEQ ID NO: 406002 - DNA, 120 bp, Artificial Sequence
  ENSG00000147459_12 (sequence is synthesized)
cggtgacctcacccaggttcagaagaatttttcacacttggttgatagatcaacagcaatagcccggaagatgggctttcctgaaatcatactgccaggagatgttcggaatgacattta

SEQ ID NO: 406003 - DNA, 120 bp, Artificial Sequence
  ENSG00000147459_13 (sequence is synthesized)
tgtcaccctgatccacggtgagtttgacaaagggaagaagaagacgccaaagaatgtggaggtgacgatgtctgtgcacgatgaggagggcaagctcttggagaaagcaattcaccctgg

SEQ ID NO: 406004 - DNA, 120 bp, Artificial Sequence
  ENSG00000147459_14 (sequence is synthesized)
tgctggatatgaaggcatttcagaatacaaatcagtagtctattaccaagtcaagcagccctgttggtatgagactgtcaaggtatccattgctatagaagaagtcacacgctgtcatat

SEQ ID NO: 406005 - DNA, 120 bp, Artificial Sequence
  ENSG00000147459_15 (sequence is synthesized)
aagatttaccttccgacacaggtcatctcaggaaaccagagataaatcggagcgagcatttggggtggccttcgtgaagctgatgaacccggatggcaccactctgcaggatgggaggca

SEQ ID NO: 406006 - DNA, 120 bp, Artificial Sequence
  ENSG00000147459_16 (sequence is synthesized)
cgatctggtggtttataagggtgacaacaaaaaaatggaagatgctaaattctacctgaccctgcctggaaccaagatggagatggaagaaaaagagcttcaagcatccaaaaacctggt

SEQ ID NO: 406007 - DNA, 120 bp, Artificial Sequence
  ENSG00000147459_17 (sequence is synthesized)
caccttcaccccaagcaaggatagcactaaagacagctttcagattgccaccctcatctgctccacaaagctcacccagaatgttgacctgttaggcttgttaaattggcgttccaactc

SEQ ID NO: 406008 - DNA, 120 bp, Artificial Sequence
  ENSG00000147459_18 (sequence is synthesized)
ccagaacattaaacacaacctaaagaagttaatggaagtggatggaggagagattgttaagtttttgcaagatacactagatgcactctttaacataatgatggaaatgtcagacagtga

SEQ ID NO: 406009 - DNA, 120 bp, Artificial Sequence
  ENSG00000147459_19 (sequence is synthesized)
aacctatgacttccttgtgtttgacgcactggtatttattatttcactgataggagacatcaagttccagcattttaatcctgtacttgaaacctacatttacaagcacttcagcgccac

SEQ ID NO: 406010 - DNA, 120 bp, Artificial Sequence
  ENSG00000147459_20 (sequence is synthesized)
tttggcatatgtgaaactctccaaggtactgaacttctatgtggctaatgcagatgactccagcaagactgaactgctttttgctgcgttgaaagccttgaagtacttgtttagattcat

SEQ ID NO: 406011 - DNA, 120 bp, Artificial Sequence
  ENSG00000147459_21 (sequence is synthesized)
catccaatcccgagtgctctacttgagattttatgggcagagcaaagatggagatgagtttaataattcaattcgccagttatttcttgctttcaatatgctgatggacaggcctctgga

SEQ ID NO: 406012 - DNA, 120 bp, Artificial Sequence
  ENSG00000147459_22 (sequence is synthesized)
ggaagccgtcaagatcaagggggcagctttgaagtaccttcctagcataattaatgatgtcaaacttgtatttgatcctgttgagctcagcgtgctcttctgcaaattcattcaaagcat

SEQ ID NO: 406013 - DNA, 120 bp, Artificial Sequence
  ENSG00000147459_23 (sequence is synthesized)
tcctgacaaccagctggttcggcagaaacttaactgcatgaccaagatagtagagagcactctttttcgacagtcagagtgcagagaagtgctgctgccactgctgacagaccagctcag

SEQ ID NO: 406014 - DNA, 120 bp, Artificial Sequence
  ENSG00000147459_24 (sequence is synthesized)
cggccagttagatgacaactccaacaagcctgaccacgaggcaagctcgcagcttctgagcaacatcctggaggtgctggacaggaaggatgtgggtgccactgcggtgcacattcagct

SEQ ID NO: 406015 - DNA, 120 bp, Artificial Sequence
  ENSG00000147459_25 (sequence is synthesized)
tataatggaacggctgctgagaaggatcaaccggacagtgattgggatgaaccggcagtctccccacatcgggagttttgtggcttgcatgattgccctgctgcagcaaatggacgacag

SEQ ID NO: 406016 - DNA, 120 bp, Artificial Sequence
  ENSG00000147459_26 (sequence is synthesized)
ccactatagccactacatcagcactttcaaaaccagacaagacatcatcgacttcctcatggaaacttttatcatgttcaaggacctgattggaaagaatgtctatgccaaagattggat

SEQ ID NO: 406017 - DNA, 120 bp, Artificial Sequence
  ENSG00000147459_27 (sequence is synthesized)
ggtgatgaatatgactcaaaacagggtttttctccgtgctataaatcagtttgctgaagttctcacaagattcttcatggatcaggcaagctttgaacttcagctctggaacaattactt

SEQ ID NO: 406018 - DNA, 120 bp, Artificial Sequence
  ENSG00000147459_28 (sequence is synthesized)
ccatttggcagttgcatttctcacccatgagtcccttcagcttgaaaccttctcacaagccaagcgcaacaaaattgttaaaaaatatggggacatgagaaaggaaatcggctttagaat

SEQ ID NO: 406019 - DNA, 120 bp, Artificial Sequence
  ENSG00000147459_29 (sequence is synthesized)
ccgggacatgtggtataacctgggtccccacaaaatcaaattcatcccatccatggtgggtcccattctggaggtcactctgacccctgaagtagagctccggaaagccacaatccccat

SEQ ID NO: 406020 - DNA, 120 bp, Artificial Sequence
  ENSG00000147459_30 (sequence is synthesized)
tttctttgatatgatgcagtgtgagttcaatttcagtggaaatggcaatttccatatgtttgagaatgagctgatcacaaagctggaccaggaggtagaagggggcagaggagacgaaca

SEQ ID NO: 406021 - DNA, 120 bp, Artificial Sequence
  ENSG00000147459_31 (sequence is synthesized)
atacaaggttcttctggaaaaactgctcctagaacattgccggaaacacaaatacctctccagctctggggaggtcttcgccctcctggtcagcagcctcttagagaacctgctggacta

SEQ ID NO: 406022 - DNA, 120 bp, Artificial Sequence
  ENSG00000147459_32 (sequence is synthesized)
tagaaccatcatcatgcaagatgagagcaaggagaaccgtatgagctgcactgtgaacgtgctgaacttttataaagaaaagaagagagaggacatatacataagatatctgtacaagct

SEQ ID NO: 406023 - DNA, 120 bp, Artificial Sequence
  ENSG00000147459_33 (sequence is synthesized)
tcgagatttgcaccgagactgtgagaactacacagaagctgcctacacgcttctcttgcacgctgagcttctgcagtggtctgacaagccctgtgtgcctcatttgcttcagaaggacag

SEQ ID NO: 406024 - DNA, 120 bp, Artificial Sequence
  ENSG00000147459_34 (sequence is synthesized)
ttactatgtttatacccagcaagagcttaaagagaagctgtatcaagaaatcatatcatatttcgacaaaggcaaaatgtgggagaaggccatcaagctgagcaaagagttggctgagac

SEQ ID NO: 406025 - DNA, 120 bp, Artificial Sequence
  ENSG00000147459_35 (sequence is synthesized)
ttacgaaagcaaagtatttgactacgagggccttggcaacctcctgaaaaaaagggcctcattttatgagaacatcattaaggcaatgaggcctcagcctgaatactttgctgttggata

SEQ ID NO: 406026 - DNA, 120 bp, Artificial Sequence
  ENSG00000147459_36 (sequence is synthesized)
ctatggacagggctttccttctttcctacggaataaaatcttcatctatcggggaaaggagtatgagaggcgagaggacttcagcctgaggttgttaacccagttccccaatgcggagaa

SEQ ID NO: 406027 - DNA, 120 bp, Artificial Sequence
  ENSG00000147459_37 (sequence is synthesized)
gatgaccagtaccacgcctcctggggaagacatcaagtcgtcccccaagcagtacatgcagtgcttcactgtaaagccagtgatgagcttgccgcccagctacaaggataaacctgttcc

SEQ ID NO: 406028 - DNA, 120 bp, Artificial Sequence
  ENSG00000147459_38 (sequence is synthesized)
agagcagatcttaaactactacagagccaatgaagtgcagcagttcagatactcccggccgttccggaaaggagaaaaggatccagacaatgaatttgctacgatgtggattgaacggac

SEQ ID NO: 406029 - DNA, 120 bp, Artificial Sequence
  ENSG00000147459_39 (sequence is synthesized)
cacgtatacgactgcatatacctttcctgggattctcaagtggtttgaagtcaaacagatttcaacagaagagatcagtcctctggagaatgccatcgaaaccatggagctgaccaacga

SEQ ID NO: 406030 - DNA, 120 bp, Artificial Sequence
  ENSG00000147459_40 (sequence is synthesized)
gaggatcagcaactgtgttcagcagcatgcctgggaccggtccctctctgtgcaccctctctccatgctgctcagtggcatcgtggacccggccgtcatggggggcttctccaactatga

SEQ ID NO: 406031 - DNA, 120 bp, Artificial Sequence
  ENSG00000147459_41 (sequence is synthesized)
aaaggctttttttacagaaaagtacttgcaggagcatcctgaagaccaggagaaggttgagctgctaaagcgactaatagcattacagatgcccctgctaacagaagggatccgcatcca

SEQ ID NO: 406032 - DNA, 120 bp, Artificial Sequence
  ENSG00000147459_42 (sequence is synthesized)
tcttcttgcttccgggaactcaaggagaaagtagaaaagcactatggggttataacactgccacccaacttgacggagaggaagcaaagccgcacggggtctattgtgctcccctacatc

SEQ ID NO: 406033 - DNA, 120 bp, Artificial Sequence
  ENSG00000147459_43 (sequence is synthesized)
atgtcttccactctgcggaggttgtccatcacctcagtcacttcctctgtggtttccacctcttcaaactcgtctgacaatgctccttccagaccgggatctgatggctcaatcttggag

SEQ ID NO: 406034 - DNA, 120 bp, Artificial Sequence
  ENSG00000147459_44 (sequence is synthesized)
ccacttttggagcgcagggcctcgtcaggtgccagagttgaagatctgtcccttagagaggagaacagcgagaaccggatcagcaagtttaagagaaaagactggagtctgagcaagtcc

SEQ ID NO: 406035 - DNA, 120 bp, Artificial Sequence
  ENSG00000147459_45 (sequence is synthesized)
caggtcattgcagagaaagcaccagaacccgatttgatgagcccaaccagaaaagcacaaaggccaaagagtctccagttgatggataatcggctatcaccatttcacggttcttcacct

SEQ ID NO: 406036 - DNA, 120 bp, Artificial Sequence
  ENSG00000147459_46 (sequence is synthesized)
cctcagtcaacacccttgagcccacctccactcactcccaaagccaccaggaccctaagctccccatcgttgcagacagatggaatcgcggccactcctgtcccacctccacctcccccc

SEQ ID NO: 406037 - DNA, 120 bp, Artificial Sequence
  ENSG00000147459_47 (sequence is synthesized)
aaaagcaagccctatgaaggcagccagaggaactccactgagctcgctcccccactgcctgtccgaagagaagccaaagcaccaccccctccacctccaaaggctcggaagtctggcatc

SEQ ID NO: 406038 - DNA, 120 bp, Artificial Sequence
  ENSG00000147459_48 (sequence is synthesized)
cctacttccgagcctggatcccagtaaggatcttgccctccctgcaacaccgagtgccttagacagctgctgcctgagaactggcctccagccggtgtcctcattccatggggctccctg

SEQ ID NO: 406039 - DNA, 120 bp, Artificial Sequence
  ENSG00000147459_49 (sequence is synthesized)
ctgactgcatttcctgatctgggatgatgtttaccagcccaaaaccagtcatgttcttccaaaagcttctctttgatagaattttgaggccatgccacctcccttccagtccacatggaa

SEQ ID NO: 406040 - DNA, 120 bp, Artificial Sequence
  ENSG00000147459_50 (sequence is synthesized)
ttccagaatcagtcacagcctctgattttttccaagaagagattgccttcaccattgttaaatgtcagcctgtacggcagagacatggtggtctgcacaagcctggacaagttcttccat

SEQ ID NO: 406041 - DNA, 120 bp, Artificial Sequence
  ENSG00000147459_51 (sequence is synthesized)
attgatggtggagcaacccctgtaatctactccttggaaggattttttgctttgcttatgaaaagctgtgcttgagacttaggtacttttctcacgtggacacactgatcccatcccata

SEQ ID NO: 406042 - DNA, 120 bp, Artificial Sequence
  ENSG00000147459_52 (sequence is synthesized)
ttgcatcttggaagagatggatatcaagtacactttggtagctgaaataatcatatctttctgatgtctattgtatctcctttgaggaaaagaacacacatttttaatggagattggctg

SEQ ID NO: 406043 - DNA, 120 bp, Artificial Sequence
  ENSG00000147459_53 (sequence is synthesized)
ctttcaggtatgtgtgtctatcattgaaagagcatggactcaaacatcagccctgagttcttgagtccacccaactcccatcttcttgtggcacaggaaagctgccctctccctctccca

SEQ ID NO: 406044 - DNA, 120 bp, Artificial Sequence
  ENSG00000147459_54 (sequence is synthesized)
ctctcccaccacactcctgactaatggccttcactgcgtcgcagtcactccttccctacggacttctttgaagctcttccttttgcacatacggctttttttttttttttttttttttgt

SEQ ID NO: 406045 - DNA, 120 bp, Artificial Sequence
  ENSG00000147459_55 (sequence is synthesized)
ctcctctgagcgcaaatcactggctacaagggacttaccagtctggattcagcagtttcttttctaaaacccatttgggtgactcagcagccgcatctgctacctgattttatcctggag

SEQ ID NO: 406046 - DNA, 120 bp, Artificial Sequence
  ENSG00000147459_56 (sequence is synthesized)
aatacagtgcaatatttctctttgattatttattcctcttgattgtggaattaatttgattgcttgctaatggtactagtagtactcctttcagaagaaaaaatggagcgatttaggtga

SEQ ID NO: 406047 - DNA, 120 bp, Artificial Sequence
  ENSG00000147459_57 (sequence is synthesized)
ccaaatattacatacataaatagccacatgaagttttagacgtttggacttgaagcctcaaagatcaaccaaccagtccccttatttagtaaataaggaaattgaggctacacacagaaa

SEQ ID NO: 406048 - DNA, 120 bp, Artificial Sequence
  ENSG00000147459_58 (sequence is synthesized)
attgtgctacagattattactaataacccagcttgctaaattaggctatacctaggtaatctctagaagacaactctgacagactctttaatatttacccctggttggaacaatatttga

SEQ ID NO: 406049 - DNA, 120 bp, Artificial Sequence
  ENSG00000147459_59 (sequence is synthesized)
aatgtcccagatatttctatgctacttagatatttgtggcaaagcagaaagctttttgactgtgaaggcagaggtcagcactgggggaaacttgctggtggtctctcccacaaccttgcc

SEQ ID NO: 406050 - DNA, 120 bp, Artificial Sequence
  ENSG00000147459_60 (sequence is synthesized)
cagagtcctttccactaaggaggtgaagagaacagagaaagagatttccatttctgctgccagagctggtatttgcctgcctgattctctgtgtttcctgtttcaccgccaccctttcag

SEQ ID NO: 406051 - DNA, 120 bp, Artificial Sequence
  ENSG00000147459_61 (sequence is synthesized)
gagagaactacaccagttcatcatgagggtcagggaagcaaaagctctcagatgtgtccagggcgttacttaagaaatgagtatgcagattctggaaggggtgtggaaaaggtgatcctt

SEQ ID NO: 406052 - DNA, 120 bp, Artificial Sequence
  ENSG00000147459_62 (sequence is synthesized)
tacccccacccaggaaaacctgcattgtgctagcatggaagaatcatgggctttggaattaaacccatttggtggaattaaacccatttggtttcaaatcccagttatgacatctgttaa

SEQ ID NO: 406053 - DNA, 120 bp, Artificial Sequence
  ENSG00000147459_63 (sequence is synthesized)
ctttgcaaactcacaaaaattatttgaaattatctgagttttcattttctcaccttccagaatggggataatgcctcctgcatcggttgttgtgaggtttcaatgagatgaaatatggga

SEQ ID NO: 406054 - DNA, 120 bp, Artificial Sequence
  ENSG00000147459_64 (sequence is synthesized)
aagaagaggtactcacctgatggtccctgctttcctctgctaggcctgagtaggaactggaactctctaagagcattactcatactttttttttcttccaaggtagtttggaatgtgagt

SEQ ID NO: 406055 - DNA, 120 bp, Artificial Sequence
  ENSG00000147459_65 (sequence is synthesized)
gcaagttagttctgcacatacagcccttctccaaatggtggtttcctttgaggtcttttacatgattatttatgactagagacaaacttaataagaactcaagaggattttaaatggaga

SEQ ID NO: 406056 - DNA, 120 bp, Artificial Sequence
  ENSG00000147459_66 (sequence is synthesized)
gaactcaagctgtagagaaaggaggaggcaacagacaggatatgtaggggcttacctagagcctggcacgacttctgagaagtcacccagcagaccggctagaggggatttgtgtgccac

SEQ ID NO: 406057 - DNA, 120 bp, Artificial Sequence
  ENSG00000147459_67 (sequence is synthesized)
actctacttgccgggctgccattaaaatagaaagatataaaactgggtcaccaaaaaaaccaaacctcaaggctatccttccagagcagtagaaatgagtcccacagcctggtctttgag

SEQ ID NO: 406058 - DNA, 120 bp, Artificial Sequence
  ENSG00000147459_68 (sequence is synthesized)
cagaggctgggaagataggatacatcactgtctggataccttctctttttaatagaatatattccgtatgattccctttccaccttaatggaaataatagctctctcctgcctgaacaaa

SEQ ID NO: 406059 - DNA, 120 bp, Artificial Sequence
  ENSG00000147459_69 (sequence is synthesized)
agggattccaggtagtattgtggctaagagattacagcggacgatggaaggttcattttttagggaaggtgttgggtaggaagagtcacatttgacagaattcataaataatgtgtcctg

SEQ ID NO: 406060 - DNA, 120 bp, Artificial Sequence
  ENSG00000147459_70 (sequence is synthesized)
aagtcagaggatgactgcaaagaaacacctcatgattccattaaatataaagagataaggagcaaggaggaaaaaagagaaagaattggtctttatttttcttgctaagaactctctgga

SEQ ID NO: 406061 - DNA, 120 bp, Artificial Sequence
  ENSG00000147459_71 (sequence is synthesized)
gtattgaaagacattgaaattatccctaaaattgtcacaacttttgtgaatactggtatacggttggaggtgtttttaaatctttatttcctctctttctttgttctagtgacttgtctt

SEQ ID NO: 406062 - DNA, 120 bp, Artificial Sequence
  ENSG00000147459_72 (sequence is synthesized)
gctttaagattttttttaaaggattgttttattcaacatatatcaagttcttatggaatgccagtcatggtactagccccttgggatgtagtggttgagtgtgttcaatggaaacagccc

SEQ ID NO: 406063 - DNA, 120 bp, Artificial Sequence
  ENSG00000147459_73 (sequence is synthesized)
cagtatacaaagacagttcactctggtgtgctgtaggattggaaagggagtggtaccagatgaaaatgaaaccctaaagaagactgctgggccatgagttgcttcctcctcctccacctt

SEQ ID NO: 406064 - DNA, 120 bp, Artificial Sequence
  ENSG00000147459_74 (sequence is synthesized)
aaccctctgattccagaattgcagtcattttcttctgccaaggaaatccattaaaaactgcagccacactgcaatttcctaatgtagaacaagatataaagcaggctttgagacaacaac

SEQ ID NO: 406065 - DNA, 120 bp, Artificial Sequence
  ENSG00000147459_75 (sequence is synthesized)
ctacctttgtttactctttccaagctggaagagtccttctcctctagttgcccctaggtcactggctaatttattttaaaatttagatggaactcatgtatagttaagtgcacaaatctt

SEQ ID NO: 406066 - DNA, 120 bp, Artificial Sequence
  ENSG00000147459_76 (sequence is synthesized)
agccgtgcagatgggtaattttcacatagctatttgcccacatccgtgcctctaagatagagacatacactgttttcagcaccccagaaagttcccacatgcccatggtgccattttgtg

SEQ ID NO: 406067 - DNA, 120 bp, Artificial Sequence
  ENSG00000147459_77 (sequence is synthesized)
aaaggtatttataaggcccttcaaatttgtggcttcctttctcatacttctcaggtataatgaaagggggagaaaaaccccaccatcaacacaaaacaaggctataaagactgtgcacct

SEQ ID NO: 406068 - DNA, 120 bp, Artificial Sequence
  ENSG00000147459_78 (sequence is synthesized)
tttaacaagtcaatttgtagtcagtccctgggcctgtctttttttttttttaattttgaagctacctgaggtttagaattccttcagccctagctgcttttattctgctttttatttaaa

SEQ ID NO: 406069 - DNA, 120 bp, Artificial Sequence
  ENSG00000147459_79 (sequence is synthesized)
caaaaagagggggaggatctgaaggaaactagttttctgtacaaaggctttgaggtccatggactatacttgtcccatttatcatcccaggtggtgctttgaccctgccataccctggct

SEQ ID NO: 406070 - DNA, 120 bp, Artificial Sequence
  ENSG00000147459_80 (sequence is synthesized)
attaagataaaaagatttgtggacattaaaattatgaatatgtcagtaataatccagcacacattgaaatattgacacagattaccataatttgtgcaacatcttataaacaatgtcatt

SEQ ID NO: 406071 - DNA, 120 bp, Artificial Sequence
  ENSG00000147459_81 (sequence is synthesized)
tccatagtagtctaaggcttcaccagcctggcccactgtatctagactttaggttcattttaataattatgctttccttctctgtatcatttgggaagttgataaatatcacttccttag

SEQ ID NO: 406072 - DNA, 120 bp, Artificial Sequence
  ENSG00000147459_82 (sequence is synthesized)
ataccttcattcagtgatatatctggcttttacaattaaattggaaaaggtaagtttctctttggtgggttgagagttggaccatcaattctaatctacaaaaggaaattcatgatttca

SEQ ID NO: 406073 - DNA, 120 bp, Artificial Sequence
  ENSG00000147459_83 (sequence is synthesized)
ctctgacgcctaggatctagccaaggctggtctgcagtatcagatgtccaaactcatctactattagccatattttgtgagtcgtttgtctaaactttgtcaaaaatgcctttgccatga

SEQ ID NO: 406074 - DNA, 120 bp, Artificial Sequence
  ENSG00000147459_84 (sequence is synthesized)
ttttgttgctatctggatttcaaacatggacagttaggaagatgtgcattgaagtaggaaaattttgttcagatttgctgttatttattttttaaattaaaaatggaaatgtattttaaa

SEQ ID NO: 406075 - DNA, 120 bp, Artificial Sequence
  ENSG00000147459_85 (sequence is synthesized)
cctttcagactaaattctatacatttcatgattttgatgggaaagaactttattccaggaatatccttttatacaagtttttttagttctttctaaataggcacagctaatttgtagatc

SEQ ID NO: 406076 - DNA, 120 bp, Artificial Sequence
  ENSG00000147459_86 (sequence is synthesized)
aagtatgggaaaatgtcagttatcttttatttaaaaatccttagaaagcagagcacgacttatgaacctttggtaattgacactctaattaaagcaataaaacacacattgatgaataca

SEQ ID NO: 406077 - DNA, 120 bp, Artificial Sequence
  ENSG00000147459_87 (sequence is synthesized)
taaaaaaatttgtaaaactgcagaaaactgcagaaagatgagttataagtgaatatagtaccatagaagtactctatttttattctctccctaaataaatgtatgttgtggtttagatat

SEQ ID NO: 406078 - DNA, 120 bp, Artificial Sequence
  ENSG00000147459_88 (sequence is synthesized)
aaatacatctatatgttatgaatcccaagtaattatttctagccctgagcaccttctctaactttggatttacatataaactttgattggccaatatgcagctcaaactgaacaaggcgg

SEQ ID NO: 406079 - DNA, 120 bp, Artificial Sequence
  ENSG00000147459_89 (sequence is synthesized)
taacaggaacctttatttctcactctttgctcctccccagcccatcctacctcactttgttaccatgttactaataacattcccatccatttagttgctcaggcaacctcatagtcatct

SEQ ID NO: 406080 - DNA, 120 bp, Artificial Sequence
  ENSG00000147459_90 (sequence is synthesized)
atcttcaatttctctcttttactcaccacctcccacattctccacaagcgagagatgtggcccctctgttcagaacatgcccctaacttatccgcttttctttttctttctttatttttt

SEQ ID NO: 406081 - DNA, 79 bp, Artificial Sequence
  ENSG00000147459_91 (sequence is synthesized)
gagtactaggattacaggcatgagccaccatgctagccaatccacttttctttatctccctgactaccaccttggtcca

SEQ ID NO: 406082 - DNA, 120 bp, Artificial Sequence
  ENSG00000147459_92 (sequence is synthesized)
atccacttttctttatctccctgactaccaccttggtccatcccgtaagcatgtcacaccttgagcactacagcagcctcctgtttggtgtctctgcctccagttttgttctcagctatt

SEQ ID NO: 406083 - DNA, 120 bp, Artificial Sequence
  ENSG00000147459_93 (sequence is synthesized)
aatattcttttacagtttatattttatactaaagtaatatatgggcattgtccgaacatatgagttaaaaataggattcctatgcctcaccacttcccaaaggaaattcacaattcatat

SEQ ID NO: 406084 - DNA, 80 bp, Artificial Sequence
  ENSG00000147459_94 (sequence is synthesized)
tatgcctcaccacttcccaaaggaaattcacaattcatatttaagtttagggcattaaaaagcttattgtataatggact

SEQ ID NO: 406085 - DNA, 90 bp, Artificial Sequence
  ENSG00000147459_95 (sequence is synthesized)
ccatgtctcaaaagaaaaaaaaaaaaaaaaagcaacctactgtatatagcttagaaagtgaggcttgttgactgtggatttcgccattgt

SEQ ID NO: 406086 - DNA, 120 bp, Artificial Sequence
  ENSG00000147459_96 (sequence is synthesized)
ttagaaagtgaggcttgttgactgtggatttcgccattgtatgatcagaaagaaatccccagtgtctgtaactgtaggtcttttcatttgggaaactcaggaaggtaaactctcctatcc

SEQ ID NO: 406087 - DNA, 120 bp, Artificial Sequence
  ENSG00000147459_97 (sequence is synthesized)
tggtgtaagatatgaggtatgaatgcagctttttttccccccagattgctattcaatagagatgctgtttgttaagtatagttcacattttgcttattggtataagatcccatctttatt

SEQ ID NO: 406088 - DNA, 120 bp, Artificial Sequence
  ENSG00000147459_98 (sequence is synthesized)
actaaattcttattttggggggagggaatctctttctagattgtatatgcttttacgtgggtctctgtctgttcatgtaccagtaccatactgtattaattattaattcttgatagtgtg

SEQ ID NO: 406089 - DNA, 120 bp, Artificial Sequence
  ENSG00000147459_99 (sequence is synthesized)
ttttatgacctggtagttactcttgattgctcttctttttcagagttttcctacctattcctttttgttaatttttccatatggactttggaaagatgaaatttaaaaattaatttagtg

SEQ ID NO: 406090 - DNA, 120 bp, Artificial Sequence
  ENSG00000147459_100 (sequence is synthesized)
agaatttacatgttaatgaaatagaattttcttatccaaaagcatggtatgactttccatttgttcgagtctgcttttgtgcccttcaatggcgtgtgaaagttttctgcatataagtct

SEQ ID NO: 406091 - DNA, 120 bp, Artificial Sequence
  ENSG00000147459_101 (sequence is synthesized)
tgcatattccttgtaatgttcactcttagaaatgttctttttggacttatttttgtttggttccattcttctattctgtatatttagtctccgtgtatctgaaataaattttatttcaag

SEQ ID NO: 406092 - DNA, 120 bp, Artificial Sequence
  ENSG00000147459_102 (sequence is synthesized)
cagttacagtttcctggaggaagtggatattttcctaagcacttgggctatatcagagaacagaataataccatacattccagaaaatgttgtcatcttcagcttaatactaaaaccctg

SEQ ID NO: 406093 - DNA, 120 bp, Artificial Sequence
  ENSG00000147459_103 (sequence is synthesized)
cgagactccatctcaaaaaaacaaaaataaaaaaaataaagtttttgcttcagaacaccttgtggagctcttgaaacttctggcgagggcgtcacctgtgtgatgtggggtaagaagtct

SEQ ID NO: 406094 - DNA, 120 bp, Artificial Sequence
  ENSG00000147459_104 (sequence is synthesized)
tggcgagggcgtcacctgtgtgatgtggggtaagaagtcttcttcgttctatccgcagaaaccatagaatgtggctttcatcagttggttgaccaggttggcttaggtgttacagtgcca

SEQ ID NO: 406095 - DNA, 120 bp, Artificial Sequence
  ENSG00000147459_105 (sequence is synthesized)
gcaacatttccatgagcttccttgctcagtgcctctctctgccgcctgcactttctgtcatttctaggctccccatcgttgcagacagatggaatcgcggccactcctgtcccacctcca

SEQ ID NO: 406096 - DNA, 120 bp, Artificial Sequence
  ENSG00000147459_106 (sequence is synthesized)
gactgtttgcagactggccatggtccttgggccacactggaagaagaactgggctaagtattttttatgcctgtgatttaacttctccaataaaccgcagctcttgtaggatatgatggt

SEQ ID NO: 406097 - DNA, 86 bp, Artificial Sequence
  ENSG00000147459_107 (sequence is synthesized)
atccatggatgctcaagtctctgatataaaatggcatagtatttgcatataacctctgcatttcctcccgtgtactttaaatcatg

SEQ ID NO: 406098 - DNA, 120 bp, Artificial Sequence
  ENSG00000147459_108 (sequence is synthesized)
aatgacaaggaaataaacctctgcttactttttttttctatatttttaatcatcagttggttgaacccatgatatggagggccttgtgtatataaaaatcagtctagctaatagtgccat

SEQ ID NO: 406099 - DNA, 120 bp, Artificial Sequence
  ENSG00000147459_109 (sequence is synthesized)
tgttgttggctttgaacagtagatagatagggttcccccaggatctaaatgataaattctggattttttttaaatttttttgtgttcattaaagagtgcttaaaacctttaagcttaaaa

SEQ ID NO: 406100 - DNA, 120 bp, Artificial Sequence
  ENSG00000147459_110 (sequence is synthesized)
tagaatgtaaaatcatatggtctatgaagccttcatatgtcactactagaacaatgaggccagtttgtatactctctgggatttagagatcacataaaactcattagggcttggagatgg

SEQ ID NO: 406101 - DNA, 90 bp, Artificial Sequence
  ENSG00000147459_111 (sequence is synthesized)
atttagagatcacataaaactcattagggcttggagatgggaacaaagaattcaaaacagtgtgtgggagggtgagaaagggagcaacgg

SEQ ID NO: 406102 - DNA, 120 bp, Artificial Sequence
  ENSG00000147459_112 (sequence is synthesized)
cccaggtgacttgagacctggattagccattcaattgtcttttaacacagaaacaggtgttagaaaccattttctcagagaaggaaagattctaagctgcaagattgtcagataggagct

SEQ ID NO: 406103 - DNA, 120 bp, Artificial Sequence
  ENSG00000147459_113 (sequence is synthesized)
gaacagaagactttattcaaagtccttgatgttggactcccattgaagagggtaaactgaactttcctgattctatagaaagcatcaaaggaatataaaagggcacatatctgtctgctc

SEQ ID NO: 406104 - DNA, 120 bp, Artificial Sequence
  ENSG00000147459_114 (sequence is synthesized)
tggaatgcagagagggtgccgtccttgtgtcagcaatgccaaaatatatgtgcagtctattgcatgaaacaggcatcatggatgacacggaatcacgtgggctagcatagggcttctcag

SEQ ID NO: 406105 - DNA, 120 bp, Artificial Sequence
  ENSG00000147459_115 (sequence is synthesized)
actgcatcatgcatatgaatcaggggaacttgttaggctgcaggggagttctgcctctgacaagctcccaggtgatgctgatgtagctggtctgagggccacactgtctgtagcgagggt

SEQ ID NO: 406106 - DNA, 120 bp, Artificial Sequence
  ENSG00000147459_116 (sequence is synthesized)
ttaggagatgagagagtgaagggctgacccacccatgggccagtgttcctgcatgttgggggaaagccagcctgggagcatgtgaaaggatccttgcagagctttactgaggccctccat

SEQ ID NO: 406107 - DNA, 120 bp, Artificial Sequence
  ENSG00000147459_117 (sequence is synthesized)
attgagctgcaggagctggagccatgggtaggccattgaggagctgttgggagcagattcaagccgtgtcactctgaagaagtgcaggtgtgaacgtcatgacctgctccagcacctgca

SEQ ID NO: 406108 - DNA, 120 bp, Artificial Sequence
  ENSG00000147459_118 (sequence is synthesized)
caggcagtggaggcctagtggaggccaagagcattgccgggaccaagtcccaccaggggccatcgtgccagtcagagggcatcatctcagctcacttgcagctgccactgcagacaagta

SEQ ID NO: 406109 - DNA, 120 bp, Artificial Sequence
  ENSG00000147459_119 (sequence is synthesized)
gaacaaactgagaattccacaaaccagccagagtcatatatttgagttaatatatcactttttacaaatgatatcacaaattagtggagaaagatacattatgcaaaaaaaaaaaaaaaa

SEQ ID NO: 406110 - DNA, 120 bp, Artificial Sequence
  ENSG00000147459_120 (sequence is synthesized)
cagaatacgtcatgctaatgggggtcccccaaaactatttgttgagtcagtggccacagtgagctctcagtgaacctgagcaatctgagttattaagaaggcactcatccctgcacagcc

SEQ ID NO: 406111 - DNA, 120 bp, Artificial Sequence
  ENSG00000147459_121 (sequence is synthesized)
acattcatcttttaagtgttatgactgatcattttcaactattttcttcataaagttatatattattctgtgagaccattttccacttttggacaagagattgctttgtagggaaaagcc

SEQ ID NO: 406112 - DNA, 120 bp, Artificial Sequence
  ENSG00000147459_122 (sequence is synthesized)
aaaaagagatctaaagacaaaactcatctatctgaggttccttaaagaaagtgaaactgagtcagaaggaatggagtcaaatcctgtgttccctgcagggtgccactgcggtgcacattc

SEQ ID NO: 406113 - DNA, 120 bp, Artificial Sequence
  ENSG00000147459_123 (sequence is synthesized)
aaagacggagtgaagacattatttgattccactttagagactcttccaatggaggtatttgggaaacctgtcattgtgcagtagcaaatatttgtattaaaaagaggcggttttccccca

SEQ ID NO: 406114 - DNA, 120 bp, Artificial Sequence
  ENSG00000147459_124 (sequence is synthesized)
ggtgcgcggcatggcccagaaatcctgctaccatcgcatccgtctttacaatcacgatagaatcttggccgtattttaattcttctttgcatcaggatgggtttgatttttcctgagaaa

SEQ ID NO: 406115 - DNA, 120 bp, Artificial Sequence
  ENSG00000147459_125 (sequence is synthesized)
agaaatataaagcctgttaaatttgtgattagcagtgagcagtttcactaaggaagctatctagactcttctagactcttatttttatatttctcctgtgctaagaaatagctccagcca

SEQ ID NO: 406116 - DNA, 120 bp, Artificial Sequence
  ENSG00000147465_0 (sequence is synthesized)
gcagctgcgggactcagaggcgaagcttgaggggctcaggaaggacgaagaaccacccttgagagaagaggcagcagcagcggcggcagcagcagcggcagcgaccccaccactgccaca

SEQ ID NO: 406117 - DNA, 120 bp, Artificial Sequence
  ENSG00000147465_1 (sequence is synthesized)
tttgccaggaaacaatgctgctagcgacattcaagctgtgcgctgggagctcctacagacacatgcgcaacatgaaggggctgaggcaacaggctgtgatggccatcagccaggagctga

SEQ ID NO: 406118 - DNA, 120 bp, Artificial Sequence
  ENSG00000147465_2 (sequence is synthesized)
accggagggccctggggggccccacccctagcacgtggattaaccaggttcggcggcggagctctctactcggttctcggctggaagagactctctacagtgaccaggagctggcctatc

SEQ ID NO: 406119 - DNA, 120 bp, Artificial Sequence
  ENSG00000147465_3 (sequence is synthesized)
tccagcagggggaggaggccatgcagaaggccttgggcatccttagcaaccaagagggctggaagaaggagagtcagcaggacaatggggacaaagtgatgagtaaagtggtcccagatg

SEQ ID NO: 406120 - DNA, 120 bp, Artificial Sequence
  ENSG00000147465_4 (sequence is synthesized)
tgggcaaggtgttccggctggaggtcgtggtggaccagcccatggagaggctctatgaagagctcgtggagcgcatggaagcaatgggggagtggaaccccaatgtcaaggagatcaagg

SEQ ID NO: 406121 - DNA, 120 bp, Artificial Sequence
  ENSG00000147465_5 (sequence is synthesized)
tcctgcagaagatcggaaaagatacattcattactcacgagctggctgccgaggcagcaggaaacctggtggggccccgtgactttgtgagcgtgcgctgtgccaagcgccgaggctcca

SEQ ID NO: 406122 - DNA, 120 bp, Artificial Sequence
  ENSG00000147465_6 (sequence is synthesized)
cctgtgtgctggctggcatggccacagacttcgggaacatgcctgagcagaagggtgtcatcagggcggagcacggtcccacttgcatggtgcttcacccgttggctggaagtccctcta

SEQ ID NO: 406123 - DNA, 120 bp, Artificial Sequence
  ENSG00000147465_7 (sequence is synthesized)
agaccaaacttacgtggctactcagcatcgacctcaaggggtggctgcccaagagcatcatcaaccaggtcctgtcccagacccaggtggattttgccaaccacctgcgcaagcgcctgg

SEQ ID NO: 406124 - DNA, 120 bp, Artificial Sequence
  ENSG00000147465_8 (sequence is synthesized)
agtcccaccctgcctctgaagccaggtgttgaagaccagcctgctgttcccaactgtgcccagctgcactggtacacacgctcatcaggagaatccctactggaagcctgcaagtctaag

SEQ ID NO: 406125 - DNA, 120 bp, Artificial Sequence
  ENSG00000147465_9 (sequence is synthesized)
atctccatctggtgacagtgggatgggtggggttcgtgtttagagtatgacactaggattcagattggtgaaagtttttagtaccaagaaaacagggatgaggctcttggattaaaaggt

SEQ ID NO: 406126 - DNA, 120 bp, Artificial Sequence
  ENSG00000147465_10 (sequence is synthesized)
aaataattgtaaaactttttttctgggcccttatgtacccacctaaaaccatctttaaaatgctagtggctgatatgggtgtgggggatgctaaccacagggcctgagaagtcttgcttt

SEQ ID NO: 406127 - DNA, 120 bp, Artificial Sequence
  ENSG00000147465_11 (sequence is synthesized)
atgggctcaagaatgccatgcgctggcagtacatgtgcacaaagcagaatctcagagggtctcctgcagccctctgctcctcccggccgctgcacagcaacaccacagaacaagcagcac

SEQ ID NO: 406128 - DNA, 120 bp, Artificial Sequence
  ENSG00000147465_12 (sequence is synthesized)
cccacagtgggtgccttccagaaatatagtccaagctttctctgtggaaaaagacaaaactcattagtagacatgtttccctattgctttcataggcaccagtcagaataaagaatcata

SEQ ID NO: 406129 - DNA, 120 bp, Artificial Sequence
  ENSG00000147465_13 (sequence is synthesized)
tgctttcataggcaccagtcagaataaagaatcataattcacacaaacatcagtctttgttttaatattgtactgttaaaaaaatctatgcagctgggtgcagtggctcacgcctgtaat

SEQ ID NO: 406130 - DNA, 65 bp, Artificial Sequence
  ENSG00000147465_14 (sequence is synthesized)
acctgtagtcgttagtgggccgagattgtgccactgcgctccagcgtgggcgacagagtgagact

SEQ ID NO: 406131 - DNA, 120 bp, Artificial Sequence
  ENSG00000147465_15 (sequence is synthesized)
ctagtagattacaacttcacactagaggagttctggacaaagcttttaattagtcaaactaaattaaggctcattaaaaggaaaggaactactgggaaattatgcaattcaataatttag

SEQ ID NO: 406132 - DNA, 120 bp, Artificial Sequence
  ENSG00000147465_16 (sequence is synthesized)
actctgttaccaggatctttcataaaaatttaatttccataatcataacctaaatgagttcttaaagaattctataagcaatagctgattaatgggccctggaagatgaagattataact

SEQ ID NO: 406133 - DNA, 120 bp, Artificial Sequence
  ENSG00000147465_17 (sequence is synthesized)
gtttatttacctaattaaaaggaaaggcagtgccaaatatgagaggataaacaatattagttaacatttctgttatttatgatgccaattagtagtaagataattccacagctgtcaact

SEQ ID NO: 406134 - DNA, 120 bp, Artificial Sequence
  ENSG00000147465_18 (sequence is synthesized)
ttgtttggggctggcaacttctctgcttaaacaggctaaaagtttagtattctgggagaagtggctggaagaaggggtaatatggtgaaagcaaattccctttcccaggagtcaagagaa

SEQ ID NO: 406135 - DNA, 79 bp, Artificial Sequence
  ENSG00000147465_19 (sequence is synthesized)
tatggtgaaagcaaattccctttcccaggagtcaagagaatttatgtgaggtggctctcacctgagggcaggagaccag

SEQ ID NO: 406136 - DNA, 120 bp, Artificial Sequence
  ENSG00000147465_20 (sequence is synthesized)
tgaggcttctgggctcctggtgctgctggcaggaggttccctggagggtgatgtggtgcatgtggctttggctcccctcctgccattccttcattttgagaggacgtccccagcctagag

SEQ ID NO: 406137 - DNA, 120 bp, Artificial Sequence
  ENSG00000147465_21 (sequence is synthesized)
ttcctcaaggccagatccctctctggtcacctggggcggctgtgattaactcgaccagcaggctggcccctatggctttagtccgggctcttcagagcaatgagcagacccagagctcca

SEQ ID NO: 406138 - DNA, 120 bp, Artificial Sequence
  ENSG00000147465_22 (sequence is synthesized)
gcatgtggactgcatccccagctccaagaaaccaacccttggtgcacccatggcttccttctacaaaagaagatacttatttaccaaaggagggacaaagacaagataggccctacttgg

SEQ ID NO: 406139 - DNA, 120 bp, Artificial Sequence
  ENSG00000147465_23 (sequence is synthesized)
acagccagacagcttgtcatgaccctcccagaaagtttaagaaccttaataattttctgaagcatggggcagggctgaggttcacctggtacgctcaggaacagctgtaatgtagactaa

SEQ ID NO: 406140 - DNA, 120 bp, Artificial Sequence
  ENSG00000147465_24 (sequence is synthesized)
aatattgaaataatccataccactcagtacaccacagcctcctgaatttcccaaggccccagcccagccaccagcctgaatcctttccctgacatcccagtaatccagcaactaaagggc

SEQ ID NO: 406141 - DNA, 120 bp, Artificial Sequence
  ENSG00000147465_25 (sequence is synthesized)
acaagaggccgcaggggctgctccagctacaagcagcctttattctgatgagctggtaactgtgccaactgccaaataattaccctttgcaaagggcacttccctgatgagactcagaaa

SEQ ID NO: 406142 - DNA, 120 bp, Artificial Sequence
  ENSG00000147465_26 (sequence is synthesized)
cttctccatttgccagggcggagcacggtcccacttgcatggtgcttcacccgttggctggaagtccctctaagaccaaacttacgtggctactcagcatcgacctcaaggtgaagggca

SEQ ID NO: 406143 - DNA, 120 bp, Artificial Sequence
  ENSG00000147465_27 (sequence is synthesized)
tgggagggggacctggaaggcaggtggtagtgagaaaaacaggctcttcccattccccccatgctgcagaaagaatcctcttctattctgatagaatcacaggctgtaagacagggaagg

SEQ ID NO: 406144 - DNA, 120 bp, Artificial Sequence
  ENSG00000147465_28 (sequence is synthesized)
gtctggagtgatggcctaactgctactctaccatctccaaagcctgtgatggccccctcttcttttttttttttttttttttcgagactcagtttcattctgtcactcaggctggagtac

SEQ ID NO: 406145 - DNA, 90 bp, Artificial Sequence
  ENSG00000147465_29 (sequence is synthesized)
ttcgagactcagtttcattctgtcactcaggctggagtacaatgacatggtctcagctcaccgttccgcctcagcctcctgagtagctgg

SEQ ID NO: 406146 - DNA, 120 bp, Artificial Sequence
  ENSG00000147465_30 (sequence is synthesized)
ttctgtctcacagcaaagttcaactcttatatgtagttatcattttagaaagaaggaaacttaggtccagagatctgaagggtgaaaaaggcaacataactggttcagggtcacacagct

SEQ ID NO: 406147 - DNA, 120 bp, Artificial Sequence
  ENSG00000147465_31 (sequence is synthesized)
gggaacaccaggctgaaacatcttgttggccagtcttgtgcttctgaaagtcatgacagcagaggagcaatgcagtcctcccgcccttgactgggcaactccaaggctgcacctattaac

SEQ ID NO: 406148 - DNA, 120 bp, Artificial Sequence
  ENSG00000147465_32 (sequence is synthesized)
agagctcgaagaccaagcccctggcagcctgtttgtgatagggtgcagtgtcaagagtgggccaaaacccacaagatggccaaattctcctacctcctactgcaggggtggctgcccaag

SEQ ID NO: 406149 - DNA, 120 bp, Artificial Sequence
  ENSG00000147465_33 (sequence is synthesized)
catgcaagcacacaggcctcaggagttgtattctccttatgaaggctgaggcaacaggctgtgatggccatcagccaggagctgaaccggagggccctggggggccccacccctagcacg

SEQ ID NO: 406150 - DNA, 120 bp, Artificial Sequence
  ENSG00000147471_0 (sequence is synthesized)
gtcggtccccgggggatgtggagagctggcagcatgtcggccgagctgggagtcgggtgcgcattgcgggcggtgaacgagcgcgtgcagcaggctgtggcgcggcggccgcgggatctc

SEQ ID NO: 406151 - DNA, 120 bp, Artificial Sequence
  ENSG00000147471_1 (sequence is synthesized)
ccagccatccagccccggctagtggcggtcagcaaaaccaaacctgcagacatggtgatcgaggcctatggacatgggcagcgcacttttggcgagaactacgttcaggaactgctagaa

SEQ ID NO: 406152 - DNA, 120 bp, Artificial Sequence
  ENSG00000147471_2 (sequence is synthesized)
aaagcatcaaatcccaaaattctgtctttgtgtcctgagatcaaatggcacttcattggccacctacagaaacaaaatgtcaacaaattgatggctgtccccaatctcttcatgctggaa

SEQ ID NO: 406153 - DNA, 120 bp, Artificial Sequence
  ENSG00000147471_3 (sequence is synthesized)
acagtggattctgtgaagttggcagacaaagtgaacagttcctggcagagaaaaggttctcctgaaaggttaaaggttatggtccagattaacaccagcggagaagagagtaaacatggc

SEQ ID NO: 406154 - DNA, 120 bp, Artificial Sequence
  ENSG00000147471_4 (sequence is synthesized)
cttccaccttcagagaccatagccatcgtggagcacataaacgccaagtgtcctaacctggagtttgtggggctgatgaccataggaagctttgggcatgatcttagtcaaggaccaaat

SEQ ID NO: 406155 - DNA, 120 bp, Artificial Sequence
  ENSG00000147471_5 (sequence is synthesized)
ccagacttccagctgttattgtccctccgggaggagctgtgtaaaaagctgaacatccctgctgaccaggttgagctgagcatgggcatgtccgcggatttccagcatgcggttgaagta

SEQ ID NO: 406156 - DNA, 120 bp, Artificial Sequence
  ENSG00000147471_6 (sequence is synthesized)
ggatctacaaatgtccgaataggaagcacgatttttggagagcgggattactcaaagaaacccaccccggacaagtgcgcagcagacgtgaaggccccgctggaggtggcacaggagcac

SEQ ID NO: 406157 - DNA, 120 bp, Artificial Sequence
  ENSG00000147471_7 (sequence is synthesized)
tgagccagggaatactgagagcactaactatgcactaacctagattttcatttcgatattccctgtgtcccagcgcagtcctgctctcctgtgacctgtggagagcactaatgatcacgt

SEQ ID NO: 406158 - DNA, 120 bp, Artificial Sequence
  ENSG00000147471_8 (sequence is synthesized)
gtgttgatggaaaccatctgtgcttagtctctgacataggaagcttgcttcaggcaatggctttggattgagtttgagaaattcaaacatttctgcagaacagataccaaatcaatagct

SEQ ID NO: 406159 - DNA, 120 bp, Artificial Sequence
  ENSG00000147471_9 (sequence is synthesized)
aggaatcatgttcaatattgaattctgcccaggagcatgaactgatccatgaatgccttttccaggttaaaatttggtcactgatgcctataatcgtggaagtcagagggattccccttt

SEQ ID NO: 406160 - DNA, 120 bp, Artificial Sequence
  ENSG00000147471_10 (sequence is synthesized)
ttcttccctagccggtagatacgtgaagatattcccaactgtggaatggcagtgtaggtagcttcaggaaatggctcaggttaattctcaaaacacaaattgttgctggccaggcatggt

SEQ ID NO: 406161 - DNA, 120 bp, Artificial Sequence
  ENSG00000147471_11 (sequence is synthesized)
catgcctgtaatcccagcaatttgggagacagaggcggaaggatcacctgagcctaggagttcaagaccagcctcagcaacagcaggagccccaccccccgtctctacaaaaaaatttaa

SEQ ID NO: 406162 - DNA, 81 bp, Artificial Sequence
  ENSG00000147471_12 (sequence is synthesized)
gcaacagcaggagccccaccccccgtctctacaaaaaaatttaaaaattaactgggcatggtggctgaggtggaagaatgg

SEQ ID NO: 406163 - DNA, 120 bp, Artificial Sequence
  ENSG00000147471_13 (sequence is synthesized)
aaaaatcccaatagtccatgaaggctttgatctcttgggaagttcttcatagatgctgtcacatttcttaaagcaaccttttaatatgcagataataccccccaacttttttagagacag

SEQ ID NO: 406164 - DNA, 120 bp, Artificial Sequence
  ENSG00000147471_14 (sequence is synthesized)
cctgtctcttaaaaaaaaaattaatttggtagtgagagcttgtgtcactgccactctgttttatccctgaaattaaaggataacataaggaggacttgggcctttctgacatcatcctga

SEQ ID NO: 406165 - DNA, 120 bp, Artificial Sequence
  ENSG00000147471_15 (sequence is synthesized)
agagacaggactttgcgtttttcctctgggacctacagtgatgagaatttaatgattatctcctccactataatcctctttagggtgattttttaaatcaaaacccagtgaatctcatta

SEQ ID NO: 406166 - DNA, 120 bp, Artificial Sequence
  ENSG00000147471_16 (sequence is synthesized)
ctcctaagaaacgaaagattccttcaaagccttttcaggcacatggtttcaacaaagcctggctttgacattccttgtcctgaggagcactttccaggcatagttacagcttccccactg

SEQ ID NO: 406167 - DNA, 120 bp, Artificial Sequence
  ENSG00000147471_17 (sequence is synthesized)
tatttacaagccagaattgtgcaactcttctggatcattaataaagtagcaagatcctcaaaaaacccaaaaacaccattctctaatagtcatgacaaatggcttcagtatggcttgttt

SEQ ID NO: 406168 - DNA, 120 bp, Artificial Sequence
  ENSG00000147471_18 (sequence is synthesized)
tttattttccagatggctttttctcttattttttgaagccccagtctttgattttacaggtaactttcaaaacatcatgatgctgccaaatgtacttttgtaaacttaaacattatgatt

SEQ ID NO: 406169 - DNA, 120 bp, Artificial Sequence
  ENSG00000147471_19 (sequence is synthesized)
cctgtattatttcagtgagagctacagtgtgatatttcagagtctattaaataaaaatgtgagtttgaattacaccatctgtgccaattacaaagcaattaaaagatttattttttatga

SEQ ID NO: 406170 - DNA, 120 bp, Artificial Sequence
  ENSG00000147471_20 (sequence is synthesized)
aaattgttctgtcattgtattgcttctactaccctttgtggaagagagagcaacttttagaatagccccaattcaccatttgtttttggaatttctttaggaaagtctgagttcttaata

SEQ ID NO: 406171 - DNA, 120 bp, Artificial Sequence
  ENSG00000147471_21 (sequence is synthesized)
aaaagagaaaacatcatgccaagaacagaatgaattcaccattttctgggttatatatacttggaaacctacccaacctcatgtttattattatttggtggtctttcagaaaaattataa

SEQ ID NO: 406172 - DNA, 120 bp, Artificial Sequence
  ENSG00000147471_22 (sequence is synthesized)
agaattgtagcccataaatttttttaactagcaaaagagacatttctgttctttttcctttaaataaaaggctacagtaaataaaatacaatacagtaaagtaagtatagtaaagtaaaa

SEQ ID NO: 406173 - DNA, 120 bp, Artificial Sequence
  ENSG00000147471_23 (sequence is synthesized)
aattttttgcaactccattaaattaataaaactataaaaattcttgatttagaaaagtaattctcaggttcatctggcattttggcaatgcaaatcttcctggtatcccaaaaaagcaag

SEQ ID NO: 406174 - DNA, 120 bp, Artificial Sequence
  ENSG00000147471_24 (sequence is synthesized)
attttttcttttccatgtctcctagctgttttcagctgaaatcctgagatggaggaaagagaatccaactgatagttcttttcttgagaaatttagaacctgaccagaagcagagcaaca

SEQ ID NO: 406175 - DNA, 120 bp, Artificial Sequence
  ENSG00000147471_25 (sequence is synthesized)
tagaaaaccccaagtataaagttactctttaggacttgaggctctttcaagaggttctcttgttgggggtcacctcttctgtcgtaaggaagggaggaaaatggagccttcctctggcca

SEQ ID NO: 406176 - DNA, 120 bp, Artificial Sequence
  ENSG00000147475_0 (sequence is synthesized)
gctcgtgggctcggacgagtacggagcgcctgcagggacagcctggataaaggctcactgatggctcagttgggagcagttgtggctgtggcttccagtttcttttgtgcatctctcttc

SEQ ID NO: 406177 - DNA, 120 bp, Artificial Sequence
  ENSG00000147475_1 (sequence is synthesized)
tcagctgtgcacaagatagaagagggacatattggggtatattacagaggcggtgccctgctgacttcgaccagcggccctggtttccatctcatgctccctttcatcacatcatataag

SEQ ID NO: 406178 - DNA, 120 bp, Artificial Sequence
  ENSG00000147475_2 (sequence is synthesized)
tctgtgcagaccacactccagacagatgaggtgaagaatgtaccttgtgggactagtggtggtgtgatgatctactttgacagaattgaagtggtgaacttcctggtcccgaacgcagtg

SEQ ID NO: 406179 - DNA, 120 bp, Artificial Sequence
  ENSG00000147475_3 (sequence is synthesized)
tatgatatagtgaagaactatactgctgactatgacaaggccctcatcttcaacaagatccaccacgaactgaaccagttctgcagtgtgcacacgcttcaagaggtctacattgagctg

SEQ ID NO: 406180 - DNA, 120 bp, Artificial Sequence
  ENSG00000147475_4 (sequence is synthesized)
tttgatcagattgatgaaaatctcaaactggctttgcaacaggacctgacctccatggcccctgggctggtcattcaagctgtgcgggtaacaaagcccaacataccagaggcaatccgc

SEQ ID NO: 406181 - DNA, 120 bp, Artificial Sequence
  ENSG00000147475_5 (sequence is synthesized)
agaaactacgagttgatggaaagtgagaagacaaagcttctcattgccgcccagaaacagaaggtggtggaaaaggaagcagagacagagcggaagaaggcgctcattgaggcagaaaaa

SEQ ID NO: 406182 - DNA, 120 bp, Artificial Sequence
  ENSG00000147475_6 (sequence is synthesized)
gtggcccaggtggctgagatcacctacgggcagaaggtgatggagaaggagactgagaagaagatttcagaaattgaagatgctgcatttctggcccgggagaaggcaaaggcagatgct

SEQ ID NO: 406183 - DNA, 120 bp, Artificial Sequence
  ENSG00000147475_7 (sequence is synthesized)
gagtgctacactgctatgaaaatagccgaagccaataagctgaagctaacccctgaatatctgcagctgatgaagtacaaggccattgcttccaacagcaagatttactttggcaaagac

SEQ ID NO: 406184 - DNA, 120 bp, Artificial Sequence
  ENSG00000147475_8 (sequence is synthesized)
attcctaacatgttcatggactctgcgggcagtgtgagcaagcagtttgaggggctagctgacaagctaagctttggcttagaagatgaacccttggagacggccactaaggagaattga

SEQ ID NO: 406185 - DNA, 120 bp, Artificial Sequence
  ENSG00000147475_9 (sequence is synthesized)
aaaaaacttgatatgactgcaaatgatacttaagcagatctttattttttaagatgaatcagaatgttcctccctccccgactaccttctctgactgtcttccagttactgtggtgaaaa

SEQ ID NO: 406186 - DNA, 120 bp, Artificial Sequence
  ENSG00000147475_10 (sequence is synthesized)
agaagaaatgaacttaaatccactccctttctagggaaaggagggtggggactgatgatggggggttttatttcaggtaagcagtttatatgacttccaataagatttgtaaatcatggg

SEQ ID NO: 406187 - DNA, 120 bp, Artificial Sequence
  ENSG00000147475_11 (sequence is synthesized)
cttgacctttgacctctagacactaattttatcctttgaggctggcttaattagggatgctgtcattaaggagagggagaaatgtagagtgttacctccaactcatttgatttcccttac

SEQ ID NO: 406188 - DNA, 120 bp, Artificial Sequence
  ENSG00000147475_12 (sequence is synthesized)
ttgggaaaatgcagtccagtgttctcacctctgcctccaaggtaggagatgtctgtgggtgaggctcagcaactgagcaaatatgtgcctgtgagtttgccagtagagctgtgaagaaac

SEQ ID NO: 406189 - DNA, 120 bp, Artificial Sequence
  ENSG00000147475_13 (sequence is synthesized)
agctgcagagaacatttgaccttcctggcattcttgtctgcatgtgtgtgagttattttagaggtgtgctttcttgagccctcataaggaagtactggtgctaggttttgcaagattttg

SEQ ID NO: 406190 - DNA, 120 bp, Artificial Sequence
  ENSG00000147475_14 (sequence is synthesized)
tatacactttgctccttgccctagggctcagagtggtggtttctgactacatttctagagtcagagcttgatcaccacaactcaattatttcggcatcttttcacctatgctgtgatttg

SEQ ID NO: 406191 - DNA, 120 bp, Artificial Sequence
  ENSG00000147475_15 (sequence is synthesized)
ttttttttttttcttctcaaaaattctgttcattggttccactcagcatcaagaagacagggacaaacaactcaagtgtcttaacagctgctggagtgggatccttgttatctcttagcc

SEQ ID NO: 406192 - DNA, 120 bp, Artificial Sequence
  ENSG00000147475_16 (sequence is synthesized)
actgcaggacctgcctgacaggttatgtgtgcacctcgagatgaagtgtctttctattattgtagagattctgtagtgaagaggtctgacaccatgtgtggaggaggaggaacgatcagt

SEQ ID NO: 406193 - DNA, 120 bp, Artificial Sequence
  ENSG00000147475_17 (sequence is synthesized)
caagagatgtcctggtcttaatgcctgtggcttgtgctgggagtgggtctgacttagtgataaaaggactctattcactaagtagcctgtgtttttaaatccagggctgcaggcagcaac

SEQ ID NO: 406194 - DNA, 120 bp, Artificial Sequence
  ENSG00000147475_18 (sequence is synthesized)
gcaagtcaggctgaacattcagtctccagagacagctgtgtggagcaaatcagagttcatgcccaagtccccaggttggaatggctgtgccaaaatccattcaaagggttttctttttca

SEQ ID NO: 406195 - DNA, 120 bp, Artificial Sequence
  ENSG00000147475_19 (sequence is synthesized)
ttactaggtcagaacattttgagtcaccttgggagattcaggatggggagagcaaatttgaacaaaaggtttttcttatatcctgagattgaggggtagggggtgtccaacctgtatagc

SEQ ID NO: 406196 - DNA, 120 bp, Artificial Sequence
  ENSG00000147475_20 (sequence is synthesized)
ccatgggttgtgtctagaattaagtggagggcagctatctggagttaacttgcaagcatattggtgccctccatgaccacctctggcttaggacttggccctgttatgagctgaccccca

SEQ ID NO: 406197 - DNA, 120 bp, Artificial Sequence
  ENSG00000147475_21 (sequence is synthesized)
ccaccccccaccccccccccccgccaactcctatacccatcttccctaggtgaatctgtgaatggtcctttctggcagcaatccctgccttctttttgggcccatgcccagacttctggt

SEQ ID NO: 406198 - DNA, 120 bp, Artificial Sequence
  ENSG00000147475_22 (sequence is synthesized)
ccttctctgttctgactcctgggacttctggtcctgggcacactttttgcaggcaacaaaatgtgcctgggagtgatggattttaatgtgctccagagtcctttcagaaggtggtcattt

SEQ ID NO: 406199 - DNA, 67 bp, Artificial Sequence
  ENSG00000147475_23 (sequence is synthesized)
agttcgagaccaccctggccaacatgcgaaaccccatctctacgaaaaatagaaatattagccgggc

SEQ ID NO: 406200 - DNA, 120 bp, Artificial Sequence
  ENSG00000147475_24 (sequence is synthesized)
catgccatcccactctagcttgggcaatagagcaaggctccgtctcaagaaaagaaggtcatttcccaagactagcatagggagtatccatttaaaatacattcatcttcctcccatttc

SEQ ID NO: 406201 - DNA, 120 bp, Artificial Sequence
  ENSG00000147475_25 (sequence is synthesized)
cgtgctattaatcacttgttagagcaacatgacatgcccagcatcccacttcccgaaaatgtctactccttctactctgagctcttgttgcctagacctcagaaaacaccaattcaccac

SEQ ID NO: 406202 - DNA, 120 bp, Artificial Sequence
  ENSG00000147475_26 (sequence is synthesized)
agtagaaccgggagcagggatagctcagcttctctgaatagcacactttgctcaggtcttaacttgagggcctctccggtactaacatcctgcgatagcttgtcccatgagcacagaaga

SEQ ID NO: 406203 - DNA, 120 bp, Artificial Sequence
  ENSG00000147475_27 (sequence is synthesized)
gcctcagtagagtcaagtcctgctgcagctgccccaccccaagtttctatcatttcctctttaaacaaaaaatatgttatcctacacattagtgtcaatccaatggttgtctcttatctg

SEQ ID NO: 406204 - DNA, 120 bp, Artificial Sequence
  ENSG00000147475_28 (sequence is synthesized)
tctaaatagcaaaatcatgaaaatcagctgttttatttgcataggacaactaacctgtctgtgtaactttgtttttattttaactcttactagaaaatctaatcttaaaacatttgaatt

SEQ ID NO: 406205 - DNA, 120 bp, Artificial Sequence
  ENSG00000147475_29 (sequence is synthesized)
ctaaacatgtaaaatgtgacagcctgcaattttgtagacagtgaagtaatggctgctatttataaatggaacatctatcaaaataagtaactgtttataaaattcagtttttgtagggtt

SEQ ID NO: 406206 - DNA, 120 bp, Artificial Sequence
  ENSG00000147475_30 (sequence is synthesized)
ttccaaggaaaaatcaccttggttgaatgtttctcactcattaaactttgcagaagtgattcatattcagtactgtttttaatcactttttaaaatataaggaccgaatgcaaggaaacc

SEQ ID NO: 406207 - DNA, 120 bp, Artificial Sequence
  ENSG00000147475_31 (sequence is synthesized)
aaagtttattaataatttttatataactaaaataaaatagatgtggagggatctgtgatcatataaaaagggagggttactgaaagaattttagcaatatattgattcaggaaaaggagc

SEQ ID NO: 406208 - DNA, 120 bp, Artificial Sequence
  ENSG00000147475_32 (sequence is synthesized)
tgttttataaatgatcattcactgttcctatggttctatgtatctttcaaaccgatacctttactatttaaagagcgtaaatagtgaaagtaagatggtcatacttactgactttatcta

SEQ ID NO: 406209 - DNA, 120 bp, Artificial Sequence
  ENSG00000147475_33 (sequence is synthesized)
tttaagtttgatggagataaactatatcttggctagtggctactgtgtctgtgaatgtaaccagtacttctttaagctctattcagtagggttccagccactgcttttttgttgtttcta

SEQ ID NO: 406210 - DNA, 120 bp, Artificial Sequence
  ENSG00000147475_34 (sequence is synthesized)
gccactgttttttttttcttgtttccttataaaacaggtaataaccaatcattttgtgtttgtatttccattcctttttatttctgcctttgtgtagactgatgattaagtaggcaaact

SEQ ID NO: 406211 - DNA, 120 bp, Artificial Sequence
  ENSG00000147475_35 (sequence is synthesized)
acttctactttcaaagagccccaagggcttaatgaccccatttgtaactgagaaatgattcttgttttagtaatcattctataaatgatactgctggattgattgccgtgggttgatagc

SEQ ID NO: 406212 - DNA, 120 bp, Artificial Sequence
  ENSG00000147475_36 (sequence is synthesized)
tggaggaattgttttggacaatactaacatgtgaatttatgtcttagttttatttgcagtcttgctaagtaaaatgagtctttgtatctacttttttattaaagtgaaatttagcaatag

SEQ ID NO: 406213 - DNA, 120 bp, Artificial Sequence
  ENSG00000147475_37 (sequence is synthesized)
ttaatattaggtgacataaataaaacatcccagactagtgagttaagtacaagatctctctaaaaataaacagatgaaaatctatccccattatcgatacagaatttgtgaacgtggcat

SEQ ID NO: 406214 - DNA, 120 bp, Artificial Sequence
  ENSG00000147475_38 (sequence is synthesized)
aattcttggtaggtgctatagagatttatcattttaaacagttcacacaccactgcaattctgctccaaaggacaaagatattttcaagtgaaccaaaattcattttgatatcagttcag

SEQ ID NO: 406215 - DNA, 120 bp, Artificial Sequence
  ENSG00000147475_39 (sequence is synthesized)
tggacgaactcccagtctttactctggaaagctgcccagcttagggttgccagataaaacataagatacctagttaaatatgaatttcaacaatgtacaatttttagtctaagtactatg

SEQ ID NO: 406216 - DNA, 120 bp, Artificial Sequence
  ENSG00000147475_40 (sequence is synthesized)
tgtcctaaacactgcatgagacatactcataccaaagtatttgttgcttatgtgtaattcatatttaactgggtatcctgtatttttacttgttaagtccggcaaccctagcccaggctt

SEQ ID NO: 406217 - DNA, 120 bp, Artificial Sequence
  ENSG00000147475_41 (sequence is synthesized)
tctcaggttttttttaacagggatcccaagctttttctattggtttgagagcctgctacacaaataatatgatcttaacaattgaatagttatgttaagagtgtagttactgcagttaga

SEQ ID NO: 406218 - DNA, 120 bp, Artificial Sequence
  ENSG00000147475_42 (sequence is synthesized)
ctgccaaagttcaaatcactgctctactacttcttaggtgtgtggtcttgaataagttttttgacctctctaagcctcagtttcttcattaataaaatgagttgcatggcttatatgaaa

SEQ ID NO: 406219 - DNA, 120 bp, Artificial Sequence
  ENSG00000147475_43 (sequence is synthesized)
acgactgcaaacttgggctgttaactagtgcatgatttgaaattatttagccattggatgagtaaaatgccattctagagaatgatataaggataatatatacatattatatatatataa

SEQ ID NO: 406220 - DNA, 120 bp, Artificial Sequence
  ENSG00000147475_44 (sequence is synthesized)
tatatatatatatacacacatacactatatatatataaaatgaggctggggattattccttcaagataaagccagagaagaacctgttctgagtatatggaaagaaaagtcagggtttat

SEQ ID NO: 406221 - DNA, 120 bp, Artificial Sequence
  ENSG00000147475_45 (sequence is synthesized)
ggacaggaaatgttaaagaatcttgtgctcaggagctggtcacaaaggagttcatggagaatgctgatagctatgcaacaagatccttagagggctggagctttgggcacagggaccata

SEQ ID NO: 406222 - DNA, 120 bp, Artificial Sequence
  ENSG00000147475_46 (sequence is synthesized)
gtggagtagagtattcacttctggcctcaatcagaggctggagtggaaatgtgttcccactgttcctaaactatcattctataatgaagacaaggtccattctagaagaaccttagagat

SEQ ID NO: 406223 - DNA, 120 bp, Artificial Sequence
  ENSG00000147475_47 (sequence is synthesized)
tgtccagaccagcatcctcattttaagctgagggtactgtgacccaaagcaagaaagtcacagagccagatgccaattagtagtggggctgaaacaggagccttcctctcctggctcttc

SEQ ID NO: 406224 - DNA, 120 bp, Artificial Sequence
  ENSG00000147475_48 (sequence is synthesized)
agcattcttctcaccatgcaacactgaatggagggcccccaggaatgggtgatgaaaaagacatgattcatagttaattctagaagtgagatgagaaccatagctccttccagttctcag

SEQ ID NO: 406225 - DNA, 120 bp, Artificial Sequence
  ENSG00000147475_49 (sequence is synthesized)
aagattccacgtgcctaagtagatatgttttgtcctttttacctttttcaaagtaaaggcaacctgacttagcagcaaaggaaggacacagttgggtaactgttataacttgtttgcagt

SEQ ID NO: 406226 - DNA, 120 bp, Artificial Sequence
  ENSG00000147475_50 (sequence is synthesized)
caagtattctgtttaaactcactgccagaaattctctaatagccaatgccaaaagtaaatgaatttttaaccaatagtataactgttcttgacactaggactggaaaatgatttttccca

SEQ ID NO: 406227 - DNA, 120 bp, Artificial Sequence
  ENSG00000147475_51 (sequence is synthesized)
ggaatcttcataaaagggaccctgagcaagaacatttttcatagcagacaggaggactcatccacatcgccagcaatcataattaagcaaaccgccttttgcaccatttaagatttagga

SEQ ID NO: 406228 - DNA, 120 bp, Artificial Sequence
  ENSG00000147475_52 (sequence is synthesized)
aatcatccaaattacttttaatgtttctgcagtagaaaatgaatctaaattcattttatagggtttgtagtcttttatctgttttggattcactgtgcttttaagaaaaagttggtaaat

SEQ ID NO: 406229 - DNA, 120 bp, Artificial Sequence
  ENSG00000147475_53 (sequence is synthesized)
ttgccgttgatttttctttttaacctcaaactaatagaattttataaaatattaattttctctagccattgtcttaggacttgtgacattacatgaacatttcaaagcactgaaaaaaga

SEQ ID NO: 406230 - DNA, 120 bp, Artificial Sequence
  ENSG00000147475_54 (sequence is synthesized)
caaaggatccctaatgtccctgaagaggaaattaaaatacaaagttgtttttcattagcaaacttcttactttcttacagctaaacttggtagcttagtgaagtacagctgcttgtatgg

SEQ ID NO: 406231 - DNA, 120 bp, Artificial Sequence
  ENSG00000147475_55 (sequence is synthesized)
aggagctggggaaatatatttgctttgaaacttttttatttttacatctcagtcttgctagcaagcactacttggcttagaatctgtcatatccataaaggaggagctcatgtctctagt

SEQ ID NO: 406232 - DNA, 120 bp, Artificial Sequence
  ENSG00000147475_56 (sequence is synthesized)
cctggcccttcaactcagaaggttcttctatactttccttctctcaggactcttatagcccagactttaaacatgaagctgcataattttcatcacttcttactctgccgcatcctcttt

SEQ ID NO: 406233 - DNA, 120 bp, Artificial Sequence
  ENSG00000147475_57 (sequence is synthesized)
gcccatgttattaaagtattatctaatactttgaagtttacctgaagaacctctttgtgtgtacttagtaatacaactttttttcctgtcccaacaccttttaatacagttgaatggata

SEQ ID NO: 406234 - DNA, 120 bp, Artificial Sequence
  ENSG00000147475_58 (sequence is synthesized)
aaaacatggatacaaacacatggatatagttatcactgaagcagtgtgacataaaataatacctatgtatacaacactcctctgtaaatagcaaatgtaaagtaaaagatacacaacaga

SEQ ID NO: 406235 - DNA, 120 bp, Artificial Sequence
  ENSG00000147475_59 (sequence is synthesized)
ggcccccgccccttcgtgcgcgcgctgggcctagctgccgctcagggtcggggctgacccgtcactttcgggaacctcagtcccagcagcttctctccctcagccggcccgctcctggag

SEQ ID NO: 406236 - DNA, 120 bp, Artificial Sequence
  ENSG00000147475_60 (sequence is synthesized)
agagacagaaacccttttctgtcgcgtcctctccttgcgagccgcagggggaccgagcggaggctattggagccgcagccccagaccagggcgcttgaccctctctcggaacggggcggg

SEQ ID NO: 406237 - DNA, 120 bp, Artificial Sequence
  ENSG00000147475_61 (sequence is synthesized)
gaaggggcgcgagtgacctcggggagggaagggcactggcaggaaaggacgcaactgcagatcggtagccggaggccgccacggataaaggctcactgatggctcagttgggagcagttg

SEQ ID NO: 406238 - DNA, 120 bp, Artificial Sequence
  ENSG00000147475_62 (sequence is synthesized)
aaccaaagctgccaggcttctcggttatccccttgctggaggatttgctacagcccattgcactgtaagattgggcaggcgtgtcagggccaccactggggctccctacctgtgattgag

SEQ ID NO: 406239 - DNA, 120 bp, Artificial Sequence
  ENSG00000147475_63 (sequence is synthesized)
aaccccaggataatccctgtagagcagcgatgttttgaaaagggccagggggccttgtttgtgttcagtgactcatgcccaaggtggagacaggagcaagagaccagtaagtggacaggc

SEQ ID NO: 406240 - DNA, 120 bp, Artificial Sequence
  ENSG00000147475_64 (sequence is synthesized)
gtaaaataagcgcctcgcagatgtccgcgccccggttacgttagacctgggaggcagaatccacgccctgcgctcacgggcccacgcacgcacagctgaactttgcagataaaggctcac

SEQ ID NO: 406241 - DNA, 120 bp, Artificial Sequence
  ENSG00000147475_65 (sequence is synthesized)
acctgggaggcagaatccacgccctgcgctcacgggcccacgcacgcacagctgaactttgcagtcagtcaccatagttccagatcattcagcgttcaggatcccactcctccgcgtcct

SEQ ID NO: 406242 - DNA, 120 bp, Artificial Sequence
  ENSG00000147475_66 (sequence is synthesized)
ggtgcctgaacgcggttggacctaggagcctagaggctcgcagtttgggacattgcctttctctctgaccacgggcttggggatctgtcaggataaaggctcactgatggctcagttggg

SEQ ID NO: 406243 - DNA, 120 bp, Artificial Sequence
  ENSG00000147475_67 (sequence is synthesized)
aagacaaggctgtgttctgaaccctacccagctggcacgggttctcccttgagcaacggctgtatccggagccagtgcttcctcagtgcggtgggggctctaattttacagttaaagaaa

SEQ ID NO: 406244 - DNA, 120 bp, Artificial Sequence
  ENSG00000147475_68 (sequence is synthesized)
ggggaacgttgactgagaacgaggaggaagcgagttgtagatctagccttgtgttcacacgacaccaggctggatatgagtcactcgcagggagctcagcttggtgaggtcctctcgctg

SEQ ID NO: 406245 - DNA, 120 bp, Artificial Sequence
  ENSG00000147481_0 (sequence is synthesized)
cccttccagccggagctcgcgagccgcggtggcggctggtggccaccccagggaaataaagccgttgctgctgcagcaaaatggctcaaagtccaaccaaagtctggccttttcctgagc

SEQ ID NO: 406246 - DNA, 120 bp, Artificial Sequence
  ENSG00000147481_1 (sequence is synthesized)
ctaggctgtgggcgactcgctagcactgccctgggcctccaagctgcctgctcgctgagctcagcgctgacactcacaggagctgcgttcgccggatcctctgagaggctctgcaacgat

SEQ ID NO: 406247 - DNA, 120 bp, Artificial Sequence
  ENSG00000147481_2 (sequence is synthesized)
cccgatccaattcagcagcgttttaaaagactgctctccagaatgttgagattgcccgagaagtgaccccagcaaaagaaaaatattgctgtacctaaattcaaacgacatcctttgtgg

SEQ ID NO: 406248 - DNA, 120 bp, Artificial Sequence
  ENSG00000147481_3 (sequence is synthesized)
tgccacagcacatggatttcagaaccgcctgtgaggagacaaagacaggaatttgtttgctgcaggatggtaaccaggagcctttcaaagtgcggctgcacctagccaaagacattttga

SEQ ID NO: 406249 - DNA, 120 bp, Artificial Sequence
  ENSG00000147481_4 (sequence is synthesized)
tgatccaggaacaggatgtgatatgtgtgtctggtgagcctttctattctggtgaaagaacggtgaccatcagaagacaaacagtaggaggatttggattaagcataaagggaggagcag

SEQ ID NO: 406250 - DNA, 120 bp, Artificial Sequence
  ENSG00000147481_5 (sequence is synthesized)
aacataacattccagttgtcgtttcaaaaatctccaaggaacaaagagcggaactttcaggactactttttattggagatgcaattctacagataaatggcattaatgtgagaaaatgta

SEQ ID NO: 406251 - DNA, 120 bp, Artificial Sequence
  ENSG00000147481_6 (sequence is synthesized)
gacatgaagaagtggttcaggttcttcggaatgctggagaagaagtgactctaacagtgtcatttttaaaaagagcacctgctttcctcaaactcccattgaatgaagattgtgcatgtg

SEQ ID NO: 406252 - DNA, 120 bp, Artificial Sequence
  ENSG00000147481_7 (sequence is synthesized)
ctccaagtgaccagagcagtggcacctcctctcctctctgtgacagtggcttacatctcaactaccatcccaacaatacagacacattatcatgctcgtcgtggccgacgtctccaggct

SEQ ID NO: 406253 - DNA, 120 bp, Artificial Sequence
  ENSG00000147481_8 (sequence is synthesized)
tgggagaagcgatggtgcgacctcagactgatccctctacttcattcgcgcttctctcagtatgtgcccggcacagatttgagtcggcagaatgcctttcaagtcattgctgtggatggg

SEQ ID NO: 406254 - DNA, 120 bp, Artificial Sequence
  ENSG00000147481_9 (sequence is synthesized)
gtctgcactgggattattcagtgcctctctgctgaagactgcgttgactggctacaagcaatagcaactaacatttcaaatctcacaaagcacaatattaaaaaaatcaacagaaacttt

SEQ ID NO: 406255 - DNA, 120 bp, Artificial Sequence
  ENSG00000147481_10 (sequence is synthesized)
cctgtaaaccagcagattgtctacatgggctggtgtgaagcccgggagcaagaccccctccaggacagagtgtactccccgaccttcctggccctgaggggctcatgtctctacaagttt

SEQ ID NO: 406256 - DNA, 120 bp, Artificial Sequence
  ENSG00000147481_11 (sequence is synthesized)
ctggcacctccagtgaccacctgggactggacgagagcagagaaaacattctcagtttatgagattatgtgcaagatcctcaaggacagtgacctgctggaccgacggaaacagtgcttc

SEQ ID NO: 406257 - DNA, 120 bp, Artificial Sequence
  ENSG00000147481_12 (sequence is synthesized)
accgtgcagtctgagtctggggaggacctgtacttctcagtggagctggaaagtgacctcgcccagtgggaaagagccttccagacagcaacctttctagaagtagaacggatacagtgc

SEQ ID NO: 406258 - DNA, 120 bp, Artificial Sequence
  ENSG00000147481_13 (sequence is synthesized)
aagacctatgcatgtgtgctagaaagtcatctaatgggactcacaattgatttcagcacaggatttatctgctttgatgctgcaacaaaggctgtcctttggaggtataaattctctcag

SEQ ID NO: 406259 - DNA, 120 bp, Artificial Sequence
  ENSG00000147481_14 (sequence is synthesized)
cttaaaggttcttcagatgatggcaagagcaaaatcaaatttttgtttcagaatccagatactaaacagattgaagcaaaggagttggaattttctaatttatttgctgttcttcactgc

SEQ ID NO: 406260 - DNA, 120 bp, Artificial Sequence
  ENSG00000147481_15 (sequence is synthesized)
attcattccttctttgctgccaaggtagcttgtttggaccctctatttttaggcaatcaagctactgcttctactgctgccagctctgctaccacgagcaaagcaaagtatacaacttga

SEQ ID NO: 406261 - DNA, 120 bp, Artificial Sequence
  ENSG00000147481_16 (sequence is synthesized)
atttctggcattaggaaactcgtgcagggccactgaaaagtcaggggaggctcagatgttatttcccagggattcctgtttttccagaaacgttgtcaccaaataagtatgagactgtta

SEQ ID NO: 406262 - DNA, 120 bp, Artificial Sequence
  ENSG00000147481_17 (sequence is synthesized)
agaaagaaaaaagaaaaaaaaaagaaccggaggggagaaggctagggcggaagacaaggaagctgctgcttggattcgctggtggaggaaagtgcgacctggacctgcgcttaggggctc

SEQ ID NO: 406263 - DNA, 120 bp, Artificial Sequence
  ENSG00000147481_18 (sequence is synthesized)
gaggaaagtgcgacctggacctgcgcttaggggctcccgtccccttacttcagcaccagaggggatggacagcgtctccggactgagctgcagccacagggacggaactacgctgccgcc

SEQ ID NO: 406264 - DNA, 120 bp, Artificial Sequence
  ENSG00000147481_19 (sequence is synthesized)
gccgctgtccttgccgccactgtcgtcgccacgggcagctgggctacttgctcctcgcagctaaaaggcggtgcctcctattaccccctcgcctcccggcccccttccttaatggatgaa

SEQ ID NO: 406265 - DNA, 120 bp, Artificial Sequence
  ENSG00000147481_20 (sequence is synthesized)
aagtacccctccctctacacctgctgtacctaaggacaggactctgaggagtactcttgctccacagattaaactctcagcagcaacttcaagaatcatttttctataggggtctgggag

SEQ ID NO: 406266 - DNA, 120 bp, Artificial Sequence
  ENSG00000147481_21 (sequence is synthesized)
gaattctggaggagagtaaagtcgaagttcttagaagctctgagaaatcatgggccgtgcggtaggggttgaaatgctcaaaggtccacacttcttgaaataaacagaatggtcttgagt

SEQ ID NO: 406267 - DNA, 120 bp, Artificial Sequence
  ENSG00000147481_22 (sequence is synthesized)
ggattgcaactgttttggaaatagctttgtgaaaagagggtggagagctactcaaaattctacgttagagagactgaaaagacatctaatttcattgctcggcagactgctctccagaat

SEQ ID NO: 406268 - DNA, 120 bp, Artificial Sequence
  ENSG00000147481_23 (sequence is synthesized)
agcaggacacatttactcatcattttagaccctagagaaaccataacatcaccaagtcgacagtggaggcaaatcaaaatttcggcagaaaaagaaggtcatgtggaacctcaaaaacac

SEQ ID NO: 406269 - DNA, 120 bp, Artificial Sequence
  ENSG00000147481_24 (sequence is synthesized)
ttctattctggatgacatctgtgaaatatactacatgaacagaacagcttgttctcactcagttgctttgtaccagtaagtgtattgctttcaccaaaagtggagacaaaagaataaatt

SEQ ID NO: 406270 - DNA, 120 bp, Artificial Sequence
  ENSG00000147481_25 (sequence is synthesized)
atttgaagaagtatgtaaataacataaaaatagtaagctacctatgaataaaaatacttattaaatgattacttctgtattttagattattttgtatgactagtacatgttgggcagagt

SEQ ID NO: 406271 - DNA, 120 bp, Artificial Sequence
  ENSG00000147481_26 (sequence is synthesized)
cataggaaaacaaatgccctatcttgtattatgagggacataaaagagttaaaaaccataaatcagcaaggagcatgcaaaaaaatctcatcaaagaaggatgcactttaatttgctgat

SEQ ID NO: 406272 - DNA, 120 bp, Artificial Sequence
  ENSG00000147481_27 (sequence is synthesized)
gtaaatttgcccttgtgttctcatcccatgatttgacactggcattccaattgtttttatcttattgtaaatattccgaagaacttccaaaggataattacattgacccatgatagatac

SEQ ID NO: 406273 - DNA, 120 bp, Artificial Sequence
  ENSG00000147481_28 (sequence is synthesized)
gatggaaaatttcatgaacctctcatttcttccttggtttgaaagagatttgtattttacctaataagatttattatcaaattaaagtttcataaattttcagtgaacccaaaacctttt

SEQ ID NO: 406274 - DNA, 120 bp, Artificial Sequence
  ENSG00000147481_29 (sequence is synthesized)
gtagagaaaataatataaacaaatatggtgtgagaaacaattctttgtaatccgaagtctactagttaatcatgaactaaaatgtcccccgaaaacagtcccaaagctattatagatgtt

SEQ ID NO: 406275 - DNA, 120 bp, Artificial Sequence
  ENSG00000147481_30 (sequence is synthesized)
aattaaatgacattttttcattttagtactattttatgagaaacaaaggtgatatttaaagataaaagttaaaattctttaacctcccttgtcatggaaagtgattaagtaatgccaact

SEQ ID NO: 406276 - DNA, 120 bp, Artificial Sequence
  ENSG00000147481_31 (sequence is synthesized)
atgcaggttgttttaggtattttgtcctaagaatgtaaatgtgaaaggctgggaaatttgaaagccttagaggtgtgcaatttactcagattccaggtattattcaactagttgtataac

SEQ ID NO: 406277 - DNA, 120 bp, Artificial Sequence
  ENSG00000147481_32 (sequence is synthesized)
atggaacacagtctctgtccttcagtacagcttttttgagatattttaaaaagtcagctgtgtatgtaaaaaaaaaaaaaaatttttattgatacacatgctcccaggtaaaccaagtat

SEQ ID NO: 406278 - DNA, 120 bp, Artificial Sequence
  ENSG00000147481_33 (sequence is synthesized)
tatgtgtgtccttgtggagataaccaagtatctaataaattgattcaattttttttttcaaatatgtttttaaaaatcactcaagaaggaaacaaagtgatttctataaaggacagattt

SEQ ID NO: 406279 - DNA, 120 bp, Artificial Sequence
  ENSG00000147481_34 (sequence is synthesized)
atttaaaaaattaatatcaagttgtttttatactcatgattcattaatttattttgcatcagattaatttgtaaatacatcaaattgaaaagaaaaagtgagggtttataattgtccctg

SEQ ID NO: 406280 - DNA, 120 bp, Artificial Sequence
  ENSG00000147481_35 (sequence is synthesized)
cctgggaaaatgttaaactgaatctaacataccttacccaaagaactgtggcaaattacaataaacagtttcagtgtaatgtattttgaccgtaaaactaagtacacatttgtaattagg

SEQ ID NO: 406281 - DNA, 120 bp, Artificial Sequence
  ENSG00000147481_36 (sequence is synthesized)
atagaactttagaattattgcacactatattgatcaaatacaacagtcattgtaaaattgaaacccaccaaaagcagccttcagtagtaggccacttctgaacttatggagaaaaagcag

SEQ ID NO: 406282 - DNA, 120 bp, Artificial Sequence
  ENSG00000147481_37 (sequence is synthesized)
tgggatacatcgaacttagaattttcagctgtggcaagtggttcattatggaacttctgcttccaaccagagctgaatctcagtgtgccccatattggggttacatgaatgtgtccacaa

SEQ ID NO: 406283 - DNA, 120 bp, Artificial Sequence
  ENSG00000147481_38 (sequence is synthesized)
tctggaaggcaatatgacatgggctaattatccataagcaaaagaaaaacgtttcaacagtttacctacctgtaatagaatgatttaaaaattgtgaaattttgtaaacgttccatttta

SEQ ID NO: 406284 - DNA, 120 bp, Artificial Sequence
  ENSG00000147481_39 (sequence is synthesized)
gaatttaaaaaacctattaaccattagctatctttttagtgttattatgaaaatttagcctatgctcatgtgtgttacgaaggaaaaggtgcacaatgagatatgtataaatatatatct

SEQ ID NO: 406285 - DNA, 120 bp, Artificial Sequence
  ENSG00000147481_40 (sequence is synthesized)
cctcagagaatacacacacacctacatatgtatttatatgcatacatgggtgtatatatatataaatataatgaaatgctgaccattaattatattagaagaatgttttgtgtacataca

SEQ ID NO: 406286 - DNA, 120 bp, Artificial Sequence
  ENSG00000147481_41 (sequence is synthesized)
actttaaattacgttgtaaaatgtagcttgattaaaaacttatgacaataccattatgaatatttttgatactattgataaaaaacataagccgtgatttttatttaacatgattagtac

SEQ ID NO: 406287 - DNA, 120 bp, Artificial Sequence
  ENSG00000147481_42 (sequence is synthesized)
attagtacaacagccaaaaagtaacaaaatactattctcgttttcatcagtttaacaattagtatttaatgttttctttacaatgtggtgattagtcattggcatttgttataacttgga

SEQ ID NO: 406288 - DNA, 120 bp, Artificial Sequence
  ENSG00000147481_43 (sequence is synthesized)
ctacttgaatgagaaagctttgaaatgaacaaaaacacttaaaaatttctatctctcatataatttaggtttacatgtaagagatttattcataaaatcctagtttgtacattaagcaca

SEQ ID NO: 406289 - DNA, 120 bp, Artificial Sequence
  ENSG00000147481_44 (sequence is synthesized)
ttttaacagcaaaatgctaatgtgttaacccctccagtgccttggtatgtgtgagcgtgtatgtgtgtttgggtgtgtgtctgtgtatgtgtgtgagtgtgtaagtgttatcattaaagg

SEQ ID NO: 406290 - DNA, 120 bp, Artificial Sequence
  ENSG00000147481_45 (sequence is synthesized)
gttcattacagtgtacataacacaagcttaatggagaatattgtaggtatttaggtcagagaatgaagttcaaagtcatttgaaaactgctaactactataataatgtcttttgcctgat

SEQ ID NO: 406291 - DNA, 120 bp, Artificial Sequence
  ENSG00000147481_46 (sequence is synthesized)
tgataaagaataacaattcatctaagtcgaagtatattacagaaagggcatttataatttgttaaaatgcaacaagtatttatttaaaaaatagtttaatagatagtgtaagtgtaatgt

SEQ ID NO: 406292 - DNA, 120 bp, Artificial Sequence
  ENSG00000147481_47 (sequence is synthesized)
ctgaacacttatccagcttttttaaaatgggaggataatcaggtaattatttcttgcccatatttcaggcatgtaccaacttataattttgaaatcttcgctcataaagctgtcattcag

SEQ ID NO: 406293 - DNA, 120 bp, Artificial Sequence
  ENSG00000147481_48 (sequence is synthesized)
caagaaaaagaaagcaattacttgaaaataaatgtcaagtccatattagccatgcaaagagagaaattttcctttgggtgcattagtttatagatcaacatttccctcatttacagtgct

SEQ ID NO: 406294 - DNA, 120 bp, Artificial Sequence
  ENSG00000147481_49 (sequence is synthesized)
gaagcttgatcatgaactttgtctatgttgaatgctggatttaagaaaagcttgatttattactgagaaaaattaataatcctaacgataatttagaattactgctagaaatcagcagtg

SEQ ID NO: 406295 - DNA, 120 bp, Artificial Sequence
  ENSG00000147481_50 (sequence is synthesized)
tggagaagctttaaaagcacaaggatgatcttgtgcttaactttttaaggtaagtgtagatgttcggatactaataacaaagattttgctactattaatattgctgtgctcataatttct

SEQ ID NO: 406296 - DNA, 120 bp, Artificial Sequence
  ENSG00000147481_51 (sequence is synthesized)
ccttatgaaattgctttattcatacttctaaaattgttctttattgtttattcttactaccgaatactttaaaatcataatgccacttatttgcacatttgaatttgcttttgaaaataa

SEQ ID NO: 406297 - DNA, 120 bp, Artificial Sequence
  ENSG00000147481_52 (sequence is synthesized)
atacatgttaaaatgcagtgaaaagacaagaaatataaaatgtaaatatatttatttcatttttaattgttttggtggatgtttgtaaaatgtaaattaatatctgtgacaaaaatttgt

SEQ ID NO: 406298 - DNA, 120 bp, Artificial Sequence
  ENSG00000147481_53 (sequence is synthesized)
ttaatatctgtgacaaaaatttgtcacttcattctttcagttcattaatgtactactaatgaaaccatacttttttaaatgaagcatactggaaaataaaaacaaatactttttactaga

SEQ ID NO: 406299 - DNA, 120 bp, Artificial Sequence
  ENSG00000147481_54 (sequence is synthesized)
aaatagctttgtgaaaagagggtggagagctactcaaaattctacgttagagagactgaaaagacatctaatttcattgctcggcagtgaacactggacacgttggtgggagttgttctg

SEQ ID NO: 406300 - DNA, 120 bp, Artificial Sequence
  ENSG00000147481_55 (sequence is synthesized)
aatgcctcataactcctttcagcattttaattgtaatcgtgtcaaatttaagatcttcgtttttgttaatggaagataaattatgcttcgatctgaaaaaaagtttgaatttttaataaa

SEQ ID NO: 406301 - DNA, 120 bp, Artificial Sequence
  ENSG00000147481_56 (sequence is synthesized)
gggcttgctgaatatgcttaaactatggtcagaagtaaaaatgaacagaaagctaatttttcacaatgcttgtctgaattggtcaaggagaatagaacattactctgctgctattcagat

SEQ ID NO: 406302 - DNA, 120 bp, Artificial Sequence
  ENSG00000147481_57 (sequence is synthesized)
gctttgccatggctggtacagcgtgatgcacagttacaaagaactttgcgtatgaacatgttctgttccagtatcaaattctgaaaggggactgcttttttccagagaactggcaattct

SEQ ID NO: 406303 - DNA, 120 bp, Artificial Sequence
  ENSG00000147481_58 (sequence is synthesized)
actcacaggagctgcgttcgccggatcctctgagaggctctgcaacgatcccgatccaattcagcagcgttttaaaaggtagccgagtgcagatgctttttcctgtctttttcattcttt

SEQ ID NO: 406304 - DNA, 120 bp, Artificial Sequence
  ENSG00000147481_59 (sequence is synthesized)
cattctctgtcttttaaaattttaacaataacctatcgtttccgcgtggagggtctaagaatcttcactgggtttaatttaggaatttcaaattgggtttctcaaaatttgaatgtggtc

SEQ ID NO: 406305 - DNA, 120 bp, Artificial Sequence
  ENSG00000147481_60 (sequence is synthesized)
cccttaattggtaatcaagattgcggagttttccaaaatattccttttcatcttatgtaattaaagatccacgagctttccaaagaagctctggattttccacggtacaaatctatatat

SEQ ID NO: 406306 - DNA, 120 bp, Artificial Sequence
  ENSG00000147481_61 (sequence is synthesized)
cttcaagtcctggtcatggagggcgacaacagctacaaacatcacttcagtttcaggaaggaaagaaaaggaagagggatgagtagaatcagccacacctgtccccttgtatcagattaa

SEQ ID NO: 406307 - DNA, 120 bp, Artificial Sequence
  ENSG00000147481_62 (sequence is synthesized)
actcaaaattctacgttagagagactgaaaagacatctaatttcattgctcggcagcttagcagagtgagcacatagcatgtgttggaagagacaacatcctgtgactgctctccagaat

SEQ ID NO: 406308 - DNA, 120 bp, Artificial Sequence
  ENSG00000147481_63 (sequence is synthesized)
gttgagattgcccgagaagtgaccccagcaaaagaaaaatattgctgtacctaaattcaagaggaattccacaaattgttaccacatacctgtgtggcttcaccattgtgaaggaagaat

SEQ ID NO: 406309 - DNA, 120 bp, Artificial Sequence
  ENSG00000147481_64 (sequence is synthesized)
ccgggttgtcggcttcaacccaacattattgtcgttgttgttgtttcctcttccttaatagttttaaatgttaattgcactatgttaaaattctgttgtctgggttaaggttggggaatt

SEQ ID NO: 406310 - DNA, 120 bp, Artificial Sequence
  ENSG00000147481_65 (sequence is synthesized)
tgttgctgtgttttataaatttttgttaagttcataattggtgaagaaatactgcgatgcaggtttaacctgttatttcaatacagaaggcaccagaatatttttcaagccatacattga

SEQ ID NO: 406311 - DNA, 120 bp, Artificial Sequence
  ENSG00000147481_66 (sequence is synthesized)
tcaccactcagagaagaggtgagaggattcttttttagtgaaattgatctaacagaaataatccacaaatagtacatttggactctcctgttgcaaacagggttcaccctaaaccacaca

SEQ ID NO: 406312 - DNA, 120 bp, Artificial Sequence
  ENSG00000147481_67 (sequence is synthesized)
gtggagcccagtggataaaccatgaatcctgtacccaacgctgtcaatttgcttttcagtgtctcactctcaaatattttgtaataccaaaggatcattaagatttgaagaaaatcaacc

SEQ ID NO: 406313 - DNA, 120 bp, Artificial Sequence
  ENSG00000147481_68 (sequence is synthesized)
ctgtaatgccagttactcaggagaccgagggaagagcatttattgaacccaacagacagaggttgcagtgagccgacaccgcaccactacgctctagcctgggcaacagagcaagactct

SEQ ID NO: 406314 - DNA, 120 bp, Artificial Sequence
  ENSG00000147481_69 (sequence is synthesized)
ccccaaacaagaaaaattataatattatctgatctcattgtgaaaagtaattacttgttgatttttaaagaattatctgtagttataaacaaataaattggaaagtggtaaatatctgta

SEQ ID NO: 406315 - DNA, 120 bp, Artificial Sequence
  ENSG00000147481_70 (sequence is synthesized)
ggaatatctcgtgcaatatcgaagaacagagtaagactgttaagatcaagatctattcttttggcttggttactgaatctgtatttgtgtgcatgagaatgtggtttaataatatccatg

SEQ ID NO: 406316 - DNA, 120 bp, Artificial Sequence
  ENSG00000147481_71 (sequence is synthesized)
aaattgatatcctgagaattcaagacagtgctatttaacaatagttctcttttagtttaatgaaaatggttggctacagtaaataacaacttaacataaacttgcctacacctaaaactt

SEQ ID NO: 406317 - DNA, 120 bp, Artificial Sequence
  ENSG00000147481_72 (sequence is synthesized)
tttatattatataccacctttattgtcaacacagcaaagacagacagtgtagcacaatgtacagacaaaactagagggagcaggattggaaactcggcggggcatacaccttggcaagtt

SEQ ID NO: 406318 - DNA, 120 bp, Artificial Sequence
  ENSG00000147481_73 (sequence is synthesized)
aaataaaacccaacactctcagcttctgtttcattaacattaaaatgttgataatactcccttctttatacaattattgttaatattaaattagatattgtatgaagtacttattgcaga

SEQ ID NO: 406319 - DNA, 120 bp, Artificial Sequence
  ENSG00000147481_74 (sequence is synthesized)
agctgtaacatagttcataatattgatattgcatcaataacatgaaaagtaacaatactttctgttctacctagtgcaagacctatgcatgtgtgctagaaagtcatctaatgggactca

SEQ ID NO: 406320 - DNA, 120 bp, Artificial Sequence
  ENSG00000147481_75 (sequence is synthesized)
gccctggtttccgagagggtgaacatgggtgtcgcagagtatcaatagctttgatgagacctggtctgacttgttatttgaatggctttaagcactaggaatggtgctcctgaatgggga

SEQ ID NO: 406321 - DNA, 120 bp, Artificial Sequence
  ENSG00000147481_76 (sequence is synthesized)
accatggaaggagagtaaaggatgcctccatctttgaaagtaaatgagtccatcacagctcaactgcagggctccacagagggaatccaactgtgagacaggtgccctggatgccgaggg

SEQ ID NO: 406322 - DNA, 120 bp, Artificial Sequence
  ENSG00000147481_77 (sequence is synthesized)
aagatagcagtggagtaaacagtggttgcagtggccacgcaatgtcatcactatgggtgcatttttgtcagaaatctcctggaaacatcaaaagcagatgtctggatttgttaggtgctg

SEQ ID NO: 406323 - DNA, 120 bp, Artificial Sequence
  ENSG00000147481_78 (sequence is synthesized)
tggacctcactgtctggaagaataagaggccaggtgaaacatgaaaatgattgtacagttgacccttgaacacttgaacaacacaggtttggacatcgagggtccactgataatgtggat

SEQ ID NO: 406324 - DNA, 120 bp, Artificial Sequence
  ENSG00000147481_79 (sequence is synthesized)
gctgagctcagcgctgacactcacaggagctgcgttcgccggatcctctgagaggctctgcaacgatcccgatccaattcagcagcgttttaaaagacggagtcttgctctggcgccagg

SEQ ID NO: 406325 - DNA, 61 bp, Artificial Sequence
  ENSG00000147481_80 (sequence is synthesized)
agcagcgttttaaaagacggagtcttgctctggcgccaggtgggagtgcagtggcgagatc

SEQ ID NO: 406326 - DNA, 120 bp, Artificial Sequence
  ENSG00000147481_81 (sequence is synthesized)
ttacaggcgtgagccaccacactcggcccatgaatttttttagtaaaattgatttgcttttataatagaagattatttagactgtagtttaagattctaaatggaacatgacaagtttaa

SEQ ID NO: 406327 - DNA, 120 bp, Artificial Sequence
  ENSG00000147481_82 (sequence is synthesized)
ctaaatggaacatgacaagtttaagaattcaaaaatcttcatcaatatcacttgttggatcctaccttttcaagataatgactacatctttacaattgctgcctttagcactgcaaatta

SEQ ID NO: 406328 - DNA, 120 bp, Artificial Sequence
  ENSG00000147485_0 (sequence is synthesized)
agtccagcagccaccatcaccaccactgcggttgctgctgcagctgcagctgctgctctccctccggctgcttcttcgcgtggccagcagcgaatggagcgatggagcccagactgttct

SEQ ID NO: 406329 - DNA, 120 bp, Artificial Sequence
  ENSG00000147485_1 (sequence is synthesized)
gctggaccactctctttctcctggccgggtggtgcctgccagggttgccctgccccagccggtgcctttgctttaagagcaccgtccgctgcatgcacttgatgctggaccacattcctc

SEQ ID NO: 406330 - DNA, 120 bp, Artificial Sequence
  ENSG00000147485_2 (sequence is synthesized)
aggtaccacagcagaccacagttctagacttgaggtttaacagaataagagaaattccagggagcgccttcaagaaactcaagaatttgaacacacttctgctgaacaacaaccacatca

SEQ ID NO: 406331 - DNA, 120 bp, Artificial Sequence
  ENSG00000147485_3 (sequence is synthesized)
gaaagatttccagaaatgcttttgaaggacttgaaaatttgctatatctgtacctgtataagaatgaaatccatgcactagataagcaaacatttaaaggactcatatctttggaacatc

SEQ ID NO: 406332 - DNA, 120 bp, Artificial Sequence
  ENSG00000147485_4 (sequence is synthesized)
tgtatattcatttcaaccaactagaaatgctacagccagagacctttggagaccttctgagattagagcgactatttttgcataacaacaaattatctaaaattccagctgggagctttt

SEQ ID NO: 406333 - DNA, 120 bp, Artificial Sequence
  ENSG00000147485_5 (sequence is synthesized)
ctaatctggattcattaaaaagattgcgtctggattccaacgccctggtttgtgactgtgatctgatgtggctgggggagcttttacaaggctttgcccaacacggccacacccaggctg

SEQ ID NO: 406334 - DNA, 120 bp, Artificial Sequence
  ENSG00000147485_6 (sequence is synthesized)
cggctacctgcgaatatcccaggagactccatgggcgtgcagttgcttcagtaacagtagaggaattcaattgccagagcccccgaattacttttgagccgcaggatgtggaggtaccat

SEQ ID NO: 406335 - DNA, 120 bp, Artificial Sequence
  ENSG00000147485_7 (sequence is synthesized)
caggaaataccgtctacttcacctgccgggcggaaggaaaccccaaacctgagattatttggatacacaacaaccactcattggatttggaagatgatactcgacttaatgtgtttgatg

SEQ ID NO: 406336 - DNA, 120 bp, Artificial Sequence
  ENSG00000147485_8 (sequence is synthesized)
atggcacactcatgatccgaaacaccagagagtcagaccaaggtgtctatcagtgcatggccagaaattccgctggggaagccaagacacagagtgccatgctcagatactccagtcttc

SEQ ID NO: 406337 - DNA, 120 bp, Artificial Sequence
  ENSG00000147485_9 (sequence is synthesized)
cagccaaaccaagctttgtaatccagcctcaggacacagaggttttaattggcaccagcacaactttggaatgtatggccacaggccacccacaccctcttatcacttggaccagggaca

SEQ ID NO: 406338 - DNA, 120 bp, Artificial Sequence
  ENSG00000147485_10 (sequence is synthesized)
atggattggagctggatggatccaggcacgtggcaacgtccagtggactttacttacagaacatcacacaacgggatcatggtcgatttacctgtcatgccaacaatagccacggcactg

SEQ ID NO: 406339 - DNA, 120 bp, Artificial Sequence
  ENSG00000147485_11 (sequence is synthesized)
ttcaagctgcagcaaacataattgtacaagctcctccacaatttacagtaacccccaaggatcaagtggtgctggaagaacatgctgtagagtggctctgtgaagctgacggcaacccac

SEQ ID NO: 406340 - DNA, 120 bp, Artificial Sequence
  ENSG00000147485_12 (sequence is synthesized)
ctcctgttattgtctggacaaaaacaggagggcagctccctgtggaaggccagcatacagttctctcctctggcactttgagaattgaccgtgcagcacagcacgatcaaggccaatatg

SEQ ID NO: 406341 - DNA, 120 bp, Artificial Sequence
  ENSG00000147485_13 (sequence is synthesized)
aatgtcaagcagtcagttcgttgggggtgaaaaaggtgtctgtgcagctgactgtaaaacccaaagctcttgcagtgtttactcaacttcctcaggatacaagtgtcgaggttggaaaga

SEQ ID NO: 406342 - DNA, 120 bp, Artificial Sequence
  ENSG00000147485_14 (sequence is synthesized)
atataaacatttcatgtcatgctcaaggagaaccacagcccataattacttggaataaggaaggtgtgcagattactgagagtggtaaattccatgtggatgatgaaggcacgctgacta

SEQ ID NO: 406343 - DNA, 120 bp, Artificial Sequence
  ENSG00000147485_15 (sequence is synthesized)
tctacgacgcagggttccctgaccagggaagatatgaatgtgtggctcggaattcttttggccttgctgtgaccaacatgtttcttacagtcacggctatacagggtagacaagctggcg

SEQ ID NO: 406344 - DNA, 120 bp, Artificial Sequence
  ENSG00000147485_16 (sequence is synthesized)
atgactttgttgaatcttccattcttgatgctgtacagagagttgacagtgcaattaactccacacgaagacatttgttttcacaaaaacctcacacctccagtgacctgctggctcaat

SEQ ID NO: 406345 - DNA, 120 bp, Artificial Sequence
  ENSG00000147485_17 (sequence is synthesized)
ttcattacccgcgtgacccactgattgtggaaatggcaagagcaggggagatttttgagcacacgctgcagctgatacgggaacgtgtgaagcaggggctcactgtggacttggaaggca

SEQ ID NO: 406346 - DNA, 120 bp, Artificial Sequence
  ENSG00000147485_18 (sequence is synthesized)
aagaattccggtacaatgacttggtgtccccgcgctccctcagcctcatcgccaatttatctggatgcacagctcgcaggcctctgccaaactgctccaaccggtgtttccatgcgaagt

SEQ ID NO: 406347 - DNA, 120 bp, Artificial Sequence
  ENSG00000147485_19 (sequence is synthesized)
aagtaccgcgcccacgacggcacgtgcaacaacctgcagcagcccacgtggggcgcggcgctgaccgccttcgcgcgcctgctgcagccagcctaccgggacggcatccgcgcgccccgc

SEQ ID NO: 406348 - DNA, 120 bp, Artificial Sequence
  ENSG00000147485_20 (sequence is synthesized)
tcctgtgggctcccgccagcccctcccgccgccccggctggtcgccacagtgtgggcgcgcgcggcggccgtcacccccgaccacagctacacgcgcatgctcatgcactggggctggtt

SEQ ID NO: 406349 - DNA, 120 bp, Artificial Sequence
  ENSG00000147485_21 (sequence is synthesized)
tctagagcacgacttggaccacacagtgcctgcgctgagcacagcccgcttctcggatgggcggccgtgcagctccgtctgcaccaacgaccctccttgtttccccatgaacacccggca

SEQ ID NO: 406350 - DNA, 120 bp, Artificial Sequence
  ENSG00000147485_22 (sequence is synthesized)
cgccgacccccggggcacccacgcgccctgcatgctcttcgcgcgctccagccccgcgtgtgccagcggccgtccctctgcgacggtggattcagtctatgcacgagagcagatcaacca

SEQ ID NO: 406351 - DNA, 120 bp, Artificial Sequence
  ENSG00000147485_23 (sequence is synthesized)
gcaaacagcctacatcgatggctccaacgtttacgggagctcggagcgggaatcccaggctctcagagacccttcggtgcctcggggtctcctgaagacaggctttccttggcctccctc

SEQ ID NO: 406352 - DNA, 120 bp, Artificial Sequence
  ENSG00000147485_24 (sequence is synthesized)
cggaaagcccttattgcccttttctacaggcccacccaccgagtgcgcgcgacaggagcaggagagcccctgtttcctggccggggaccaccgggccaacgagcatctggctctggccgc

SEQ ID NO: 406353 - DNA, 120 bp, Artificial Sequence
  ENSG00000147485_25 (sequence is synthesized)
catgcacaccctgtggttccgggaacacaacaggatggccacggagctgtccgccctgaacccccactgggagggaaacacggtttaccaggaagccaggaagatcgtgggcgcggagct

SEQ ID NO: 406354 - DNA, 120 bp, Artificial Sequence
  ENSG00000147485_26 (sequence is synthesized)
gcagcacatcacctacagccactggctgcctaaggtcctgggggaccctggcactaggatgctgaggggttaccgaggctacaaccccaacgtgaatgcaggcatcattaactcttttgc

SEQ ID NO: 406355 - DNA, 120 bp, Artificial Sequence
  ENSG00000147485_27 (sequence is synthesized)
tactgcagcctttagatttggccacacattaatcaatcctattctttaccgactgaatgccaccttaggtgaaatttccgaaggccaccttccgttccataaagcgctcttttcaccgtc

SEQ ID NO: 406356 - DNA, 120 bp, Artificial Sequence
  ENSG00000147485_28 (sequence is synthesized)
cagaataatcaaggaaggtgggatagacccggttctccgggggctgtttggcgtggctgctaaatggcgggcaccctcctaccttctcagtcctgagctgacccagaggctcttctccgc

SEQ ID NO: 406357 - DNA, 120 bp, Artificial Sequence
  ENSG00000147485_29 (sequence is synthesized)
ggcttattctgcggccgtggattcggctgccaccatcattcaaaggggtagagaccacgggatcccaccatatgttgacttcagagttttctgtaatttgacttcagttaagaactttga

SEQ ID NO: 406358 - DNA, 120 bp, Artificial Sequence
  ENSG00000147485_30 (sequence is synthesized)
ggatcttcaaaatgaaattaaagattcagagattagacaaaaactgagaaagttgtacggctctccaggtgacattgacctctggcccgcccttatggttgaagacctgattcctggtac

SEQ ID NO: 406359 - DNA, 120 bp, Artificial Sequence
  ENSG00000147485_31 (sequence is synthesized)
aagagtgggaccaacacttatgtgcctgtttgttacccagtttcagcggctaagagatggagataggttctggtatgaaaaccctggagtatttaccccggcacaactcactcagctgaa

SEQ ID NO: 406360 - DNA, 120 bp, Artificial Sequence
  ENSG00000147485_32 (sequence is synthesized)
gcaggcgtccctgagccgggtgctttgtgacaatggtgacagcattcagcaagtgcaggctgatgtctttgtaaaggcagaatacccacaggattacctgaactgcagcgagatcccgaa

SEQ ID NO: 406361 - DNA, 120 bp, Artificial Sequence
  ENSG00000147485_33 (sequence is synthesized)
ggtggacctgcgagtgtggcaagactgctgtgcagactgtaggagtagaggacagttcagagcagtgacgcaagagtctcaaaagaaacgctcagctcaatacagctatcctgttgataa

SEQ ID NO: 406362 - DNA, 120 bp, Artificial Sequence
  ENSG00000147485_34 (sequence is synthesized)
ggatatggagttaagtcatctaagaagtaggcaacaagataaaatatatgtgggtgaagatgctagaaatgtgacagttctggcaaaaacaaagttctcccaagatttcagcacgtttgc

SEQ ID NO: 406363 - DNA, 120 bp, Artificial Sequence
  ENSG00000147485_35 (sequence is synthesized)
agcggaaattcaggaaaccatcacagcactcagagagcagataaacaagctggaggcacgcctgaggcaggcagggtgtacagatgttagaggggttccaaggaaggccgaggagcgctg

SEQ ID NO: 406364 - DNA, 120 bp, Artificial Sequence
  ENSG00000147485_36 (sequence is synthesized)
gatgaaagaagactgcactcactgcatttgtgagagtggccaggtcacctgtgtggtggagatttgtcccccggctccctgtcccagtcctgaattggtgaaaggaacctgctgtccagt

SEQ ID NO: 406365 - DNA, 120 bp, Artificial Sequence
  ENSG00000147485_37 (sequence is synthesized)
ttgcagagaccgaggaatgccaagtgattccccagagaagcgctaataaaagttttgtgctgttgagccccaaatgggaaatttctcaggaagagacatttaggacttcagaacttttaa

SEQ ID NO: 406366 - DNA, 120 bp, Artificial Sequence
  ENSG00000147485_38 (sequence is synthesized)
cttgtagtcacattgttgatatggaaaccactgacttaagcaacttagttcatctaatcttacatatacttacgatcttttattttttcattttctaacataccttgaaataattcaaaa

SEQ ID NO: 406367 - DNA, 120 bp, Artificial Sequence
  ENSG00000147485_39 (sequence is synthesized)
ctaaaagcaataaagtgcatatgaagtgtttgatcataagaaatatttcttactgtaagctgtcagttttatatgccacacctggaaataaaaagaatatcatggaatatttaaaaaata

SEQ ID NO: 406368 - DNA, 120 bp, Artificial Sequence
  ENSG00000147485_40 (sequence is synthesized)
catgaatttataatagagaaagcagcttccctacctggctactggataatatgttatattaaatttgtcactgctctttcactgtttaaagtgaaatgaagaattcgttagcaaaagaaa

SEQ ID NO: 406369 - DNA, 120 bp, Artificial Sequence
  ENSG00000147485_41 (sequence is synthesized)
ttaaggtctaaataatatatcaaatatatatgtaatacaacatgaaatttcctttatgtcataagaaatactttcttattattttagataaattacatgaaccagatgtgacactctgga

SEQ ID NO: 406370 - DNA, 120 bp, Artificial Sequence
  ENSG00000147485_42 (sequence is synthesized)
tggattatcatcttatctgccatttaattttaattttgaattccactcataccattttccttttaagatcacaaagaacaccaatcacaatgccttgtacatgccaaatgaccaaagaag

SEQ ID NO: 406371 - DNA, 120 bp, Artificial Sequence
  ENSG00000147488_0 (sequence is synthesized)
ctttttgtagggagaagggcaggatgtttttaactgaatgtgacctcaggggaatactagagaaaataataaaatttctgaatggggcagcgtggagaaatcctaagagaaatagcataa

SEQ ID NO: 406372 - DNA, 120 bp, Artificial Sequence
  ENSG00000147488_1 (sequence is synthesized)
gagcattttggaacacatccaggaaaagataactttcgacacacctgtagacgttcgccaggtaaaggagtgatggaaactctccagttcagatccagtagcttttagggaaggaactac

SEQ ID NO: 406373 - DNA, 120 bp, Artificial Sequence
  ENSG00000147488_2 (sequence is synthesized)
agttgctgacttaagttgaagaagcatctatttaatgtctggtcaaatcctacaagaaacacagaaatctatgattaaaaagctgagcactttgatatactgcaaagggtagagaaggca

SEQ ID NO: 406374 - DNA, 120 bp, Artificial Sequence
  ENSG00000147488_3 (sequence is synthesized)
ggacggtagaaattttctgcaagaaagaatgaatttcaggatttatcactaaataagacaaagtcatttatttagtccccctgacacagcagggcaaactgagttgacatacaagttacc

SEQ ID NO: 406375 - DNA, 120 bp, Artificial Sequence
  ENSG00000147488_4 (sequence is synthesized)
tggagaaaaagagagcaattccaggacttcctcttcagcctaaaagaaggtaccagatctgtgcactggggcgatgtggaagagacctgcttattgcccctgatgtaagctccagtaaga

SEQ ID NO: 406376 - DNA, 120 bp, Artificial Sequence
  ENSG00000147488_5 (sequence is synthesized)
aaagacgtcaagtacaagtactaggaaatcactttatacatctgtttataggaatgacctcaggactttgtgttcatgttatagatggatgcagaggctgaagataaaacgctgcgtact

SEQ ID NO: 406377 - DNA, 120 bp, Artificial Sequence
  ENSG00000147488_6 (sequence is synthesized)
cgctctaaaggaaccgaggtgccaatggattcactaatccaggagctcagtgttgcctatgattgctccatggcaaagaagagaacagctgaagatcaggctttgggggttccagtcaac

SEQ ID NO: 406378 - DNA, 120 bp, Artificial Sequence
  ENSG00000147488_7 (sequence is synthesized)
aaaaggaaatccctgctaatgaagccccgacactacagcccaaaagcagactgccaagaagaccgcagtgacaggacagaggacgatggccccttggaaacacatggtcactctaccgca

SEQ ID NO: 406379 - DNA, 120 bp, Artificial Sequence
  ENSG00000147488_8 (sequence is synthesized)
gaggaaatcatgataaaacctatggatgaaagtcttctttcaactgcacaagaaaactccagtaggaaggaagacagatactcttgttatcaagagctcatggtcaagtctttaatgcac

SEQ ID NO: 406380 - DNA, 120 bp, Artificial Sequence
  ENSG00000147488_9 (sequence is synthesized)
ttggggaaatttgaaaaaaatgtatctgttcagactgtaagtgaaaatttaaatgacagtggcatccagtctttaaaagcagagagcgatgaagcagacgagtgctttctgattcattct

SEQ ID NO: 406381 - DNA, 120 bp, Artificial Sequence
  ENSG00000147488_10 (sequence is synthesized)
gatgatggaagagacaagattgatgattctcagccacccttctgctcctctgatgacaatgaaagtaactctgaaagtgcagaaaatggctgggacagtggctccaacttctcagaagaa

SEQ ID NO: 406382 - DNA, 120 bp, Artificial Sequence
  ENSG00000147488_11 (sequence is synthesized)
accaaaccacctagagtcccaaagtatgttttaacagatcataaaaaagacctattggaagttcctgaaataaaaactgaaggtgacaaatttatcccttgtgagaacaggtgtgattct

SEQ ID NO: 406383 - DNA, 120 bp, Artificial Sequence
  ENSG00000147488_12 (sequence is synthesized)
gaaacagaaaggaaagacccgcagaatgctctcgcagaacccctggatggcaatgcccagccctcattccctgacgttgaggaggaagatagcgagagcctggcagtaatgacggaagag

SEQ ID NO: 406384 - DNA, 120 bp, Artificial Sequence
  ENSG00000147488_13 (sequence is synthesized)
ggtagtgacctggaaaaggccaaggggaatttaagtttgctggagcaggcaattgctctgcaggctgagcgaggttgtgttttccataacacctacaaagagctggataggttcctgctg

SEQ ID NO: 406385 - DNA, 120 bp, Artificial Sequence
  ENSG00000147488_14 (sequence is synthesized)
gagcacctagcaggggaaaggaggcaaaccaaagttatcgacatgggtggaagacaaatctttaacaataaacattcaccaaggcctgaaaagagggagaccaagtgcccgatccctgga

SEQ ID NO: 406386 - DNA, 120 bp, Artificial Sequence
  ENSG00000147488_15 (sequence is synthesized)
tgtgatggcacgggacacgtgacagggctctacccgcaccaccgcagcctttcggggtgcccccacaaagtgcgggttcccctggaaattcttgccatgcatgaaaatgtgctcaagtgt

SEQ ID NO: 406387 - DNA, 120 bp, Artificial Sequence
  ENSG00000147488_16 (sequence is synthesized)
cccacgccgggatgcacaggaaggggtcatgtgaacagcaaccgcaacacccacaggagtctttctggttgtccaattgctgcagctgaaaaattggcaatgtcccaggataaaaatcag

SEQ ID NO: 406388 - DNA, 120 bp, Artificial Sequence
  ENSG00000147488_17 (sequence is synthesized)
cttgattctccccaaactgggcagtgtcctgaccaggcccacaggacaagtttggtgaagcaaattgaattcaatttcccgtcacaagccatcacctctcccagagccacagtgtcaaaa

SEQ ID NO: 406389 - DNA, 120 bp, Artificial Sequence
  ENSG00000147488_18 (sequence is synthesized)
gaacaagagaagtttggaaaagtaccatttgattatgccagttttgatgcccaagttttcggtaaacgccctctcatacaaacagtgcaaggacgaaaaacaccaccatttcctgaatca

SEQ ID NO: 406390 - DNA, 120 bp, Artificial Sequence
  ENSG00000147488_19 (sequence is synthesized)
aagcattttccaaatccagtgaaatttcctaatcgactgcctagtgcaggcgcccacacccagagccctggccgtgccagctcttatagctacggtcaatgtagtgaagacacccacata

SEQ ID NO: 406391 - DNA, 120 bp, Artificial Sequence
  ENSG00000147488_20 (sequence is synthesized)
gcagcagctgctgccatcctgaacctttccacccgctgcagggaagccacagacatcctctccaacaagccacagagtctgcatgccaagggagccgaaatagaagtggatgaaaatggc

SEQ ID NO: 406392 - DNA, 120 bp, Artificial Sequence
  ENSG00000147488_21 (sequence is synthesized)
acattggacttaagcatgaaaaaaaatcgaatcctggacaagtctgcacccctaacttcctctaacacttctattccaactccttcctcttccccattcaaaacaagcagcattctggtc

SEQ ID NO: 406393 - DNA, 120 bp, Artificial Sequence
  ENSG00000147488_22 (sequence is synthesized)
aatgcagcattctatcaggctctttgtgaccaagagggctgggacactcctatcaactatagcaaaactcacgggaagacagaggaggagaaagagaaagacccagtgagctctctagaa

SEQ ID NO: 406394 - DNA, 120 bp, Artificial Sequence
  ENSG00000147488_23 (sequence is synthesized)
aatttagaggaaaaaaagtttcctggagaggcctctataccaagccctaaacccaagcttcatgcaagagatctcaaaaaggaactaatcacctgtccaacaccaggatgtgatggaagt

SEQ ID NO: 406395 - DNA, 120 bp, Artificial Sequence
  ENSG00000147488_24 (sequence is synthesized)
ggccacgtgacaggaaactatgcatctcatcgcagtgtttctggatgtcctttagcagataagactctaaaatccctcatggctgccaactctcaggagcttaagtgtccaaccccaggc

SEQ ID NO: 406396 - DNA, 120 bp, Artificial Sequence
  ENSG00000147488_25 (sequence is synthesized)
caaggaaaggtggtgtcaaaatgacccctaccaaggaagaaaaagaagaccctgaactgaaatgtcctgtgatagggtgtgatggccaaggtcacatatcaggtaaatacacatcacacc

SEQ ID NO: 406397 - DNA, 120 bp, Artificial Sequence
  ENSG00000147488_26 (sequence is synthesized)
gcacagcttctggctgtcctctggctgccaagagacagaaggagaatcctctcaatggagcctccctctcctggaaactgaacaaacaagagctaccacattgtcccttgccaggctgca

SEQ ID NO: 406398 - DNA, 120 bp, Artificial Sequence
  ENSG00000147488_27 (sequence is synthesized)
atgggctgggccatgtaaataatgtttttgtcacccaccgaagcttatctggatgtcctctcaatgcacaagttatcaaaaagggcaaggtttctgaagaactcatgaccatcaagctca

SEQ ID NO: 406399 - DNA, 120 bp, Artificial Sequence
  ENSG00000147488_28 (sequence is synthesized)
aagcaactgggggaatagagagtgatgaagaaattaggcatttggatgaagaaataaaggaactgaatgaatccaaccttaaaattgaagcagatatgatgaaacttcagacccagatca

SEQ ID NO: 406400 - DNA, 120 bp, Artificial Sequence
  ENSG00000147488_29 (sequence is synthesized)
catctatggagagcaacttaaagacgatagaggaggagaacaaactcatagaacagaacaatgaaagtctgctgaaagagctggcaggtctaagccaagctctcatttcaagccttgctg

SEQ ID NO: 406401 - DNA, 120 bp, Artificial Sequence
  ENSG00000147488_30 (sequence is synthesized)
acatccagcttccacagatgggacctatcagtgagcagaattttgaagcatatgtaaatacactcacagatatgtacagcaatctggaacgggactattccccggaatgcaaagctctac

SEQ ID NO: 406402 - DNA, 120 bp, Artificial Sequence
  ENSG00000147488_31 (sequence is synthesized)
tggaaagtatcaaacaggcagtgaagggtatccatgtgtaggatcacagcgctgccgggcaacagaagttaccaacagcagtaaactccagatggatctgttagaggttcatgtactgct

SEQ ID NO: 406403 - DNA, 120 bp, Artificial Sequence
  ENSG00000147488_32 (sequence is synthesized)
aaggcgtggaggttgccgtactgcatttacaatttgcaacattgcactaattttattttccccagctgatataaaaaggaaagaaaaactatgatagacttcttggattaaaagcaatgc

SEQ ID NO: 406404 - DNA, 120 bp, Artificial Sequence
  ENSG00000147488_33 (sequence is synthesized)
tcttggattaaaagcaatgcagtcaattattagatcttatttattttcatatgtttttcttttatttcttcattgtactctttttttttttgtaaagtatatgtaaaataaatgtgacat

SEQ ID NO: 406405 - DNA, 120 bp, Artificial Sequence
  ENSG00000147488_34 (sequence is synthesized)
taatcaaagagttttttatcttttaactgcattttgaagtctgccgtatttttacaagtgtgtttattaatttattttccaataggatttaaatagaaatgctattctcaagtcatcttt

SEQ ID NO: 406406 - DNA, 120 bp, Artificial Sequence
  ENSG00000147488_35 (sequence is synthesized)
cttgctgggttttaatgaggaaacaggaaagggtgaaggaaatccttgtctaaggactgcactatagttgagtttgatttttattgcacacttcttcccccacctttcactgatttttgt

SEQ ID NO: 406407 - DNA, 120 bp, Artificial Sequence
  ENSG00000147488_36 (sequence is synthesized)
atttataaatgaatttgcggtaaggtgagctgcacggaaggaataagaagacaaatggcgcccactagtggggaatccgcactcacaaaagcacaggatgctggaaaacagcctgctcag

SEQ ID NO: 406408 - DNA, 120 bp, Artificial Sequence
  ENSG00000147488_37 (sequence is synthesized)
aatttgttagcaataattaaatatagcaatcagcaaagtattcgacttggctggacggttttcgttaatatgaattatttatttgaaatgttttaaagaaacataagcctttttagtgat

SEQ ID NO: 406409 - DNA, 120 bp, Artificial Sequence
  ENSG00000147488_38 (sequence is synthesized)
gcagatttgtctgtttgtttttcaagtcatatcagatcgttggcaactcgtatcccaagatgaaaaataagacttggtgtgaccagccaggctttcctgccatatgttggtacaatatac

SEQ ID NO: 406410 - DNA, 120 bp, Artificial Sequence
  ENSG00000147488_39 (sequence is synthesized)
aagtgacaatattggtgtagatttgtacttagcaaatacaaacacatccaaatgaaaaattttgtagataccatatcccctgaaatagcatttatcttactgggttgactggaaaggaat

SEQ ID NO: 406411 - DNA, 120 bp, Artificial Sequence
  ENSG00000147488_40 (sequence is synthesized)
ggaaaatatagtaacacatgaaaaaatgctactccaatctgaatgattacttcaaacactggcaccttgggtctcacccaccataggaaacaagacaacattcaatttgatagaaatctt

SEQ ID NO: 406412 - DNA, 120 bp, Artificial Sequence
  ENSG00000147488_41 (sequence is synthesized)
aggaaacaagacaacattcaatttgatagaaatcttgccacaaaacttcaaatgctacaaaatatacacacacactcacacacacaggcatactcacacacagacacacacacacacaca

SEQ ID NO: 406413 - DNA, 120 bp, Artificial Sequence
  ENSG00000147488_42 (sequence is synthesized)
atcttgaatttctgaacggatcagagtttcatagtttctatagtaaaggcaatgtctatttcagggattgtaaagtagttaagcattgtttcaaaagtttttttatatttatttttttta

SEQ ID NO: 406414 - DNA, 120 bp, Artificial Sequence
  ENSG00000147488_43 (sequence is synthesized)
aggaaaaggtatagacaaccagctaaactgcctttttggtgtgcacacacatttcatgtgcagacgtgcctctgtgtaaatgtacacatgaacttcatgtgggcttaattttctgtgcta

SEQ ID NO: 406415 - DNA, 120 bp, Artificial Sequence
  ENSG00000147488_44 (sequence is synthesized)
taaacaaaagtgtttattttttattaacctcatggatatttagatggaaagtgatggcattcacaggcttgatgtattccactgttattactgttacctgcacaaatgaaaaacaatact

SEQ ID NO: 406416 - DNA, 120 bp, Artificial Sequence
  ENSG00000147488_45 (sequence is synthesized)
caacagtaattccactcccatgaaactttggtcattgttatgcattaagtggggcttatctttggtttggagttcatttgaactcttgaaccttagtttagtgaagatgaactgtctgtt

SEQ ID NO: 406417 - DNA, 120 bp, Artificial Sequence
  ENSG00000147488_46 (sequence is synthesized)
cttaggtagaaacggtgtttatttaaaaatcagttttaaaaaatgagctaccatatgtgctgtctattataaatgggacaccaaacaaaattttctattacagttgtgtacttgcaaaca

SEQ ID NO: 406418 - DNA, 120 bp, Artificial Sequence
  ENSG00000147488_47 (sequence is synthesized)
ttttgctatacagtacttcatagatgcatacaaatgagctcacttattacaaagacaaacgtttaatttgctaaatattttaacaagtttgttatatattttatttaatttaaaagaaat

SEQ ID NO: 406419 - DNA, 120 bp, Artificial Sequence
  ENSG00000147488_48 (sequence is synthesized)
ctcttaccaacctacatatttattactataatttgctatgacttcaggttaatttatttgtgtttgcatagtttgagcaggatgttttgtgaagtatgtttgtatttatttgcctacttt

SEQ ID NO: 406420 - DNA, 120 bp, Artificial Sequence
  ENSG00000147488_49 (sequence is synthesized)
gtacttgatgtgttttgtaatgtgcactgaatttgttttcttttcaactatgttaatgatcaatactgtaaattgggtcttttgtaaacaaaaaggcaatgatgtatgcattttttttaa

SEQ ID NO: 406421 - DNA, 120 bp, Artificial Sequence
  ENSG00000147488_50 (sequence is synthesized)
tttgaggtagtttgtttgtatactgtttctccaaacacttaatatttcttacatcaaagcaacaaaattgtgttcagtgctgtacatttggtgtatggtaggaaataaaaattgataacg

SEQ ID NO: 406422 - DNA, 120 bp, Artificial Sequence
  ENSG00000147488_51 (sequence is synthesized)
atcactgcttccctgatgtcagcgtgagaggcagaacaaaggctaggaggcaccgagcccccaattttgtgagtgtccctgaagcattgtgacaattccattttatgtgtctgcgtgctc

SEQ ID NO: 406423 - DNA, 120 bp, Artificial Sequence
  ENSG00000147488_52 (sequence is synthesized)
gacatgaggccacttacctggtgagggacaccagagtcctttaaaggaaccaagtcattcagagaaaaaaaggccagacctgaacattagaatccaagaaactgacaccttcaagaaaac

SEQ ID NO: 406424 - DNA, 120 bp, Artificial Sequence
  ENSG00000147488_53 (sequence is synthesized)
cctttttacctataagccactttgagagggactcaagactgatcacccaagaagctgatgataaaaattaatttagaagagaagtgtccctccagggtgtggcagaggcatctgtagggt

SEQ ID NO: 406425 - DNA, 120 bp, Artificial Sequence
  ENSG00000147488_54 (sequence is synthesized)
gtcatatcatgggaactacctttcaaagaaacagctttagtgtttccgttcagcccaccagggaggagagaaatataagttttggaaacaaacaaaaaagagtgatggaaactctccagt

SEQ ID NO: 406426 - DNA, 120 bp, Artificial Sequence
  ENSG00000147488_55 (sequence is synthesized)
atcaaagaatttatacgaaagctctcctctacaacagctctttctctgtggattcgcttacaaatttattgttagtgttgaatttagaattgcaatttttgtcagaaatacagccattta

SEQ ID NO: 406427 - DNA, 120 bp, Artificial Sequence
  ENSG00000147488_56 (sequence is synthesized)
ggctccgtgtggaacatgaggctggaggcctcacaccaacagaagcattccagagattattttatgtttactgtactgttcttactagggcagaaaagtgtcttaaaatatattggggaa

SEQ ID NO: 406428 - DNA, 120 bp, Artificial Sequence
  ENSG00000147488_57 (sequence is synthesized)
atggacagcctgcaaatcccactcatggagctctgtaagtgggagcagattgctgtctgagtacagggcttctgcagaagtctccctatcaactccacgtcgaactcaaagtctagagag

SEQ ID NO: 406429 - DNA, 120 bp, Artificial Sequence
  ENSG00000147488_58 (sequence is synthesized)
cttcaacaattaatgatatgtcatctggatccagtcataaaagcatgatgaccaccccttcccccacccctcaccattcctttctccttggatttgttatatttcattctgttcaatata

SEQ ID NO: 406430 - DNA, 120 bp, Artificial Sequence
  ENSG00000147488_59 (sequence is synthesized)
tggctccccaaagcgttccgtgtgtcaaagtattctctaggtgggaagcataattttaatgtacaagaagaaaggtttcctcagatttgaactaaaattataactttgtttaaaaaccaa

SEQ ID NO: 406431 - DNA, 120 bp, Artificial Sequence
  ENSG00000147488_60 (sequence is synthesized)
ttactttcaggatttagaaagagctttgtttgccagtgtgactgttttccaggatcttttgttttaggttagtgtatggcaaacaaaggggaataggcaggtggaaagcttcagaactct

SEQ ID NO: 406432 - DNA, 120 bp, Artificial Sequence
  ENSG00000147488_61 (sequence is synthesized)
ttctgaactgagggcgcaatagaataggccaaaaacatttggagagaaagccgtttttttttttttagttgcaatcaaacgcaaactaagaattcccaagctcctgtgctacttttcaat

SEQ ID NO: 406433 - DNA, 65 bp, Artificial Sequence
  ENSG00000147488_62 (sequence is synthesized)
ggccaggctggtctcagaagcttgaaccactgtgtccagcctcctgcgtttttttttcatttccc

SEQ ID NO: 406434 - DNA, 120 bp, Artificial Sequence
  ENSG00000147488_63 (sequence is synthesized)
gccaccccattctcttattcagctcagaaccaggaaggactccttcctggggggaaaaggtaagcaggaggtacccagcagcccctattaccattgtggacaccagcagtcttcaccact

SEQ ID NO: 406435 - DNA, 120 bp, Artificial Sequence
  ENSG00000147488_64 (sequence is synthesized)
ggagaattctacagtcctcaaggtccctgagctcagcttggggagctgcctggagttcacatagctgcactgctccaaagaaggagcccacattgtgcctcaactcttgtaggccaagct

SEQ ID NO: 406436 - DNA, 120 bp, Artificial Sequence
  ENSG00000147488_65 (sequence is synthesized)
actcggcgccagccccacggccatcaccggaccgctggagatgtgactgggctcgggacatgagcccgcttgttcgctcactctcagtgaaaagagttttgaaatgagttctgaatagac

SEQ ID NO: 406437 - DNA, 120 bp, Artificial Sequence
  ENSG00000147488_66 (sequence is synthesized)
tgtgacctcaggggaatactagaggtaaggagagaaaaataattgaggtaactgtgggtgttttacatctcggaaaccatggcttttaataaggccacatgaagagagaagctggcatca

SEQ ID NO: 406438 - DNA, 120 bp, Artificial Sequence
  ENSG00000147488_67 (sequence is synthesized)
aaagataactttcgacacacctgtagacgttcgccaggtaaaggaaatccaggcccttgagcaatgtattgatgaattggggtggaaatggaggaggatggaaacgatggcggcactgga

SEQ ID NO: 406439 - DNA, 120 bp, Artificial Sequence
  ENSG00000147488_68 (sequence is synthesized)
ctgttttccagaaaccatttacacaggctcaccagaagagggcagcgcagagcaatgaactctccgaggagtttccaaacagatgtcttgaaacttaaagtgaaaatctctgcatgaaag

SEQ ID NO: 406440 - DNA, 120 bp, Artificial Sequence
  ENSG00000147488_69 (sequence is synthesized)
tagccgtttttggacagcgtcctccaccaaaaccatatatctctaaaataataataaaactccccaaacatgctaatctcgaaatgggtccctcaacatggaaggattgagttgcaaggg

SEQ ID NO: 406441 - DNA, 120 bp, Artificial Sequence
  ENSG00000147488_70 (sequence is synthesized)
acaaaattttacttccctgtcagagatgttttcacttcgattatccttttgatttattttattataaaagactatgtgaagtctagtattagtcatgtgcacaaatattcattatgcagc

SEQ ID NO: 406442 - DNA, 120 bp, Artificial Sequence
  ENSG00000147488_71 (sequence is synthesized)
tttttggggtgatttttttgataaaaatattgaaaaaatcacaaattcagattcgtggaagattccctacgcaacacagcgtttgaagcaaaatgcagcttaaggaagtttcccattaaa

SEQ ID NO: 406443 - DNA, 120 bp, Artificial Sequence
  ENSG00000147488_72 (sequence is synthesized)
tccatatttccttgatgcaaaatgatatcacattgttttacttgttaatttttttcttctcagaattaccacagaaaatattttttgttttataataaaacacgtgatactctacattgg

SEQ ID NO: 406444 - DNA, 120 bp, Artificial Sequence
  ENSG00000147488_73 (sequence is synthesized)
acatacattttacacttgaaatctggaaagaaaaacctactagactggaacagaattccaaagaacgtgaggggacaaatctatggagacatttatattttgttttagggttattataaa

SEQ ID NO: 406445 - DNA, 120 bp, Artificial Sequence
  ENSG00000147488_74 (sequence is synthesized)
actctagtttcatcgtctatgcataaatgtttaggggatctaaatatcttcactaaattttattctgtaatcggaaagttggcatttaagatgatcattcttataggctaattaggatga

SEQ ID NO: 406446 - DNA, 120 bp, Artificial Sequence
  ENSG00000147488_75 (sequence is synthesized)
taaaatcctttcctcttttcaaaagttcacgaacgcataacaaattggaactacttttacaagccgagtgtccctcttatgccattagctttcttggatttaccttctagatgactttgg

SEQ ID NO: 406447 - DNA, 120 bp, Artificial Sequence
  ENSG00000147488_76 (sequence is synthesized)
ctcctgttaacttcagatctttgacatatcaagtatggttgttttcaaaggtttcccaggcaactgcaacaattcatctggttctagtcaaaagtgcccttgaactctcagctcacttcc

SEQ ID NO: 406448 - DNA, 120 bp, Artificial Sequence
  ENSG00000147488_77 (sequence is synthesized)
cttccctgtatgagtaatgtgtgtagcaaaaggaaaaacaccaaagacttcatgtaatggctaatgtgaatgatttggtgaagagaggaatggatttcacaaaaggatccacttggatgt

SEQ ID NO: 406449 - DNA, 120 bp, Artificial Sequence
  ENSG00000147488_78 (sequence is synthesized)
taagacctcagctggctgcctgcgggttccctttgtcaagctctcatttgcatttagggggaaggccacaacccacatcatgtgttcggggttctgtttaactcttcctcacagttccta

SEQ ID NO: 406450 - DNA, 120 bp, Artificial Sequence
  ENSG00000147488_79 (sequence is synthesized)
gggccccaaactcttaccctaggtggccccaaggactccttcaaggccagatcgctggcccgccagggagtgactgcccccaaatctctgagagatgcctcaggactccagctgactcac

SEQ ID NO: 406451 - DNA, 120 bp, Artificial Sequence
  ENSG00000147488_80 (sequence is synthesized)
acacacgctgacctgtgagaatcattctgtgcttcttgtttctcacataacccactgggaagcaatggttggagtcttgttgcattttacttacaggaagagttttataattacctccca

SEQ ID NO: 406452 - DNA, 120 bp, Artificial Sequence
  ENSG00000147488_81 (sequence is synthesized)
agaagttcctgaagaacagaggagggagtaattggaatctctgatcctgttgtttgtgaaaggttcctctgctttacattaattacattctgtgttgcgtttaaaagaaaagatttcacc

SEQ ID NO: 406453 - DNA, 120 bp, Artificial Sequence
  ENSG00000147488_82 (sequence is synthesized)
tatgggtctataacaaattttaggaaggctatttcattgatatgtgaaagtgtataatagttgctttagctactagcccttccaacagctacatttaccactgtgattgtcactttgaat

SEQ ID NO: 406454 - DNA, 120 bp, Artificial Sequence
  ENSG00000147488_83 (sequence is synthesized)
gtcactttgaataatccttgtgttattaaaattaatacagataaatataattttatagtaggaaatgtagttgtcaggatgtgaaacaatagtaatcaatttgaataaatatttgctatt

SEQ ID NO: 406455 - DNA, 120 bp, Artificial Sequence
  ENSG00000147488_84 (sequence is synthesized)
agttttaatcctcaaaagagaactctgaccaaaataggaatatagcaggatcaatgaaacaggtggcatgagtcatctcactggcttttaattaaaaaggatgctgtggttgttggcgtg

SEQ ID NO: 406456 - DNA, 120 bp, Artificial Sequence
  ENSG00000147488_85 (sequence is synthesized)
gactggactgcgcataggcagttttagaatttcttaagctgaaatccagctggagagttcttaatcagaatggacttattttgataatttataatctgtgtattcagagcattgatgtta

SEQ ID NO: 406457 - DNA, 120 bp, Artificial Sequence
  ENSG00000147488_86 (sequence is synthesized)
tagttttgatacctaaatcaccgttttaaaaattcaaagagatatatgaatcctgagtctcggacagttattcctgagccaaaggatttctgtgcaatgctaatatgtataatagagaat

SEQ ID NO: 406458 - DNA, 120 bp, Artificial Sequence
  ENSG00000147488_87 (sequence is synthesized)
cagtctttcactgtacagttttgtcatcatgtttcaataactgaatgaatattctgaattaataagcataacgtttgtataagctaaagactaatctaagctctgcattcattgatggga

SEQ ID NO: 406459 - DNA, 120 bp, Artificial Sequence
  ENSG00000147488_88 (sequence is synthesized)
accttaagcaaatgtttcttttcatcagcttgttcaaaaggcataaacataattacagttctgaggcgataacatatcgactggttaaatagtaagtgggtctggacaaggtaacttaaa

SEQ ID NO: 406460 - DNA, 120 bp, Artificial Sequence
  ENSG00000147488_89 (sequence is synthesized)
gttatgggctgcacgttgttttgagtacttggaagcatctggaaaaaataatttttttaaaaagatatttttactgtttatcttatagaaaaacagtatgagcattaaacccccactaga

SEQ ID NO: 406461 - DNA, 120 bp, Artificial Sequence
  ENSG00000147488_90 (sequence is synthesized)
attttggaggttttctttttctaaagcgttggttaaaattcagataagttgatacttacagcttgagagaaaagatggggaagtggtagaaatatcaaatcatgagttagttttaaattt

SEQ ID NO: 406462 - DNA, 120 bp, Artificial Sequence
  ENSG00000147488_91 (sequence is synthesized)
ctcagaatgctcagggggcagtgagggaaagagggacttgctggccatgtccccacacctccgctttgcaccttttgctgaagttagttcccgaaaacagtgctgggtgtttgggttaca

SEQ ID NO: 406463 - DNA, 120 bp, Artificial Sequence
  ENSG00000147488_92 (sequence is synthesized)
tctggttcagccttcttttcctccttccttctttatccgtcacatggcctgccctctatctcttaaatcttaggtctgttgtgagactggggaaggagtgatgtgaacatgtgctcctgg

SEQ ID NO: 406464 - DNA, 120 bp, Artificial Sequence
  ENSG00000147488_93 (sequence is synthesized)
gcctggaaatgcccctctgccccgactccttctgtctcagcagtgcttgtcattaattctcccaacaaatacctgagcccttctctgtgcaggatgggtctcagtgctttgaatgtgctg

SEQ ID NO: 406465 - DNA, 120 bp, Artificial Sequence
  ENSG00000147488_94 (sequence is synthesized)
tctcgtttaattctctcaaaagccctttattgacaatgctcttataatattttatacagaaagaatggaaagctaatccaatctttttctaatgtggttaatcaaatttatttattttta

SEQ ID NO: 406466 - DNA, 120 bp, Artificial Sequence
  ENSG00000147488_95 (sequence is synthesized)
attaatggtggcttagaaagctttctttcagcattactatcctttatgagattgtcataaatgtttactatttttcattgttcatggcaaggcggcaatagatcttattcagaattgata

SEQ ID NO: 406467 - DNA, 120 bp, Artificial Sequence
  ENSG00000147488_96 (sequence is synthesized)
atcagtgtgatttatctggtagccaaaccaaaaatcaaactattatgctgtttagatataatggtagccactagaagatttacatcaaatgttagaccagaagccctttccatcagtgac

SEQ ID NO: 406468 - DNA, 120 bp, Artificial Sequence
  ENSG00000147488_97 (sequence is synthesized)
caggtttggtatctgctaggagggaaaagcctggtaactgatcaccagtgtttctgttctttttactttatagtttgtaatttaccaaggcatgattaattttgctgatgtttaagttac

SEQ ID NO: 406469 - DNA, 120 bp, Artificial Sequence
  ENSG00000147488_98 (sequence is synthesized)
ttacaatcatattaagagttagagaggagtgatatcagcaagatggctgactaaaagtgcccaacacccatttcctggactacccccacaaaaaatgaataaacaatgaataaacaacta

SEQ ID NO: 406470 - DNA, 120 bp, Artificial Sequence
  ENSG00000147488_99 (sequence is synthesized)
atccagtagcttttagggaaggtaagtaaaagctatttaaaaataaacttttcccccaaagaaaaagaatctccaacttttcaacatccatcaaaaacctgagaagttaaggaacttcat

SEQ ID NO: 406471 - DNA, 120 bp, Artificial Sequence
  ENSG00000147488_100 (sequence is synthesized)
tttagaggaccagaaaagatgcttgctttggttattgttggcatcctcatggtaatttgggttatgttcatatagatttttgaggagtgtttacacctgttcatcctgattcatgacttc

SEQ ID NO: 406472 - DNA, 120 bp, Artificial Sequence
  ENSG00000147488_101 (sequence is synthesized)
atatgtttgatattaggggcattaatatgtaagacattcagaattaacatgtatgattttaaaatgtggtagacaggataaagtacccctccccaaaatatccatgaaatctctgaaatc

SEQ ID NO: 406473 - DNA, 120 bp, Artificial Sequence
  ENSG00000147488_102 (sequence is synthesized)
ctaaaggaaccgaggtgccaatggattcactaatccaggagctcagattgcccctgtgagaatagagagaagtagactcctagactcacaaagtgctcaagtgttgcctatgattgctcc

SEQ ID NO: 406474 - DNA, 120 bp, Artificial Sequence
  ENSG00000147488_103 (sequence is synthesized)
tgcaacctccctggtttcctctacctctcagactgcatcttctcaggtctccttgctggtttctcaacaccccagtctctgacactggattccccaagtgttgcctatgattgctccatg

SEQ ID NO: 406475 - DNA, 120 bp, Artificial Sequence
  ENSG00000147488_104 (sequence is synthesized)
atgtgagttcttcaaaattgtcagacgacgtttcccttcagctggtttggagctcattttccaactgctttgcaaaaaataataaaatttctgaatggggcagcgtggagaaatcctaag

SEQ ID NO: 406476 - DNA, 120 bp, Artificial Sequence
  ENSG00000147488_105 (sequence is synthesized)
taggagggctcaccttttgcccctccctctcgtgggcatgggcatggcagccctgtgtccaccatgaccatcagcggccacctgagttgtttctaatgccggctgtggagcagtcgaaga

SEQ ID NO: 406477 - DNA, 120 bp, Artificial Sequence
  ENSG00000147488_106 (sequence is synthesized)
catgttcaccaggtcgaggggatctgactgagtatgatactcggcagacagttctgcgaaaaagtcaatgtatttaatactgcaaatgttacttgtacagtaaggaatttcttttagatt

SEQ ID NO: 406478 - DNA, 120 bp, Artificial Sequence
  ENSG00000147488_107 (sequence is synthesized)
atttttcaaatgaattaaaacatctttgattgctaactgacaacatcacaaggacatcactttcccacatcaatggaatcaaataatcgaatgtgatgttgaaacaggtacctaaggaag

SEQ ID NO: 406479 - DNA, 120 bp, Artificial Sequence
  ENSG00000147488_108 (sequence is synthesized)
taactcatcatgctatgatttttagttttctttcaggtagtccactggttcttatataatataaatccttggtacactagcttctgcatgtcctatactgtgttaacttatctcgcacag

SEQ ID NO: 406480 - DNA, 120 bp, Artificial Sequence
  ENSG00000147509_0 (sequence is synthesized)
agagccagcccagcattaaccaaacaaagagaagcagagtggatcctgtgctaatattgggaaaaccaggcaacaggactcatttggggcctttattgtgaaaacatgccccagctttcc

SEQ ID NO: 406481 - DNA, 120 bp, Artificial Sequence
  ENSG00000147509_1 (sequence is synthesized)
caagataaccaagagtgcctccagaaacatttctccaggccgtctatatggacacagtttctgcccctgttcagggctcagagatataatacagacattcaccaaatcacagaaaatgaa

SEQ ID NO: 406482 - DNA, 120 bp, Artificial Sequence
  ENSG00000147509_2 (sequence is synthesized)
ggagacctcagggctgttcctgatatcaagtccttcccgcctgcacagctcccagactcgcccgccgccccgaagctgttcggcctcctttctagcccgctttccagcctcgcaaggttc

SEQ ID NO: 406483 - DNA, 120 bp, Artificial Sequence
  ENSG00000147509_3 (sequence is synthesized)
ttctctcaccttctccggcgaccccctcccgaggctccccggaggcgcctggacttctcccccctgcttcccgccctgccggccgcccggctctcgagggggcacgaggagctgccgggc

SEQ ID NO: 406484 - DNA, 120 bp, Artificial Sequence
  ENSG00000147509_4 (sequence is synthesized)
cgcctctcgctcctgctcggggcggcgctggcactgcccggccgaccctcggggggtcgtccgctgaggcccccccatccggtagccaagcccagggaagaagacgccaccgctgggcag

SEQ ID NO: 406485 - DNA, 120 bp, Artificial Sequence
  ENSG00000147509_5 (sequence is synthesized)
agctcgcctatgccgcagatgggatcagagcggatggagatgcggaagcggcagatgcccgccgcccaggacacaccaggcgccgccccaggccagcccggagcggggagtcgcgggtcc

SEQ ID NO: 406486 - DNA, 120 bp, Artificial Sequence
  ENSG00000147509_6 (sequence is synthesized)
aacgcatgctgcttctgctggtgctgctgttgtagctgctcgtgtctcactgttagaaaccaggaagatcagaggcccacaatagcttcccacgaactcagagcagatcttccaacctgg

SEQ ID NO: 406487 - DNA, 120 bp, Artificial Sequence
  ENSG00000147509_7 (sequence is synthesized)
gaagaaagccctgctcctactctggaagaagtcaacgcctgggctcagtcatttgacaaattaatggtcactccagcaggaaggaatgcattccgtgaattcctccgaacagaattcagt

SEQ ID NO: 406488 - DNA, 120 bp, Artificial Sequence
  ENSG00000147509_8 (sequence is synthesized)
aaggataatctatgaagactacatttctatactttctcctaaggaggtgagcttagactcccgggtgagagaagtgatcaacagaaacatggtggagccatcccaacacatattcgatga

SEQ ID NO: 406489 - DNA, 120 bp, Artificial Sequence
  ENSG00000147509_9 (sequence is synthesized)
tgctcaacttcagatttacaccctgatgcacagagactcatatcctcgattcatgaactctgctgtctataaggacttgcttcagtccttatcggagaaatctattgaagcataggattt

SEQ ID NO: 406490 - DNA, 120 bp, Artificial Sequence
  ENSG00000147509_10 (sequence is synthesized)
ttcaaatatatttattattaataaaataataaaagaattcatgggctacaactagcacagggaatttagaggttgtagcatcttctgctggagtaatactcaggctattctaataacaga

SEQ ID NO: 406491 - DNA, 120 bp, Artificial Sequence
  ENSG00000147509_11 (sequence is synthesized)
tgattccttcaacagactgctatatattcaccatgtaaactgcagccacctttagtgatacttttgaaaaaaaaaaataaagggatatggctgttgtagaaagatagcgtatttgcattt

SEQ ID NO: 406492 - DNA, 120 bp, Artificial Sequence
  ENSG00000147509_12 (sequence is synthesized)
acaataacagtagcatgttgtcagtggccaaggctacacagaaggctccctgctgcccggagcaggtacatccaccagagcaaagggaaccacttttattttgcatgagtttggtaactg

SEQ ID NO: 406493 - DNA, 120 bp, Artificial Sequence
  ENSG00000147509_13 (sequence is synthesized)
attactctcccctcaaagaaaagacattcaggtgtttctcaacgacatcttctgtccagcaagctcggtttgaatacgtcacttaccagtgccattgcaggacccaaattcacagttcat

SEQ ID NO: 406494 - DNA, 120 bp, Artificial Sequence
  ENSG00000147509_14 (sequence is synthesized)
aaaagatgtgaccactacatgtaaaaatagcattctacttgatcttacagtatgtatgtatgtatgtatggagacatatgtgtgcgtgtggatgtctacatggttaatggaaagcactgt

SEQ ID NO: 406495 - DNA, 120 bp, Artificial Sequence
  ENSG00000147509_15 (sequence is synthesized)
gctctgaagtggatcagtctcaagtgtctggtaacagcagcagtgcttagaaaattcttttgttgaaaagagttactgttattatcagaatttgccaacctaaagaatgaatttttaaat

SEQ ID NO: 406496 - DNA, 120 bp, Artificial Sequence
  ENSG00000147509_16 (sequence is synthesized)
tcataacttggtcatgttcacaacaaaactgtcaaataagcatatttccatttttattactgaaagaaatatgggcattttcattctttaaagaaataaagcacaagaattttatctcaa

SEQ ID NO: 406497 - DNA, 120 bp, Artificial Sequence
  ENSG00000147509_17 (sequence is synthesized)
gggagaagagggctagagcaaagaccgagagccggagaaaggcgaaaggcgcggtgagcaatcgccgacgtagagagggcagccctccgcgctgcaatattgagaaggcacccgcgggac

SEQ ID NO: 406498 - DNA, 120 bp, Artificial Sequence
  ENSG00000147509_18 (sequence is synthesized)
cacggcggacggaggcgagccggccggggcttcctccccggccggcagggtggacggtgggctcggtctttgcatgcaccaccacatctggctaatcaagtgaagatgaggccaaactgg

SEQ ID NO: 406499 - DNA, 120 bp, Artificial Sequence
  ENSG00000147509_19 (sequence is synthesized)
gcctgaaatccaacgactggtgaccttataaggagggagagcttcaaagacccaggcagtcatagagggaagaagggcaagtggcaaagaagacagagattgggtttctgttgccaccga

SEQ ID NO: 406500 - DNA, 120 bp, Artificial Sequence
  ENSG00000147509_20 (sequence is synthesized)
ggctgccagaagaggcaaggaagaatcctcccctagagccttcagaggcagatgcctggccctgctgacggtttggttttgaacttttagcctccagaactgtgcaagaataaatttctg

SEQ ID NO: 406501 - DNA, 120 bp, Artificial Sequence
  ENSG00000147509_21 (sequence is synthesized)
ttgttttaagccatcgggtttgtggtaatttgttatggcagctctaggaaactaatccagatgttaaagtttattcttacatagaaattgaggtttctaataaaaggtgtgtggacgtgg

SEQ ID NO: 406502 - DNA, 120 bp, Artificial Sequence
  ENSG00000147509_22 (sequence is synthesized)
gaggctgcctttcaaactctcagcgtgtcgctctcctccgcctactccgagcctcccccaaacgcgcctccgcctgctcccagcgctcgctctcccactcccctgccctctcggcaggca

SEQ ID NO: 406503 - DNA, 120 bp, Artificial Sequence
  ENSG00000147509_23 (sequence is synthesized)
ggcaagggaggaaatgacgtgatgttatttttgtgtcaggtcagtttccagcttcagcttagccctccgggctccagggaactaaccccgcggccccaccgggtcccactcccgaaggga

SEQ ID NO: 406504 - DNA, 120 bp, Artificial Sequence
  ENSG00000147509_24 (sequence is synthesized)
cgctgcgggctacggggacacgcggtgctgcgagtccggagagctgggcggctgggttccccctcccgctgccccctggtctactcctttccccggactccggagtccctggagaagggg

SEQ ID NO: 406505 - DNA, 80 bp, Artificial Sequence
  ENSG00000147526_0 (sequence is synthesized)
cagaggtctagcagccgggcgccgcgggccgggggcctgaggaggccacaggacgggcgtcttcccggctagtggagccc

SEQ ID NO: 406506 - DNA, 120 bp, Artificial Sequence
  ENSG00000147526_1 (sequence is synthesized)
ccgaggaggacgcagcgccggctgccggcgggaggaagcgctccaccagggcccccgacggcactcgtttaaccacatccgcgcctctgctggaaacgcttgctggcgcctgtcaccggt

SEQ ID NO: 406507 - DNA, 120 bp, Artificial Sequence
  ENSG00000147526_2 (sequence is synthesized)
tccctccattttgaaagggaaaaaggctctccccacccattcccctgcccctaggagctggagccggaggagccgcgctcatggcgttcagcccgtggcagatcctgtcccccgtgcagt

SEQ ID NO: 406508 - DNA, 120 bp, Artificial Sequence
  ENSG00000147526_3 (sequence is synthesized)
gggcgaaatggacgtggtctgcggtacgcggcggggccgccggcgaggacgaggctggcgggcccgagggcgaccccgaggaggaggattcgcaagccgagaccaaatccttgagtttca

SEQ ID NO: 406509 - DNA, 120 bp, Artificial Sequence
  ENSG00000147526_4 (sequence is synthesized)
ggagtggctgtaaggtgaagaagcatgaaactcagtctctcgccctggatgcatgttctcgggatgaaggggcagtgatctcccagatttcagacatttctaatagggatggccatgcta

SEQ ID NO: 406510 - DNA, 120 bp, Artificial Sequence
  ENSG00000147526_5 (sequence is synthesized)
ctgatgaggagaaactggcatccacgtcatgtggtcagaaatcagctggtgccgaggtgaaaggtgagccagaggaagacctggagtactttgaatgttccaatgttcctgtgtctacca

SEQ ID NO: 406511 - DNA, 120 bp, Artificial Sequence
  ENSG00000147526_6 (sequence is synthesized)
taaatcatgcgttttcatcctcagaagcaggcatagagaaggagacgtgccagaagatggaagaagacgggtccactgtgcttgggctgctggagtcctctgcagagaaggcccctgtgt

SEQ ID NO: 406512 - DNA, 120 bp, Artificial Sequence
  ENSG00000147526_7 (sequence is synthesized)
cggtgtcctgtggaggtgagagccccctggatgggatctgcctcagcgaatcagacaagacagccgtgctcaccttaataagagaagagataattactaaagagattgaagcaaatgaat

SEQ ID NO: 406513 - DNA, 120 bp, Artificial Sequence
  ENSG00000147526_8 (sequence is synthesized)
ggaagaagaaatacgaagagacccggcaagaagttttggagatgaggaaaattgtagctgaatatgaaaagactattgctcaaatgattgaagatgaacaaaggacaagtatgacctctc

SEQ ID NO: 406514 - DNA, 120 bp, Artificial Sequence
  ENSG00000147526_9 (sequence is synthesized)
agaagagcttccagcaactgaccatggagaaggaacaggccctggctgaccttaactctgtggaaaggtccctttctgatctcttcaggagatatgagaacctgaaaggtgttctggaag

SEQ ID NO: 406515 - DNA, 120 bp, Artificial Sequence
  ENSG00000147526_10 (sequence is synthesized)
ggttcaagaagaatgaagaagccttgaagaaatgtgctcaggattacttagccagagttaaacaagaggagcagcgataccaggccctgaaaatccacgcagaagagaaactggacaaag

SEQ ID NO: 406516 - DNA, 120 bp, Artificial Sequence
  ENSG00000147526_11 (sequence is synthesized)
ccaatgaagagattgctcaggttcgaacaaaagcaaaggctgagagtgcagctctccatgctggactccgcaaagagcagatgaaggtggagtccctggaaagggccctgcagcagaaga

SEQ ID NO: 406517 - DNA, 120 bp, Artificial Sequence
  ENSG00000147526_12 (sequence is synthesized)
accaagaaattgaagaactgacaaaaatctgtgatgagctgattgcaaagctgggaaagactgactgagacactccccctgttagctcaacagatctgcatttggctgcttctcttgtga

SEQ ID NO: 406518 - DNA, 120 bp, Artificial Sequence
  ENSG00000147526_13 (sequence is synthesized)
ccacaattatcttgccttatccaggaataattgcccctttgcagagaaaaaaaaaaacttaaaaaaagcacatgcctactgctgcctgtcccgctttgctgccaatgcaacagccctgga

SEQ ID NO: 406519 - DNA, 120 bp, Artificial Sequence
  ENSG00000147526_14 (sequence is synthesized)
agaaaccctagagggttgcatagtctagaaaggagtgtgacctgacagtgctggagcctcctagtttccccctatgaaggttcccttaggctgctgagtttgggtttgtgatttatcttt

SEQ ID NO: 406520 - DNA, 120 bp, Artificial Sequence
  ENSG00000147526_15 (sequence is synthesized)
agtttgttttaaagtcatctttactttcccaaatgtgttaaatttgtaactcctctttggggtcttctccaccacctgtctgatttttttgtgatctgtttaatcttttaattttttagt

SEQ ID NO: 406521 - DNA, 120 bp, Artificial Sequence
  ENSG00000147526_16 (sequence is synthesized)
atcagtggttttatttaaggagacagtttggcctattgttacttccaatttataatcaagaaggggctctggatccccttttaaattacacacactctcacacacatacatgtatgttta

SEQ ID NO: 406522 - DNA, 120 bp, Artificial Sequence
  ENSG00000147526_17 (sequence is synthesized)
tagatgctgctgctcttttccctgaagcatagtcaagtaagaactgctctacagaaggacatatttccttggatgtgagaccctattttgaaatagagtcctgactcagaacaccaactt

SEQ ID NO: 406523 - DNA, 120 bp, Artificial Sequence
  ENSG00000147526_18 (sequence is synthesized)
aagaatttgggggattaaagatgtgaagaccacagtcttgggttttcatatctggagaagactatttgccatgacgttttgttgccctggtatttggacactcctcagctttaatgggtg

SEQ ID NO: 406524 - DNA, 120 bp, Artificial Sequence
  ENSG00000147526_19 (sequence is synthesized)
tggcccctttagggttagtcctcagactaatgatagtgtctgctttctgcatgaacggcaatatgggactccctccaagctagggtttggcaagtctgccctagagtcatttactctcct

SEQ ID NO: 406525 - DNA, 89 bp, Artificial Sequence
  ENSG00000147526_20 (sequence is synthesized)
attaatctattttaagtatgtgaagaaaatctacttgtaaaaggctcagatcttaattaaaaggtaattgtagcacattaccaattata

SEQ ID NO: 406526 - DNA, 120 bp, Artificial Sequence
  ENSG00000147526_21 (sequence is synthesized)
atcttaattaaaaggtaattgtagcacattaccaattataaggtgaagaaatgtttttttcccaagtgtgatgcattgttcttcagatgttgaaaagaaagcaaaaaataccttctaact

SEQ ID NO: 406527 - DNA, 120 bp, Artificial Sequence
  ENSG00000147526_22 (sequence is synthesized)
taagacagaatttttaacaaaatgagcagtaaaagtcacatgaaccactccaaaaatcagtgcattttgcatatttttaaacaaagacagcttgttgaatactgagaagaggagtgcaag

SEQ ID NO: 406528 - DNA, 120 bp, Artificial Sequence
  ENSG00000147526_23 (sequence is synthesized)
gagaaggtctgtactaacaaagccaaattcctcaagctcttactggactcagttcagagtggtgggccattaaccccaacatggaatttttccatataaatctcaatgaattccctttca

SEQ ID NO: 406529 - DNA, 120 bp, Artificial Sequence
  ENSG00000147526_24 (sequence is synthesized)
tttgaataggcaaacccaaatccatgcaagtgttttaaagcactgtcctgtcttaatcttacatgctgaaagtcttcatggtgatatgcactatattcagtatacgtatgttttcctact

SEQ ID NO: 406530 - DNA, 120 bp, Artificial Sequence
  ENSG00000147526_25 (sequence is synthesized)
tctcttgtaaaactgttgcatgatccaacttcagcaatgaattgtgcctagtggagaacctctatagatcttaaaaaatgaattattctttagcagtgtattactcacatgggtgcaatc

SEQ ID NO: 406531 - DNA, 120 bp, Artificial Sequence
  ENSG00000147526_26 (sequence is synthesized)
tttagccccagggaggtcaataatgtcttttaaagccagaagtcacattttaccaatatgcatttatcataattggtgcttaggctgtatattcaagcctgttgtcttaacattttgtat

SEQ ID NO: 406532 - DNA, 120 bp, Artificial Sequence
  ENSG00000147526_27 (sequence is synthesized)
gaagtggcttgacaatcatttgagctttgaaagcagtcactgtggtgtaatatgaatgctgtcctagtggtcatagtaccaagggcacgtgtctccccttggtataactgatttcctttt

SEQ ID NO: 406533 - DNA, 120 bp, Artificial Sequence
  ENSG00000147526_28 (sequence is synthesized)
tagtcctctactgctaaataagttaattttgcattttgcagaaagaaacattgattgctaaatctttttgctgctgtgttttggtgttttcatgtttacttgttttatattgatctgttt

SEQ ID NO: 406534 - DNA, 120 bp, Artificial Sequence
  ENSG00000147526_29 (sequence is synthesized)
taagtatgagaggcttatagtgccctccattgtaaatccatagtcatctttttaagcttattgtgtttaagaaagtagctatgtgttaaacagaggtgatggcagcccttccctagcaca

SEQ ID NO: 406535 - DNA, 120 bp, Artificial Sequence
  ENSG00000147526_30 (sequence is synthesized)
ctggtggaagagaccccttaagaacctgaccccagtgaatgaagctgatgcacagggagcaccaaaggaccttcgttaagtgataattgtcctggcctctcagccatgaccgttatgagg

SEQ ID NO: 406536 - DNA, 120 bp, Artificial Sequence
  ENSG00000147526_31 (sequence is synthesized)
aaatatcccccattcgaacttaacagatgcctcctctccaaagagaattaaaatcgtagcttgtacagatcaagagaatatactgggcagaatgaagtatgtttgtttatttttctttaa

SEQ ID NO: 406537 - DNA, 120 bp, Artificial Sequence
  ENSG00000147526_32 (sequence is synthesized)
aaataaaggattttggaactctggagagtaagaatatagtatagagtttgcctcaacacatgtgagggccaaataacctgctagctaggcagtaataaactctgttacagaagagaaaaa

SEQ ID NO: 406538 - DNA, 83 bp, Artificial Sequence
  ENSG00000147526_33 (sequence is synthesized)
ctagctaggcagtaataaactctgttacagaagagaaaaagggccgggcacagtggcttattcctgtaatcccaacactgtgg

SEQ ID NO: 406539 - DNA, 120 bp, Artificial Sequence
  ENSG00000147526_34 (sequence is synthesized)
aaaaaaaaaaaaaaaaaaaaccaggagtgaaaaaggaaagtagaaggcagctgctggcctagatgttggtttgggaatattaggtgatcctgttgagattctggatccagagcaatttct

SEQ ID NO: 406540 - DNA, 120 bp, Artificial Sequence
  ENSG00000147526_35 (sequence is synthesized)
cctgttgagattctggatccagagcaatttctttagcttttgactttgccaaagtgtagatagcctttatccagcagtattttaagtggggaatgcaacgtgaggccaactgaacaattc

SEQ ID NO: 406541 - DNA, 120 bp, Artificial Sequence
  ENSG00000147526_36 (sequence is synthesized)
cccccgtggctgcccagatagtcacagtcaaggttggagagtctccttccagccagtgacctacccaaaccttttgttctgtaaaactgctctggaaataccgggaagcccagttttctc

SEQ ID NO: 406542 - DNA, 120 bp, Artificial Sequence
  ENSG00000147526_37 (sequence is synthesized)
acgtggtttctagcttcttcagactcagcccaaattaggaagtgcagaagcacatgatggtgaaaaacctaggatttggcagccttccagaatggtatggaatctgagggaagatttatg

SEQ ID NO: 406543 - DNA, 120 bp, Artificial Sequence
  ENSG00000147526_38 (sequence is synthesized)
tttcgttttggaggatagctcaagttgaattttctttccagccagttaccctttcaacctacccatactttgtacaactcttacacaaatacttagatatttattagatagccctgaatt

SEQ ID NO: 406544 - DNA, 120 bp, Artificial Sequence
  ENSG00000147526_39 (sequence is synthesized)
cactctaattataaacagggagtgtaaactgcccccagatgttcctgggctgggtaaaagcagctggagtgaagcactcattttccataaaggtaacaaagggcagctcagtggttactc

SEQ ID NO: 406545 - DNA, 120 bp, Artificial Sequence
  ENSG00000147526_40 (sequence is synthesized)
aagctcaaaagggtttttttaagagcaagcattggttaagtctgtgtatactgagttggaagtgatttcagcacattcttttttagtggagtgaaagttctgaagcccccttttaacttc

SEQ ID NO: 406546 - DNA, 120 bp, Artificial Sequence
  ENSG00000147526_41 (sequence is synthesized)
ctcttggtttttcattataattggtagccatctcatgaactgtctctgactgttgtctctttgtggtcatgtgattgtgagcttgctttctgacttgcatttctgactttatcctgttgt

SEQ ID NO: 406547 - DNA, 120 bp, Artificial Sequence
  ENSG00000147526_42 (sequence is synthesized)
taggaagatagaaactaggttttgaaagattacatgattcaagcgagggattttaaagtaaagatgtatttattctgaagaatctaaaagataacagattatttgcttatgaaagaacaa

SEQ ID NO: 406548 - DNA, 120 bp, Artificial Sequence
  ENSG00000147526_43 (sequence is synthesized)
tatagtctgggaatcccagaatgtcaagccaaaggtctaagaagtcatctccttcaaatactttaataaagaagtatttcgaggagatatctgtccaaaaaggtttgactggcctccaga

SEQ ID NO: 406549 - DNA, 120 bp, Artificial Sequence
  ENSG00000147526_44 (sequence is synthesized)
ttccagttatttttaaaaagcaacttaccactaaatccttgagtctccatagagtaacagtaaagaaactgatgtaacagactctcctctcaaaggatctcctctggaagagactatcag

SEQ ID NO: 406550 - DNA, 120 bp, Artificial Sequence
  ENSG00000147526_45 (sequence is synthesized)
cggcagcattctccagggaagacccatcccctagtgccagagcttgcatcctggagactaaagattgcacttttttgtagttttttgtccaaatgcaatcccatttctgtgcctcttagc

SEQ ID NO: 406551 - DNA, 120 bp, Artificial Sequence
  ENSG00000147526_46 (sequence is synthesized)
atgcagttagatttggacaaacaagattcctaaggaatgactttattaactataatatggttacagctattatataaatatatattctggttatagttctaatatggagatgttgtgtgc

SEQ ID NO: 406552 - DNA, 120 bp, Artificial Sequence
  ENSG00000147526_47 (sequence is synthesized)
aatgctggcctgtggtggtctgtgtaatgctttaacttgtatggaggaggccaggctcagagctgagatgtggcctgaaccttccctgtatcgatcctttaatttagaactgtcaagatg

SEQ ID NO: 406553 - DNA, 120 bp, Artificial Sequence
  ENSG00000147526_48 (sequence is synthesized)
tcactttctccccctctgccttttagtggtatctgacatatactcaaaacagtaatttcctggtcacatcattaactgctaattctgtatttataaagaattttcagatggacatgtaca

SEQ ID NO: 406554 - DNA, 120 bp, Artificial Sequence
  ENSG00000147526_49 (sequence is synthesized)
aatttgaactcaaaccatccccagtccagatacagggcagcgtgtaggtgaccacaccagagcctcagcctcggtccttctcagccgtcgggataggatccaggcatttcttttaaatct

SEQ ID NO: 406555 - DNA, 120 bp, Artificial Sequence
  ENSG00000147526_50 (sequence is synthesized)
cagaggtagcagtaaacttttcagtattgctgttagcaagtgtgtgtttgccaatagatacccattatactaatgtgccaagtaaatgttcattgcacatctgcttccactgtgttccca

SEQ ID NO: 406556 - DNA, 120 bp, Artificial Sequence
  ENSG00000147526_51 (sequence is synthesized)
cgggtgccatgaagtgtgtgaggagcccctcatctggagggatgagtgctgcgttgactactgctatcaggattgtgttgtgtggaatattcatctacataaattttatatgcacagtaa

SEQ ID NO: 406557 - DNA, 120 bp, Artificial Sequence
  ENSG00000147526_52 (sequence is synthesized)
tttccctttttatatgtcaagtaactatttgtaaaagttatactcacaaattattataatgattactaatatattttttccatgtttcattgcctgaataaaaactgtttaccactgtta

SEQ ID NO: 406558 - DNA, 120 bp, Artificial Sequence
  ENSG00000147526_53 (sequence is synthesized)
caggacctggggccaaaagccaagaatcacaagaagctgatgaacagcttgtagcagaagtggttgaaaaatgttcatctaagacttgttctaaaccttcagaaaatgaagtgccacagc

SEQ ID NO: 406559 - DNA, 120 bp, Artificial Sequence
  ENSG00000147526_54 (sequence is synthesized)
aggccattgactctcactcagtcaagaatttcagagaagaacctgaacatgattttagcaaaatttccatcgtgaggccattttcaatagaaacgaaggattccacggatatctcggcag

SEQ ID NO: 406560 - DNA, 120 bp, Artificial Sequence
  ENSG00000147526_55 (sequence is synthesized)
tcctcggaacaaaagcagctcatggctgtgtaactgcagtctcaggcaaggctctgccttccagcccgccagacgccctccaggacgaggcgatgacagaaggcagcatgggggtcaccc

SEQ ID NO: 406561 - DNA, 120 bp, Artificial Sequence
  ENSG00000147526_56 (sequence is synthesized)
tcgaggcctccgcagaagctgatctaaaagctggcaactcctgtccagagcttgtgcccagcagaagaagcaagctgagaaagcccaagcctgtccccctgaggaagaaagcaattggag

SEQ ID NO: 406562 - DNA, 120 bp, Artificial Sequence
  ENSG00000147526_57 (sequence is synthesized)
gagagttctcagacaccaacgctgctgtggagggcacacctctccccaaggcatcctatcacttcagtcctgaagagttggatgagaacacaagtcctttgctaggagatgccaggttcc

SEQ ID NO: 406563 - DNA, 120 bp, Artificial Sequence
  ENSG00000147526_58 (sequence is synthesized)
agaagtctccccctgaccttaaagaaactcccggcactctcagtagtgacaccaacgactcaggggttgagctgggggaggagtcgaggagctcacctctcaagcttgagtttgatttca

SEQ ID NO: 406564 - DNA, 120 bp, Artificial Sequence
  ENSG00000147526_59 (sequence is synthesized)
cagaagatacaggaaacatagaggccaggaaagcccttccaaggaagcttggcaggaaactgggtagcacactgactcccaagatacaaaaagatggcatcagtaagtcagcaggtttag

SEQ ID NO: 406565 - DNA, 120 bp, Artificial Sequence
  ENSG00000147526_60 (sequence is synthesized)
aacagcctacagacccagtggcacgagacgggcctctctcccaaacatcttccaagccagatcctagtcagtgggaaagccccagcttcaacccctttgggagccactctgttctgcaga

SEQ ID NO: 406566 - DNA, 120 bp, Artificial Sequence
  ENSG00000147526_61 (sequence is synthesized)
actccccacccctctcttctgagggctcctaccactttgacccagataactttgacgaatccatggatccctttaaaccaactacgaccttaacaagcagtgacttttgttctcccactg

SEQ ID NO: 406567 - DNA, 120 bp, Artificial Sequence
  ENSG00000147526_62 (sequence is synthesized)
aaatgattggtaaggagaacattttgttttttgagggtatgagccataggatctgtcttagtctgttcagcctggtataacaaaatatgtaagctaggtagcttataaacaacaaacatt

SEQ ID NO: 406568 - DNA, 120 bp, Artificial Sequence
  ENSG00000147526_63 (sequence is synthesized)
tttcatagctctggagacaggagagttcaaggtgcccacagatgagatgtctggggagggcccattcctcatagaaggggctggctagctctctggggtctcttttataaggacactaat

SEQ ID NO: 406569 - DNA, 120 bp, Artificial Sequence
  ENSG00000147526_64 (sequence is synthesized)
cctgacataatcacctcccaaattcccttccatgcccactttcaccctgaacatactcacacactggggattaggtttcaatacacaaatttggggttggggggtggcataaactataag

SEQ ID NO: 406570 - DNA, 120 bp, Artificial Sequence
  ENSG00000147526_65 (sequence is synthesized)
agtcgctccccggcccttcccggggccctaccgtgtacccaaaacgcagccgcggtgaagaaggtcgcgtgatgacaggcccctggcagctgctgggaaatggtggtctctgccgggctg

SEQ ID NO: 406571 - DNA, 120 bp, Artificial Sequence
  ENSG00000147526_66 (sequence is synthesized)
gttaaagcctctgggaaagggctcttgtgacaaaaggagtctgttggaaaagcgcatttttcaggtgtctgagggaaggatgacctcgaaaataaatggtgctggagaaaagctccaggg

SEQ ID NO: 406572 - DNA, 120 bp, Artificial Sequence
  ENSG00000147526_67 (sequence is synthesized)
aatggaggagctttcagagagacaggatgccagcctgagaaacccaaggagggcactgctcagagaccgcagttgcctcccgcaggtcagaccctgctgaggaccggttggttgtgaagt

SEQ ID NO: 406573 - DNA, 120 bp, Artificial Sequence
  ENSG00000147526_68 (sequence is synthesized)
aagaaggtcgcgtgatgacaggcccctggcagctgctgggaaatggtggtctctgccgggctgtcatccgcgtgattgcggaaggcaggtgacaccattcttagcctcgggcccagggag

SEQ ID NO: 406574 - DNA, 120 bp, Artificial Sequence
  ENSG00000147526_69 (sequence is synthesized)
tcctcccgccccaccgcctccccgcccagggtctgggcacagccgcccgccgcccagcacaggagggtgcagccccggccccaagttctgcgccatgggaggctcccactctcagacccc

SEQ ID NO: 406575 - DNA, 120 bp, Artificial Sequence
  ENSG00000147526_70 (sequence is synthesized)
gtgcaaatgtgttgtgggccttgaggtggcagtcctatgaggcggtggtagggctttcccctgattcagtactcagctggtcccaaggggctttgagtgtggcttttgcctccttaactg

SEQ ID NO: 406576 - DNA, 120 bp, Artificial Sequence
  ENSG00000147526_71 (sequence is synthesized)
aatcatgcgttttcatcctcagaagcaggtatggaagcatatcttcatctttctaatgtacataagcatggaaatgcctgaaagcctaataaagcaggaggagccttacagagattaaag

SEQ ID NO: 406577 - DNA, 120 bp, Artificial Sequence
  ENSG00000147526_72 (sequence is synthesized)
aattgggtcacttgaaggatagatttaggatgctgacctatgctttgcttctttacctggaaaagggacacaaagtgcttattgaagtactaggaacgtagagatacttgtgacaagttg

SEQ ID NO: 406578 - DNA, 120 bp, Artificial Sequence
  ENSG00000147526_73 (sequence is synthesized)
tataggagatgctgatgtatgtgagactgcttgaatttctttataattttatgtgaatatggccatatcttaaagtatagtggtgtgttagttcatttgcgttgctgtaaaggaatacct

SEQ ID NO: 406579 - DNA, 120 bp, Artificial Sequence
  ENSG00000147526_74 (sequence is synthesized)
gagaatggctaatttataggaaaaagaggtttatttggttcatggttctgcagactgtagaataagcatggcaccagtgcctgcttctggtgagggactcaggaagcttccaatcatggt

SEQ ID NO: 406580 - DNA, 120 bp, Artificial Sequence
  ENSG00000147526_75 (sequence is synthesized)
ggaaggcaagggggagcaagtgtgtcacatggcgagaggtgggaggaagagggggcggggaggatgccaggctatttttaacaaagatttcacagaaactaacagcaagaagtcgctcat

SEQ ID NO: 406581 - DNA, 120 bp, Artificial Sequence
  ENSG00000147526_76 (sequence is synthesized)
taccacaaggagggcaccaagctattcatgagggatccgctcctatgacccagccacctcccattaggcctcacttccaactgttgatcaggtttcaacatgagatttagggggcaaata

SEQ ID NO: 406582 - DNA, 120 bp, Artificial Sequence
  ENSG00000147526_77 (sequence is synthesized)
ggggaccgactctggggaccctcgccgaagagtcccaagggttccaaggccagagagaggtcctggtcttgattgctggcatgtttactcttccaagtacactgagatcaaatgcaaaga

SEQ ID NO: 406583 - DNA, 120 bp, Artificial Sequence
  ENSG00000147526_78 (sequence is synthesized)
caaaccatcaaagaaaataactctaaaatctggacatgatatacaaagtgactgcctaaaggagctgaagagaggacataagtggatcgcctctgctgttgcatgttggcttggagaaca

SEQ ID NO: 406584 - DNA, 120 bp, Artificial Sequence
  ENSG00000147526_79 (sequence is synthesized)
gaagatgaggagccaaataagcaagtccttcagccccaggcttctagcacggggctgcatgtaggctatgcattctggggagtgaggagatcatgaatgctgaaaataaatgaaggaatc

SEQ ID NO: 406585 - DNA, 120 bp, Artificial Sequence
  ENSG00000147526_80 (sequence is synthesized)
cagaaaagcaagagtcaaagaaggcatctgcaggccaaatctctgatcaacccctgacccacatacacacaaaatacactcaaagcagctcagctaaagacaaagatctgcactcagagt

SEQ ID NO: 406586 - DNA, 120 bp, Artificial Sequence
  ENSG00000147526_81 (sequence is synthesized)
agagctgcctccccagaaacagagctcgcagttcaggcccagcaagaaaattacctgcaaaacaaaggaaaaacaacactcatcagagaaaaagaacagaatctggaatcttcacaacct

SEQ ID NO: 406587 - DNA, 120 bp, Artificial Sequence
  ENSG00000147526_82 (sequence is synthesized)
agcattcatcatatccaagattgaaacccaaattatgggacatatttaaaaaccaggaaaatggaacgtagtcttaagagaaaagtcaatcaaatctgacctggagatgaataatatatt

SEQ ID NO: 406588 - DNA, 120 bp, Artificial Sequence
  ENSG00000147526_83 (sequence is synthesized)
aaattccagacagggccagcgttgggagcacgtaggaggcgcccctcggaaaggagccggagacccagctgacttcgcacttgagctccagccccgtggacatttcctgttctgcctctg

SEQ ID NO: 406589 - DNA, 120 bp, Artificial Sequence
  ENSG00000147526_84 (sequence is synthesized)
gaaattcaagctgaaagttacaaaacatccttttccctggaaccaagtgcttggttgggagaccatgccctccccttccttcctcggaactcctccctgatcgccccgtggcttccccag

SEQ ID NO: 406590 - DNA, 120 bp, Artificial Sequence
  ENSG00000147526_85 (sequence is synthesized)
aaggacaggatgtttctgagccaagttgaagcaaaagaaactttttccagcatgtcaggaacgaagctgacgttccattaagaaaaaaaaaaaaaaaaaaagaagtgctagaggaaggag

SEQ ID NO: 406591 - DNA, 120 bp, Artificial Sequence
  ENSG00000147526_86 (sequence is synthesized)
ttaacaagcagtgacttttgttctcccactggtaatcacgttaatgaaatcttagaatcacccaagaaggcaaagtcgcgtttaataacgatgaaggggcagtgatctcccagatttcag

SEQ ID NO: 406592 - DNA, 120 bp, Artificial Sequence
  ENSG00000147526_87 (sequence is synthesized)
aaaaaaaaaaaaaaaaagataacgagagccccaaagcagataaatggattacatacattgtcagtgtatgttaatgtgtttaattgtttgggacagcatttctccaactttcattgtctg

SEQ ID NO: 406593 - DNA, 120 bp, Artificial Sequence
  ENSG00000147526_88 (sequence is synthesized)
gattgagagaggaaaacaaaatcactgtttcgcaactccaggttgtatttttatgtgtgtgtttatttcactttttaaacccttttcccattgttaaaacattaaaaagtaaaaaaaggt

SEQ ID NO: 406594 - DNA, 120 bp, Artificial Sequence
  ENSG00000147526_89 (sequence is synthesized)
ggagagttatgagccatgaaatgactaaagatgaaatcaaagtagagaagaaaaaaaggcataaataattcacacacagtgtggtcaacacttgaatgattaaaaaacattttaagtata

SEQ ID NO: 406595 - DNA, 120 bp, Artificial Sequence
  ENSG00000147526_90 (sequence is synthesized)
tagaaaccatttgctagtgagatacaaattttgaagttgtctgtaaattgaatttttataaattaaaatggaattatttaggtcaccgatttttgttttttttctctcatgcagtcaatt

SEQ ID NO: 406596 - DNA, 120 bp, Artificial Sequence
  ENSG00000147526_91 (sequence is synthesized)
atggaaaggaagggacattcctgctcttagagagcggtagccatccataataaccaacttggatatgacgtcaaaagtgatgggggcaccaccattgagggcaggggaggacgtgatgcg

SEQ ID NO: 406597 - DNA, 120 bp, Artificial Sequence
  ENSG00000147526_92 (sequence is synthesized)
actcacagagcacccagcaccggactgggtcagaaggacattgtcattcttcactagaagaaaggttaacccaagaggttgatctttaaagtctttgaataagtgaaatacttttggaat

SEQ ID NO: 406598 - DNA, 120 bp, Artificial Sequence
  ENSG00000147526_93 (sequence is synthesized)
taggacacaaaataaaacttgtcactgaatcagaggtagagtgtctgaaagggtggattgactcaggaaagtctaaagtcagatcgcatctgttaggaagagcccagaagaatatcttta

SEQ ID NO: 406599 - DNA, 120 bp, Artificial Sequence
  ENSG00000147526_94 (sequence is synthesized)
acttagtttgtaaaagattgactcatctaagcagaatgaatctatttccttgcagtattcaaataggtgcaaagagaaagggaaggcagttggttctataagtaaaatataagtttgact

SEQ ID NO: 406600 - DNA, 120 bp, Artificial Sequence
  ENSG00000147526_95 (sequence is synthesized)
agaaacagaaccctgtgtcaaatccaggagcctgggggactgtagaacctgaagttttactggctcggattctgaaggtaattttgagactcctgaagctgaaaccccgatccgatcacc

SEQ ID NO: 406601 - DNA, 120 bp, Artificial Sequence
  ENSG00000147526_96 (sequence is synthesized)
agaagggagaggggagcgaccctggggaccgactctggggaccctcgccgaagaggtaggaaacgggggactgcacgttcctgaggccacttcacacttattgagcaaaacgagaaaata

SEQ ID NO: 406602 - DNA, 120 bp, Artificial Sequence
  ENSG00000147533_0 (sequence is synthesized)
ggcggtgcgacagcagctggagggcagaggaggcgggtttgtgtttcccgggccgaaccgggttgtggggggcgcggggcctgggccaggcggcagctaaggcccgcggtgacagcatgg

SEQ ID NO: 406603 - DNA, 120 bp, Artificial Sequence
  ENSG00000147533_1 (sequence is synthesized)
gtgaaggggagcggggcagaggaggccttgggctgttttcggcggcgggtgggggcgaggggctggcgggtcagagtcccgggtccaggccggggctctgactcgcggttggtgttcccc

SEQ ID NO: 406604 - DNA, 120 bp, Artificial Sequence
  ENSG00000147533_2 (sequence is synthesized)
cgaccccgcagcgcggggtgtcctgtcctcgccatgaggccgcagcaggcgccggtgtccggaaaggtgttcattcagcgagactacagcagtggcacacgctgccagttccagaccaag

SEQ ID NO: 406605 - DNA, 120 bp, Artificial Sequence
  ENSG00000147533_3 (sequence is synthesized)
ttccctgcggagctggagaaccggattgataggcagcagtttgaagaaacagttcgaactctaaataacctttatgcagaagcagagaagctcggcggccagtcatatctcgaaggttgt

SEQ ID NO: 406606 - DNA, 120 bp, Artificial Sequence
  ENSG00000147533_4 (sequence is synthesized)
ttggcttgtttaacagcatataccatcttcctatgcatggaaactcattatgagaaggttctgaagaaagtctccaaatacattcaagagcagaatgagaagatctatgctccacaaggc

SEQ ID NO: 406607 - DNA, 120 bp, Artificial Sequence
  ENSG00000147533_5 (sequence is synthesized)
ctcctcctgacagaccctattgagcgaggactgcgagttattgaaattaccatttatgaagacagaggcatgagcagtggaagataaaccgaagaattaaagatcccacttccagccggg

SEQ ID NO: 406608 - DNA, 120 bp, Artificial Sequence
  ENSG00000147533_6 (sequence is synthesized)
cccctcatgtatccactggccgaccgcagagtgtccctacctcctctccagagcatcattcctttctatctgctgccagagccacggtgccatttactccaaggactcactttctaaaat

SEQ ID NO: 406609 - DNA, 120 bp, Artificial Sequence
  ENSG00000147533_7 (sequence is synthesized)
tccacacctggagtgacctctagtcgctcagcatccactttgtgtctccaaattgtgtaggactctgtaatcttttgattagtttctgagaaaacacaatgaagcacttcactttttttt

SEQ ID NO: 406610 - DNA, 120 bp, Artificial Sequence
  ENSG00000147533_8 (sequence is synthesized)
accagtacataccattggttctcttcattccttgggccagcttctcaggtggctttagacctcaacaagccgtatcttcaccagtgttctatcttgttcccctaaattaataaaatgttt

SEQ ID NO: 406611 - DNA, 120 bp, Artificial Sequence
  ENSG00000147533_9 (sequence is synthesized)
ttctccaggattttggtgagggttggctgtggctgtcgttttgcacctcccagatttcaaagaattactggttttaccatgactcaaatcttaagatctgtttctactattcagttcctc

SEQ ID NO: 406612 - DNA, 120 bp, Artificial Sequence
  ENSG00000147533_10 (sequence is synthesized)
aaactgaagcttattgaaaaaaaaatgtataatgttatttgttttattatagcaattatgcctaattaaagcagtatttaatgcaatttccagttatttctttggagaattttatgtcat

SEQ ID NO: 406613 - DNA, 120 bp, Artificial Sequence
  ENSG00000147533_11 (sequence is synthesized)
tgttccattaccttgaatgttggaaagatatgatacgtgctgcttgttcatcacaaaaatcagtaagcacaataaagtggatgccaaaccatcagacacataaatgttcccgctgtgtcc

SEQ ID NO: 406614 - DNA, 120 bp, Artificial Sequence
  ENSG00000147533_12 (sequence is synthesized)
cccgctgtgtccctggatatggaataagcaggtataaaaaatattttaattatagttttgttataaatataacttatgagaaaaaaatttgataggaataatactgtatattactaattt

SEQ ID NO: 406615 - DNA, 120 bp, Artificial Sequence
  ENSG00000147533_13 (sequence is synthesized)
aaggcaaaccttatgacccacagaattttctcatatacagtattcagtgcacagaaatcttatgattggctcaagtacagtaagttacttctcagtaaaactctcaagtctgagtccata

SEQ ID NO: 406616 - DNA, 120 bp, Artificial Sequence
  ENSG00000147533_14 (sequence is synthesized)
tttgtagctctgcttttggctgtacgttcctaggatcggggctgcttatgcctttcgtttatccttggggtttgagagcgctgtatttgggagagagtttaaaaatacattaggagagag

SEQ ID NO: 406617 - DNA, 120 bp, Artificial Sequence
  ENSG00000147533_15 (sequence is synthesized)
aaaccattaaaagtttcactgtcagatatattgtaggtgctaatactggatttcgtctcagatttaatttcttttatgggtctgttagtcattcaacaaatcccataagtatgtgttaat

SEQ ID NO: 406618 - DNA, 120 bp, Artificial Sequence
  ENSG00000147533_16 (sequence is synthesized)
attttaattgtgtaaaactcatttgttactttacagcctgtaatagtgtgtctgcattttcaacctgttgcaataactttgctgaaatattaacacattaataaaacttttcttaaacaa

SEQ ID NO: 406619 - DNA, 120 bp, Artificial Sequence
  ENSG00000147533_17 (sequence is synthesized)
gcggaaggcggggtcggccctggccccgcccacatcatttcccttcctcggcccagccccacagcgcgcagcttcggcagggtggctttacggccggaggagagggtgggtcccagacct

SEQ ID NO: 406620 - DNA, 120 bp, Artificial Sequence
  ENSG00000147533_18 (sequence is synthesized)
tttacggccggaggagagggtgggtcccagacctgaggtaggaggccgagctgaggggcggggaagaggctttttgcggcaggacgtaagtgacggcgaaggcggtgcgacagcagctgg

SEQ ID NO: 406621 - DNA, 120 bp, Artificial Sequence
  ENSG00000147533_19 (sequence is synthesized)
agtatctctctgccttgttcatgaactagaaaacatcccttctgcctatgtgctgtaatctctagaaggaacacaggagagaacttgggttctgaagaaagtctccaaatacattcaaga

SEQ ID NO: 406622 - DNA, 120 bp, Artificial Sequence
  ENSG00000147533_20 (sequence is synthesized)
gaaaacgaattcccactgcctattttgagatctcactaacacttaaagggaaatctgatgaagtttgtaagaagctgtggtgtttctttctgtcaggttctgaagaaagtctccaaatac

SEQ ID NO: 406623 - DNA, 120 bp, Artificial Sequence
  ENSG00000147533_21 (sequence is synthesized)
aggcgggtttgtgtttcccgggccgaaccgggttgtggggggcgcggggcctgggccaggcggcagctaaggcccgcggcgccggtgtccggaaaggtgttcattcagcgagactacagc

SEQ ID NO: 406624 - DNA, 120 bp, Artificial Sequence
  ENSG00000147535_0 (sequence is synthesized)
agcgtcgctcggagctcgcggccggatggggaaggcggcggcggcggtggcctttggggccgaagtgggcgtgcggctcgcgctgttcgcggccttcctggtgacggagctgctcccccc

SEQ ID NO: 406625 - DNA, 120 bp, Artificial Sequence
  ENSG00000147535_1 (sequence is synthesized)
gttccagagactcatccagccggaggagatgtggctctaccggaacccctacgtggaggcggagtatttccccaccaagccgatgtttgttattgcatttctctctccactgtctctgat

SEQ ID NO: 406626 - DNA, 120 bp, Artificial Sequence
  ENSG00000147535_2 (sequence is synthesized)
cttcctggccaaatttctcaagaaggcagacacaagagacagcagacaagcctgcctggctgccagccttgccctggctctgaatggcgtctttaccaacacaataaaactgatcgtagg

SEQ ID NO: 406627 - DNA, 120 bp, Artificial Sequence
  ENSG00000147535_3 (sequence is synthesized)
gaggccacgcccagatttcttctaccgctgcttccctgatgggctagcccattctgacttgatgtgtacaggggataaggacgtggtgaatgagggccgaaagagcttccccagtggaca

SEQ ID NO: 406628 - DNA, 120 bp, Artificial Sequence
  ENSG00000147535_4 (sequence is synthesized)
ttcttcctttgcatttgctggtctggcctttgcgtccttctacctggcagggaagttacactgcttcacaccacaaggccgtgggaaatcttggaggttctgtgcctttctgtcacctct

SEQ ID NO: 406629 - DNA, 120 bp, Artificial Sequence
  ENSG00000147535_5 (sequence is synthesized)
actttttgcagctgtgattgcactgtcccgcacatgtgactacaagcatcactggcaagatgtactagttggatccatgattggaatgacatttgcctatgtctgctatcggcagtatta

SEQ ID NO: 406630 - DNA, 120 bp, Artificial Sequence
  ENSG00000147535_6 (sequence is synthesized)
tcctcctctgactgatgcagaatgccataaaccatttcaagacaaacttgtactttccactgcacagaagcctggggattcttattgttttgatatttaaaaattgaatctggccgggcg

SEQ ID NO: 406631 - DNA, 120 bp, Artificial Sequence
  ENSG00000147535_7 (sequence is synthesized)
agaccccatctcaaaaaaaaaaaaaattgaatctatctcaatagagaacaggtgaactagccctcctaaccggaccatgcacaagacaagaaattctagcctttttttccccttccaagg

SEQ ID NO: 406632 - DNA, 120 bp, Artificial Sequence
  ENSG00000147535_8 (sequence is synthesized)
agaaattctagcctttttttccccttccaaggtgcaagtgaggacataagccacactgtattctgcctccaaatgattacacacttttgcccctgctcatctatcttgaggagttacggt

SEQ ID NO: 406633 - DNA, 120 bp, Artificial Sequence
  ENSG00000147535_9 (sequence is synthesized)
tcttttccactactgtatgccacatgttctagtaaaaggatctttcaaaggtgtccaacaccttatgaatctggtctatcagattaatatctgaagatctacagtgtttttacatttaat

SEQ ID NO: 406634 - DNA, 120 bp, Artificial Sequence
  ENSG00000147535_10 (sequence is synthesized)
ttaaatgccattcttagaaggatcttgtcacaaagaagcctttacatagccccaccttgtctcagaagctagagttcattatcaaaacttaatttccatttcatatagctcaaaatctta

SEQ ID NO: 406635 - DNA, 120 bp, Artificial Sequence
  ENSG00000147535_11 (sequence is synthesized)
aaatctagggcatggccaactaaattactttgattctgtttaccttctctgatgacaattccatcaagccttaaataggaaaatgtcgaatctagggtaatttatcacttttgtgtgcat

SEQ ID NO: 406636 - DNA, 120 bp, Artificial Sequence
  ENSG00000147535_12 (sequence is synthesized)
cttatctgagtccagccatctggtactgctgtgcattttgaacaccgtgggcataaacaatttgttgaattactaagtgaaaacaataataaagaagaaaatggtcaggagtgtggtttc

SEQ ID NO: 406637 - DNA, 120 bp, Artificial Sequence
  ENSG00000147535_13 (sequence is synthesized)
agcactactaacagatgactgtttctacctcatttgaccataactgtacttgtgagcttctttccttccattcatgactgaagatctgctcaaatgcaccaacactgccaagtgactaag

SEQ ID NO: 406638 - DNA, 120 bp, Artificial Sequence
  ENSG00000147535_14 (sequence is synthesized)
gtagaaaagaaaaatgacaggtatcgtcatctgaaggacagatgaatctttttctgccccttcttcacaatggaatataaggaacaattatgggatgtcatcagaatggatgccatagga

SEQ ID NO: 406639 - DNA, 120 bp, Artificial Sequence
  ENSG00000147535_15 (sequence is synthesized)
cctacagctccctttctctttattgtgattatactttaaatatgacattgtcttttatgtgtatgttcctatattttcaatgtatctttttccttcagtaaacctgatattcaaataaaa

SEQ ID NO: 406640 - DNA, 120 bp, Artificial Sequence
  ENSG00000147535_16 (sequence is synthesized)
gttcgcggccttcctgtaagaaagatccacggccgggcccgggcggccccgcttcccaggcaggcgggcggcacggggcggcgggtcgggcagtggggaagcggggaggaagccaggcga

SEQ ID NO: 406641 - DNA, 120 bp, Artificial Sequence
  ENSG00000147535_17 (sequence is synthesized)
cacatgtgactacaagcatcactggcaaggaccctttaaatggtgaaaatgggcagatgaatagcaataagtggacctttgttactcttctgagttagaaaaattctaatttagtacact

SEQ ID NO: 406642 - DNA, 120 bp, Artificial Sequence
  ENSG00000147535_18 (sequence is synthesized)
ctgaacaaagcttattatacttacttaagatgtgttttgatttggtgttcagaaagcaacctgacaatgataatactgtaactatgataaaattgagaataaaaagattttatttagaaa

SEQ ID NO: 406643 - DNA, 120 bp, Artificial Sequence
  ENSG00000147535_19 (sequence is synthesized)
tcagtcctccaggtgacacctgggctcttttctgcctgaacagcatttcccaccaacggccacagcagtcggtcagtgtcctcttgagcacctcctgaagctgcagtgtcatttgctgtt

SEQ ID NO: 406644 - DNA, 120 bp, Artificial Sequence
  ENSG00000147535_20 (sequence is synthesized)
gaatttaacctagaaagctagtagggatgggaaaatctgactactcttgtttctacaatttggaaaatccccccttctttagtaactccacagtttaacaagtctgagccttgactattt

SEQ ID NO: 406645 - DNA, 120 bp, Artificial Sequence
  ENSG00000147535_21 (sequence is synthesized)
gggtaaatattacagaacagaaaggtagtttaccttcatgagatttgcacatttaattgttatattatttgcctagatcctgcaatcttgtactagcaataaaaatacctttaacgaaga

SEQ ID NO: 406646 - DNA, 120 bp, Artificial Sequence
  ENSG00000147535_22 (sequence is synthesized)
ggatggggaaggcggcggcggcggtggcctttggggccgaagtgggcgtgcggctcgcgctgttcgcggccttcctgtaagaaagatccacggccgggcccgggcggccccgcttcccag

SEQ ID NO: 406647 - DNA, 120 bp, Artificial Sequence
  ENSG00000147535_23 (sequence is synthesized)
cctccctccccatgacccggcttcccgcgggcacctgtgcgttttccaccccgagacggcctttgtagggacccactgcccactccgctgctgtgcgctgggttccgcctcctagggctc

SEQ ID NO: 406648 - DNA, 120 bp, Artificial Sequence
  ENSG00000147535_24 (sequence is synthesized)
gagtgtttaagatcctgattgagagaggagggtgtccgagcctctttgggctgagacaacgttttcccgggcgctctgtgcctcagcctgaggtaccggggcccgagccgcacgggcgct

SEQ ID NO: 406649 - DNA, 120 bp, Artificial Sequence
  ENSG00000147535_25 (sequence is synthesized)
gacagagcaagactgtctcaaaaaataaataaataaaaacatactcatgcttcctagcctcctatgtggggatgaatgaggtagcttcctttaaaagacaaaccacttaaaagtttttct

SEQ ID NO: 406650 - DNA, 120 bp, Artificial Sequence
  ENSG00000147535_26 (sequence is synthesized)
gttcactggtggcgctgcctggcgcccggttacgcgcactcagagaccttatgttagctccagtgagtcctgctgtgtcacatccctctttcctgtaggagcacgagtgtggcttttttt

SEQ ID NO: 406651 - DNA, 120 bp, Artificial Sequence
  ENSG00000147535_27 (sequence is synthesized)
tggattgtttttaacctctgacattctgattcaggttattgcatttctctctccactgtctctgatcttcctggccaaatttctcaagaaggcagacacaagagacagcagacaagcctg

SEQ ID NO: 406652 - DNA, 120 bp, Artificial Sequence
  ENSG00000147535_28 (sequence is synthesized)
tttcttcgtgctgggaacctaggaggtcgttgtgggattcagccacggtgagcctgtgtggaggccactgagttctgcattcctaaaggaactctatccccgcgggagaggaaaatagca

SEQ ID NO: 406653 - DNA, 120 bp, Artificial Sequence
  ENSG00000147535_29 (sequence is synthesized)
ctgcagggacttggttacgcaggctacacggcaggcagccctgtgcctaaatgcactgggttatttgtacctcagaaatgtctttggcctagtacaaaagttctcggctacaaaagagtg

SEQ ID NO: 406654 - DNA, 120 bp, Artificial Sequence
  ENSG00000147535_30 (sequence is synthesized)
atcactgaggaccctaattatttttgtgcccaggcctggttggattctatccatctcagaaacagcacggctgctctcataacgaggccatgaccatacctttcctcctagacagatcct

SEQ ID NO: 406655 - DNA, 120 bp, Artificial Sequence
  ENSG00000147535_31 (sequence is synthesized)
gtggctctaccggaacccctacgtggaggcggagtatttccccaccaagccgatgtttgtgcgtggagaaagatcgtctttcctccctccccatgacccggcttcccgcgggcacctctg

SEQ ID NO: 406656 - DNA, 74 bp, Artificial Sequence
  ENSG00000147535_32 (sequence is synthesized)
ttaggtgaggctggtctcaatctcctgacctcgggatccatctgcctggtcctcccaaagtgctgggattacag

SEQ ID NO: 406657 - DNA, 120 bp, Artificial Sequence
  ENSG00000147536_0 (sequence is synthesized)
gagttggtcccggcaagtccttgagcagtttgttcctctgtcttcccgcttcctggtgccccgactgcgtccccacgaacgccccgtccttaccgccggctgctgtggagtgcctcgctg

SEQ ID NO: 406658 - DNA, 120 bp, Artificial Sequence
  ENSG00000147536_1 (sequence is synthesized)
tctcccaggtccccgagttcctggtttcagagaagatgaccgaagaagtggatttcctgggacaggactctgatgggggtagtgaggaagtggtcctaactcctgcagagctcattgaaa

SEQ ID NO: 406659 - DNA, 120 bp, Artificial Sequence
  ENSG00000147536_2 (sequence is synthesized)
gattggagcaggcctggatgaatgaaaagtttgcccctgagctgctggagagcaagcctgagattgtagaatgtgtcatggaacagctggagcacatggaagaaaatctcaggagagcca

SEQ ID NO: 406660 - DNA, 120 bp, Artificial Sequence
  ENSG00000147536_3 (sequence is synthesized)
aaagggaggacctgaaggtcagcatccaccaaatggagatggagaggatccgctacgtcctcagcagctacttgcggtgtcgcctcatgaagatagagaagtttttccctcatgtccttg

SEQ ID NO: 406661 - DNA, 120 bp, Artificial Sequence
  ENSG00000147536_4 (sequence is synthesized)
agaaggaaaaaacacgtcctgagggggagccttccagcctctcgccggaagagttggcctttgccagagagttcatggcgaacacagagtcctatctgaaaaatgtcgccttgaagcaca

SEQ ID NO: 406662 - DNA, 120 bp, Artificial Sequence
  ENSG00000147536_5 (sequence is synthesized)
tgccccctaacttacagaaggtggacctctttcgggcagttcccaaaccagatctagattcttacgtgtttctgagagtgagagaacgacaagaaaacatactggtagaaccagacacag

SEQ ID NO: 406663 - DNA, 120 bp, Artificial Sequence
  ENSG00000147536_6 (sequence is synthesized)
atgagcagagggactacgtgattgacctggagaagggctcacagcacttgatccgatacaaaaccattgcacctctggttgcatctggagctgtccagctaatttaaaactaggcataaa

SEQ ID NO: 406664 - DNA, 80 bp, Artificial Sequence
  ENSG00000147536_7 (sequence is synthesized)
aaatacaaaataattagccgggtgtgggcaggagaatcgcttgaacctgggagcaggaggttgcagtgagccgaggtcgt

SEQ ID NO: 406665 - DNA, 68 bp, Artificial Sequence
  ENSG00000147536_8 (sequence is synthesized)
ggtcaggagatcaagaccatcctggctactaaaccccatctctacccatctactcaggaggctgaggc

SEQ ID NO: 406666 - DNA, 120 bp, Artificial Sequence
  ENSG00000147536_9 (sequence is synthesized)
tgggcgacagagcgagactccatttccaaaaaaaacacactaggcgtaaacaagaatgaagacctggaaccgtagagaaaatactagaaacccctcgtatcacgttgtgcctgaggacaa

SEQ ID NO: 406667 - DNA, 120 bp, Artificial Sequence
  ENSG00000147536_10 (sequence is synthesized)
atactagaaacccctcgtatcacgttgtgcctgaggacaataataaagtagtttactaggcatcagacattcctcagcagtgctgtgggtcacgggcgtgaagcggagctcgaggcagga

SEQ ID NO: 406668 - DNA, 120 bp, Artificial Sequence
  ENSG00000147536_11 (sequence is synthesized)
ttgcttgtgttgctgcatgtcctgtctgctgttttagcccgtgtcagtagatggggccattgtactgtttgttctgcacacttggcggagcagcagaggctctcagcacgccttttccct

SEQ ID NO: 406669 - DNA, 120 bp, Artificial Sequence
  ENSG00000147536_12 (sequence is synthesized)
ttgtagtattttctgagctaaggaaagtcaggcagaagtagttcataagaaggcatcactgcctgtgatcggggctgcatttagccctgacctgataatggtaggagagttcatttagcc

SEQ ID NO: 406670 - DNA, 120 bp, Artificial Sequence
  ENSG00000147536_13 (sequence is synthesized)
tcccgtcatacatcattagactgtgtaaactaacattttagaacctctaatattggacttaaaaccaatttctgtcgtgcttaattgaaaatcacaactaaaccaataaaccattattaa

SEQ ID NO: 406671 - DNA, 120 bp, Artificial Sequence
  ENSG00000147536_14 (sequence is synthesized)
atttccattctgcagcagaaggcacctctggacggctcccggcttgtagtttaatgaagtatgtgctccctgctgttaacccgcagccctccccaactctccagcagctttgccaagtca

SEQ ID NO: 406672 - DNA, 120 bp, Artificial Sequence
  ENSG00000147536_15 (sequence is synthesized)
gcctccgggccatctggctgtccttggccaaggcactgttaacggagtgacgttaaccatcttgtattgtgacctgtggccgcttttctggtttaagtccttcactttttcaagaggaat

SEQ ID NO: 406673 - DNA, 120 bp, Artificial Sequence
  ENSG00000147536_16 (sequence is synthesized)
ggatgaaattaatgtgcatgcagagtctcacagtgatgccggaaggaaggatgtataggcagtgaatgaatgatctttccttgaaatgctataaaaagcaacctgcattccagtcttttc

SEQ ID NO: 406674 - DNA, 120 bp, Artificial Sequence
  ENSG00000147536_17 (sequence is synthesized)
ttcctggttgaagttggcagatttccatttgcagggtatgggctgcgagagtaatcagggtaacattgctgtcatttccaagagaaatcagtaggggaaagcaagggaggtctttttttt

SEQ ID NO: 406675 - DNA, 120 bp, Artificial Sequence
  ENSG00000147536_18 (sequence is synthesized)
aggggaaagcaagggaggtcttttttttttttcttttttgagacggagtttccctcttgttacccaggctggagtggcagtggtgtgaacacggctcactgcagcctccacctcctgggt

SEQ ID NO: 406676 - DNA, 120 bp, Artificial Sequence
  ENSG00000147536_19 (sequence is synthesized)
ggaattataggcgtgagccactgcgcacggcctggggaggttttatttcttgacaaaggtatttgatactcgtgcagtccctggagggtctcactggagagacaacatttaggctgagat

SEQ ID NO: 406677 - DNA, 120 bp, Artificial Sequence
  ENSG00000147536_20 (sequence is synthesized)
gagagacaacatttaggctgagatctgattaacaggaggcagctgcagtgcagaggtcaaaagggagggtgttccaggcagagaaaacagcctgtgcaaaggccctgaggcagaaacaaa

SEQ ID NO: 406678 - DNA, 120 bp, Artificial Sequence
  ENSG00000147536_21 (sequence is synthesized)
ctctacttgaggtcagcctggttagaaagcccaactcaaaatagaaagtattacatgataaggtctgaggcaggctggacccagatcttacaggaccttgttaataaggatcccatttgg

SEQ ID NO: 406679 - DNA, 120 bp, Artificial Sequence
  ENSG00000147536_22 (sequence is synthesized)
tcccccacagtcctgagaagcgggcagggctgtgggaaacagcagatatttagtggtaagcctgagatcagaacccaagtctgcacttcctagtcacgttctccctgtagtgctaagccc

SEQ ID NO: 406680 - DNA, 120 bp, Artificial Sequence
  ENSG00000147536_23 (sequence is synthesized)
agagacctgagctgttaacctagaacagtgtgcttcctaagccttaatgtgcatacccatcgcctggagctcgccttaagatgtaggttctgcctgaagcccaagttcatttagtatgtc

SEQ ID NO: 406681 - DNA, 120 bp, Artificial Sequence
  ENSG00000147536_24 (sequence is synthesized)
atggttaattcagagtaaaatcaagagttagtacttgatttatgcttgttatataaagaaagagacaacttcactgtatgatcattttgtcacttttcaaaagcatttaattcccattca

SEQ ID NO: 406682 - DNA, 120 bp, Artificial Sequence
  ENSG00000147536_25 (sequence is synthesized)
attgaaaatgtttcaagaacaaacctgtttggtcattttattgatattgcacatttgtatatgaataaatttttgcaaattaaaaaaaaaaaagatgtaggttctgaaacagggtgaggt

SEQ ID NO: 406683 - DNA, 120 bp, Artificial Sequence
  ENSG00000147536_26 (sequence is synthesized)
ccaggatcctgcctttctaaggagctcccatgttgtgcagttgctgctggcccggggaccacattgaatgacggctctacgtcctcatgcctccagctgctgccctgtacatgtccaact

SEQ ID NO: 406684 - DNA, 120 bp, Artificial Sequence
  ENSG00000147536_27 (sequence is synthesized)
gcacggagcactttacatcctctaaaaccacagtaaattgctccatttcctaaattacctcttcaagagaagactggttttgatgtcatttttaaataaaggagaagttgaatttcaaaa

SEQ ID NO: 406685 - DNA, 120 bp, Artificial Sequence
  ENSG00000147536_28 (sequence is synthesized)
ggggagggggatgttcgcagtttccttgcgaccccagggactttctttgtccccgccatccacctccttaggcctttgggatcgccgactggtctaatgtcgccggcccttgtggctctg

SEQ ID NO: 406686 - DNA, 120 bp, Artificial Sequence
  ENSG00000147536_29 (sequence is synthesized)
atcgccgactggtctaatgtcgccggcccttgtggctctgggaaattagcattgattaatcttcctaacaatttttgtttttatagagacaggatctccctatgttgcccaggctggtct

SEQ ID NO: 406687 - DNA, 120 bp, Artificial Sequence
  ENSG00000147536_30 (sequence is synthesized)
gtgctgggattacaggcgtgagcccggccagctcctaataatgttaagtgcttgctaggagtcaagcgctgtgctgagcgcaggggcttcccacgtcattgcgtccccagtgcttagtgc

SEQ ID NO: 406688 - DNA, 120 bp, Artificial Sequence
  ENSG00000147536_31 (sequence is synthesized)
gtgccaggcactgagcagaggcgcgattcgtatttgaactaaaacgaaccccgtccctgaggaacaagacctctactgggaagtcaaagaaatgaatagtgattgtatggtgtgatgggt

SEQ ID NO: 406689 - DNA, 120 bp, Artificial Sequence
  ENSG00000147536_32 (sequence is synthesized)
gctcagctcttggtggacagaagtaagggggaggcttgtttgagaaacggatacctgacctaagccttggaggaagaggcagacactggaaaactagagtccctgcgttctctcaccact

SEQ ID NO: 406690 - DNA, 120 bp, Artificial Sequence
  ENSG00000147536_33 (sequence is synthesized)
tgctaaagggcctctacaaccccaggaaacctcaataaacctttcctttctccagatagatgtctgttcttgcagataattagaaaacgcattgcagagtattggttctttccctctcat

SEQ ID NO: 406691 - DNA, 120 bp, Artificial Sequence
  ENSG00000147536_34 (sequence is synthesized)
ggattgagacagcacagtctgtaatgcagactgaatgtcctggggaaaacttgggctggggcccaggagggtccaggacctgaagatgctgctaagagcccaatatccatgtagctaaac

SEQ ID NO: 406692 - DNA, 120 bp, Artificial Sequence
  ENSG00000147536_35 (sequence is synthesized)
tgtaaggagagcgagagattgctccacagaagcacagaggaacgtgtgtggcccactgcggggacaccgcacacatttttagtctgttcacctgccgagtgagtggttcccccttgcgtt

SEQ ID NO: 406693 - DNA, 120 bp, Artificial Sequence
  ENSG00000147536_36 (sequence is synthesized)
acagcatggcagtgctaaagggagagttgttggcattggtcaatagtgaatgctgactagaggagaacttgtttccaaaattattttgtctgtcagatggccaacgtcagtgtcaaatga

SEQ ID NO: 406694 - DNA, 120 bp, Artificial Sequence
  ENSG00000147536_37 (sequence is synthesized)
tctgtcagatggccaacgtcagtgtcaaatgaaccaggatgacttacattcacctacagctttgtggctatctaacttacaaaaatgaagttgcaggccaggcgtggtggctcacacctg

SEQ ID NO: 406695 - DNA, 120 bp, Artificial Sequence
  ENSG00000147548_0 (sequence is synthesized)
ctttgtgcgcggcggcggcgggagaggcggcggcggcggccagcacggaggcggaggccgagggggctgtgcacaggtcgccgcggagaggcgtgcgaattccgagccgagcgccgagga

SEQ ID NO: 406696 - DNA, 120 bp, Artificial Sequence
  ENSG00000147548_1 (sequence is synthesized)
aggaccgtgctacccaggccgggctgccagccgcaggctcctctctggcagcagcggcggcgcggcgacccccgtccctcggcctccccttcccatcccacctcccgagccttcctcttc

SEQ ID NO: 406697 - DNA, 120 bp, Artificial Sequence
  ENSG00000147548_2 (sequence is synthesized)
ccgcagcacgcccggcccggcccggccgtggccctcctcagtgccggccgccatggcagaggcgtccggcgcggggaaaatctagcccggggatttcatgcggcctagctcggttccgcc

SEQ ID NO: 406698 - DNA, 120 bp, Artificial Sequence
  ENSG00000147548_3 (sequence is synthesized)
tcctcctcgcgcggccccagcggctgcccgcaccccagccccactccgggcctccgtgtctctcctgtgatcgcactgacacggccggggggttagaatggaacaaactgaaggcccgat

SEQ ID NO: 406699 - DNA, 120 bp, Artificial Sequence
  ENSG00000147548_4 (sequence is synthesized)
gagagaaagggaaagttaaggatgctggagcagaacaatggatttctctttctctttcatgcaagggatcatgggaaacacaattcagcaaccacctcaactcattgactccgccaacat

SEQ ID NO: 406700 - DNA, 120 bp, Artificial Sequence
  ENSG00000147548_5 (sequence is synthesized)
ccgtcaggaggatgcctttgataacaacagtgacattgctgaagatggtggccagacaccatatgaagctactttgcagcaaggctttcagtacccagctacaacagaagatcttcctcc

SEQ ID NO: 406701 - DNA, 120 bp, Artificial Sequence
  ENSG00000147548_6 (sequence is synthesized)
actcacaaatgggtatccatcatcaatcagtgtgtatgaaactcaaaccaaataccagtcatataatcagtatcctaatgggtcagccaatggctttggtgcagttagaaactttagccc

SEQ ID NO: 406702 - DNA, 120 bp, Artificial Sequence
  ENSG00000147548_7 (sequence is synthesized)
cactgactattatcattcagaaattccaaacacaagaccacatgaaattctggaaaaaccttcccctccacagccaccacctcctccttcggtaccacaaactgtgattccaaagaagac

SEQ ID NO: 406703 - DNA, 120 bp, Artificial Sequence
  ENSG00000147548_8 (sequence is synthesized)
tggctcacctgaaattaaactaaaaataaccaaaactatccagaatggcagggaattgtttgagtcttccctttgtggagaccttttaaatgaagtacaggcaagtgagcacacgaaatc

SEQ ID NO: 406704 - DNA, 120 bp, Artificial Sequence
  ENSG00000147548_9 (sequence is synthesized)
aaagcatgaaagcagaaaagaaaagaggaaaaaaagcaacaagcatgactcatcaagatctgaagagcgcaagtcacacaaaatccccaaattagaaccagaggaacaaaatagaccaaa

SEQ ID NO: 406705 - DNA, 120 bp, Artificial Sequence
  ENSG00000147548_10 (sequence is synthesized)
tgagagggttgacactgtatcagaaaaaccaagggaagaaccagtactaaaagaggaagccccagttcagccaatactatcttctgttccaacaacggaagtgtccactggtgttaagtt

SEQ ID NO: 406706 - DNA, 120 bp, Artificial Sequence
  ENSG00000147548_11 (sequence is synthesized)
tcaggttggcgatcttgtgtggtccaaggtgggaacctatccttggtggccttgtatggtttcaagtgatccccagcttgaggttcatactaaaattaacacaagaggtgcccgagaata

SEQ ID NO: 406707 - DNA, 120 bp, Artificial Sequence
  ENSG00000147548_12 (sequence is synthesized)
tcatgtccagttttttagcaaccagccagagagggcgtgggttcatgaaaaacgggtacgagagtataaaggtcataaacagtatgaagaattactggctgaggcaaccaaacaagccag

SEQ ID NO: 406708 - DNA, 120 bp, Artificial Sequence
  ENSG00000147548_13 (sequence is synthesized)
caatcactctgagaaacaaaagattcggaaaccccgacctcagagagaacgtgctcagtgggatattggcattgcccatgcagagaaagcattgaaaatgactcgagaagaaagaataga

SEQ ID NO: 406709 - DNA, 120 bp, Artificial Sequence
  ENSG00000147548_14 (sequence is synthesized)
acagtatacttttatttacattgataaacagcctgaagaggctttatcccaagcaaaaaagagtgttgcctccaaaaccgaagttaaaaaaacccgacgaccaagatctgtgctgaatac

SEQ ID NO: 406710 - DNA, 120 bp, Artificial Sequence
  ENSG00000147548_15 (sequence is synthesized)
tcagccagaacagaccaatgcaggggaggtggcctcctcactctcaagtactgaaattcggagacatagccagaggcggcacacaagtgcggaagaggaagagccaccgcctgttaaaat

SEQ ID NO: 406711 - DNA, 120 bp, Artificial Sequence
  ENSG00000147548_16 (sequence is synthesized)
agcctggaaaactgcggcagcaaggaaatccttaccagcttccattacgatgcacaaagggagcctggatttgcagaagtgtaacatgtctccagttgtgaaaattgaacaagtgtttgc

SEQ ID NO: 406712 - DNA, 120 bp, Artificial Sequence
  ENSG00000147548_17 (sequence is synthesized)
tcttcagaatgctacaggggatgggaaatttatcgatcaatttgtttattcaacaaagggaattggtaacaaaacagaaataagtgtcagggggcaagacaggcttataatttctacacc

SEQ ID NO: 406713 - DNA, 120 bp, Artificial Sequence
  ENSG00000147548_18 (sequence is synthesized)
aaaccagagaaatgaaaagccaacgcagagtgtatcatctcctgaagcaacatctggttctacaggctcagtagaaaagaagcaacagagaagatcaattagaactcgttctgaatcaga

SEQ ID NO: 406714 - DNA, 120 bp, Artificial Sequence
  ENSG00000147548_19 (sequence is synthesized)
gaaatccactgaggttgtgccaaagaagaagatcaaaaaggagcaggttgaaacagttcctcaggctacagtgaagactggattacagaaaggtgccagcgagatttcagattcctgtaa

SEQ ID NO: 406715 - DNA, 120 bp, Artificial Sequence
  ENSG00000147548_20 (sequence is synthesized)
acctctaaagaaaaggagtcgcgcctcaactgatgtagaaatgactagttcagcatacagagacacatctgactccgattctagaggactgagtgacctgcaggtaggctttggaaagca

SEQ ID NO: 406716 - DNA, 120 bp, Artificial Sequence
  ENSG00000147548_21 (sequence is synthesized)
agtagatagcccttcagctactgcagatgcagacgtttctgatgtgcagtccatggattcaagtttgtcgagaagaggcactggaatgagtaagaaggacactgtatgtcagatttgtga

SEQ ID NO: 406717 - DNA, 120 bp, Artificial Sequence
  ENSG00000147548_22 (sequence is synthesized)
aagctctggtgactctctgattccttgtgagggagagtgctgcaaacactttcacctggagtgcctgggattggcatcacttcctgatagcaagttcatctgcatggaatgtaaaactgg

SEQ ID NO: 406718 - DNA, 120 bp, Artificial Sequence
  ENSG00000147548_23 (sequence is synthesized)
gcagcacccatgtttttcgtgtaaagtgtctggtaaagatgtgaagcgttgttctgttggtgcttgtgggaaattttatcatgaagcctgtgtccgcaaattccccactgccatctttga

SEQ ID NO: 406719 - DNA, 120 bp, Artificial Sequence
  ENSG00000147548_24 (sequence is synthesized)
atcaaaaggattccgctgtcctcagcactgctgctctgcctgctctatggagaaagatatccacaaagcaagtaaaggccgcatgatgagatgtttaagatgtccagttgcctatcactc

SEQ ID NO: 406720 - DNA, 120 bp, Artificial Sequence
  ENSG00000147548_25 (sequence is synthesized)
tggagatgcttgcattgcggccggaagcatgttagtatcctcctacattctcatctgtagtaatcattccaaacggagcagtaattcttctgctgtaaatgtaggcttttgtttcgtttg

SEQ ID NO: 406721 - DNA, 120 bp, Artificial Sequence
  ENSG00000147548_26 (sequence is synthesized)
tgccagagggctgatagttcaggaccattcagaccccatgttcagttcatatgcctataagtcccactacctactgaatgaatcaaatcgtgctgagttgatgaaattacctatgattcc

SEQ ID NO: 406722 - DNA, 120 bp, Artificial Sequence
  ENSG00000147548_27 (sequence is synthesized)
ttcttcgtcagcttccaaaaagaaatgtgagaaaggtggaagattgctctgctgtgaatcgtgcccagcttccttccacccggaatgcctaagcatagaaatgccagaaggctgctggaa

SEQ ID NO: 406723 - DNA, 120 bp, Artificial Sequence
  ENSG00000147548_28 (sequence is synthesized)
ttgtaatgactgtaaagctggcaagaaactacattacaagcagattgtttgggtcaaattgggaaattacagatggtggccagcagagatctgcaaccccaggtctgtgccactgaacat

SEQ ID NO: 406724 - DNA, 120 bp, Artificial Sequence
  ENSG00000147548_29 (sequence is synthesized)
ccagggccttaaacatgacttgggggacttccctgtattcttctttggttctcatgactactactgggtacaccagggcagagtgttcccttatgttgaaggagacaaaagctttgctga

SEQ ID NO: 406725 - DNA, 120 bp, Artificial Sequence
  ENSG00000147548_30 (sequence is synthesized)
agggcagactagtattaacaagaccttcaaaaaggcactggaagaagctgcaaaacgtttccaggaattgaaagcacaaagagaaagtaaagaagccctagagattgaaaaaaactcaag

SEQ ID NO: 406726 - DNA, 120 bp, Artificial Sequence
  ENSG00000147548_31 (sequence is synthesized)
aaaaccccctccctacaaacacatcaaagctaacaaagtaataggaaaggtgcagatccaggttgctgacctgtcagagattccccgctgtaactgcaagccagctgatgaaaacccttg

SEQ ID NO: 406727 - DNA, 120 bp, Artificial Sequence
  ENSG00000147548_32 (sequence is synthesized)
tggcttggaatcggagtgcctgaacagaatgttgcagtatgaatgccacccgcaggtgtgcccagctggagatcgttgtcagaaccagtgctttacaaagagactataccctgatgcaga

SEQ ID NO: 406728 - DNA, 120 bp, Artificial Sequence
  ENSG00000147548_33 (sequence is synthesized)
gatcatcaaaacggagcggagaggctggggcctcaggaccaaaaggagcattaagaagggtgaatttgtaaatgaatacgtcggtgaattaattgatgaagaagaatgcagattgcgaat

SEQ ID NO: 406729 - DNA, 120 bp, Artificial Sequence
  ENSG00000147548_34 (sequence is synthesized)
caagcgagcccacgagaacagtgtaactaatttttatatgttaactgttaccaaggaccgtataattgatgccggcccaaaaggaaattattctcgcttcatgaaccacagttgtaatcc

SEQ ID NO: 406730 - DNA, 120 bp, Artificial Sequence
  ENSG00000147548_35 (sequence is synthesized)
caactgtgaaacacaaaagtggacagtgaatggagatgttcgagtgggactatttgctctctgtgatattcctgcagggatggagttaacatttaattataacctagattgtctgggcaa

SEQ ID NO: 406731 - DNA, 120 bp, Artificial Sequence
  ENSG00000147548_36 (sequence is synthesized)
cggcagaacggagtgccactgtggagcagataactgcagtggttttctaggagtgcggccaaagtcggcatgtgcgtcaacaaatgaagagaaggcaaaaaatgctaagttaaaacagaa

SEQ ID NO: 406732 - DNA, 120 bp, Artificial Sequence
  ENSG00000147548_37 (sequence is synthesized)
gagacgaaagatcaaaacagaaccaaagcagatgcatgaagattactgttttcaatgtggagatggtggagagctggtcatgtgtgacaaaaaagactgtcccaaagcataccacctcct

SEQ ID NO: 406733 - DNA, 120 bp, Artificial Sequence
  ENSG00000147548_38 (sequence is synthesized)
atgccttaacctgactcagccaccatatggaaagtgggagtgtccgtggcatcagtgcgatgagtgcagcagtgcagctgtttccttctgtgaattctgtccacattcattttgtaaaga

SEQ ID NO: 406734 - DNA, 120 bp, Artificial Sequence
  ENSG00000147548_39 (sequence is synthesized)
tcatgaaaagggggccctggttccctctgcactggaaggccgcctctgctgctcggaacatgaccccatggctcctgtgtcaccagaatactggagcaagataaaatgtaaatgggaatc

SEQ ID NO: 406735 - DNA, 120 bp, Artificial Sequence
  ENSG00000147548_40 (sequence is synthesized)
acaagatcatggagaagaagtaaaagaataaatgtgtggtgtcccctcctttctatttaagtgaaaaaagcaaatagatcatgcatttaaaaagaagagactgctacagtgcatacagcc

SEQ ID NO: 406736 - DNA, 120 bp, Artificial Sequence
  ENSG00000147548_41 (sequence is synthesized)
tttgccatcggaactgccttattaaagcaaaaatgggaaaccagttcatgcaggcagaagcagttggtggtgtctggtttttgtttgatttggttggtttgggattcttttgtggagggt

SEQ ID NO: 406737 - DNA, 120 bp, Artificial Sequence
  ENSG00000147548_42 (sequence is synthesized)
taaattcccttggtcttttcttgccttttattgtgcttcagtgccattgcagcttgaaaaagaaatgtttttgctgttaaaataagaacaaagagaaaagtaagttttgttaatgagata

SEQ ID NO: 406738 - DNA, 120 bp, Artificial Sequence
  ENSG00000147548_43 (sequence is synthesized)
aatttaaagtctaagatgtgttccttggttgtataaagcaaaagtagccatcattcctttatttattttcatttttaggaatttcaagaagtgtagttcaatagtctaatcaagtgtgtg

SEQ ID NO: 406739 - DNA, 120 bp, Artificial Sequence
  ENSG00000147548_44 (sequence is synthesized)
cttctctttcccttcaaaatgcttttcataggcttagagaagggctctatggaagtattaaatctggcctcttgaaaacaatgcctcggtggattttacctctgtggtcttaaacaaggt

SEQ ID NO: 406740 - DNA, 120 bp, Artificial Sequence
  ENSG00000147548_45 (sequence is synthesized)
gggctttgtactatggtaactttacctagaagggtatatggtgtgtttccttggtggaaggaaaaaaaggaatggatgtgctcactgatttttaaaacgttttccattgacatggatggt

SEQ ID NO: 406741 - DNA, 120 bp, Artificial Sequence
  ENSG00000147548_46 (sequence is synthesized)
ttgggttttggatgaagtgcgtttctgtggatatgaagcatagttggaatggtcactcctattttcctgacactgattaaggcagctaaagggggatgaaggcataaaccaaaatttgga

SEQ ID NO: 406742 - DNA, 120 bp, Artificial Sequence
  ENSG00000147548_47 (sequence is synthesized)
tcatataagcaccattttctgtccaattttattgtagaccctggtcttaattggagagaattacaggcattttattttttgtctctgttttcctctcctactcaaacatttcttttgtca

SEQ ID NO: 406743 - DNA, 120 bp, Artificial Sequence
  ENSG00000147548_48 (sequence is synthesized)
tctgaccattcagtcatgtttcctggtaaaaccacacaagtgagtttgaattgtatttgaatagatctttttggttgagttcctaatttggggggtgaaagtagtaggggcatccccagg

SEQ ID NO: 406744 - DNA, 120 bp, Artificial Sequence
  ENSG00000147548_49 (sequence is synthesized)
ttacatgtaaagaatttctattattatccagtacttaagattgctcccattgagtaaggggaagaacttctacttttacagggtgcataagagccacacaaacacacttcatcttaggaa

SEQ ID NO: 406745 - DNA, 120 bp, Artificial Sequence
  ENSG00000147548_50 (sequence is synthesized)
gcacttggagaaaactcccaagaaagtcagtgttagcaaaaatggttgatggtgatgcttgactcttatagatgcgagtataccaagatgtctgctcaccaaactcacttgcttttaatg

SEQ ID NO: 406746 - DNA, 120 bp, Artificial Sequence
  ENSG00000147548_51 (sequence is synthesized)
cttaggaatatgtatattccagtattccttgtatgaaaataattagtaatgtcagacattgttgtaacactgtactaagtagaagtctagggttagcttgaatgaatgttaactttctct

SEQ ID NO: 406747 - DNA, 120 bp, Artificial Sequence
  ENSG00000147548_52 (sequence is synthesized)
gtgaattttgactgcttacaattgctggtacctggtagcatttattttccctcaagtacctagtaaccttatgaaggtagggagggtagatgctctaccacattccttcagctgtattga

SEQ ID NO: 406748 - DNA, 120 bp, Artificial Sequence
  ENSG00000147548_53 (sequence is synthesized)
gtgttccatttgcttatcaatttagagctcttctatggaaagagggtgaaaatctgttttgtgcctcttttttttgtatgtaaatgtgcaattatactggattttctcttgtaaaaaaca

SEQ ID NO: 406749 - DNA, 120 bp, Artificial Sequence
  ENSG00000147548_54 (sequence is synthesized)
ctacaattcttttactgaagctcctaaactgccatttgcctgactccagcaattaattctgcggtgactcattgggcttccagtacttctgttgattagatatggtcccaaaagaaagag

SEQ ID NO: 406750 - DNA, 120 bp, Artificial Sequence
  ENSG00000147548_55 (sequence is synthesized)
caaaatggaaaatgcgatccatgtcaccaaatataattgctacaagtaacatgaaatacagctcaccaaaacactaaactttgctcttgagcaattatatagtttgatgtccttttaaaa

SEQ ID NO: 406751 - DNA, 120 bp, Artificial Sequence
  ENSG00000147548_56 (sequence is synthesized)
aataagaaaagctaggttttatcatactaaaattttattttgtatatgatgtttggttttttaaacttactaacataaggatttcctttaatattccaaatacagttcttgaaacagtat

SEQ ID NO: 406752 - DNA, 120 bp, Artificial Sequence
  ENSG00000147548_57 (sequence is synthesized)
ccaacatgaaatcttatctccttgcttttagacttagtgctatttactatctaaagacttttctatggtaagccagggtacatcctatatactacagataccttaggtttcagtattttt

SEQ ID NO: 406753 - DNA, 120 bp, Artificial Sequence
  ENSG00000147548_58 (sequence is synthesized)
atgcagcttcttcattgtgtcacattttgttttcatatctgtaacagagctctgctgaaattaaaaaaaaattatgattaataggattgtttcaccatttcagaaatcagagtagaaaac

SEQ ID NO: 406754 - DNA, 120 bp, Artificial Sequence
  ENSG00000147548_59 (sequence is synthesized)
agcgagactccatctcaaaaaaaaaaggtaaccatagttctgaagtctttggccatgaatgttctttaatggtctaaaaagcggttttagtcatgctggtgccaaggagttctcctcaca

SEQ ID NO: 406755 - DNA, 120 bp, Artificial Sequence
  ENSG00000147548_60 (sequence is synthesized)
cctccatagcgtcaatgttgacctatttgatatatttttaagttgcagattatagatgcagaaagagaaaattgtcctttatgtgtgcatgagtatacatgcactgtgcctgtgatacac

SEQ ID NO: 406756 - DNA, 120 bp, Artificial Sequence
  ENSG00000147548_61 (sequence is synthesized)
caatgaaatattccaaaagacattgctcactcatagtctgaagttggtatttgttaacttttaaatctatatgtggtcagagtgtaagtggctggtttttattcttgtccaacaatgaaa

SEQ ID NO: 406757 - DNA, 120 bp, Artificial Sequence
  ENSG00000147548_62 (sequence is synthesized)
taacttaaagcagcatgggctaatggtggtattttttttaaccacatgttaatttgttgaaggaagaagtgaacataagatttttgataatcagcctaaagcttcagaaactggatcagt

SEQ ID NO: 406758 - DNA, 120 bp, Artificial Sequence
  ENSG00000147548_63 (sequence is synthesized)
aagagctaaagatgaaatcctgggaaactttctcaggcactgtgcaggggagggaggggctggaccgccactgctgcgagggaagaatcagaagagctgcctgtggctggctgagaaggg

SEQ ID NO: 406759 - DNA, 120 bp, Artificial Sequence
  ENSG00000147548_64 (sequence is synthesized)
caaggtggatggctcttcattcctggaaggctgaagcagccagaggcagtgattcacctctttaatgtctaatcagggagagatacaggagtgaggtgggttttattttcatttttgttt

SEQ ID NO: 406760 - DNA, 120 bp, Artificial Sequence
  ENSG00000147548_65 (sequence is synthesized)
taacaagttcccactcttatcttaattctcaaaaatgatctggcctcatctatagaactggctgagttggggaatcatttaaaatttgggattttctgtacaagtcaagaacatatgtga

SEQ ID NO: 406761 - DNA, 120 bp, Artificial Sequence
  ENSG00000147548_66 (sequence is synthesized)
aagctaaaaaagtaatggaggcagggggactgctcccagctcccttctgccatttacacaaaatatttgaaaacatgtctgtaaataacgttgtggaactgagatattgagtatctaatc

SEQ ID NO: 406762 - DNA, 120 bp, Artificial Sequence
  ENSG00000147548_67 (sequence is synthesized)
atgtaaaggaccctcagatgggacaggctattggacaactttcctggttcatgaagtggaatttcctttttgagtagtttcttgcatggtgtattccaataggtcaaacccagacctact

SEQ ID NO: 406763 - DNA, 120 bp, Artificial Sequence
  ENSG00000147548_68 (sequence is synthesized)
gtttgcaaacaggccatctgtagagaatacaatctctggactgcccaggacttgttgcttgtctttcatttcattttaaatacaaagctcttcctttagcattcaccttgaagtcaaggt

SEQ ID NO: 406764 - DNA, 120 bp, Artificial Sequence
  ENSG00000147548_69 (sequence is synthesized)
gttggctgccacatgccatgtcctcttaacaagataagaaaacagtggctatggagccctcacagctgggaagctgacattctatacttccatatgagaaaaaggacattggaaagttgc

SEQ ID NO: 406765 - DNA, 120 bp, Artificial Sequence
  ENSG00000147548_70 (sequence is synthesized)
tttatttctgggcagcgtagactaaagttacttttcacaaggctgatgcatccagcctcccccagttgtccaagttggtgcagacatgaattgatgaatggaaacactttcctttggcct

SEQ ID NO: 406766 - DNA, 120 bp, Artificial Sequence
  ENSG00000147548_71 (sequence is synthesized)
agggccacctagaattggtctctggttatttgtaaaacaaaaagtagaacttgcttccattttcagatggactagggaatactataattagacagctttgcaatgaattaacaaatactg

SEQ ID NO: 406767 - DNA, 120 bp, Artificial Sequence
  ENSG00000147548_72 (sequence is synthesized)
aaaagttggaaatgtgtatatactgaaatctcaccaacttttacctggggtggggtaccaggagaaagggaaccccctttctcctggtaaagggtaaggggggggataatgtttaccaca

SEQ ID NO: 406768 - DNA, 120 bp, Artificial Sequence
  ENSG00000147548_73 (sequence is synthesized)
ggtacgaaatagtcactttaacattgagacctctgcctcattgaattcaggttttttaagtacttgaaactcttcagattctccttattttagtttctttttacatttatgaagtagaaa

SEQ ID NO: 406769 - DNA, 120 bp, Artificial Sequence
  ENSG00000147548_74 (sequence is synthesized)
gcattgttttgtaaactgttttgaaaataaatagcctagtctcttatcctctttagcgtggattaaaggtgaagttctgcaaatgggagagtgttcacagtagatagctcagattgattg

SEQ ID NO: 406770 - DNA, 120 bp, Artificial Sequence
  ENSG00000147548_75 (sequence is synthesized)
aacacatttgaggaagagactcctgcatgagataccagcatttttacaaatactttttatgtacattctttattttgtcattttgtcaaccctctccccaagcacatcttctttcctttt

SEQ ID NO: 406771 - DNA, 120 bp, Artificial Sequence
  ENSG00000147548_76 (sequence is synthesized)
actatgtctatgtagggaaaaaaacaaaacaaaaaattgcacttacgttacactcccaaaatgtgggtaatccgtgtctttcaaaaaacatttctgttttttgttttgttttggtcagtc

SEQ ID NO: 406772 - DNA, 120 bp, Artificial Sequence
  ENSG00000147548_77 (sequence is synthesized)
cattgcataagtgacaagtttgggtgcttgtggcacgtatgtatgaagcgggagggggatgagaattgcctgtccttcagtaggctgtaaaagtaatttacatgtaagtaaaaagggaaa

SEQ ID NO: 406773 - DNA, 120 bp, Artificial Sequence
  ENSG00000147548_78 (sequence is synthesized)
atagaatagatgccaaagtcatttattcagtccttagttttcttatgtggcattactgcatctgctagttagtgagaaagcaccctcagcttttactgctcccctccctgcctgccaaca

SEQ ID NO: 406774 - DNA, 120 bp, Artificial Sequence
  ENSG00000147548_79 (sequence is synthesized)
cacttgatgtgtgcaaacagccctcaagtatctgtcagatgacctatataaggtattgaataaggtattcttgtcagtttagaaatggactggataaaacttacttggttgtcattattt

SEQ ID NO: 406775 - DNA, 120 bp, Artificial Sequence
  ENSG00000147548_80 (sequence is synthesized)
tatctcatttgtcctgttacatgccctatgttaagataattatattgccactaataatcaagatgctaaatgagtattacaactggctaatatcattttttatatacaagggtatgtgta

SEQ ID NO: 406776 - DNA, 120 bp, Artificial Sequence
  ENSG00000147548_81 (sequence is synthesized)
tatttggaattgatatgagaaactcatttgtacccatttgagtgatattgcacaacaaacacagatacctacagactccgttttcattttctcgtgttctttatgataatgatctttgta

SEQ ID NO: 406777 - DNA, 120 bp, Artificial Sequence
  ENSG00000147548_82 (sequence is synthesized)
gattggttatttctgtactttatctgtaataaactttgtagatcctgtgaaccattactttgcctaaatcacttgagacttgagtctttaataacaaagcatcaatattcactaaagtca

SEQ ID NO: 406778 - DNA, 120 bp, Artificial Sequence
  ENSG00000147548_83 (sequence is synthesized)
atctcttttgagtttctgtgacttggctagaagctcttgacactaagggattagtgttaattttccctgggggtgttccactagggcattactgtataatgacttgatgttgccacatag

SEQ ID NO: 406779 - DNA, 120 bp, Artificial Sequence
  ENSG00000147548_84 (sequence is synthesized)
acttcaagatatataatattttgaggattttgttgattggcctatgttttattgcatagtgtgaaacgtgtaaagcttggttaacctgtatatagatagcttattgttgactagttatag

SEQ ID NO: 406780 - DNA, 120 bp, Artificial Sequence
  ENSG00000147548_85 (sequence is synthesized)
tgtatttagggttgcctgtaatatttaagcttctttactgatgtgtgtgctggtaggaacatataatttttgtacattatatttactgagatgttgccttttttattttacaaatacttt

SEQ ID NO: 406781 - DNA, 120 bp, Artificial Sequence
  ENSG00000147548_86 (sequence is synthesized)
ggaattccaatgtgttttttgcttccgtgaggattaatttggaaaggtttttaatgacattccactgatttcagattttgcttgagattgacttcaataaattgtcctgtatgttccaaa

SEQ ID NO: 406782 - DNA, 120 bp, Artificial Sequence
  ENSG00000147548_87 (sequence is synthesized)
ggggtttttagcaacattggggccggttgcagaaacaacccctctcctgccttccagacactgaggaaagtattcttgttctcttcatataccaagggaatggtgggaaaagtctttgct

SEQ ID NO: 406783 - DNA, 120 bp, Artificial Sequence
  ENSG00000147548_88 (sequence is synthesized)
agagagcatgtggctgtgtgttgtcacttgatattcagcacaggcagctaggatttaaaccctccctgatcttgagacagagaactttacccaaaagatgggactgagttcagatttcag

SEQ ID NO: 406784 - DNA, 120 bp, Artificial Sequence
  ENSG00000147548_89 (sequence is synthesized)
atacattaatcactcatcattgcttagattgatgaaagtatcttttccctctgttaataattaaaagggaaaaaaattctttgttaatgctgtatttttctgtccaaacaggttgaaaca

SEQ ID NO: 406785 - DNA, 120 bp, Artificial Sequence
  ENSG00000147548_90 (sequence is synthesized)
gattcctgtacaatttcatcccagaaactccagacttgtagtctccatgcaagatttctttgtcggcggcttgataaacagtttctttgttttcgattttgatttcgccaatcatcatta

SEQ ID NO: 406786 - DNA, 120 bp, Artificial Sequence
  ENSG00000147548_91 (sequence is synthesized)
ttggcattttcctgcctggtttcttcttcaagactctgaacaattgctttaacagtcaaatgatttttttttttcggtttgagctggatgggtacagcttaaatcatgggtccagcctaa

SEQ ID NO: 406787 - DNA, 120 bp, Artificial Sequence
  ENSG00000147548_92 (sequence is synthesized)
tgatcaatttcaacatggactgtttttggttttttgtttttaaataaagcatcattaatgcacatctgcaggggtttgccaaacagcccaaactgtatacattacaatcattaaaagttc

SEQ ID NO: 406788 - DNA, 120 bp, Artificial Sequence
  ENSG00000147548_93 (sequence is synthesized)
ttattttttttaatattagtgccgttatcatggagaacagcatgacagctgtctttggcagtctgtcatttttctagcattttcagaaactcatcggaaatggcggtacctgtgtttccc

SEQ ID NO: 406789 - DNA, 120 bp, Artificial Sequence
  ENSG00000147548_94 (sequence is synthesized)
ttcgaaagcctctcagtacagcactcctgttcctctgttaaaactccttgttaatccagtgatcttttaggccaaggaaatattttgtgatggtgttctgggtccatacaccagcaatga

SEQ ID NO: 406790 - DNA, 120 bp, Artificial Sequence
  ENSG00000147548_95 (sequence is synthesized)
aggagatagatttgtgtacttgtgttttttaatcagcattaacatgggcaggcaccctcatttatagatgtcaggaaacattcagtgaaaaacttgtagaatgggatgtgataacgaggt

SEQ ID NO: 406791 - DNA, 120 bp, Artificial Sequence
  ENSG00000147548_96 (sequence is synthesized)
tccagtaatctgagcagtctaacgaggcccacctcctccaccacagaacgtggctatgttccaagtgctactctcactcagcctgttgcggatcttcatggcctcaggagacttgtttct

SEQ ID NO: 406792 - DNA, 120 bp, Artificial Sequence
  ENSG00000147548_97 (sequence is synthesized)
ccatgggctcttctggactgcacacttccaccatagcttgctgggttgatctagatgtctgtttgttgtatggaaattttgggggaaaaaatccaaaacacaaactgtgggttgaaatat

SEQ ID NO: 406793 - DNA, 120 bp, Artificial Sequence
  ENSG00000147548_98 (sequence is synthesized)
taaccgtctccttggttccttggtattcaccgtgcctgatctgcacatttcatcgtggctgtttctgtatagcctatactgcattagcccaagagattgttgctttgtaactttttgcac

SEQ ID NO: 406794 - DNA, 120 bp, Artificial Sequence
  ENSG00000147548_99 (sequence is synthesized)
gtaaaaacagagcaaacagataagcactggagaatatatcctacacagtagtccttccatcagacagctctccaagttttgtttctcatttttctttcttctttctggcctaagctctca

SEQ ID NO: 406795 - DNA, 120 bp, Artificial Sequence
  ENSG00000147548_100 (sequence is synthesized)
tgtatcccctcctatactagttttgcttcctgcttggagcagaaaaggaaggctgacagcaaaacaacagagcagttatcagaactttgagatctctaatcagaaaataccattcctaaa

SEQ ID NO: 406796 - DNA, 120 bp, Artificial Sequence
  ENSG00000147548_101 (sequence is synthesized)
cctctggcccactaatcttctaaatagcattattccatggtctatttgtttctagaagcaaacttaaaaagcaactaaatcccactttatcctaattactttgacttgaaggtcatcaaa

SEQ ID NO: 406797 - DNA, 120 bp, Artificial Sequence
  ENSG00000147548_102 (sequence is synthesized)
taaaggagagaacttagtaaattacccaggcagcctcacatttcctgatctgtcagttgtcaaacaccagttggtagcaaaatgctgctgcctgtgatccttgactgagttggatgtttc

SEQ ID NO: 406798 - DNA, 120 bp, Artificial Sequence
  ENSG00000147548_103 (sequence is synthesized)
tttatttcttcccgcacaaattccacatagaggccttcccatccagctctacgtgatttggctgcacttgaacactgattgtccatttacagccctcagcaatgtgccttctaaatggca

SEQ ID NO: 406799 - DNA, 120 bp, Artificial Sequence
  ENSG00000147548_104 (sequence is synthesized)
tgacatatgtagatgtgctgcagcgcttgttaatggtcacaataaatgccacttcaccaaggaagtctcagatgaacaattatgaacatccaaattttattggggggcaataatcaactg

SEQ ID NO: 406800 - DNA, 120 bp, Artificial Sequence
  ENSG00000147548_105 (sequence is synthesized)
aattgcaaaatttgggggaaaatggcactatccgtgtacgaatcgaatacaaatcaaagatttgtcacatccctaataaaaacaagatggagatgtctctgcaaccatatttgtaagcta

SEQ ID NO: 406801 - DNA, 120 bp, Artificial Sequence
  ENSG00000147548_106 (sequence is synthesized)
ttccttttcctctccgacatcagtatgaatctggaaggggccaattcagactgttagccccctttctttctattcatgaactcttttccccttacgtcttgggtcattttaaattattca

SEQ ID NO: 406802 - DNA, 120 bp, Artificial Sequence
  ENSG00000147548_107 (sequence is synthesized)
ctttaccctcttccttctggttgcaaacaaggcccgatgagagaaagggaaagttaaggatgctggagcagaacaatggatttctctttctctttcatgcaagggatcatgggaaacaca

SEQ ID NO: 406803 - DNA, 120 bp, Artificial Sequence
  ENSG00000147548_108 (sequence is synthesized)
agggataaggaattgagtagttcagactccctttgaaaactgtagaaaacctttctgtcagatctttcttttttcttcatattctcattttcgccctccccaccccagctttgaagcata

SEQ ID NO: 406804 - DNA, 120 bp, Artificial Sequence
  ENSG00000147548_109 (sequence is synthesized)
gtatttgtaaatgttgtggcttacattcctgtcttaaaagaaagagaaactttcccccacactgagtttcctttctggactatcttaacgcttctgtcctggtgggttccagtgctcagt

SEQ ID NO: 406805 - DNA, 120 bp, Artificial Sequence
  ENSG00000147548_110 (sequence is synthesized)
tttaatacagccatccctgtgattctgcttcaagcattttcacagaaaacaggtttcaggagatgggaagccagtggtgcaagacttaaaaaatccttcacatttatttagaagtttctg

SEQ ID NO: 406806 - DNA, 120 bp, Artificial Sequence
  ENSG00000147548_111 (sequence is synthesized)
ttatcagcagaatgatttcatgtttttatgatttttatttggaaccatcattgagttcctttttttttttttaagtttgatttttggtttaagctgctggtatatattgttttttatttt

SEQ ID NO: 406807 - DNA, 120 bp, Artificial Sequence
  ENSG00000147548_112 (sequence is synthesized)
ttaaacaaatcaatttaatttatattcttatatttaagaagcagatattcatagatgatctgttttttctgttaatatcgcagattttttggaatgttattttcccagtggaatattcac

SEQ ID NO: 406808 - DNA, 120 bp, Artificial Sequence
  ENSG00000147548_113 (sequence is synthesized)
aaccagtgtaatcaatgtagtaagatacatttaaatcaacttttcaaataaaattttagaagccattcttctttaaattaaactcacaatcagattttttcttaatttttttgttaaaga

SEQ ID NO: 406809 - DNA, 120 bp, Artificial Sequence
  ENSG00000147548_114 (sequence is synthesized)
ccattcttacagcctaaacacctgctagcaaacaaaacaaattctgaatagaattagttccaataagttttatattttttaaaccatttatatggaagaatgtgagcttttctatttaaa

SEQ ID NO: 406810 - DNA, 120 bp, Artificial Sequence
  ENSG00000147548_115 (sequence is synthesized)
atatttccttcatgattttaaacttccaaatttaaaagctaactttgtgggtgctctgtggtatcaccaagcaagtgaaacagtttttccagaatatttaactaaaatttaaatagtata

SEQ ID NO: 406811 - DNA, 120 bp, Artificial Sequence
  ENSG00000147548_116 (sequence is synthesized)
ctaatttgtcattcatttatcatattaactttcatatttcatacttaggaaattatattccaaaaaatctttctaagctcttgaaaatctatagttattcattaccaaaatgaagttgtg

SEQ ID NO: 406812 - DNA, 120 bp, Artificial Sequence
  ENSG00000147548_117 (sequence is synthesized)
attttgccagctggttcccaaaatcagtctgtgaccagtcagttttaaactaataagcagaatgagtataaaaagtgggacaaattgttaatgccactgtgttatagttagtagtagaac

SEQ ID NO: 406813 - DNA, 120 bp, Artificial Sequence
  ENSG00000147548_118 (sequence is synthesized)
aataccagtgattgtttagaagattttatatttgtattactaattgtatcttataaaagcgtttctgttgtatgtttttttacctgttgtaaaaaaaataaaattttttttaaaaagctt

SEQ ID NO: 406814 - DNA, 120 bp, Artificial Sequence
  ENSG00000147548_119 (sequence is synthesized)
gtagtgctaggaagggctgaggagggaacgacggggagggggcgacctagggatggagcgccagaccccaggaggaatggaaggggaagcgggtggcctgaaagggctcgaggggagtcc

SEQ ID NO: 406815 - DNA, 120 bp, Artificial Sequence
  ENSG00000147570_0 (sequence is synthesized)
aggaggcgcagttactgatatagccaaggtgggacactactggagggagctagaagggatcagccagccatgcctccagttcaggtacttggcattgctaagctcagaacaggacttgcc

SEQ ID NO: 406816 - DNA, 120 bp, Artificial Sequence
  ENSG00000147570_1 (sequence is synthesized)
agtgtctagatgaaaaagaggagagatctcaagagggataaccaattggctggcaaagtaacaaatgaaaagtaacctgactctattgacctgcttaaccctgcatgggggggaaggatg

SEQ ID NO: 406817 - DNA, 120 bp, Artificial Sequence
  ENSG00000147570_2 (sequence is synthesized)
gaaaggagcagctgtttgctttgaaacggtggaacagttttgcagccttagaaaatggcatgtaacatacctaaccaaagacagcggactctgtcaacaacaggagaagctctatacgaa

SEQ ID NO: 406818 - DNA, 120 bp, Artificial Sequence
  ENSG00000147570_3 (sequence is synthesized)
attcttggtctgcataagggagcatcaaatgaagaaattaagaaaacctacagaaaattggccctgaaacaccatccagacaagaatccagatgatccagctgctactgagaagtttaaa

SEQ ID NO: 406819 - DNA, 120 bp, Artificial Sequence
  ENSG00000147570_4 (sequence is synthesized)
gaaatcaacaacgcccacgcaatacttaccgacatttcaaagagaagcatatacgacaagtacggatcgctgggactctacgtggccgagcagtttggagacgaaaacgttaacacctac

SEQ ID NO: 406820 - DNA, 120 bp, Artificial Sequence
  ENSG00000147570_5 (sequence is synthesized)
ttcatgctgtcgagctggtgggcaaaggccctgtttgtcatcgttggcctcttgacgggctgctacttttgctgctgcctgtgctgctgctgcaactgctgctgtggacactgccggccc

SEQ ID NO: 406821 - DNA, 120 bp, Artificial Sequence
  ENSG00000147570_6 (sequence is synthesized)
gagtcatcagtgccagaagaggacttctatgtgtccccagaggatctggaggagcagatcaagtctgacatggaaaaagatgtggactttccagtttttctccagcctacaaatgcaaat

SEQ ID NO: 406822 - DNA, 120 bp, Artificial Sequence
  ENSG00000147570_7 (sequence is synthesized)
gagaaaacacagctaatcaaagaaggatctcgaagttattgcacagactcttgatattgagccctcagagagtccacagtccctcctctcagttcagtcttgtctccagatggtcgtagg

SEQ ID NO: 406823 - DNA, 120 bp, Artificial Sequence
  ENSG00000147570_8 (sequence is synthesized)
atgattgctatataattttctcagtatgcagactttctctctgagtagaatttcttatgaaacacattcaatttgggtgaataaaggcctgaagagttattttaccctccttgcctgatg

SEQ ID NO: 406824 - DNA, 120 bp, Artificial Sequence
  ENSG00000147570_9 (sequence is synthesized)
taggacagtggaattgtacagcctttatgaacctgccctttatgtgtggcagatctgattcctaactgaccaaagtaatattccagaacaaaagccacttttcttacatttaacacaata

SEQ ID NO: 406825 - DNA, 120 bp, Artificial Sequence
  ENSG00000147570_10 (sequence is synthesized)
ttcatatctaccacgaacatgatcatcaaaatatatgagaacttataaagagtttttgtgtgtggagcctcttccgtgtcaatattcaataaagttatagaaatgtttcaagagccagaa

SEQ ID NO: 406826 - DNA, 120 bp, Artificial Sequence
  ENSG00000147570_11 (sequence is synthesized)
agggatgatttttttttaaatcacatttttaaggtatatttttggaacattaaaaattggcatttactgaaaactggaaaccaggaagaaacaggttttgtgtgtacttttagattggct

SEQ ID NO: 406827 - DNA, 120 bp, Artificial Sequence
  ENSG00000147570_12 (sequence is synthesized)
taaaaacaaaacaaaacaaaacttcaacctggttaaatgttgtaagtgaaccagaaaatcattctgagcctgaacccgccccatcagcatgttgatcattttctagtaaaataatttttg

SEQ ID NO: 406828 - DNA, 120 bp, Artificial Sequence
  ENSG00000147570_13 (sequence is synthesized)
tataactggctcagattagccagactaagggaaaaaaaacagatgaaggggtagaactctatactctagagcctaaatttacaccaaaacatgtatcacctcatttttgttaaaattagt

SEQ ID NO: 406829 - DNA, 120 bp, Artificial Sequence
  ENSG00000147570_14 (sequence is synthesized)
tgccttgaccagaaattgctcagctctgtgcatgttacacaatttaagcccagaggtcatctctgcatttgcttgtttgattcttgtatttattatgtggtagaaaccatgtgctatttc

SEQ ID NO: 406830 - DNA, 120 bp, Artificial Sequence
  ENSG00000147570_15 (sequence is synthesized)
taaaatactatggcagaaaaagtgttcgtttttctagctctttcttacttttttatataatattgcattttcaagatcttgttatgtttttatataatattgtataaaatgcctttatct

SEQ ID NO: 406831 - DNA, 120 bp, Artificial Sequence
  ENSG00000147570_16 (sequence is synthesized)
tttttcttgtttcttattcccacccaaaaaattatagttaattgctgctaaatatatattgtaagtgagaattagtgttatagctctgatagttctgaggtcattaaaattccactctaa

SEQ ID NO: 406832 - DNA, 120 bp, Artificial Sequence
  ENSG00000147570_17 (sequence is synthesized)
atcccttcacctaaaggcacctggctcctcagctactaccaacaaggagtgttgggagcctcagaagcgggagacaaaccaaacaaaccaaagaagcaccgtaaagactctgaaaagtag

SEQ ID NO: 406833 - DNA, 120 bp, Artificial Sequence
  ENSG00000147570_18 (sequence is synthesized)
attgttattggaaccactcacaaaagtaggctagaacctgcatgctaaacctaaagggggctgcctgctaaaataaaacaacttaaatagaacccattatctcccaacatgataaccaaa

SEQ ID NO: 406834 - DNA, 120 bp, Artificial Sequence
  ENSG00000147570_19 (sequence is synthesized)
atatccagatacaaacaaaatgacccatcctacaaagaagcaagaaaatcacaacttgaataagaaaagacaatcagctaactcctgtgctgagatgaaccagatgttggaactatctga

SEQ ID NO: 406835 - DNA, 66 bp, Artificial Sequence
  ENSG00000147570_20 (sequence is synthesized)
actcctgtgctgagatgaaccagatgttggaactatctgaaaagcattttaaagtaaccatcatag

SEQ ID NO: 406836 - DNA, 88 bp, Artificial Sequence
  ENSG00000147570_21 (sequence is synthesized)
ataaataaataaagtaaccatcataaaaaattcaacaagtaacgacaaattctcttgaagcaagtaaaaaaaaatggaaattctcagt

SEQ ID NO: 406837 - DNA, 120 bp, Artificial Sequence
  ENSG00000147570_22 (sequence is synthesized)
attctcttgaagcaagtaaaaaaaaatggaaattctcagtgaagaaataggaattaacaaaaaagaaccaaatggaaactatagaaccaaaaaataacacaaataataaaactaactgga

SEQ ID NO: 406838 - DNA, 120 bp, Artificial Sequence
  ENSG00000147570_23 (sequence is synthesized)
ataaacaataaactgaaaacagagtctcagaaacctgtgggacaataacaaagatccaacatttatagcattgacatcctagaaggagaagagtgaaacaatgggactaaaagagtacta

SEQ ID NO: 406839 - DNA, 120 bp, Artificial Sequence
  ENSG00000147570_24 (sequence is synthesized)
aaagaagtaatggctggaaattccccacatttggcaaaaaatagaaacctacagattcaagaggctgagagaactccgacaggataaacccaaagcaatcaatgccaagaaacattataa

SEQ ID NO: 406840 - DNA, 120 bp, Artificial Sequence
  ENSG00000147570_25 (sequence is synthesized)
ttaaatttctgaaaactacagacaaagaaaaaaatttgaaagcagccagggagaaacaatgcatggccaaacacccatttgaatggcagcatatttctcatctaaagcaacagcagcctg

SEQ ID NO: 406841 - DNA, 120 bp, Artificial Sequence
  ENSG00000147570_26 (sequence is synthesized)
aaggaagtgacaaaagatttttcaactgatgaaagagaagaactgtcaacagaaaattctgtatctggtgaaactatatttcacgagtgaatggggaaatacgttctcacataaagggaa

SEQ ID NO: 406842 - DNA, 120 bp, Artificial Sequence
  ENSG00000147570_27 (sequence is synthesized)
tctaaaagaattgtcactagcagatctcttcttaaagaatggctaaaggaagttcttcgaaagaaaggaaatgataaagaaaggatcttagacgatcaggaagaaggaaagaacaaggga

SEQ ID NO: 406843 - DNA, 120 bp, Artificial Sequence
  ENSG00000147571_0 (sequence is synthesized)
gagaaactcagagaccaagtccattgagagactgaggggaaagagaggagagaaagaaaaagagagtgggaacagtaaagagaaaggaagacaacctccagagaaagcccccggagacgt

SEQ ID NO: 406844 - DNA, 120 bp, Artificial Sequence
  ENSG00000147571_1 (sequence is synthesized)
ctctctgcagagaggcggcagcacccggctcacctgcgaagcgcctgggaagcgagtgcccctaacatgcggctgccgctgcttgtgtccgcgggagtcctgctggtggctctcctgccc

SEQ ID NO: 406845 - DNA, 120 bp, Artificial Sequence
  ENSG00000147571_2 (sequence is synthesized)
tgcccgccatgcagggcgctcctgagccgcgggccggtcccgggagctcggcaggcgccgcagcaccctcagcccttggatttcttccagccgccgccgcagtccgagcagccccagcag

SEQ ID NO: 406846 - DNA, 120 bp, Artificial Sequence
  ENSG00000147571_3 (sequence is synthesized)
ccgcaggctcggccggtcctgctccgcatgggagaggagtacttcctccgcctggggaacctcaacaagagcccggccgctcccctttcgcccgcctcctcgctcctcgccggaggcagc

SEQ ID NO: 406847 - DNA, 120 bp, Artificial Sequence
  ENSG00000147571_4 (sequence is synthesized)
ggcagccgcccttcgccggaacaggcgaccgccaactttttccgcgtgttgctgcagcagctgctgctgcctcggcgctcgctcgacagccccgcggctctcgcggagcgcggcgctagg

SEQ ID NO: 406848 - DNA, 120 bp, Artificial Sequence
  ENSG00000147571_5 (sequence is synthesized)
tccgggaagtcttggaaatggccagggccgagcagttagcacagcaagctcacagcaacaggaaactcatggagattattgggaaataaaacggtgcgtttggccaaaaagaatctgcat

SEQ ID NO: 406849 - DNA, 120 bp, Artificial Sequence
  ENSG00000147571_6 (sequence is synthesized)
ttagcacaaaaaaaatttaaaaaaatacagtattctgtaccatagcgctgctcttatgccatttgtttatttttatatagcttgaaacatagagggagagagggagagagcctatacccc

SEQ ID NO: 406850 - DNA, 120 bp, Artificial Sequence
  ENSG00000147571_7 (sequence is synthesized)
ttacttagcatgcacaaagtgtattcacgtgcagcagcaacacaatgttattcgttttgtctacgtttagtttccgtttccaggtgtttatagtggtgttttaaagagaatgtagacctg

SEQ ID NO: 406851 - DNA, 120 bp, Artificial Sequence
  ENSG00000147571_8 (sequence is synthesized)
tgagaaaacgttttgtttgaaaaagcagacagaagtcactcaattgtttttgttgtggtctgagccaaagagaatgccattctcttgggtgggtaagactaaatctgtaagctctttgaa

SEQ ID NO: 406852 - DNA, 120 bp, Artificial Sequence
  ENSG00000147571_9 (sequence is synthesized)
acaactttctcttgtaaacgtttcagtaataaaacatctttccagtccttggtcagtttggttgtgtaagagaatgttgaatacttatatttttaataaaagttgcaaaggtaatcatga

SEQ ID NO: 406853 - DNA, 120 bp, Artificial Sequence
  ENSG00000147573_0 (sequence is synthesized)
agggcctgaaacaatgtcctccaccgagagaaacgtaaaggacacttgatcacacaatccctggaataatatccaggaaacacttgctggagccactcgcagcacccttccctggcagca

SEQ ID NO: 406854 - DNA, 120 bp, Artificial Sequence
  ENSG00000147573_1 (sequence is synthesized)
cacttggggacagcgaggagatgagcgcatctctgaattacaaatctttttccaaagagcagcagaccatggataacttagagaagcaactcatctgtcccatctgcttagagatgttca

SEQ ID NO: 406855 - DNA, 120 bp, Artificial Sequence
  ENSG00000147573_2 (sequence is synthesized)
cgaaacctgtggtgattctcccttgtcagcacaacctgtgtaggaaatgtgccagtgatattttccaggcctctaacccgtatttgcccacaagaggaggtaccaccatggcatcagggg

SEQ ID NO: 406856 - DNA, 120 bp, Artificial Sequence
  ENSG00000147573_3 (sequence is synthesized)
gccgattccgctgcccatcctgtagacatgaagtggttttggatagacatggggtatatggacttcagaggaacctgctggtggaaaatatcattgacatctacaagcaggagtccacca

SEQ ID NO: 406857 - DNA, 120 bp, Artificial Sequence
  ENSG00000147573_4 (sequence is synthesized)
ggccagaaaagaaatccgaccagcccatgtgcgaggaacatgaagaggagcgcatcaacatctactgtctgaactgcgaagtacccacctgctctctgtgcaaggtgtttggtgcacaca

SEQ ID NO: 406858 - DNA, 120 bp, Artificial Sequence
  ENSG00000147573_5 (sequence is synthesized)
aagactgccaggtggctcccctcactcatgtgttccagagacagaagtctgagctcagtgatggcatcgccatcctcgtgggcagcaacgatcgagtccagggagtgatcagccagctgg

SEQ ID NO: 406859 - DNA, 120 bp, Artificial Sequence
  ENSG00000147573_6 (sequence is synthesized)
aagacacctgcaaaactatcgaggaatgttgcagaaaacagaaacaagagctttgtgagaagtttgattacctgtatggcattttggaggagaggaagaatgaaatgacccaagtcatta

SEQ ID NO: 406860 - DNA, 120 bp, Artificial Sequence
  ENSG00000147573_7 (sequence is synthesized)
cccgaacccaagaggagaaactggaacatgtccgtgctctgatcaaaaagtattctgatcatttggagaacgtctcaaagttggttgagtcaggaattcagtttatggatgagccagaaa

SEQ ID NO: 406861 - DNA, 120 bp, Artificial Sequence
  ENSG00000147573_8 (sequence is synthesized)
tggcagtgtttctgcagaatgccaaaaccctgctaaaaaaaatctcggaagcatcaaaggcatttcagatggagaaaatagaacatggctatgagaacatgaaccacttcacagtcaacc

SEQ ID NO: 406862 - DNA, 120 bp, Artificial Sequence
  ENSG00000147573_9 (sequence is synthesized)
tcaatagagaagaaaagataatacgtgaaattgacttttacagagaagatgaagatgaagaagaagaagaaggcggagaaggagaaaaagaaggagaaggagaagtgggaggagaagcag

SEQ ID NO: 406863 - DNA, 120 bp, Artificial Sequence
  ENSG00000147573_10 (sequence is synthesized)
tagaagtggaagaggtagaaaatgttcaaacagagtttccaggagaagatgaaaacccagaaaaagcttcagagctctctcaggtggagctgcaggctgcccctggggcacttccagttt

SEQ ID NO: 406864 - DNA, 120 bp, Artificial Sequence
  ENSG00000147573_11 (sequence is synthesized)
atgcccctgtgacacagggggaggttgtacccactggctctgagcagaccacagagtctgaaactccagtccctgcagcagcagaaactgcggatcccttgttttaccctagttggtata

SEQ ID NO: 406865 - DNA, 120 bp, Artificial Sequence
  ENSG00000147573_12 (sequence is synthesized)
aaggccaaacccggaaagccaccaccaacccaccttgcaccccagggagcgaaggtctggggcaaatagggcctccaggttctgaggattcgaatgtacggaaggcagaagtggcagcag

SEQ ID NO: 406866 - DNA, 120 bp, Artificial Sequence
  ENSG00000147573_13 (sequence is synthesized)
ccgcagcgagtgagagggcagctgtgagtggtaaggaaactagtgcacctgcagctacttctcagattggatttgaggctcctcccctccagggacaggctgcagctccagcgagtggca

SEQ ID NO: 406867 - DNA, 120 bp, Artificial Sequence
  ENSG00000147573_14 (sequence is synthesized)
gtggagctgattctgagccagctcgccatatcttctccttttcctggttgaactccctaaatgaatgatattcattccaactgctgcccctctgtctgcctggctgagatgcatgtgggc

SEQ ID NO: 406868 - DNA, 120 bp, Artificial Sequence
  ENSG00000147573_15 (sequence is synthesized)
agcaggaagcccaagtgaaattaatattatgcagatgatgaaagggacctctgaacaggatttctgcaaaaatagccccaaactgcaattccatatgacttatctaacatcttgggggga

SEQ ID NO: 406869 - DNA, 120 bp, Artificial Sequence
  ENSG00000147573_16 (sequence is synthesized)
aagaatattttgagaaaatagttgcagaaagcactggaaataataaacttgatcttatacaaatcttctattgtgtggaaaatgttgtgaagggtgtgtaggtgtggtacatgtgtatgt

SEQ ID NO: 406870 - DNA, 120 bp, Artificial Sequence
  ENSG00000147573_17 (sequence is synthesized)
cactaacaagtggcaaatggtgaaaaaagtggtcactatgcttttgtctctcataggcactgactttttgttattatattatggtagctttcatttcctttactctttaacagtgcaggt

SEQ ID NO: 406871 - DNA, 120 bp, Artificial Sequence
  ENSG00000147573_18 (sequence is synthesized)
ggtcagtgaaaatcagtgtcaactcagaagtgactgatttatcaatacatggacaaaaagtaaatcattgaccaaagctatgaaatgtttcacaaagttttcctcttttgcataacagat

SEQ ID NO: 406872 - DNA, 120 bp, Artificial Sequence
  ENSG00000147573_19 (sequence is synthesized)
gtcactggatgtacattcagaaatgttctttgaatttggtgacactttcatggtccagaaagctgaaggcctgggcatctcttgtgacatttttctaatattagttttagattttcacgt

SEQ ID NO: 406873 - DNA, 120 bp, Artificial Sequence
  ENSG00000147573_20 (sequence is synthesized)
attaggcactttagttgaatcttccagcaaaagctgtctactttctcttttattcactgtggcaccaatctggtaaattgtagaacaattgcatgtgtttaaatatatatacaaacatat

SEQ ID NO: 406874 - DNA, 120 bp, Artificial Sequence
  ENSG00000147573_21 (sequence is synthesized)
cacacattaaatatatatatatttaaatcatgctttgttaatatttgtcccaccataatgcctccttcagaacataagtgtaactttatatgaactcttaaataaatgatgtttttaaaa

SEQ ID NO: 406875 - DNA, 120 bp, Artificial Sequence
  ENSG00000147573_22 (sequence is synthesized)
gaaactagtgcacctgcagctacttctcaggagttagtaatctgcctagcgcttttggcttttcttattcttcactacatctggagtcagattcagtgcttgatttttactttaatggat

SEQ ID NO: 406876 - DNA, 120 bp, Artificial Sequence
  ENSG00000147573_23 (sequence is synthesized)
tttgttgttgacaactgtcagcttcgacctccttctcctcacaaccccgtctaaatggggtttgtaatcctccttcccacccactctcttcactccctggggcaagaatgttgactcctg

SEQ ID NO: 406877 - DNA, 120 bp, Artificial Sequence
  ENSG00000147573_24 (sequence is synthesized)
gctataagcactggccattaactgtgtccatggctgcagagatagttataacaatttacaagataccttaccttaccagaagatgaagatgaagaagaagaagaaggcggagaaggagaa

SEQ ID NO: 406878 - DNA, 120 bp, Artificial Sequence
  ENSG00000147576_0 (sequence is synthesized)
gactccaagcgccatggccgctgccgcccgagcccgggtcgcgtacttgctgaggcaactgcaacgcgcagcgtgccagtgcccaactcattctcatacttactcccaagcccctggact

SEQ ID NO: 406879 - DNA, 120 bp, Artificial Sequence
  ENSG00000147576_1 (sequence is synthesized)
ttcaccttctgggaaaacaacagattatgcctttgagatggctgtttcaaatattagatatggagcagcagttacaaaggaagtaggaatggacctaaaaaacatgggtgctaaaaatgt

SEQ ID NO: 406880 - DNA, 120 bp, Artificial Sequence
  ENSG00000147576_2 (sequence is synthesized)
gtgcttgatgacagacaagaacctctccaagctccctcctgtgcaagtagctatggattccctagtgaagaatggcatcccctttacggtttatgataatgtgagagtggaaccaacgga

SEQ ID NO: 406881 - DNA, 120 bp, Artificial Sequence
  ENSG00000147576_3 (sequence is synthesized)
ttcaagcttcatggaagctattgagtttgcccaaaagggagcttttgatgcctatgttgctgtcggtggtggctctaccatggacacctgtaaggctgctaatctgtatgcatccagccc

SEQ ID NO: 406882 - DNA, 120 bp, Artificial Sequence
  ENSG00000147576_4 (sequence is synthesized)
tcattctgatttcctagattatgtcagtgcccccattggcaagggaaagcctgtgtctgtgcctcttaagcctctgattgcagtgccaactacctcaggaaccgggagtgaaactactgg

SEQ ID NO: 406883 - DNA, 120 bp, Artificial Sequence
  ENSG00000147576_5 (sequence is synthesized)
ggttgccatttttgactatgaacacttgaaagtaaaaattggcatcacttcgagagccatcaaacccacactgggactgattgatcctctgcacaccctccacatgcctgcccgagtggt

SEQ ID NO: 406884 - DNA, 120 bp, Artificial Sequence
  ENSG00000147576_6 (sequence is synthesized)
cgccaacagtggctttgatgtgctttgccatgccctggagtcatacaccaccctgccctaccacctgcggagcccctgcccttcaaatcccatcacacggcctgcgtaccagggcagcaa

SEQ ID NO: 406885 - DNA, 120 bp, Artificial Sequence
  ENSG00000147576_7 (sequence is synthesized)
cccaatcagtgacatttgggctatccacgcgctgcggatcgtggctaagtatctgaagagggctgtcagaaatcccgatgatcttgaagcaaggtctcatatgcacttggcaagtgcttt

SEQ ID NO: 406886 - DNA, 120 bp, Artificial Sequence
  ENSG00000147576_8 (sequence is synthesized)
tacccaatttcaggtttagtgaagatgtataaagcaaaggattacaatgtggatcacccactggtgccccatggcctttctgtggtgctcacgtccccagcggtgttcactttcacggcc

SEQ ID NO: 406887 - DNA, 120 bp, Artificial Sequence
  ENSG00000147576_9 (sequence is synthesized)
cagatgtttccagagcgacacctggagatggcagaaatactgggagccgacacccgcactgccaggatccaagatgcagggctggtgttggcagacacgctccggaaattcttattcgat

SEQ ID NO: 406888 - DNA, 120 bp, Artificial Sequence
  ENSG00000147576_10 (sequence is synthesized)
ctggatgttgatgatggcctagcagctgttggttactccaaagctgatatccccgcactagtgaaaggaacgctgccccaggaaagggtcaccaagcttgcaccctgtccccagtcagaa

SEQ ID NO: 406889 - DNA, 120 bp, Artificial Sequence
  ENSG00000147576_11 (sequence is synthesized)
gaggatctggctgctctgtttgaagcttcaatgaaactgtattaattgtcattttaactgaaagaattaccgctggccattgtagtgctgagagcaagagctgatctagctagggctttg

SEQ ID NO: 406890 - DNA, 120 bp, Artificial Sequence
  ENSG00000147576_12 (sequence is synthesized)
tcttttcatctttgcgcataacttacctgttaccagtataggtgggatatacatttatcttgcaggaaattccccaaagctcagagtccagttccttccataaaacaggctggacaaatg

SEQ ID NO: 406891 - DNA, 120 bp, Artificial Sequence
  ENSG00000147576_13 (sequence is synthesized)
accactatgttagacccccaggctcgacttcaggggtcagtgttcctgtcccaaaccccacacagaatactctgcctctgtttcatgtagcaaatgagcaaaaactcagtatctatcaaa

SEQ ID NO: 406892 - DNA, 120 bp, Artificial Sequence
  ENSG00000147576_14 (sequence is synthesized)
agtgtaaattatatttcctatgcctagtaattcacttcatgtctaaaaatttatctgatagaaacactagcaccagtacatacagaagcatggcaaggatgtttctggcagcacttttct

SEQ ID NO: 406893 - DNA, 120 bp, Artificial Sequence
  ENSG00000147576_15 (sequence is synthesized)
aataataaaagatttgaaacaaccttaagtattcattattggtatatagatcacttatagtatactagacagtggaatactatggtactgttaataaagatgaagtaaatctcttggaaa

SEQ ID NO: 406894 - DNA, 120 bp, Artificial Sequence
  ENSG00000147576_16 (sequence is synthesized)
aggagggaagaggactccaagcgccatggccgctgccgcccgagcccgggtcgcgtacttgctgaggcaactgcaacgcgcagcatttgaatttttggcggggagaaggaagtgatgcac

SEQ ID NO: 406895 - DNA, 120 bp, Artificial Sequence
  ENSG00000147576_17 (sequence is synthesized)
cgctgccgcccgagcccgggtcgcgtacttgctgaggcaactgcaacgcgcagcgtgagtgcggggccggcgggcgggcaggggaccgcagggtgcccacgcagccccctgggtgtgacc

SEQ ID NO: 406896 - DNA, 120 bp, Artificial Sequence
  ENSG00000147576_18 (sequence is synthesized)
ctgggtgtgacccgctcagatcctgcgcagtcttctccgcttactttcaagaattcggagaatttggataccgccctgggctcccaccgcgcgccaggcggaacagcgaggtcacagagt

SEQ ID NO: 406897 - DNA, 120 bp, Artificial Sequence
  ENSG00000147576_19 (sequence is synthesized)
tctaccgttaaagaaactgaggcccagagaggacctggtcccacatcgtagcaggcagtggagagcttggcacggtggccaagacaaattcatgtgccagtgcccaactcattctcatac

SEQ ID NO: 406898 - DNA, 120 bp, Artificial Sequence
  ENSG00000147576_20 (sequence is synthesized)
gaggactccaagcgccatggccgctgccgcccgagcccgggtcgcgtacttgctgaggcaactgcaacgcgcagcgtgccagtgcccaactcattctcatacttactcccaagatggctg

SEQ ID NO: 406899 - DNA, 120 bp, Artificial Sequence
  ENSG00000147576_21 (sequence is synthesized)
ctaagtatctgaagagggccgtcaacagcactgacaaatgaagaagaagaatgagtctcagggcaccttcctggagtggccctcgccatccagggaccagcgcgttgcctcccccggcgc

SEQ ID NO: 406900 - DNA, 120 bp, Artificial Sequence
  ENSG00000147576_22 (sequence is synthesized)
ttttacatcacatgagcagctgacagcgtatttattatgcctttgctgaaacagttgatgagaaatatgtttcccttcagttttcatttagaagacaaggcgtcgtttgaataacttgcc

SEQ ID NO: 406901 - DNA, 120 bp, Artificial Sequence
  ENSG00000147576_23 (sequence is synthesized)
gtagcatttctttttttttcaccatatctttccctaaggcagctccttattctgtaggaattgccaatgttgatgtgttattgttaggtatttatatcattcacagggctgtcagaaatc

SEQ ID NO: 406902 - DNA, 120 bp, Artificial Sequence
  ENSG00000147576_24 (sequence is synthesized)
gcactcaagtatctaccgagacccaaccactggacaaggtcttctgggcaacccaacgaaacataaaaccgtcttcccagcctcgatcagagagcgagcaggagaaagagaagccagagg

SEQ ID NO: 406903 - DNA, 120 bp, Artificial Sequence
  ENSG00000147576_25 (sequence is synthesized)
agagactgggactgtccaggaaataggagacgaccaggacaggaagagggaccacagccaggggagggagggtttccaaaaaggaggacgtgggaaatctgtagagaagtcgaccgagaa

SEQ ID NO: 406904 - DNA, 120 bp, Artificial Sequence
  ENSG00000147576_26 (sequence is synthesized)
gtgagatgcggtggcgacctcggagcgcaccgggtgtgcgcgcagctggggcctctggggagcggcgcggcggggacggaggagagctcggagcccggggctgcaactgggcagagaaag

SEQ ID NO: 406905 - DNA, 120 bp, Artificial Sequence
  ENSG00000147576_27 (sequence is synthesized)
atataaggtgccagtgcccaactcattctcatacttactcccaagatggctgtttcaaatattagatatggagcagcagttacaaaggaagtaggaatggcaagtattcgagatgtctac

SEQ ID NO: 406906 - DNA, 120 bp, Artificial Sequence
  ENSG00000147576_28 (sequence is synthesized)
ggtctcctactgtaaatgttacatatctcacaagaccatgctaaatgacaacaatcacatcctctatttttaaaaatgtacaacgtgagtttgccagaagagtctattgcagttctagtg

SEQ ID NO: 406907 - DNA, 120 bp, Artificial Sequence
  ENSG00000147586_0 (sequence is synthesized)
gtaaagaagtcatggcggcgctgtgtcggacccgtgctgtggctgccgagagccattttctgcgagtgtttctcttcttcaggccctttcggggtgtaggcactgagagtggatccgaaa

SEQ ID NO: 406908 - DNA, 120 bp, Artificial Sequence
  ENSG00000147586_1 (sequence is synthesized)
gtggtagttccaatgccaaggagcctaagacgcgcgcaggcggtttcgcgagcgcgttggagcggcactcggagcttctacagaaggtggagcccctacagaagggttctccaaaaaatg

SEQ ID NO: 406909 - DNA, 120 bp, Artificial Sequence
  ENSG00000147586_2 (sequence is synthesized)
tggaatcctttgcatctatgctgagacattctcctcttacacagatgggacctgcaaaggataaactggtcattggacggatctttcatattgtggagaatgatctgtacatagattttg

SEQ ID NO: 406910 - DNA, 120 bp, Artificial Sequence
  ENSG00000147586_3 (sequence is synthesized)
aacaacagatacaactgtactagaggctaatgcagttctcttgggaatccaggagagtaaagactcaagatcgaaagaagaacatcatgaaaaataaatgaactttgcttagtggattga

SEQ ID NO: 406911 - DNA, 120 bp, Artificial Sequence
  ENSG00000147586_4 (sequence is synthesized)
ctcctttgctgaagtcagttattcatcaagaatgcaattagactaattgtgaataaatgattgaatgaagatataataaataaaagctataattatagataactcttattagaattttct

SEQ ID NO: 406912 - DNA, 120 bp, Artificial Sequence
  ENSG00000147586_5 (sequence is synthesized)
ttagcaatattcccaccccccaccccttgttttgctcttaatgtttttttcctttggtggggatagtatacactgtactaagaaattgtcattcaataaatacgttttgagtgctgtcta

SEQ ID NO: 406913 - DNA, 120 bp, Artificial Sequence
  ENSG00000147586_6 (sequence is synthesized)
tgtatgtagaagaccagaagtggatggagagagtcccatttcgtggtatgctgtttggaggagattttcacaagtgatgataacctgtttttcttccaactctgactttggaaaacatcg

SEQ ID NO: 406914 - DNA, 120 bp, Artificial Sequence
  ENSG00000147586_7 (sequence is synthesized)
taaaagataaagaagttgtaatacaacatggatgaaccctgaaaacattatgccaaatgaaagaagccattcacaaaagatcatatattgtatgattccatttatatgaaatgttcagaa

SEQ ID NO: 406915 - DNA, 120 bp, Artificial Sequence
  ENSG00000147586_8 (sequence is synthesized)
gagagattgctaatgagtacagggtttcttttttggggtgatgaaaatgttctaaaattaggttatggtaaaagctgtacagctctgagaatatattcaaagtcactgaattatacactt

SEQ ID NO: 406916 - DNA, 120 bp, Artificial Sequence
  ENSG00000147586_9 (sequence is synthesized)
tgggtagattttatgatatgtgaattatatctcaataaagctgttaaagttttagtataccactttagaatagtaaatatgttacatgtggactaaatcattagcctagcttcattttaa

SEQ ID NO: 406917 - DNA, 120 bp, Artificial Sequence
  ENSG00000147586_10 (sequence is synthesized)
tagaatgtaatatccacactgtaatatgtgaatctatacagctctaaaagatgactgtttaagacatttgtgtcttcttcaaccacatgatcagcagagttaaaaatgcacttgttcagc

SEQ ID NO: 406918 - DNA, 120 bp, Artificial Sequence
  ENSG00000147586_11 (sequence is synthesized)
gagttgcggtgcgttgtggctcagccctcggcccctagaatctgtgcttggtgtttttcttcctttcgttgtccttttgtgtggcatttgcgtactgggccgggtctgtccacactgcgc

SEQ ID NO: 406919 - DNA, 70 bp, Artificial Sequence
  ENSG00000147586_12 (sequence is synthesized)
gtggcatttgcgtactgggccgggtctgtccacactgcgcttgttttcctgggattgaatgctggtggga

SEQ ID NO: 406920 - DNA, 120 bp, Artificial Sequence
  ENSG00000147588_0 (sequence is synthesized)
atctgagtcttctgaatcccacttagaactgtgttgagctctcacccatcacgatgagcaacaaattcctgggcacctggaaacttgtctctagtgagaactttgacgattacatgaaag

SEQ ID NO: 406921 - DNA, 120 bp, Artificial Sequence
  ENSG00000147588_1 (sequence is synthesized)
ctctgggtgtggggttagccaccagaaaactgggaaatttggccaaacccactgtgatcatcagcaagaaaggagatattataactatacgaactgaaagtacctttaaaaatacagaaa

SEQ ID NO: 406922 - DNA, 120 bp, Artificial Sequence
  ENSG00000147588_2 (sequence is synthesized)
tctccttcaagctaggccaggaatttgaagaaaccacagctgacaatagaaagaccaagagcatcgtaaccctgcagagaggatcactgaatcaagtgcagagatgggatggcaaagaga

SEQ ID NO: 406923 - DNA, 120 bp, Artificial Sequence
  ENSG00000147588_3 (sequence is synthesized)
caaccataaagagaaagctagtgaatgggaaaatggtagcggaatgtaaaatgaagggcgtggtgtgcaccagaatctatgagaaggtctgaaaaatcatttcttcattgaagtggcttt

SEQ ID NO: 406924 - DNA, 120 bp, Artificial Sequence
  ENSG00000147588_4 (sequence is synthesized)
ttatcatttaatgatggaaatcaattgcttccattgacaaaactgaatacactgcaaatatttgtttttgcttttgtcttaatatatcagatatgcaaaggcctaaactgagaattaatc

SEQ ID NO: 406925 - DNA, 120 bp, Artificial Sequence
  ENSG00000147588_5 (sequence is synthesized)
taaaagtcagtgttatttaaacattttcaatgtgcatgcatgtcattattacatcaaagcatatatattggccagacacaaacagttgatgatgtcattcaattaactacaaaattctaa

SEQ ID NO: 406926 - DNA, 120 bp, Artificial Sequence
  ENSG00000147588_6 (sequence is synthesized)
tctatgttgaactttgtatacttgaaatgataataaaaaggatataatttcttagtaaaatgaaatcaaagtattgatcagggtagcaaactcaaatgctgacaggggccagaggagata

SEQ ID NO: 406927 - DNA, 120 bp, Artificial Sequence
  ENSG00000147588_7 (sequence is synthesized)
tggggaaggagcatcagaaatgaggcaagctaggagaatgggctattataatgtaaagaattgtagtctcagttaaaaggggtagcctctactccagccaacattttaaaattaatggat

SEQ ID NO: 406928 - DNA, 120 bp, Artificial Sequence
  ENSG00000147588_8 (sequence is synthesized)
aatttatagacagttaaatttatagacagttaagtaaaaatggataatttatagacagataatttatagacaggtaaatgtgagttaaatataactcacatcccactcaagacacaaaac

SEQ ID NO: 406929 - DNA, 120 bp, Artificial Sequence
  ENSG00000147588_9 (sequence is synthesized)
attttcttaatcctagtacatttttttctgtcccttcccaatcagtgtccttttctgttccacccctaccaaaagcaagtagtggtttggtttctatcatatagattaattttacctgct

SEQ ID NO: 406930 - DNA, 120 bp, Artificial Sequence
  ENSG00000147588_10 (sequence is synthesized)
catatgaagggaattgtacatcatgcattcttttctgtttgccttttttaaattcagcatcatgtttttgtgatacatccacattgttgcatgcagctgtagtttgtttctttttattac

SEQ ID NO: 406931 - DNA, 120 bp, Artificial Sequence
  ENSG00000147588_11 (sequence is synthesized)
caagtactatttcattgtatgaatatatcacagtttatccattctactattaagacaattgagctatttctaattttcggctgctatgaataaagctgctacaaatatttttgtacaaga

SEQ ID NO: 406932 - DNA, 120 bp, Artificial Sequence
  ENSG00000147588_12 (sequence is synthesized)
ctttttgtaaacataggagtccctttattttaaataaataactagtcatatcattaggtccagtaattgttgacaggcaggaacgggggaccattgcattgtgcccaagtaataataaaa

SEQ ID NO: 406933 - DNA, 120 bp, Artificial Sequence
  ENSG00000147588_13 (sequence is synthesized)
ctatttcagatgtattatatgattgagcaaatgagaaaacatgttgatgttgatgggagtcaggatgttcactatggaaaaacaaatatacaaatatgaaatgagggaaggcaagaaaga

SEQ ID NO: 406934 - DNA, 120 bp, Artificial Sequence
  ENSG00000147588_14 (sequence is synthesized)
aaaccatgtatatgtacgtttatatgtattataattgcatacacatgcctccatgcatatatgtgtgtgataatacacatgcatttatgtgcgtgtgtgtatacacatgcatatatttac

SEQ ID NO: 406935 - DNA, 120 bp, Artificial Sequence
  ENSG00000147588_15 (sequence is synthesized)
taatcctatctgccaaaatggcttagacacaaaaacacctcagcagaaatgaatatacctagcactcagatcttcgtgtctaatatagtttgccactaaaaggaaccaaggctacttgga

SEQ ID NO: 406936 - DNA, 120 bp, Artificial Sequence
  ENSG00000147588_16 (sequence is synthesized)
aaaatggatgattccaaagcaagggcaaggtaggaacaagatgagcttgaaatatcttgttatgccagaaagtaatgttaaaaaaaaaaatagaggtatattgccaaaacatagagccag

SEQ ID NO: 406937 - DNA, 120 bp, Artificial Sequence
  ENSG00000147588_17 (sequence is synthesized)
cttgaaggggctcccactggccaaacttgagccaatctgagagcaaaataattgagaaaaataaataacaagataattgagaaaaaaataaaataaattcccaattccattgggaaaaaa

SEQ ID NO: 406938 - DNA, 120 bp, Artificial Sequence
  ENSG00000147588_18 (sequence is synthesized)
attcccaattccattgggaaaaaatagaaatccatgaatccatactgatataatgatagataatcgatagataggtagatgactgacagatgatagatagatatatagatagatagatag

SEQ ID NO: 406939 - DNA, 120 bp, Artificial Sequence
  ENSG00000147588_19 (sequence is synthesized)
atagagaaatgagaaggtttctcttttgcaatagaacgtcatggaccagtgttaaatgtgagtggaaggagttctggaattggaaaaccatcatttttcaaccatcacagtaaatatggc

SEQ ID NO: 406940 - DNA, 120 bp, Artificial Sequence
  ENSG00000147588_20 (sequence is synthesized)
tcaggcaagaattatcaatcaatgctaaagctagggggaaatttcgcttaggagcaggatattagggtattagtctgggcttaaagtatctcctcacagattgttgttagtttctgggga

SEQ ID NO: 406941 - DNA, 120 bp, Artificial Sequence
  ENSG00000147588_21 (sequence is synthesized)
aagaatagtaaccatgcaatggaaaaaaatggacaacctcttgactaggttatcaaaattaacctcaccaataaagggtggatgttcaacatgtgccttcaaatgtgacccactgagaag

SEQ ID NO: 406942 - DNA, 120 bp, Artificial Sequence
  ENSG00000147588_22 (sequence is synthesized)
gaaacaacatcactgtaacaacaacaaccagaaacgacagggggttttgactgaattcttcaaaaatgtcaatgtcatagaagacaaagaaaggttgtggaaatgtttcagattaaatga

SEQ ID NO: 406943 - DNA, 120 bp, Artificial Sequence
  ENSG00000147588_23 (sequence is synthesized)
tagtaaaaacacctgacaactaaacatagtaagtaatactagactggattctgtaccagaggtaacataagtgctccaaaggacaatgttaggtcaactggcaaattggaatatagacag

SEQ ID NO: 406944 - DNA, 120 bp, Artificial Sequence
  ENSG00000147588_24 (sequence is synthesized)
tcaatcagataagaagtatactttgattaagtaaaaaaaatccctattcttggaaaatacacaataaagtattttgaggtaaagggccataatgtatgcaatctactctcaaaaaattca

SEQ ID NO: 406945 - DNA, 120 bp, Artificial Sequence
  ENSG00000147588_25 (sequence is synthesized)
gaaacatatatttgtgtgcatttgcatgtgcaacagtacacacaaacatacataaagagagcaattgataaggcaaataaggtaacatttaacaataatctgatacacataaatagagaa

SEQ ID NO: 406946 - DNA, 120 bp, Artificial Sequence
  ENSG00000147588_26 (sequence is synthesized)
agagcaattgataaagtaaatgaggtaaaatttaacaataatctgagcaaaaggtatatgtgttttctttgagacagtctgattcttgcaacttattctgtaagttggaacttatttcca

SEQ ID NO: 406947 - DNA, 120 bp, Artificial Sequence
  ENSG00000147588_27 (sequence is synthesized)
aacatgattgaaaaaaaaccccgcacttggcaacttcttctctttttcagcctagaaatgtctgtgttaagtggttttttatttattgttgttgtttgttgttattgttgttttgttgcc

SEQ ID NO: 406948 - DNA, 120 bp, Artificial Sequence
  ENSG00000147588_28 (sequence is synthesized)
aggctccaactcacaaaatacgagtttaaaaactgcgttgttatttttagagatttgtgataatacaacttgttataaaatttattcctcaataaatataatttctctactatgcaaaaa

SEQ ID NO: 406949 - DNA, 120 bp, Artificial Sequence
  ENSG00000147592_0 (sequence is synthesized)
ctgttggcttcttccgcgctggagtatccagataggcgacacgccggcgggcggctgaggcgggaatggctgctgtactgcagcgcgtcgagcggctgtccaatcgagtcgtgcgtgtgt

SEQ ID NO: 406950 - DNA, 120 bp, Artificial Sequence
  ENSG00000147592_1 (sequence is synthesized)
tgggctgtaacccgggtcccatgaccctccaaggcaccaacacctacctagtggggaccggccccaggagaatcctcattgacactggagaaccagcaattccagaatacatcagctgtt

SEQ ID NO: 406951 - DNA, 120 bp, Artificial Sequence
  ENSG00000147592_2 (sequence is synthesized)
taaagcaggctctaactgaatttaacacagcaatccaggaaattgtagtgactcactggcaccgagatcattctggaggcataggagatatttgtaaaagcatcaataatgacactacct

SEQ ID NO: 406952 - DNA, 120 bp, Artificial Sequence
  ENSG00000147592_3 (sequence is synthesized)
attgcattaaaaaactcccacggaatcctcagagagaagaaattataggaaatggagagcaacaatatgtttatctgaaagatggagatgtgattaagactgagggagccactctaagag

SEQ ID NO: 406953 - DNA, 120 bp, Artificial Sequence
  ENSG00000147592_4 (sequence is synthesized)
ttctatatacccctggccacactgatgatcacatggctctactcttagaagaggaaaatgctatcttttctggagattgcatcctaggggaaggaacaacggtatttgaagacctctatg

SEQ ID NO: 406954 - DNA, 120 bp, Artificial Sequence
  ENSG00000147592_5 (sequence is synthesized)
attatatgaactctttaaaagagttattgaaaatcaaagctgatattatatatccaggacatggcccagtaattcataatgctgaagctaaaattcaacaatacatttctcacagaaata

SEQ ID NO: 406955 - DNA, 120 bp, Artificial Sequence
  ENSG00000147592_6 (sequence is synthesized)
aatactcctgagaatttacatgaaatggctaaacataatctcttacttcatttgaaaaaactagaaaaagaaggaaaaatatttagcaacacagatcctgacaagaaatggaaagctcat

SEQ ID NO: 406956 - DNA, 120 bp, Artificial Sequence
  ENSG00000147592_7 (sequence is synthesized)
ctttagtttcagattaaagaaagctttgttttattttgctttcagagaatggtatgttttcttaactataggttattttatagagaatataaaagtataaaacattaaaaataaccctag

SEQ ID NO: 406957 - DNA, 120 bp, Artificial Sequence
  ENSG00000147592_8 (sequence is synthesized)
actttaaaataatgttatatttatgctaaaatatgtaaattacactatacaaccatatgataggttatttctctaaccttgtcttctaacgttttaccaaaaattcataatctaatagtt

SEQ ID NO: 406958 - DNA, 120 bp, Artificial Sequence
  ENSG00000147592_9 (sequence is synthesized)
actttaaaaataataaaatttatctaatttaaagttgatattatttttggccgttagttatctattactagtgatcagttatactgttttctatagctactttatttaacagcacagatt

SEQ ID NO: 406959 - DNA, 120 bp, Artificial Sequence
  ENSG00000147592_10 (sequence is synthesized)
tgttttctatagctactttatttaacagcacagatttctatgcacctttactctttcctcaacccttgtctctatctgtacataattgctttgtcttgatgtttctatcaactatatcat

SEQ ID NO: 406960 - DNA, 120 bp, Artificial Sequence
  ENSG00000147592_11 (sequence is synthesized)
gactatctattggttccataactctgtatcatgtgtattttcttattctggtataccacaaatgattcatgcaaatgaatttttggtgattgaaaaatattaaattcccaatttaaagta

SEQ ID NO: 406961 - DNA, 120 bp, Artificial Sequence
  ENSG00000147592_12 (sequence is synthesized)
agatcagaagttacgccacttttctagatttgagaccagcagcctaaactttctacagtgctaaaattaaacaaaaactggccttagagaacaaagatagccatttcgagccatcattga

SEQ ID NO: 406962 - DNA, 120 bp, Artificial Sequence
  ENSG00000147592_13 (sequence is synthesized)
actttatatacttaactatgtaggagaaactgcctaactatgtaggagaaactaccaacagcctgatgattacattttgtaataatttttgcattattctagccatcttgattatcttgt

SEQ ID NO: 406963 - DNA, 120 bp, Artificial Sequence
  ENSG00000147592_14 (sequence is synthesized)
aaaagagttattgaaaatcaaagctgatattatatatccagaatactcctgagaatttacatgaaatggctaaacataatctcttacttcatttgaaaaaactagaaaaagaaggaaaaa

SEQ ID NO: 406964 - DNA, 120 bp, Artificial Sequence
  ENSG00000147596_0 (sequence is synthesized)
gcccgaagtctaccgagcccgagtggcctaccgagcccgagtggccccgcagcgtccaggaggcgcccgctccgcggtggcgctcttggaggtggtgtcggagagccgccgagcgtgcgg

SEQ ID NO: 406965 - DNA, 120 bp, Artificial Sequence
  ENSG00000147596_1 (sequence is synthesized)
tcccgggatggctctaccccggccaagtgaggccgtgcctcaggacaaggtgtgctacccgccggagagcagcccgcagaacctggccgcgtactacacgcctttcccgtcctatggaca

SEQ ID NO: 406966 - DNA, 120 bp, Artificial Sequence
  ENSG00000147596_2 (sequence is synthesized)
ctacagaaacagcctggccaccgtggaggaagacttccaacctttccggcagctggaggccgcagcgtctgctgcccccgccatgccccccttccccttccggatggcgcctcccttgct

SEQ ID NO: 406967 - DNA, 120 bp, Artificial Sequence
  ENSG00000147596_3 (sequence is synthesized)
gagcccgggtctgggcctacagagggagcctctctacgatctgccctggtacagcaagctgccaccgtggtacccaattccccacgtccccagggaagtgccgcccttcctgagcagcag

SEQ ID NO: 406968 - DNA, 120 bp, Artificial Sequence
  ENSG00000147596_4 (sequence is synthesized)
ccacgagtacgcgggtgccagcagtgaagatctgggccaccaaatcattggtggcgacaacgagagtggcccgtgttgtggacctgacactttaattccaccgccccctgcggatgcttc

SEQ ID NO: 406969 - DNA, 120 bp, Artificial Sequence
  ENSG00000147596_5 (sequence is synthesized)
tctgttacctgaggggctgaggacctcccagttattaccttgctcacccagcaagcagtcagaggatggtcccaaaccctccaaccaagaagggaagtcccctgctcggttccagttcac

SEQ ID NO: 406970 - DNA, 120 bp, Artificial Sequence
  ENSG00000147596_6 (sequence is synthesized)
ggaggaggacctgcacttcgttctgtacggggtcactcccagcctggagcacccagccagcctgcaccatgcgatttcaggcctcctggtccccccagacagctctggatctgattctct

SEQ ID NO: 406971 - DNA, 120 bp, Artificial Sequence
  ENSG00000147596_7 (sequence is synthesized)
tcctcaaactctggataaagactcccttcaacttccagaaggtctatgcctcatgcagacggtgtttggtgaagtcccacattttggtgtgttctgcagtagttttatcgccaaaggagt

SEQ ID NO: 406972 - DNA, 120 bp, Artificial Sequence
  ENSG00000147596_8 (sequence is synthesized)
caggtttgggccctttcaaggtaaagtggtcaatgccagtgaagtgaagacctacggagacaattctgtgatgtgggagatctttgaagatggtcatttgagccactttatagatggaaa

SEQ ID NO: 406973 - DNA, 120 bp, Artificial Sequence
  ENSG00000147596_9 (sequence is synthesized)
gagatccatcagaaccaagagctccttgtgtggtatggagactgctatgagaaatttctggatattcctgtgagccttcaggtcacagagccggggaagcagccatctgggccctctgaa

SEQ ID NO: 406974 - DNA, 120 bp, Artificial Sequence
  ENSG00000147596_10 (sequence is synthesized)
gagtctgcagaaggctacagatgtgaaagatgtgggaaggtatttacctacaaatattacagagataagcacctcaagtacaccccctgtgtggacaagggcgataggaaatttccctgt

SEQ ID NO: 406975 - DNA, 120 bp, Artificial Sequence
  ENSG00000147596_11 (sequence is synthesized)
tctctctgcaaacgatcctttgagaagcgggaccggcttcggatccacattcttcatgttcatgagaagcaccggcctcacaagtgttctacatgtgggaaatgtttctctcaatcttcc

SEQ ID NO: 406976 - DNA, 120 bp, Artificial Sequence
  ENSG00000147596_12 (sequence is synthesized)
agcctaaacaaacacatgcgagtccactctggagacagaccataccagtgtgtgtattgtactaagaggttcacagcctccagcatactccgcacacacatcaggcagcactccggggag

SEQ ID NO: 406977 - DNA, 120 bp, Artificial Sequence
  ENSG00000147596_13 (sequence is synthesized)
aagcccttcaaatgcaagtactgtggtaaatcttttgcatcccatgctgcccatgacagccatgtccggcgttcacacaaggaggatgatggctgctcatgcagcatctgtgggaaaatc

SEQ ID NO: 406978 - DNA, 120 bp, Artificial Sequence
  ENSG00000147596_14 (sequence is synthesized)
tcatgcagcatctgtgggaaaatcttctcagatcaagaaacattctactcccacatgaagtttcatgaagactactagccctgccaggcacaatgactcacgcctgtaatcccagcactt

SEQ ID NO: 406979 - DNA, 120 bp, Artificial Sequence
  ENSG00000147596_15 (sequence is synthesized)
tggtgaaatcctgtctctaccaaaaaaatacaaaaatcagctgggggtggtggcacatgcctgtggttccagccactcaggaggtcgaggtggcaggatggtttgagcacaggagacgga

SEQ ID NO: 406980 - DNA, 120 bp, Artificial Sequence
  ENSG00000147596_16 (sequence is synthesized)
gaggtcgaggtggcaggatggtttgagcacaggagacggaggttgctgtgagctgagatcgccccactgcttttcaacctgggtgacagaaccagaccctgtctcaaaacaaaacaaaac

SEQ ID NO: 406981 - DNA, 120 bp, Artificial Sequence
  ENSG00000147596_17 (sequence is synthesized)
aaaatgagtagccctcaagagtgtggagacaatgtaaaaacaagagattcggattctctctatttccttttatgggttatagaagtccctgcagttggctgtgtgtggtggctcacgcct

SEQ ID NO: 406982 - DNA, 120 bp, Artificial Sequence
  ENSG00000147601_0 (sequence is synthesized)
agtacccaagcgagccatttaacatggcggaggatgtttcctcagcggccccgagcccgcggggctgtgcggatggtagggatgccgaccctactgaggagcagatggcagaaacagaga

SEQ ID NO: 406983 - DNA, 120 bp, Artificial Sequence
  ENSG00000147601_1 (sequence is synthesized)
gaaacgacgaggagcagttcgaatgccaggaactgctcgagtgccaggtgcaggtgggggcccccgaggaggaggaggaggaggaggaggacgcgggcctggtggccgaggccgaggccg

SEQ ID NO: 406984 - DNA, 120 bp, Artificial Sequence
  ENSG00000147601_2 (sequence is synthesized)
tggctgccggctggatgctcgatttcctctgcctctctctttgccgagctttccgcgacggccgctccgaggacttccgcaggacccgcaacagcgcagaggctattattcatggactat

SEQ ID NO: 406985 - DNA, 120 bp, Artificial Sequence
  ENSG00000147601_3 (sequence is synthesized)
ccagtctaacagcttgccagttgagaacgatatacatatgtcagtttttgacaagaattgcagcaggaaaaacccttgatgcacagtttgaaaatgatgaacgaattacacccttggaat

SEQ ID NO: 406986 - DNA, 120 bp, Artificial Sequence
  ENSG00000147601_4 (sequence is synthesized)
cagccctgatgatttggggttcaattgaaaaggaacatgacaaacttcatgaagaaatacagaatttaattaaaattcaggctatagctgtttgtatggaaaatggcaactttaaagaag

SEQ ID NO: 406987 - DNA, 120 bp, Artificial Sequence
  ENSG00000147601_5 (sequence is synthesized)
cagaagaagtctttgaaagaatatttggtgatccaaattctcatatgcctttcaaaagcaaattgcttatgataatctctcagaaagatacatttcattccttttttcaacacttcagct

SEQ ID NO: 406988 - DNA, 120 bp, Artificial Sequence
  ENSG00000147601_6 (sequence is synthesized)
acaaccacatgatggagaaaattaagagttatgtgaattatgtgctaagtgaaaaatcatcaacctttctaatgaaggcagcggcaaaagtagtagaaagcaaaaggacaagaacaataa

SEQ ID NO: 406989 - DNA, 120 bp, Artificial Sequence
  ENSG00000147601_7 (sequence is synthesized)
cttctcaagataaacctagtggtaatgatgttgaaatggaaactgaagctaatttggatacaagaaaaagtgttagtgacaaacagtctgcggtaactgaatcctcagagggtacagtat

SEQ ID NO: 406990 - DNA, 120 bp, Artificial Sequence
  ENSG00000147601_8 (sequence is synthesized)
ccttattgaggtctcacaagaatcttttcttatctaagttgcaacatggaacccagcaacaagaccttaataagaaagaaagaagagtaggaactcctcaaagtacaaaaaagaaaaaag

SEQ ID NO: 406991 - DNA, 120 bp, Artificial Sequence
  ENSG00000147601_9 (sequence is synthesized)
aaagcagaagagccactgaaagcagaatacctgtttcaaagagtcagccggtaactcctgaaaaacatcgagctagaaaaagacaggcatggctttgggaagaagacaagaatttgagat

SEQ ID NO: 406992 - DNA, 120 bp, Artificial Sequence
  ENSG00000147601_10 (sequence is synthesized)
ctggcgtgaggaaatatggagagggaaactggtctaaaatactgttgcattataaattcaacaaccggacaagtgtcatgttaaaagacagatggaggaccatgaagaaactaaaactga

SEQ ID NO: 406993 - DNA, 120 bp, Artificial Sequence
  ENSG00000147601_11 (sequence is synthesized)
tttcctcagacagcgaagactgattgtgtttgtaaaagcttgatgaaaggacagttaagtattttgatcactgcattttgtttgaaacttgtgtcattgatgtaatttaaaacttttgtt

SEQ ID NO: 406994 - DNA, 120 bp, Artificial Sequence
  ENSG00000147601_12 (sequence is synthesized)
taaagcattacagtatttttctgtgaccatcaattaatgagggtttgtgctaccagagttaaagcatatgctatcattgtattctttaagaaccttattttgataaaatgtaaatttgtt

SEQ ID NO: 406995 - DNA, 120 bp, Artificial Sequence
  ENSG00000147601_13 (sequence is synthesized)
aaattccagttaacctattttgtgtctgtaggctgacctcaaccctgtaacgtaacccattaaaatgaatttctttttttttaagacagagtttctctctgttgcccaggctggagtgca

SEQ ID NO: 406996 - DNA, 120 bp, Artificial Sequence
  ENSG00000147601_14 (sequence is synthesized)
tttctagatgattgaataacagtagtcctttgatagaagataatgacttggtttatggccttaatatactacttaattacttaagatgtttattaatagaatgataaatgtacagagtaa

SEQ ID NO: 406997 - DNA, 120 bp, Artificial Sequence
  ENSG00000147601_15 (sequence is synthesized)
cctataagcatgacatacttttgctttcagtagtttcatgtaaagaaaaaaacttgaaaatagtaatacctgagtacccatgggaataatagacactggggaggtagggtggggagcggg

SEQ ID NO: 406998 - DNA, 120 bp, Artificial Sequence
  ENSG00000147601_16 (sequence is synthesized)
agcaagagctgaaaaacttacctactggggactgtgctcactacctgggtgacaggatcatacgtaccccaaacctcaacatcacacagtatactcagctaacaaacctgcccatgtgtt

SEQ ID NO: 406999 - DNA, 120 bp, Artificial Sequence
  ENSG00000147601_17 (sequence is synthesized)
tcctgaatctaaaataaaaatcgaaataatttttttaaaaaagaaaaagacaatagtattacccatgggacaaaatttgtactattagcaagaatcattttgtgtctcatttagaaacaa

SEQ ID NO: 407000 - DNA, 120 bp, Artificial Sequence
  ENSG00000147601_18 (sequence is synthesized)
tttgacttttgttccagtgtttaaactttgacaaaaatggttttgaatagatctttataacctgatgccataaatacaagattctctgataccttcatttaatatatcaatattgggcct

SEQ ID NO: 407001 - DNA, 120 bp, Artificial Sequence
  ENSG00000147601_19 (sequence is synthesized)
aaaacagtattctgtaaagcttaaattggtattaactatgatcatcttgatgtctatgatagataataaacaaggtcatacataccttactaaacaattttggtttttcaccaacatttt

SEQ ID NO: 407002 - DNA, 120 bp, Artificial Sequence
  ENSG00000147601_20 (sequence is synthesized)
attctttaaaagatttagactaacagaattatttagcatttcgagtcatgtgctttatttagcaagtgagtaaaaatattggaatattgaagtatttgcataaaaaatcaaatggtggtg

SEQ ID NO: 407003 - DNA, 120 bp, Artificial Sequence
  ENSG00000147601_21 (sequence is synthesized)
ttttgtaatctctattgtatttcctattaaggtttcatatattactttcccattgttcctgaatttgttatcctatatataaacagaaacatggatgagtaccatatacttcctgactcc

SEQ ID NO: 407004 - DNA, 120 bp, Artificial Sequence
  ENSG00000147601_22 (sequence is synthesized)
tttatcttgttacaccacaagatactgcactatttattggagatattttgatgattagtgccaaggctggcatcatgagccaaaatagacttgttaagtcaacctcattccaaacacctg

SEQ ID NO: 407005 - DNA, 120 bp, Artificial Sequence
  ENSG00000147601_23 (sequence is synthesized)
ctatagatcatcaaatctaagttgccattaattgtaagatgtcctgttatttcacacacacaactagaaaagaaaaatcggtatcaattatagtatggtgctttcttattttgaatttta

SEQ ID NO: 407006 - DNA, 120 bp, Artificial Sequence
  ENSG00000147601_24 (sequence is synthesized)
cttattagaagagctattttagatgtatttaaacataagatttttatcacataacttgtggatacaaaaaaagagaaattgtaagcaaaataagttgggtaatatattcctaaaacctca

SEQ ID NO: 407007 - DNA, 120 bp, Artificial Sequence
  ENSG00000147601_25 (sequence is synthesized)
aagaaagaagagtaggaactcctcaaattacatatatttgtcttaccaaactgactatgaataagaaagaaggagtgaggaaaggattatgcttcttagtactcctaaaacattatcgta

SEQ ID NO: 407008 - DNA, 120 bp, Artificial Sequence
  ENSG00000147601_26 (sequence is synthesized)
taaaattgaacccatcaaattgtatactttaaacatgtgccatgctttttatgtatcaattataccttaataaagcagtttttaaaacttgaattcatggaaataaagtgccgtagaaga

SEQ ID NO: 407009 - DNA, 120 bp, Artificial Sequence
  ENSG00000147601_27 (sequence is synthesized)
gtttttgaaagagtgttataaatgcttgactacaccattaattatgcttatgtttggagaaacttggtttaatacctcttataagcatgtctggacaagaattagccatgttgtaatgga

SEQ ID NO: 407010 - DNA, 120 bp, Artificial Sequence
  ENSG00000147601_28 (sequence is synthesized)
ctgtatatgtcccgatgttaccaaggtttctttccaaagttatttttttataaattgaaatatgccttgactatgtggaaagtactatccttatgaaaagtttcttttgtttacattctt

SEQ ID NO: 407011 - DNA, 120 bp, Artificial Sequence
  ENSG00000147601_29 (sequence is synthesized)
acaaattttttcttcttttaaagtgttagtgacaaacagtctgcggtaactgaatcctcagagggtacagtatccttattgaggtgaagtaaattgacgtttttcttctttgtctttcaa

SEQ ID NO: 407012 - DNA, 120 bp, Artificial Sequence
  ENSG00000147601_30 (sequence is synthesized)
atctttgattgaagcaattcatgcagacctaataaaaactaccacataaatggtacaattgaaagaatatctcagggtcctagttagcccaacagatagtcacgactctgagacatcttg

SEQ ID NO: 407013 - DNA, 120 bp, Artificial Sequence
  ENSG00000147601_31 (sequence is synthesized)
aaattccaaactgtagagacctgctctgagactgggttgtttcacattgtttctacaaagccattattggaatacacatatagggagttcttgagcttaaaacagatgtttagtaaacac

SEQ ID NO: 407014 - DNA, 120 bp, Artificial Sequence
  ENSG00000147601_32 (sequence is synthesized)
ttctctgtcacagaaacaaagatatgatactggggcaggaaggggatggcaattacatttctaatgaatgccccatgccaattttatgaaagttacttgaaaaactttatttgatctaat

SEQ ID NO: 407015 - DNA, 120 bp, Artificial Sequence
  ENSG00000147601_33 (sequence is synthesized)
agaatcgctgtgacagacaatacaacctgtcccgagggcagaaagtctgcatgaatgatttctaacatagagcagttgggatcacaagtggaaccatggggaggaggtggctgacttcat

SEQ ID NO: 407016 - DNA, 120 bp, Artificial Sequence
  ENSG00000147601_34 (sequence is synthesized)
gtggaggaggtgattggacatgaggaactgagaggccaagatggtatatgaattgtctgtgagaacactgaaataattcataatagcagcacttaggtgtagagaaagatctgtgaatga

SEQ ID NO: 407017 - DNA, 120 bp, Artificial Sequence
  ENSG00000147601_35 (sequence is synthesized)
tgaagaagtgcttggaaggatggtaaatggctgtgaagaatgattgaaggtgatacatctcagtggcatgaatcctcaaggctgaagtttctatggaagcaggatcttgaaagtggcatt

SEQ ID NO: 407018 - DNA, 120 bp, Artificial Sequence
  ENSG00000147601_36 (sequence is synthesized)
cattaggaaatgaaaactgctgtctctggagtcctatagtttatggagggtggaagattaagccaatctctacttgagaaggctaccaaggagagaaacattgtccccaggggaaagcta

SEQ ID NO: 407019 - DNA, 120 bp, Artificial Sequence
  ENSG00000147601_37 (sequence is synthesized)
gattttagacaaggcaaagagcggagaggaatgggtgaagagattgagaatgacattctagaaaggacaatagaaagtcttaggaaggagggacagaggggaagagagaaaggatggctg

SEQ ID NO: 407020 - DNA, 120 bp, Artificial Sequence
  ENSG00000147601_38 (sequence is synthesized)
gtcacctagagtatctatagggataaaagtatagctaaaataacctacattttaggtggagataatacagctgcctaagcttaggtgaactgctttttgaatcttagtttgctccttcat

SEQ ID NO: 407021 - DNA, 120 bp, Artificial Sequence
  ENSG00000147601_39 (sequence is synthesized)
tgtgtttccaaacagccttacctttcaaaactctttttggaagctgtaaagataatcaagtgatacctgccattatgtaaaggaattttggaatccgtctttggggaaataaaagccata

SEQ ID NO: 407022 - DNA, 120 bp, Artificial Sequence
  ENSG00000147601_40 (sequence is synthesized)
agagagaatgaaagctaatactttgtagtttaaggatttttttccttgatgtatctaattggaaggccgaaagagtcttgtcttttcttttttttgcctgcttcttctgagacatcaaaa

SEQ ID NO: 407023 - DNA, 120 bp, Artificial Sequence
  ENSG00000147601_41 (sequence is synthesized)
aacatcttgatttctgcggagtagatgagatggagaaagatgagacaggcaacagaaatcttaagaggccacaggttaagatggggtactaagcagggagagcaccaaaggaagtaggcc

SEQ ID NO: 407024 - DNA, 120 bp, Artificial Sequence
  ENSG00000147601_42 (sequence is synthesized)
cggcagagggctggttccctacgtcgccgagggaggggctgctgcggccgattagctgggagtccgaggctccgggctgaactttgttcgaatcccggttcgcccgttgtcagcacctga

SEQ ID NO: 407025 - DNA, 120 bp, Artificial Sequence
  ENSG00000147601_43 (sequence is synthesized)
gtttttctcagattgatttcctcttcgataaaatgaaaataagaccctgtttaggtttgatgcaagcattaaatgagttaaaatgtatacagttccactcaacccagtacctttgtctct

SEQ ID NO: 407026 - DNA, 120 bp, Artificial Sequence
  ENSG00000147601_44 (sequence is synthesized)
tttggcgctttctactcaggtattcctgtagtaatattcagcagtccctgtggcctccagtaacccccgaggcatcagtgttttatgttaatttgtgagctattaaatctcatttggcct

SEQ ID NO: 407027 - DNA, 120 bp, Artificial Sequence
  ENSG00000147601_45 (sequence is synthesized)
tattaaatctcatttggcctgctggctctacagcagttacttttattctgtgtagtctcagaataaaagtaaatgttggccacatgcctgcaagtcccagctacttgggagcctgaggtg

SEQ ID NO: 407028 - DNA, 120 bp, Artificial Sequence
  ENSG00000147601_46 (sequence is synthesized)
ggttgcagtgagtcgagatcgtgccactacagtcctgcctgggtaacagagtgataccctgtatgaataaataaatgaatgaatgaaactgttcatgaaatctgctgcaccccgcccccg

SEQ ID NO: 407029 - DNA, 120 bp, Artificial Sequence
  ENSG00000147601_47 (sequence is synthesized)
cgcccccgtcccaagatggggtctcactgtcacccaggctggagagtgtagtggcgccatcacagctcactgcaggctcgacctcctcaggctcaggtatcctcccgcttcagcttctgg

SEQ ID NO: 407030 - DNA, 88 bp, Artificial Sequence
  ENSG00000147601_48 (sequence is synthesized)
taagtgtagctttttgaaaaacaacagaaagatgttctggtacttcattcatagttggcgctaaaattactgtgcaagtatatattta

SEQ ID NO: 407031 - DNA, 120 bp, Artificial Sequence
  ENSG00000147601_49 (sequence is synthesized)
tcatagttggcgctaaaattactgtgcaagtatatatttataatactataattatgctatttaatagaattcttagacattttgacacatttcatcttcaccataatcctgtgagttagg

SEQ ID NO: 407032 - DNA, 120 bp, Artificial Sequence
  ENSG00000147601_50 (sequence is synthesized)
caaataatcttagttttaaggtactgataggttaaaagggagtgtttcagccccatcctttatcttccagttcaaggatctttcctctgtattgcggttaacactggagccagggataat

SEQ ID NO: 407033 - DNA, 120 bp, Artificial Sequence
  ENSG00000147601_51 (sequence is synthesized)
taacattaagtagaaaattaaatcctggaatgaagctagttcctcagaattctcttagagttctcttagagttggagacatcagtatgaactgtttagctcatgtaggtatagatgactt

SEQ ID NO: 407034 - DNA, 120 bp, Artificial Sequence
  ENSG00000147601_52 (sequence is synthesized)
agaaatatttgcatatgcatgtgtagacataggttactatacaaatatgtatttccttactctgtcagataaaagggcacagaagcaacctaactctagtaacaatgagtacacctagca

SEQ ID NO: 407035 - DNA, 120 bp, Artificial Sequence
  ENSG00000147601_53 (sequence is synthesized)
ggttggctttatagacagtaaggacttaaggaagctgaaacagaacaaaaagaagattggttatttcacagttacttgtaaggctgggacagggagacagaacaatagatacatgggatg

SEQ ID NO: 407036 - DNA, 120 bp, Artificial Sequence
  ENSG00000147601_54 (sequence is synthesized)
cagaatggatgttgtgttatcaggcatgaaagcaacagtaatttccttgtatgtacgtctccctcagagctcttgagtggttaggcgcattatcaatgagcaatggtattttgaaaggaa

SEQ ID NO: 407037 - DNA, 120 bp, Artificial Sequence
  ENSG00000147601_55 (sequence is synthesized)
tcttttttccaagcagtagatctcaataatgggcttaaaatattcagtaaaccatggtgtaaacagaggcactgtcatcttgttccatttctagagcacaggcaaagttgatatatcatt

SEQ ID NO: 407038 - DNA, 120 bp, Artificial Sequence
  ENSG00000147601_56 (sequence is synthesized)
tgaagggccttaagattttcagaatgagaaatgggcaatgggtttaacttaaagtcaccagcagcattagtccctaaggagagtcagcctgtcctttgaaatattaaagttaggcattga

SEQ ID NO: 407039 - DNA, 120 bp, Artificial Sequence
  ENSG00000147601_57 (sequence is synthesized)
ggcattgacttctctctggctatgaaagttctctatgacatcttcttctaatatgaggctgtttcatctacaatgaaaatctgttgttggctggatacagtggctcacacctgtaatccc

SEQ ID NO: 407040 - DNA, 66 bp, Artificial Sequence
  ENSG00000147601_58 (sequence is synthesized)
tcacacctgtaatcccagccctttggaaggccaaggcagttggatcacttgaggtcaggagtttga

SEQ ID NO: 407041 - DNA, 80 bp, Artificial Sequence
  ENSG00000147601_59 (sequence is synthesized)
gtcacaccactgcccttcaacctgggtgacacggcgagactctgtctcacaaaaaaacaaaatcagttgtttagtgtaac

SEQ ID NO: 407042 - DNA, 120 bp, Artificial Sequence
  ENSG00000147601_60 (sequence is synthesized)
tctgtctcacaaaaaaacaaaatcagttgtttagtgtaaccaccttcatttgtgattgtagctagatcttctcaataacttgtagcttttacttcagcacttgctgcttcaccttgcact

SEQ ID NO: 407043 - DNA, 120 bp, Artificial Sequence
  ENSG00000147601_61 (sequence is synthesized)
tctatgtcacagagatggcttcttttcttaaacctcatgaaccaacaacctctgctagcttccaacttttcttttgcaattttcttacctctgtcagccttcttagacttgctctggatt

SEQ ID NO: 407044 - DNA, 120 bp, Artificial Sequence
  ENSG00000147601_62 (sequence is synthesized)
aggctgtggcttaaaggaatgttgtggctggtttgatttttttttttctatccaagtcaaactttctccatatgagcaataggctcttttactttcttatcatttatgtgttcagtggat

SEQ ID NO: 407045 - DNA, 120 bp, Artificial Sequence
  ENSG00000147601_63 (sequence is synthesized)
tagaacttttaatttcctttgagaacttttcctttgtattaacaacttggctgttagacacaagaggcctatgtttcagcctatcatggcatttgacatcctttcctcactaagcttaat

SEQ ID NO: 407046 - DNA, 120 bp, Artificial Sequence
  ENSG00000147601_64 (sequence is synthesized)
catttctagcttttgatttaaagtgaatgacttgcaactcttcctttcactgaaacacttggagggcatgtagagttactcattggcctaatttcaatcttgttgtgtttcaggagataa

SEQ ID NO: 407047 - DNA, 120 bp, Artificial Sequence
  ENSG00000147601_65 (sequence is synthesized)
ggaggcctgaagagagggagtaaggggaagggctggtcagtggagcagttagaacacacacaatatttatggaataagtttgtgtcttatgggcatgatttgtggtactccagaaccttt

SEQ ID NO: 407048 - DNA, 120 bp, Artificial Sequence
  ENSG00000147601_66 (sequence is synthesized)
acaatagtaacatcagagattattgatcacagaccaccatacagatataataataatgaaaaagtttgaaatattgcaagaattatcaaaatgtgacaggtacaggtactgttagaaaaa

SEQ ID NO: 407049 - DNA, 120 bp, Artificial Sequence
  ENSG00000147604_0 (sequence is synthesized)
cctctttttccggctggaaccatggagggtgtagaagagaagaagaaggaggttcctgctgtgccagaaacccttaagaaaaagcgaaggaatttcgcagagctgaagatcaagcgcctg

SEQ ID NO: 407050 - DNA, 120 bp, Artificial Sequence
  ENSG00000147604_1 (sequence is synthesized)
gcagagctgaagatcaagcgcctgagaaagaagtttgcccaaaagatgcttcgaaaggcaaggaggaagcttatctatgaaaaagcaaagcactatcacaaggaatataggcagatgtac

SEQ ID NO: 407051 - DNA, 120 bp, Artificial Sequence
  ENSG00000147604_2 (sequence is synthesized)
tatgtacctgcagaacccaaattggcgtttgtcatcagaatcagaggtatcaatggagtgagcccaaaggttcgaaaggtgttgcagcttcttcgccttcgtcaaatcttcaatggaacc

SEQ ID NO: 407052 - DNA, 120 bp, Artificial Sequence
  ENSG00000147604_3 (sequence is synthesized)
cttcgtcaaatcttcaatggaacctttgtgaagctcaacaaggcttcgattaacatgctgaggattgtagagccatatattgcatgggggtaccccaatctgaagtcagtaaatgaacta

SEQ ID NO: 407053 - DNA, 120 bp, Artificial Sequence
  ENSG00000147604_4 (sequence is synthesized)
atctacaagcgtggttatggcaaaatcaataagaagcgaattgctttgacagataacgctttgattgctcgatctcttggtaaatacggcatcatctgcatggaggatttgattcatgag

SEQ ID NO: 407054 - DNA, 82 bp, Artificial Sequence
  ENSG00000147604_5 (sequence is synthesized)
tcatgagatctatactgttggaaaacgcttcaaagaggcaaataacttcctgtggcccttcaaattgtcttctccacgaggt

SEQ ID NO: 407055 - DNA, 120 bp, Artificial Sequence
  ENSG00000147604_6 (sequence is synthesized)
ctaccatgattatttttctaagctggttggttaataaacagtacctgctctcaaattgaaatatattgttgtatttgtgatttgttgttgttgttgttagcctgcctctgtcttccctta

SEQ ID NO: 407056 - DNA, 120 bp, Artificial Sequence
  ENSG00000147604_7 (sequence is synthesized)
cctgcctctgtcttcccttaactactgtggcaagtgtggtgtgtgataaaattaagccaaatcaacagcccatttcgtgcaaaatcagggtcgagtctgtgtgaaagacatctcttgggt

SEQ ID NO: 407057 - DNA, 120 bp, Artificial Sequence
  ENSG00000147604_8 (sequence is synthesized)
ttttaaaaggcttttctatacaaaagattttaattttttgttttttaactgtgctgagtgattcgaaatgggtttattctaagaaagcctgtttcacaagcatttgtacatgatttgtcg

SEQ ID NO: 407058 - DNA, 120 bp, Artificial Sequence
  ENSG00000147604_9 (sequence is synthesized)
gtaaggtaatccaactttggtttatggaaaaaattgaatttagttgctaaaatttatttctcgggccttcgcttgtttataaactgccatgtaaatgtgttgttttccttttgcattcca

SEQ ID NO: 407059 - DNA, 120 bp, Artificial Sequence
  ENSG00000147604_10 (sequence is synthesized)
agtcctcggtagagggtctttcgggggaggcgcagaacctctgaattgtgttcgtccttggctggtgcttggtacaggcctccctgccgccaggcctttgctttcaacatgtggatcctg

SEQ ID NO: 407060 - DNA, 120 bp, Artificial Sequence
  ENSG00000147604_11 (sequence is synthesized)
tattgtgaatcttcatgtgttccctatgattcttgatttagcttaaaagaaaacgtaagacatggtttcattagcttgaaccttatctttgtaaagccatgcatttaccttgtttattcc

SEQ ID NO: 407061 - DNA, 120 bp, Artificial Sequence
  ENSG00000147604_12 (sequence is synthesized)
tggttatgttttcatctcacagcctattcaaaaagattttgaataattatttcaaaactttttgcaactttaataatcttaaataaccttaaaatatttaggtaaatacggcatcatctg

SEQ ID NO: 407062 - DNA, 120 bp, Artificial Sequence
  ENSG00000147604_13 (sequence is synthesized)
gagtataagtggtggtaatcttgaatacttttcccattaaatattgatgggggtttgaattttaatcagtgcttttgtggggagtgggggtcaactatcttaatgattacagttggtttg

SEQ ID NO: 407063 - DNA, 120 bp, Artificial Sequence
  ENSG00000147604_14 (sequence is synthesized)
tttactgcttttgaggacctttctggaggaaaggaaaagcctgttttggggagtctttaaagatggaaattgggtggtcttaaaaatgtaaactcaatcattactttataactgcctagt

SEQ ID NO: 407064 - DNA, 120 bp, Artificial Sequence
  ENSG00000147604_15 (sequence is synthesized)
ccctctcacacggccgtggccgcaacctcagccctcctcgcacctcccttcgcagctcacgccccctcccgtggggtgtcctggcctccgcctgccgagctcggcagtcagcagagcccc

SEQ ID NO: 407065 - DNA, 120 bp, Artificial Sequence
  ENSG00000147604_16 (sequence is synthesized)
ggccatcctcctccggccgtccggtccccactggtccctggctagccacttttcgtaagctagagcactccagaccgccccgcctgcgatcaggcgctgcggaagacagccctgtgggct

SEQ ID NO: 407066 - DNA, 120 bp, Artificial Sequence
  ENSG00000147604_17 (sequence is synthesized)
ggagcgacgacaaggacctcgcggagcggcgaaaggggtgtagtctgcgactaccgcggcagggagccgggagggcggccaaaagtgacttcgaattgcagctagccgtttggaacgtgg

SEQ ID NO: 407067 - DNA, 120 bp, Artificial Sequence
  ENSG00000147604_18 (sequence is synthesized)
cccaagaggctctcattttcctggctggaaccgtcgccgcggtgcttgcctgcggtcctggtcagccgttgccctcccgccgggcgggcgaagactggtgcatgctgggatttgtagttc

SEQ ID NO: 407068 - DNA, 120 bp, Artificial Sequence
  ENSG00000147604_19 (sequence is synthesized)
gtccccatgaggctcgtcctgggaacattatggggaggaacggagcctaatcctgtcagcgcagcctggggattaggacccggagttgccaagagagaagaagaaggaggttcctgctgt

SEQ ID NO: 407069 - DNA, 120 bp, Artificial Sequence
  ENSG00000147606_0 (sequence is synthesized)
gtagaccaacttaacactgaacccattacttttccaagaccagaaaaaaatattacatgaacaggaactacttctccttcagataagaattcaagctttgacattgtaaaccacagacga

SEQ ID NO: 407070 - DNA, 120 bp, Artificial Sequence
  ENSG00000147606_1 (sequence is synthesized)
attggagcttggcattgaaaggaggtgttctgcaatgattttttttcttgtttagagaagtttacttctacaagaagaaatctgaaaaatgacaggagcaaagaggaaaaagaaaagcat

SEQ ID NO: 407071 - DNA, 120 bp, Artificial Sequence
  ENSG00000147606_2 (sequence is synthesized)
gctttggagcaagatgcataccccccagtgtgaagacattatacagtggtgtagaaggcgactgcccattttggattgggcaccacattacaatctgaaagaaaacttgcttccagacac

SEQ ID NO: 407072 - DNA, 120 bp, Artificial Sequence
  ENSG00000147606_3 (sequence is synthesized)
tgtgtctgggataatgttggcagttcaacaggtgacccaaggattggcctttgctgttctctcatctgtgcacccagtgtttggtttatatgggtctctgtttcctgccataatttatgc

SEQ ID NO: 407073 - DNA, 120 bp, Artificial Sequence
  ENSG00000147606_4 (sequence is synthesized)
catatttggaatgggacatcatgttgccacaggcacctttgccttgacatccttaatatcagccaacgccgtggaacggattgtccctcagaacatgcagaatctcaccacacagagtaa

SEQ ID NO: 407074 - DNA, 120 bp, Artificial Sequence
  ENSG00000147606_5 (sequence is synthesized)
cacaagcgtgctgggcttatccgactttgaaatgcaaaggatccacgttgctgcagcagtttccttcttgggaggtgtgattcaggtggccatgtttgtgctgcaactgggcagtgccac

SEQ ID NO: 407075 - DNA, 120 bp, Artificial Sequence
  ENSG00000147606_6 (sequence is synthesized)
atttgtggtcacagagcctgtgatcagcgcaatgacaactggggctgccacccatgtggtgacttcacaagtcaaatatctcttgggaatgaaaatgccatatatatccggaccacttgg

SEQ ID NO: 407076 - DNA, 120 bp, Artificial Sequence
  ENSG00000147606_7 (sequence is synthesized)
attcttttatatttatgcatatgtttttgaaaacatcaagtctgtgcgactggaagcattgcttttatccttgctgagcattgtggtccttgttcttgttaaagagctgaatgaacagtt

SEQ ID NO: 407077 - DNA, 120 bp, Artificial Sequence
  ENSG00000147606_8 (sequence is synthesized)
taaaaggaaaattaaagttgttcttcctgtagatttagttttgattattgctgcatcatttgcttgttattgcaccaatatggaaaacacatatggattagaagtagttggtcatattcc

SEQ ID NO: 407078 - DNA, 120 bp, Artificial Sequence
  ENSG00000147606_9 (sequence is synthesized)
acaaggaattccctcacctagagctcccccgatgaacatcctctctgcggtgatcactgaagctttcggagtggcacttgtaggctatgtggcctcactggctcttgctcaaggatctgc

SEQ ID NO: 407079 - DNA, 120 bp, Artificial Sequence
  ENSG00000147606_10 (sequence is synthesized)
caaaaaattcaaatattcaattgatgacaaccaggaatttttggcccatggcctcagcaatatagtttcttcatttttcttctgcataccaagtgctgctgccatgggaaggacggctgg

SEQ ID NO: 407080 - DNA, 120 bp, Artificial Sequence
  ENSG00000147606_11 (sequence is synthesized)
cctgtacagcacaggagcgaagacacaggtggcttgtctaatatcttgcattttcgtccttatagtcatctatgcaataggacctttgctttactggctgcccatgtgtgtccttgcaag

SEQ ID NO: 407081 - DNA, 120 bp, Artificial Sequence
  ENSG00000147606_12 (sequence is synthesized)
cattattgttgtgggactgaagggaatgctaatacagttccgagatttaaaaaaatattggaatgtggataaaatcgattggggaatatgggtcagtacatatgtatttacaatatgctt

SEQ ID NO: 407082 - DNA, 120 bp, Artificial Sequence
  ENSG00000147606_13 (sequence is synthesized)
tgctgccaatgtgggactgctgtttggtgttgtttgtaccatagctatagtgataggacgcttcccaagagcaatgactgtaagtataaaaaatatgaaagaaatggaatttaaagtgaa

SEQ ID NO: 407083 - DNA, 120 bp, Artificial Sequence
  ENSG00000147606_14 (sequence is synthesized)
gacagaaatggacagtgaaaccctgcagcaggtgaaaattatctcaataaacaacccgcttgttttcctgaatgcaaaaaaattttatactgatttaatgaacatgatccaaaaggaaaa

SEQ ID NO: 407084 - DNA, 120 bp, Artificial Sequence
  ENSG00000147606_15 (sequence is synthesized)
tgcctgtaatcagccacttgatgatatcagcaagtgtgaacaaaacacattgcttaattccctatccaatggcaactgcaatgaagaagcttcacagtcctgccctaatgagaagtgtta

SEQ ID NO: 407085 - DNA, 120 bp, Artificial Sequence
  ENSG00000147606_16 (sequence is synthesized)
tttaatcctggattgcagtggatttaccttttttgactattctggagtctccatgcttgttgaggtttacatggactgtaaaggcaggagtgtggatgtattgttagcccattgtacagc

SEQ ID NO: 407086 - DNA, 120 bp, Artificial Sequence
  ENSG00000147606_17 (sequence is synthesized)
ttccttgataaaagcaatgacgtattatggaaacctagactcagagaaaccaattttttttgaatcggtatctgctgcaataagtcatatccattcaaataagaatttgagcaaactcag

SEQ ID NO: 407087 - DNA, 120 bp, Artificial Sequence
  ENSG00000147606_18 (sequence is synthesized)
tgaccacagtgaagtctgagacccttttgtcacagtacagctcttgtctttaccaactgcctgaagaggccatatgctggcattttgcacaactttttggttgtttagatcctacagatg

SEQ ID NO: 407088 - DNA, 120 bp, Artificial Sequence
  ENSG00000147606_19 (sequence is synthesized)
acctctgctacaataagtacgatgtgacttagtaactgcatagcagttggaaagaactgccaacttttttttctcatttttgttagtaagaagattcgcttagttattttatgtaaaaat

SEQ ID NO: 407089 - DNA, 120 bp, Artificial Sequence
  ENSG00000147606_20 (sequence is synthesized)
cagtatgtgtttagttttagtgtactgaagggtaaacatggttttattttattttaccatattattttgtgttgttttatttctattgtgctgtaagttgatgtttaaaattgagaaata

SEQ ID NO: 407090 - DNA, 120 bp, Artificial Sequence
  ENSG00000147606_21 (sequence is synthesized)
caacttagcaaatgtgccattttcacacaacttctctctgtataggcctctgaaatatcaataaggctaaatattactttacacagtaagatgtgaaattcacaaaaagtaaaccaaaca

SEQ ID NO: 407091 - DNA, 120 bp, Artificial Sequence
  ENSG00000147606_22 (sequence is synthesized)
aaacgaatgaaaaactggaaataattcgtttccatatctttccatacatccatttctgaagtattcaggaatgttttcataatcgaaagaaacgggtatccaaataaaaccaagttcttg

SEQ ID NO: 407092 - DNA, 120 bp, Artificial Sequence
  ENSG00000147606_23 (sequence is synthesized)
acattggtctgttttgctgtgaatattggaaatgcttaggatcttcagacccaatagctctaattttaacatttctacccaataagaggctctgttttccactgaagctttgttggagaa

SEQ ID NO: 407093 - DNA, 120 bp, Artificial Sequence
  ENSG00000147606_24 (sequence is synthesized)
agagaatatgaaaattacacattttataatttttagatgagaaaataccactagcagaatagctttgtgctattccagtataagatgaactgtaataatttttgacttccctatttcaga

SEQ ID NO: 407094 - DNA, 120 bp, Artificial Sequence
  ENSG00000147606_25 (sequence is synthesized)
gatagtcaatataatatgtttatctatatccatatggatggataggtaggtagatcttcatagatttttttttcttttgttagaggagagcttgatgtgattatcttcaaacccaccaaa

SEQ ID NO: 407095 - DNA, 120 bp, Artificial Sequence
  ENSG00000147606_26 (sequence is synthesized)
ccaacaggataattgacaaataaacgccataggctaggctgaactgtatgttactgttttcatgcttatacatatattttcaatcacatacaagtacatagaatttcacattttaattta

SEQ ID NO: 407096 - DNA, 120 bp, Artificial Sequence
  ENSG00000147606_27 (sequence is synthesized)
gcaaattgatttacctaggaaaaaattatcaccttcaaagataggcatagacacataattatgcttaagcttttaacagcattttaaccgctctaaaaattaccagagtaagaaaaagct

SEQ ID NO: 407097 - DNA, 120 bp, Artificial Sequence
  ENSG00000147606_28 (sequence is synthesized)
aggtactttaaagtgagtttgagaaacaagttgaaactaaaattaaaataccagccatttaggtgctttctctggcatctataaaagtaaattctagtgcctgccaagtgatggattata

SEQ ID NO: 407098 - DNA, 120 bp, Artificial Sequence
  ENSG00000147606_29 (sequence is synthesized)
atggtctctagcaaatgtgtggtaaacattcatatggccattaattttaacattaaatcgtaggtagggcaatgtagtaaaatgaaagagaattaagaaaggttttgaattcttataaca

SEQ ID NO: 407099 - DNA, 120 bp, Artificial Sequence
  ENSG00000147606_30 (sequence is synthesized)
tatccagccatttcaattttgattgaaatgaactacaaagaatagtgtttgtccctatggtagcctcagtctctttatcactaacttggattgaaatgagtgaggccaactcacattccc

SEQ ID NO: 407100 - DNA, 120 bp, Artificial Sequence
  ENSG00000147606_31 (sequence is synthesized)
atcaaacactcttccaaggaaaagcagaagtaataattggaggtaaagtttccttagagaaaataattttattctgctttgtccaattaaattattccaatggcggatggtaatattcac

SEQ ID NO: 407101 - DNA, 120 bp, Artificial Sequence
  ENSG00000147606_32 (sequence is synthesized)
catctctaattcattggtcactggtaggtaagcatgagttaaggaaagtcaaaaatgaaaatatattttgctgtgtataaattgatattttgctatgcaactcctgtaattgaatttgta

SEQ ID NO: 407102 - DNA, 120 bp, Artificial Sequence
  ENSG00000147606_33 (sequence is synthesized)
taatgcaggcactttctaatttattagagattatggatcagttctgacattaaaatcatagttaattgatggatggtttttatagtttgttgataaagtggacacagtattgtctgagca

SEQ ID NO: 407103 - DNA, 120 bp, Artificial Sequence
  ENSG00000147606_34 (sequence is synthesized)
gttatattttaatgcatttcagtgtttatagtagaagtttagtggataaaactttaagtccaataacttgggggtcaaatgctaatgttttattcaatgtaaaggaagaccaaaccatgt

SEQ ID NO: 407104 - DNA, 120 bp, Artificial Sequence
  ENSG00000147606_35 (sequence is synthesized)
accttatgaagacctttgttttaagacttccacacaccaaggctacaatgactgttaacctggaggaagtctctggtatggagttctgagagcttaagagctaaacatgagtttagacac

SEQ ID NO: 407105 - DNA, 120 bp, Artificial Sequence
  ENSG00000147606_36 (sequence is synthesized)
acaagattctaaaatgcaaatgtttattttgaagcaggcattgacaacacaaaaactgtgtagtggtcttgatgctggattgtttctagagtcacaatgaattatttttatgagattacc

SEQ ID NO: 407106 - DNA, 120 bp, Artificial Sequence
  ENSG00000147606_37 (sequence is synthesized)
taccttatttttatatatgacaaactacttctataatgcttattatggtaaaataaaattggaaaaaattaaaactgacctataagagtgttaaggacctaatagagtgacatatataaa

SEQ ID NO: 407107 - DNA, 120 bp, Artificial Sequence
  ENSG00000147606_38 (sequence is synthesized)
gcataaaatatgtaaccaggaaaagactgttaacattacatttatgcaaattaaatgcccttaaatttcaccatttgtctttcattttaaaggttatttgctcccgattatatgattcaa

SEQ ID NO: 407108 - DNA, 120 bp, Artificial Sequence
  ENSG00000147606_39 (sequence is synthesized)
gtgttataagttttagcttgaactactttgcagtaatttatttgacagatctctattctataaatgtgtaatgtgatgaagaaagagatctttcttttttaatgaaaacattaatgtgtt

SEQ ID NO: 407109 - DNA, 120 bp, Artificial Sequence
  ENSG00000147606_40 (sequence is synthesized)
aataccctgtatggataatgcttgacatttagtggtttccaaaatatattagtatattgttgaacatacattatgccttagaaatgcacattctgtattttgtgggatgataatctaatt

SEQ ID NO: 407110 - DNA, 120 bp, Artificial Sequence
  ENSG00000147606_41 (sequence is synthesized)
cagtatagaatatgctgtttggcaatgagtttgtggccagatttcaaatagggagttaagtggtactttcacaatccaaagatttttagttaaaaatcatgtagtctaatatgctgcagt

SEQ ID NO: 407111 - DNA, 120 bp, Artificial Sequence
  ENSG00000147606_42 (sequence is synthesized)
cagttatttttttatatttttcaatgcatttaattatcttttttataattctttgtactaactcagcatgtaacaaccaatttacatggaaataaatcgaaatatgataactattatgct

SEQ ID NO: 407112 - DNA, 120 bp, Artificial Sequence
  ENSG00000147606_43 (sequence is synthesized)
ccagcaagtcttgactaatctccaagcaatgtagctgtaaaaggactggaagataagcaagaatctgaagctggtgcctctccaagtattaatttgttcttacaaatgttttactcaacg

SEQ ID NO: 407113 - DNA, 120 bp, Artificial Sequence
  ENSG00000147606_44 (sequence is synthesized)
tgatgacaaccaggtggagtgtgcccccagtccctctccactccagttgtatcattgcactgtgcactcccagatcctaaaaatgatgaacttatgaaaaataaaactttcctaactgta

SEQ ID NO: 407114 - DNA, 120 bp, Artificial Sequence
  ENSG00000147606_45 (sequence is synthesized)
tttgtgcagtgatgagaagaaaaacctgactgatgtgacctaaagatggaggagaaattgatgacagagagcattaaaaaaaaatagtatttccctataaggttgttctgaggattaaat

SEQ ID NO: 407115 - DNA, 120 bp, Artificial Sequence
  ENSG00000147606_46 (sequence is synthesized)
gataacttggatcttccaacaatgccaccgctctgaggattgggtggttgcctatcatttgcaaactgcttacttgtacaacaaatgcttcttccaggatctactgtcctggggacttga

SEQ ID NO: 407116 - DNA, 120 bp, Artificial Sequence
  ENSG00000147606_47 (sequence is synthesized)
atccacctttctcaaatataaaaactctaaatatggccttttaagttttttctgctctgatatcttgcctctaagcttatattgccatctttggaaatactatttgtagaatctagtgct

SEQ ID NO: 407117 - DNA, 120 bp, Artificial Sequence
  ENSG00000147606_48 (sequence is synthesized)
cacatgatctgaagtgtcaaagttattttacaaatgctgggcttatggtttagttttacaactgttcttagagctttaatttcctgcaatttttccttgagttttgaattgttttgcctt

SEQ ID NO: 407118 - DNA, 120 bp, Artificial Sequence
  ENSG00000147606_49 (sequence is synthesized)
tcctcacccctagaataacatttggtgcctcgcagagtcatccctattgtatacaatcagaacagtatgtatttacaaaataataataacactattattattaaatctaacatatattga

SEQ ID NO: 407119 - DNA, 120 bp, Artificial Sequence
  ENSG00000147613_0 (sequence is synthesized)
gcttcccgagtccccaggtcccgcgagcggcgggcgtgttgcgggtatggggtgcggcgccagcaggaaggtggtcccggggccaccagcgctggcttgggccaagcacgaaggtcaaaa

SEQ ID NO: 407120 - DNA, 120 bp, Artificial Sequence
  ENSG00000147613_1 (sequence is synthesized)
ccaagccggcgtcggaggcgcggggcctgggcccgaggcggcggcccaggcggcgcagaggatacaggtggctcgcttccgagccaagttcgacccccgggtccttgccagatatgacat

SEQ ID NO: 407121 - DNA, 120 bp, Artificial Sequence
  ENSG00000147613_2 (sequence is synthesized)
caaagctcttattgggacaggcagtttcagcagggttgtcagggtagagcagaagaccaccaagaaaccttttgcaataaaagtgatggaaaccagagagagggaaggtagagaagcgtg

SEQ ID NO: 407122 - DNA, 120 bp, Artificial Sequence
  ENSG00000147613_3 (sequence is synthesized)
cgtgtctgagctgagcgtcctgcggcgggttagccatcgttacattgtccagctcatggagatctttgagactgaggatcaagtttacatggtaatggagctggctaccggaggggagct

SEQ ID NO: 407123 - DNA, 120 bp, Artificial Sequence
  ENSG00000147613_4 (sequence is synthesized)
ctttgatcgactcattgctcagggatcctttacagagcgggatgccgtcaggatcctccagatggttgctgatgggattaggtatttgcatgcgctgcagataactcataggaatctaaa

SEQ ID NO: 407124 - DNA, 120 bp, Artificial Sequence
  ENSG00000147613_5 (sequence is synthesized)
gcctgaaaacctcttatactatcatccaggtgaagagtcgaaaattttaattacagattttggtttggcatactccgggaaaaaaagtggtgactggacaatgaagacactctgtgggac

SEQ ID NO: 407125 - DNA, 120 bp, Artificial Sequence
  ENSG00000147613_6 (sequence is synthesized)
cccagagtacatagctcctgaggttttgctaaggaagccttataccagtgcagtggacatgtgggctcttggtgtgatcacatatgctttacttagcggattcctgccttttgatgatga

SEQ ID NO: 407126 - DNA, 120 bp, Artificial Sequence
  ENSG00000147613_7 (sequence is synthesized)
aagccagacaaggctttacaggaagattctgaaaggcaaatataattatacaggagagccttggccaagcatttcccacttggcgaaggactttatagacaaactactgattttggaggc

SEQ ID NO: 407127 - DNA, 120 bp, Artificial Sequence
  ENSG00000147613_8 (sequence is synthesized)
tggtcatcgcatgtcagctggccaggccctggaccatccctgggtgatcaccatggctgcagggtcttccatgaagaatctccagagggccatatcccgaaacctcatgcagagggcctc

SEQ ID NO: 407128 - DNA, 120 bp, Artificial Sequence
  ENSG00000147613_9 (sequence is synthesized)
tccccactctcagagtcctggatctgcacagtcttctaagtcacattattctcacaaatccaggcatatgtggagcaagagaaacttaaggatagtagaatcgccactgtctgcgctttt

SEQ ID NO: 407129 - DNA, 120 bp, Artificial Sequence
  ENSG00000147613_10 (sequence is synthesized)
taggaccatttcatcatgattagggcaccctcaagctccaaagacacgggactccatggtattgttggatactattgatcttgacttttaacattttcttgttctataatttttcctata

SEQ ID NO: 407130 - DNA, 120 bp, Artificial Sequence
  ENSG00000147613_11 (sequence is synthesized)
cctgtattcattttcccaaaatatactgctgcaaatgattaacagtttagtaaatactagctatgtttagataactggaaacaataaatagataagaaaatctttaaagtatgtaatgga

SEQ ID NO: 407131 - DNA, 120 bp, Artificial Sequence
  ENSG00000147613_12 (sequence is synthesized)
ttaaataaaatacaatactatagaaataagggatgtatatgtgaaggcatggtgaaccagagacatagcaggaatagttagatatggggaatatatgtatttatcctgaaattactgatt

SEQ ID NO: 407132 - DNA, 120 bp, Artificial Sequence
  ENSG00000147613_13 (sequence is synthesized)
tttatttaagccccagtatacagtgttaactaggtaacactcgaagtagttataaatgtctgttaatttcatatttagtctgcaaatatttatgaaaaattattaattatggggcctata

SEQ ID NO: 407133 - DNA, 120 bp, Artificial Sequence
  ENSG00000147613_14 (sequence is synthesized)
aagaactataagatataatttcaatctatcagaaacttttagtctaattggggcattattcacgggaaaaatagagatttttaagaatcataaaatagtgatttttttctaatgttagca

SEQ ID NO: 407134 - DNA, 120 bp, Artificial Sequence
  ENSG00000147613_15 (sequence is synthesized)
ttcatcaaccaccagggtttacaaaaaaatataaacatcttgcttcttatcactactgtcaactcttttcagtatgtactggtttcttttagaattatttaatcaaatatcttgatgact

SEQ ID NO: 407135 - DNA, 120 bp, Artificial Sequence
  ENSG00000147613_16 (sequence is synthesized)
ttaaacactcaccatgaaataattataggtaatgcaataaaggggtaagtttcaaaacttagttctctaggcaagtcacatatggcctgatctcttatatggtaaatttttgtaaaatga

SEQ ID NO: 407136 - DNA, 120 bp, Artificial Sequence
  ENSG00000147613_17 (sequence is synthesized)
ttattaatcatatctgtgagtcactcatatgtgtgggtaaacatagtaaataaatgattaattagttgatattgcttattttattcagaaaaataataaaatgttagaatgacatttact

SEQ ID NO: 407137 - DNA, 120 bp, Artificial Sequence
  ENSG00000147613_18 (sequence is synthesized)
atgttagaatgacatttactgtaactttaaaatcagtctcaattttttcattttatttttctcttttaggctatatagatggaacagctatatatctgatatatagataagaatatgtaa

SEQ ID NO: 407138 - DNA, 120 bp, Artificial Sequence
  ENSG00000147613_19 (sequence is synthesized)
tgacacaactattttctttttatgttgtaatgctgtatcacatgatatatgacagacctggattaattcctttaatatagaaagacacttacaaattcattagataaataatagaaaaat

SEQ ID NO: 407139 - DNA, 120 bp, Artificial Sequence
  ENSG00000147613_20 (sequence is synthesized)
gggcaaatattttaccaggtggtttataaacatatagatggctaatgagtaaatgaaaaaaatgcttcatttcatttgtaatttacaaaatgaaaataaaaatgacaaagaaaatgaaaa

SEQ ID NO: 407140 - DNA, 120 bp, Artificial Sequence
  ENSG00000147613_21 (sequence is synthesized)
gaattgcaaagtcagcaaagataggaggttataagatttgggtgagtggaattaacttggggagaatgaggtcatcaccttctcactccactctaccgctaaagcaatgagatccggtct

SEQ ID NO: 407141 - DNA, 120 bp, Artificial Sequence
  ENSG00000147613_22 (sequence is synthesized)
agacatctcactaagtgtcaagaagttctgctactccctagctcttactcactccccaaaccactgtttgtcttcatcacaaatgtcaagcccttctcctctttcctaaacaataagaaa

SEQ ID NO: 407142 - DNA, 120 bp, Artificial Sequence
  ENSG00000147614_0 (sequence is synthesized)
gcaaatcttcaggggccgtccaggactacagagctgtttcaccctaccttggcttcaatctcttcccccatgctcgaaggtgcggagctgtacttcaacgtggaccatggctacctggag

SEQ ID NO: 407143 - DNA, 120 bp, Artificial Sequence
  ENSG00000147614_1 (sequence is synthesized)
ggcctggttcgaggatgcaaggccagcctcctgacccagcaagactatatcaacctggtccagtgtgagaccctagaagacctgaaaattcatctccagactactgattatggtaacttt

SEQ ID NO: 407144 - DNA, 120 bp, Artificial Sequence
  ENSG00000147614_2 (sequence is synthesized)
ttggctaatcacacaaatcctcttactgtttccaaaattgacactgagatgaggaaaagactatgtggagaatttgagtatttccggaatcattccctggagcccctcagcacatttctc

SEQ ID NO: 407145 - DNA, 120 bp, Artificial Sequence
  ENSG00000147614_3 (sequence is synthesized)
acctatatgacgtgcagttatatgatagacaatgtgattctgctgatgaatggtgcattgcagaaaaaatctgtgaaagaaattctggggaagtgccaccccttgggccgtttcacagaa

SEQ ID NO: 407146 - DNA, 120 bp, Artificial Sequence
  ENSG00000147614_4 (sequence is synthesized)
atggaagctgtcaacattgcagagacaccttcagatctctttaatgccattctgatcgaaacgccattagctccattcttccaagactgcatgtctgaaaatgctctagatgaactgaat

SEQ ID NO: 407147 - DNA, 120 bp, Artificial Sequence
  ENSG00000147614_5 (sequence is synthesized)
attgaattgctacgcaataaactatacaagtcttaccttgaggcattctataaattctgtaagaatcatggtgatgtcacagcagaagttatgtgtcccattcttgagtttgaggccgac

SEQ ID NO: 407148 - DNA, 120 bp, Artificial Sequence
  ENSG00000147614_6 (sequence is synthesized)
agacgtgcttttatcatcactcttaactcctttggcactgaattgagcaaagaagaccgagagaccctctatccaaccttcggcaaactctatcctgaggggttgcggctgttggctcaa

SEQ ID NO: 407149 - DNA, 120 bp, Artificial Sequence
  ENSG00000147614_7 (sequence is synthesized)
gcagaagactttgaccagatgaagaacgtagcggatcattacggagtatacaaacctttatttgaagctgtaggtggcagtgggggaaagacattggaggacgtgttttacgagcgtgag

SEQ ID NO: 407150 - DNA, 120 bp, Artificial Sequence
  ENSG00000147614_8 (sequence is synthesized)
gtacaaatgaatgtgctggcattcaacagacagttccactacggtgtgttttatgcatatgtaaagctgaaggaacaggaaattagaaatattgtgtggatagcagaatgtatttcacag

SEQ ID NO: 407151 - DNA, 120 bp, Artificial Sequence
  ENSG00000147614_9 (sequence is synthesized)
ttattgaagaaaataaaagaaattatgttatattatctagactacacaaaagtaagccacactatatcttcatgagttgcaaatccatggaaacacagtaaaccagccctgaaacaaagc

SEQ ID NO: 407152 - DNA, 120 bp, Artificial Sequence
  ENSG00000147614_10 (sequence is synthesized)
atttccttgttttcagtggtattagatcttgtttccacatgtctgtctcattcttcactgggccttacaggttagttttaattaactctatggtatttttcttattcttgtttgatcatg

SEQ ID NO: 407153 - DNA, 120 bp, Artificial Sequence
  ENSG00000147614_11 (sequence is synthesized)
ttaaaaattggacctaataaaagtattttattcttgcttttccatgcttctctacaggtccaaatactgaatgtctcctttactttttctcttttaaatttttttctagacagggtctca

SEQ ID NO: 407154 - DNA, 81 bp, Artificial Sequence
  ENSG00000147614_12 (sequence is synthesized)
cagctctcagcctccaaagtagctggcactacaagtgtacacccccacacaaggctaagttttgtattttttgtagagaca

SEQ ID NO: 407155 - DNA, 120 bp, Artificial Sequence
  ENSG00000147614_13 (sequence is synthesized)
ttgtattttttgtagagacagggtttcaacatattatccaggctggtgtcgaattcctgggctccagggatccacagtcccccttggcctcccaaagtgttgggattacatgcatgagcc

SEQ ID NO: 407156 - DNA, 120 bp, Artificial Sequence
  ENSG00000147614_14 (sequence is synthesized)
tgggattacatgcatgagccactgtgctgggcttcatttacattttaactgtctgttccttgcctagattcacagaaatccaaagctgtatgtagtcaacatggttcacaagtgttggaa

SEQ ID NO: 407157 - DNA, 120 bp, Artificial Sequence
  ENSG00000147614_15 (sequence is synthesized)
gctgtatgtagtcaacatggttcacaagtgttggaaaatgtgttttttgttttgttttgttttgtttcgttttgttttgagacagagtttccctctgtcgcccaggctagagtgcaatgg

SEQ ID NO: 407158 - DNA, 120 bp, Artificial Sequence
  ENSG00000147614_16 (sequence is synthesized)
cctcccaaagtgctgggattacaggccccttgttcagccactgcacctggccccttattttgtttttgttttctaatatactttgatgtaatcagcttgagaaagcaacacaatttcaaa

SEQ ID NO: 407159 - DNA, 120 bp, Artificial Sequence
  ENSG00000147614_17 (sequence is synthesized)
gatgtaatcagcttgagaaagcaacacaatttcaaatcctatcttctagatgcaagcagtgttaaatttgttaataaatttgcttttcacacctttctttaaataaaaggtatatctctc

SEQ ID NO: 407160 - DNA, 120 bp, Artificial Sequence
  ENSG00000147614_18 (sequence is synthesized)
taaaatcacagataaaataagttcctatggtgaggaatggaggcctccagctgacagagagcaaagaactgaggcctgcgacaactataggcgtgatcctgggaaccgattctcaacctc

SEQ ID NO: 407161 - DNA, 120 bp, Artificial Sequence
  ENSG00000147614_19 (sequence is synthesized)
atctgagccttgagacgactgctgctctggccgacagcctgacggcaacctcctgagacagctctgagaggagattttccaggttcaagtcccgagacgaggtttcaccgtgctggccaa

SEQ ID NO: 407162 - DNA, 76 bp, Artificial Sequence
  ENSG00000147614_20 (sequence is synthesized)
aacctgggatgagatcctcgtttcagaaaatgatttgatcctcctgaaggcgctccctgctaaggatctaaactca

SEQ ID NO: 407163 - DNA, 120 bp, Artificial Sequence
  ENSG00000147642_0 (sequence is synthesized)
agcacgtcagctgctccttgttgctgtgcagatcacccaacattaggtcaccgagagagacagcagctcttgctcacacagctgataggattaggagatggtgctttgtcagccctgatt

SEQ ID NO: 407164 - DNA, 120 bp, Artificial Sequence
  ENSG00000147642_1 (sequence is synthesized)
gagcccaagaaaaccccctgcatacacaggtgcctcctcctggacggcggcagcggcggcgcgaggagccggcgggcagcggcgcgatggggcccctccgcgagagcaaggagcacagag

SEQ ID NO: 407165 - DNA, 120 bp, Artificial Sequence
  ENSG00000147642_2 (sequence is synthesized)
tgcagcatcatgacaaggagatttctcgaagccgaattccccggttgattcttcggccccatatgccccaacaacagcacaaagtgtccccagcctctgagtctcctttctctgaggaag

SEQ ID NO: 407166 - DNA, 120 bp, Artificial Sequence
  ENSG00000147642_3 (sequence is synthesized)
agagcagagagttcaaccccagcagctctgggcgctcagcgaggaccgttagcagcaacagcttctgctcagatgacacaggctgtcctagcagccagtcagtgtctcctgtgaagacac

SEQ ID NO: 407167 - DNA, 120 bp, Artificial Sequence
  ENSG00000147642_4 (sequence is synthesized)
cctcagatgctggaaacagccccattggcttttgccctggaagtgatgaaggcttcaccagaaagaaatgcacgattggaatggttggtgaaggaagcattcagtcctctcgatataaga

SEQ ID NO: 407168 - DNA, 120 bp, Artificial Sequence
  ENSG00000147642_5 (sequence is synthesized)
aggaatcaaagtcaggccttgtgaaaccaggtagtgaagctgattttagctcctcgagcagcacaggcagcatttccgctcctgaggtccatatgtcgactgcgggaagcaagcggtctt

SEQ ID NO: 407169 - DNA, 120 bp, Artificial Sequence
  ENSG00000147642_6 (sequence is synthesized)
cttcttcacgcaatcgaggtcctcatgggcggagtaatggagcttcgtcacacaagcctggcagcagcccatcatccccgcgggaaaaggaccttctgtccatgctgtgcaggaatcagc

SEQ ID NO: 407170 - DNA, 120 bp, Artificial Sequence
  ENSG00000147642_7 (sequence is synthesized)
tgagccctgtcaatatccatcccagttatgcaccttcttccccaagcagtagcaactcaggctcctacaaaggaagcgactgtagccccatcatgaggcgttctggaaggtacatgtctt

SEQ ID NO: 407171 - DNA, 120 bp, Artificial Sequence
  ENSG00000147642_8 (sequence is synthesized)
gcggtgaaaatcatggtgtcagacccccaaacccagagcagtatttgactccactgcagcagaaagaggtgacagtgagacacctcaaaaccaagctgaaggaatctgagcgccgactcc

SEQ ID NO: 407172 - DNA, 120 bp, Artificial Sequence
  ENSG00000147642_9 (sequence is synthesized)
atgaaagggaaagtgaaatcgtggagcttaagtcccagctggcccgcatgcgagaggactggattgaggaggagtgtcaccgggtagaggcccagttggcactcaaagaagccaggaaag

SEQ ID NO: 407173 - DNA, 120 bp, Artificial Sequence
  ENSG00000147642_10 (sequence is synthesized)
agattaaacagctcaaacaggtcatcgaaaccatgcggagcagcttggctgataaagataaaggcattcagaaatattttgtggacataaacatccaaaacaagaagctggagtctctcc

SEQ ID NO: 407174 - DNA, 120 bp, Artificial Sequence
  ENSG00000147642_11 (sequence is synthesized)
ttcagagcatggagatggcacacagtggctctctgagggacgaactgtgcctagactttccatgtgattccccagagaagagcttaaccctcaacccccctcttgacacaatggcagatg

SEQ ID NO: 407175 - DNA, 120 bp, Artificial Sequence
  ENSG00000147642_12 (sequence is synthesized)
acagggagctactggtaggagatagcatagccaacagcacagatttgttcgatgagatagtgacagccaccaccacagaatctggtgacctggagcttgtgcattccacccctggggcta

SEQ ID NO: 407176 - DNA, 120 bp, Artificial Sequence
  ENSG00000147642_13 (sequence is synthesized)
acgtcctggagctgctgcccatagtcatgggtcaggaggagggcagtgtggtggtggagcgagccgttcagaccgacgtggtgccctacagcccagccatctcagagctcattcagagtg

SEQ ID NO: 407177 - DNA, 120 bp, Artificial Sequence
  ENSG00000147642_14 (sequence is synthesized)
tgctgcagaagctccaggacccctgtccctcgagcttggcgtcccctgatgagtctgaaccagactcgatggagagcttcccagagtccctctctgccttagtggttgatttaactccaa

SEQ ID NO: 407178 - DNA, 120 bp, Artificial Sequence
  ENSG00000147642_15 (sequence is synthesized)
gaaatccaaactcagccatccttttgtctcccgtggagaccccctacgccaatgtggatgcagaagttcatgcaaaccgcctcatgagagagctggattttgcagcctgcgtggaagaga

SEQ ID NO: 407179 - DNA, 120 bp, Artificial Sequence
  ENSG00000147642_16 (sequence is synthesized)
ggttggatggtgtcatcccactggctcgcgggggcgtcgtgaggcagtactggagcagcagcttcctggtggatctcctggctgtggctgcccccgtggtccccacggttctgtgggcat

SEQ ID NO: 407180 - DNA, 120 bp, Artificial Sequence
  ENSG00000147642_17 (sequence is synthesized)
tcagtactcagagagggggaacggatcctgtgtataacatcggggccttgctcaggggctgttgcgtggttgccctgcattcgctccgccgcaccgccttccgtatcaaaacctaaatag

SEQ ID NO: 407181 - DNA, 120 bp, Artificial Sequence
  ENSG00000147642_18 (sequence is synthesized)
aagttgttgttaccgtgtgccaatgtgtcccatgtgggttgtgccaggtagagaaacaggaagtcaatcatctgtgacagtctctattctgtcgttttgctccttggtatttgatttgca

SEQ ID NO: 407182 - DNA, 120 bp, Artificial Sequence
  ENSG00000147642_19 (sequence is synthesized)
ctatatttagttgaagcctgttcactgtttaaaaccggaggtatcttcaaaggcatggagacctggttccagtaaatgtcccaccagtggggtatagaaagcatgctcatgaccctgccg

SEQ ID NO: 407183 - DNA, 120 bp, Artificial Sequence
  ENSG00000147642_20 (sequence is synthesized)
tgtcgtctgaggtacccgttcttatcctagtggttcaggaagagaaaacgcagtttgcactttcaagacagcttctctaaggctggcatgttatctccttgctttgctttttgccgtttt

SEQ ID NO: 407184 - DNA, 120 bp, Artificial Sequence
  ENSG00000147642_21 (sequence is synthesized)
aaaatgtgtaattgttccagcattccaatggtcttgtgcatagcaggggactgtaaccaaaaataaacatgtatttgtgtaattggtttgaagaagtcttgaatagctctttactgtctt

SEQ ID NO: 407185 - DNA, 120 bp, Artificial Sequence
  ENSG00000147642_22 (sequence is synthesized)
acttggggttgataagatttgagtgtttgcaattttttactaaatgtagctccaaagtcttaaatggcttgtttgttcttaaactgttaattgatgaaactgtgcataagtttacaatgt

SEQ ID NO: 407186 - DNA, 120 bp, Artificial Sequence
  ENSG00000147642_23 (sequence is synthesized)
actaacttattttgcttattatatatagtgttttattggaaattgtaaccacacacttcagcatgatgaaaataaagattagtgtttccatttaaataaatgttttatcctcccataaaa

SEQ ID NO: 407187 - DNA, 120 bp, Artificial Sequence
  ENSG00000147642_24 (sequence is synthesized)
gcagtgtgctggagctacttcctggagccgggcagctgcagggcagcgctggggaaaagactgttctctggctacatagcagcctggcttctccaagccggagggagctgcgctgaccac

SEQ ID NO: 407188 - DNA, 120 bp, Artificial Sequence
  ENSG00000147642_25 (sequence is synthesized)
tgaaggcctttctgatgcaaccccttccaagtagaatccatcgcagcctttcagatcccggaacccagaggctgtgtcggtcctgacgcactggcttggctgggctccggtgcctcctcc

SEQ ID NO: 407189 - DNA, 120 bp, Artificial Sequence
  ENSG00000147642_26 (sequence is synthesized)
gagcccaagaaaaccccctgcatacacaggcatcaacaaatattgactggatcatctggacctgacttagctgccctttggaaagttctgttcaatcagctggatagagctgtttgtttt

SEQ ID NO: 407190 - DNA, 120 bp, Artificial Sequence
  ENSG00000147642_27 (sequence is synthesized)
taaaaattgaattaaattaggaagagggaaaaagagttagttattaaagaaaatgaagatttcctacccttacttaaaaagcatcatttctgaataaaagtagatttgtttacttttaaa

SEQ ID NO: 407191 - DNA, 120 bp, Artificial Sequence
  ENSG00000147642_28 (sequence is synthesized)
agagcaatcggcggcagtggcggcggcggcgcgttggagcctcaccaagagccgccgcccgcagcccgcgccggctcagcgcagtctcctcgctccgtgctcgcaggtgcctcctcctgg

SEQ ID NO: 407192 - DNA, 120 bp, Artificial Sequence
  ENSG00000147642_29 (sequence is synthesized)
atttttaaaaccacgaaatggcagggtacttcatgctgcgtttttaaggagaaagaaaaatctcttcttatggatgtcctgtaaggaaaacaaaaattaaagatgatgtaaaaggtggag

SEQ ID NO: 407193 - DNA, 120 bp, Artificial Sequence
  ENSG00000147642_30 (sequence is synthesized)
ccatcttcccgagtatcggatttgtgtttgcttttctgttggcaacaagccttgtgtaccaggatattaacgaataattaagatcctgtccagaagaggagggattttaaagataattgt

SEQ ID NO: 407194 - DNA, 120 bp, Artificial Sequence
  ENSG00000147642_31 (sequence is synthesized)
gtgtgagctatcaggaaataactgttccaggtatagggttcaactttgtgaggagacaagaaaacaagtcagactgtcacagctaatttagggaaagcaaaatggaagtctgaaggctat

SEQ ID NO: 407195 - DNA, 120 bp, Artificial Sequence
  ENSG00000147642_32 (sequence is synthesized)
caagtaagccagagtgtggtgttaataaagagcctttgggaggcagaagcttgaatgtgatagaagtcagggtgggaaggtgagtcaggaccagcatagggaagtaggatggccttccag

SEQ ID NO: 407196 - DNA, 120 bp, Artificial Sequence
  ENSG00000147642_33 (sequence is synthesized)
tatgtgtgtgtgtgtgtgtgtgtgtgtgccacacagacatgtgctattcagtagattagaaaggttaactcattggaagagttttgaagctcatttcagcaactgagataagaaggacta

SEQ ID NO: 407197 - DNA, 120 bp, Artificial Sequence
  ENSG00000147642_34 (sequence is synthesized)
aactgagataagaaggactactctgtgaagactcaatactcagaaatgtgatttcttagaaattgatccttgaaggaaccgacaggagttaagagagggaaacgcgtttccttttgtttt

SEQ ID NO: 407198 - DNA, 120 bp, Artificial Sequence
  ENSG00000147642_35 (sequence is synthesized)
cccatcaggatatttaagctggaagctttgtcaggctgcgtcagtgttccctgagtaagcaggaatgcaaactgcaattttagcattagcattctacttagaacaaagggaggtgcccgg

SEQ ID NO: 407199 - DNA, 120 bp, Artificial Sequence
  ENSG00000147642_36 (sequence is synthesized)
aagcagtacacattagtgcagagttttctggtttccctttaaagagaaggcacagccatttgactcttgagcttatttaaacaagtcaccagtccttgactccagaactgaagctttata

SEQ ID NO: 407200 - DNA, 120 bp, Artificial Sequence
  ENSG00000147642_37 (sequence is synthesized)
agcggcttcttcaagaaacagatcctgcagcataatctgccagggccctggcaacaggaaccggtccttcaggcagcgagcccagggagcagaatcctggcgcccccggcgcgcggccct

SEQ ID NO: 407201 - DNA, 120 bp, Artificial Sequence
  ENSG00000147642_38 (sequence is synthesized)
cagcgtgctcacgccgctgcgccccacccagcggtgcctgccctttggtcccccgcccttctctccattttgtcctcagccccagcagccgcccggctggctgcagaggccgaggggccg

SEQ ID NO: 407202 - DNA, 120 bp, Artificial Sequence
  ENSG00000147642_39 (sequence is synthesized)
agggcaccggagcgcaagggattccgcggcaccacgtgtccaagccgggctaaggcgggcggagcgggccgggcccggctccccgggcctgagcgcaaaccagcagcgacgcggggtccc

SEQ ID NO: 407203 - DNA, 120 bp, Artificial Sequence
  ENSG00000147642_40 (sequence is synthesized)
gtccgcaccggcacccggcccagccggggcccggtctcccgggcgcacgtaggtgcctcctcctggacagcgcgatggggcccttctgggcgagaaagggtgcctcctcctggacggcgg

SEQ ID NO: 407204 - DNA, 120 bp, Artificial Sequence
  ENSG00000147642_41 (sequence is synthesized)
taatcaaaattaccaatgatgcatttatgtgtgctctgtttatcttgccctgttttctcctcctcctgtatggggtaccaccttcccccatcctccaaatgaaccgcattaattttctta

SEQ ID NO: 407205 - DNA, 120 bp, Artificial Sequence
  ENSG00000147642_42 (sequence is synthesized)
ccctgacatgaaccaaatgcaaatatttctaaactgaaacaggtggactagaacaaaaaccatatcttgaaaacagcctccaaaataaacagcctccaaaataaacctgagctaaatcaa

SEQ ID NO: 407206 - DNA, 120 bp, Artificial Sequence
  ENSG00000147642_43 (sequence is synthesized)
tattctacattgtgtatgttcttagcaggctattgggtgttatccaaaaaaagctttatggtcagaaactatttgaaagaacaacagagggagaggttgcttgtgctgatgtcacaagga

SEQ ID NO: 407207 - DNA, 120 bp, Artificial Sequence
  ENSG00000147642_44 (sequence is synthesized)
gagaaaataccaggcaggtgggaagaaggccgctcctaaggacagtctacacgaataattgtattgcgcctttcaactctataaattggatttccttagatttaaggagtaagacattag

SEQ ID NO: 407208 - DNA, 120 bp, Artificial Sequence
  ENSG00000147642_45 (sequence is synthesized)
atgcagaaggctcagtctccatggataccccactctgagactgtactctactgagatatgagctgcacacactgtatttctgcaaaagacataccccagcctgtgctgggaggctgtttg

SEQ ID NO: 407209 - DNA, 120 bp, Artificial Sequence
  ENSG00000147642_46 (sequence is synthesized)
tatttaaacaagtcaccagtccttgactccagaactgaagctttatatgttctttctatttggctgagccagtaatttttgattgcttcttcttcccaagaggcatcaacaaatattgac

SEQ ID NO: 407210 - DNA, 120 bp, Artificial Sequence
  ENSG00000147642_47 (sequence is synthesized)
gtattttatttttcttttgcttgaaatagggtgagcccgttgttgtggagtgagagcctcacatacgggagaacagtgcatttcttgatgcacttgggtcactgttgacagtgtctgcag

SEQ ID NO: 407211 - DNA, 120 bp, Artificial Sequence
  ENSG00000147642_48 (sequence is synthesized)
gaagactggcctctttatgaaaccagccttactgtgcatcttagctgtgtttatgaaatgatgttcttgtactgggccttctcttgactgctttgaggaaaatgctgtgagcctggaagc

SEQ ID NO: 407212 - DNA, 120 bp, Artificial Sequence
  ENSG00000147642_49 (sequence is synthesized)
ctcttatgggaaaacaggcagctctctccctggtaagaaaaatatgggtctccaccccaccccaccacacacacaaaaaaatctcacgatgccccagaatgcagtttctttccttcgtga

SEQ ID NO: 407213 - DNA, 120 bp, Artificial Sequence
  ENSG00000147642_50 (sequence is synthesized)
attttattattcagtgaggctttttgttttgtttttttacagtgattttaaattggtagtttttcctgtcttgccaactgtggtcacatggctcacctgtgtttgtacatccatggctgt

SEQ ID NO: 407214 - DNA, 120 bp, Artificial Sequence
  ENSG00000147642_51 (sequence is synthesized)
ctcccatccaacccttgactctatgcccactcctcctgtcccttctctctttcccttactcacctgtgtactcatctgcataggaagctagtggtctcccacttccctcctacctcccct

SEQ ID NO: 407215 - DNA, 120 bp, Artificial Sequence
  ENSG00000147642_52 (sequence is synthesized)
actggcctagggaaggaagaatatagagaaggctctttagagtacgttcccatcagtctcaaagtaggaagtatcctggtatccaggggcttagagaagggagcaggtgaacattctaat

SEQ ID NO: 407216 - DNA, 120 bp, Artificial Sequence
  ENSG00000147642_53 (sequence is synthesized)
gtgccagatgtcactgagagtgagatcctggggaaggttccactaaaggagtccaaggaaatgcagagcataatttgtgagcagagcaaaatccaattgtagtgaagctgattttagctc

SEQ ID NO: 407217 - DNA, 120 bp, Artificial Sequence
  ENSG00000147647_0 (sequence is synthesized)
ggatttgcagcctgaggcagagctcgggggctgtcggtggggaccttgcaggagggcaccccaagcccgcccggcccgcccaacccagcccctgcgcgcagcccgggccgagtaggaccc

SEQ ID NO: 407218 - DNA, 120 bp, Artificial Sequence
  ENSG00000147647_1 (sequence is synthesized)
cgcgcgcccctcgctatggcggcgccctcgcggctcctgatccgcgggggtcgcgtggtcaacgatgacttctcggaggtggccgacgtgctggtggaggacggcgtggtgcgggcactc

SEQ ID NO: 407219 - DNA, 120 bp, Artificial Sequence
  ENSG00000147647_2 (sequence is synthesized)
gggcacgacctgctgcctcccgggggcgctcctgcggggctgcgggtcctcgacgccgccggcaagctcgtcctgcccggaggcatcgacacacacacgcacatgcagttccccttcatg

SEQ ID NO: 407220 - DNA, 120 bp, Artificial Sequence
  ENSG00000147647_3 (sequence is synthesized)
ggctcgcggtccatcgacgacttccaccagggcaccaaggctgctctctcaggaggcaccaccatgattattgatttcgccattcctcagaaaggtggctccctcattgaggccttcgag

SEQ ID NO: 407221 - DNA, 120 bp, Artificial Sequence
  ENSG00000147647_4 (sequence is synthesized)
acctggcgaagctgggctgatcccaaagtttgctgcgactacagccttcatgtggcagtgacgtggtggagtgaccaggttaaagaagaaatgaaaatccttgtgcaagataaaggtgtt

SEQ ID NO: 407222 - DNA, 120 bp, Artificial Sequence
  ENSG00000147647_5 (sequence is synthesized)
aactctttcaagatgtttatggcctataaagatctgtacatggtgacagacctggagctgtacgaagccttctctcggtgcaaggaaattggagcaattgcccaggtccatgcggaaaat

SEQ ID NO: 407223 - DNA, 120 bp, Artificial Sequence
  ENSG00000147647_6 (sequence is synthesized)
ggagacttaattgcagagggagcaaagaagatgttggctctggggataacaggccctgagggccacgagctgtgccgcccagaggcagtggaggcagaggccacgctgagagccatcacc

SEQ ID NO: 407224 - DNA, 120 bp, Artificial Sequence
  ENSG00000147647_7 (sequence is synthesized)
atagccagcgctgtgaactgtcctctctacattgtgcatgtgatgagcaagtctgcagctaaggtgatagcggatgcaaggagagatgggaaggtggtctatggtgaacccatagcagcc

SEQ ID NO: 407225 - DNA, 120 bp, Artificial Sequence
  ENSG00000147647_8 (sequence is synthesized)
cagacccctcaacacccgacttcctcatgaatctgttggctaatgatgatctaaccacaacagggactgataactgcactttcaacacctgccagaaagctcttgggaaggatgatttta

SEQ ID NO: 407226 - DNA, 120 bp, Artificial Sequence
  ENSG00000147647_9 (sequence is synthesized)
ccaagatccccaatggggtgaatggtgttgaagatcggatgtccgtaatatgggaaaaaggcgtgcatagtggtaaaatggatgaaaacagatttgtggcagttaccagcacaaatgcag

SEQ ID NO: 407227 - DNA, 120 bp, Artificial Sequence
  ENSG00000147647_10 (sequence is synthesized)
ccaaaatttttaatctctatccaagaaaaggaagaatagctgtaggatcagatgctgacattgttatttgggacccaaaaggcacaaggactatctcagcaaaaactcatcatcaggctg

SEQ ID NO: 407228 - DNA, 120 bp, Artificial Sequence
  ENSG00000147647_11 (sequence is synthesized)
ttaacttcaacattttcgagggcatggtttgccacggggtgccccttgtgactatttcaagaggcaaagtggtatatgaagccggagtgttcagtgtcacggcaggagatgggaagttta

SEQ ID NO: 407229 - DNA, 120 bp, Artificial Sequence
  ENSG00000147647_12 (sequence is synthesized)
ttcctcgaaaaccatttgctgaatatatttacaaacgaataaagcagcgagaccggacttgcacacctacccctgtggagcgtgcaccctataagggagaagtcgccacactgaaatcca

SEQ ID NO: 407230 - DNA, 120 bp, Artificial Sequence
  ENSG00000147647_13 (sequence is synthesized)
gagtgacaaaagaagatgccacagcagggaccaggaaacaggcccacccctgaagtgtgtgccatcggtaaaaaaatcagaggaaaggaggctgccattcccttcacagccaaacattgt

SEQ ID NO: 407231 - DNA, 120 bp, Artificial Sequence
  ENSG00000147647_14 (sequence is synthesized)
caacccatggagaagcaggccttattcaactccctaggatcctttagaaaaaattcaccactataggcttctttgattttctttcagaagcaattgctgtctttctcactgtgtttttgt

SEQ ID NO: 407232 - DNA, 120 bp, Artificial Sequence
  ENSG00000147647_15 (sequence is synthesized)
tgctgcataagattgaaggtataaatttatattattgtgatggaaaggctgtgtggaaattcattgatgatactttaaaatgtcatctttgcttgtactagatttcttacttagaatttt

SEQ ID NO: 407233 - DNA, 120 bp, Artificial Sequence
  ENSG00000147647_16 (sequence is synthesized)
atctttgcttgtactagatttcttacttagaatttttaaaaatcattttcttgtttaaatagtttctttttttaaaaaaatggttacattagttttaaaatagctctgtgattttacttt

SEQ ID NO: 407234 - DNA, 120 bp, Artificial Sequence
  ENSG00000147647_17 (sequence is synthesized)
ctttttttaaagctctcgcaattcataaagggagctacacttaactttgaactcaagaaaataaaccacaagagagaaatgaaatgttctctttcagacttgcacacctacccctgtgga

SEQ ID NO: 407235 - DNA, 120 bp, Artificial Sequence
  ENSG00000147647_18 (sequence is synthesized)
aaagtcaaatattctcagcctaagaagggatgggttaagaatatcacacgagaggcagaaacaagatgccttagaaattcaaagaagaaagatcattgtggagttagagcagtcatcgac

SEQ ID NO: 407236 - DNA, 120 bp, Artificial Sequence
  ENSG00000147647_19 (sequence is synthesized)
ttgaagagatcaaggtcagaggcttcacagtgatccaagactcaaggacaattgagccaagggaagattgatcaaagcagaacatttagataagccttccagattgtagaaggccttggg

SEQ ID NO: 407237 - DNA, 120 bp, Artificial Sequence
  ENSG00000147647_20 (sequence is synthesized)
cttgctagagagtcattctttaagatgttaggaaacattcaatacagccttggataatcaactatgagcaagttgcactaaggaggctgataacatacagagggaactacttaagacagg

SEQ ID NO: 407238 - DNA, 120 bp, Artificial Sequence
  ENSG00000147647_21 (sequence is synthesized)
gagtataatttcatggtcaaaatttacaaatgaattaggaccttatctggagaaatgaatcttcatattgtaaatacaacggtgttctaaaatttagaataaatgaaaaatgaataaaat

SEQ ID NO: 407239 - DNA, 120 bp, Artificial Sequence
  ENSG00000147647_22 (sequence is synthesized)
gttgctttaggggatataatccttcagaaaaattctttgatagtatctgattatttcacagttagttttgggaataatattacagatacagtcatttttgcaaaagtatttgagcacttc

SEQ ID NO: 407240 - DNA, 120 bp, Artificial Sequence
  ENSG00000147647_23 (sequence is synthesized)
atcagttttctctgtcttttgacatgcagatctttcttttctgaagtgcctcgtatcatcatccttgtcaattttctttcttcagttgtcttctggtcctgctctctcagatcctcattt

SEQ ID NO: 407241 - DNA, 120 bp, Artificial Sequence
  ENSG00000147647_24 (sequence is synthesized)
aggagatgggaagtttattcctcgaaaaccatttgctgaatatatttacaaacgaataaagcagcgagaccgggtaaaaaaatcagaggaaaggaggctgccattcccttcacagccaaa

SEQ ID NO: 407242 - DNA, 120 bp, Artificial Sequence
  ENSG00000147647_25 (sequence is synthesized)
aagaaggtttgggtagaagggagctcgtcctcccatctggatcctccactaacctcccagtattctcttctacttgacctgtcaggtcctgggtacccctcacctgcagagcaaaaaaca

SEQ ID NO: 407243 - DNA, 120 bp, Artificial Sequence
  ENSG00000147647_26 (sequence is synthesized)
ttgacttaattatgctgtgatatgttgtcaaagcctttcctagactctcagaaatcagatcgttttcactgaaactttactcttttctgacttttttcatctcttgttgcccaaacccag

SEQ ID NO: 407244 - DNA, 120 bp, Artificial Sequence
  ENSG00000147647_27 (sequence is synthesized)
ggctcttcattacaccttactttttatcagaatattgttgaatttttttctatgctgatataatatgggaactaggttaaccctgttactttctgggaacatatgatcatttttcttgaa

SEQ ID NO: 407245 - DNA, 120 bp, Artificial Sequence
  ENSG00000147647_28 (sequence is synthesized)
gctacagagcagcggtggacccaattccacggcacgcagtggaggaggcatcactgcagaaagttaggactccagtttgtagaagggcccagactgaggctgggcagagactctgccaac

SEQ ID NO: 407246 - DNA, 120 bp, Artificial Sequence
  ENSG00000147647_29 (sequence is synthesized)
taacagattaaaggggagaacggttaactggccggcacagcacacagtggctgttccacatgtcagccctggacccactgtcttgggagaagatgatccaaggaccccagggacgctggg

SEQ ID NO: 407247 - DNA, 120 bp, Artificial Sequence
  ENSG00000147649_0 (sequence is synthesized)
aagccgccattgttccgccgagggaggacagcggggcctggcgctggcgccgagacgccgcttagcggccgccactggagacactccctcccgcctcccgggtctcctggcggcggcgga

SEQ ID NO: 407248 - DNA, 120 bp, Artificial Sequence
  ENSG00000147649_1 (sequence is synthesized)
gtgaggctgacagcggggaacctgggagacccctccgccctccccgcggtggcagcggccgatccccggctccggcgcgagggacggccgcgatgcgctcggcctgaggttacccggccc

SEQ ID NO: 407249 - DNA, 120 bp, Artificial Sequence
  ENSG00000147649_2 (sequence is synthesized)
ggcccttcctcgcttccctcgactattccactgcgtctccgcgccccggcgtcatcctgcgagtccctctgacgggagggaagatggctgcacggagctggcaggacgagctggcccagc

SEQ ID NO: 407250 - DNA, 120 bp, Artificial Sequence
  ENSG00000147649_3 (sequence is synthesized)
aggccgaggagggctcggcccggctgcgggaaatgctctcggtcggcctaggctttctgcgcaccgagctgggcctcgacctggggctggagccgaaacggtaccccggctgggtgatcc

SEQ ID NO: 407251 - DNA, 120 bp, Artificial Sequence
  ENSG00000147649_4 (sequence is synthesized)
tggtgggcactggcgcgctcgggctgctgctgctgtttctgctgggctacggctgggccgcggcttgcgccggcgcccgcaaaaagcggaggagcccgccccgcaagcgggaggaggcgg

SEQ ID NO: 407252 - DNA, 120 bp, Artificial Sequence
  ENSG00000147649_5 (sequence is synthesized)
cggccgtgccggccgcggcccccgacgacctggccttgctgaagaatctccggagcgaggaacagaagaagaagaaccggaagaaactgtccgagaagcccaaaccaaatgggcggactg

SEQ ID NO: 407253 - DNA, 120 bp, Artificial Sequence
  ENSG00000147649_6 (sequence is synthesized)
ttgaagtggctgagggtgaagctgttcgaacacctcaaagtgtaacagcaaagcagccaccagagattgacaagaaaaatgaaaagtcaaagaaaaataagaagaaatcaaagtcagatg

SEQ ID NO: 407254 - DNA, 120 bp, Artificial Sequence
  ENSG00000147649_7 (sequence is synthesized)
ctaaagcagtgcaaaacagttcacgccatgatggaaaggaagttgatgaaggagcctgggaaactaaaattagtcacagagagaaacgacagcagcgtaaacgtgataaggtgctgactg

SEQ ID NO: 407255 - DNA, 120 bp, Artificial Sequence
  ENSG00000147649_8 (sequence is synthesized)
attctggttcattggattcaactatccctgggatagaaaataccatcacagttaccaccgagcaacttacaaccgcatcatttcctgttggttccaagaagaataaaggtgattctcatc

SEQ ID NO: 407256 - DNA, 120 bp, Artificial Sequence
  ENSG00000147649_9 (sequence is synthesized)
taaatgttcaagttagcaactttaaatctggaaaaggagattctacacttcaggtttcttcaggattgaatgaaaacctcactgtcaatggaggaggctggaatgaaaagtctgtaaaac

SEQ ID NO: 407257 - DNA, 120 bp, Artificial Sequence
  ENSG00000147649_10 (sequence is synthesized)
tctcctcacagatcagtgcaggtgaggagaagtggaactccgtttcacctgcttctgcaggaaagaggaaaactgagccatctgcctggagtcaagacactggagatgctaatacaaatg

SEQ ID NO: 407258 - DNA, 120 bp, Artificial Sequence
  ENSG00000147649_11 (sequence is synthesized)
gaaaagactggggaaggagttggagtgaccgttcaatattttctggcattgggtctactgctgagccagtttctcagtctaccacttctgattatcagtgggatgttagccgtaatcaac

SEQ ID NO: 407259 - DNA, 120 bp, Artificial Sequence
  ENSG00000147649_12 (sequence is synthesized)
cctatatcgatgatgaatggtctgggttaaatggtctgtcttctgctgatcccaactctgattggaatgcaccagcagaagagtggggcaattgggtagacgaagaaagagcttcacttc

SEQ ID NO: 407260 - DNA, 120 bp, Artificial Sequence
  ENSG00000147649_13 (sequence is synthesized)
taaagtcccaggaaccaattcctgatgatcaaaaggtctcagatgatgataaagaaaagggagagggagctcttccaactgggaaatccaaaaagaaaaaaaagaaaaagaagaagcaag

SEQ ID NO: 407261 - DNA, 120 bp, Artificial Sequence
  ENSG00000147649_14 (sequence is synthesized)
gtgaagataactctactgcacaggacacagaagaattagaaaaagagattagagaagaccttccagtgaatacctctaaaacccgtccaaaacaggaaaaagctttttccttgaagacca

SEQ ID NO: 407262 - DNA, 120 bp, Artificial Sequence
  ENSG00000147649_15 (sequence is synthesized)
taagcactagtgatccagccgaagtactcgtcaaaaatagccagcctatcaagactcttccacctgctacttctaccgagccatctgtaatcttatcaaaaagtgattctgacaagagct

SEQ ID NO: 407263 - DNA, 120 bp, Artificial Sequence
  ENSG00000147649_16 (sequence is synthesized)
cttcccaagtgccgccaatactacaagagacagataaatccaagtcaaataccaagcaaaatagtgtgcctccttcacagaccaagtctgaaactagctgggaatctcccaaacaaataa

SEQ ID NO: 407264 - DNA, 120 bp, Artificial Sequence
  ENSG00000147649_17 (sequence is synthesized)
aaaagaagaaaaaagccagacgagaaacgtgaaattttttttcctgaattggacatgtgtttgcaaacacttgtcttgaagattatgctgtttatgcaataatttgtgaacatgtacaga

SEQ ID NO: 407265 - DNA, 120 bp, Artificial Sequence
  ENSG00000147649_18 (sequence is synthesized)
gttttatataaatttaaaccaatttttaaaacaaaactgcggacaccaccataaaaatggaatcaaaagaaagttaatttatgaaattaagaggtcagcagaatatactcagtgatggaa

SEQ ID NO: 407266 - DNA, 120 bp, Artificial Sequence
  ENSG00000147649_19 (sequence is synthesized)
gacacttgggaaagtctttttaatagaacaagaacgatcttaatttaagaatattatcctggtttaacaacagtgccctgtttacaacagattgtgccctatctcatctgcagccgagga

SEQ ID NO: 407267 - DNA, 120 bp, Artificial Sequence
  ENSG00000147649_20 (sequence is synthesized)
ataaaggattctgattagaaagagggttgcctacagattagtaagcaattccttggatcttatgcacagaacttgtaccatttgaatctgttttatgcttaaatcaaagtgctttgatca

SEQ ID NO: 407268 - DNA, 120 bp, Artificial Sequence
  ENSG00000147649_21 (sequence is synthesized)
aatgcataacctgccatatctttacatatttgttggtagcaatttgtattaaagaaatcacaagtgcaaataaaaagtcatttatcatttgtttaactaaactgtcatggtttagtttac

SEQ ID NO: 407269 - DNA, 120 bp, Artificial Sequence
  ENSG00000147649_22 (sequence is synthesized)
aatttttaaaaagttcttaaaatactgaaaatgcagttgacacttgtgtatggcttatgaagttatttttgatagtcttacattacttgaattgttcaaagtacagtatattttaaatta

SEQ ID NO: 407270 - DNA, 120 bp, Artificial Sequence
  ENSG00000147649_23 (sequence is synthesized)
agaaaagtgaactatatgtatttgttttatacatttaaggcttagactcataaataatgctattgtttatgatttgaaaactttcaggcaaaatccaatttacatttttcccttccctag

SEQ ID NO: 407271 - DNA, 120 bp, Artificial Sequence
  ENSG00000147649_24 (sequence is synthesized)
caattacttttttccagcttcaactcttcttagttactaatactttgttgactttaaaaatgaaatcattcacaaacttttggtatatgatggagaatgaaaaactagagtcagacagct

SEQ ID NO: 407272 - DNA, 120 bp, Artificial Sequence
  ENSG00000147649_25 (sequence is synthesized)
ttaattgacattgtcaacacctccagttatcaggaatacatttttttactgccttaacctgtagtgcgtagaatatgcatcaatttcttgaaggagattcatgtttttataagaattttc

SEQ ID NO: 407273 - DNA, 120 bp, Artificial Sequence
  ENSG00000147649_26 (sequence is synthesized)
atgtaattattgcaattgtggtcaaataaggaacgtttcctgcttgaaattatattgatttaaatgatgtgtgagatgtttcaccattttcaggcactgtgtaattctattgtaataaac

SEQ ID NO: 407274 - DNA, 120 bp, Artificial Sequence
  ENSG00000147649_27 (sequence is synthesized)
tggcaggtatctttgtaactataaatagtgcatgctcagccatgtacactgtaaatagcctttaccaaacgtgtttgacaaggaccataattaacatcacttagtgaattgtgataaaga

SEQ ID NO: 407275 - DNA, 120 bp, Artificial Sequence
  ENSG00000147649_28 (sequence is synthesized)
aaaaaaagccatgatttattcgatgtgattggcttgtttttatgtggcgccaagaacgaacctgtttaacagctgtaaccaatggtactgatctatccatccaatgttgtcattatattt

SEQ ID NO: 407276 - DNA, 120 bp, Artificial Sequence
  ENSG00000147649_29 (sequence is synthesized)
gactgtggttcaacagtattgcgttgtcagactaggaaagctaaacgaacaaaatggttttagttttgctgaagactggccttattaatggacagctttcctaacaagagattattaact

SEQ ID NO: 407277 - DNA, 120 bp, Artificial Sequence
  ENSG00000147649_30 (sequence is synthesized)
tttatcaggtgttaacatctgtttcaggaacatggcagtatgtttacatgtcagaagttttgtttaattctatggtatttctaaattgacttgtttaaataaattcagcaaatggatagc

SEQ ID NO: 407278 - DNA, 120 bp, Artificial Sequence
  ENSG00000147649_31 (sequence is synthesized)
aggattcctaaggtgtcagcattttgtaaaggtaccacaaaggagaagttgatagggaatctaattttagaatgtgccaaatggtctgtgctcaacaatataattgaactctctcaactc

SEQ ID NO: 407279 - DNA, 120 bp, Artificial Sequence
  ENSG00000147649_32 (sequence is synthesized)
tacctcaccatttctttatctcaaaattctgttggctttgtcaaacgttggattttatttctgcagcctagtatctccccattctaccacctatgccagatgttaaagacagcagatgtt

SEQ ID NO: 407280 - DNA, 120 bp, Artificial Sequence
  ENSG00000147649_33 (sequence is synthesized)
ttgaggagaatggcattgtggagatgcagagatgcgttgctaagttgaggtggatccagtatagagatacctctatttcttctttatggctcaagagctaggacttggattttgttttaa

SEQ ID NO: 407281 - DNA, 120 bp, Artificial Sequence
  ENSG00000147649_34 (sequence is synthesized)
aggagactccgtctcaaaaaaaaaaaaaagatggcagctatataaatgataaaattaattacattctctttcacatgcatgaggtgcaaactctgtcacaaagtattttaattacctttt

SEQ ID NO: 407282 - DNA, 120 bp, Artificial Sequence
  ENSG00000147649_35 (sequence is synthesized)
tttcacatgcatgaggtgcaaactctgtcacaaagtattttaattaccttttaccttgtttcatagatctttatgtgacataaaaacagtttctggcacggtggctcacgcctgtaatcc

SEQ ID NO: 407283 - DNA, 66 bp, Artificial Sequence
  ENSG00000147649_36 (sequence is synthesized)
aaagagcgagactcaatctcaaaaaaaaaaaagtttctggcacctgaacaggaactggtttccatc

SEQ ID NO: 407284 - DNA, 120 bp, Artificial Sequence
  ENSG00000147649_37 (sequence is synthesized)
aaaaaagtttctggcacctgaacaggaactggtttccatcatcaactcagaaagcactaaaatctaggtggtgattcagggaggagcaggggaagacagcctcctatggtggcatgaata

SEQ ID NO: 407285 - DNA, 120 bp, Artificial Sequence
  ENSG00000147649_38 (sequence is synthesized)
agatgcttccagaactagtagggaaataactaacctcttcaggctttatcaggcctggaggggaaccttgctcatgttagcaagaaaggtatcctagagaagccactcaaaaggctccct

SEQ ID NO: 407286 - DNA, 120 bp, Artificial Sequence
  ENSG00000147649_39 (sequence is synthesized)
aatccagcctgtctccacatacatactgaaaattcttccctactctgaggcagggtgtagtggtttaggggtttctccagactggaatcctacctatctgtaccgacaattgagcaaaca

SEQ ID NO: 407287 - DNA, 120 bp, Artificial Sequence
  ENSG00000147649_40 (sequence is synthesized)
acagttgagagagtccaaaaaaaaaagtattaaaatgtgattgatgtaatttaccatgtttactttatgcatgcattttattggggaggggaggtcagaataattcacccaaatctagtg

SEQ ID NO: 407288 - DNA, 120 bp, Artificial Sequence
  ENSG00000147649_41 (sequence is synthesized)
gtcttatttcataggctaatctggtttatatttgcattaaagatactggagggcaatatttacagagtttagtttttcttaattaaaaacagtcctctattaatatagtgtgaaatatct

SEQ ID NO: 407289 - DNA, 120 bp, Artificial Sequence
  ENSG00000147649_42 (sequence is synthesized)
ttcaaaatttagagtttaggtttaagatgtctactagatatctttaagattttcctgtaaactcactgcacaaactggaattactttccaaaagacttagggaatgcaaatatgttactc

SEQ ID NO: 407290 - DNA, 120 bp, Artificial Sequence
  ENSG00000147649_43 (sequence is synthesized)
ataagatgcattgagtattgtaaataaaacaaaccatttttgatttgtttaaattgctcgttacagttctcttgtggggagggactttgtcagtcattttgcatcttaagctagactaaa

SEQ ID NO: 407291 - DNA, 120 bp, Artificial Sequence
  ENSG00000147649_44 (sequence is synthesized)
ctttttgttgttgttttcctaaaaccataggtgcaagctttgccgctgggaagtcatattgaattaagcacttttgaaaatgtcactgtttgtgacacacaatgttctctacagaaaact

SEQ ID NO: 407292 - DNA, 120 bp, Artificial Sequence
  ENSG00000147649_45 (sequence is synthesized)
tcttctatcttatgtcattttagcagtagatgtagctgcctgccaccaggtgcaatatgtcatttgcatcagccttttcagttaaggaaattaaaacttggcatgcattagttcatatgt

SEQ ID NO: 407293 - DNA, 120 bp, Artificial Sequence
  ENSG00000147649_46 (sequence is synthesized)
aggaaattaaaacttggcatgcattagttcatatgtatgaggttggctgtgtccccaaacagcaattgcttgtacaagatagaagtttgcttctcagctgggcatggtggctcatgcctg

SEQ ID NO: 407294 - DNA, 120 bp, Artificial Sequence
  ENSG00000147649_47 (sequence is synthesized)
taatccaagctctttgggaggccaacgcgggaggattgtttgagcccaggagtttgaaaccatcctgagcaatagagagacccccatctcgacaaaaaaaaaaaaaaaaaattagaaaca

SEQ ID NO: 407295 - DNA, 120 bp, Artificial Sequence
  ENSG00000147649_48 (sequence is synthesized)
gaaggcaatccagagcccatatgacattatgcagggtcagggatccgggttctttctatattgttcctccccattctcaacctgtagctttttttttttttcttttaatgagatagggtc

SEQ ID NO: 407296 - DNA, 88 bp, Artificial Sequence
  ENSG00000147649_49 (sequence is synthesized)
ttgcccaggctggagtgcagtggcacacttctggctcacttcagcctggaactcccgggctcgagctatattctcccactttatacac

SEQ ID NO: 407297 - DNA, 120 bp, Artificial Sequence
  ENSG00000147649_50 (sequence is synthesized)
aggtacacaccaccatgcctggctaaattttttttttttttttttggtagagatgaggtcattgctatgttgcccaggctggccttgaagtccagggcttaagtgatcctcctgccttgg

SEQ ID NO: 407298 - DNA, 120 bp, Artificial Sequence
  ENSG00000147649_51 (sequence is synthesized)
gtgtgagccaccacacctggccaacatgtggctttcagttcttacttgaagacagctgctctagctagaaacttcctatcggcatctgagccagctggtagagggcattacctcccccac

SEQ ID NO: 407299 - DNA, 120 bp, Artificial Sequence
  ENSG00000147649_52 (sequence is synthesized)
ggtagagggcattacctcccccacccccaagaacacttcttggaagttacacacaatacataaacttcaatttcaaacagttgcttggtcccactagccatgaagctggatgggacgtaa

SEQ ID NO: 407300 - DNA, 120 bp, Artificial Sequence
  ENSG00000147649_53 (sequence is synthesized)
tattctatctgggttgtcatgggccaaattaacattttgagattctgttaggaagatgagaattggataatgggcacctctaacagtgtctgtcagagttgacatacattgtgtatctcc

SEQ ID NO: 407301 - DNA, 120 bp, Artificial Sequence
  ENSG00000147649_54 (sequence is synthesized)
tgcaccaaagcatttttgagatcaagtgttcttccagctgagcagaaatttggaaggctattcagtgctgcttagtgtagcagctaataatgttccaacttctatatgatagtttgcttt

SEQ ID NO: 407302 - DNA, 120 bp, Artificial Sequence
  ENSG00000147649_55 (sequence is synthesized)
ttgttttttgtttttttctagagacagagtctcgttgcccaggctggtctccaattcctgggttcaagcaatcctcctgactcagcctcctaaatgctgggattacaggcatgaaccact

SEQ ID NO: 407303 - DNA, 120 bp, Artificial Sequence
  ENSG00000147649_56 (sequence is synthesized)
gtgcccagtctatatataatagattttagaagaaatttctgccactcagtgactgctttaaattctagagacagaggctgagagaaacttagtagcctgcctgcgcatactgcaagtaca

SEQ ID NO: 407304 - DNA, 120 bp, Artificial Sequence
  ENSG00000147649_57 (sequence is synthesized)
gactatataacaagttgaaagagaatcaccctggtatataatattttaaaacatgaaaaaggcattactattgttctggtctaagtactctaacaggacgatgatttctaaccctagcat

SEQ ID NO: 407305 - DNA, 120 bp, Artificial Sequence
  ENSG00000147649_58 (sequence is synthesized)
catgacatgtatatagtgtgttgtaagacatttgccagctaatagttacagtactgaagcttgtgaatacgttaattgagaaaactttaagcaggttcaaagttatcccatgatagtggc

SEQ ID NO: 407306 - DNA, 120 bp, Artificial Sequence
  ENSG00000147649_59 (sequence is synthesized)
attcttatttgtatatatgtgctttccttttttatttgtatcaaggcatttaaaatgaatatatgtaacatgtacctaagttttaaaagcataataaaatgaacacatctgaaaccacca

SEQ ID NO: 407307 - DNA, 120 bp, Artificial Sequence
  ENSG00000147649_60 (sequence is synthesized)
ttagaaattccatttaaccatatgatatgcttagcagaaattgaataaagattgttaccttcatgttatttttttttctggctcttaaaatgtgcttgggagacagaacaataacttaaa

SEQ ID NO: 407308 - DNA, 120 bp, Artificial Sequence
  ENSG00000147649_61 (sequence is synthesized)
attacagcttagttgaacataaggaatttttagtttttgccttttaatttatggcaaaaatgatagacgcctaattcacactgttaaattttagatggtctgtcttctgctgatcccaac

SEQ ID NO: 407309 - DNA, 120 bp, Artificial Sequence
  ENSG00000147650_0 (sequence is synthesized)
ggtggctcggcggcggcggcggcggcggcggcggcgtcggcgtcgtctacctccagcttctcctccctcctcctccgtctcctcctctctctctccatctgctgtggttatggcctgtcg

SEQ ID NO: 407310 - DNA, 120 bp, Artificial Sequence
  ENSG00000147650_1 (sequence is synthesized)
ctggagcacaaaagagtctccgcggtggaggtctgcgttgctcttgcttttcctcgctggggtgtacggaaatggtgctcttgcagaacattctgaaaatgtgcatatttcaggagtgtc

SEQ ID NO: 407311 - DNA, 120 bp, Artificial Sequence
  ENSG00000147650_2 (sequence is synthesized)
aactgcttgtggagagactccagagcaaatacgagcaccaagtggcataatcacaagcccaggctggccttctgaatatcctgcaaaaatcaactgtagctggttcataagggcaaaccc

SEQ ID NO: 407312 - DNA, 120 bp, Artificial Sequence
  ENSG00000147650_3 (sequence is synthesized)
aggcgaaatcattactataagttttcaggattttgatattcaaggatccagaaggtgcaatttggactggttgacaatagaaacatacaagaatattgaaagttacagagcttgtggttc

SEQ ID NO: 407313 - DNA, 120 bp, Artificial Sequence
  ENSG00000147650_4 (sequence is synthesized)
cacaattccacctccgtatatctcttcacaagaccacatctggattaggtttcattcggatgacaacatctctagaaagggtttcagactggcatatttttcagggaaatctgaggaacc

SEQ ID NO: 407314 - DNA, 120 bp, Artificial Sequence
  ENSG00000147650_5 (sequence is synthesized)
aaattgtgcttgtgatcagtttcgttgtggtaatggaaagtgtataccagaagcctggaaatgtaataacatggatgaatgtggagatagttccgatgaagagatctgtgccaaagaagc

SEQ ID NO: 407315 - DNA, 120 bp, Artificial Sequence
  ENSG00000147650_6 (sequence is synthesized)
aaatcctccaactgctgctgcttttcaaccctgtgcttacaaccagttccagtgtttatcccgttttaccaaagtttacacttgcctccccgaatctttaaaatgtgatgggaacattga

SEQ ID NO: 407316 - DNA, 120 bp, Artificial Sequence
  ENSG00000147650_7 (sequence is synthesized)
ctgccttgacctaggagatgagatagactgtgatgtgccaacatgtgggcaatggctaaaatatttttatggtacttttaattctcccaattatccagacttttatcctcctggaagcaa

SEQ ID NO: 407317 - DNA, 120 bp, Artificial Sequence
  ENSG00000147650_8 (sequence is synthesized)
ttgcacctggttaatagacactggtgatcaccgtaaagtcattttacgcttcactgactttaaacttgatggtactggttatggtgattatgtcaaaatatatgatggattagaggagaa

SEQ ID NO: 407318 - DNA, 120 bp, Artificial Sequence
  ENSG00000147650_9 (sequence is synthesized)
tccacacaagcttttgcgtgtgttgacagcttttgattctcatgcacctcttacagttgtttcttcttctggacagataagggtacatttttgtgctgataaagtgaatgctgcaagggg

SEQ ID NO: 407319 - DNA, 120 bp, Artificial Sequence
  ENSG00000147650_10 (sequence is synthesized)
atttaatgctacttaccaagtagatgggttctgtttgccatgggaaataccctgtggaggtaactgggggtgttatactgagcagcagcgttgtgatgggtattggcattgcccaaatgg

SEQ ID NO: 407320 - DNA, 120 bp, Artificial Sequence
  ENSG00000147650_11 (sequence is synthesized)
aagggatgaaaccaattgtaccatgtgccagaaggaagaatttccatgttcccgaaatggtgtctgttatcctcgttctgatcgctgcaactaccagaatcattgcccaaatggctcaga

SEQ ID NO: 407321 - DNA, 120 bp, Artificial Sequence
  ENSG00000147650_12 (sequence is synthesized)
tgaaaaaaactgctttttttgccaaccaggaaatttccattgtaaaaacaatcgttgtgtgtttgaaagttgggtgtgtgattctcaagatgactgtggtgatggcagcgatgaagaaaa

SEQ ID NO: 407322 - DNA, 120 bp, Artificial Sequence
  ENSG00000147650_13 (sequence is synthesized)
ttgcccagtaatcgtgcctacaagagtcatcactgctgccgtcatagggagcctcatctgtggcctgttactcgtcatagcattgggatgtacttgtaagctttattctctgagaatgtt

SEQ ID NO: 407323 - DNA, 120 bp, Artificial Sequence
  ENSG00000147650_14 (sequence is synthesized)
tgaaagaagatcatttgaaacacagttgtcaagagtggaagcagaattgttaagaagagaagctcctccctcgtatggacaattgattgctcagggtttaattccaccagttgaagattt

SEQ ID NO: 407324 - DNA, 120 bp, Artificial Sequence
  ENSG00000147650_15 (sequence is synthesized)
tcctgtttgttcacctaatcaggcttctgttttggaaaatctgaggctagcggtacgatctcagcttggatttacttcagtcaggcttcctatggcaggcagatcaagcaacatttggaa

SEQ ID NO: 407325 - DNA, 120 bp, Artificial Sequence
  ENSG00000147650_16 (sequence is synthesized)
ccgtatttttaattttgcaagatcacgtcattctgggtcattggctttggtctcagcagatggagatgaggttgtccctagtcagagtaccagtagagaacctgagagaaatcatactca

SEQ ID NO: 407326 - DNA, 120 bp, Artificial Sequence
  ENSG00000147650_17 (sequence is synthesized)
cagacacagaaaatgagagaagagatatggcaggagcatctggtggggttgcagctcctttgcctcaaaaagtccctcccacaacggcagtagaagcgacagtaggagcatgtgcaagtt

SEQ ID NO: 407327 - DNA, 120 bp, Artificial Sequence
  ENSG00000147650_18 (sequence is synthesized)
cctcaactcagagtacccgaggtggtcatgcagataatggaagggatgtgacaagtgtggaacccccaagtgtgagtccagcacgtcaccagcttacaagtgcactcagtcgtatgactc

SEQ ID NO: 407328 - DNA, 120 bp, Artificial Sequence
  ENSG00000147650_19 (sequence is synthesized)
aggggctacgctgggtacgttttacattaggacgatcaagttccctaagtcagaaccagagtcctttgagacaacttgataatggggtaagtggaagagaagatgatgatgatgttgaaa

SEQ ID NO: 407329 - DNA, 120 bp, Artificial Sequence
  ENSG00000147650_20 (sequence is synthesized)
tgctaattccaatttctgatggatcttcagactttgatgtgaatgactgctccagacctcttcttgatcttgcctcagatcaaggacaagggcttagacaaccatataatgcaacaaatc

SEQ ID NO: 407330 - DNA, 120 bp, Artificial Sequence
  ENSG00000147650_21 (sequence is synthesized)
ctggagtaaggccaagtaatcgagatggcccctgtgagcgctgtggtattgtccacactgcccagataccagacacttgcttagaagtaacactgaaaaacgaaacgagtgatgatgagg

SEQ ID NO: 407331 - DNA, 120 bp, Artificial Sequence
  ENSG00000147650_22 (sequence is synthesized)
ctttgttactttgttaggtacgaatcacataagggagattgtatacaagttggagcaatatccatttattattttgtaactttacagttaaactagttttagtttaaaaagaaaaaatgc

SEQ ID NO: 407332 - DNA, 120 bp, Artificial Sequence
  ENSG00000147650_23 (sequence is synthesized)
agggtgatttcttattattatatgttagcctgcatggttaaattcgacaacttgtaactctatgaacttagagtttactattttagcagctaaaaatgcatcacatattcatattgttca

SEQ ID NO: 407333 - DNA, 120 bp, Artificial Sequence
  ENSG00000147650_24 (sequence is synthesized)
ataatgtcctttcatttgtttctgattgttttcatcctgatactgtagttcactgtagaaatgtggctgctgaaactcatttgattgtcatttttatctatcctatgttaaatggtttgt

SEQ ID NO: 407334 - DNA, 120 bp, Artificial Sequence
  ENSG00000147650_25 (sequence is synthesized)
ttttacaaaataataccttattttaattgaaacgtttatgcttttgccaacacatcttgtaacttaatatactagatgttaaggttgttaatgtacaaaaaaaaaacccttatactcacc

SEQ ID NO: 407335 - DNA, 120 bp, Artificial Sequence
  ENSG00000147650_26 (sequence is synthesized)
tgcgttttcatttgtttgacatttgtctattattggatttcattatcatatgaacttgtcagtgggaaacaaactgtctaaaaatttttctcttacgtttaacatacaatcatgtgaaat

SEQ ID NO: 407336 - DNA, 120 bp, Artificial Sequence
  ENSG00000147650_27 (sequence is synthesized)
ttaggcagagttcgataaattactggcaaaaacaaaactcttttataaagattttctaatgttgactttaatactctaacatggtacaaaccaaatggtaaaatcccaagtcatttcttt

SEQ ID NO: 407337 - DNA, 120 bp, Artificial Sequence
  ENSG00000147650_28 (sequence is synthesized)
tttcatctctatttagcaacagaattaagtggatgaagatattctactatgcattaaatcttgaactttataaaacatgtacaaaaattgtacaagataagttccacctggtaatgtctt

SEQ ID NO: 407338 - DNA, 120 bp, Artificial Sequence
  ENSG00000147650_29 (sequence is synthesized)
tccctaatacagggttgcgcttgcattggaccctagggatttgcactaaaattatatcaaggtctcagatgagcttagtgcacaagcactatcactttaaatactattatttgctaccac

SEQ ID NO: 407339 - DNA, 120 bp, Artificial Sequence
  ENSG00000147650_30 (sequence is synthesized)
agcaactatatatttccatagcttttggctgggggcgggggacatttttattacaacttgaaattgctttgctggtttcatatttatttgttgtatttaaaaaatacattgttgtaagag

SEQ ID NO: 407340 - DNA, 120 bp, Artificial Sequence
  ENSG00000147650_31 (sequence is synthesized)
tgattttttcaatatattttattcctgggggggatcatgctacactctcaaaagaaaattaagaaatcattcagatcatcccccctttttaagtagtgtgaattgcaaaacccaacatat

SEQ ID NO: 407341 - DNA, 120 bp, Artificial Sequence
  ENSG00000147650_32 (sequence is synthesized)
tttttttactgtcagttgcggtttatttattctttaactgtctgttttagtagtttaatgattatgaaaaatgtatctgtgtgtgatttgctatttattaaattttaagtactttgctga

SEQ ID NO: 407342 - DNA, 120 bp, Artificial Sequence
  ENSG00000147650_33 (sequence is synthesized)
atgtcattttaaagcatgtttgaagtcttgtgtatttgtctgtgttaatgctgtcaggaggaactgactaagatgttttaatatgtatcaaaaattaaaatgattttttttattgccttg

SEQ ID NO: 407343 - DNA, 120 bp, Artificial Sequence
  ENSG00000147650_34 (sequence is synthesized)
attccattttcatttattattacttaacatgcagtaatataaaaagaaggcttttcaggagatgtaataaagaacagctattagctattggtgtcatcttaagagtaagagtaacagccc

SEQ ID NO: 407344 - DNA, 120 bp, Artificial Sequence
  ENSG00000147650_35 (sequence is synthesized)
atctggtatgtgttttgagtattttctaagggtggtaatgtatttgcattgaatcatctatattcttctaagctactttttaacaaaatatagacatttgcaaaatagcctattagggtc

SEQ ID NO: 407345 - DNA, 120 bp, Artificial Sequence
  ENSG00000147650_36 (sequence is synthesized)
aagactaacctttggcagtggaacaaacaaataaacaaaactcattaattcacttggatatctagctcttaacctttgtctcattagtagagccttctacctaaatgagttaaaacacaa

SEQ ID NO: 407346 - DNA, 120 bp, Artificial Sequence
  ENSG00000147650_37 (sequence is synthesized)
tttgtcatgcctgtctgtatatgtgtatgtatgtataaaacttgaaacaaactgataatggagaaatactatatctagaaaaatctttgtttataacttcgaaacaaaagaacatttgtt

SEQ ID NO: 407347 - DNA, 120 bp, Artificial Sequence
  ENSG00000147650_38 (sequence is synthesized)
aagaatacaaatgaaaggcattcctaggggaaatagctgtaagtttaagattctaagaatgaatgtgacatataaataaggaaggttaagattaaattttaaaacatttagcaaattact

SEQ ID NO: 407348 - DNA, 120 bp, Artificial Sequence
  ENSG00000147650_39 (sequence is synthesized)
tgcagagaaaaacagtacgggaataagattgtaaagaatatatttagtagaactagatactgcttgcttaggaaaattctatcaaggccattaggaaaaaaatatttacctacaggggaa

SEQ ID NO: 407349 - DNA, 120 bp, Artificial Sequence
  ENSG00000147650_40 (sequence is synthesized)
aaaaaaatagcccgaatgaagaactgcagttggaacaaaacacaaataagaatgtcatttccatcacagagacagtgtagcacaaaggcaccttcaacatgttttcatgtgtaacattgt

SEQ ID NO: 407350 - DNA, 120 bp, Artificial Sequence
  ENSG00000147650_41 (sequence is synthesized)
atgggtaggaggcatagaattttagatttagaagagactttggagatcataaactcaaattccttcattttatgtttttaaaataagacttatacatttagcctactttctcatcttttt

SEQ ID NO: 407351 - DNA, 120 bp, Artificial Sequence
  ENSG00000147650_42 (sequence is synthesized)
tcatcttccttttttgtatttattaactgatgaggaaaccaatctctcttgagaagcataactgtcatctatctcctttttttggtggaaaccacaaacaagggccatagtttgttttcc

SEQ ID NO: 407352 - DNA, 120 bp, Artificial Sequence
  ENSG00000147650_43 (sequence is synthesized)
ttttattttcctctaccctacattacctcttctggaaccccagagcttggcacatacaaaagctgttgttctcctcctccatgcagtgtttttctcttgcctgattgagtggtagaatgc

SEQ ID NO: 407353 - DNA, 120 bp, Artificial Sequence
  ENSG00000147650_44 (sequence is synthesized)
accattaaggttatctttctgtaacagggtcagtgtttaaatgtaaataatatacctattttctgttacttgtagtgtgactaagtatgtttacaaaataacatttttaccacatattgg

SEQ ID NO: 407354 - DNA, 120 bp, Artificial Sequence
  ENSG00000147650_45 (sequence is synthesized)
gagttttttagcataaaactagaatttatagagaccttcaccttttaacctaaaaatttaacttacaacttatagctcagttttgtaaaacttgaaaatcttaccagcacagaggagatt

SEQ ID NO: 407355 - DNA, 120 bp, Artificial Sequence
  ENSG00000147650_46 (sequence is synthesized)
acatgaaatactgccatctggttttgataatgtattgcatccttgagatttcatgaggttaagatacactaaaaaccaagcacaatactgaaatgcagaataaaattgaagtgagcccta

SEQ ID NO: 407356 - DNA, 120 bp, Artificial Sequence
  ENSG00000147650_47 (sequence is synthesized)
cagctaaaggaaaatttcctgaattttagaagggagcaatgaatttcgatgtatacagatcagaaggtgattttagtaattgttcagattctttactgaagtcattatcatggtaatacc

SEQ ID NO: 407357 - DNA, 120 bp, Artificial Sequence
  ENSG00000147650_48 (sequence is synthesized)
ataactttaaaaagatgacacacctgcatatacacaaagacaagttttacatatgattatcattgcataatcttaaatgattcaaaagaatcatatgcataattaaatgtagctctttta

SEQ ID NO: 407358 - DNA, 120 bp, Artificial Sequence
  ENSG00000147650_49 (sequence is synthesized)
gacatacaaatgagtcagtattaggaaatattaaattaacttaccatgtaaacaagtcaaaagaaaaagtatatgattatctagtgtacacagatgctttgaagcatcttggtaaaaaag

SEQ ID NO: 407359 - DNA, 120 bp, Artificial Sequence
  ENSG00000147650_50 (sequence is synthesized)
aaaatcagcattcattcctgaatttaaaataaaaattttaaattcttagtaaaatggaattagaaacatgattttttaaaatctggatagaagagggaaactaaagttacggagtaaaaa

SEQ ID NO: 407360 - DNA, 120 bp, Artificial Sequence
  ENSG00000147650_51 (sequence is synthesized)
aatcaacaaaggccaccttatccatggggaagagaggattgaataccagcaccctgcttgaagccaaggactagggacgggcaattttgctccagacaggaggctgaaaaatcttccacc

SEQ ID NO: 407361 - DNA, 120 bp, Artificial Sequence
  ENSG00000147650_52 (sequence is synthesized)
aaccacagcctgaatttatatggggctgagagcttagagagctgagagggcataacctaacaaacatgaataactatgtcacctgctgactccatgaaaggatctgtaatactctgaacc

SEQ ID NO: 407362 - DNA, 120 bp, Artificial Sequence
  ENSG00000147650_53 (sequence is synthesized)
atcatttaagacttgttctggaatgtagacccaagtaggggaacatagaagaagagaggattaaaaaaaagagagaaaaccaaaaaacttccataaaataaacctgtaaaccaaaattcc

SEQ ID NO: 407363 - DNA, 120 bp, Artificial Sequence
  ENSG00000147650_54 (sequence is synthesized)
agaatgtgtgaaaaaattgaatgctgagaaaaacagccaaacaaaattaagttggaactcaaatttactccaggcattttaagatgtattctgtcaggaattatttcttaactttcttta

SEQ ID NO: 407364 - DNA, 120 bp, Artificial Sequence
  ENSG00000147650_55 (sequence is synthesized)
tgccacggccacctagtattctggtaaaacctatgtattctttcccagaataatgtgtttaaattcattaaaaaaaatacatagcattacaaagggaaccaattatgttaaagtacagct

SEQ ID NO: 407365 - DNA, 120 bp, Artificial Sequence
  ENSG00000147650_56 (sequence is synthesized)
atgttaaagtacagctatcagatattttttaatatttgtaatgtaatatatgcttatttatgaacacattagcaaaatcaagtggttaatttcaaagaaaaaattttacgtgtaaatagt

SEQ ID NO: 407366 - DNA, 120 bp, Artificial Sequence
  ENSG00000147650_57 (sequence is synthesized)
aaaaactgaaatgtaacataaaaatatctctaattttgaatagtggtggagtggccagtgctataaatactgtcatggtttgttgtttataagtgtaggaaatgctaaattttagtaaaa

SEQ ID NO: 407367 - DNA, 120 bp, Artificial Sequence
  ENSG00000147650_58 (sequence is synthesized)
ggttagtgaaaataaagctttaaattgtttctaccctatttgtgatttttgaggggacaggagaaacaccgaatattcttacttggactttgttagaaaaaaagtgtgtttcagcatttc

SEQ ID NO: 407368 - DNA, 120 bp, Artificial Sequence
  ENSG00000147650_59 (sequence is synthesized)
agttaaaatatcaaaaggtagccactgattaaaaataggagtaatattgagcagttaacagaggaaaaggaactttaaaaatatattcaaaaaagacaggaagctagatgtggtggctca

SEQ ID NO: 407369 - DNA, 88 bp, Artificial Sequence
  ENSG00000147650_60 (sequence is synthesized)
tcctagctactcaggaggctgaggcatgataactgcttgaacccaggaggtggaggttacaggcaacagagtgaaaccctgtctcaaa

SEQ ID NO: 407370 - DNA, 120 bp, Artificial Sequence
  ENSG00000147650_61 (sequence is synthesized)
aaaaaaaaaaaaggaaagaaggaaaatgagaactctctcccaagtagaaaggttgtaacacatctaaaacaaaactaatacagaatgtctaaaaacaaggagatgggccagatgctgtgg

SEQ ID NO: 407371 - DNA, 120 bp, Artificial Sequence
  ENSG00000147650_62 (sequence is synthesized)
ctaaaaacaaggagatgggccagatgctgtggctcgtgcctgtaatcctagcattttggaaggccaaggtaggctcaggaattcgacaccagcctgggcaaggtggtgaaaccctgtctt

SEQ ID NO: 407372 - DNA, 75 bp, Artificial Sequence
  ENSG00000147650_63 (sequence is synthesized)
aaaccctgtctttacaaaaaatacaaaaaactagctgggcatgatggcacgtcggagcccaggaggttgaggctg

SEQ ID NO: 407373 - DNA, 120 bp, Artificial Sequence
  ENSG00000147650_64 (sequence is synthesized)
aatgcaccactgcactccagcttgggtggaagaatgagacttagtcttaaaaataaacaaaaacaaaacgagatagaaaaggttagttttggagctactcatcaagagaaagctagtgta

SEQ ID NO: 407374 - DNA, 120 bp, Artificial Sequence
  ENSG00000147650_65 (sequence is synthesized)
ggaagattaacatccattgtaattgagcttaaggcacaaaatactagtaacaattggggtattctaccaggaaaataaaccagcagtaaatttcatttacttaattacatagcctaaaat

SEQ ID NO: 407375 - DNA, 120 bp, Artificial Sequence
  ENSG00000147650_66 (sequence is synthesized)
acatgcaaagcaaaatgtggagaattgcccggcaaatttgaccaatccacagttgcagtgggagatttttaacacacctttaatacttatttcaacaaagaatacacattcttttcaaag

SEQ ID NO: 407376 - DNA, 120 bp, Artificial Sequence
  ENSG00000147650_67 (sequence is synthesized)
acatgtggaacatttataaaaattgattatgtttcacatcacaaaggaactcttaatacatttcaaagactgtacatcattcagattgtgttttcttaccacaatgcaattaaaataaaa

SEQ ID NO: 407377 - DNA, 120 bp, Artificial Sequence
  ENSG00000147650_68 (sequence is synthesized)
gaaaaaaataaacctgtatgtttagaaatatattcctaaataactcctgaattaaagaggaaatcacaatgggaccaaatattttttaaataaccatagtgaaagtaatacatattaaaa

SEQ ID NO: 407378 - DNA, 120 bp, Artificial Sequence
  ENSG00000147650_69 (sequence is synthesized)
ctgttagaatacattgaaagaatacttagaaaagtttacaactttaatgcattgatttaaaaattagaaaataaataagctcagcatttaactcaagagttaaggaaaagaattagaggg

SEQ ID NO: 407379 - DNA, 120 bp, Artificial Sequence
  ENSG00000147650_70 (sequence is synthesized)
taaattttaaagtagcagtaaagaccaggaaaatacgcaataaaattcaataaaacaaaaagctgactttctgaaaaactcaggaaaatagataaaactcaaagcaaaactgaagaaaaa

SEQ ID NO: 407380 - DNA, 120 bp, Artificial Sequence
  ENSG00000147650_71 (sequence is synthesized)
ttttcagtttgatgcaggataaatgggacctggcagaagttaatggcagagatgtccctgtggagacaatgaccttcagtcccaggagaattacaaataatagatttaacaactttttac

SEQ ID NO: 407381 - DNA, 120 bp, Artificial Sequence
  ENSG00000147650_72 (sequence is synthesized)
ggagaattacaaataatagatttaacaactttttacgtaacagatggctaataggtggcacacagatgcacagtatcgtaataaccattactgcatcttttcttttttttcctttttttt

SEQ ID NO: 407382 - DNA, 120 bp, Artificial Sequence
  ENSG00000147650_73 (sequence is synthesized)
gtgtgagccacggcgcccgaccactgcatctttggccaagtgtaaatggccagaaaactttttaccacattgcaacaaaagagcacaatgaagagtcaaagatcccagctgggcgcagtg

SEQ ID NO: 407383 - DNA, 120 bp, Artificial Sequence
  ENSG00000147650_74 (sequence is synthesized)
gcttcaacgtatattcagtaaatacagtattcttaggagtttttaaatcttgtattatttctccctttaccttttacagggattttcatttattaaaactcagtgatctaggcttctact

SEQ ID NO: 407384 - DNA, 120 bp, Artificial Sequence
  ENSG00000147650_75 (sequence is synthesized)
agcataaagccctatgaagacagactgcctgcgtcagctttgtattcccactgtagggataatacatatattcagtaaatgtttgtcaaatgactaagctttaaaatgatcaaatatgcc

SEQ ID NO: 407385 - DNA, 120 bp, Artificial Sequence
  ENSG00000147654_0 (sequence is synthesized)
aggcgtgcagcattcgccatgctccgctcacgcgtgggagactgggctgtggggtaccggcccggaaagcacgcagcctccaaagccgccttcctcagggaaatttgcgtgaccttactg

SEQ ID NO: 407386 - DNA, 120 bp, Artificial Sequence
  ENSG00000147654_1 (sequence is synthesized)
ccctccgtctacaggccttgtacctctccaggccgatttttccacaatttaaatctcagttcacctggtatccagctccagcaacttagagcgtttcacgtcacgccgggcgccaggcgt

SEQ ID NO: 407387 - DNA, 120 bp, Artificial Sequence
  ENSG00000147654_2 (sequence is synthesized)
cggcttgtataacctgaaaacgctcctgtttttctcatctgtgcagtgggttttgattcccaccatggccatcacccagtttcggttatttaaattttgtacctgcctagcaacagtatt

SEQ ID NO: 407388 - DNA, 120 bp, Artificial Sequence
  ENSG00000147654_3 (sequence is synthesized)
ctcattcctaaagagattaatatgcagatctggcagaggacggaaattaagtggagaccaaataactttgccaactacagttgattattcatcagttcctaagcagacagatgttgaaga

SEQ ID NO: 407389 - DNA, 120 bp, Artificial Sequence
  ENSG00000147654_4 (sequence is synthesized)
gtggacttcctgggatgaagatgcacccaccagtgtaaagatcgaaggagggaatgggaatgtggcaacacaacaaaattctttggaacaactggaacctgactattttaaggacatgac

SEQ ID NO: 407390 - DNA, 120 bp, Artificial Sequence
  ENSG00000147654_5 (sequence is synthesized)
accaactattaggaaaactcagaaaattgttattaagaagagagaaccattgaattttggcatcccagatgggagcacaggtttctctagtagattagcagctacacaagatctgccttt

SEQ ID NO: 407391 - DNA, 120 bp, Artificial Sequence
  ENSG00000147654_6 (sequence is synthesized)
tattcatcagtcttctgaattaggtgacttagatacctggcaggaaaataccaatgcatgggaagaagaagaagatgcagcctggcaagcagaagaagttctgagacagcagaaactagc

SEQ ID NO: 407392 - DNA, 120 bp, Artificial Sequence
  ENSG00000147654_7 (sequence is synthesized)
agacagagaaaagagagcagccgaacaacaaaggaagaaaatggaaaaggaagcacaacggctaatgaagaaggaacaaaacaaaattggtgtgaaactttcataacacatgttcaaatt

SEQ ID NO: 407393 - DNA, 120 bp, Artificial Sequence
  ENSG00000147654_8 (sequence is synthesized)
ttatcatgccagtaggagaaatctcagctccacaacccaagcaacatttgtatggatttaagagtattttaagaagacatactgcttgattttaatacattgatcaggccatccaggaca

SEQ ID NO: 407394 - DNA, 120 bp, Artificial Sequence
  ENSG00000147654_9 (sequence is synthesized)
tttgtttgctgtacagaaagtatcacaaatggaatatatcagtacctctcaagctagtgtttctagctaaataaatgggtgtatataattttatggtggaaaagaactgtactgtctgtt

SEQ ID NO: 407395 - DNA, 120 bp, Artificial Sequence
  ENSG00000147654_10 (sequence is synthesized)
atgatttccttcaatgtgcataatgataaaataaataattttaatattcttttgtttccatggttacctgacctaaattagataaattgtagggctttagctttcttatttttgtcaaaa

SEQ ID NO: 407396 - DNA, 120 bp, Artificial Sequence
  ENSG00000147654_11 (sequence is synthesized)
gttggtgttgacatacattccctctaatttgaactggtattgtttacgtttgatacaacattaaggaatttgatgattttcatttcatgaaaatgacattaaatgcaataattttactta

SEQ ID NO: 407397 - DNA, 120 bp, Artificial Sequence
  ENSG00000147654_12 (sequence is synthesized)
tcataaacattttgtacatcattattttcttttggattagtgttgtcatacatgtaatttatatcacatgtataaacattgaaaatcaactaaaatgacatttgttctacattataactt

SEQ ID NO: 407398 - DNA, 120 bp, Artificial Sequence
  ENSG00000147654_13 (sequence is synthesized)
gtgagtttcaagaactagtattagtagttttttcctttcattatagattgtaagatgttgtggtatctttgagtgccttagttcttccttcctcccaaaagccattaatttacaaatgct

SEQ ID NO: 407399 - DNA, 120 bp, Artificial Sequence
  ENSG00000147654_14 (sequence is synthesized)
taaagccatcaggtcaaatatttcaaagcctttagatgatttctgtactagctttagatgtctgacgttatgtaggttacctgtgttcttggctaggaaaacattattgattcattaaat

SEQ ID NO: 407400 - DNA, 120 bp, Artificial Sequence
  ENSG00000147654_15 (sequence is synthesized)
cataaaggtgggaataataatcttttatttatgatgttgattggctccaaaatagtcttaaggaaataaatactgggtctgtaggggaaaagtagacttcatagtttaaaatcccattaa

SEQ ID NO: 407401 - DNA, 120 bp, Artificial Sequence
  ENSG00000147654_16 (sequence is synthesized)
ccttttcaccgcagttgaaatgcatccagcctgattttcctatcattttggaatttttaaggatttttactttcttaagttactgcctagaatcaacattcggtgagattttgaaatgtc

SEQ ID NO: 407402 - DNA, 120 bp, Artificial Sequence
  ENSG00000147654_17 (sequence is synthesized)
atagatactgtacaggccaaaccttactaatttattttacttaaagtgatattttatagaaaaatcataagttatacaatgagaaccctttaagcccttagcctaagctttcagactaaa

SEQ ID NO: 407403 - DNA, 120 bp, Artificial Sequence
  ENSG00000147654_18 (sequence is synthesized)
tgtgattatagaataagatgaaagttaactttggtacagagctttttatagccccaaattatatttccagttattatattcattagaatttctgctaataaactcccaacttaaatagaa

SEQ ID NO: 407404 - DNA, 120 bp, Artificial Sequence
  ENSG00000147654_19 (sequence is synthesized)
gatgaaggggcggccatggcagctgcgcagaggcaacgcaggctgctacggagcgcgcgcccggctttgaatgagcggggctgggagtgagcgggcggagcgcgagctcgaggaagagac

SEQ ID NO: 407405 - DNA, 120 bp, Artificial Sequence
  ENSG00000147654_20 (sequence is synthesized)
aggcagcgcgcgtgagcgcgccttgtgtgcgcgcgcggcccgcggcagctcggagcctccgccgggcgggcggggagggggaggggcaggttttgattcccaccatggccatcacccagt

SEQ ID NO: 407406 - DNA, 120 bp, Artificial Sequence
  ENSG00000147654_21 (sequence is synthesized)
atggcacagaatgttcgattttactaccagctctcacactccgcttctgtttccccttctcttacgggccgctgctcaaacctttatttatcaaatttaagttttgattcccaccatggc

SEQ ID NO: 407407 - DNA, 120 bp, Artificial Sequence
  ENSG00000147654_22 (sequence is synthesized)
tgtttactctgctctctcctgtttcatcatcccactcctacctccactccctacattaaccaatcagtaaagatagagagagtgagtctgggtcagtggagttacggaaagagtaaggaa

SEQ ID NO: 407408 - DNA, 120 bp, Artificial Sequence
  ENSG00000147654_23 (sequence is synthesized)
ggtactcctaggtattggcatttctttaatagattcccagatttgtgaaccactggactaaatgagctccatggtaactttcaatttactagctatgtgactttggtcaagttatttgac

SEQ ID NO: 407409 - DNA, 120 bp, Artificial Sequence
  ENSG00000147654_24 (sequence is synthesized)
tgacctctcttaattcaatttcctcatctataaaatggatataaggaaatatattcatctgcaagttaaaaatatttaaagtattttaaatagtattatgttcatgtggttcaaacttta

SEQ ID NO: 407410 - DNA, 120 bp, Artificial Sequence
  ENSG00000147654_25 (sequence is synthesized)
ttctattttatacttttttattttttgaattgtagatttttgtattaatagatttaggtaaaattattttcaaaaactcagaatgaagggttttatccttacaaccattgaaaactcgaa

SEQ ID NO: 407411 - DNA, 120 bp, Artificial Sequence
  ENSG00000147654_26 (sequence is synthesized)
aggtaaaaaatatcttagatttttcttagtgcataataggtcttttcaggacaggagtatgacttttgaaatcaatttaatgcattttttgttttgtgcctcttccacaggttttgattc

SEQ ID NO: 407412 - DNA, 120 bp, Artificial Sequence
  ENSG00000147654_27 (sequence is synthesized)
acagctcacttctacacctgacaaattaatgctatttgtttgcacaaagcctcagttccttgctgtgcacctctccaaggagctgcttgaatttctttatgatgtaactcctgattttcc

SEQ ID NO: 407413 - DNA, 120 bp, Artificial Sequence
  ENSG00000147655_0 (sequence is synthesized)
ggtctgcatctccatcggaaagtgcgcttgccacatcccttcggatcacttcgtcctcccgagagcgttctgccttctacagctcggaaagaaagaaatcttagctgtgaagtgaccgtg

SEQ ID NO: 407414 - DNA, 120 bp, Artificial Sequence
  ENSG00000147655_1 (sequence is synthesized)
gagaaagcgcaggaagcgacacaattggttagggaggcagagagtgtgagcgggcgcaccccttgcctggggaccgcgctcgcgggcggggacggagcatcccagtggctgcacccgccg

SEQ ID NO: 407415 - DNA, 120 bp, Artificial Sequence
  ENSG00000147655_2 (sequence is synthesized)
ctccgcgctcctgcctggcgtcgccaaccccgcggcggccgctggaattccagagctgccaggcgctcccagccggtctcggcaaacttttccccagcccacgtgctaaccaagcggctc

SEQ ID NO: 407416 - DNA, 120 bp, Artificial Sequence
  ENSG00000147655_3 (sequence is synthesized)
gcttcccgagcccgggatggagcaccgcgcctagggaggccgcgccgcccgagacgtgcgcacggttcgtggcggagagatgctgatcgcgctgaactgaccggtgcggcccgggggtga

SEQ ID NO: 407417 - DNA, 120 bp, Artificial Sequence
  ENSG00000147655_4 (sequence is synthesized)
gtggcgagtctccctctgagtcctccccagcagcgcggccggcgccggctctttgggcgaaccctccagttcctagactttgagaggcgtctctcccccgcccgaccgcccagatgcagt

SEQ ID NO: 407418 - DNA, 120 bp, Artificial Sequence
  ENSG00000147655_5 (sequence is synthesized)
ttcgccttttctcctttgccctcatcattctgaactgcatggattacagccactgccaaggcaaccgatggagacgcagtaagcgagctagttatgtatcaaatcccatttgcaagggtt

SEQ ID NO: 407419 - DNA, 120 bp, Artificial Sequence
  ENSG00000147655_6 (sequence is synthesized)
gtttgtcttgttcaaaggacaatgggtgtagccgatgtcaacagaagttgttcttcttccttcgaagagaagggatgcgccagtatggagagtgcctgcattcctgcccatccgggtact

SEQ ID NO: 407420 - DNA, 120 bp, Artificial Sequence
  ENSG00000147655_7 (sequence is synthesized)
atggacaccgagccccagatatgaacagatgtgcaagatgcagaatagaaaactgtgattcttgctttagcaaagacttttgtaccaagtgcaaagtaggcttttatttgcatagaggcc

SEQ ID NO: 407421 - DNA, 120 bp, Artificial Sequence
  ENSG00000147655_8 (sequence is synthesized)
gttgctttgatgaatgtccagatggttttgcaccattagaagaaaccatggaatgtgtggaaggatgtgaagttggtcattggagcgaatggggaacttgtagcagaaataatcgcacat

SEQ ID NO: 407422 - DNA, 120 bp, Artificial Sequence
  ENSG00000147655_9 (sequence is synthesized)
gtggatttaaatggggtctggaaaccagaacacggcaaattgttaaaaagccagtgaaagacacaatactgtgtccaaccattgctgaatccaggagatgcaagatgacaatgaggcatt

SEQ ID NO: 407423 - DNA, 120 bp, Artificial Sequence
  ENSG00000147655_10 (sequence is synthesized)
gtccaggagggaagagaacaccaaaggcgaaggagaagaggaacaagaaaaagaaaaggaagctgatagaaagggcccaggagcaacacagcgtcttcctagctacagacagagctaacc

SEQ ID NO: 407424 - DNA, 120 bp, Artificial Sequence
  ENSG00000147655_11 (sequence is synthesized)
aataaaacaagagatccggtagatttttaggggtttttgtttttgcaaatgtgcacaaagctactctccactcctgcacactggtgtgcagcctttgtgctgctctgcccagtatctgtt

SEQ ID NO: 407425 - DNA, 120 bp, Artificial Sequence
  ENSG00000147655_12 (sequence is synthesized)
aggagtaagtgcacagcccgtgacttggctcagtgtgtgctgagagaatccgtccccggcaccatggacatgctagaggtgtgaggctgcagaacaccgctggaggacggacttgtgcct

SEQ ID NO: 407426 - DNA, 120 bp, Artificial Sequence
  ENSG00000147655_13 (sequence is synthesized)
atttatgtgaaagaagatgcttggcaggcaatgcgctactcactcgtgacctttatttctcacattgtgcattttcaaggatatgtttgtgtggatatctgcttagtgttaccacatggt

SEQ ID NO: 407427 - DNA, 120 bp, Artificial Sequence
  ENSG00000147655_14 (sequence is synthesized)
attctcagcatgttaccttcacactgttgtgcgatgaaactgcttttagctgaggatatgctctggaaattcctgctcagtttcactgcagccctaatatgtacatatactgcaggagct

SEQ ID NO: 407428 - DNA, 120 bp, Artificial Sequence
  ENSG00000147655_15 (sequence is synthesized)
acatataaagctcttatttactgtatatttatgctttcttgtgggtaacaagtcatacctgattaatatgatgccactttgtttctagtggttcctaacccattgtctgataaatgactt

SEQ ID NO: 407429 - DNA, 120 bp, Artificial Sequence
  ENSG00000147655_16 (sequence is synthesized)
ttctagtttggggaattgacacttgttttgttgcctcttgaaactttttttttttcccctcattgtgggcttatttctcattgtaagggtaggataaactagtttttgtatatagagtca

SEQ ID NO: 407430 - DNA, 120 bp, Artificial Sequence
  ENSG00000147655_17 (sequence is synthesized)
aatgaccagtgtcaaagagtttgcatattgggtagaccttctccactccacatgtcccacacatatagataaagcagcaggcggcatctggcaatcagaagcccaaactgcctttgagtc

SEQ ID NO: 407431 - DNA, 120 bp, Artificial Sequence
  ENSG00000147655_18 (sequence is synthesized)
taagatgtgatgactttgatgaaacacaactgaaaacatgagggactatatccagtcacttgtagccagtttcacaggccagctacagaattgtccaaacaaacattatttctgactgca

SEQ ID NO: 407432 - DNA, 120 bp, Artificial Sequence
  ENSG00000147655_19 (sequence is synthesized)
atttttttcccccaaatttaaagcaatccctggctttaaatgacaaggcacctaccaatgttcttgggtcactgaagaagctactaccatgagcctgggcatagaattttaggagataaa

SEQ ID NO: 407433 - DNA, 120 bp, Artificial Sequence
  ENSG00000147655_20 (sequence is synthesized)
aggatgaatttctgtgactgccagtcagatcttaacaggtttctgttgagccagaatctgtttcagatccaagatggagaggaacactatggaaacttcccaggtgactttcagagcagt

SEQ ID NO: 407434 - DNA, 120 bp, Artificial Sequence
  ENSG00000147655_21 (sequence is synthesized)
tgtttcaaacacatcattgtccttttaggggaaccagtttttagaaggttgtgaattggctttttcacaaagcatgattatcttcctggctgatccaggagaaaattagaacagaaaaat

SEQ ID NO: 407435 - DNA, 120 bp, Artificial Sequence
  ENSG00000147655_22 (sequence is synthesized)
aatggttgtggattttgaaacaaagcaaggtaaagccttttttttttcaccttgcattggcaaaactacctcttcagtgtttttaacttttgattcaaaagcatcttaccaataaggata

SEQ ID NO: 407436 - DNA, 120 bp, Artificial Sequence
  ENSG00000147655_23 (sequence is synthesized)
aatatcatatacatcgttatgaaaatattgctatgagataataagccacatatgaatgttgtatacaactttagggtttacatttaatcctgaagtgttacctcctttcatgtctattta

SEQ ID NO: 407437 - DNA, 120 bp, Artificial Sequence
  ENSG00000147655_24 (sequence is synthesized)
cactattttcccatttactaagtggggagggggtctccttatatagtgcttcatcgttaataagtcaatacctgttgttcctgggatgttcttttttgtgcattaaaaacttcaaaatta

SEQ ID NO: 407438 - DNA, 120 bp, Artificial Sequence
  ENSG00000147655_25 (sequence is synthesized)
cttttttctggaaactgcgacgagatgggaactttctgaattaagcagcaattcccgcgctggttttctggggagtcctcgcctccagagctagttatgtatcaaatcccatttgcaagg

SEQ ID NO: 407439 - DNA, 120 bp, Artificial Sequence
  ENSG00000147655_26 (sequence is synthesized)
gggacgtgcgaaggcgcagctgcctccccggggctctctccatcccccacacaccctgttttcgcttcttgtctctcaggttcgtggcggagagatgctgatcgcgctgaactgaccggt

SEQ ID NO: 407440 - DNA, 120 bp, Artificial Sequence
  ENSG00000147655_27 (sequence is synthesized)
atttcttggcctgggttgaggaccttgccctaagttctacctctgtctggtctgacatccccatgagccattcagctttagcttctggcctcaactctgcctctgagtttcctctttgtt

SEQ ID NO: 407441 - DNA, 120 bp, Artificial Sequence
  ENSG00000147655_28 (sequence is synthesized)
gcgcacggtaggcaacccacaccaaggcagccgcagctgcggcgcttgggtacaccgccgtggactccaaatggcctaagagcgttcttttagccctgcgctctcagtgcctttagagtt

SEQ ID NO: 407442 - DNA, 120 bp, Artificial Sequence
  ENSG00000147655_29 (sequence is synthesized)
ctttcctttccccggagcgccggcacaacgcattatgccgctgggtcggagcttagggctcggcagaggttgctaattcactgattataatcaccttcctctccaactcgtccgcagctg

SEQ ID NO: 407443 - DNA, 120 bp, Artificial Sequence
  ENSG00000147655_30 (sequence is synthesized)
attttttgcctgtgtttagacacagaggttggtgtagtgaccatgtggtagatggagaagttcttgtggaattactaagctattgatttacaacagggagaatgccactaaaatagtgga

SEQ ID NO: 407444 - DNA, 120 bp, Artificial Sequence
  ENSG00000147655_31 (sequence is synthesized)
caatggtgaattaaatggaaaagtctgtttgaggtttggggcaagaagcttcaaattgtaaaaatcacatgggctcttgtccttcagcactgagcagcatcatgattgaagattggagaa

SEQ ID NO: 407445 - DNA, 120 bp, Artificial Sequence
  ENSG00000147655_32 (sequence is synthesized)
tggggagagagtactcaggttaggtgtggttcacatcacttttgctttaagggaattcctcgtgtgtagggttataaagataacctaagatatggacttggctagttatgtatcaaatcc

SEQ ID NO: 407446 - DNA, 120 bp, Artificial Sequence
  ENSG00000147669_0 (sequence is synthesized)
ggaagttggtctcgacacctggactagccgggttgtatttggaaacgcggagtgagtttttccgtgctgtgtaggggctaacaatggacacccagaaggacgttcaacctccaaagcagc

SEQ ID NO: 407447 - DNA, 120 bp, Artificial Sequence
  ENSG00000147669_1 (sequence is synthesized)
aaccaatgatatatatctgtggagagtgtcacacagaaaatgaaataaaatctagggatccaatcagatgcagagaatgtggatacagaataatgtacaagaaaaggactaaaagattgg

SEQ ID NO: 407448 - DNA, 120 bp, Artificial Sequence
  ENSG00000147669_2 (sequence is synthesized)
tcgtttttgatgctcgatgaatgctgggaattcagaggaatgtcttcacttatacttggatttgctctcttcccatttctgattgttgtatagctttcgattttgcttacagtagttccc

SEQ ID NO: 407449 - DNA, 120 bp, Artificial Sequence
  ENSG00000147669_3 (sequence is synthesized)
agtataatgtataaattaagcatagcaagagattaataataatgtaatagaacaatgataacatactataataaaagttatgtgaatgtggttggtctctcttgctttcaaaatatcttc

SEQ ID NO: 407450 - DNA, 120 bp, Artificial Sequence
  ENSG00000147669_4 (sequence is synthesized)
ttgtacagtactcacctattttagaatgtggttgactacaggtaaccaaaaccacagaaagggaaactttggatgaggggggcactactgtacttaggaatacaactatatacatatgat

SEQ ID NO: 407451 - DNA, 120 bp, Artificial Sequence
  ENSG00000147669_5 (sequence is synthesized)
tttatttttaagaccatattatatttgggtatctactaatattttgtataaagcaattttttgttccattacgtgactttttgttttattgtatatgtaatttaacacacaataaagggt

SEQ ID NO: 407452 - DNA, 120 bp, Artificial Sequence
  ENSG00000147669_6 (sequence is synthesized)
aaagttgcttccccaaaccacacttttaatcaaaacctagaatcatctgcagtccttgttaaaaatgcaggtttctagaaccctctgaagttctgattaaataaatttattgcaaaccac

SEQ ID NO: 407453 - DNA, 120 bp, Artificial Sequence
  ENSG00000147669_7 (sequence is synthesized)
gtaccagcgccggaagttggtctcgacacctggactagccgggttgtatttggaaacgcggagtgagtttttccgtgctgtgtagtctgtgatttcaggggctaacaatggacacccaga

SEQ ID NO: 407454 - DNA, 120 bp, Artificial Sequence
  ENSG00000147669_8 (sequence is synthesized)
aggacgttcaacctccaaagcagcaaccaatgatatatatctgtggaggtaagagtagcacttacctaaagtaagaatattttatttaagtttttttgaaattgttacatttattctttg

SEQ ID NO: 407455 - DNA, 120 bp, Artificial Sequence
  ENSG00000147669_9 (sequence is synthesized)
cttaaatgagttactggtcttcagagttataaagtagaacactttagcaaccataaaaaaaatcgttgaggtcagtagacctgggttcgtccttggtcttctgtttactaacagaaaaaa

SEQ ID NO: 407456 - DNA, 120 bp, Artificial Sequence
  ENSG00000147669_10 (sequence is synthesized)
acaaagctcgttgagatttcattctctctcctggaaatatgcatggcctacaacctttttctttcctatttaatatatttaataaaagcagcagacccttgagattgagtatattttagt

SEQ ID NO: 407457 - DNA, 120 bp, Artificial Sequence
  ENSG00000147669_11 (sequence is synthesized)
tggggttgataaagattaatttctggttaaaatgataactttctggattacagtacttaaaaaacaaacatgattagcattttcatggaccaatgcataggctctaaataatctaaataa

SEQ ID NO: 407458 - DNA, 120 bp, Artificial Sequence
  ENSG00000147669_12 (sequence is synthesized)
tgctagttgattttggttctcataaatttattttttagggattctgtgcagtcaagcttgaggatagggatacattctgagaattgtgtccttaagcaatttcatcattcctacagaaac

SEQ ID NO: 407459 - DNA, 80 bp, Artificial Sequence
  ENSG00000147676_0 (sequence is synthesized)
ggaggcggaggcgggaggcggcggcggcgcgcggagacgcagcagcggcagcggcagcatgtcggccggcggagcgtcag

SEQ ID NO: 407460 - DNA, 120 bp, Artificial Sequence
  ENSG00000147676_1 (sequence is synthesized)
gcggagcgtcagtcccgccgcccccgaaccccgccgtgtccttcccgccgccccgggtcaccctgcccgccggccccgacatcctgcggacctactcgggcgccttcgtctgcctggaga

SEQ ID NO: 407461 - DNA, 120 bp, Artificial Sequence
  ENSG00000147676_2 (sequence is synthesized)
ttctgttcgggggtcttgtctggattttggttgcctcctccaatgttcctctacctctactacaaggatgggtcatgtttgtgtccgtgacagcgtttttcttttcgctcctctttctgg

SEQ ID NO: 407462 - DNA, 120 bp, Artificial Sequence
  ENSG00000147676_3 (sequence is synthesized)
gcatgttcctctctggcatggtggctcaaattgatgctaactggaacttcctggattttgcctaccattttacagtatttgtcttctattttggagcctttttattggaagcagcagcca

SEQ ID NO: 407463 - DNA, 120 bp, Artificial Sequence
  ENSG00000147676_4 (sequence is synthesized)
catccctgcatgatttgcattgcaatacaaccataaccgggcagccactcctgagtgataaccagtataacataaacgtagcagcctcaatttttgcctttatgacgacagcttgttatg

SEQ ID NO: 407464 - DNA, 120 bp, Artificial Sequence
  ENSG00000147676_5 (sequence is synthesized)
gttgcagtttgggtctggctttacgaagatggcgaccgtaacactccttagaaactggcagtcgtatgttagtttcacttgtctactttatatgtctgatcaatttggataccattttgt

SEQ ID NO: 407465 - DNA, 120 bp, Artificial Sequence
  ENSG00000147676_6 (sequence is synthesized)
ccagatgcaaaaacattccaaaagtaatgtgtttagtagagagagactctaagctcaagttctggtttatttcatggatggaatgttaattttattatgatattaaagaaatggcctttt

SEQ ID NO: 407466 - DNA, 120 bp, Artificial Sequence
  ENSG00000147676_7 (sequence is synthesized)
attttacatctctcccctttttccctttccccctttattttcctccttttctttctgaaagtttccttttatgtccataaaatacaaatatattgttcataaaaaattagtatccctttt

SEQ ID NO: 407467 - DNA, 120 bp, Artificial Sequence
  ENSG00000147676_8 (sequence is synthesized)
gtttggttgctgagtcacctgaaccttaattttaattggtaattacagcccctaaaaaaaacacatttcaaataggcttcccactaaactctatattttagtgtaaaccaggaattggca

SEQ ID NO: 407468 - DNA, 120 bp, Artificial Sequence
  ENSG00000147676_9 (sequence is synthesized)
cactttttttagaatgggccagatggtaaatatttatgcttcacggtccatacagtctctgtcacaactattcagttctgctagtatagcgtgaaagcagctatacacaatacagaaatg

SEQ ID NO: 407469 - DNA, 120 bp, Artificial Sequence
  ENSG00000147676_10 (sequence is synthesized)
aatgagtgtggttatgttctaataaaacttatttataaaaacaaggggaggctgggtttagcctgtgggccatagtttgtcaaccactggtgtaaaaccttagttatatatgatctgcat

SEQ ID NO: 407470 - DNA, 120 bp, Artificial Sequence
  ENSG00000147676_11 (sequence is synthesized)
atgcaataatcacattgcctttgtgttaatagtcaaatacttacctttggagaatacttacctttggaggaatgtataaaatttctcaggcagagtcctggatataggaaaaagtaattt

SEQ ID NO: 407471 - DNA, 120 bp, Artificial Sequence
  ENSG00000147676_12 (sequence is synthesized)
atgaagtaaacttcagttgcttaatcaaactaatgatagtctaacaactgagcaagatcctcatctgagagtgcttaaaatgggatccccagagaccattaaccaatactggaactggta

SEQ ID NO: 407472 - DNA, 120 bp, Artificial Sequence
  ENSG00000147676_13 (sequence is synthesized)
tctagctactgatgtcttactttgagtttatttatgcttcagaatacagttgtttgccctgtgcatgaatatacccatatttgtgtgtggatatgtgaagcttttccaaatagagctctc

SEQ ID NO: 407473 - DNA, 120 bp, Artificial Sequence
  ENSG00000147676_14 (sequence is synthesized)
agaagaattaagtttttacttctaattattttgcattactttgagttaaatttgaatagagtattaaatataaagttgtagattcttatgtgtttttgtattagcccagacatctgtaat

SEQ ID NO: 407474 - DNA, 120 bp, Artificial Sequence
  ENSG00000147676_15 (sequence is synthesized)
gtttttgcactggtgacagacaaaatctgttttaaaatcatatccagcacaaaaactatttctggctgaatagcacagaaaagtattttaacctacctgtagagatcctcgtcatggaaa

SEQ ID NO: 407475 - DNA, 120 bp, Artificial Sequence
  ENSG00000147676_16 (sequence is synthesized)
ggtgccaaactgttttgaatggaaggacaagtaagagtgaggccacagttcccaccacacgagggcttttgtattgttctactttttcagccctttactttctggctgaagcatcccctt

SEQ ID NO: 407476 - DNA, 120 bp, Artificial Sequence
  ENSG00000147676_17 (sequence is synthesized)
ggagtgccatgtataagttgggctattagagttcatggaacatagaacaaccatgaatgagtggcatgatccgtgcttaatgatcaagtgttacttatctaataatcctctagaaagaac

SEQ ID NO: 407477 - DNA, 120 bp, Artificial Sequence
  ENSG00000147676_18 (sequence is synthesized)
cctgttagatcttggtttgtgataaaaatataaagacagaagacatgaggaaaaacaaaaggtttgaggaaatcaggcatatgactttatacttaacatcagatcttttctataatatcc

SEQ ID NO: 407478 - DNA, 120 bp, Artificial Sequence
  ENSG00000147676_19 (sequence is synthesized)
tactactttggttttcctagctccataccacacacctaaacctgtattatgaattacatattacaaagtcataaatgtgccatatggatatacagtacattctagttggaatcgtttact

SEQ ID NO: 407479 - DNA, 120 bp, Artificial Sequence
  ENSG00000147676_20 (sequence is synthesized)
ctgctagaatttaggtgtgagattttttgtttcccaggtatagcaggcttatgtttggtggcattaaattggtttctttaaaatgctttggtggcacttttgtaaacagattgcttctag

SEQ ID NO: 407480 - DNA, 120 bp, Artificial Sequence
  ENSG00000147676_21 (sequence is synthesized)
attgttacaaaccaagcctaagacacatctgtgaatacttagatttgtagcttaatcacattctagacttgtgagttgaatgacaaagcagttgaacaaaaattatggcatttaagaatt

SEQ ID NO: 407481 - DNA, 120 bp, Artificial Sequence
  ENSG00000147676_22 (sequence is synthesized)
taacatgtcttagctgtaaaaatgagaaagtgttggttggttttaaaatctggtaactccatgatgaaaagaaatttattttatacgtgttatgtctctaataaagtattcatttgataa

SEQ ID NO: 407482 - DNA, 120 bp, Artificial Sequence
  ENSG00000147676_23 (sequence is synthesized)
agattccatgggcgtaggaccctccgagccagggcaagaagttgcaggaaaaatggcttctagcagtggaacttcctcatacacgtgatctgtttctgattagagaactgcaggaggtga

SEQ ID NO: 407483 - DNA, 120 bp, Artificial Sequence
  ENSG00000147676_24 (sequence is synthesized)
gaacattggggacgtggaggaaagaaaggtgttggggctcagaggcgcctttagaaacccagggcatggccaggggccgcgcttggccggagcgagctcctggctctcggcctcgcctgt

SEQ ID NO: 407484 - DNA, 120 bp, Artificial Sequence
  ENSG00000147676_25 (sequence is synthesized)
tgctaacctgccattttgttgggtggtgcaaaggtgtagccgatgactgggtgacctggtggctgccacgctgtggaaagtgggggcgggaggcaacaggaagaggaagagggctgagga

SEQ ID NO: 407485 - DNA, 120 bp, Artificial Sequence
  ENSG00000147676_26 (sequence is synthesized)
ataagcaccccactttttaagtgtgactggtgacctcgattttaccttctgagtcacagcaccaagacctgtgtatctgtcaaactgagcacagtgggcgagggcgcgctgtgagagctg

SEQ ID NO: 407486 - DNA, 120 bp, Artificial Sequence
  ENSG00000147677_0 (sequence is synthesized)
ctctttcttcctgtctgcttggaaagatggcgtcccgcaaggaaggtaccggctctactgccacctcttccagctccaccgccggcgcagcagggaaaggcaaaggcaaaggcggctcgg

SEQ ID NO: 407487 - DNA, 120 bp, Artificial Sequence
  ENSG00000147677_1 (sequence is synthesized)
gagattcagccgtgaagcaagtgcagatagatggccttgtggtattaaagataatcaaacattatcaagaagaaggacaaggaactgaagttgttcaaggagtgcttttgggtctggttg

SEQ ID NO: 407488 - DNA, 120 bp, Artificial Sequence
  ENSG00000147677_2 (sequence is synthesized)
tagaagatcggcttgaaattaccaactgctttcctttccctcagcacacagaggatgatgctgactttgatgaagtccaatatcagatggaaatgatgcggagccttcgccatgtaaaca

SEQ ID NO: 407489 - DNA, 120 bp, Artificial Sequence
  ENSG00000147677_3 (sequence is synthesized)
ttgatcatcttcacgtgggctggtatcagtccacatactatggctcattcgttacccgggcactcctggactctcagtttagttaccagcatgccattgaagaatctgtcgttctcattt

SEQ ID NO: 407490 - DNA, 120 bp, Artificial Sequence
  ENSG00000147677_4 (sequence is synthesized)
atgatcccataaaaactgcccaaggatctctctcactaaaggcatacagactgactcctaaactgatggaagtttgtaaagaaaaggatttttcccctgaagcattgaaaaaagcaaata

SEQ ID NO: 407491 - DNA, 120 bp, Artificial Sequence
  ENSG00000147677_5 (sequence is synthesized)
tcacctttgagtacatgtttgaagaagtgccgattgtaattaaaaattcacatctgatcaatgtcctaatgtgggaacttgaaaagaagtcagctgttgcagataaacatgaattgctca

SEQ ID NO: 407492 - DNA, 120 bp, Artificial Sequence
  ENSG00000147677_6 (sequence is synthesized)
gccttgccagcagcaatcatttggggaagaatctacagttgctgatggacagagtggatgaaatgagccaagatatagttaaatacaacacatacatgaggaatactagtaaacaacagc

SEQ ID NO: 407493 - DNA, 120 bp, Artificial Sequence
  ENSG00000147677_7 (sequence is synthesized)
agcagaaacatcagtatcagcagcgtcgccagcaggagaatatgcagcgccagagccgaggagaacccccgctccctgaggaggacctgtccaaactcttcaaaccaccacagccgcctg

SEQ ID NO: 407494 - DNA, 120 bp, Artificial Sequence
  ENSG00000147677_8 (sequence is synthesized)
ccaggatggactcgctgctcattgcaggccagataaacacttactgccagaacatcaaggagttcactgcccaaaacttaggcaagctcttcatggcccaggctcttcaagaatacaaca

SEQ ID NO: 407495 - DNA, 120 bp, Artificial Sequence
  ENSG00000147677_9 (sequence is synthesized)
actaagaaaaggaagtttccagaaaagaagttaacatgaactcttgaagtcacaccagggcaactcttggaagaaatatatttgcatattgaaaagcacagaggatttctttagtgtcat

SEQ ID NO: 407496 - DNA, 120 bp, Artificial Sequence
  ENSG00000147677_10 (sequence is synthesized)
tgccgattttggctataacagtgtctttctagccataataaaataaaacaaaatcttgactgcttgctcatttgattttagatgtattttctctggcttacttttgtttgcttatacttg

SEQ ID NO: 407497 - DNA, 120 bp, Artificial Sequence
  ENSG00000147677_11 (sequence is synthesized)
tttatttctaaaagctaaaacaagccctgaccggaagtttcaccaggcagaaacctataggctccaccacttttgctgcctctcaggtgccacctttcaacccacttctcccaactactt

SEQ ID NO: 407498 - DNA, 120 bp, Artificial Sequence
  ENSG00000147677_12 (sequence is synthesized)
atcccagctcctgaccccgaggccctggcatctactgtgaatattttttttttgaatttttatacttcgctgctcccaaatgagcaccccgagagaagtccaggcttcatgtacttgccc

SEQ ID NO: 407499 - DNA, 120 bp, Artificial Sequence
  ENSG00000147677_13 (sequence is synthesized)
aggaattccttgtccccggacccggaatcacttggcctaattccggtcagtctgccttttcatttctgcaggtgatggtcaaccagtccccgtactcataggccatgggacacaagatta

SEQ ID NO: 407500 - DNA, 64 bp, Artificial Sequence
  ENSG00000147677_14 (sequence is synthesized)
aaccagtccccgtactcataggccatgggacacaagattattattatcatcattatttttagct

SEQ ID NO: 407501 - DNA, 120 bp, Artificial Sequence
  ENSG00000147677_15 (sequence is synthesized)
agtgctgggaatacaggcatgagccaccactcctggacaggccacagaaattttaaagaaaagaatcatgccaccacaagtaaacttcattttgtttatattatttaggacttcacattt

SEQ ID NO: 407502 - DNA, 120 bp, Artificial Sequence
  ENSG00000147677_16 (sequence is synthesized)
tatattatttaggacttcacatttgtcttccgaaaccatgaagtataattctgctaacagcaagtgttgtgaatgaggaattaggaattaggagaatggtagtacattgggaaaaacata

SEQ ID NO: 407503 - DNA, 120 bp, Artificial Sequence
  ENSG00000147677_17 (sequence is synthesized)
ttttagtaatttttatattttaaagataatcacagattttgctgtttgtgcatcaccaaaatcagtgagatctgccagctggtgggggtgtgcctatgagaatttttgattatgatcccc

SEQ ID NO: 407504 - DNA, 120 bp, Artificial Sequence
  ENSG00000147677_18 (sequence is synthesized)
taggagggttatcaaaaaaggagatgggtgaaagatcaggagagtcgagaaattcattttttggacaacattgttttgaaggcactactggggctctgggatcaggcagccagattgaaa

SEQ ID NO: 407505 - DNA, 120 bp, Artificial Sequence
  ENSG00000147677_19 (sequence is synthesized)
cctggctcctccttttcctaagttatttaacctccctgtgcctcactttttgtcaaccagataagataagaaatgagagcaggtctgttacctcacaaggtggctgtgagtgttgaagac

SEQ ID NO: 407506 - DNA, 120 bp, Artificial Sequence
  ENSG00000147677_20 (sequence is synthesized)
gtttgttgggggtttgggtgaagcatgcaaactctggttggtatgtggcagccactcagcctgtatttatgatgagggaggcattctaggcaccccttccaggatgttgggttgttggct

SEQ ID NO: 407507 - DNA, 120 bp, Artificial Sequence
  ENSG00000147677_21 (sequence is synthesized)
gggttttactttaaaaagctcagggcctagaacattctagaatccaagtacttgctcacatatataattatttctttaggataatctttgatatagacttacgagtcaaagggtatgtaa

SEQ ID NO: 407508 - DNA, 120 bp, Artificial Sequence
  ENSG00000147677_22 (sequence is synthesized)
aatgtcagcccttttacctgtattgccaaattgccttcaaaagtttctgctgttttgccctcctacccatagtgataaccttaaattggagtcaacacaaatttgagtgtgactgtgtta

SEQ ID NO: 407509 - DNA, 120 bp, Artificial Sequence
  ENSG00000147677_23 (sequence is synthesized)
gacagaagggatatattaacaggtaaaactggccatggcccctgcccttgtggagtatatgctctgttggttcatttcctctgcattctaattttctagacttgggatcttattgtggag

SEQ ID NO: 407510 - DNA, 120 bp, Artificial Sequence
  ENSG00000147677_24 (sequence is synthesized)
ttaaacaaagcacccttaaagtagcaagcgagcaaaataaaagcaaggaaaatcagttggaacataacttatgtattttttaggattaagagtaatttaactgagtcaattcaatatgtt

SEQ ID NO: 407511 - DNA, 120 bp, Artificial Sequence
  ENSG00000147677_25 (sequence is synthesized)
tttaaaggtgtgattcttaaattctttatgattgtttagatttctatatcttggtaacatgaatacacacttaatgaaagatttcagtaatttttgatttgggaattaatcatagtggga

SEQ ID NO: 407512 - DNA, 120 bp, Artificial Sequence
  ENSG00000147677_26 (sequence is synthesized)
aaaactgtttaggaaaacatgtcagtggaaattaactcgccacagtatgtagtgttagggaatagcttctgttcggcatttgatttgagtgctgtattctgacatttttcaggaacaaat

SEQ ID NO: 407513 - DNA, 120 bp, Artificial Sequence
  ENSG00000147677_27 (sequence is synthesized)
acatgtgattcatcttctataaatatttgcagtttcttcaagttgaaatgagaaaagctcgtaaattgagcaccaggtctaataaatcattcacttacccaagaacagaaagacaggaaa

SEQ ID NO: 407514 - DNA, 120 bp, Artificial Sequence
  ENSG00000147677_28 (sequence is synthesized)
agctagcatgttaatctaatgaaaaaatcgaatgttaaaaaaccaagaaagtagaagatatttgacattaactttctaatcattgataataatctaataatcataacattattcttaaaa

SEQ ID NO: 407515 - DNA, 120 bp, Artificial Sequence
  ENSG00000147677_29 (sequence is synthesized)
cctgaaagaatggattcctgctcccaatgtgtttttaatatcaacttaaactaaaataatttttttacctatttttggaagcttggaaattgagatgtagttgtctaatgttaacctaat

SEQ ID NO: 407516 - DNA, 120 bp, Artificial Sequence
  ENSG00000147677_30 (sequence is synthesized)
taagagagcttggtgtgatttctcatatacagcatctaaatatttaagttttaatgtcttctaaaatattattacattcttcatactatagttttttaacatcctttagaaaacttgtat

SEQ ID NO: 407517 - DNA, 120 bp, Artificial Sequence
  ENSG00000147677_31 (sequence is synthesized)
cagcttcactttcaaaccatgctggcatcgaactcaggtgtagtggtatcagaatgttatgaaataattttttattttcattataaactccatttttacaataaacacttctcaaccaaa

SEQ ID NO: 407518 - DNA, 120 bp, Artificial Sequence
  ENSG00000147677_32 (sequence is synthesized)
cccttaatattattactactatttttgctttctgtcctttttgcctctaagagcagtctggcaggccttctcaagtaaataccaaccctgtttctgcagcagcctcagcagcagctcagt

SEQ ID NO: 407519 - DNA, 120 bp, Artificial Sequence
  ENSG00000147677_33 (sequence is synthesized)
ctagacagggtttccttctttctgtttatttttcttgctatcagagccctgatgtgtacattttggaatgctggagtagctgcttcatttctattcctccatctcccctccctcattgaa

SEQ ID NO: 407520 - DNA, 120 bp, Artificial Sequence
  ENSG00000147677_34 (sequence is synthesized)
ctctgtacgtgactgaccaatcataatacggtgtgccaagttttttttatacctctgacaacagcgtacaaaacctggactgtttcttagcacaaagatttttttcttttcggcctattt

SEQ ID NO: 407521 - DNA, 120 bp, Artificial Sequence
  ENSG00000147677_35 (sequence is synthesized)
aatggtgtttcctcaagctctccagaccagatgttctgtgctgtatcagaactgtaggcaatttaacagctttatagccttccccctccccaaacactcacagtttgccatatctggcag

SEQ ID NO: 407522 - DNA, 120 bp, Artificial Sequence
  ENSG00000147677_36 (sequence is synthesized)
gatgctgactttgatgaaggttcattcatagtgcagcatacatcagaacttcgttccttgttattgctgagtagtattccattaaatgtattccaatatcagatggaaatgatgcggagc

SEQ ID NO: 407523 - DNA, 120 bp, Artificial Sequence
  ENSG00000147677_37 (sequence is synthesized)
gaaatgtgaacagtgattattaggattgataaattttgtgtgcggggctattcattttaagttgaatgaggagctacccaagtacatgcagtgaattttcatgtttaatatttatcagtg

SEQ ID NO: 407524 - DNA, 120 bp, Artificial Sequence
  ENSG00000147677_38 (sequence is synthesized)
atttcctaattatacaatatgtctagaacatatgatacatttaattttcagcaaggttactagttcttgctgaggaatgaatttgaaaataactcttttgcatctttagtttttgacaga

SEQ ID NO: 407525 - DNA, 120 bp, Artificial Sequence
  ENSG00000147677_39 (sequence is synthesized)
ggaaattactctattgtaagtaggatagaggtattcctgcattttcaagtgctatttgcaatagtgctttgagtctgcttcaagttgtgttctggttgtttattttgatctttattttgc

SEQ ID NO: 407526 - DNA, 120 bp, Artificial Sequence
  ENSG00000147677_40 (sequence is synthesized)
aggcgcgtagcaagagcttctctgaaagactggcagtatagtagtagtcagtgataatattgagccttaatatgttccagacactgtcctaagtgatttaccttacattattcccctgaa

SEQ ID NO: 407527 - DNA, 120 bp, Artificial Sequence
  ENSG00000147677_41 (sequence is synthesized)
tgtttataattcccaagtgaaagaaggaaatgatatattggatagctatgagtggggaggtttgtactggctgctttcccataaagaaattaagcacgttcacgaagggcacgtagtttg

SEQ ID NO: 407528 - DNA, 120 bp, Artificial Sequence
  ENSG00000147677_42 (sequence is synthesized)
ttagtgtctggaacccagttttcgtgcctgaagttcaaatgttcttgctacaccaccatagaaactaacgtcactcaggaaccatttgtcagggcaaagggtgccaccattttgcatttc

SEQ ID NO: 407529 - DNA, 120 bp, Artificial Sequence
  ENSG00000147677_43 (sequence is synthesized)
ctcctgccttaggaccatcctaaatcactcgcatggagtgttttggaagaactctcaagagcttcgtttgcctagagtcagaattcctaaccttgagtcctggttttgccacaaacccaa

SEQ ID NO: 407530 - DNA, 120 bp, Artificial Sequence
  ENSG00000147677_44 (sequence is synthesized)
gccgtttgatcttgggcaactcccgaagaaagctgggttcaacttcctcactgtcaaactggttgtaggtctagataagtttcaagtactctttttatgtgcatggtctctgacatagga

SEQ ID NO: 407531 - DNA, 120 bp, Artificial Sequence
  ENSG00000147677_45 (sequence is synthesized)
agactacatactgggccagtaacaggaaggcacaaagctgactggaggtttaaaaattacttggtcaatttgattaatgaggagaatgaatcagaaaatttcaagttctcccgtggctaa

SEQ ID NO: 407532 - DNA, 120 bp, Artificial Sequence
  ENSG00000147677_46 (sequence is synthesized)
cccagtatttcctttggggtgatctgtcaacccctggaaaaagggacaagcacacacaggagaagaggcacaggtttgggagggaagggaagcagaatttggttggacactaagagagtg

SEQ ID NO: 407533 - DNA, 120 bp, Artificial Sequence
  ENSG00000147677_47 (sequence is synthesized)
gagattcagccgtgaagcaagtgcagatagatggccttttttcatagggctgatggcttgttcttcagttctctggtcaggtatcctctcagaagcccttcctggatccccctaaggtgg

SEQ ID NO: 407534 - DNA, 120 bp, Artificial Sequence
  ENSG00000147677_48 (sequence is synthesized)
acttaactgtcaactccacgtgggcggggcgttttgcacctcctgagctcgcaatgaaggtctgtgagcaacggcctcgcctctacaacacccgacggaccctctgtgcctcctccccag

SEQ ID NO: 407535 - DNA, 120 bp, Artificial Sequence
  ENSG00000147677_49 (sequence is synthesized)
ccccccgggcccaccttgtggtgcacagctgcgtctcccccatgaggtagcggggcagctgctcccgcagctggatgcggccccgcagcgccgcctgacagaaggtgccgtccagcagga

SEQ ID NO: 407536 - DNA, 120 bp, Artificial Sequence
  ENSG00000147679_0 (sequence is synthesized)
ggcattgagggtactggggcgtgcgtgaggcgtttactgatgcttcctggtccggtggcctcggtcccggtaagccaggcatgaagatcacaaggcagaaacatgccaagaagcatcttg

SEQ ID NO: 407537 - DNA, 120 bp, Artificial Sequence
  ENSG00000147679_1 (sequence is synthesized)
gcttcttccgcaacaacttcggagtccgcgagccgtaccagatcctgctggacggcaccttctgtcaggcggcgctgcggggccgcatccagctgcgggagcagctgccccgctacctca

SEQ ID NO: 407538 - DNA, 120 bp, Artificial Sequence
  ENSG00000147679_2 (sequence is synthesized)
tgggggagacgcagctgtgcaccacaagatgtgtgttaaaagagctagaaacattgggaaaggacttatatggggcaaaactgattgcacaaaaatgccaagttcgaaattgtcctcatt

SEQ ID NO: 407539 - DNA, 120 bp, Artificial Sequence
  ENSG00000147679_3 (sequence is synthesized)
tcaagaatgcagtgagtggatcagaatgtctgctttccatggttgaagagggaaatcctcatcattattttgtggcaacacaggatcagaatttgtctgtgaaagtaaaaaagaagcctg

SEQ ID NO: 407540 - DNA, 120 bp, Artificial Sequence
  ENSG00000147679_4 (sequence is synthesized)
gagttcctctcatgtttattattcagaacactatggttttggacaaaccttctcccaaaacaattgcctttgtaaaagcagtggagtcaggtcagcttgtctcagtgcatgagaaagaaa

SEQ ID NO: 407541 - DNA, 120 bp, Artificial Sequence
  ENSG00000147679_5 (sequence is synthesized)
gtatcaaacatctcaaagaggaacagggtttagtgaaaaacactgaacagagtagaagaaaaaagcgcaagaaaataagtggtcccaatcctcttagttgtttgaagaaaaagaaaaagg

SEQ ID NO: 407542 - DNA, 120 bp, Artificial Sequence
  ENSG00000147679_6 (sequence is synthesized)
caccggacacacaatcatctgcttctgaaaagaaaagaaaaagaaaaagaattcggaacagatctaacccaaaagtactttctgagaagcagaatgcagaaggagaatgaatcctttgga

SEQ ID NO: 407543 - DNA, 120 bp, Artificial Sequence
  ENSG00000147679_7 (sequence is synthesized)
tactttcaaggacattcaaatgtgaaaatgaattttttacaactagaagtatttataataaaagaccaaacttatttttgtaaatgaacccatatgctttagctaaaattaattataaaa

SEQ ID NO: 407544 - DNA, 88 bp, Artificial Sequence
  ENSG00000147679_8 (sequence is synthesized)
gttcgtgtacatgtctcaaaaaaaaaataaaaacagtgaatgggtgtaggtgtgatggaattcactttacttactaaatggtttcggg

SEQ ID NO: 407545 - DNA, 120 bp, Artificial Sequence
  ENSG00000147679_9 (sequence is synthesized)
ggtgtgatggaattcactttacttactaaatggtttcgggaggttgtttctccaggtaaaattgtcgcctctctggtcccattcccaccttcaaacattatatgcaaacagttttaaaaa

SEQ ID NO: 407546 - DNA, 120 bp, Artificial Sequence
  ENSG00000147679_10 (sequence is synthesized)
atcttacagttctaaaaggcttgtgacaaaaaaagaggcagtccctctttcacattgacagaagaaacttcctctttcaattctagtagttgaagaatttatatttccaaattgtatgat

SEQ ID NO: 407547 - DNA, 120 bp, Artificial Sequence
  ENSG00000147679_11 (sequence is synthesized)
tataccgctactttttgatacatcaattatttattgacttcctactagaaagagtgaaattttgcccatttatactgcaccatttttccagtatatgaatattttactctttgtacatca

SEQ ID NO: 407548 - DNA, 120 bp, Artificial Sequence
  ENSG00000147679_12 (sequence is synthesized)
gaaactcagtattttcattattatgactagagtttttttgtttgtttgtttgagttctacttgtccaataaggatgatgattttcttttagatgtaaatgttaacttcaatagcaagaat

SEQ ID NO: 407549 - DNA, 120 bp, Artificial Sequence
  ENSG00000147679_13 (sequence is synthesized)
tcaaaaataatattctctttgagattgactgtgaatgttattgaaaagtgtctaaattagtctgaggatcaatgagggtcaattcagttaggaattgaataatgaaacgtgtctctctga

SEQ ID NO: 407550 - DNA, 120 bp, Artificial Sequence
  ENSG00000147679_14 (sequence is synthesized)
taaaattattggacaagtgaaatcgtatcagtagttcctgactgacagcttctggagccacactagagcagtgattctcagtctaacattaggttatcatgatgacgtatgagtaaattc

SEQ ID NO: 407551 - DNA, 120 bp, Artificial Sequence
  ENSG00000147679_15 (sequence is synthesized)
ttaatggttaaatgtgagacagttcacatttattcccatagaaatgtcattctcatttgaattcagagatacttctttgctggaagttggaattatagctttacaccaaggagtgacacg

SEQ ID NO: 407552 - DNA, 120 bp, Artificial Sequence
  ENSG00000147679_16 (sequence is synthesized)
tagactaatctggcaagccaaggtagtgtttggattgcaatgtcatgattctattttaaattcttgatggtagaaacatttttaataaggaaggtaaaaatactggaaaaaagtgaatag

SEQ ID NO: 407553 - DNA, 120 bp, Artificial Sequence
  ENSG00000147679_17 (sequence is synthesized)
tgtaggttttgtgaggaaagttaacatttgtcaatgacaagcattaaggccacctaataaagtgtagacaaagtgataaatgaaatatacactgatgatactcatttcaatatgctaaaa

SEQ ID NO: 407554 - DNA, 120 bp, Artificial Sequence
  ENSG00000147679_18 (sequence is synthesized)
tacattaaatttaggtattactcttaatctatttctacttagtcagtgctatctgattacctgttaatagcatctgaactggagagctggaaaaatccacttttttatgaagcagtaatt

SEQ ID NO: 407555 - DNA, 120 bp, Artificial Sequence
  ENSG00000147679_19 (sequence is synthesized)
gatcatgccactgcactccagcctggtgagagagtgaaaccccgtctcaaaaataaataaataaataagtttactattttaaaactggttaatcatttatgtattttgccagtaaaatta

SEQ ID NO: 407556 - DNA, 120 bp, Artificial Sequence
  ENSG00000147679_20 (sequence is synthesized)
ctggttaatcatttatgtattttgccagtaaaattactttaaaagatattttaacaaaagtctcatatccttgtacttcagtttttttgtgtgtgaatactatccctataccactacccc

SEQ ID NO: 407557 - DNA, 120 bp, Artificial Sequence
  ENSG00000147679_21 (sequence is synthesized)
taaaacctcagaattatttgctttattttttcatacaacttggggaagggaaccatgggagtatgcacatgggatcataatccattctgtggtttggaaaaagaaaatgttaacctctgc

SEQ ID NO: 407558 - DNA, 120 bp, Artificial Sequence
  ENSG00000147679_22 (sequence is synthesized)
tttagagggtagctactagctttgttggggataaaagtgtaatacatgcacttttgaactctgaaagtttgccaatctgaaaaggggtgtttctgaagaccactatcttttacgaacact

SEQ ID NO: 407559 - DNA, 120 bp, Artificial Sequence
  ENSG00000147679_23 (sequence is synthesized)
taaaaataagtgtttgcagttgtgtatgggcacgatactgtattctttacatttttatggccctacagctacttcttatccctgcaagtatataaattaaaaccaagtcactttagaaca

SEQ ID NO: 407560 - DNA, 120 bp, Artificial Sequence
  ENSG00000147679_24 (sequence is synthesized)
gctttgaaactagagtttcaaaggtaaaaggatctcatgtttctgaatctgcgtaaagcaagatggctgtgatttgacaggtttaattgctagttttttataggtggatagaaatgaata

SEQ ID NO: 407561 - DNA, 120 bp, Artificial Sequence
  ENSG00000147679_25 (sequence is synthesized)
taggtggatagaaatgaatagtttggagtctttaaaatgttttaaaaaatgtttgcttactatctatatatatgacattattcccaattagttttatatctccaagatatatatatgtat

SEQ ID NO: 407562 - DNA, 120 bp, Artificial Sequence
  ENSG00000147679_26 (sequence is synthesized)
tcatgcagtcagaaagatgccatctgttctcttcagctgccaaagtgtcacaggttacccacagtatatcccaagaatgtacacattctgcaccaattatggaggacaacagtatgtgat

SEQ ID NO: 407563 - DNA, 120 bp, Artificial Sequence
  ENSG00000147679_27 (sequence is synthesized)
tgatgctctgattggctagctctggaccacatgaccaactctgctctggtggtagagctaattccacttaaaccacatcaacagagaatgggtaagatgtgtttcctcaagggagactgt

SEQ ID NO: 407564 - DNA, 120 bp, Artificial Sequence
  ENSG00000147679_28 (sequence is synthesized)
aacactattagaaggaggagtgaaagttggcgtgtaagaagcaaatgatcactactgatatgtgggcatttgaggtgaattaaatttttacttgaattattttatgttttcatactcatc

SEQ ID NO: 407565 - DNA, 120 bp, Artificial Sequence
  ENSG00000147679_29 (sequence is synthesized)
gcatctgctgagtccttttgttccatcttctttcttcctgatcttgatcgccccctgatgcatcttcatcctgaataaaaatgacccccaaaaagctgacaaaacaagtccaatgaaaaa

SEQ ID NO: 407566 - DNA, 120 bp, Artificial Sequence
  ENSG00000147679_30 (sequence is synthesized)
gagcaatcacttagcatttagagtacaaactgaagagtctgtttttcttaaattacaaggcaaagtcctctatgtgcaagcaaacatttggctgaaagtatgcttctatattgcgctata

SEQ ID NO: 407567 - DNA, 120 bp, Artificial Sequence
  ENSG00000147679_31 (sequence is synthesized)
tggttactggcccctcttaaagaacttcaggatataaatcaactgtaccactaaatatactgtttatttcaactaaatatacatacataaatattgcaacatgattttctagatgactaa

SEQ ID NO: 407568 - DNA, 120 bp, Artificial Sequence
  ENSG00000147679_32 (sequence is synthesized)
atactacttttaaaaccacaggcaattttcaccatttctatttatacttcatatggagctatttataatcagaaaaaagttagaatgattagacttttaaaaatacaggcttctaagtta

SEQ ID NO: 407569 - DNA, 120 bp, Artificial Sequence
  ENSG00000147679_33 (sequence is synthesized)
atttgcagtcagtaaaagcaattgtcatttgagaatttgaggaaaactttaagcatgttgatattctttttagtagtggaaggttgggttttgttttttttaatgattcctttgttttgc

SEQ ID NO: 407570 - DNA, 120 bp, Artificial Sequence
  ENSG00000147679_34 (sequence is synthesized)
tttttttgtttgtttcttgagacttgagggtctcactatattgcctaggctggtctcgaacccctaggctaaagtgatccttccacctcagctcctgagtacctgggattacaggtgttt

SEQ ID NO: 407571 - DNA, 120 bp, Artificial Sequence
  ENSG00000147679_35 (sequence is synthesized)
gccatcatgctggacactggcagaagtttctttttttaaaacaagaaattgttgacatgagatgtgatgatttgttgtagggttcttgaagggaagataagtagagcaaagtgcctgtat

SEQ ID NO: 407572 - DNA, 120 bp, Artificial Sequence
  ENSG00000147684_0 (sequence is synthesized)
agtcacccgcagcaggcgtgcagtttcccggctctccgcgcggccggggaaggtcagcgccgtaatggcgttcttggcgtcgggaccctacctgacccatcagcaaaaggtgttgcggct

SEQ ID NO: 407573 - DNA, 120 bp, Artificial Sequence
  ENSG00000147684_1 (sequence is synthesized)
ttataagcgggcgctacgccacctcgagtcgtggtgcgtccagagagacaaataccgatactttgcttgtttgatgagagcccggtttgaagaacataagaatgaaaaggatatggcgaa

SEQ ID NO: 407574 - DNA, 120 bp, Artificial Sequence
  ENSG00000147684_2 (sequence is synthesized)
tcctatgagagatacgattgctacaaggtcccagaatggtgcttagatgactggcatccttctgagaaggcaatgtatcctgattactttgccaagagagaacagtggaagaaactgcgg

SEQ ID NO: 407575 - DNA, 120 bp, Artificial Sequence
  ENSG00000147684_3 (sequence is synthesized)
agggaaagctgggaacgagaggttaagcagctgcaggaggaaacgccacctggtggtcctttaactgaagctttgccccctgcccgaaaggaaggtgatttgcccccactgtggtggtat

SEQ ID NO: 407576 - DNA, 120 bp, Artificial Sequence
  ENSG00000147684_4 (sequence is synthesized)
attgtgaccagaccccgggagcggcccatgtagaaagagagagacctcatctttcatgcttgcaagtgaaatatgttacagaacatgcacttgccctaataaaaaatcagtgaaatggtc

SEQ ID NO: 407577 - DNA, 120 bp, Artificial Sequence
  ENSG00000147684_5 (sequence is synthesized)
gctgggaacgagaggtttactagaaactgtgcaagctgtttcataatcacaatgttgagaactggaaaggatgatcctttttaaagttggggaaccactagcccaacatcgccatgaggg

SEQ ID NO: 407578 - DNA, 120 bp, Artificial Sequence
  ENSG00000147684_6 (sequence is synthesized)
gaaatagaggccgtgtcagccccaaccatcaaaggagacctttgtgcactgggtttgctgtaaatgacagaagccacttcaaaagcctctttggagctgttcagtaaaatgctcagggaa

SEQ ID NO: 407579 - DNA, 120 bp, Artificial Sequence
  ENSG00000147684_7 (sequence is synthesized)
gggcacactcaggcaagataaaccacacagacacctcgcagacagacctcccaggacagagggacagcaacaagactccaaaagcaacttgaagttttggcagcatgatcatccacagag

SEQ ID NO: 407580 - DNA, 120 bp, Artificial Sequence
  ENSG00000147684_8 (sequence is synthesized)
tgaagttcaacattcagtcaagaagaatcattctgattacttaattggaagatctgatacttctgaaatgaaacatttcacaaactctactgaaataagaaatacttttgatttattttt

SEQ ID NO: 407581 - DNA, 120 bp, Artificial Sequence
  ENSG00000147684_9 (sequence is synthesized)
taaaaaatgaatcattggttatggaaagaactatatggtcttgcagacaggacaaagttaaagatgttttgcaagcttaacacaaccaaatctgatttgagaattattttgaggcttgca

SEQ ID NO: 407582 - DNA, 120 bp, Artificial Sequence
  ENSG00000147684_10 (sequence is synthesized)
gctctgtttgtggcataaatatatacatacatacatacgcaggtatatatgtatgcaaaaatgcttattgactgtggaaatgacagtttaagtcactctgtatttcttttttccatgagt

SEQ ID NO: 407583 - DNA, 120 bp, Artificial Sequence
  ENSG00000147684_11 (sequence is synthesized)
ctaatattgaattacgatgattcaaaggctctcagagtgttgtgctaacatcgtaaatggctaaacatccaaaaaagaaaacaattaaaacacaacgcacacacaattttcttaaagttg

SEQ ID NO: 407584 - DNA, 120 bp, Artificial Sequence
  ENSG00000147684_12 (sequence is synthesized)
tggaaaattaggtaggcacagttgattgttttgagctggtagaaaaacctgggcagctagcagaggtctggacaaccacggaaagcccacagcaaggaccacaccgtgagcagccaccag

SEQ ID NO: 407585 - DNA, 120 bp, Artificial Sequence
  ENSG00000147684_13 (sequence is synthesized)
agatttgggatggtagacttaccaagagtgtccactggcgggggggcacacggtgagaaagtgcaggatacacaattgacacaaaaaggaaaataataaagtcaaactggtattcaagca

SEQ ID NO: 407586 - DNA, 120 bp, Artificial Sequence
  ENSG00000147684_14 (sequence is synthesized)
catgatgatacggctgctccattgggagggttggggtaggtccactgcccatccagaaggtatcagaagtgcagcctcctgtcagacagcaacactgaccacgtgagtaggtaacatttc

SEQ ID NO: 407587 - DNA, 120 bp, Artificial Sequence
  ENSG00000147684_15 (sequence is synthesized)
ccatgacagttactctgggcccttgcttctcagatatactttagtatctaagtgtatcaatttaacatttataatcaccttacaagtaagttaaagtgcattccctggtcgttttggctt

SEQ ID NO: 407588 - DNA, 120 bp, Artificial Sequence
  ENSG00000147684_16 (sequence is synthesized)
tgtctttgattttgcttcagatctccttctctttagtcctttgtctgacttttttgccttcttgctatactttccctcaacctgcctctccactattttcttaggcatttttcagtcatg

SEQ ID NO: 407589 - DNA, 120 bp, Artificial Sequence
  ENSG00000147684_17 (sequence is synthesized)
aggagctggggaccatggaagaaacatcccatgtgctttatcgaagtgccaagttgggaccacgggccgggctagaacgatccatggaaaagttctgtgctcaggggaacaactcaaatt

SEQ ID NO: 407590 - DNA, 120 bp, Artificial Sequence
  ENSG00000147684_18 (sequence is synthesized)
cagacattttgctagggctaagggaaatgagctggtaccttcgaatcagcttccagaacgcctgcagtgcaagttctcaattacggcatgcaaatgatttccttaaaaattaagtctaaa

SEQ ID NO: 407591 - DNA, 120 bp, Artificial Sequence
  ENSG00000147684_19 (sequence is synthesized)
ttgattcattgaggctcttggatattcatctcatggtcaccccttagtactcggctacaacagtgagtctcaaaaccacctggagtgctcctttaaaacacagacgactgggtccccacc

SEQ ID NO: 407592 - DNA, 120 bp, Artificial Sequence
  ENSG00000147684_20 (sequence is synthesized)
cccagaggtttggacttggtgggtctgggttgggcccaagaacttgcatttctagccagttcccacgtgatgctgctgacctggggacctcactttgagaaccaccctgctgggccttct

SEQ ID NO: 407593 - DNA, 120 bp, Artificial Sequence
  ENSG00000147684_21 (sequence is synthesized)
tgacttggtgagacaaagtaacggggaacaagtggtactagaacagtgaatgaggagtgagctacatggccatcaacttgcactgaatcgctggtctgtacaggagataccaccatcatg

SEQ ID NO: 407594 - DNA, 120 bp, Artificial Sequence
  ENSG00000147684_22 (sequence is synthesized)
attcctgacagtagattctccatgactcaacagtggatggataaaattagaaggaagccacctctacaccagcagtttaaaccttctggagttttccattaacttacaatcactggccgc

SEQ ID NO: 407595 - DNA, 120 bp, Artificial Sequence
  ENSG00000147684_23 (sequence is synthesized)
agcatagagatgaaggtacagaatcggccacgttcttcaatcaaagccttccggacagcctgcttttctgtttcttccaataagagatacttatcattgacatcttggagagcactgtcc

SEQ ID NO: 407596 - DNA, 120 bp, Artificial Sequence
  ENSG00000147684_24 (sequence is synthesized)
acagagacccaagcacggcttgctgaaataccagcttctggaacaagtgcccctcctccctggggtccttgctggagtcaaaaccacaattttccaggatgtaaaaaaagtatttattca

SEQ ID NO: 407597 - DNA, 120 bp, Artificial Sequence
  ENSG00000147684_25 (sequence is synthesized)
tgccccaaaaggatttaaggcagctgtttttctaggaccagccatttccaattttcaatgcccaaagggcacatttagcctggcttattcctgacaaggaaaatgtcctggggcaactct

SEQ ID NO: 407598 - DNA, 120 bp, Artificial Sequence
  ENSG00000147684_26 (sequence is synthesized)
tcatgacttgccttctcacactgcacaacccccaccaactcttctgccaacacaaccctggaacacagagccagacagcattctttccttgcagaacattctgaagaggctaagagatgt

SEQ ID NO: 407599 - DNA, 120 bp, Artificial Sequence
  ENSG00000147684_27 (sequence is synthesized)
aggaggaaacgccacctggtggtcctttaactgaagctttgccccctgcccgaaaggaagaagcagttttccagctttgcttctgctaccgtagcttggattgtctgcggactcaaaggt

SEQ ID NO: 407600 - DNA, 120 bp, Artificial Sequence
  ENSG00000147684_28 (sequence is synthesized)
gctgtgtgcagtccagaggaatcatgggagaaaggaagtcaagtccttaaacaccctacagaaacaaacactgcaatccagtatggcttattcggatgcatttaccatgaagctaccaga

SEQ ID NO: 407601 - DNA, 120 bp, Artificial Sequence
  ENSG00000147684_29 (sequence is synthesized)
agatactctaattaagagttccaagtaagataagactactctggatatttagagaaggcaggtaggggaggaatgaagccagttctccttggactgatgatggtgctatttttcagcaca

SEQ ID NO: 407602 - DNA, 120 bp, Artificial Sequence
  ENSG00000147684_30 (sequence is synthesized)
gtctttgactctaaggtgttttcctttatctttgcttcctacttatcctctgctgttccttgcttagagttagaaacagtctggtagttgcagtggttataaaaatatatcttgatcttt

SEQ ID NO: 407603 - DNA, 120 bp, Artificial Sequence
  ENSG00000147687_0 (sequence is synthesized)
cacttccgcttccgctggggaggtcctccatgcgcagtcatgagtcgcttcaagtttatcgatattggtatcaacttgactgaccctatgttcagaggaatttataggggggttcaaaag

SEQ ID NO: 407604 - DNA, 120 bp, Artificial Sequence
  ENSG00000147687_1 (sequence is synthesized)
catcaagatgacttacaggatgtaatagggagagctgtcgagattggtgttaaaaagtttatgattacaggtggaaatctacaagacagtaaagatgcactgcatttggcacaaacaaat

SEQ ID NO: 407605 - DNA, 120 bp, Artificial Sequence
  ENSG00000147687_2 (sequence is synthesized)
ggtatgtttttcagtacagttggatgtcatcctacaagatgtggtgaatttgaaaagaataaccctgatctttacttaaaggagttgctaaatcttgctgaaaacaataaagggaaagtt

SEQ ID NO: 407606 - DNA, 120 bp, Artificial Sequence
  ENSG00000147687_3 (sequence is synthesized)
gtggcaataggagaatgcggacttgattttgaccgactgcagttttgtcccaaagatactcaactcaaatattttgaaaaacagtttgaactgtcagaacaaacaaaattaccaatgttt

SEQ ID NO: 407607 - DNA, 120 bp, Artificial Sequence
  ENSG00000147687_4 (sequence is synthesized)
ggagtggtgcattcatttgatggtaccaaggaagcagcagctgctttgattgacttggatctttatataggatttaatggttgctcactgaaaactgaagctaatttggaagttttgaag

SEQ ID NO: 407608 - DNA, 120 bp, Artificial Sequence
  ENSG00000147687_5 (sequence is synthesized)
tcaattcctagtgaaaaattaatgattgagacagatgcaccttggtgtggagtcaaaagtacacatgctggatcaaaatatataagaactgcatttcctaccaaaaagaagtgggaaagt

SEQ ID NO: 407609 - DNA, 120 bp, Artificial Sequence
  ENSG00000147687_6 (sequence is synthesized)
gggcactgcttaaaagacagaaatgaaccctgccatataattcaaatattggagataatgtcagcagtgagagatgaggatccactggaattagccaatacactatataacaatactatt

SEQ ID NO: 407610 - DNA, 120 bp, Artificial Sequence
  ENSG00000147687_7 (sequence is synthesized)
aaagtattttttcctggaatataattggtatatgtcttccactttccatcatgtatgtaaaatttcatagtaaaacttcctgatagtttcaataaagaaattatctgcaagttgtctaaa

SEQ ID NO: 407611 - DNA, 120 bp, Artificial Sequence
  ENSG00000147687_8 (sequence is synthesized)
atgcgcagtcatgagtcgcttcaagtttatcgatcataggtgacagtgatgtgacacgattcagtgagcccaataactgaggcttcaacttaagagttgtggttttctcctggttacaaa

SEQ ID NO: 407612 - DNA, 120 bp, Artificial Sequence
  ENSG00000147687_9 (sequence is synthesized)
cagtgccgttttctactcttactttgttttgaaaacgaaaagtcaatatttgaagaactcttaaataataaaatattggtatcaacttgactgaccctatgttcagaggaatttataggg

SEQ ID NO: 407613 - DNA, 120 bp, Artificial Sequence
  ENSG00000147687_10 (sequence is synthesized)
gtgccataaaattactaagctttcctcatgtttttgcctaagaatatatctattcctaaaccccttcctggagcttctgcactaatgctagtgcagagacagcaacactgccactctaaa

SEQ ID NO: 407614 - DNA, 120 bp, Artificial Sequence
  ENSG00000147687_11 (sequence is synthesized)
gagagaaattctcggcagctaacgttttgcatcatgtcactggagatgatgacaggttgtaattgtgaaaaataatatgaaaataaaaattatagcgactaccacctttgaaaccctgag

SEQ ID NO: 407615 - DNA, 120 bp, Artificial Sequence
  ENSG00000147687_12 (sequence is synthesized)
atgacttacaggatgtaatagggagagctgtcgagattggtgttaaaaaggtaacatccattttgttatttttgagatttttaaaattcattttttaactaaattttagttaaaattttg

SEQ ID NO: 407616 - DNA, 120 bp, Artificial Sequence
  ENSG00000147687_13 (sequence is synthesized)
tcaaaatactctgttcatagcaatttaagttacacaaatctcatgtattgtttttatatatgataaatggcaaaagctccttgaaaaaaaattttttaaacctatgtgaattaccaggct

SEQ ID NO: 407617 - DNA, 120 bp, Artificial Sequence
  ENSG00000147687_14 (sequence is synthesized)
taagaggcaacttttaatcaattttataatataatttagcatttgtcagaattaagcaataatcaaaaatacatgtacctgacaccaagtgtagctatttatagtttgggcataccattt

SEQ ID NO: 407618 - DNA, 120 bp, Artificial Sequence
  ENSG00000147687_15 (sequence is synthesized)
aaataatggagtaaaactttcatttttacagtaataaaatgcctacggctttttagagagttctactaagcaaatgaatagatatttctttaaattagctttaaaacagagagctagccc

SEQ ID NO: 407619 - DNA, 120 bp, Artificial Sequence
  ENSG00000147687_16 (sequence is synthesized)
aggaaagctggagaaagaaatttgacttcaaactttaagtgaacaagtattttaaaacagcatgctcaacctcaacaattatgttttccagaagatctttgggggttattaatggaaaaa

SEQ ID NO: 407620 - DNA, 120 bp, Artificial Sequence
  ENSG00000147687_17 (sequence is synthesized)
catatgcaaatgatttttttcaatttagaagtttgctatgtctaagcacttagaaaatgagatgccagaatataactcaggaggttgtagttacgagtacttagctaaacaaggggtctt

SEQ ID NO: 407621 - DNA, 120 bp, Artificial Sequence
  ENSG00000147687_18 (sequence is synthesized)
gactaagcacatcacacttccaagtttcaaaatctgttcagaattttgtttacacagtgtctttataatggcttaattctacagcactttgtacagtgcaacaatttatattggtttagt

SEQ ID NO: 407622 - DNA, 76 bp, Artificial Sequence
  ENSG00000147687_19 (sequence is synthesized)
acagcactttgtacagtgcaacaatttatattggtttagtataagaattttagaatccgttgcctcttaaaacaag

SEQ ID NO: 407623 - DNA, 120 bp, Artificial Sequence
  ENSG00000147687_20 (sequence is synthesized)
cagagtgagactccgtctcaaaaaaataataaggtgaaaagctaaaacttttatctaaaccctgtcaaggctctccttataccatggactttaggaaagtcaagactgagccattctgga

SEQ ID NO: 407624 - DNA, 120 bp, Artificial Sequence
  ENSG00000147687_21 (sequence is synthesized)
aagtcaagactgagccattctggagaaatcacattcatttccttgggcagtcaggaaaacaaaatatttgattaaaagtacgatgtttgcaaaatgtgtaattctttattaaaaaatatt

SEQ ID NO: 407625 - DNA, 120 bp, Artificial Sequence
  ENSG00000147687_22 (sequence is synthesized)
caaaaccagtttcacattcagtagagatagaaatttgtttaacttatgcaaacctcactacatgcatagcgaaaaagattttgaaaactgaaaaaaaaactgtttaacttaaatgttttc

SEQ ID NO: 407626 - DNA, 120 bp, Artificial Sequence
  ENSG00000147687_23 (sequence is synthesized)
atgttgttatacaattgtatttaaggtttaggtcttttttttaaagcatgctgcacaccaacaatgttagcagaaaaaaggaatagaagtgagtcttagaaggtatttaagatgcaattc

SEQ ID NO: 407627 - DNA, 120 bp, Artificial Sequence
  ENSG00000147687_24 (sequence is synthesized)
aagattttatcttgtgcttttcttagaactgttttctgttgaaataactgtgccattttggaagctgaatcacggtttatcatttagaggttatatattagataatggtcataaaaaatt

SEQ ID NO: 407628 - DNA, 120 bp, Artificial Sequence
  ENSG00000147687_25 (sequence is synthesized)
gcttccgctggggaggtcctccatgcgcagtcatgagtcgcttcaagtttatcggtaagaggagcgttttccacgcccttgggtctttctgacttgtcccgggcgtcggtcaccaaggtc

SEQ ID NO: 407629 - DNA, 120 bp, Artificial Sequence
  ENSG00000147687_26 (sequence is synthesized)
aagtggcgaagcctggatttgaacccgggtctaccataggattctgtgaagcgagaggccaccttccaattccgttcccgaagtccttgaacctccaggtacccaggggcctctccacct

SEQ ID NO: 407630 - DNA, 120 bp, Artificial Sequence
  ENSG00000147687_27 (sequence is synthesized)
ccatggggccccgagggtcacctccccgagtcctgggtccccatcccttacctctggacgcaccacgactcgaggtggcgtagcgcccgcttataaagccgcaacaccttttgctgatgg

SEQ ID NO: 407631 - DNA, 120 bp, Artificial Sequence
  ENSG00000147687_28 (sequence is synthesized)
cgtcatatctgactatggacgaacggtttattctgtgacagtcatacatctctgcagtcaaagaaaccgaggctcaaagaaattaggaaacagctcactgaaaactgaagctaatttgga

SEQ ID NO: 407632 - DNA, 120 bp, Artificial Sequence
  ENSG00000147687_29 (sequence is synthesized)
agaacagcctgtagctctttacaagcactgtgctctttcccatcttgaaggctttgctcccgctgcttcctctttgtgcagttacctctcttccactggataacagtcactcatccttta

SEQ ID NO: 407633 - DNA, 120 bp, Artificial Sequence
  ENSG00000147687_30 (sequence is synthesized)
agattcagttcaatgatgacttctttctggaagcctcttctgagccagccaccagactaggttgggtgttcctcttctgtgtcccatagtaccagtgtttacttctaatatttcataatt

SEQ ID NO: 407634 - DNA, 120 bp, Artificial Sequence
  ENSG00000147687_31 (sequence is synthesized)
ctttatataggatttaatggttggtacgttcttaggttgctttggtttttaacttttatttaagcagatttcttaaattgtcttacagtgaattgctgatgaagatttattttcattaaa

SEQ ID NO: 407635 - DNA, 120 bp, Artificial Sequence
  ENSG00000147687_32 (sequence is synthesized)
aagtacaatgatccagtcggcatcagtagaacgagagggagaatgctgcgggatttaaatgggcatgatcctcgttttgtggggtttccagctacctgaaggtgggaaatgacagtgatc

SEQ ID NO: 407636 - DNA, 120 bp, Artificial Sequence
  ENSG00000147689_0 (sequence is synthesized)
gatgacttggagaacagtcacttcctctttctgggctacagttttctcatcagtaactgaagagcttgcagtaccttcaacattccttcaggtgaggacttctctttgatcactgctatg

SEQ ID NO: 407637 - DNA, 120 bp, Artificial Sequence
  ENSG00000147689_1 (sequence is synthesized)
gtttgaatgtgtctcctaaagttcatgtgttggaagcttgatccccagtgcaaaagtgttgggaggtggggcctaatgagaagtaattaggccatgagtattctgccctcatgtattcat

SEQ ID NO: 407638 - DNA, 120 bp, Artificial Sequence
  ENSG00000147689_2 (sequence is synthesized)
gagattaatgtcattatcatgggagcgggtttgttaaaatgagttcggccccttccttctctctctttcttctgccatacagtatgggatgcacagtgcagaaggtcttaccagatactg

SEQ ID NO: 407639 - DNA, 120 bp, Artificial Sequence
  ENSG00000147689_3 (sequence is synthesized)
gcaccatgcttttggacttctcagcccccagaaccatgagccaaataaatttctgttcattataaatcacccagtctgtggcatcctgttagagcagcataaatggactaagataatccc

SEQ ID NO: 407640 - DNA, 120 bp, Artificial Sequence
  ENSG00000147689_4 (sequence is synthesized)
tataaagagtggcaacagaacagttcccagctcactggcagaatcctatgatcaactagtaatgtctgccagggaaggaggatgagtggcactaacatgtacggtgtgtttgctcactgt

SEQ ID NO: 407641 - DNA, 120 bp, Artificial Sequence
  ENSG00000147689_5 (sequence is synthesized)
tctacaggattcaactagaatctctgggtctgtgtgaagaccaagagctgggaacagaagcagggctctagagggaaaagtttctttcggattccttttttttgttttgttttaaagagc

SEQ ID NO: 407642 - DNA, 120 bp, Artificial Sequence
  ENSG00000147689_6 (sequence is synthesized)
tgctctgtgagaagacaaggagaaaatggtccctacaggatactcacctctgtctcagggagacactcaagcatttattcaaccaagaaagagaattagttccaggtgaaaggagaaccc

SEQ ID NO: 407643 - DNA, 120 bp, Artificial Sequence
  ENSG00000147689_7 (sequence is synthesized)
cagaatacccacctacttttaaaattctcccctatgcatattcaggaaccaatcagaggatctgtaatgcgctgtgagtagaaagggaaggggaatgggaaagaaaaaagtgaagcttgg

SEQ ID NO: 407644 - DNA, 120 bp, Artificial Sequence
  ENSG00000147689_8 (sequence is synthesized)
aatggtggaaagtacatgggctctgccatttaccagctaagtgatcttgggcaagtaacttgacctttctgagcctcggtttcctctttggtgaaatgaggactaataatccatttctcc

SEQ ID NO: 407645 - DNA, 120 bp, Artificial Sequence
  ENSG00000147689_9 (sequence is synthesized)
ctcagtacagacagccagcatgcagtgagcactcagcgatggccaagtatgggagaagccatgctggaatgaacatgtgggaccattttgtgcagtttctcagcgccaacactgactggt

SEQ ID NO: 407646 - DNA, 120 bp, Artificial Sequence
  ENSG00000147689_10 (sequence is synthesized)
cccctgggctcgtgggccgccggcagcctcggctcgttctccagacagtgttccaagaagccacttccagcgaggaagcgttggcctgagaactggaacctctgcggtctctgcaaacac

SEQ ID NO: 407647 - DNA, 120 bp, Artificial Sequence
  ENSG00000147689_11 (sequence is synthesized)
gacaatgacaaacacttgagagggcatgggagaaaggagctccttcatagggcagggaggggtgggcacttgggtgtgaccaaggagaggaggcgcgcctggtcaacagctctccctggc

SEQ ID NO: 407648 - DNA, 120 bp, Artificial Sequence
  ENSG00000147689_12 (sequence is synthesized)
ccgtgtccagctccctcctcacacagagaggggggcgcatctcagggatggcatctttcccccccacagggaaattcttatctttgaaacagcatgggaatcgaggcacccaggagggga

SEQ ID NO: 407649 - DNA, 120 bp, Artificial Sequence
  ENSG00000147689_13 (sequence is synthesized)
gcagaggcaggcaggcctccttcaggcccatcctccagctgggctggtggtgccagggaggctccctgcttggtaacaaaggcctgagggagagttgcgaaacccagcaggaaagccggc

SEQ ID NO: 407650 - DNA, 120 bp, Artificial Sequence
  ENSG00000147689_14 (sequence is synthesized)
tcaccttcgcctccccctgcggctgggaggagaggaaatatcccatggctgactgtgccaaggaggtgtctgagccagccctcccggcccgagggcagggcaggtggccctgagagataa

SEQ ID NO: 407651 - DNA, 120 bp, Artificial Sequence
  ENSG00000147689_15 (sequence is synthesized)
gccaatcccgcagctgcagatgaggagttctgagaagcattgctcaggacagcggtaaatcacttcttggaggtgccctgcacgccggtcctgggagcaggcggcctcccgggggtgcgg

SEQ ID NO: 407652 - DNA, 120 bp, Artificial Sequence
  ENSG00000147689_16 (sequence is synthesized)
gagccccactcctccgtggtgtgttccatttgcttcccacatctggaggagctgacgtgccagcctcccccagcaccacccagggacgggaggcatgagccggtcaaggcacctgggcaa

SEQ ID NO: 407653 - DNA, 120 bp, Artificial Sequence
  ENSG00000147689_17 (sequence is synthesized)
aatccggaagcgtctggaagatgtcaagagccagtgggtccggccagccagggctgactttagtgacaacgagagtgcccggctggccacggacgccctcttggatgggggttctgaagc

SEQ ID NO: 407654 - DNA, 120 bp, Artificial Sequence
  ENSG00000147689_18 (sequence is synthesized)
ctactggcgggtgctcagccaggaaggcgaggtggacttcttgtcctcggtggaggcccagtacatccaggcccaggccagggagcccccgtgtcccccagacaccctgggaggggcgga

SEQ ID NO: 407655 - DNA, 120 bp, Artificial Sequence
  ENSG00000147689_19 (sequence is synthesized)
agcaggccctaagggactggactccagctccctacagtccggcacctacttccctgtggcctcagagggcagcgagccggccctactgcacagctgggcctcagctgagaagccctacct

SEQ ID NO: 407656 - DNA, 120 bp, Artificial Sequence
  ENSG00000147689_20 (sequence is synthesized)
gaaggaaaaatccagcgccactgtgtacttccagaccgtcaagcacaacaacatcagagacctcgtccgccgctgcatcacccggactagccaggtcctggtcatcctgatggatgtgtt

SEQ ID NO: 407657 - DNA, 120 bp, Artificial Sequence
  ENSG00000147689_21 (sequence is synthesized)
cacggatgtggagatcttctgtgacattctagaggcagccaacaagcgtggggtgttcgtttgtgtgctcctggaccagggaggtgtgaagctcttccaggagatgtgtgacaaagtcca

SEQ ID NO: 407658 - DNA, 120 bp, Artificial Sequence
  ENSG00000147689_22 (sequence is synthesized)
cggactggagatttgtcctgtctggatcttacagcttcacctggctctgcggacacgtgcaccggaacatcctctccaagttcacaggccaggcggtggagctgtttgacgaggagttcc

SEQ ID NO: 407659 - DNA, 120 bp, Artificial Sequence
  ENSG00000147689_23 (sequence is synthesized)
gccacctctacgcctcctccaagcctgtgatgggcctgaagtccccgcggctggtcgcccccgtcccgcccggagcagccccggccaatggccgccttagcagcagcagtggctccgcca

SEQ ID NO: 407660 - DNA, 120 bp, Artificial Sequence
  ENSG00000147689_24 (sequence is synthesized)
gtgaccgcacgtcctccaaccccttcagcggccgctcggcaggcagccaccccggtacccgaagtgtgtccgcgtcttcagggccctgtagccccgcggccccacacccgcctccaccgc

SEQ ID NO: 407661 - DNA, 120 bp, Artificial Sequence
  ENSG00000147689_25 (sequence is synthesized)
cccggttccagccccaccaaggcccttggggagccccgagtccccaggcccacctctccccgcggccccacgacggcccgcccgccgctgtctacagcaacctgggggcctacaggccca

SEQ ID NO: 407662 - DNA, 120 bp, Artificial Sequence
  ENSG00000147689_26 (sequence is synthesized)
cgcggctgcagctggagcagctgggcctggtgccgaggctgactccaacctggaggcccttcctgcaggcctcccctcacttctgaaggtcccatcccctgctgccctccgcaggcccag

SEQ ID NO: 407663 - DNA, 120 bp, Artificial Sequence
  ENSG00000147689_27 (sequence is synthesized)
ggctgggcactccctgagacccaaagacccacctcaacgacgagtggcgttgagccacttccctttgaaaagacactcaaaatcactgccatggttcaatgttcccaggccccaggccat

SEQ ID NO: 407664 - DNA, 120 bp, Artificial Sequence
  ENSG00000147689_28 (sequence is synthesized)
ccacttgccggcccccaccagttcttgggttccccgctctagtttgacctgtgcagcacattccagaaggttccagggaggttgtggggcagctagaggacaaaatcatgaaaacagagt

SEQ ID NO: 407665 - DNA, 120 bp, Artificial Sequence
  ENSG00000147689_29 (sequence is synthesized)
ccctgtcttccagagatcatccggggctttaatattaatggcccccaaaactccgtaagaagcaggaaatgcagcccaagttttacaaatgggtaaacagaggcactgagagatagatgg

SEQ ID NO: 407666 - DNA, 120 bp, Artificial Sequence
  ENSG00000147689_30 (sequence is synthesized)
tagtttggtacttctggttcccagtgcccaggaatggtccactcccaagaaattcaggaaagaaagactgaggagaaggtgtgggaacattctggatgtttcgggagagttggggaaact

SEQ ID NO: 407667 - DNA, 120 bp, Artificial Sequence
  ENSG00000147689_31 (sequence is synthesized)
cctcctcttaggaaaggctaatactagggtatccttgggcccaatgaattaggggtgaggccccagaacccgttatctatgagttgtatgggggagccatctgaagctgtagccaccagg

SEQ ID NO: 407668 - DNA, 120 bp, Artificial Sequence
  ENSG00000147689_32 (sequence is synthesized)
gatgcagctagctgaggagtttggggtgttgggttggacaaggcaggttagtagactcagattcttgcttcaaagagccttgggctggcctggaggtccctggagtctagactggaccta

SEQ ID NO: 407669 - DNA, 120 bp, Artificial Sequence
  ENSG00000147689_33 (sequence is synthesized)
ggagcttgagttgtcaggggccaggactggccccactgcagtgcccaggccagtcttgagcagcagggagggctcagctgtccccagatccaggtgcctctgaccagcctggtcacctcc

SEQ ID NO: 407670 - DNA, 120 bp, Artificial Sequence
  ENSG00000147689_34 (sequence is synthesized)
tgaggaataaatgctgaacctcacaagccccatcattcatttcttctcaattcacagtgcccctctttgtttctggggtggaactaggtcctgagggcacagcctagctgagtgcaaaga

SEQ ID NO: 407671 - DNA, 74 bp, Artificial Sequence
  ENSG00000147689_35 (sequence is synthesized)
atgccaaggtggttggattacctgagatcaggtggattacctggtctcgagaccagcctgaccaatatggtgaa

SEQ ID NO: 407672 - DNA, 120 bp, Artificial Sequence
  ENSG00000147689_36 (sequence is synthesized)
cactgcactccagcatgggcaacaaagcaagactccgtcacagaaaaaaaaaaaaaaaagagagagagcatagaggagggttggccagccctgtggtgggtgggatgtcagagacacttc

SEQ ID NO: 407673 - DNA, 120 bp, Artificial Sequence
  ENSG00000147689_37 (sequence is synthesized)
ccagataaagtaagagttaaccctgcacctcaggtgtgatagtggggtcagtggtatgtgatccaggctggggagccagaggggagcaggtgccaactccacatccttctcctgtttcta

SEQ ID NO: 407674 - DNA, 120 bp, Artificial Sequence
  ENSG00000147689_38 (sequence is synthesized)
ggccctctcctcccttgtcggtttttggcggggaagctcagccttcgctgtggagggacgagagcacagagctcttcctcctggtggcctctgacccctgacggcctgtggcatcctccc

SEQ ID NO: 407675 - DNA, 120 bp, Artificial Sequence
  ENSG00000147689_39 (sequence is synthesized)
tagtcccctctgcccatccatccctctgttccaattctccactgctcccagcatgatctggggcatcttggcttctggtttcttttattattattattattattaattattgtattcctg

SEQ ID NO: 407676 - DNA, 120 bp, Artificial Sequence
  ENSG00000147689_40 (sequence is synthesized)
aacaaaacaaaaacaaaaaaacaaacaacactttggttcctgatggctttctgaacccagccctgaccttgttgtttcacagctgacggctgagatgaggttagaatgactgggcccggc

SEQ ID NO: 407677 - DNA, 120 bp, Artificial Sequence
  ENSG00000147689_41 (sequence is synthesized)
agctgacggctgagatgaggttagaatgactgggcccggctgaacattccaaattggatttcaccatctgctgagaaagtttaaggaaggcaaagcttgccaggtcacagaagctcccaa

SEQ ID NO: 407678 - DNA, 120 bp, Artificial Sequence
  ENSG00000147689_42 (sequence is synthesized)
gcccagctttccaaaggcctcagcctgtgcctgtgtcgagctcagtcctgggagataggggagaacctgcaggcaggaacaagcccccctactcctgaccaccctccatcagcagtctcc

SEQ ID NO: 407679 - DNA, 120 bp, Artificial Sequence
  ENSG00000147689_43 (sequence is synthesized)
cctgctgggaggttaggtcggggctgccccggcgagtggagcatgagcagaaccgccgagggtcacttctgggcagaagctttgagagcctgggtccaggttgccacatagaagcagctc

SEQ ID NO: 407680 - DNA, 120 bp, Artificial Sequence
  ENSG00000147689_44 (sequence is synthesized)
tccagttgaaaccctcctctgccagcctggggtcctaagcgatgagcagaatcccccactcccaccccaccaacccacaatggatatgtagtgagcaagaaataaacctttgttgtttaa

SEQ ID NO: 407681 - DNA, 120 bp, Artificial Sequence
  ENSG00000147689_45 (sequence is synthesized)
ggaaaacatgccttcccccagccctcaacccttaacagctctcagccccgctgcccagcccactctccaactaaagaagccagcagagaagtctgaaaccatttccacacaagacagatg

SEQ ID NO: 407682 - DNA, 120 bp, Artificial Sequence
  ENSG00000147689_46 (sequence is synthesized)
gcagtaccttcaacattccttcagtacagacagccagcatgcagtgagcactcagcgatggccaagtatgggagaagccatgctggaatgaacatgtgggaccattttgtgcagtttctc

SEQ ID NO: 407683 - DNA, 120 bp, Artificial Sequence
  ENSG00000147689_47 (sequence is synthesized)
agaggaagataacaaccatcttcaatggcacatggcagttgccaaattgccatgaagcaatatctaaagccacctcatgctcaggagaaaacgctcaccttcccctcctggctccccgtg

SEQ ID NO: 407684 - DNA, 120 bp, Artificial Sequence
  ENSG00000147689_48 (sequence is synthesized)
ttctctagtaatgaactcaggaactggtcactgagagtatagtctctatggacagcttcggagccatggagtgaagccgagcaaatccatggaccactgccctgcccccggtctatctcg

SEQ ID NO: 407685 - DNA, 120 bp, Artificial Sequence
  ENSG00000147689_49 (sequence is synthesized)
ctagactagggacaggacttgggtgatgcaggaacagagaatggcctgaggaggacacagaccagaccagagaggaaggaagatgagaggaggatgcgggaaaggggcttacatcaatct

SEQ ID NO: 407686 - DNA, 120 bp, Artificial Sequence
  ENSG00000147689_50 (sequence is synthesized)
acagccggcaagaacgaggacacttcacagggctgggctgccgaggaaagatgagagactaaactgatgagaatcaccaaccagtttgatgacttggagaacagtcacttcctctttctg

SEQ ID NO: 407687 - DNA, 120 bp, Artificial Sequence
  ENSG00000147697_0 (sequence is synthesized)
agatgccacttgattttgttccacagactttttgctgaggacttgagagctaaggttctgtgatccagaactagttccagacttactcttctggaaatgaacagggccctcctgtgctta

SEQ ID NO: 407688 - DNA, 120 bp, Artificial Sequence
  ENSG00000147697_1 (sequence is synthesized)
tttttccaggatactgcattggaaattgagtcagggacccattggtgagaagagaacagtgaacagaatcacattgatctggtcctggagtttgtctgacaatttctacttgaccgcagg

SEQ ID NO: 407689 - DNA, 120 bp, Artificial Sequence
  ENSG00000147697_2 (sequence is synthesized)
aggtctgaagattggaaggggccctactcaattgtgctatttttctctcttttttttttttttgagacggagttgcccaggctggagtgcagcggcatggtctcagctcactgcaacctc

SEQ ID NO: 407690 - DNA, 66 bp, Artificial Sequence
  ENSG00000147697_3 (sequence is synthesized)
tcctgctatttctctacaggacaaagggatatataatctgcaacatgccctccatgttggaacgca

SEQ ID NO: 407691 - DNA, 120 bp, Artificial Sequence
  ENSG00000147697_4 (sequence is synthesized)
ggatatataatctgcaacatgccctccatgttggaacgcattagcaaaaatttggtcaaagagattggaagcaaagacctgacacctgtcaaatacctattgagtgccaccaaattacgt

SEQ ID NO: 407692 - DNA, 120 bp, Artificial Sequence
  ENSG00000147697_5 (sequence is synthesized)
cagtttgttatattacgaaagaagaaggattctcgttcatcattttgggaacaatctgactatgttccagttgaattctccctcaatgacatcctggagccaagttcttcagtcctagaa

SEQ ID NO: 407693 - DNA, 120 bp, Artificial Sequence
  ENSG00000147697_6 (sequence is synthesized)
actgttgtgacaggaccgttccacttcagtgacattatgatccagaagcataaggctgacatgggtgtgaatgttggtatagaagtgagtgtgtcaggggaggcctctgtggaccatgga

SEQ ID NO: 407694 - DNA, 120 bp, Artificial Sequence
  ENSG00000147697_7 (sequence is synthesized)
tgctccctcgagtttcaaattgttaccatcccatcaccaaacctggaagactttcaaaaaaggaaactgttggatccagagccatcatttctgaaggagtgccggaggagaggggacaac

SEQ ID NO: 407695 - DNA, 120 bp, Artificial Sequence
  ENSG00000147697_8 (sequence is synthesized)
ctgtacgtggtgacagaggctgttgaactgatcaacaatactgtgctgtacgatagcagtagtgtgaatattttagggaaaattgctctttggattacctatggcaagggtcaaggccaa

SEQ ID NO: 407696 - DNA, 120 bp, Artificial Sequence
  ENSG00000147697_9 (sequence is synthesized)
ggtgatggcttataagagaaagcagctggttatcaaggagaaagccattctcatctcagatgatgatgaacagagaacctttcaagatgagtacgaaatttccgaaatggtaggctactg

SEQ ID NO: 407697 - DNA, 120 bp, Artificial Sequence
  ENSG00000147697_10 (sequence is synthesized)
tgctgcgaggagtgaggggttgctaccatcatttcataccatctctccaaccctcttcaatgcctcatccaatgatatgaagttaaaaccagagctatttctgacacagcaatttttgag

SEQ ID NO: 407698 - DNA, 120 bp, Artificial Sequence
  ENSG00000147697_11 (sequence is synthesized)
cgggcatttgccaaaatacgaacaagttcacatcctcccagtaggaagaatagaggaacccttctggcaaaatttcaagcatctacaagaggaggttttccagaaaataaagacactggc

SEQ ID NO: 407699 - DNA, 120 bp, Artificial Sequence
  ENSG00000147697_12 (sequence is synthesized)
tcagctctcaaaggatgttcaggatgtcatgttctacagtatcctggccatgctcagagacagaggggctctacaggacctgatgaacatgctggaattggacagctcaggtcatttgga

SEQ ID NO: 407700 - DNA, 120 bp, Artificial Sequence
  ENSG00000147697_13 (sequence is synthesized)
tggccctggtggtgccatcctaaagaaacttcaacaggattcaaaccatgcatggtttaacccaaaggaccccattctttatctccttgaagccataatggtgctgagtgacttccaaca

SEQ ID NO: 407701 - DNA, 120 bp, Artificial Sequence
  ENSG00000147697_14 (sequence is synthesized)
cgatttgctggcctgttccatggagaagaggatcctgcttcagcaacaggagctggtaaggagcatcctggagccaaacttcagatacccctggagcattcccttcaccctcaaacctga

SEQ ID NO: 407702 - DNA, 120 bp, Artificial Sequence
  ENSG00000147697_15 (sequence is synthesized)
gctcctcgccccactccagagtgagggtttggccatcacctatggcctgctggaggagtgtggccttaggatggagctggataaccccaggtcaacctgggatgtagaagcaaagatgcc

SEQ ID NO: 407703 - DNA, 120 bp, Artificial Sequence
  ENSG00000147697_16 (sequence is synthesized)
cctgtctgccctctatgggactctctcgttgctgcagcagctggctgaggcctaagccctccctgatgggcagtcagtccagagatgctggccctcgcccagtctatgctgtgagtgtcc

SEQ ID NO: 407704 - DNA, 120 bp, Artificial Sequence
  ENSG00000147697_17 (sequence is synthesized)
ttatgggtgcaagagatagggctgtgcctctctgcgtttccaggtggagtagagacagtaatgggtagagactttaggaaatgttttggggtggtggaatactctatatattgacaagag

SEQ ID NO: 407705 - DNA, 120 bp, Artificial Sequence
  ENSG00000147697_18 (sequence is synthesized)
tttatatattgacaagagtttatatatttgtcaaaactcctcaaatagtatgttaaagacgtaagcgtttcactatgtataaattttacttcaaaataataaaaacaaatactgactcta

SEQ ID NO: 407706 - DNA, 120 bp, Artificial Sequence
  ENSG00000147697_19 (sequence is synthesized)
tcccatcctgcacacatggggtaagtagggcagattgcccctgcctcgcctttgccaccaccgccctagggcctggcgtttggtcatgtggaatgggaagggtccagaaagctgagaaca

SEQ ID NO: 407707 - DNA, 80 bp, Artificial Sequence
  ENSG00000147724_0 (sequence is synthesized)
agtcgcgcagcgtctacccacgcggtgcgcagcggctgcggagcggagccagcgggagcagcagggcgggctctcccggc

SEQ ID NO: 407708 - DNA, 120 bp, Artificial Sequence
  ENSG00000147724_1 (sequence is synthesized)
cccggcggaggaaggagaggagtgagggcgccagaggtgagcgcagcccgggaggcgccagcccagcggcgcgggcgcagccggtcggtccttgctttcttgcggcgctggcggctgcgt

SEQ ID NO: 407709 - DNA, 120 bp, Artificial Sequence
  ENSG00000147724_2 (sequence is synthesized)
tcccccgaccgcgctgacagcctcgcgtcctggcgcctgctcgctggggctgcccggaggccgcggccgggcagctgttgcacggagaggggggcagttgcggggttccataaccatagc

SEQ ID NO: 407710 - DNA, 120 bp, Artificial Sequence
  ENSG00000147724_3 (sequence is synthesized)
aaccgcatcagcaccggcggcggcgggcgagggcagcatccgctcgctcctcctccaggcagcctcgccgcggggacccaacaccagctcgcaggtgctgcggactccccagtccgcccg

SEQ ID NO: 407711 - DNA, 120 bp, Artificial Sequence
  ENSG00000147724_4 (sequence is synthesized)
ccgccgccgccgccgcaactgttggcggccagagacggcgaaagaggagagagagggacccaggagcgcggcccccgggggagagagaggggagccctgcagtggagacaggtaatgagc

SEQ ID NO: 407712 - DNA, 120 bp, Artificial Sequence
  ENSG00000147724_5 (sequence is synthesized)
caaaaagatcatgtctgaaatacaaggaacggttgagttttcggtagagctacataaattttataatgtggatctctttcagagagggtattaccagatccgagtgaccttgaaggtgtc

SEQ ID NO: 407713 - DNA, 120 bp, Artificial Sequence
  ENSG00000147724_6 (sequence is synthesized)
ttcaaggatcccccacagactgagtgcctccatcgctgggcagacagagagcagcagcctgcattcagcctgtgtccatgacagcaccgtgcacagccgggtctttcagatcttataccg

SEQ ID NO: 407714 - DNA, 120 bp, Artificial Sequence
  ENSG00000147724_7 (sequence is synthesized)
gaatgaagaggtacccataaatgatgctgtggtcttccgagttcatttactcttgggtggtgaaaggatggaagacgcactgagtgaagtagattttcaactcaaggtggatctgcactt

SEQ ID NO: 407715 - DNA, 120 bp, Artificial Sequence
  ENSG00000147724_8 (sequence is synthesized)
tacggacagtgaacagcagttgagggatgtggctggggcaccgatggtcagcagccgaacgcttggcctgcacttccacccccggaatggtctgcaccaccaggtcccggtcatgttcga

SEQ ID NO: 407716 - DNA, 120 bp, Artificial Sequence
  ENSG00000147724_9 (sequence is synthesized)
ctatttccacctgtctgtgatctcggtgaccgtccatgctgccctggtggctctgcagcagccattgatcagttttactcgtccaggaagaggctcctggcttggtaaaggtggcccaga

SEQ ID NO: 407717 - DNA, 120 bp, Artificial Sequence
  ENSG00000147724_10 (sequence is synthesized)
caccggacaagaacagtctatcatttctctggaaaacttggtctttggagctgggtactgcaagccgacttcctcagagggaagcttctacatcacctctgagaactgcatgcagcacgc

SEQ ID NO: 407718 - DNA, 120 bp, Artificial Sequence
  ENSG00000147724_11 (sequence is synthesized)
acacaagtggcaccgagacctgtgcctgttgctcctccacgcttaccggggtctccgtctccacttcctggtgatcatgcgggacatcccagagctgccacacacggagctggaggccct

SEQ ID NO: 407719 - DNA, 120 bp, Artificial Sequence
  ENSG00000147724_12 (sequence is synthesized)
tgctgttgaagaaacactttctcagctgtgctcagagctacagatgttgaacaatccagagaagatcgctgagcagataagcaaggatctggcctggctcacgtcccacatgatgactct

SEQ ID NO: 407720 - DNA, 120 bp, Artificial Sequence
  ENSG00000147724_13 (sequence is synthesized)
gtggacccagttcctggacacagtcactctgcactcccaagtgaccacttatctcacccaggaacaccacaccctgagggtccgaaggttttctgaggccttcttttacatggagcacca

SEQ ID NO: 407721 - DNA, 120 bp, Artificial Sequence
  ENSG00000147724_14 (sequence is synthesized)
aaaacttgcagtcctgacatttcaggagaatctgatacagacgcacagccagctgtccctggatatccggaactcggagtacctcactagcatgcccccgctgcctgcagagtgcctgga

SEQ ID NO: 407722 - DNA, 120 bp, Artificial Sequence
  ENSG00000147724_15 (sequence is synthesized)
catcgacggcgattggaacaccctgccggtgatctttgaggacagatacgtggactgccctgcgacagggcataacttgagtgtttatcctaattttgatgttccagtgacaagtcctac

SEQ ID NO: 407723 - DNA, 120 bp, Artificial Sequence
  ENSG00000147724_16 (sequence is synthesized)
aataatgaatctgaaagacaaggaagataactgtatggtaaatagcaatttatcttttagggaagaccttgtcttgtctaccataaaaccatcccaaatggattctgatgaagaagttat

SEQ ID NO: 407724 - DNA, 120 bp, Artificial Sequence
  ENSG00000147724_17 (sequence is synthesized)
aaggtgtccagagccaggtgagaatgtggccacacaaaatcatatggacatgtgctctgaatctcaggtgtatatatcaattggtgaatttcaaaacaaagcaggtgtgcctgaagatga

SEQ ID NO: 407725 - DNA, 120 bp, Artificial Sequence
  ENSG00000147724_18 (sequence is synthesized)
atgttggactggccaaacatctgatgctgggacatatccagtggcagatgtggatacttctagaaggagtccaggtccagaggatggacaggccccagtgctgacctacattgacgtaaa

SEQ ID NO: 407726 - DNA, 120 bp, Artificial Sequence
  ENSG00000147724_19 (sequence is synthesized)
atctagcaataagaacccctccagagctgaacccctggtggccttcaatgctcagcatgagagtaggagctctagagataagtatggattagacaggactgggctaagcaaagtggtagt

SEQ ID NO: 407727 - DNA, 120 bp, Artificial Sequence
  ENSG00000147724_20 (sequence is synthesized)
aggtggaagccaccaaaatgccatctcttcagacaaaacaactctccatgaattaagtactctaggaaagggaatagatcaagaggggaagatggtgctgctaagcttgaaactcacccc

SEQ ID NO: 407728 - DNA, 120 bp, Artificial Sequence
  ENSG00000147724_21 (sequence is synthesized)
ctctgagccctgtgatccactaagttctaccctgagggagcccttagatattaggtcttccctaaaggactctcacacagaagagcaggaggaactctcagtgctatccggggtcatcaa

SEQ ID NO: 407729 - DNA, 120 bp, Artificial Sequence
  ENSG00000147724_22 (sequence is synthesized)
gagatcttcatccatcatatctgattcaggcattgagagtgagccaagctccgtcgcctggtcagaggcccgaagcagggctctggagttgcccagtgatcgggaagtcttgcacccgtt

SEQ ID NO: 407730 - DNA, 120 bp, Artificial Sequence
  ENSG00000147724_23 (sequence is synthesized)
tgttcgaagacatgccctccaccggaactccctagagggtggacacacagaaagtaacacaagtttgccaagcggcatccaggcttctctcacctccattagctctttaccttttgagga

SEQ ID NO: 407731 - DNA, 120 bp, Artificial Sequence
  ENSG00000147724_24 (sequence is synthesized)
ggatgagcgggaggtggcactcactaagttaaccaagtctgtatctgctccccacatcagtagcccagaggaggctgctgaagatgcggacaccaagcagcaagatggaggttttgctga

SEQ ID NO: 407732 - DNA, 120 bp, Artificial Sequence
  ENSG00000147724_25 (sequence is synthesized)
accttcagatatgcacagcaagagccaaggttccccaggatcttgctctcaactttgtggtgactctggaacagatgctggagcagaccatcccctggtggagatagttttagatgctga

SEQ ID NO: 407733 - DNA, 120 bp, Artificial Sequence
  ENSG00000147724_26 (sequence is synthesized)
caaccagcagggccccggatacatagacatccccaaagggaaagggaagcagtttgatgctcaaggacactgtcttcctgatggcaggactgagaacactccaggtgttgaaaccaaagg

SEQ ID NO: 407734 - DNA, 120 bp, Artificial Sequence
  ENSG00000147724_27 (sequence is synthesized)
tcttaatttaaaaataccacgcgtcatagcacttgaaaaccccaggaccagatctcttcatagagcacttgaggaaaccccaaagggcatgcctaaagacttgaatgtgggtcagcaagc

SEQ ID NO: 407735 - DNA, 120 bp, Artificial Sequence
  ENSG00000147724_28 (sequence is synthesized)
tctttccaacagtggcatctcagaggttgagggtctctctcaacatcaggtgcctgaattgagctgtacgtcagctgctgatgccatcaacaggaactcaacaggccagcaaagccaaag

SEQ ID NO: 407736 - DNA, 120 bp, Artificial Sequence
  ENSG00000147724_29 (sequence is synthesized)
cggttcaccttgcattatggatgacacagcatttaatagaggagtgaatgccttcccggaggctaaacataaagcaggcactgtgtgccccactgtgacccattccgttcattcccaggt

SEQ ID NO: 407737 - DNA, 120 bp, Artificial Sequence
  ENSG00000147724_30 (sequence is synthesized)
cctgaaggctgtggaggttgtgaacttatctgtgtcttgcactgccacctgtctccctttctcatctgtgcccaaggagacccctgccagggctggattctcttccaaacagaccctgtt

SEQ ID NO: 407738 - DNA, 120 bp, Artificial Sequence
  ENSG00000147724_31 (sequence is synthesized)
tcccatcacccatcagcctttgggatcctttggagttgtttctacccattccagcacgttggatgaggaagtcagtgagaggatgtttagtttttatcaggccaaagaaaaatttaaaaa

SEQ ID NO: 407739 - DNA, 120 bp, Artificial Sequence
  ENSG00000147724_32 (sequence is synthesized)
agaactgaagattgaaggatttctgtacagtgacttaactgtactagcttctgatataccatatttcccaccagaggaagaggaagaaaatttggaagatggaattcacctggttgtctg

SEQ ID NO: 407740 - DNA, 120 bp, Artificial Sequence
  ENSG00000147724_33 (sequence is synthesized)
tgtccatggcctggatgggaacagtgcagacctccggctggtaaagactttcatagaactggggctccctggaggaaaactggacttcctaatgtctgaaaagaatcagatggacacatt

SEQ ID NO: 407741 - DNA, 120 bp, Artificial Sequence
  ENSG00000147724_34 (sequence is synthesized)
tgcagattttgatactatgacggatcggttattggatgaaatcattcaacacattcagttgtacaacctctccatatcccgaattagcttcattggccattctcttggcaacatcatcat

SEQ ID NO: 407742 - DNA, 120 bp, Artificial Sequence
  ENSG00000147724_35 (sequence is synthesized)
ccgatcggtcctcacacggccccggttccggtattacctcaacaaactccacacgttcctgtcactctctgggcctcacctgggaaccctgtacaacaacagcaccctggttagtacagg

SEQ ID NO: 407743 - DNA, 120 bp, Artificial Sequence
  ENSG00000147724_36 (sequence is synthesized)
cttatggctcatgcagaaactgaagaaatccgggtctctactgcagctgaccttcagggataatgctgatttgcgcaaatgtttcctctaccaactaagccaaaaaacagggctgcagta

SEQ ID NO: 407744 - DNA, 120 bp, Artificial Sequence
  ENSG00000147724_37 (sequence is synthesized)
ttttaaaaacgtcgtgctggttgcttctccccaagaccgttatgtgccatttcattcagccaggattgaaatgtgtaaaactgccctcaaagacagacacacagggccagtttatgcaga

SEQ ID NO: 407745 - DNA, 120 bp, Artificial Sequence
  ENSG00000147724_38 (sequence is synthesized)
aatgatcaacaacctcctgggccctctggttgaagccaaggactgcactttaatccgacacaacgtgttccacgccctgcccaacactgccaacaccctgatcggccgagccgctcacat

SEQ ID NO: 407746 - DNA, 120 bp, Artificial Sequence
  ENSG00000147724_39 (sequence is synthesized)
cgctgtgctggattcagaactcttcctggagaagtttttcttggtggcaggactcaactacttcaagtagtggctttgagggagcaggtctttggtaatgcttacgatcggtggagagct

SEQ ID NO: 407747 - DNA, 120 bp, Artificial Sequence
  ENSG00000147724_40 (sequence is synthesized)
ttagctgagacctgcttttacagacctcaccatttcagaatgaagcttcaacagcattgggggacggaggctcgggtggaacctgacatgagaggtgcttttgttttggagattcgagaa

SEQ ID NO: 407748 - DNA, 120 bp, Artificial Sequence
  ENSG00000147724_41 (sequence is synthesized)
agctgagcaaatagactaaatgacaacaaactttgcttgaatttgtatagttacctggagtgtcattcaagatgttttctaggaaaaatatgagagaataaacagaatacttgggagttg

SEQ ID NO: 407749 - DNA, 120 bp, Artificial Sequence
  ENSG00000147724_42 (sequence is synthesized)
gtgagctccccttgctagccactactggcttactgagagattactccaatttaactagacttgccgaatatgttactagcttatagctttatcatttctgattaagtgcacacaagcatt

SEQ ID NO: 407750 - DNA, 120 bp, Artificial Sequence
  ENSG00000147724_43 (sequence is synthesized)
tcagaactcaggttaatctctgtgcagcagtggaacatatttgtgtaaatagaatcctcaatagattcaaatgtgtcagttgttcaagaaaatgtgatgcccatattcatattctctcct

SEQ ID NO: 407751 - DNA, 120 bp, Artificial Sequence
  ENSG00000147724_44 (sequence is synthesized)
catgttttctaaacaagggagcaaggaatgtgttacaaatcccagttctatttcataacagcagtgagcagggtgacttaaggtaaagagggataaaggtgacactattggtaaatacaa

SEQ ID NO: 407752 - DNA, 120 bp, Artificial Sequence
  ENSG00000147724_45 (sequence is synthesized)
gtttgttacaaagaaacatgactctagggacatactgaactatgaatagttgctccacctacttccccagaattcttctatgcagagccctgatccacaaattattttagtgattgctta

SEQ ID NO: 407753 - DNA, 120 bp, Artificial Sequence
  ENSG00000147724_46 (sequence is synthesized)
catctttgtctgtagtagggaacactgagtgagactaacctagcagaagggggcactgagatgaatgcacacacgtgtgaagctcctgctgatacacttccaaagacatgctatgttagc

SEQ ID NO: 407754 - DNA, 120 bp, Artificial Sequence
  ENSG00000147724_47 (sequence is synthesized)
atttgatgcaattgcaaaaaattaaatccattaaagtggccagctgcttctcctctccatggaaggaggaaaacatctaaatggaggagtgctggattaaaacctcaggggagctctaag

SEQ ID NO: 407755 - DNA, 120 bp, Artificial Sequence
  ENSG00000147724_48 (sequence is synthesized)
aagggtgctggctatctttcaatagaaatgtcttcttgccttaggaaaataaagggctaggaaaggtcactgcgttgataaaaaccaatagacgacagggacaaaagtgagatcagatag

SEQ ID NO: 407756 - DNA, 120 bp, Artificial Sequence
  ENSG00000147724_49 (sequence is synthesized)
gaggagaacaaccagactgaagactcaacataagctgttattggtaagtgactcaaaggggagttttgaaaattaccaggatgtttaatagtcaggtctcaaagactgagtatgttgtat

SEQ ID NO: 407757 - DNA, 120 bp, Artificial Sequence
  ENSG00000147724_50 (sequence is synthesized)
gggctaaagtaagcctaaagaatcatttcgttgtatggaagagatgaatgaacctggacagtagggataagtaagacaggagcctaatcttttggagatgaaagctcctgcttctgcaaa

SEQ ID NO: 407758 - DNA, 120 bp, Artificial Sequence
  ENSG00000147724_51 (sequence is synthesized)
aatcccttctgaagtgtggaaacgcatctaggaccagggttctcaatacctagaccatgactctaggtcactgatgccatggtaacaaaaccaagtaaatctaagctcatttgagaattt

SEQ ID NO: 407759 - DNA, 120 bp, Artificial Sequence
  ENSG00000147724_52 (sequence is synthesized)
tagatcctcttatgttaacaatgtgactttgaaaaataaaagcagaccatgggaatgagtccagatgggcagctttgcaggagtgtagacatgtggtattcttttgaagaaagagagggt

SEQ ID NO: 407760 - DNA, 120 bp, Artificial Sequence
  ENSG00000147724_53 (sequence is synthesized)
cgttgagggagagttgaatgtcttgcaaaggcagagttccacacaatggatttagggtttctcagtgagtcctttctaaatgcttgttatatcctggtcataatgcatatgggttcactg

SEQ ID NO: 407761 - DNA, 120 bp, Artificial Sequence
  ENSG00000147724_54 (sequence is synthesized)
agtcctctggtcactttccactggggatttttatctgagctcccgagtcagagctgggcatagactctggttcttcatgaggagtgctgtatttgctctgtaacctgggagacatttgtt

SEQ ID NO: 407762 - DNA, 120 bp, Artificial Sequence
  ENSG00000147724_55 (sequence is synthesized)
ccctagtcgtgcagcacatggtattgtgtttcctgacctaggcaagtgcccatgctcagtacagaaccataagttggtagcagcttctcctttctggccaaatgatgggccctgtccctc

SEQ ID NO: 407763 - DNA, 120 bp, Artificial Sequence
  ENSG00000147724_56 (sequence is synthesized)
tgatgagtgcatttcatgttgtgtttccaattttcatcagcaatgttcgtcattccctggtcctttgaaagactgtgtagcccgcggttatggagccgggatgaatctgatgatcatcat

SEQ ID NO: 407764 - DNA, 120 bp, Artificial Sequence
  ENSG00000147724_57 (sequence is synthesized)
cttctccaataaccagatgccatttttaacttcaatatgctgtctggacatagtgagaactaatggcaataaacgtccagctgcatggtgcacctcttttttataggggtgctctgctgt

SEQ ID NO: 407765 - DNA, 120 bp, Artificial Sequence
  ENSG00000147724_58 (sequence is synthesized)
ctttgtaaaccctctctggcctctgagcatctattataattgtgtagaaagtacatctctatattgtaaataagagtgtcgagtgttgcgtgtcatgcctcatttgaaaaggctttttta

SEQ ID NO: 407766 - DNA, 120 bp, Artificial Sequence
  ENSG00000147724_59 (sequence is synthesized)
atatatacataaaatatatataaatatatattatgtaaaacagggacattctattattgattgtaaaaattataaacaaaatgcctgccaagataatggtcttgtatgtcttcattctct

SEQ ID NO: 407767 - DNA, 120 bp, Artificial Sequence
  ENSG00000147724_60 (sequence is synthesized)
atgcctgccaagataatggtcttgtatgtcttcattctctgcgtaatttttgtttttgtttttatgatttgttgtttcccaaaatgagttagaaataaaaatgcccaatattgagattaa

SEQ ID NO: 407768 - DNA, 120 bp, Artificial Sequence
  ENSG00000147724_61 (sequence is synthesized)
aagagggatctgtggtgatttgggagccaaaggaaggagctcttcacccagtgtagggtatggtttgtgaaggtatccctagagaaggtgactctgcggctgagcttgaaggaagagaat

SEQ ID NO: 407769 - DNA, 120 bp, Artificial Sequence
  ENSG00000147724_62 (sequence is synthesized)
tggtaggtgacaaagaagaggtccactcatatgatcgaatttgaatcaaggtctcaagctaatctaaggaaaaaaaaaaagcagagaagctatatggcagaaagcagagaattggaaggg

SEQ ID NO: 407770 - DNA, 120 bp, Artificial Sequence
  ENSG00000147724_63 (sequence is synthesized)
aagtcacaaaagaagagaacatacttgcaggcattgtttcaggtagtgagtgaaatctgcaaacaaacagaaattctttctctcgtggaatgtatgtactaactggagaaagcattgttt

SEQ ID NO: 407771 - DNA, 120 bp, Artificial Sequence
  ENSG00000147724_64 (sequence is synthesized)
aaaaaataagcaaataggatgtcaggctgtgttcaagagagtgtatttagttcttcacacaatagtgatgctgatggataaagatttccagtttggtctcaatccaataaaacaccccca

SEQ ID NO: 407772 - DNA, 120 bp, Artificial Sequence
  ENSG00000147724_65 (sequence is synthesized)
ttcaaagtgtcattgtcccactctttccaactgatgccctaaagctcacagaagagacttgttgggtgtgcaaatttggctttcctcataattctgcaacctgcataagaaagttttagt

SEQ ID NO: 407773 - DNA, 120 bp, Artificial Sequence
  ENSG00000147724_66 (sequence is synthesized)
tctgattttcagccttatcttccctgtgactacatgaaataagagattattttagggctaccccagaaacaaacttgttctctcatcagagctgagttgatagacagtctgaaggctaga

SEQ ID NO: 407774 - DNA, 120 bp, Artificial Sequence
  ENSG00000147724_67 (sequence is synthesized)
tcttgttattttcctctgtttactctccagtgctgtaaaaaatatccatcccagcatgcttgtattcatcattaacattgtagccacgtggagcagccactcggtcatccaaggcacttg

SEQ ID NO: 407775 - DNA, 120 bp, Artificial Sequence
  ENSG00000147724_68 (sequence is synthesized)
ctagagtgagcacttcctccactgaggctggagggtctacgatgacttcactcacatgtgtgggggtcttggtgcaggcgctaactgttcctctctttctttaaggtctgtgtttagtat

SEQ ID NO: 407776 - DNA, 120 bp, Artificial Sequence
  ENSG00000147724_69 (sequence is synthesized)
tctagtgtaggctttgttacatagtggcaggaacactccaaaatagcaaagtagaaggctcaggaactcacacagtttcacttctgcatattcagttaccacccagaccaaggggcatgg

SEQ ID NO: 407777 - DNA, 120 bp, Artificial Sequence
  ENSG00000147724_70 (sequence is synthesized)
aaattggctctacctcttgagttgcatgtcatgaaatatcatagccactttttcaatcaattagaggaagcctacagtatgagtatatctcagaaatgtgatagattttaaattgatctt

SEQ ID NO: 407778 - DNA, 120 bp, Artificial Sequence
  ENSG00000147724_71 (sequence is synthesized)
gcctttctaaagatgtttcccatctatactctgtgagagacacctctaaaatatctcatgtcaaaaaagtattgggtaaggtgtccagtaacctaggtttgtggtctggctctggaactg

SEQ ID NO: 407779 - DNA, 120 bp, Artificial Sequence
  ENSG00000147724_72 (sequence is synthesized)
atttatgttatcttgtaatgatagcaatgatgatgattttggtgatgacggtgatggtgattttattagatatgatttagacaatgcagttagtactttcatgtgcattattataaatat

SEQ ID NO: 407780 - DNA, 120 bp, Artificial Sequence
  ENSG00000147724_73 (sequence is synthesized)
ttaaattctaattttaccttttttggacttttgtatgtattatctgttaaatataaagcccatattttacttttgtcctagatatttgtcactatcttgcacccatttctccctcctaat

SEQ ID NO: 407781 - DNA, 120 bp, Artificial Sequence
  ENSG00000147724_74 (sequence is synthesized)
agcacccagacattcctctagatgaattgtctcttgaatgtatgctcttggttgaaagtaaccccagaaatatgccttcttctggggtggcttaagggttcctgagacatttatttgcaa

SEQ ID NO: 407782 - DNA, 120 bp, Artificial Sequence
  ENSG00000147724_75 (sequence is synthesized)
gagcatagccaaaagctggggcgatgaccttaatatggccaggaagctacctctcacctggaactttaagtcttaactgagatgagtcaacacaaaagaaaacattatagttcctgcagc

SEQ ID NO: 407783 - DNA, 120 bp, Artificial Sequence
  ENSG00000147724_76 (sequence is synthesized)
ccagtggtgggaacctggtgagcttgtcaagttctcactgatgagactggcaagaacaccctgatagctcttagttcttagccttgttcatcacactatcttccctatgatcctcgcacc

SEQ ID NO: 407784 - DNA, 120 bp, Artificial Sequence
  ENSG00000147724_77 (sequence is synthesized)
tgcactccagttctccagtgggtccattcttgcacaggtaagccaggattagtgttggcatcccaggaaccatgactgcttcagttatctattgaattactttagaagtacctggagtga

SEQ ID NO: 407785 - DNA, 120 bp, Artificial Sequence
  ENSG00000147724_78 (sequence is synthesized)
tggaaagtgcttggccaaagtttacaaagccctgtagccaataactggttccaaatttcaggtctgccttttctgctcacatttcaacattggacagtcaaactttctaagcacgaattt

SEQ ID NO: 407786 - DNA, 120 bp, Artificial Sequence
  ENSG00000147724_79 (sequence is synthesized)
cttcagttgtaacatgggacacaataatacatccctagcagaggggttaggattaaattagagagcagctgtgaagcacctgggagagcttctggcacacagtaacagtggaaagttctg

SEQ ID NO: 407787 - DNA, 120 bp, Artificial Sequence
  ENSG00000147724_80 (sequence is synthesized)
gcactacagtagaaagttctttccctttctgttaatgttaatgcttcatccccattcacagagactggagtatcccttgactactccagtcaaagggaaacccaacatgacatgttccct

SEQ ID NO: 407788 - DNA, 120 bp, Artificial Sequence
  ENSG00000147724_81 (sequence is synthesized)
ccccctaggaaatgtcctcctctgatgttatgaggtcggcctatgaagctttaccttggagtttgaagatgagactggtgtttgtaacccatgaggactactgaggtcacatggtgtagt

SEQ ID NO: 407789 - DNA, 120 bp, Artificial Sequence
  ENSG00000147724_82 (sequence is synthesized)
caggtctgaattcatacctaatgatgacatatgtgattagctgcttaatcttgaacgtcatttattgtcctatgtgctatgattctctcatattgaccacacagggccattatgaaatga

SEQ ID NO: 407790 - DNA, 120 bp, Artificial Sequence
  ENSG00000147724_83 (sequence is synthesized)
taattggtaatttacatgcaggttctttgtaacctagaagaatattatctttgtactggagcctcctcaaagattttcaggtatatacacaccagaaactttgccttgtacagctcctgg

SEQ ID NO: 407791 - DNA, 120 bp, Artificial Sequence
  ENSG00000147724_84 (sequence is synthesized)
tggataaatgaaggccttcaaatgggcaggaaataatccaatttccatgaaagttaattgagctctgtgttttctaaaggctaatagcctggtgagagatgtcctgagtcaagctaatgt

SEQ ID NO: 407792 - DNA, 120 bp, Artificial Sequence
  ENSG00000147724_85 (sequence is synthesized)
gatgacccacttgtttttttaggtaccagttatggaacagaagccacatctgtcactgataacctgtttgtatagtgacctcttccaccccacccacaaggttgccatggcaattttagg

SEQ ID NO: 407793 - DNA, 120 bp, Artificial Sequence
  ENSG00000147724_86 (sequence is synthesized)
tcaagaagatcatcccattgaaagacaggaaatgctaaggagtaaaatgcagtccccaggaaacctggttttagtccttgctacatattattaaatggctggtccagtatctggttggga

SEQ ID NO: 407794 - DNA, 120 bp, Artificial Sequence
  ENSG00000147724_87 (sequence is synthesized)
ctactgtgccaggcatcatcctcaggtgatgtctgatcatcctggcctgtctttggcaagaatccagttcagtgggttttgccagaatccttttacttctgaggttttctcttagttgtt

SEQ ID NO: 407795 - DNA, 120 bp, Artificial Sequence
  ENSG00000147724_88 (sequence is synthesized)
ttccatcctctgatccctctcttgttccttggttatatatttccccttgcttgtgctgtattcaaaattgaacccagttttatattgaagcatcttttctcctgtttcaataatccagaa

SEQ ID NO: 407796 - DNA, 120 bp, Artificial Sequence
  ENSG00000147724_89 (sequence is synthesized)
tagagtctgtttctaccactttaactactgcctagctctgtttttttctttgatagagctcagaagtgcaattcaaatttgatttgtagatgtagcagcaatcaagatttagctggtatt

SEQ ID NO: 407797 - DNA, 120 bp, Artificial Sequence
  ENSG00000147724_90 (sequence is synthesized)
tgaagacactcatattatcactctttctactaccctttattatattttttgattctgccccacattatttttgctaaggaaggagagttccaggaactctcatggagtacttgagacatg

SEQ ID NO: 407798 - DNA, 120 bp, Artificial Sequence
  ENSG00000147724_91 (sequence is synthesized)
gctcttcaatagccacccggcaccttctcttagataagaggtgtgaaattataggagctccttctcgcttgagagccccttgagtaataattatttaaaaaaagctgttataataaaact

SEQ ID NO: 407799 - DNA, 120 bp, Artificial Sequence
  ENSG00000147724_92 (sequence is synthesized)
ttgcatttaaattgcctcttattcttaggatgtcaaagtgctttacaaacatgaattgctagaaaccttttaggttaattaaaatgagcaggtttcccagacaaagaaggtgactgtttt

SEQ ID NO: 407800 - DNA, 120 bp, Artificial Sequence
  ENSG00000147724_93 (sequence is synthesized)
tgtactctcgggtgtttttacaggtgagcgaattgaagcacaaataagttctttgactaatcaaatagagatgttctgagaacaggtgatttcagcattagcacatcaaccatgctacca

SEQ ID NO: 407801 - DNA, 120 bp, Artificial Sequence
  ENSG00000147724_94 (sequence is synthesized)
aatttcattgcccttcggaattataatgacaataatgtagtgattcctgaattctggtattcttaataagaatatttgtgctactatttactgaatggctgcagtaagccatgcattatg

SEQ ID NO: 407802 - DNA, 120 bp, Artificial Sequence
  ENSG00000147724_95 (sequence is synthesized)
cctggcactgggtttgtggtagtgtgttgtgttctcacaatgccactgtgaaataagtcttatcttcactttatgctgctgtaagataggatttatcctcactttacagccctggacact

SEQ ID NO: 407803 - DNA, 120 bp, Artificial Sequence
  ENSG00000147724_96 (sequence is synthesized)
cagtttgaaagcagctgagccacttgtcacgggtcctgcagctaggaaatggcagagtgtattagtccatattcacactgctatgaagaactgcctgagacggggtaatttataaagaaa

SEQ ID NO: 407804 - DNA, 89 bp, Artificial Sequence
  ENSG00000147724_97 (sequence is synthesized)
tggacataaggggaaggagaaacaaggcaccttcttcacaaggcggcaggaaggagaggtatcgagtgaagggggaagagccccttata

SEQ ID NO: 407805 - DNA, 120 bp, Artificial Sequence
  ENSG00000147724_98 (sequence is synthesized)
gagccccttataaaaccatcagatcccatgagaactcactcattaccacaagaacagcatgagagtaactgcccccatgatccaattacctcccaccaggttccttccatgacaggtggg

SEQ ID NO: 407806 - DNA, 120 bp, Artificial Sequence
  ENSG00000147724_99 (sequence is synthesized)
ttccatgacaggtggggattatggggattataattcaagatgagttttgggtagggacacaaagcctaactatatcacagagctagggttttaacccatgtttgtttgattgctgtgtct

SEQ ID NO: 407807 - DNA, 120 bp, Artificial Sequence
  ENSG00000147724_100 (sequence is synthesized)
atattcttcttctctaccaatatcattaccaaacgttattactttattcttctctatttctaaacccctgaggaatataacacattcctgtcattaagagaagctgctgacttgaaatgg

SEQ ID NO: 407808 - DNA, 120 bp, Artificial Sequence
  ENSG00000147724_101 (sequence is synthesized)
gagttcagtaatggcagtgagaggagatgaagtaacaccgttggaggaggtcagagcacagggtgccttaaaaacaagccacagcatttggactttattctccttatttatgccatcctg

SEQ ID NO: 407809 - DNA, 120 bp, Artificial Sequence
  ENSG00000147724_102 (sequence is synthesized)
tttatcagtattgatctgcagcactccaaggtccaagggacaaaggcaaggaaatctccaacctctcagaatatgagaagatactatagtaaatatgtcaataaattttattctacaaca

SEQ ID NO: 407810 - DNA, 120 bp, Artificial Sequence
  ENSG00000147724_103 (sequence is synthesized)
ggaagaggggggacatttttgagtgtttgctgtataaaagcaataatatgatgccttctgtataccactgagctaagctaacttgtgacttttaataaattacttttaaagcagaagtaa

SEQ ID NO: 407811 - DNA, 120 bp, Artificial Sequence
  ENSG00000147724_104 (sequence is synthesized)
gatcatgtctgaaatacaaggaacggttgagttttcggtagagctacataaattttataatgtggatctctttcagagagggatgcagtctgaatttggcatttcacgtgcaggtgatat

SEQ ID NO: 407812 - DNA, 120 bp, Artificial Sequence
  ENSG00000147724_105 (sequence is synthesized)
agcatgttccctgggggctcaagtcagctttgccactcagcaggcactttgcttgtgggtgctcagcccttctacataccagcccagctcatttcctgttcaacatgaagtacacagctt

SEQ ID NO: 407813 - DNA, 120 bp, Artificial Sequence
  ENSG00000147724_106 (sequence is synthesized)
cgattctcctgcctcagcctcctgaactacagatggacacatttgcagattttgatactatgacggatcggttattggatgaaatcattcaacacattcagttgtacaacctctccatat

SEQ ID NO: 407814 - DNA, 120 bp, Artificial Sequence
  ENSG00000147724_107 (sequence is synthesized)
agccctctatggactactccattgattgtaattgagactctgaaccaaacatcctcagctggtcagtgccagggctagaacagactgtcgatctggtcaagctctgaatgtatgttcctc

SEQ ID NO: 407815 - DNA, 120 bp, Artificial Sequence
  ENSG00000147724_108 (sequence is synthesized)
tctacattttatgcaggtattaccagatccgagtgaccttgaaggtgtcttcaaggatcccccacagactgagtgcctccatcgctgggcagacagagagcagcagcctgcattcagcct

SEQ ID NO: 407816 - DNA, 120 bp, Artificial Sequence
  ENSG00000147724_109 (sequence is synthesized)
gtagggtatggtttgtgaaggtatccctagagaaggtgactctgcggctgagcttgaaggaagagaattggtaggtgacaaagaagaggaatataacacattcctgtcattaagagaagc

SEQ ID NO: 407817 - DNA, 120 bp, Artificial Sequence
  ENSG00000147724_110 (sequence is synthesized)
aaaggaaggagctcttcacccagtgtagggtatggtttgtgaaggtatccctagagaaggtgactctgcggctgagcttgaaggaagagaattggtaggtgacaaagaagagattgaaga

SEQ ID NO: 407818 - DNA, 120 bp, Artificial Sequence
  ENSG00000147724_111 (sequence is synthesized)
ttggtgtcccaaagaccataaaactcaacaataagaaaataaccaaccacattaaaaagtgagccagaaattataacagacacttcaccaaagaaaatgtagatggcaaataaccatatg

SEQ ID NO: 407819 - DNA, 120 bp, Artificial Sequence
  ENSG00000147724_112 (sequence is synthesized)
aaaagaagctccatatcatagtttatcagataaatgtaaatgaaaacagcaatgagataccaccacacacctatcagaatgaccaaaatccagaacatcaacaccaccaaatgctggcaa

SEQ ID NO: 407820 - DNA, 120 bp, Artificial Sequence
  ENSG00000147724_113 (sequence is synthesized)
attgaatcaatacagcctgtgtttctcatgatcgcctggtccttgagactgttgataaggcattagagagcttcatggttgttgataatctgaggaacgccctctctagtgacagactgt

SEQ ID NO: 407821 - DNA, 120 bp, Artificial Sequence
  ENSG00000147724_114 (sequence is synthesized)
cacggacatggaggattttttgaagtgccttttcaattttatgagttgaggatcctgcagccctggagatttataattgtccctgccactgctgctttgtgccttcttctagtttctgcc

SEQ ID NO: 407822 - DNA, 120 bp, Artificial Sequence
  ENSG00000147724_115 (sequence is synthesized)
cccgagaactgacacttttggaggctactgatgtttacggcaaaatagcctgagtcctttaatgtccttctttgattgttctaccagctacgattcctgcaaatccctgtcattcttcat

SEQ ID NO: 407823 - DNA, 120 bp, Artificial Sequence
  ENSG00000147789_0 (sequence is synthesized)
gcgcggcgggcgcggactcgggttgccctcggtccgagtgatccctggtcgcttccttagccctcccgccttcggcattggggtccccgcgtcccccgggcctccaggcgggaaagcgcg

SEQ ID NO: 407824 - DNA, 120 bp, Artificial Sequence
  ENSG00000147789_1 (sequence is synthesized)
ggggctttgcggggccttgagcgcctggtgtgggaggtggtcgagcccagccaccctcccccgcggcggcgcgaggtctctcggccagaacacgtggatgcccacccaccactgagcctc

SEQ ID NO: 407825 - DNA, 120 bp, Artificial Sequence
  ENSG00000147789_2 (sequence is synthesized)
atggaggtggtaacatttggcgatgtggctgtgcacttctctcgggaggagtggcagtgtctggaccctggccagagggccctctacagggaagtgatgctggagaaccacagcagtgtg

SEQ ID NO: 407826 - DNA, 120 bp, Artificial Sequence
  ENSG00000147789_3 (sequence is synthesized)
gctggactagcaggattcctggttttcaagcctgagctgatctctcggctggagcagggagaagagccatgggtcctcgacctgcagggagcagaggggacagaggcaccaaggacctcc

SEQ ID NO: 407827 - DNA, 120 bp, Artificial Sequence
  ENSG00000147789_4 (sequence is synthesized)
aagacagattctacgattaggactgaaaatgagcaggcctgtgaggacatggacatcctaaaatcagaatcctatgggacagtggtcagaatctccccacaggactttcctcagaatcct

SEQ ID NO: 407828 - DNA, 120 bp, Artificial Sequence
  ENSG00000147789_5 (sequence is synthesized)
ggctttggagacgtttctgattctgaggtctggttagacagtcatctgggcagtcccgggctgaaagtgacaggctttaccttccaaaataactgtttgaatgaggagactgtggttccc

SEQ ID NO: 407829 - DNA, 120 bp, Artificial Sequence
  ENSG00000147789_6 (sequence is synthesized)
aagaccttcaccaaggacgcaccccagggatgtaaggagctgggaagcagcggcctggattgtcagcctcttgaaagtcagggagagagtgcggaagggatgtcccagagatgcgaggag

SEQ ID NO: 407830 - DNA, 120 bp, Artificial Sequence
  ENSG00000147789_7 (sequence is synthesized)
tgtggcaaaggcatcagagccacttcagatatcgctctgcattgggaaattaatacacagaaaattagcagatgtcaagaatgccaaaaaaagttatctgactgcttgcaggggaaacat

SEQ ID NO: 407831 - DNA, 120 bp, Artificial Sequence
  ENSG00000147789_8 (sequence is synthesized)
acaaataactgccatggagagaagccgtacgaatgtgcagagtgtgggaaagtcttcaggctctgctcgcagcttaatcagcatcagagaatccacacgggagagaaaccctttaaatgc

SEQ ID NO: 407832 - DNA, 120 bp, Artificial Sequence
  ENSG00000147789_9 (sequence is synthesized)
actgagtgtggaaaagccttccgcctgagctcaaaacttattcagcatcaaagaatccacactggggagaagccctacagatgtgaggaatgtggaaaagcttttggtcagagctcaagc

SEQ ID NO: 407833 - DNA, 120 bp, Artificial Sequence
  ENSG00000147789_10 (sequence is synthesized)
ctcatccaccatcagagaatccacacaggagagaggccctatggttgtcgtgagtgtgggaaagccttcagccagcagtcgcagctggttagacaccagagaactcacactggggagagg

SEQ ID NO: 407834 - DNA, 120 bp, Artificial Sequence
  ENSG00000147789_11 (sequence is synthesized)
ccctacccttgcaaggagtgtgggaaggccttcagccagagctccaccctagcccagcatcaaaggatgcatactggggagaaagctcaaattctaaaagcctcagacagtccaagcctt

SEQ ID NO: 407835 - DNA, 120 bp, Artificial Sequence
  ENSG00000147789_12 (sequence is synthesized)
tagagaaaccatttaagtgtgatgagtgtgggaaagcttttaggtggatctctcgcctgagtcagcatcagctgattcacactggagagaagccttataaatgcaacaagtgtacaaaag

SEQ ID NO: 407836 - DNA, 120 bp, Artificial Sequence
  ENSG00000147789_13 (sequence is synthesized)
cctttggttgtagttcacggcttattcgccatcagagaactcacactggagaaaaaccatttaaatgtgatgagtgtggcaaaggctttgttcagggctcacaccttattcagcatcagc

SEQ ID NO: 407837 - DNA, 120 bp, Artificial Sequence
  ENSG00000147789_14 (sequence is synthesized)
gaatccacactggagagaaaccctatgtgtgtaatgactgtggaaaagccttcagtcagagttccagccttatttaccatcagagaatccataaaggagagaagccctacgaatgcctcc

SEQ ID NO: 407838 - DNA, 120 bp, Artificial Sequence
  ENSG00000147789_15 (sequence is synthesized)
aatgcggaaaagccttcagtatgagcacacagcttacaatacatcaaagggttcacactggagagaggccctataaatgtaatgaatgtgggaaagccttcagtcaaaactcaacccttt

SEQ ID NO: 407839 - DNA, 120 bp, Artificial Sequence
  ENSG00000147789_16 (sequence is synthesized)
tccaacaccagataattcatgcaggggtgaagccctatgagtgcagtgagtgtggaaaagccttcagccggagctcatatcttattgaacaccagagaatacacactagggcccagtggt

SEQ ID NO: 407840 - DNA, 120 bp, Artificial Sequence
  ENSG00000147789_17 (sequence is synthesized)
tttacgaatatgggaatgccctggaagggtccacctttgtgagccgtaaaaaggttaatactataaagaaactgcatcagtgtgaagactgtgagaagatatttaggtggcgttcacacc

SEQ ID NO: 407841 - DNA, 120 bp, Artificial Sequence
  ENSG00000147789_18 (sequence is synthesized)
taattatacaccagagaattcacaccggggagaagccttataaatgcaatgactgtggcaaagcttttaatcgtagctcaaggcttacccagcatcaaaaaattcacatgggatagacca

SEQ ID NO: 407842 - DNA, 120 bp, Artificial Sequence
  ENSG00000147789_19 (sequence is synthesized)
cttacatataaatgtgtatatatgtgaataaacctatagccttaacttacttattttatatggaatcgtttatactgacaaacatgtagaatgttggtaaaggttcagaattgctctcaa

SEQ ID NO: 407843 - DNA, 73 bp, Artificial Sequence
  ENSG00000147789_20 (sequence is synthesized)
aacatgtagaatgttggtaaaggttcagaattgctctcaagaatatccaacttcaggccgagtgtggtggctt

SEQ ID NO: 407844 - DNA, 75 bp, Artificial Sequence
  ENSG00000147789_21 (sequence is synthesized)
tcatacaaaatgtatgtttatttcctgaaatgtttgaccttaacctgttcaataaagcctgtgtccctcaaaatc

SEQ ID NO: 407845 - DNA, 120 bp, Artificial Sequence
  ENSG00000147789_22 (sequence is synthesized)
gaccttaacctgttcaataaagcctgtgtccctcaaaatcagggtgcagtctgcagttttgagttgacaggtccctgtgaatgaggaagcagcacaaggagggctctacgagcgctgcta

SEQ ID NO: 407846 - DNA, 120 bp, Artificial Sequence
  ENSG00000147789_23 (sequence is synthesized)
cgtttccggcggcgtcgcgcgtttgcgagcctcgggtggtcctcagggagggtctctcggccagaacacgtggatgcccacccaccactgagcctcatgggattcctggggtgctggtgt

SEQ ID NO: 407847 - DNA, 120 bp, Artificial Sequence
  ENSG00000147789_24 (sequence is synthesized)
accatgggacaagagccaaggcacccacatgcaccgcctgcaactcctgttcctggccttccaaaacactgctcacaaagactgaccctgcctcctcctgggctctcgtcatctcctctt

SEQ ID NO: 407848 - DNA, 120 bp, Artificial Sequence
  ENSG00000147789_25 (sequence is synthesized)
ggccacttcctggttcatgatcaggacagaaggaggggaacgtcagccatatggatggtctgaaaattccagattctgtgctaaccataatgctgtgttcttttcactaacagcaaccag

SEQ ID NO: 407849 - DNA, 120 bp, Artificial Sequence
  ENSG00000147789_26 (sequence is synthesized)
ccaaaaaggggctggggtgcaagcttcattctgcttcagcacctggattctctctggattgacatggtcctaagtcaggggctggcaaaccattcgtagctttttacatttctgaatggt

SEQ ID NO: 407850 - DNA, 120 bp, Artificial Sequence
  ENSG00000147789_27 (sequence is synthesized)
tggggagaaaataagagacttgtgacatttgaaaactatgttaaaatcgaatttgactgtgcacagtgtccctgggcttggtgatgcccaagcgtcttcatggagcctctggcggctttc

SEQ ID NO: 407851 - DNA, 120 bp, Artificial Sequence
  ENSG00000147789_28 (sequence is synthesized)
gaaggattatttttcctctcagcccttagtggtttctttacctaaatgtcacggtacaactgagaataaggcagctgggtcagttcaatagaagtaaacctaaagtccaacaatccaggt

SEQ ID NO: 407852 - DNA, 90 bp, Artificial Sequence
  ENSG00000147789_29 (sequence is synthesized)
cagttcaatagaagtaaacctaaagtccaacaatccaggttagatattagccacggagggatgggaggaggagtcttccctcaggctgaa

SEQ ID NO: 407853 - DNA, 90 bp, Artificial Sequence
  ENSG00000147789_30 (sequence is synthesized)
ggcctcccttgccgagctgaggaggagtcctcttctagctgcacgatgtggaaatgacacatcatgtccatggggcagcttgctgagagc

SEQ ID NO: 407854 - DNA, 120 bp, Artificial Sequence
  ENSG00000147789_31 (sequence is synthesized)
gaaatgacacatcatgtccatggggcagcttgctgagagccaagggtgtgagcacatgacttaaattcaagctactgcacagctttgagatctgagtatcacatggaagcatccaggtgg

SEQ ID NO: 407855 - DNA, 120 bp, Artificial Sequence
  ENSG00000147789_32 (sequence is synthesized)
cccctggcacacaggctggtggttcttttgtggagagggagaggaagaggggctgctcatggggtagtgcaggtgctagaatatcctgttaacctgttcacactgcactgcaattcgggc

SEQ ID NO: 407856 - DNA, 72 bp, Artificial Sequence
  ENSG00000147789_33 (sequence is synthesized)
aaggatcacgtgaccccaggagttcggagaccacagtgagctgtgatcgcaccactgcactctagcctgggt

SEQ ID NO: 407857 - DNA, 70 bp, Artificial Sequence
  ENSG00000147789_34 (sequence is synthesized)
acagtgagctgcacaatatataaataaaaacattttgggtttctgttttggagacaataaattaaatcta

SEQ ID NO: 407858 - DNA, 120 bp, Artificial Sequence
  ENSG00000147789_35 (sequence is synthesized)
gcgtttgcgagcctcgggtggtcctcagggagggtctctcggccagaacacgtggatgcccacccaccactgagcctcatgaagggggctggcacccagggattcctggggtgctggtgt

SEQ ID NO: 407859 - DNA, 120 bp, Artificial Sequence
  ENSG00000147789_36 (sequence is synthesized)
ggcccgtttccggcggcgtcgcgcgtttgcgagcctcgggtggtcctcagggagggtctctcggccagaacacgtggatgcccacccaccactgagcctcatggtaggaagcttgactgc

SEQ ID NO: 407860 - DNA, 120 bp, Artificial Sequence
  ENSG00000147789_37 (sequence is synthesized)
ctccttcccctcgcatgtcctgtgaaggcccacctcctgctctgcccactggccctgggcccagaccctaccttggcccttgctgggcttaggaaggcccccttgcccccaaccccaagg

SEQ ID NO: 407861 - DNA, 120 bp, Artificial Sequence
  ENSG00000147789_38 (sequence is synthesized)
tagtgagcaaacccctgcccaaaccagggcctaattgaggctcttgaggggggagggttgtatgaccaccatggactgggttccttcctcctccccgagactgcccctccccagaatatt

SEQ ID NO: 407862 - DNA, 120 bp, Artificial Sequence
  ENSG00000147789_39 (sequence is synthesized)
cggaagtttgcggggcggggcggacgcgggtggccaaggcccgtttccggcggcgtcgcgcgtttgcgagcctcgggtggtcctcagggagggtctctcggccagaacacgtggatgccc

SEQ ID NO: 407863 - DNA, 120 bp, Artificial Sequence
  ENSG00000147789_40 (sequence is synthesized)
gagtggtgtgccaggctggttcctagctttgcccatgtcatggggttcagcccccagggagtgggtgggattctgggagttagtaaagcctctttttttcctaagctgttaaattgtgag

SEQ ID NO: 407864 - DNA, 120 bp, Artificial Sequence
  ENSG00000147789_41 (sequence is synthesized)
aaatagaatccaaacttgaaatagcttagacaagaaaagagaaattattgggtggagaaatccaaggaaaaggttgtgcaacgagcaagaggtggcagcgacgcccacacggctgctttg

SEQ ID NO: 407865 - DNA, 120 bp, Artificial Sequence
  ENSG00000147789_42 (sequence is synthesized)
agggaaggatcctgtcctgcctctccgggcagctggtggttttctggcagtccttgggttccttggcttgtggatgcgtccctcactctgatctccgactccttcacacggctgccttct

SEQ ID NO: 407866 - DNA, 120 bp, Artificial Sequence
  ENSG00000147789_43 (sequence is synthesized)
gggttaggggccaccccagtgacctcatggtgactaattaatctgcaacgactgtgtttccaaacaaggtcacattctgaggtgcttcaagttaggacttcagcctatcttggggtcctc

SEQ ID NO: 407867 - DNA, 120 bp, Artificial Sequence
  ENSG00000147789_44 (sequence is synthesized)
agccctaaccagggcacccactgcctccggcatcagctcctgctgggcaggcgcccggcctggtgctctgctcccctgcttagccggtgtgctgcccagcatgacaagggagatgggtct

SEQ ID NO: 407868 - DNA, 120 bp, Artificial Sequence
  ENSG00000147789_45 (sequence is synthesized)
gcgtgcatctcagctgcagaaaggaagcccctcacctccctttcagttgctgctgggtcatcaccgtcactcctgcagcagggcaggaccaggtcctacagaggccaccggcttgtaggg

SEQ ID NO: 407869 - DNA, 120 bp, Artificial Sequence
  ENSG00000147789_46 (sequence is synthesized)
aggggcctcgggaagcaagttggacagtccaaagttgtgaaaagtaggggccgtggagccgggcatggtggctcacgccggccattctagcgatttgggaggccgaggtgggcggatcac

SEQ ID NO: 407870 - DNA, 120 bp, Artificial Sequence
  ENSG00000147789_47 (sequence is synthesized)
agtgtttcttaatactacaagaatactaaaagaattaaactcacccgtttaattcttttttttctgggacggagtttcgctcttgttgcccaggctcgagtgcaatggcgcgatctcagt

SEQ ID NO: 407871 - DNA, 65 bp, Artificial Sequence
  ENSG00000147789_48 (sequence is synthesized)
gtgatccgtgcatactaattttagaataagttgagttcctaaaagccactggaatttttattggg

SEQ ID NO: 407872 - DNA, 120 bp, Artificial Sequence
  ENSG00000147789_49 (sequence is synthesized)
ataagttgagttcctaaaagccactggaatttttattgggagtgctttgaaactgttttctgtcaatgtaaaagttttgatttttttgctttgtgaatgtatttttagctgattattgct

SEQ ID NO: 407873 - DNA, 120 bp, Artificial Sequence
  ENSG00000147789_50 (sequence is synthesized)
gtagtacaaaaatgctgttggttctggaggatgatcttacatctggcaactttgtggaactccctgggtaaatcagtgttgctcggtgattctgctgttttccagcaggaggattcctgc

SEQ ID NO: 407874 - DNA, 120 bp, Artificial Sequence
  ENSG00000147789_51 (sequence is synthesized)
aaatgagagtttggtattttccctcccagccctcactcctcccatctctgcctttgcagtggccagcacagtgttaaacaggaccgtgtgggcatgttgtgttcctgattttaaagggaa

SEQ ID NO: 407875 - DNA, 120 bp, Artificial Sequence
  ENSG00000147789_52 (sequence is synthesized)
tgcatctacataaccacagaatttggctaaggagttttttttgtttttaatcataaatactgaatttcaaattctttttctgcatcatttgagacacgtgatttattttctttattaatg

SEQ ID NO: 407876 - DNA, 120 bp, Artificial Sequence
  ENSG00000147789_53 (sequence is synthesized)
caggaaattacattgttatattttcttgtattcctggaataagccttacttaaatcacgatatttatatataaattttgatatgcctttggattcaactagccaatattgtatttttgtg

SEQ ID NO: 407877 - DNA, 120 bp, Artificial Sequence
  ENSG00000147789_54 (sequence is synthesized)
ttgtgtattgtccttatgtaattttgacatgtttgataaatggcatttggcatacaagtagaacttggtggagctaatctgtaaaaccatcgggaccttgagcttttggggaaggaaagt

SEQ ID NO: 407878 - DNA, 120 bp, Artificial Sequence
  ENSG00000147789_55 (sequence is synthesized)
cttggattagcatttatgcatttatattttctttttttttttttttaaagagttggggttttgctctgttgtccagcctagagtacagtggtgcgattatagctcactgcagccttgaac

SEQ ID NO: 407879 - DNA, 120 bp, Artificial Sequence
  ENSG00000147789_56 (sequence is synthesized)
tcctgggctcaagtgattcttccacttgagtttccctagtagctgggactataggtgtgcgccaccatgctcagctgttttttctttctttgtagagttggggtctgtcatgttgccgca

SEQ ID NO: 407880 - DNA, 120 bp, Artificial Sequence
  ENSG00000147789_57 (sequence is synthesized)
cttggccttccaaaatgctgggattataggcaggagacaccttgcctggcatttcctttggttttaatctgttatatttgtaattgtgtctcttattctctgttttttggcagcatcttc

SEQ ID NO: 407881 - DNA, 120 bp, Artificial Sequence
  ENSG00000147789_58 (sequence is synthesized)
tgtgtctcttattctctgttttttggcagcatcttctcactaagtggaccttgattggttttgtcatcagtcatattcatgttttcaaataactggcttttggttttgccttttttgggg

SEQ ID NO: 407882 - DNA, 120 bp, Artificial Sequence
  ENSG00000147789_59 (sequence is synthesized)
ggttgggttggaggatgtttttatttgtctttgttctctagctctctgaatcctgccccggatttattattttcttcctttttatttatgtgagtttgatgtgtgtggtgtttgtttgtt

SEQ ID NO: 407883 - DNA, 120 bp, Artificial Sequence
  ENSG00000147789_60 (sequence is synthesized)
ttgcttttttaattttttgagacaaagtttcactctgtttcccagggtggagtgcagtggcttactgcagcctggactgcctgggttccagcgatcctcccaccgtgttggccaggctgg

SEQ ID NO: 407884 - DNA, 120 bp, Artificial Sequence
  ENSG00000147789_61 (sequence is synthesized)
tgtgttttaaaatgatcatttctagtaaatgtatctaaaagtataaaatttttctgggtatagtggcatatgcctataatctcagttacttaggaggctgaggcaggaggattgtttgag

SEQ ID NO: 407885 - DNA, 120 bp, Artificial Sequence
  ENSG00000147789_62 (sequence is synthesized)
tttgaggccagcctgggcaacatagcgagaccacatgtctgcaaagaatttaaaaattagctgggtgtggtgtcacgcacctgtagtcctagctactcagtaggttgaggcgggaggatt

SEQ ID NO: 407886 - DNA, 120 bp, Artificial Sequence
  ENSG00000147789_63 (sequence is synthesized)
ggaggattggcctaggctatagtgagctgtgatggtgccactgcactccggcctgagtgctagagcaagaccgtatctctaaataaataacattttatctttacatactgcttgggctgc

SEQ ID NO: 407887 - DNA, 120 bp, Artificial Sequence
  ENSG00000147789_64 (sequence is synthesized)
atcctataaattctgactcataataaatacagttgccacttagtcatttattatgtagtttccaagtagctaatggcatctaagcaccattttgtggtgagtttcacactgagttgcatt

SEQ ID NO: 407888 - DNA, 120 bp, Artificial Sequence
  ENSG00000147789_65 (sequence is synthesized)
gcctgggcgcgtgttctgtggtatgttctttggcatgtctgtgactcagtttgtggcttgacccaaggctgtttctttgttccacatgtacttggagaggatatgcattttctgttgaat

SEQ ID NO: 407889 - DNA, 120 bp, Artificial Sequence
  ENSG00000147789_66 (sequence is synthesized)
gtggagtcctgcctgcatctgggggtttcagcttattggctataggcctttggaatctctgcctgcctctttccttccagttgggggaaccctgaaggaagcttctaaacagaggccttg

SEQ ID NO: 407890 - DNA, 120 bp, Artificial Sequence
  ENSG00000147789_67 (sequence is synthesized)
gctggcccatggatcaactgctcatctctgtactgaccggcacaaagagggtatgggggcaggtggccccaagaaggcagggtgccaggtgggcccccacaggtctctgccacccagtct

SEQ ID NO: 407891 - DNA, 120 bp, Artificial Sequence
  ENSG00000147789_68 (sequence is synthesized)
gcagcgagggaggcaggccctgaggcatcctttgtgcagggacttgaggctggaaggacactggctgaggactggaccttggagctttctgatgcaaaatgtgcttcgtttgtgtctatt

SEQ ID NO: 407892 - DNA, 120 bp, Artificial Sequence
  ENSG00000147789_69 (sequence is synthesized)
catcgttgtttgttaccttattttgtaaccacccctgcctcttggagcatctctgctctctgaactgagggacaggcccggttctgctaagtgaagcttgggcttctccttctctttccc

SEQ ID NO: 407893 - DNA, 120 bp, Artificial Sequence
  ENSG00000147789_70 (sequence is synthesized)
gagttccaggggtagaggcggactgtcctttgcagactgtttggtgacagggtcgcctggagattgtgggagtcaggtatcccttgctgtccagccacaggaggtggacagatctggaca

SEQ ID NO: 407894 - DNA, 120 bp, Artificial Sequence
  ENSG00000147789_71 (sequence is synthesized)
gaaagggctgctgtgtccccagattctccccaccctccacccactctccctgcaggagcttggcctgtgccttgtagcccccctgcccctttccatttggaaactggggaagacttagcc

SEQ ID NO: 407895 - DNA, 120 bp, Artificial Sequence
  ENSG00000147789_72 (sequence is synthesized)
gtttgcgagcctcgggtggtcctcagggaggactgcttcgtgaaggcagggtcctcgtgtccactactgtatccccattactcagtgcctggcacgtggcatccacttcttacggctttg

SEQ ID NO: 407896 - DNA, 120 bp, Artificial Sequence
  ENSG00000147789_73 (sequence is synthesized)
tggagtgagtcacacatgccacacacacatacactctaaagaggaacaagagttcagtgggcctccttcactcaagtgccatggctgcttcagcccagccccatgtccctgctagagaaa

SEQ ID NO: 407897 - DNA, 120 bp, Artificial Sequence
  ENSG00000147789_74 (sequence is synthesized)
tttgcgagcctcgggtggtcctcagggagggcctaggataagtgacagtggaggaaggaacggtgccttgggtggggtctctcggccagaacacgtggatgcccacccaccactgagcct

SEQ ID NO: 407898 - DNA, 120 bp, Artificial Sequence
  ENSG00000147799_0 (sequence is synthesized)
cacgggtgccgtggagtccatcgtcatcctgcccagccagtctgcggcggtgggctgggccgggtgattggtgtggtgaggcgtcttccatatcagcactgttgcttctcccctcttgca

SEQ ID NO: 407899 - DNA, 120 bp, Artificial Sequence
  ENSG00000147799_1 (sequence is synthesized)
gtgcggcaccttcccgtctgatgctggcgttgtgcgtatggtgccctgacgtctgtccacgtgggcgcggaagcaaacagcgatgtcccagacgcaggactacgagtgcaggagccataa

SEQ ID NO: 407900 - DNA, 120 bp, Artificial Sequence
  ENSG00000147799_2 (sequence is synthesized)
tgtcgacctgccggagtcgaggattccagggtcgaacactcggttggagtgggtggagatcatcgaaccgcgcacccgcgagcgcatgtacgccaacctggtcaccggtgagtgcgtgtg

SEQ ID NO: 407901 - DNA, 120 bp, Artificial Sequence
  ENSG00000147799_3 (sequence is synthesized)
ggacccgccggccggcgtccgcatcaagcgcaccagcgagaaccagtggtgggagctgttcgaccccaacacgtcccgcttctactactacaatgccagcacgcagcgcacggtgtggca

SEQ ID NO: 407902 - DNA, 120 bp, Artificial Sequence
  ENSG00000147799_4 (sequence is synthesized)
ccggccgcagggctgcgacatcatcccgctggccaagctgcagacgctgaagcagaacacggagtccccgcgcgcctcggcggagagcagccccgggcgcggcagcagcgtcagccgtga

SEQ ID NO: 407903 - DNA, 120 bp, Artificial Sequence
  ENSG00000147799_5 (sequence is synthesized)
gggcagcaccagctcctccctggagcccgagcccgacactgagaaagcgcaggagttgccagcgagggccgggcggcccgcggcgtttgggacagtgaaggaggacagcggcagctcttc

SEQ ID NO: 407904 - DNA, 120 bp, Artificial Sequence
  ENSG00000147799_6 (sequence is synthesized)
accaccaggagtgttccttgagaaggactatgagatttaccgggattacagtgcggacggccagcttcttcactacaggacctcctcgctgcggtggaactcgggcgccaaagagcgcat

SEQ ID NO: 407905 - DNA, 120 bp, Artificial Sequence
  ENSG00000147799_7 (sequence is synthesized)
gctcatcaaggtcgctgatcgggagcccagcttcctcgccgcccagggcaatggctacgccccagacggcccacctggggtccgctcccgcagaccctccggcagccagcactcacccag

SEQ ID NO: 407906 - DNA, 120 bp, Artificial Sequence
  ENSG00000147799_8 (sequence is synthesized)
cctgcagaccttcgccccggaggctgacggcaccatcttcttcccagagaggaggccgtcacccttcctgaagagggccgagctcccagggagcagctccccgctgctggcccagccccg

SEQ ID NO: 407907 - DNA, 120 bp, Artificial Sequence
  ENSG00000147799_9 (sequence is synthesized)
aaagccctccggggactcgcagccctcctccccgcgctatggctatgaacccccgctctacgaggagcccccagtggagtaccaggcccccatctacgatgagccccccatggacgtgca

SEQ ID NO: 407908 - DNA, 120 bp, Artificial Sequence
  ENSG00000147799_10 (sequence is synthesized)
attcgaggctggcgggggctaccaggccggctctccccagcggtcgccgggccgtaagccccggccgttcctccagcccaacaagcagggccccccctcgccctgccagcagctggtgct

SEQ ID NO: 407909 - DNA, 120 bp, Artificial Sequence
  ENSG00000147799_11 (sequence is synthesized)
caccaagcagaagtgtcccgagcgcttcctgagcctggagtacagtcccgccggcaaggagtacgtgcggcagctggtctacgtggagcaggcgggctccagccccaagctgcgcgccgg

SEQ ID NO: 407910 - DNA, 120 bp, Artificial Sequence
  ENSG00000147799_12 (sequence is synthesized)
cccgcggcacaagtacgcgcccaaccccggcggtggttcgtactccttgcagcccagcccctgcctgctgagggaccagcgcctgggcgtcaagtccggagactacagcaccatggaggg

SEQ ID NO: 407911 - DNA, 120 bp, Artificial Sequence
  ENSG00000147799_13 (sequence is synthesized)
acctgagctgcggcacagccagccgcccacgccgctgccacaggcccaggaggatgccatgtcctggtccagccagcaggacaccctgtcctccacaggctactccccgggcacgcgcaa

SEQ ID NO: 407912 - DNA, 120 bp, Artificial Sequence
  ENSG00000147799_14 (sequence is synthesized)
gcggaagagcagaaagccctctttgtgccaagccaccagcgccacccccactgagggccccggggacctgcttgtggagcagcccctggccgaggaacagcccccgtgcgggaccagcct

SEQ ID NO: 407913 - DNA, 120 bp, Artificial Sequence
  ENSG00000147799_15 (sequence is synthesized)
cgcccccgtgaagcgagcggaaggtgaggccgaaggggcgcggggcgcggccgagcccttcctggcgcaggctcggctggcctgggaggcgcagcaggcccacttccacatgaagcagag

SEQ ID NO: 407914 - DNA, 120 bp, Artificial Sequence
  ENSG00000147799_16 (sequence is synthesized)
gagcagctgggactcccagcaggacggctctggctacgagagcgacggcgccctgccactgcccatgcccgggccggtggtgcgggccttcagcgaggacgaggcgctggcccagcagga

SEQ ID NO: 407915 - DNA, 120 bp, Artificial Sequence
  ENSG00000147799_17 (sequence is synthesized)
gaacaggcactggaggaggggcaccttcgagaagctaggcttcccccagatcctgctggagaagagcgtctccgtgcagaccaacctggcctcaccagagccctacctccacccctcaca

SEQ ID NO: 407916 - DNA, 120 bp, Artificial Sequence
  ENSG00000147799_18 (sequence is synthesized)
gtctgaggacctcgctgcctgtgcccagttcgagagcagccggcagagccgcagcggcgttcccagctccagctgcgtcttccccactttcacgctgcgcaagccctcctcggagacgga

SEQ ID NO: 407917 - DNA, 120 bp, Artificial Sequence
  ENSG00000147799_19 (sequence is synthesized)
ccaagcacttcaacaagcacacgcagggcctcttccggcggaaggtgtccatcgccaacatgctggcctggagcagcgagtccatcaagaagcccatgatcgtgacaagcgaccggcacg

SEQ ID NO: 407918 - DNA, 120 bp, Artificial Sequence
  ENSG00000147799_20 (sequence is synthesized)
tgaagaaggaggcctgcgagctcttcaagctgatccagatgtacatgggtgaccggcgggccaaggccgacccactgcacgtggccctggaggtggccaccaagggctggagcgtgcagg

SEQ ID NO: 407919 - DNA, 120 bp, Artificial Sequence
  ENSG00000147799_21 (sequence is synthesized)
gcctgcgggacgagctctacatccagctgtgccggcagaccaccgagaacttccgcctggagagcctggcccgcggctgggagctcatggccatctgcctggcctttttcccgcccaccc

SEQ ID NO: 407920 - DNA, 120 bp, Artificial Sequence
  ENSG00000147799_22 (sequence is synthesized)
ccaagttccactcctacctggaaggctacatctaccggcacatggaccccgtcaatgacactaaaggggtggcgataagcacgtatgccaagtactgttaccacaagctacagaaggcag

SEQ ID NO: 407921 - DNA, 120 bp, Artificial Sequence
  ENSG00000147799_23 (sequence is synthesized)
ccctgaccggggccaagaaggggctgaagaagcccaacgtggaggagatccggcatgccaagaacgccgtgttcagcccgtccatgttcggcagcgcactgcaggaggtcatgggcatgc

SEQ ID NO: 407922 - DNA, 120 bp, Artificial Sequence
  ENSG00000147799_24 (sequence is synthesized)
agagagagcgctaccccgagcgccagctgccctgggtgcagacacggctctctgaggaggtgctggcgctcaacggtgaccagacagagggcatcttcagggtccctggggacattgacg

SEQ ID NO: 407923 - DNA, 120 bp, Artificial Sequence
  ENSG00000147799_25 (sequence is synthesized)
aggtgaatgccctgaagctgcaggtggaccagtggaaggtgcccacaggcctggaagacccccacgtccctgcgtccctgctgaagctgtggtaccgggagctggaggagcccctgatcc

SEQ ID NO: 407924 - DNA, 120 bp, Artificial Sequence
  ENSG00000147799_26 (sequence is synthesized)
cgcacgagttctacgagcagtgcatcgcgcactacgacagccccgaggcggcggtggccgtggtgcacgcgctgccccgcatcaaccgcatggtgctgtgctacctcatccgcttcctgc

SEQ ID NO: 407925 - DNA, 120 bp, Artificial Sequence
  ENSG00000147799_27 (sequence is synthesized)
aggtcttcgtgcagccggccaacgtcgcggtcaccaagatggatgtcagcaacctggccatggtgatggcgcccaactgcttgcgctgccagtccgacgacccgcgcgtcatcttcgaga

SEQ ID NO: 407926 - DNA, 120 bp, Artificial Sequence
  ENSG00000147799_28 (sequence is synthesized)
acacccgcaaggagatgtccttcctgcgggtgctcatccagcacctggacaccagcttcatggagggtgtgctgtagcgggggcgcccggggacaggagggatgtcctgccgcccccagc

SEQ ID NO: 407927 - DNA, 120 bp, Artificial Sequence
  ENSG00000147799_29 (sequence is synthesized)
caggccgaactccgcactcgctctcccggcagaggggccagaatcgcccggcccagccctggagccccctccactcccccaggcccctggccccggcgctccccacgtcttctgcctggt

SEQ ID NO: 407928 - DNA, 120 bp, Artificial Sequence
  ENSG00000147799_30 (sequence is synthesized)
ctgagggtgcagccagggcacagcagcggcggggagggcgcctctggccccccacctcacggccagttcccgcgggcaccgcctcgccctccgctggccgcgggtcagctccgagaaagt

SEQ ID NO: 407929 - DNA, 120 bp, Artificial Sequence
  ENSG00000147799_31 (sequence is synthesized)
gccttctgtgtcctggagccgagcgacgctgcctccttggggccgggctgcctccctgtggctcctgcgcgccctggcctgggccttgcccagccgccccggtctctccttccctttctc

SEQ ID NO: 407930 - DNA, 120 bp, Artificial Sequence
  ENSG00000147799_32 (sequence is synthesized)
ctgtcctcgtcctggcctgcagctcttcccagccccgagagagcttcccgacctgtccccgcctcctctccctccctcggcccgtggtccccagctggtgactgctcaggagtttggggg

SEQ ID NO: 407931 - DNA, 120 bp, Artificial Sequence
  ENSG00000147799_33 (sequence is synthesized)
ctccaggacagtgggcccggggcctggcaggctctcggtgggtggggtgggggcccccaaaccaaagtcctctggggtagggagcagggctgggcaggcattctgggggcagggtggggg

SEQ ID NO: 407932 - DNA, 120 bp, Artificial Sequence
  ENSG00000147799_34 (sequence is synthesized)
aggggcgagagtatttttttcttcgtgtaactgtaaatccagaatctatcctgcatcgcagcccaccgtgtatagagatataaatagagggaaagatataagaactaaatttgctaatga

SEQ ID NO: 407933 - DNA, 120 bp, Artificial Sequence
  ENSG00000147799_35 (sequence is synthesized)
catagttttaacctaaatgctatttatctctgagccgtccccgtcctccgtgcagagcaagttgaggtcattccttcttttcttctccgatcttttttcttggcttctgaccaaaaacca

SEQ ID NO: 407934 - DNA, 120 bp, Artificial Sequence
  ENSG00000147799_36 (sequence is synthesized)
agctctaccccatccccatcccagacctgcaggagacgagcgagcgggaaggcgccgggcccgggactgtccgttctcggggccagagctgctgggggaccgagtttgtacattttccat

SEQ ID NO: 407935 - DNA, 120 bp, Artificial Sequence
  ENSG00000147799_37 (sequence is synthesized)
tttggaattttgagttccaattgttgtaaaacttaatttctccccagtttttatatatatattttttagagttccgtttttatttattaaaaacaaaagccccagccctgccgaggcctg

SEQ ID NO: 407936 - DNA, 120 bp, Artificial Sequence
  ENSG00000147799_38 (sequence is synthesized)
ggcggcgtcctcagtcgggtggtcccggggcctttgcggtcccgcccggctgagacgctcgccccgacgcatggacccgagaggcgacgacacgagtgaataaagtgcacatggaccctg

SEQ ID NO: 407937 - DNA, 120 bp, Artificial Sequence
  ENSG00000147799_39 (sequence is synthesized)
aaagaaacactaagaagaagtccaaattgagaaagaaacccaagccttatgttgaagagccggatggggtggcgataagcacgtatgccaagtactgttaccacaagctacagaaggcag

SEQ ID NO: 407938 - DNA, 120 bp, Artificial Sequence
  ENSG00000147799_40 (sequence is synthesized)
tatggagctgagcccccactgctcagcacagcatgcagcccacagtgggtacccccgagagtagtgacacagcacataaaagagctcctggaaagaaacactaagaagaagtccaaattg

SEQ ID NO: 407939 - DNA, 120 bp, Artificial Sequence
  ENSG00000147804_0 (sequence is synthesized)
agccccagtctggccctggacaaccccagcaaagccgccctcagccagcccagaagcactgggccttggccacagcaacacccactgagcacgctgggagctgagtatggcgtccctggt

SEQ ID NO: 407940 - DNA, 120 bp, Artificial Sequence
  ENSG00000147804_1 (sequence is synthesized)
ctcgctggagctggggctgcttctggctgtgctggtggtgacggcgacggcgtccccgcctgctggtctgctgagcctgctcacctctggccagggcgctctggatcaagaggctctggg

SEQ ID NO: 407941 - DNA, 120 bp, Artificial Sequence
  ENSG00000147804_2 (sequence is synthesized)
cggcctgttaaatacgctggcggaccgtgtgcactgcgccaacgggccgtgtggaaagtgcctgtctgtggaggacgccctgggcctgggcgagcctgaggggtcagggctgcccccggg

SEQ ID NO: 407942 - DNA, 120 bp, Artificial Sequence
  ENSG00000147804_3 (sequence is synthesized)
cccggtcctggaggccaggtacgtcgcccgcctcagtgccgccgccgtcctgtacctcagcaaccccgagggcacctgtgaggacgctcgggctggcctctgggcctctcatgcagacca

SEQ ID NO: 407943 - DNA, 120 bp, Artificial Sequence
  ENSG00000147804_4 (sequence is synthesized)
cctcctggccctgctcgagagccccaaggccctgaccccgggcctgagctggctgctgcagaggatgcaggcccgggctgccggccagacccccaagatggcctgcgtagatatccctca

SEQ ID NO: 407944 - DNA, 120 bp, Artificial Sequence
  ENSG00000147804_5 (sequence is synthesized)
gctgctggaggaggcggtgggggcgggggctccgggcagtgctggcggcgtcctggctgccctgctggaccatgtcaggagcgggtcttgcttccacgccttgccgagccctcagtactt

SEQ ID NO: 407945 - DNA, 120 bp, Artificial Sequence
  ENSG00000147804_6 (sequence is synthesized)
cgtggactttgtgttccagcagcacagcagcgaggtccctatgacgctggccgagctgtcagccttgatgcagcgcctgggggtgggcagggaggcccacagtgaccacagtcatcggca

SEQ ID NO: 407946 - DNA, 120 bp, Artificial Sequence
  ENSG00000147804_7 (sequence is synthesized)
caggggagccagcagccgggaccctgtgcccctcatcagctccagcaacagctccagtgtgtgggacacggtatgcctgagtgccagggacgtgatggctgcatatggactgtcggaaca

SEQ ID NO: 407947 - DNA, 120 bp, Artificial Sequence
  ENSG00000147804_8 (sequence is synthesized)
ggctggggtgaccccggaggcctgggcccaactgagccctgccctgctccaacagcagctgagtggagcctgcacctcccagtccaggccccccgtccaggaccagctcagccagtcaga

SEQ ID NO: 407948 - DNA, 120 bp, Artificial Sequence
  ENSG00000147804_9 (sequence is synthesized)
gctccctggccacgctgctcatctgcctctgcgcggtctttggcctcctgctgctgacctgcactggctgcaggggggtcacccactacatcctgcagaccttcctgagcctggcagtgg

SEQ ID NO: 407949 - DNA, 120 bp, Artificial Sequence
  ENSG00000147804_10 (sequence is synthesized)
gtgcagtcactggggacgctgtcctgcatctgacgcccaaggtgctggggctgcatacacacagcgaagagggcctcagcccacagcccacctggcgcctcctggctatgctggccgggc

SEQ ID NO: 407950 - DNA, 120 bp, Artificial Sequence
  ENSG00000147804_11 (sequence is synthesized)
tctacgccttcttcctgtttgagaacctcttcaatctcctgctgcccagggacccggaggacctggaggacgggccctgcggccacagcagccatagccacgggggccacagccacggtg

SEQ ID NO: 407951 - DNA, 120 bp, Artificial Sequence
  ENSG00000147804_12 (sequence is synthesized)
tgtccctgcagctggcacccagcgagctccggcagcccaagcccccccacgagggctcccgcgcagacctggtggcggaggagagcccggagctgctgaaccctgagcccaggagactga

SEQ ID NO: 407952 - DNA, 120 bp, Artificial Sequence
  ENSG00000147804_13 (sequence is synthesized)
gcccagagttgaggctactgccctatatgatcactctgggcgacgccgtgcacaacttcgccgacgggctggccgtgggcgccgccttcgcgtcctcctggaagaccgggctggccacct

SEQ ID NO: 407953 - DNA, 120 bp, Artificial Sequence
  ENSG00000147804_14 (sequence is synthesized)
cgctggccgtgttctgccacgagttgccacacgagctgggggacttcgccgccttgctgcacgcggggctgtccgtgcgccaagcactgctgctgaacctggcctccgcgctcacggcct

SEQ ID NO: 407954 - DNA, 120 bp, Artificial Sequence
  ENSG00000147804_15 (sequence is synthesized)
tcgctggtctctacgtggcactcgcggttggagtcagcgaggagagcgaggcctggatcctggcagtggccaccggcctgttcctctacgtagcactctgcgacatgctcccggcgatgt

SEQ ID NO: 407955 - DNA, 120 bp, Artificial Sequence
  ENSG00000147804_16 (sequence is synthesized)
tgaaagtacgggacccgcggccctggctcctcttcctgctgcacaacgtgggcctgctgggcggctggaccgtcctgctgctgctgtccctgtacgaggatgacatcaccttctgatacc

SEQ ID NO: 407956 - DNA, 120 bp, Artificial Sequence
  ENSG00000147804_17 (sequence is synthesized)
ctgccctagtcccccacctttgacttaagatcccacacctcacaaacctacagcccagaaaccagaagcccctatagaggccccagtcccaactccagtaaagacactcttgtccttgga

SEQ ID NO: 407957 - DNA, 120 bp, Artificial Sequence
  ENSG00000147804_18 (sequence is synthesized)
aaactccaggaggcggaggaggctagtggcagtacctgggcaccctgaccctccccacaggccagagcccaccctcctgctcatgagggcagacaggcctttccagggacacagtccctc

SEQ ID NO: 407958 - DNA, 120 bp, Artificial Sequence
  ENSG00000147804_19 (sequence is synthesized)
ttctccccaggaccccagggccaactccccctgccggccctctgccatcaaattggcagtggctccaggggagtcccctggggatgggggaccactgttggggacccctctgcgtgcacc

SEQ ID NO: 407959 - DNA, 120 bp, Artificial Sequence
  ENSG00000147804_20 (sequence is synthesized)
cctgtagttggggaagcaggacaggggcctggggagacggaagggcgccaggggttgagagaggatggtggacgttgttggacttgaaagggaaacaggccctcggggaagcccctggcc

SEQ ID NO: 407960 - DNA, 120 bp, Artificial Sequence
  ENSG00000147804_21 (sequence is synthesized)
ggacttactcaaggctcctcccaggtggcggaggagagcccggagctgctgaaccctgagcccaggagactgagcccaggtgagcccagggggcgaccccggaagggctgggggatctgg

SEQ ID NO: 407961 - DNA, 120 bp, Artificial Sequence
  ENSG00000147804_22 (sequence is synthesized)
ggtgcctcgaagccaggagagctgcactcaggacccccaggcagccagcctcaggtgccccctctttgatatggagaccctgcctgcctgaggagtggggtcagggaaattcacccgggt

SEQ ID NO: 407962 - DNA, 120 bp, Artificial Sequence
  ENSG00000147804_23 (sequence is synthesized)
gtgtgggcagcaggtgggacctgtccccaaacaggaatcaaacttgcttacctataactgcttacacagccgagggcttatttctctgtcatggaaagcaaacctggagatcgtcagacc

SEQ ID NO: 407963 - DNA, 120 bp, Artificial Sequence
  ENSG00000147804_24 (sequence is synthesized)
agagtgtgtggcagcccacggttcctgggacgccagcctcttctgactctgaggcgttaatcctgagtgcctgtgtggtggcctcctagggctaccttaacaaagcctaccataaactga

SEQ ID NO: 407964 - DNA, 120 bp, Artificial Sequence
  ENSG00000147804_25 (sequence is synthesized)
gtgccttaaaaccagaaacttattctcacagttctggaggctgaaagttaggaatcaaagtgtcaggagagcaatgctctctctgaagtctctaggaaacagtctgttccatgagccttt

SEQ ID NO: 407965 - DNA, 120 bp, Artificial Sequence
  ENSG00000147804_26 (sequence is synthesized)
caggtgttccttggtttgtgggcagtatgactccaatccctgcctttgtcttcacatgaccttccctcccctcccctccccttttcttttctttcttcttttgagacagagcttcactct

SEQ ID NO: 407966 - DNA, 120 bp, Artificial Sequence
  ENSG00000147804_27 (sequence is synthesized)
gtgagccattgcgcctggcccacatgaccttctttcttgtgtttctgtctcttctgattatttttattgtatgtgactcttgtcactcaggctggagtgcaatgacgccatcttggctca

SEQ ID NO: 407967 - DNA, 76 bp, Artificial Sequence
  ENSG00000147804_28 (sequence is synthesized)
tggctaatttttgaagggagccagcccctccacacctgtgagtatttctcatcaggtgggacgagagactgagaaa

SEQ ID NO: 407968 - DNA, 120 bp, Artificial Sequence
  ENSG00000147804_29 (sequence is synthesized)
tgtgagtatttctcatcaggtgggacgagagactgagaaaagaagacacacagacgaagtatagggaaagaacagtgggcccagaggacccagcatacggaggacctgcatcagcaccgg

SEQ ID NO: 407969 - DNA, 120 bp, Artificial Sequence
  ENSG00000147804_30 (sequence is synthesized)
ccggcctctgagttcccacagtattgatcattatttttaccatcttagcgaggggagtgtagcagggcaacaagtggggagaaggtcagcgcggaaacatgtgagcaaaggaatctgtat

SEQ ID NO: 407970 - DNA, 120 bp, Artificial Sequence
  ENSG00000147804_31 (sequence is synthesized)
aataagttcaaggaaaggtactgtgcccggatgtgcacgtaggctaaatttatgtttctctttacccaaacatgtcattgtagcaaagagtaacagagcagcagcgctagatttatgttt

SEQ ID NO: 407971 - DNA, 120 bp, Artificial Sequence
  ENSG00000147804_32 (sequence is synthesized)
gtaacagagcagtattgctgccagcattcttgcttccaggcagttttctcctatctcagaatagaacaaaagggaatggttggctttacaatgagacattccattcccaaagacgagcag

SEQ ID NO: 407972 - DNA, 83 bp, Artificial Sequence
  ENSG00000147804_33 (sequence is synthesized)
tcctatctcagaatagaacaaaagggaatggttggctttacaatgagacattccattcccaaagacgagcaggagacagaagg

SEQ ID NO: 407973 - DNA, 65 bp, Artificial Sequence
  ENSG00000147804_34 (sequence is synthesized)
tacgactcctcagcacagaccctttataggtgttgggctgggggacggtaaggtctttcccccag

SEQ ID NO: 407974 - DNA, 120 bp, Artificial Sequence
  ENSG00000147804_35 (sequence is synthesized)
ttgtgtccctggttaatcgagaatgaagaatggcgataacttttaccaagcatactgcctacaaacatattaacaaggcacatcctgcatagccctaaatccattaaactttgattcatt

SEQ ID NO: 407975 - DNA, 120 bp, Artificial Sequence
  ENSG00000147804_36 (sequence is synthesized)
tgggtaggcagcagtgagcaaggcgggcggacagcgctgggctcgcggggtcctgcgtcctccgcgggagtgttggcggcgggggtcgctctgcgcggggacactgggcagagggggcgt

SEQ ID NO: 407976 - DNA, 120 bp, Artificial Sequence
  ENSG00000147813_0 (sequence is synthesized)
gtcgggagcaggatggcggcggagcaggaccccgaggcgcgcgcggcggcgcggccgctgctcactgacctctaccaggccaccatggcgttgggctattggcgcgcgggccgggcgcgg

SEQ ID NO: 407977 - DNA, 120 bp, Artificial Sequence
  ENSG00000147813_1 (sequence is synthesized)
gacgccgccgagttcgagctcttcttccgccgctgcccgttcggcggcgccttcgccttggccgccggcttgcgcgactgtgtgcgcttcctgcgcgccttccgcctgcgggacgccgac

SEQ ID NO: 407978 - DNA, 120 bp, Artificial Sequence
  ENSG00000147813_2 (sequence is synthesized)
gtgcagttcctggcctcggtgctgcccccagacacggatcctgcgttcttcgagcaccttcgggccctcgactgctccgaggtgacggtgcgagccctgcccgagggctccctcgccttc

SEQ ID NO: 407979 - DNA, 120 bp, Artificial Sequence
  ENSG00000147813_3 (sequence is synthesized)
cccggagtgccgctcctgcaggtgtccgggccgctcctggtggtgcagctgctggagacaccgctgctctgcctggtcagctacgccagcctggtggccaccaacgcagcgcggcttcgc

SEQ ID NO: 407980 - DNA, 120 bp, Artificial Sequence
  ENSG00000147813_4 (sequence is synthesized)
ttgatcgcagggccagagaagcggctgctagagatgggcctgaggcgggctcagggccccgatgggggcctgacagcctccacctacagctacctgggcggcttcgacagcagcagcaac

SEQ ID NO: 407981 - DNA, 120 bp, Artificial Sequence
  ENSG00000147813_5 (sequence is synthesized)
gtgctagcgggccagctgcgaggtgtgccggtggccgggaccctggcccactccttcgtcacttccttttcaggcagcgaggtgccccctgacccgatgttggcgccagcagctggtgag

SEQ ID NO: 407982 - DNA, 120 bp, Artificial Sequence
  ENSG00000147813_6 (sequence is synthesized)
ggccctggggtggacctggcggccaaagcccaggtgtggctggagcaggtgtgtgcccacctggggctgggggtgcaggagccgcatccaggcgagcgggcagcctttgtggcctatgcc

SEQ ID NO: 407983 - DNA, 120 bp, Artificial Sequence
  ENSG00000147813_7 (sequence is synthesized)
ggcttttccccgggccttccagggcctcctggacacctacagcgtgtggaggagtggtctccccaacttcctagcagtcgccctggccctgggagagctgggctaccgggcagtgggcgt

SEQ ID NO: 407984 - DNA, 120 bp, Artificial Sequence
  ENSG00000147813_8 (sequence is synthesized)
gaggctggacagtggtgacctgctacagcaggctcaggagatccgcaaggtcttccgagctgctgcagcccagttccaggtgccctggctggagtcagtcctcatcgtagtcagcaacaa

SEQ ID NO: 407985 - DNA, 120 bp, Artificial Sequence
  ENSG00000147813_9 (sequence is synthesized)
cattgacgaggaggcgctggcccgactggcccaggagggcagtgaggtgaatgtcattggcattggcaccagtgtggtcacctgcccccaacagccttccctgggtggcgtctataagct

SEQ ID NO: 407986 - DNA, 120 bp, Artificial Sequence
  ENSG00000147813_10 (sequence is synthesized)
ggtggccgtggggggccagccacgaatgaagctgaccgaggaccccgagaagcagacgttgcctgggagcaaggctgctttccggctcctgggctctgacgggtctccactcatggacat

SEQ ID NO: 407987 - DNA, 120 bp, Artificial Sequence
  ENSG00000147813_11 (sequence is synthesized)
gctgcagttagcagaagagccagtgccacaggctgggcaggagctgagggtgtggcctccaggggcccaggagccctgcaccgtgaggccagcccaggtggagccactactgcggctctg

SEQ ID NO: 407988 - DNA, 120 bp, Artificial Sequence
  ENSG00000147813_12 (sequence is synthesized)
cctccagcagggacagctgtgtgagccgctcccatccctggcagagtctagagccttggcccagctgtccctgagccgactcagccctgagcacaggcggctgcggagccctgcacagta

SEQ ID NO: 407989 - DNA, 120 bp, Artificial Sequence
  ENSG00000147813_13 (sequence is synthesized)
ccaggtggtgctgtccgagaggctgcaggccctggtgaacagtctgtgtgcggggcagtccccctgagactcggagcggggctgactggaaacaacacgaatcactcacttttccccaca

SEQ ID NO: 407990 - DNA, 120 bp, Artificial Sequence
  ENSG00000147813_14 (sequence is synthesized)
ggtcagtccctcctctaaaccctgctgtctccaggcgacaggccccaagccagcccttgccctggcgagaggtgtgccacccaggcaggtcaccccagtgctgtcccaggaagctggcac

SEQ ID NO: 407991 - DNA, 120 bp, Artificial Sequence
  ENSG00000147813_15 (sequence is synthesized)
gcaggtggtgctgtccgagaggctgcaggccctggtgaacagtctgtgtgcggggcagtccccctgagactcggagcggggctgactggaaacaacacgaatcactcacttttccccaca

SEQ ID NO: 407992 - DNA, 120 bp, Artificial Sequence
  ENSG00000147813_16 (sequence is synthesized)
tccgcgcgacgagccccccacgcccggcagaaacccccacctatggccggtggaagtccttgtccccccgtggaaccccccatgtcccacgaccggtctgtccccgcgctggtctcagcg

SEQ ID NO: 407993 - DNA, 120 bp, Artificial Sequence
  ENSG00000147813_17 (sequence is synthesized)
cccagacacggatcctgcgttcttcgagcaccttcgggccctcgactgctccgaggtgacggtgcgagccctgcccgagggctccctcgccttccccggagtgagtaggggtaagcgggc

SEQ ID NO: 407994 - DNA, 120 bp, Artificial Sequence
  ENSG00000147813_18 (sequence is synthesized)
aaggacagtgaggtactctgctgaagtttcagcggtgatactgcaggccgtggcagggaagtaagtggtggggctccctaggagctcccaagcagaaggtgagcacaggtgtccttgact

SEQ ID NO: 407995 - DNA, 120 bp, Artificial Sequence
  ENSG00000147813_19 (sequence is synthesized)
gaggcggggcggggagcagggggacaccagggtgaatcaggaagacccgaggggtggcccccaccctttctccacccacgcggcaggttccaggtgccctggctggagtcagtcctcatc

SEQ ID NO: 407996 - DNA, 120 bp, Artificial Sequence
  ENSG00000147852_0 (sequence is synthesized)
accccgctctccggccgccgccggtgcgggtgctccgctaccggctcctctccgttctgtgctctcttctgctctcggctccccaccccctctcccttccctcctctccccttgcctccc

SEQ ID NO: 407997 - DNA, 120 bp, Artificial Sequence
  ENSG00000147852_1 (sequence is synthesized)
ctcctctgcagcgcctgcattattttctgcccgcaggctcggcttgcactgctgctgcagcccggggaggtggctgggtgggtggggaggagactgtgcaagttgtaggggagggggtgc

SEQ ID NO: 407998 - DNA, 120 bp, Artificial Sequence
  ENSG00000147852_2 (sequence is synthesized)
cctcttcttccccgctcccttcccccgccaactccttcccctccttctccccctttcccctccccgcccccaccttcttcctcctttcggaaggactggtaacttgtcgtgcggagcgaa

SEQ ID NO: 407999 - DNA, 120 bp, Artificial Sequence
  ENSG00000147852_3 (sequence is synthesized)
cggcggcggcggcaccatccaggcgggcaccatgggcacgtccgcgctctgggcgctctggctgctgctcgcgctgtgctgggcgccccgggagagcggcgccaccggaaccgggagaaa

SEQ ID NO: 408000 - DNA, 120 bp, Artificial Sequence
  ENSG00000147852_4 (sequence is synthesized)
aaccgggagaaaagccaaatgtgaaccctcccaattccagtgcacaaatggtcgctgtattacgctgttgtggaaatgtgatggggatgaagactgtgttgacggcagtgatgaaaagaa

SEQ ID NO: 408001 - DNA, 120 bp, Artificial Sequence
  ENSG00000147852_5 (sequence is synthesized)
ctgtgtaaagaagacgtgtgctgaatctgacttcgtgtgcaacaatggccagtgtgttcccagccgatggaagtgtgatggagatcctgactgcgaagatggttcagatgaaagcccaga

SEQ ID NO: 408002 - DNA, 120 bp, Artificial Sequence
  ENSG00000147852_6 (sequence is synthesized)
acagtgccatatgagaacatgccgcatacatgaaatcagctgtggcgcccattctactcagtgtatcccagtgtcctggagatgtgatggtgaaaatgattgtgacagtggagaagatga

SEQ ID NO: 408003 - DNA, 120 bp, Artificial Sequence
  ENSG00000147852_7 (sequence is synthesized)
agaaaactgtggcaatataacatgtagtcccgacgagttcacctgctccagtggccgctgcatctccaggaactttgtatgcaatggccaggatgactgcagcgatggcagtgatgagct

SEQ ID NO: 408004 - DNA, 120 bp, Artificial Sequence
  ENSG00000147852_8 (sequence is synthesized)
ggactgtgccccgccaacctgtggcgcccatgagttccagtgcagcacctcctcctgcatccccatcagctgggtatgcgacgatgatgcagactgctccgaccaatctgatgagtccct

SEQ ID NO: 408005 - DNA, 120 bp, Artificial Sequence
  ENSG00000147852_9 (sequence is synthesized)
ggagcagtgtggccgtcagccagtcatacacaccaagtgtccagccagcgaaatccagtgcggctctggcgagtgcatccataagaagtggcgatgtgatggggaccctgactgcaagga

SEQ ID NO: 408006 - DNA, 120 bp, Artificial Sequence
  ENSG00000147852_10 (sequence is synthesized)
tggcagtgatgaggtcaactgtccctctcgaacttgccgacctgaccaatttgaatgtgaggatggcagctgcatccatggcagcaggcagtgtaatggtatccgagactgtgtcgatgg

SEQ ID NO: 408007 - DNA, 120 bp, Artificial Sequence
  ENSG00000147852_11 (sequence is synthesized)
ttccgatgaagtcaactgcaaaaatgtcaatcagtgcttgggccctggaaaattcaagtgcagaagtggagaatgcatagatatcagcaaagtatgtaaccaggagcaggactgcaggga

SEQ ID NO: 408008 - DNA, 120 bp, Artificial Sequence
  ENSG00000147852_12 (sequence is synthesized)
ctggagtgatgagcccctgaaagagtgtcatataaacgaatgcttggtaaataatggtggatgttctcatatctgcaaagacctagttataggctacgagtgtgactgtgcagctgggtt

SEQ ID NO: 408009 - DNA, 120 bp, Artificial Sequence
  ENSG00000147852_13 (sequence is synthesized)
tgaactgatagataggaaaacctgtggagatattgatgaatgccaaaatccaggaatctgcagtcaaatttgtatcaacttaaaaggcggttacaagtgtgaatgtagtcgtggctatca

SEQ ID NO: 408010 - DNA, 120 bp, Artificial Sequence
  ENSG00000147852_14 (sequence is synthesized)
aatggatcttgctactggcgtgtgcaaggcagtaggcaaagagccaagtctgatcttcactaatcgaagagacatcaggaagattggcttagagaggaaagaatatatccaactagttga

SEQ ID NO: 408011 - DNA, 120 bp, Artificial Sequence
  ENSG00000147852_15 (sequence is synthesized)
acagctaagaaacactgtggctctcgatgctgacattgctgcccagaaactattctgggccgatctaagccaaaaggctatcttcagtgcctcaattgatgacaaggttggtagacatgt

SEQ ID NO: 408012 - DNA, 120 bp, Artificial Sequence
  ENSG00000147852_16 (sequence is synthesized)
taaaatgatcgacaatgtctataatcctgcagccattgctgttgattgggtgtacaagaccatctactggactgatgcggcttctaagactatttcagtagctaccctagatggaaccaa

SEQ ID NO: 408013 - DNA, 120 bp, Artificial Sequence
  ENSG00000147852_17 (sequence is synthesized)
gaggaagttcctgtttaactctgacttgcgagagcctgcctccatagctgtggacccactgtctggctttgtttactggtcagactggggtgaaccagctaaaatagaaaaagcaggaat

SEQ ID NO: 408014 - DNA, 120 bp, Artificial Sequence
  ENSG00000147852_18 (sequence is synthesized)
gaatggattcgatagacgtccactggtgacagcggatatccagtggcctaacggaattacacttgaccttataaaaagtcgcctctattggcttgattctaagttgcacatgttatccag

SEQ ID NO: 408015 - DNA, 120 bp, Artificial Sequence
  ENSG00000147852_19 (sequence is synthesized)
cgtggacttgaatggccaagatcgtaggatagtactaaagtctctggagttcctagctcatcctcttgcactaacaatatttgaggatcgtgtctactggatagatggggaaaatgaagc

SEQ ID NO: 408016 - DNA, 120 bp, Artificial Sequence
  ENSG00000147852_20 (sequence is synthesized)
agtctatggtgccaataaattcactggatcagagctagccactctagtcaacaacctgaatgatgcccaagacatcattgtctatcatgaacttgtacagccatcaggtaaaaattggtg

SEQ ID NO: 408017 - DNA, 120 bp, Artificial Sequence
  ENSG00000147852_21 (sequence is synthesized)
tgaagaagacatggagaatggaggatgtgaatacctatgcctgccagcaccacagattaatgatcactctccaaaatatacctgttcctgtcccagtgggtacaatgtagaggaaaatgg

SEQ ID NO: 408018 - DNA, 120 bp, Artificial Sequence
  ENSG00000147852_22 (sequence is synthesized)
ccgagactgtcaaagtactgcaactactgtgacttacagtgagacaaaagatacgaacacaacagaaatttcagcaactagtggactagttcctggagggatcaatgtgaccacagcagt

SEQ ID NO: 408019 - DNA, 120 bp, Artificial Sequence
  ENSG00000147852_23 (sequence is synthesized)
atcagaggtcagtgttcccccaaaagggacttctgccgcatgggccattcttcctctcttgctcttagtgatggcagcagtaggtggctacttgatgtggcggaattggcaacacaagaa

SEQ ID NO: 408020 - DNA, 120 bp, Artificial Sequence
  ENSG00000147852_24 (sequence is synthesized)
catgaaaagcatgaactttgacaatcctgtgtacttgaaaaccactgaagaggacctctccatagacattggtagacacagtgcttctgttggacacacgtacccagcaatatcagttgt

SEQ ID NO: 408021 - DNA, 120 bp, Artificial Sequence
  ENSG00000147852_25 (sequence is synthesized)
aagcacagatgatgatctagcttgacttctgtgacaaatgttgacctttgaggtctaaacaaataatacccccgtcggaatggtaaccgagccagcagctgaagtctctttttcttcctc

SEQ ID NO: 408022 - DNA, 120 bp, Artificial Sequence
  ENSG00000147852_26 (sequence is synthesized)
tcggctggaagaacatcaagatacctttgcgtggatcaagcttgtgtacttgaccgtttttatattacttttgtaaatattcttgtccacattctacttcagctttggatgtggttaccg

SEQ ID NO: 408023 - DNA, 120 bp, Artificial Sequence
  ENSG00000147852_27 (sequence is synthesized)
agtatctgtaacccttgaatttctagacagtattgccacctctggccaaatatgcactttccctagaaagccatattccagcagtgaaacttgtgctatagtgtataccacctgtacata

SEQ ID NO: 408024 - DNA, 120 bp, Artificial Sequence
  ENSG00000147852_28 (sequence is synthesized)
cattgtataggccatctgtaaatatcccagagaacaatcactattcttaagcactttgaaaatatttctatgtaaattattgtaaactttttcaatggttgggacaatggcaataggaca

SEQ ID NO: 408025 - DNA, 120 bp, Artificial Sequence
  ENSG00000147852_29 (sequence is synthesized)
aaacgggttactaagatgaaattgccaaaaaaatttataaactaattttgtacgtatgaatgatatctttgacctcaatggaggtttgcaaagactgagtgttcaaactactgtacattt

SEQ ID NO: 408026 - DNA, 120 bp, Artificial Sequence
  ENSG00000147852_30 (sequence is synthesized)
tttttcaagtgctaaaaaattaaaccaagcagcttaaccatggtttgtgcctgttcctctaggatgaactcctatcctgagtagtaccaagtgttctaactaaatgtgtgagctgtagtt
